United States Patent Application Publication US 2005/0255487 A1 - sequence listing, part 19

SEQ ID NO: 503188 - RNA, 19 nt, Homo sapiens
  misc_RNA (1)...(19): siRNA sense strand
uggacaagcuguugaaagg

SEQ ID NO: 503189 - RNA, 19 nt, Homo sapiens
  misc_RNA (1)...(19): siRNA sense strand
gagaagggcaugggcgauu

SEQ ID NO: 503190 - RNA, 19 nt, Homo sapiens
  misc_RNA (1)...(19): siRNA sense strand
ggaauucagcaauauccuu

SEQ ID NO: 503191 - RNA, 19 nt, Homo sapiens
  misc_RNA (1)...(19): siRNA sense strand
cagaagaagcuugcagaaa

SEQ ID NO: 503192 - RNA, 19 nt, Homo sapiens
  misc_RNA (1)...(19): siRNA sense strand
gacagcagcaugcaugaug

SEQ ID NO: 503193 - RNA, 19 nt, Homo sapiens
  misc_RNA (1)...(19): siRNA sense strand
uaccugaucuaaccgaugu

SEQ ID NO: 503194 - RNA, 19 nt, Homo sapiens
  misc_RNA (1)...(19): siRNA sense strand
ugaaggagacgguggacaa

SEQ ID NO: 503195 - RNA, 19 nt, Homo sapiens
  misc_RNA (1)...(19): siRNA sense strand
cagccaaggcaaagaauga

SEQ ID NO: 503196 - RNA, 19 nt, Homo sapiens
  misc_RNA (1)...(19): siRNA sense strand
ccuucuggaucaauuauga

SEQ ID NO: 503197 - RNA, 19 nt, Homo sapiens
  misc_RNA (1)...(19): siRNA sense strand
uuuacuggcuguacuaugu

SEQ ID NO: 503198 - RNA, 19 nt, Homo sapiens
  misc_RNA (1)...(19): siRNA sense strand
uaaaauaccugaucuaacc

SEQ ID NO: 503199 - RNA, 19 nt, Homo sapiens
  misc_RNA (1)...(19): siRNA sense strand
ucagcaauauccuuugaca

SEQ ID NO: 503200 - RNA, 19 nt, Homo sapiens
  misc_RNA (1)...(19): siRNA sense strand
gaacgaucccgggaacaug

SEQ ID NO: 503201 - RNA, 19 nt, Homo sapiens
  misc_RNA (1)...(19): siRNA sense strand
guucaaagagcgaaagcaa

SEQ ID NO: 503202 - RNA, 19 nt, Homo sapiens
  misc_RNA (1)...(19): siRNA sense strand
gcaaagaaugaccguucaa

SEQ ID NO: 503203 - RNA, 19 nt, Homo sapiens
  misc_RNA (1)...(19): siRNA sense strand
gaagaagcuugcagaaaag

SEQ ID NO: 503204 - RNA, 19 nt, Homo sapiens
  misc_RNA (1)...(19): siRNA sense strand
ccacggaugacauugaguu

SEQ ID NO: 503205 - RNA, 19 nt, Homo sapiens
  misc_RNA (1)...(19): siRNA sense strand
caaagccauugacauguac

SEQ ID NO: 503206 - RNA, 19 nt, Homo sapiens
  misc_RNA (1)...(19): siRNA sense strand
gugcauggagugacaguga

SEQ ID NO: 503207 - RNA, 19 nt, Homo sapiens
  misc_RNA (1)...(19): siRNA sense strand
caauauccuuugacaacuc

SEQ ID NO: 503208 - RNA, 19 nt, Homo sapiens
  misc_RNA (1)...(19): siRNA sense strand
agaggaacauuggauacuu

SEQ ID NO: 503209 - RNA, 19 nt, Homo sapiens
  misc_RNA (1)...(19): siRNA sense strand
gaucguguuuccauucacu

SEQ ID NO: 503210 - RNA, 19 nt, Homo sapiens
  misc_RNA (1)...(19): siRNA sense strand
ccaggaucguguuuccauu

SEQ ID NO: 503211 - RNA, 19 nt, Homo sapiens
  misc_RNA (1)...(19): siRNA sense strand
ugaugcaucugcugcuaga

SEQ ID NO: 503212 - RNA, 19 nt, Homo sapiens
  misc_RNA (1)...(19): siRNA sense strand
uaugcccucuauacugaua

SEQ ID NO: 503213 - RNA, 19 nt, Homo sapiens
  misc_RNA (1)...(19): siRNA sense strand
gcucauggaaauauucugu

SEQ ID NO: 503214 - RNA, 19 nt, Homo sapiens
  misc_RNA (1)...(19): siRNA sense strand
ggaguaugccuuugucaac

SEQ ID NO: 503215 - RNA, 19 nt, Homo sapiens
  misc_RNA (1)...(19): siRNA sense strand
caaccucacgcuugacaau

SEQ ID NO: 503216 - RNA, 19 nt, Homo sapiens
  misc_RNA (1)...(19): siRNA sense strand
gaucuaaccgaugugaaug

SEQ ID NO: 503217 - RNA, 19 nt, Homo sapiens
  misc_RNA (1)...(19): siRNA sense strand
ggaauccaguacaggaaac

SEQ ID NO: 503218 - RNA, 19 nt, Homo sapiens
  misc_RNA (1)...(19): siRNA sense strand
cgcuggaaguucacaauga

SEQ ID NO: 503219 - RNA, 19 nt, Homo sapiens
  misc_RNA (1)...(19): siRNA sense strand
ucaacaauauuggagagau

SEQ ID NO: 503220 - RNA, 19 nt, Homo sapiens
  misc_RNA (1)...(19): siRNA sense strand
gcauggagugacagugaaa

SEQ ID NO: 503221 - RNA, 19 nt, Homo sapiens
  misc_RNA (1)...(19): siRNA sense strand
ccgaagucaacauggauua

SEQ ID NO: 503222 - RNA, 19 nt, Homo sapiens
  misc_RNA (1)...(19): siRNA sense strand
ccucuauacugauaacgau

SEQ ID NO: 503223 - RNA, 19 nt, Homo sapiens
  misc_RNA (1)...(19): siRNA sense strand
ccgggaacauguccuuugu

SEQ ID NO: 503224 - RNA, 19 nt, Homo sapiens
  misc_RNA (1)...(19): siRNA sense strand
cuacaccacggaugacauu

SEQ ID NO: 503225 - RNA, 19 nt, Homo sapiens
  misc_RNA (1)...(19): siRNA sense strand
uaugaugcaucugcugcua

SEQ ID NO: 503226 - RNA, 19 nt, Homo sapiens
  misc_RNA (1)...(19): siRNA sense strand
gaagccucccgcacaagaa

SEQ ID NO: 503227 - RNA, 19 nt, Homo sapiens
  misc_RNA (1)...(19): siRNA sense strand
aguaugccuuugucaacua

SEQ ID NO: 503228 - RNA, 19 nt, Homo sapiens
  misc_RNA (1)...(19): siRNA sense strand
gaguaugccuuugucaacu

SEQ ID NO: 503229 - RNA, 19 nt, Homo sapiens
  misc_RNA (1)...(19): siRNA sense strand
cccgacacauauuucuuaa

SEQ ID NO: 503230 - RNA, 19 nt, Homo sapiens
  misc_RNA (1)...(19): siRNA sense strand
uacuggcuguacuauguua

SEQ ID NO: 503231 - RNA, 19 nt, Homo sapiens
  misc_RNA (1)...(19): siRNA sense strand
acaacugugcugacaauga

SEQ ID NO: 503232 - RNA, 19 nt, Homo sapiens
  misc_RNA (1)...(19): siRNA sense strand
aacauuggauacuucauuc

SEQ ID NO: 503233 - RNA, 19 nt, Homo sapiens
  misc_RNA (1)...(19): siRNA sense strand
ucuggaaauugaaagcuau

SEQ ID NO: 503234 - RNA, 19 nt, Homo sapiens
  misc_RNA (1)...(19): siRNA sense strand
agaaugaccguucaaagag

SEQ ID NO: 503235 - RNA, 19 nt, Homo sapiens
  misc_RNA (1)...(19): siRNA sense strand
agacagccaaggcaaagaa

SEQ ID NO: 503236 - RNA, 19 nt, Homo sapiens
  misc_RNA (1)...(19): siRNA sense strand
cgggagaccuugcccaaaa

SEQ ID NO: 503237 - RNA, 19 nt, Homo sapiens
  misc_RNA (1)...(19): siRNA sense strand
ggauacuucauucuucaga

SEQ ID NO: 503238 - RNA, 19 nt, Homo sapiens
  misc_RNA (1)...(19): siRNA sense strand
acuucauucuucagacuua

SEQ ID NO: 503239 - RNA, 19 nt, Homo sapiens
  misc_RNA (1)...(19): siRNA sense strand
acugcacucuggaaauuga

SEQ ID NO: 503240 - RNA, 19 nt, Homo sapiens
  misc_RNA (1)...(19): siRNA sense strand
auucagcaauauccuuuga

SEQ ID NO: 503241 - RNA, 19 nt, Homo sapiens
  misc_RNA (1)...(19): siRNA sense strand
caacuacauuuucuuugga

SEQ ID NO: 503242 - RNA, 19 nt, Homo sapiens
  misc_RNA (1)...(19): siRNA sense strand
uugaaaggcuacgacauuc

SEQ ID NO: 503243 - RNA, 19 nt, Homo sapiens
  misc_RNA (1)...(19): siRNA sense strand
gacaugguuuccgaaguca

SEQ ID NO: 503244 - RNA, 19 nt, Homo sapiens
  misc_RNA (1)...(19): siRNA sense strand
caacauggauuauaccuua

SEQ ID NO: 503245 - RNA, 19 nt, Homo sapiens
  misc_RNA (1)...(19): siRNA sense strand
gaacugcacucuggaaauu

SEQ ID NO: 503246 - RNA, 19 nt, Homo sapiens
  misc_RNA (1)...(19): siRNA sense strand
ucacugagcuuucgguuga

SEQ ID NO: 503247 - RNA, 19 nt, Homo sapiens
  misc_RNA (1)...(19): siRNA sense strand
gaaauauucuguugacauc

SEQ ID NO: 503248 - RNA, 19 nt, Homo sapiens
  misc_RNA (1)...(19): siRNA sense strand
gauuauaccuuaaccaugu

SEQ ID NO: 503249 - RNA, 19 nt, Homo sapiens
  misc_RNA (1)...(19): siRNA sense strand
caacaauauuggagagaua

SEQ ID NO: 503250 - RNA, 19 nt, Homo sapiens
  misc_RNA (1)...(19): siRNA sense strand
ggauugagcucccgcaguu

SEQ ID NO: 503251 - RNA, 19 nt, Homo sapiens
  misc_RNA (1)...(19): siRNA sense strand
gaacauguccuuugugaag

SEQ ID NO: 503252 - RNA, 19 nt, Homo sapiens
  misc_RNA (1)...(19): siRNA sense strand
gaacauuggauacuucauu

SEQ ID NO: 503253 - RNA, 19 nt, Homo sapiens
  misc_RNA (1)...(19): siRNA sense strand
gggaacauguccuuuguga

SEQ ID NO: 503254 - RNA, 19 nt, Homo sapiens
  misc_RNA (1)...(19): siRNA sense strand
ugacaucgcuggaaguuca

SEQ ID NO: 503255 - RNA, 19 nt, Homo sapiens
  misc_RNA (1)...(19): siRNA sense strand
gaagucaacauggauuaua

SEQ ID NO: 503256 - RNA, 19 nt, Homo sapiens
  misc_RNA (1)...(19): siRNA sense strand
agacuuauaugcccucuau

SEQ ID NO: 503257 - RNA, 19 nt, Homo sapiens
  misc_RNA (1)...(19): siRNA sense strand
uaccaggaauucagcaaua

SEQ ID NO: 503258 - RNA, 19 nt, Homo sapiens
  misc_RNA (1)...(19): siRNA sense strand
gaauucagcaauauccuuu

SEQ ID NO: 503259 - RNA, 19 nt, Homo sapiens
  misc_RNA (1)...(19): siRNA sense strand
gcuguacuauguuaacuga

SEQ ID NO: 503260 - RNA, 19 nt, Homo sapiens
  misc_RNA (1)...(19): siRNA sense strand
agaagaagcuugcagaaaa

SEQ ID NO: 503261 - RNA, 19 nt, Homo sapiens
  misc_RNA (1)...(19): siRNA sense strand
ugauggaccucaggagaua

SEQ ID NO: 503262 - RNA, 19 nt, Homo sapiens
  misc_RNA (1)...(19): siRNA sense strand
gaggaacauuggauacuuc

SEQ ID NO: 503263 - RNA, 19 nt, Homo sapiens
  misc_RNA (1)...(19): siRNA sense strand
cgacaugguuuccgaaguc

SEQ ID NO: 503264 - RNA, 19 nt, Homo sapiens
  misc_RNA (1)...(19): siRNA sense strand
gcccgacacauauuucuua

SEQ ID NO: 503265 - RNA, 19 nt, Homo sapiens
  misc_RNA (1)...(19): siRNA sense strand
ggaaauauucuguugacau

SEQ ID NO: 503266 - RNA, 19 nt, Homo sapiens
  misc_RNA (1)...(19): siRNA sense strand
guugaaaggcuacgacauu

SEQ ID NO: 503267 - RNA, 19 nt, Homo sapiens
  misc_RNA (1)...(19): siRNA sense strand
ccauugacauguaccuuau

SEQ ID NO: 503268 - RNA, 19 nt, Homo sapiens
  misc_RNA (1)...(19): siRNA sense strand
gguggaugcucauggaaau

SEQ ID NO: 503269 - RNA, 19 nt, Homo sapiens
  misc_RNA (1)...(19): siRNA sense strand
caacugugcugacaaugac

SEQ ID NO: 503270 - RNA, 19 nt, Homo sapiens
  misc_RNA (1)...(19): siRNA sense strand
cggaugacauugaguuuua

SEQ ID NO: 503271 - RNA, 19 nt, Homo sapiens
  misc_RNA (1)...(19): siRNA sense strand
cuucacagcucaaaauuaa

SEQ ID NO: 503272 - RNA, 19 nt, Homo sapiens
  misc_RNA (1)...(19): siRNA sense strand
ucauggaaauauucuguug

SEQ ID NO: 503273 - RNA, 19 nt, Homo sapiens
  misc_RNA (1)...(19): siRNA sense strand
gccauugacauguaccuua

SEQ ID NO: 503274 - RNA, 19 nt, Homo sapiens
  misc_RNA (1)...(19): siRNA sense strand
caaaauccccuaugucaaa

SEQ ID NO: 503275 - RNA, 19 nt, Homo sapiens
  misc_RNA (1)...(19): siRNA sense strand
ugaagaggaacauuggaua

SEQ ID NO: 503276 - RNA, 19 nt, Homo sapiens
  misc_RNA (1)...(19): siRNA sense strand
aagaaugaccguucaaaga

SEQ ID NO: 503277 - RNA, 19 nt, Homo sapiens
  misc_RNA (1)...(19): siRNA sense strand
gcagaagaagcuugcagaa

SEQ ID NO: 503278 - RNA, 19 nt, Homo sapiens
  misc_RNA (1)...(19): siRNA sense strand
gcacaagaagacccaucua

SEQ ID NO: 503279 - RNA, 19 nt, Homo sapiens
  misc_RNA (1)...(19): siRNA sense strand
caaagaaugaccguucaaa

SEQ ID NO: 503280 - RNA, 19 nt, Homo sapiens
  misc_RNA (1)...(19): siRNA sense strand
cgucuggucucgaggaaug

SEQ ID NO: 503281 - RNA, 19 nt, Homo sapiens
  misc_RNA (1)...(19): siRNA sense strand
gcaauauccuuugacaacu

SEQ ID NO: 503282 - RNA, 19 nt, Homo sapiens
  misc_RNA (1)...(19): siRNA sense strand
ggcaaagaaugaccguuca

SEQ ID NO: 503283 - RNA, 19 nt, Homo sapiens
  misc_RNA (1)...(19): siRNA sense strand
gaagaggaacauuggauac

SEQ ID NO: 503284 - RNA, 19 nt, Homo sapiens
  misc_RNA (1)...(19): siRNA sense strand
cuacgacauucgccuaaga

SEQ ID NO: 503285 - RNA, 19 nt, Homo sapiens
  misc_RNA (1)...(19): siRNA sense strand
ggaugcucauggaaauauu

SEQ ID NO: 503286 - RNA, 19 nt, Homo sapiens
  misc_RNA (1)...(19): siRNA sense strand
ugaaugccauagacagaug

SEQ ID NO: 503287 - RNA, 19 nt, Homo sapiens
  misc_RNA (1)...(19): siRNA sense strand
acagaagccucccgcacaa

SEQ ID NO: 503288 - RNA, 19 nt, Homo sapiens
  misc_RNA (1)...(19): siRNA sense strand
uggacaagcuguugaaagg

SEQ ID NO: 503289 - RNA, 19 nt, Homo sapiens
  misc_RNA (1)...(19): siRNA sense strand
gagaagggcaugggcgauu

SEQ ID NO: 503290 - RNA, 19 nt, Homo sapiens
  misc_RNA (1)...(19): siRNA sense strand
ggaauucagcaauauccuu

SEQ ID NO: 503291 - RNA, 19 nt, Homo sapiens
  misc_RNA (1)...(19): siRNA sense strand
cagaagaagcuugcagaaa

SEQ ID NO: 503292 - RNA, 19 nt, Homo sapiens
  misc_RNA (1)...(19): siRNA sense strand
gacagcagcaugcaugaug

SEQ ID NO: 503293 - RNA, 19 nt, Homo sapiens
  misc_RNA (1)...(19): siRNA sense strand
uaccugaucuaaccgaugu

SEQ ID NO: 503294 - RNA, 19 nt, Homo sapiens
  misc_RNA (1)...(19): siRNA sense strand
ugaaggagacgguggacaa

SEQ ID NO: 503295 - RNA, 19 nt, Homo sapiens
  misc_RNA (1)...(19): siRNA sense strand
cagccaaggcaaagaauga

SEQ ID NO: 503296 - RNA, 19 nt, Homo sapiens
  misc_RNA (1)...(19): siRNA sense strand
ccuucuggaucaauuauga

SEQ ID NO: 503297 - RNA, 19 nt, Homo sapiens
  misc_RNA (1)...(19): siRNA sense strand
uuuacuggcuguacuaugu

SEQ ID NO: 503298 - RNA, 19 nt, Homo sapiens
  misc_RNA (1)...(19): siRNA sense strand
uaaaauaccugaucuaacc

SEQ ID NO: 503299 - RNA, 19 nt, Homo sapiens
  misc_RNA (1)...(19): siRNA sense strand
ucagcaauauccuuugaca

SEQ ID NO: 503300 - RNA, 19 nt, Homo sapiens
  misc_RNA (1)...(19): siRNA sense strand
gaacgaucccgggaacaug

SEQ ID NO: 503301 - RNA, 19 nt, Homo sapiens
  misc_RNA (1)...(19): siRNA sense strand
guucaaagagcgaaagcaa

SEQ ID NO: 503302 - RNA, 19 nt, Homo sapiens
  misc_RNA (1)...(19): siRNA sense strand
gcaaagaaugaccguucaa

SEQ ID NO: 503303 - RNA, 19 nt, Homo sapiens
  misc_RNA (1)...(19): siRNA sense strand
gaagaagcuugcagaaaag

SEQ ID NO: 503304 - RNA, 19 nt, Homo sapiens
  misc_RNA (1)...(19): siRNA sense strand
ccacggaugacauugaguu

SEQ ID NO: 503305 - RNA, 19 nt, Homo sapiens
  misc_RNA (1)...(19): siRNA sense strand
caaagccauugacauguac

SEQ ID NO: 503306 - RNA, 19 nt, Homo sapiens
  misc_RNA (1)...(19): siRNA sense strand
gugcauggagugacaguga

SEQ ID NO: 503307 - RNA, 19 nt, Homo sapiens
  misc_RNA (1)...(19): siRNA sense strand
caauauccuuugacaacuc

SEQ ID NO: 503308 - RNA, 19 nt, Homo sapiens
  misc_RNA (1)...(19): siRNA sense strand
agaggaacauuggauacuu

SEQ ID NO: 503309 - RNA, 19 nt, Homo sapiens
  misc_RNA (1)...(19): siRNA sense strand
gaucguguuuccauucacu

SEQ ID NO: 503310 - RNA, 19 nt, Homo sapiens
  misc_RNA (1)...(19): siRNA sense strand
ccaggaucguguuuccauu

SEQ ID NO: 503311 - RNA, 19 nt, Homo sapiens
  misc_RNA (1)...(19): siRNA sense strand
ugaugcaucugcugcuaga

SEQ ID NO: 503312 - RNA, 19 nt, Homo sapiens
  misc_RNA (1)...(19): siRNA sense strand
uaugcccucuauacugaua

SEQ ID NO: 503313 - RNA, 19 nt, Homo sapiens
  misc_RNA (1)...(19): siRNA sense strand
gcucauggaaauauucugu

SEQ ID NO: 503314 - RNA, 19 nt, Homo sapiens
  misc_RNA (1)...(19): siRNA sense strand
ggaguaugccuuugucaac

SEQ ID NO: 503315 - RNA, 19 nt, Homo sapiens
  misc_RNA (1)...(19): siRNA sense strand
caaccucacgcuugacaau

SEQ ID NO: 503316 - RNA, 19 nt, Homo sapiens
  misc_RNA (1)...(19): siRNA sense strand
gaucuaaccgaugugaaug

SEQ ID NO: 503317 - RNA, 19 nt, Homo sapiens
  misc_RNA (1)...(19): siRNA sense strand
ggaauccaguacaggaaac

SEQ ID NO: 503318 - RNA, 19 nt, Homo sapiens
  misc_RNA (1)...(19): siRNA sense strand
cgcuggaaguucacaauga

SEQ ID NO: 503319 - RNA, 19 nt, Homo sapiens
  misc_RNA (1)...(19): siRNA sense strand
ucaacaauauuggagagau

SEQ ID NO: 503320 - RNA, 19 nt, Homo sapiens
  misc_RNA (1)...(19): siRNA sense strand
gcauggagugacagugaaa

SEQ ID NO: 503321 - RNA, 19 nt, Homo sapiens
  misc_RNA (1)...(19): siRNA sense strand
ccgaagucaacauggauua

SEQ ID NO: 503322 - RNA, 19 nt, Homo sapiens
  misc_RNA (1)...(19): siRNA sense strand
ccucuauacugauaacgau

SEQ ID NO: 503323 - RNA, 19 nt, Homo sapiens
  misc_RNA (1)...(19): siRNA sense strand
ccgggaacauguccuuugu

SEQ ID NO: 503324 - RNA, 19 nt, Homo sapiens
  misc_RNA (1)...(19): siRNA sense strand
cuacaccacggaugacauu

SEQ ID NO: 503325 - RNA, 19 nt, Homo sapiens
  misc_RNA (1)...(19): siRNA sense strand
uaugaugcaucugcugcua

SEQ ID NO: 503326 - RNA, 19 nt, Homo sapiens
  misc_RNA (1)...(19): siRNA sense strand
gaagccucccgcacaagaa

SEQ ID NO: 503327 - RNA, 19 nt, Homo sapiens
  misc_RNA (1)...(19): siRNA sense strand
aguaugccuuugucaacua

SEQ ID NO: 503328 - RNA, 19 nt, Homo sapiens
  misc_RNA (1)...(19): siRNA sense strand
gaguaugccuuugucaacu

SEQ ID NO: 503329 - RNA, 19 nt, Homo sapiens
  misc_RNA (1)...(19): siRNA sense strand
cccgacacauauuucuuaa

SEQ ID NO: 503330 - RNA, 19 nt, Homo sapiens
  misc_RNA (1)...(19): siRNA sense strand
uacuggcuguacuauguua

SEQ ID NO: 503331 - RNA, 19 nt, Homo sapiens
  misc_RNA (1)...(19): siRNA sense strand
acaacugugcugacaauga

SEQ ID NO: 503332 - RNA, 19 nt, Homo sapiens
  misc_RNA (1)...(19): siRNA sense strand
aacauuggauacuucauuc

SEQ ID NO: 503333 - RNA, 19 nt, Homo sapiens
  misc_RNA (1)...(19): siRNA sense strand
ucuggaaauugaaagcuau

SEQ ID NO: 503334 - RNA, 19 nt, Homo sapiens
  misc_RNA (1)...(19): siRNA sense strand
agaaugaccguucaaagag

SEQ ID NO: 503335 - RNA, 19 nt, Homo sapiens
  misc_RNA (1)...(19): siRNA sense strand
agacagccaaggcaaagaa

SEQ ID NO: 503336 - RNA, 19 nt, Homo sapiens
  misc_RNA (1)...(19): siRNA sense strand
cgggagaccuugcccaaaa

SEQ ID NO: 503337 - RNA, 19 nt, Homo sapiens
  misc_RNA (1)...(19): siRNA sense strand
ggauacuucauucuucaga

SEQ ID NO: 503338 - RNA, 19 nt, Homo sapiens
  misc_RNA (1)...(19): siRNA sense strand
acuucauucuucagacuua

SEQ ID NO: 503339 - RNA, 19 nt, Homo sapiens
  misc_RNA (1)...(19): siRNA sense strand
acugcacucuggaaauuga

SEQ ID NO: 503340 - RNA, 19 nt, Homo sapiens
  misc_RNA (1)...(19): siRNA sense strand
auucagcaauauccuuuga

SEQ ID NO: 503341 - RNA, 19 nt, Homo sapiens
  misc_RNA (1)...(19): siRNA sense strand
caacuacauuuucuuugga

SEQ ID NO: 503342 - RNA, 19 nt, Homo sapiens
  misc_RNA (1)...(19): siRNA sense strand
uugaaaggcuacgacauuc

SEQ ID NO: 503343 - RNA, 19 nt, Homo sapiens
  misc_RNA (1)...(19): siRNA sense strand
gacaugguuuccgaaguca

SEQ ID NO: 503344 - RNA, 19 nt, Homo sapiens
  misc_RNA (1)...(19): siRNA sense strand
ggaaagaggugaacuggua

SEQ ID NO: 503345 - RNA, 19 nt, Homo sapiens
  misc_RNA (1)...(19): siRNA sense strand
ggucagagcuggaggauuu

SEQ ID NO: 503346 - RNA, 19 nt, Homo sapiens
  misc_RNA (1)...(19): siRNA sense strand
gaaagaaggagacccguua

SEQ ID NO: 503347 - RNA, 19 nt, Homo sapiens
  misc_RNA (1)...(19): siRNA sense strand
gugaagagcugaaggagaa

SEQ ID NO: 503348 - RNA, 19 nt, Homo sapiens
  misc_RNA (1)...(19): siRNA sense strand
ggaacugcaugcugaauga

SEQ ID NO: 503349 - RNA, 19 nt, Homo sapiens
  misc_RNA (1)...(19): siRNA sense strand
ccaagaagaucuacaaugg

SEQ ID NO: 503350 - RNA, 19 nt, Homo sapiens
  misc_RNA (1)...(19): siRNA sense strand
ugaacaggaugacuggaua

SEQ ID NO: 503351 - RNA, 19 nt, Homo sapiens
  misc_RNA (1)...(19): siRNA sense strand
gcucaucggugucuguuuc

SEQ ID NO: 503352 - RNA, 19 nt, Homo sapiens
  misc_RNA (1)...(19): siRNA sense strand
uuacagagcugcgggaaga

SEQ ID NO: 503353 - RNA, 19 nt, Homo sapiens
  misc_RNA (1)...(19): siRNA sense strand
caucuuggcucucuuccuu

SEQ ID NO: 503354 - RNA, 19 nt, Homo sapiens
  misc_RNA (1)...(19): siRNA sense strand
ggagacccguuauggagaa

SEQ ID NO: 503355 - RNA, 19 nt, Homo sapiens
  misc_RNA (1)...(19): siRNA sense strand
gacgaaauccucuauguca

SEQ ID NO: 503356 - RNA, 19 nt, Homo sapiens
  misc_RNA (1)...(19): siRNA sense strand
ggaugaggguggagguuau

SEQ ID NO: 503357 - RNA, 19 nt, Homo sapiens
  misc_RNA (1)...(19): siRNA sense strand
gaaggagacccguuaugga

SEQ ID NO: 503358 - RNA, 19 nt, Homo sapiens
  misc_RNA (1)...(19): siRNA sense strand
gaaauccucuaugucaaca

SEQ ID NO: 503359 - RNA, 19 nt, Homo sapiens
  misc_RNA (1)...(19): siRNA sense strand
acagcgagauuuaugacua

SEQ ID NO: 503360 - RNA, 19 nt, Homo sapiens
  misc_RNA (1)...(19): siRNA sense strand
gagaacagcgagauuuaug

SEQ ID NO: 503361 - RNA, 19 nt, Homo sapiens
  misc_RNA (1)...(19): siRNA sense strand
ggagaaguguuugaaccaa

SEQ ID NO: 503362 - RNA, 19 nt, Homo sapiens
  misc_RNA (1)...(19): siRNA sense strand
ggugucagcuccagguuca

SEQ ID NO: 503363 - RNA, 19 nt, Homo sapiens
  misc_RNA (1)...(19): siRNA sense strand
gguaccggcuggcguauca

SEQ ID NO: 503364 - RNA, 19 nt, Homo sapiens
  misc_RNA (1)...(19): siRNA sense strand
ccacugaagcuaccuugaa

SEQ ID NO: 503365 - RNA, 19 nt, Homo sapiens
  misc_RNA (1)...(19): siRNA sense strand
caacccagccagacccuaa

SEQ ID NO: 503366 - RNA, 19 nt, Homo sapiens
  misc_RNA (1)...(19): siRNA sense strand
guggucaucuuaccuuuca

SEQ ID NO: 503367 - RNA, 19 nt, Homo sapiens
  misc_RNA (1)...(19): siRNA sense strand
cagcgagauuuaugacuau

SEQ ID NO: 503368 - RNA, 19 nt, Homo sapiens
  misc_RNA (1)...(19): siRNA sense strand
gcacgcaggcugaagaaag

SEQ ID NO: 503369 - RNA, 19 nt, Homo sapiens
  misc_RNA (1)...(19): siRNA sense strand
ggguggagguuauccugaa

SEQ ID NO: 503370 - RNA, 19 nt, Homo sapiens
  misc_RNA (1)...(19): siRNA sense strand
gcacagccaccaucacagu

SEQ ID NO: 503371 - RNA, 19 nt, Homo sapiens
  misc_RNA (1)...(19): siRNA sense strand
ggcauggaguaucugagua

SEQ ID NO: 503372 - RNA, 19 nt, Homo sapiens
  misc_RNA (1)...(19): siRNA sense strand
ugaagacgaugaagauugc

SEQ ID NO: 503373 - RNA, 19 nt, Homo sapiens
  misc_RNA (1)...(19): siRNA sense strand
ggagaacagcgagauuuau

SEQ ID NO: 503374 - RNA, 19 nt, Homo sapiens
  misc_RNA (1)...(19): siRNA sense strand
gugaagacgaugaagauug

SEQ ID NO: 503375 - RNA, 19 nt, Homo sapiens
  misc_RNA (1)...(19): siRNA sense strand
gugaagcggucugcaugaa

SEQ ID NO: 503376 - RNA, 19 nt, Homo sapiens
  misc_RNA (1)...(19): siRNA sense strand
guuuggagcugugauggaa

SEQ ID NO: 503377 - RNA, 19 nt, Homo sapiens
  misc_RNA (1)...(19): siRNA sense strand
ggauugccauugagagucu

SEQ ID NO: 503378 - RNA, 19 nt, Homo sapiens
  misc_RNA (1)...(19): siRNA sense strand
uggagaacagcgagauuua

SEQ ID NO: 503379 - RNA, 19 nt, Homo sapiens
  misc_RNA (1)...(19): siRNA sense strand
ccaguggcauggaguaucu

SEQ ID NO: 503380 - RNA, 19 nt, Homo sapiens
  misc_RNA (1)...(19): siRNA sense strand
gugaacugguagucaggua

SEQ ID NO: 503381 - RNA, 19 nt, Homo sapiens
  misc_RNA (1)...(19): siRNA sense strand
gggaagauuuggagaacac

SEQ ID NO: 503382 - RNA, 19 nt, Homo sapiens
  misc_RNA (1)...(19): siRNA sense strand
gaacagcgagauuuaugac

SEQ ID NO: 503383 - RNA, 19 nt, Homo sapiens
  misc_RNA (1)...(19): siRNA sense strand
gaacaggaugacuggauag

SEQ ID NO: 503384 - RNA, 19 nt, Homo sapiens
  misc_RNA (1)...(19): siRNA sense strand
gagaagcugcgggauguga

SEQ ID NO: 503385 - RNA, 19 nt, Homo sapiens
  misc_RNA (1)...(19): siRNA sense strand
ggacgacuccauccucaag

SEQ ID NO: 503386 - RNA, 19 nt, Homo sapiens
  misc_RNA (1)...(19): siRNA sense strand
ucaccucccugcagcuuuc

SEQ ID NO: 503387 - RNA, 19 nt, Homo sapiens
  misc_RNA (1)...(19): siRNA sense strand
ggacaguaccaguguuugg

SEQ ID NO: 503388 - RNA, 19 nt, Homo sapiens
  misc_RNA (1)...(19): siRNA sense strand
gaacagccugggcaucagu

SEQ ID NO: 503389 - RNA, 19 nt, Homo sapiens
  misc_RNA (1)...(19): siRNA sense strand
uggaguaucugaguaccaa

SEQ ID NO: 503390 - RNA, 19 nt, Homo sapiens
  misc_RNA (1)...(19): siRNA sense strand
guggagaacagcgagauuu

SEQ ID NO: 503391 - RNA, 19 nt, Homo sapiens
  misc_RNA (1)...(19): siRNA sense strand
cagcaccuguggucaucuu

SEQ ID NO: 503392 - RNA, 19 nt, Homo sapiens
  misc_RNA (1)...(19): siRNA sense strand
cugacgaaauccucuaugu

SEQ ID NO: 503393 - RNA, 19 nt, Homo sapiens
  misc_RNA (1)...(19): siRNA sense strand
gccaggccuucgugcauug

SEQ ID NO: 503394 - RNA, 19 nt, Homo sapiens
  misc_RNA (1)...(19): siRNA sense strand
ccaagaugccagucaagug

SEQ ID NO: 503395 - RNA, 19 nt, Homo sapiens
  misc_RNA (1)...(19): siRNA sense strand
aggagaagcugcgggaugu

SEQ ID NO: 503396 - RNA, 19 nt, Homo sapiens
  misc_RNA (1)...(19): siRNA sense strand
gggugaggaugaacaggau

SEQ ID NO: 503397 - RNA, 19 nt, Homo sapiens
  misc_RNA (1)...(19): siRNA sense strand
cacgcaggcugaagaaagu

SEQ ID NO: 503398 - RNA, 19 nt, Homo sapiens
  misc_RNA (1)...(19): siRNA sense strand
acauagggcuaaggcaaga

SEQ ID NO: 503399 - RNA, 19 nt, Homo sapiens
  misc_RNA (1)...(19): siRNA sense strand
gcgggaagauuuggagaac

SEQ ID NO: 503400 - RNA, 19 nt, Homo sapiens
  misc_RNA (1)...(19): siRNA sense strand
gauggacuguaugccuuga

SEQ ID NO: 503401 - RNA, 19 nt, Homo sapiens
  misc_RNA (1)...(19): siRNA sense strand
caaguggauugccauugag

SEQ ID NO: 503402 - RNA, 19 nt, Homo sapiens
  misc_RNA (1)...(19): siRNA sense strand
acagcuuccuccucuauuc

SEQ ID NO: 503403 - RNA, 19 nt, Homo sapiens
  misc_RNA (1)...(19): siRNA sense strand
gggucuguguccaaucuga

SEQ ID NO: 503404 - RNA, 19 nt, Homo sapiens
  misc_RNA (1)...(19): siRNA sense strand
guaccaagagauucauaca

SEQ ID NO: 503405 - RNA, 19 nt, Homo sapiens
  misc_RNA (1)...(19): siRNA sense strand
gaaccaacaguggaaagag

SEQ ID NO: 503406 - RNA, 19 nt, Homo sapiens
  misc_RNA (1)...(19): siRNA sense strand
gaaguucauggcagacauc

SEQ ID NO: 503407 - RNA, 19 nt, Homo sapiens
  misc_RNA (1)...(19): siRNA sense strand
gcugugaagacgaugaaga

SEQ ID NO: 503408 - RNA, 19 nt, Homo sapiens
  misc_RNA (1)...(19): siRNA sense strand
gaagcugcgggaugugaug

SEQ ID NO: 503409 - RNA, 19 nt, Homo sapiens
  misc_RNA (1)...(19): siRNA sense strand
cagaggugcuaauggacau

SEQ ID NO: 503410 - RNA, 19 nt, Homo sapiens
  misc_RNA (1)...(19): siRNA sense strand
cagagcugcgggaagauuu

SEQ ID NO: 503411 - RNA, 19 nt, Homo sapiens
  misc_RNA (1)...(19): siRNA sense strand
gaguaccaagagauucaua

SEQ ID NO: 503412 - RNA, 19 nt, Homo sapiens
  misc_RNA (1)...(19): siRNA sense strand
gaguaucugaguaccaaga

SEQ ID NO: 503413 - RNA, 19 nt, Homo sapiens
  misc_RNA (1)...(19): siRNA sense strand
ggucaucuuaccuuucaug

SEQ ID NO: 503414 - RNA, 19 nt, Homo sapiens
  misc_RNA (1)...(19): siRNA sense strand
gagccaggccuucgugcau

SEQ ID NO: 503415 - RNA, 19 nt, Homo sapiens
  misc_RNA (1)...(19): siRNA sense strand
cccaggaccggccaaguuu

SEQ ID NO: 503416 - RNA, 19 nt, Homo sapiens
  misc_RNA (1)...(19): siRNA sense strand
ggcuggagggcuugccuua

SEQ ID NO: 503417 - RNA, 19 nt, Homo sapiens
  misc_RNA (1)...(19): siRNA sense strand
guaucugaguaccaagaga

SEQ ID NO: 503418 - RNA, 19 nt, Homo sapiens
  misc_RNA (1)...(19): siRNA sense strand
guaccugcccacucagaug

SEQ ID NO: 503419 - RNA, 19 nt, Homo sapiens
  misc_RNA (1)...(19): siRNA sense strand
acacagcuuccuccucuau

SEQ ID NO: 503420 - RNA, 19 nt, Homo sapiens
  misc_RNA (1)...(19): siRNA sense strand
aaacauggagaccuacaca

SEQ ID NO: 503421 - RNA, 19 nt, Homo sapiens
  misc_RNA (1)...(19): siRNA sense strand
gacccguuauggagaagug

SEQ ID NO: 503422 - RNA, 19 nt, Homo sapiens
  misc_RNA (1)...(19): siRNA sense strand
cuaauggacauagggcuaa

SEQ ID NO: 503423 - RNA, 19 nt, Homo sapiens
  misc_RNA (1)...(19): siRNA sense strand
cagccagacccuaaggauu

SEQ ID NO: 503424 - RNA, 19 nt, Homo sapiens
  misc_RNA (1)...(19): siRNA sense strand
acgaaauccucuaugucaa

SEQ ID NO: 503425 - RNA, 19 nt, Homo sapiens
  misc_RNA (1)...(19): siRNA sense strand
agaacagcgagauuuauga

SEQ ID NO: 503426 - RNA, 19 nt, Homo sapiens
  misc_RNA (1)...(19): siRNA sense strand
gcauggaguaucugaguac

SEQ ID NO: 503427 - RNA, 19 nt, Homo sapiens
  misc_RNA (1)...(19): siRNA sense strand
ucugggagagggagaguuu

SEQ ID NO: 503428 - RNA, 19 nt, Homo sapiens
  misc_RNA (1)...(19): siRNA sense strand
cucagaugcuagugaaguu

SEQ ID NO: 503429 - RNA, 19 nt, Homo sapiens
  misc_RNA (1)...(19): siRNA sense strand
uggaugaggguggagguua

SEQ ID NO: 503430 - RNA, 19 nt, Homo sapiens
  misc_RNA (1)...(19): siRNA sense strand
ucgcggugcugggagcuaa

SEQ ID NO: 503431 - RNA, 19 nt, Homo sapiens
  misc_RNA (1)...(19): siRNA sense strand
ucgccaagaugccagucaa

SEQ ID NO: 503432 - RNA, 19 nt, Homo sapiens
  misc_RNA (1)...(19): siRNA sense strand
cuggugguauguacugcua

SEQ ID NO: 503433 - RNA, 19 nt, Homo sapiens
  misc_RNA (1)...(19): siRNA sense strand
gaccaucccaacgucauga

SEQ ID NO: 503434 - RNA, 19 nt, Homo sapiens
  misc_RNA (1)...(19): siRNA sense strand
agaaggagacccguuaugg

SEQ ID NO: 503435 - RNA, 19 nt, Homo sapiens
  misc_RNA (1)...(19): siRNA sense strand
aaagaaggagacccguuau

SEQ ID NO: 503436 - RNA, 19 nt, Homo sapiens
  misc_RNA (1)...(19): siRNA sense strand
agccagacccuaaggauuc

SEQ ID NO: 503437 - RNA, 19 nt, Homo sapiens
  misc_RNA (1)...(19): siRNA sense strand
cgaaauccucuaugucaac

SEQ ID NO: 503438 - RNA, 19 nt, Homo sapiens
  misc_RNA (1)...(19): siRNA sense strand
gugaggaugaacaggauga

SEQ ID NO: 503439 - RNA, 19 nt, Homo sapiens
  misc_RNA (1)...(19): siRNA sense strand
gggcacgcaggcugaagaa

SEQ ID NO: 503440 - RNA, 19 nt, Homo sapiens
  misc_RNA (1)...(19): siRNA sense strand
cuggagggcuugccuuacu

SEQ ID NO: 503441 - RNA, 19 nt, Homo sapiens
  misc_RNA (1)...(19): siRNA sense strand
uggacuguaugccuugaug

SEQ ID NO: 503442 - RNA, 19 nt, Homo sapiens
  misc_RNA (1)...(19): siRNA sense strand
gcuucgggauggacagauc

SEQ ID NO: 503443 - RNA, 19 nt, Homo sapiens
  misc_RNA (1)...(19): siRNA sense strand
acuucgggcucuccaagaa

SEQ ID NO: 503444 - RNA, 19 nt, Homo sapiens
  misc_RNA (1)...(19): siRNA sense strand
ggaaagaggugaacuggua

SEQ ID NO: 503445 - RNA, 19 nt, Homo sapiens
  misc_RNA (1)...(19): siRNA sense strand
ggucagagcuggaggauuu

SEQ ID NO: 503446 - RNA, 19 nt, Homo sapiens
  misc_RNA (1)...(19): siRNA sense strand
gaaagaaggagacccguua

SEQ ID NO: 503447 - RNA, 19 nt, Homo sapiens
  misc_RNA (1)...(19): siRNA sense strand
gugaagagcugaaggagaa

SEQ ID NO: 503448 - RNA, 19 nt, Homo sapiens
  misc_RNA (1)...(19): siRNA sense strand
ggaacugcaugcugaauga

SEQ ID NO: 503449 - RNA, 19 nt, Homo sapiens
  misc_RNA (1)...(19): siRNA sense strand
ccaagaagaucuacaaugg

SEQ ID NO: 503450 - RNA, 19 nt, Homo sapiens
  misc_RNA (1)...(19): siRNA sense strand
ugaacaggaugacuggaua

SEQ ID NO: 503451 - RNA, 19 nt, Homo sapiens
  misc_RNA (1)...(19): siRNA sense strand
gcucaucggugucuguuuc

SEQ ID NO: 503452 - RNA, 19 nt, Homo sapiens
  misc_RNA (1)...(19): siRNA sense strand
uuacagagcugcgggaaga

SEQ ID NO: 503453 - RNA, 19 nt, Homo sapiens
  misc_RNA (1)...(19): siRNA sense strand
caucuuggcucucuuccuu

SEQ ID NO: 503454 - RNA, 19 nt, Homo sapiens
  misc_RNA (1)...(19): siRNA sense strand
ggagacccguuauggagaa

SEQ ID NO: 503455 - RNA, 19 nt, Homo sapiens
  misc_RNA (1)...(19): siRNA sense strand
gacgaaauccucuauguca

SEQ ID NO: 503456 - RNA, 19 nt, Homo sapiens
  misc_RNA (1)...(19): siRNA sense strand
ggaugaggguggagguuau

SEQ ID NO: 503457 - RNA, 19 nt, Homo sapiens
  misc_RNA (1)...(19): siRNA sense strand
gaaggagacccguuaugga

SEQ ID NO: 503458 - RNA, 19 nt, Homo sapiens
  misc_RNA (1)...(19): siRNA sense strand
gaaauccucuaugucaaca

SEQ ID NO: 503459 - RNA, 19 nt, Homo sapiens
  misc_RNA (1)...(19): siRNA sense strand
acagcgagauuuaugacua

SEQ ID NO: 503460 - RNA, 19 nt, Homo sapiens
  misc_RNA (1)...(19): siRNA sense strand
gagaacagcgagauuuaug

SEQ ID NO: 503461 - RNA, 19 nt, Homo sapiens
  misc_RNA (1)...(19): siRNA sense strand
ggagaaguguuugaaccaa

SEQ ID NO: 503462 - RNA, 19 nt, Homo sapiens
  misc_RNA (1)...(19): siRNA sense strand
ggugucagcuccagguuca

SEQ ID NO: 503463 - RNA, 19 nt, Homo sapiens
  misc_RNA (1)...(19): siRNA sense strand
gguaccggcuggcguauca

SEQ ID NO: 503464 - RNA, 19 nt, Homo sapiens
  misc_RNA (1)...(19): siRNA sense strand
ccacugaagcuaccuugaa

SEQ ID NO: 503465 - RNA, 19 nt, Homo sapiens
  misc_RNA (1)...(19): siRNA sense strand
caacccagccagacccuaa

SEQ ID NO: 503466 - RNA, 19 nt, Homo sapiens
  misc_RNA (1)...(19): siRNA sense strand
guggucaucuuaccuuuca

SEQ ID NO: 503467 - RNA, 19 nt, Homo sapiens
  misc_RNA (1)...(19): siRNA sense strand
cagcgagauuuaugacuau

SEQ ID NO: 503468 - RNA, 19 nt, Homo sapiens
  misc_RNA (1)...(19): siRNA sense strand
gcacgcaggcugaagaaag

SEQ ID NO: 503469 - RNA, 19 nt, Homo sapiens
  misc_RNA (1)...(19): siRNA sense strand
ggguggagguuauccugaa

SEQ ID NO: 503470 - RNA, 19 nt, Homo sapiens
  misc_RNA (1)...(19): siRNA sense strand
gcacagccaccaucacagu

SEQ ID NO: 503471 - RNA, 19 nt, Homo sapiens
  misc_RNA (1)...(19): siRNA sense strand
ggcauggaguaucugagua

SEQ ID NO: 503472 - RNA, 19 nt, Homo sapiens
  misc_RNA (1)...(19): siRNA sense strand
ugaagacgaugaagauugc

SEQ ID NO: 503473 - RNA, 19 nt, Homo sapiens
  misc_RNA (1)...(19): siRNA sense strand
ggagaacagcgagauuuau

SEQ ID NO: 503474 - RNA, 19 nt, Homo sapiens
  misc_RNA (1)...(19): siRNA sense strand
gugaagacgaugaagauug

SEQ ID NO: 503475 - RNA, 19 nt, Homo sapiens
  misc_RNA (1)...(19): siRNA sense strand
gugaagcggucugcaugaa

SEQ ID NO: 503476 - RNA, 19 nt, Homo sapiens
  misc_RNA (1)...(19): siRNA sense strand
guuuggagcugugauggaa

SEQ ID NO: 503477 - RNA, 19 nt, Homo sapiens
  misc_RNA (1)...(19): siRNA sense strand
ggauugccauugagagucu

SEQ ID NO: 503478 - RNA, 19 nt, Homo sapiens
  misc_RNA (1)...(19): siRNA sense strand
uggagaacagcgagauuua

SEQ ID NO: 503479 - RNA, 19 nt, Homo sapiens
  misc_RNA (1)...(19): siRNA sense strand
ccaguggcauggaguaucu

SEQ ID NO: 503480 - RNA, 19 nt, Homo sapiens
  misc_RNA (1)...(19): siRNA sense strand
gugaacugguagucaggua

SEQ ID NO: 503481 - RNA, 19 nt, Homo sapiens
  misc_RNA (1)...(19): siRNA sense strand
gggaagauuuggagaacac

SEQ ID NO: 503482 - RNA, 19 nt, Homo sapiens
  misc_RNA (1)...(19): siRNA sense strand
gaacagcgagauuuaugac

SEQ ID NO: 503483 - RNA, 19 nt, Homo sapiens
  misc_RNA (1)...(19): siRNA sense strand
gaacaggaugacuggauag

SEQ ID NO: 503484 - RNA, 19 nt, Homo sapiens
  misc_RNA (1)...(19): siRNA sense strand
gagaagcugcgggauguga

SEQ ID NO: 503485 - RNA, 19 nt, Homo sapiens
  misc_RNA (1)...(19): siRNA sense strand
ggacgacuccauccucaag

SEQ ID NO: 503486 - RNA, 19 nt, Homo sapiens
  misc_RNA (1)...(19): siRNA sense strand
ucaccucccugcagcuuuc

SEQ ID NO: 503487 - RNA, 19 nt, Homo sapiens
  misc_RNA (1)...(19): siRNA sense strand
ggacaguaccaguguuugg

SEQ ID NO: 503488 - RNA, 19 nt, Homo sapiens
  misc_RNA (1)...(19): siRNA sense strand
gaacagccugggcaucagu

SEQ ID NO: 503489 - RNA, 19 nt, Homo sapiens
  misc_RNA (1)...(19): siRNA sense strand
uggaguaucugaguaccaa

SEQ ID NO: 503490 - RNA, 19 nt, Homo sapiens
  misc_RNA (1)...(19): siRNA sense strand
guggagaacagcgagauuu

SEQ ID NO: 503491 - RNA, 19 nt, Homo sapiens
  misc_RNA (1)...(19): siRNA sense strand
cagcaccuguggucaucuu

SEQ ID NO: 503492 - RNA, 19 nt, Homo sapiens
  misc_RNA (1)...(19): siRNA sense strand
cugacgaaauccucuaugu

SEQ ID NO: 503493 - RNA, 19 nt, Homo sapiens
  misc_RNA (1)...(19): siRNA sense strand
gccaggccuucgugcauug

SEQ ID NO: 503494 - RNA, 19 nt, Homo sapiens
  misc_RNA (1)...(19): siRNA sense strand
ccaagaugccagucaagug

SEQ ID NO: 503495 - RNA, 19 nt, Homo sapiens
  misc_RNA (1)...(19): siRNA sense strand
aggagaagcugcgggaugu

SEQ ID NO: 503496 - RNA, 19 nt, Homo sapiens
  misc_RNA (1)...(19): siRNA sense strand
gggugaggaugaacaggau

SEQ ID NO: 503497 - RNA, 19 nt, Homo sapiens
  misc_RNA (1)...(19): siRNA sense strand
cacgcaggcugaagaaagu

SEQ ID NO: 503498 - RNA, 19 nt, Homo sapiens
  misc_RNA (1)...(19): siRNA sense strand
acauagggcuaaggcaaga

SEQ ID NO: 503499 - RNA, 19 nt, Homo sapiens
  misc_RNA (1)...(19): siRNA sense strand
gcgggaagauuuggagaac

SEQ ID NO: 503500 - RNA, 19 nt, Homo sapiens
  misc_RNA (1)...(19): siRNA sense strand
gauggacuguaugccuuga

SEQ ID NO: 503501 - RNA, 19 nt, Homo sapiens
  misc_RNA (1)...(19): siRNA sense strand
caaguggauugccauugag

SEQ ID NO: 503502 - RNA, 19 nt, Homo sapiens
  misc_RNA (1)...(19): siRNA sense strand
acagcuuccuccucuauuc

SEQ ID NO: 503503 - RNA, 19 nt, Homo sapiens
  misc_RNA (1)...(19): siRNA sense strand
gggucuguguccaaucuga

SEQ ID NO: 503504 - RNA, 19 nt, Homo sapiens
  misc_RNA (1)...(19): siRNA sense strand
guaccaagagauucauaca

SEQ ID NO: 503505 - RNA, 19 nt, Homo sapiens
  misc_RNA (1)...(19): siRNA sense strand
gaaccaacaguggaaagag

SEQ ID NO: 503506 - RNA, 19 nt, Homo sapiens
  misc_RNA (1)...(19): siRNA sense strand
gaaguucauggcagacauc

SEQ ID NO: 503507 - RNA, 19 nt, Homo sapiens
  misc_RNA (1)...(19): siRNA sense strand
gcugugaagacgaugaaga

SEQ ID NO: 503508 - RNA, 19 nt, Homo sapiens
  misc_RNA (1)...(19): siRNA sense strand
gaagcugcgggaugugaug

SEQ ID NO: 503509 - RNA, 19 nt, Homo sapiens
  misc_RNA (1)...(19): siRNA sense strand
cagaggugcuaauggacau

SEQ ID NO: 503510 - RNA, 19 nt, Homo sapiens
  misc_RNA (1)...(19): siRNA sense strand
cagagcugcgggaagauuu

SEQ ID NO: 503511 - RNA, 19 nt, Homo sapiens
  misc_RNA (1)...(19): siRNA sense strand
gaguaccaagagauucaua

SEQ ID NO: 503512 - RNA, 19 nt, Homo sapiens
  misc_RNA (1)...(19): siRNA sense strand
gaguaucugaguaccaaga

SEQ ID NO: 503513 - RNA, 19 nt, Homo sapiens
  misc_RNA (1)...(19): siRNA sense strand
ggucaucuuaccuuucaug

SEQ ID NO: 503514 - RNA, 19 nt, Homo sapiens
  misc_RNA (1)...(19): siRNA sense strand
gagccaggccuucgugcau

SEQ ID NO: 503515 - RNA, 19 nt, Homo sapiens
  misc_RNA (1)...(19): siRNA sense strand
cccaggaccggccaaguuu

SEQ ID NO: 503516 - RNA, 19 nt, Homo sapiens
  misc_RNA (1)...(19): siRNA sense strand
ggcuggagggcuugccuua

SEQ ID NO: 503517 - RNA, 19 nt, Homo sapiens
  misc_RNA (1)...(19): siRNA sense strand
guaucugaguaccaagaga

SEQ ID NO: 503518 - RNA, 19 nt, Homo sapiens
  misc_RNA (1)...(19): siRNA sense strand
guaccugcccacucagaug

SEQ ID NO: 503519 - RNA, 19 nt, Homo sapiens
  misc_RNA (1)...(19): siRNA sense strand
acacagcuuccuccucuau

SEQ ID NO: 503520 - RNA, 19 nt, Homo sapiens
  misc_RNA (1)...(19): siRNA sense strand
aaacauggagaccuacaca

SEQ ID NO: 503521 - RNA, 19 nt, Homo sapiens
  misc_RNA (1)...(19): siRNA sense strand
gacccguuauggagaagug

SEQ ID NO: 503522 - RNA, 19 nt, Homo sapiens
  misc_RNA (1)...(19): siRNA sense strand
cuaauggacauagggcuaa

SEQ ID NO: 503523 - RNA, 19 nt, Homo sapiens
  misc_RNA (1)...(19): siRNA sense strand
cagccagacccuaaggauu

SEQ ID NO: 503524 - RNA, 19 nt, Homo sapiens
  misc_RNA (1)...(19): siRNA sense strand
acgaaauccucuaugucaa

SEQ ID NO: 503525 - RNA, 19 nt, Homo sapiens
  misc_RNA (1)...(19): siRNA sense strand
agaacagcgagauuuauga

SEQ ID NO: 503526 - RNA, 19 nt, Homo sapiens
  misc_RNA (1)...(19): siRNA sense strand
gcauggaguaucugaguac

SEQ ID NO: 503527 - RNA, 19 nt, Homo sapiens
  misc_RNA (1)...(19): siRNA sense strand
ucugggagagggagaguuu

SEQ ID NO: 503528 - RNA, 19 nt, Homo sapiens
  misc_RNA (1)...(19): siRNA sense strand
cucagaugcuagugaaguu

SEQ ID NO: 503529 - RNA, 19 nt, Homo sapiens
  misc_RNA (1)...(19): siRNA sense strand
uggaugaggguggagguua

SEQ ID NO: 503530 - RNA, 19 nt, Homo sapiens
  misc_RNA (1)...(19): siRNA sense strand
ucgcggugcugggagcuaa

SEQ ID NO: 503531 - RNA, 19 nt, Homo sapiens
  misc_RNA (1)...(19): siRNA sense strand
ucgccaagaugccagucaa

SEQ ID NO: 503532 - RNA, 19 nt, Homo sapiens
  misc_RNA (1)...(19): siRNA sense strand
cuggugguauguacugcua

SEQ ID NO: 503533 - RNA, 19 nt, Homo sapiens
  misc_RNA (1)...(19): siRNA sense strand
gaccaucccaacgucauga

SEQ ID NO: 503534 - RNA, 19 nt, Homo sapiens
  misc_RNA (1)...(19): siRNA sense strand
agaaggagacccguuaugg

SEQ ID NO: 503535 - RNA, 19 nt, Homo sapiens
  misc_RNA (1)...(19): siRNA sense strand
aaagaaggagacccguuau

SEQ ID NO: 503536 - RNA, 19 nt, Homo sapiens
  misc_RNA (1)...(19): siRNA sense strand
agccagacccuaaggauuc

SEQ ID NO: 503537 - RNA, 19 nt, Homo sapiens
  misc_RNA (1)...(19): siRNA sense strand
cgaaauccucuaugucaac

SEQ ID NO: 503538 - RNA, 19 nt, Homo sapiens
  misc_RNA (1)...(19): siRNA sense strand
gugaggaugaacaggauga

SEQ ID NO: 503539 - RNA, 19 nt, Homo sapiens
  misc_RNA (1)...(19): siRNA sense strand
gggcacgcaggcugaagaa

SEQ ID NO: 503540 - RNA, 19 nt, Homo sapiens
  misc_RNA (1)...(19): siRNA sense strand
cuggagggcuugccuuacu

SEQ ID NO: 503541 - RNA, 19 nt, Homo sapiens
  misc_RNA (1)...(19): siRNA sense strand
uggacuguaugccuugaug

SEQ ID NO: 503542 - RNA, 19 nt, Homo sapiens
  misc_RNA (1)...(19): siRNA sense strand
gcuucgggauggacagauc

SEQ ID NO: 503543 - RNA, 19 nt, Homo sapiens
  misc_RNA (1)...(19): siRNA sense strand
acuucgggcucuccaagaa

SEQ ID NO: 503544 - RNA, 19 nt, Homo sapiens
  misc_RNA (1)...(19): siRNA sense strand
gcgaagagaucuacauuaa

SEQ ID NO: 503545 - RNA, 19 nt, Homo sapiens
  misc_RNA (1)...(19): siRNA sense strand
gaagaucucugcccucaag

SEQ ID NO: 503546 - RNA, 19 nt, Homo sapiens
  misc_RNA (1)...(19): siRNA sense strand
caaccuggcuaccguguuu

SEQ ID NO: 503547 - RNA, 19 nt, Homo sapiens
  misc_RNA (1)...(19): siRNA sense strand
agaagaagauguuugagaa

SEQ ID NO: 503548 - RNA, 19 nt, Homo sapiens
  misc_RNA (1)...(19): siRNA sense strand
gaagagaucuacauuaacc

SEQ ID NO: 503549 - RNA, 19 nt, Homo sapiens
  misc_RNA (1)...(19): siRNA sense strand
ggaaaggccuggagaugag

SEQ ID NO: 503550 - RNA, 19 nt, Homo sapiens
  misc_RNA (1)...(19): siRNA sense strand
gagagaagcaauucagaaa

SEQ ID NO: 503551 - RNA, 19 nt, Homo sapiens
  misc_RNA (1)...(19): siRNA sense strand
ggaagcaccagcaguauga

SEQ ID NO: 503552 - RNA, 19 nt, Homo sapiens
  misc_RNA (1)...(19): siRNA sense strand
cagaggaacucaaagugaa

SEQ ID NO: 503553 - RNA, 19 nt, Homo sapiens
  misc_RNA (1)...(19): siRNA sense strand
caagugggaugaggaguuu

SEQ ID NO: 503554 - RNA, 19 nt, Homo sapiens
  misc_RNA (1)...(19): siRNA sense strand
gcaauaaagacgacgauga

SEQ ID NO: 503555 - RNA, 19 nt, Homo sapiens
  misc_RNA (1)...(19): siRNA sense strand
gagaagcaauucagaaacu

SEQ ID NO: 503556 - RNA, 19 nt, Homo sapiens
  misc_RNA (1)...(19): siRNA sense strand
cggcacgucuuccucuuua

SEQ ID NO: 503557 - RNA, 19 nt, Homo sapiens
  misc_RNA (1)...(19): siRNA sense strand
gaaggagcccaucaacaaa

SEQ ID NO: 503558 - RNA, 19 nt, Homo sapiens
  misc_RNA (1)...(19): siRNA sense strand
acaaugagaucguggacaa

SEQ ID NO: 503559 - RNA, 19 nt, Homo sapiens
  misc_RNA (1)...(19): siRNA sense strand
gagaagugcuaugacaaga

SEQ ID NO: 503560 - RNA, 19 nt, Homo sapiens
  misc_RNA (1)...(19): siRNA sense strand
ugaagaagaagauguuuga

SEQ ID NO: 503561 - RNA, 19 nt, Homo sapiens
  misc_RNA (1)...(19): siRNA sense strand
ggagagaagcaauucagaa

SEQ ID NO: 503562 - RNA, 19 nt, Homo sapiens
  misc_RNA (1)...(19): siRNA sense strand
uaaagucgcucuggagaca

SEQ ID NO: 503563 - RNA, 19 nt, Homo sapiens
  misc_RNA (1)...(19): siRNA sense strand
ucuaugagauccacaagga

SEQ ID NO: 503564 - RNA, 19 nt, Homo sapiens
  misc_RNA (1)...(19): siRNA sense strand
agaaggagcccaucaacaa

SEQ ID NO: 503565 - RNA, 19 nt, Homo sapiens
  misc_RNA (1)...(19): siRNA sense strand
agaagauguuugagaauga

SEQ ID NO: 503566 - RNA, 19 nt, Homo sapiens
  misc_RNA (1)...(19): siRNA sense strand
acaaggaguucuaugacaa

SEQ ID NO: 503567 - RNA, 19 nt, Homo sapiens
  misc_RNA (1)...(19): siRNA sense strand
gccaagggauuuaagcaau

SEQ ID NO: 503568 - RNA, 19 nt, Homo sapiens
  misc_RNA (1)...(19): siRNA sense strand
guacacaacauuccuguca

SEQ ID NO: 503569 - RNA, 19 nt, Homo sapiens
  misc_RNA (1)...(19): siRNA sense strand
gaaggagaaagccaacaaa

SEQ ID NO: 503570 - RNA, 19 nt, Homo sapiens
  misc_RNA (1)...(19): siRNA sense strand
gaucucagaggaacucaaa

SEQ ID NO: 503571 - RNA, 19 nt, Homo sapiens
  misc_RNA (1)...(19): siRNA sense strand
gaaauucaccagccgagau

SEQ ID NO: 503572 - RNA, 19 nt, Homo sapiens
  misc_RNA (1)...(19): siRNA sense strand
ggaacacacuguacuucuc

SEQ ID NO: 503573 - RNA, 19 nt, Homo sapiens
  misc_RNA (1)...(19): siRNA sense strand
uggaagcucugcucuacaa

SEQ ID NO: 503574 - RNA, 19 nt, Homo sapiens
  misc_RNA (1)...(19): siRNA sense strand
ucaacaaggacaacaauga

SEQ ID NO: 503575 - RNA, 19 nt, Homo sapiens
  misc_RNA (1)...(19): siRNA sense strand
gggaaaggccuggagauga

SEQ ID NO: 503576 - RNA, 19 nt, Homo sapiens
  misc_RNA (1)...(19): siRNA sense strand
agagugaaauccagaagga

SEQ ID NO: 503577 - RNA, 19 nt, Homo sapiens
  misc_RNA (1)...(19): siRNA sense strand
gcaaucagccaaccuguac

SEQ ID NO: 503578 - RNA, 19 nt, Homo sapiens
  misc_RNA (1)...(19): siRNA sense strand
gaagaagauguuugagaau

SEQ ID NO: 503579 - RNA, 19 nt, Homo sapiens
  misc_RNA (1)...(19): siRNA sense strand
gcuaugagaagugcuauga

SEQ ID NO: 503580 - RNA, 19 nt, Homo sapiens
  misc_RNA (1)...(19): siRNA sense strand
ccucagaaguggagagcaa

SEQ ID NO: 503581 - RNA, 19 nt, Homo sapiens
  misc_RNA (1)...(19): siRNA sense strand
ugagugacauggacaucaa

SEQ ID NO: 503582 - RNA, 19 nt, Homo sapiens
  misc_RNA (1)...(19): siRNA sense strand
uaugagaagugcuaugaca

SEQ ID NO: 503583 - RNA, 19 nt, Homo sapiens
  misc_RNA (1)...(19): siRNA sense strand
aagaagauguuugagaaug

SEQ ID NO: 503584 - RNA, 19 nt, Homo sapiens
  misc_RNA (1)...(19): siRNA sense strand
gcucaaggccgucuucgau

SEQ ID NO: 503585 - RNA, 19 nt, Homo sapiens
  misc_RNA (1)...(19): siRNA sense strand
cagggaagcaccagcagua

SEQ ID NO: 503586 - RNA, 19 nt, Homo sapiens
  misc_RNA (1)...(19): siRNA sense strand
ccgggacgcucaagcugua

SEQ ID NO: 503587 - RNA, 19 nt, Homo sapiens
  misc_RNA (1)...(19): siRNA sense strand
gcuccaaggugcccuacau

SEQ ID NO: 503588 - RNA, 19 nt, Homo sapiens
  misc_RNA (1)...(19): siRNA sense strand
gagaugaacgggaucaaag

SEQ ID NO: 503589 - RNA, 19 nt, Homo sapiens
  misc_RNA (1)...(19): siRNA sense strand
gaagauguuugagaaugag

SEQ ID NO: 503590 - RNA, 19 nt, Homo sapiens
  misc_RNA (1)...(19): siRNA sense strand
uggaggacaugaagaugaa

SEQ ID NO: 503591 - RNA, 19 nt, Homo sapiens
  misc_RNA (1)...(19): siRNA sense strand
gaaaaggguugccgagaag

SEQ ID NO: 503592 - RNA, 19 nt, Homo sapiens
  misc_RNA (1)...(19): siRNA sense strand
gugccaagcugaagaagac

SEQ ID NO: 503593 - RNA, 19 nt, Homo sapiens
  misc_RNA (1)...(19): siRNA sense strand
gaacgggaucaaaguggaa

SEQ ID NO: 503594 - RNA, 19 nt, Homo sapiens
  misc_RNA (1)...(19): siRNA sense strand
ggauccuguuucaagcuua

SEQ ID NO: 503595 - RNA, 19 nt, Homo sapiens
  misc_RNA (1)...(19): siRNA sense strand
uggaaagaguuaccuguuc

SEQ ID NO: 503596 - RNA, 19 nt, Homo sapiens
  misc_RNA (1)...(19): siRNA sense strand
ucagaggaacucaaaguga

SEQ ID NO: 503597 - RNA, 19 nt, Homo sapiens
  misc_RNA (1)...(19): siRNA sense strand
guuggcaucuacaggauau

SEQ ID NO: 503598 - RNA, 19 nt, Homo sapiens
  misc_RNA (1)...(19): siRNA sense strand
cauggaagcucugcucuac

SEQ ID NO: 503599 - RNA, 19 nt, Homo sapiens
  misc_RNA (1)...(19): siRNA sense strand
ccaacaaccaguuccagaa

SEQ ID NO: 503600 - RNA, 19 nt, Homo sapiens
  misc_RNA (1)...(19): siRNA sense strand
ugaggauccugugcuauga

SEQ ID NO: 503601 - RNA, 19 nt, Homo sapiens
  misc_RNA (1)...(19): siRNA sense strand
caauaaagacgacgaugag

SEQ ID NO: 503602 - RNA, 19 nt, Homo sapiens
  misc_RNA (1)...(19): siRNA sense strand
gcaauucagaaacuacaga

SEQ ID NO: 503603 - RNA, 19 nt, Homo sapiens
  misc_RNA (1)...(19): siRNA sense strand
cgcgacagcuggugaagga

SEQ ID NO: 503604 - RNA, 19 nt, Homo sapiens
  misc_RNA (1)...(19): siRNA sense strand
ccagccagcucggugugua

SEQ ID NO: 503605 - RNA, 19 nt, Homo sapiens
  misc_RNA (1)...(19): siRNA sense strand
gagaaggagcccaucaaca

SEQ ID NO: 503606 - RNA, 19 nt, Homo sapiens
  misc_RNA (1)...(19): siRNA sense strand
cgagauaugagccugaaga

SEQ ID NO: 503607 - RNA, 19 nt, Homo sapiens
  misc_RNA (1)...(19): siRNA sense strand
cacaaggaguucuaugaca

SEQ ID NO: 503608 - RNA, 19 nt, Homo sapiens
  misc_RNA (1)...(19): siRNA sense strand
agaagcaauucagaaacua

SEQ ID NO: 503609 - RNA, 19 nt, Homo sapiens
  misc_RNA (1)...(19): siRNA sense strand
caacaaggacaacaaugag

SEQ ID NO: 503610 - RNA, 19 nt, Homo sapiens
  misc_RNA (1)...(19): siRNA sense strand
ccagcucgguguguacaaa

SEQ ID NO: 503611 - RNA, 19 nt, Homo sapiens
  misc_RNA (1)...(19): siRNA sense strand
ugaaaaggguugccgagaa

SEQ ID NO: 503612 - RNA, 19 nt, Homo sapiens
  misc_RNA (1)...(19): siRNA sense strand
gcuuaggacuguacacaac

SEQ ID NO: 503613 - RNA, 19 nt, Homo sapiens
  misc_RNA (1)...(19): siRNA sense strand
uucagaaacuacagaagaa

SEQ ID NO: 503614 - RNA, 19 nt, Homo sapiens
  misc_RNA (1)...(19): siRNA sense strand
cagcgaagagaucuacauu

SEQ ID NO: 503615 - RNA, 19 nt, Homo sapiens
  misc_RNA (1)...(19): siRNA sense strand
aagcguuugucgauaacua

SEQ ID NO: 503616 - RNA, 19 nt, Homo sapiens
  misc_RNA (1)...(19): siRNA sense strand
ucgagcgccugaagaagaa

SEQ ID NO: 503617 - RNA, 19 nt, Homo sapiens
  misc_RNA (1)...(19): siRNA sense strand
ucgaggagguuggcaucua

SEQ ID NO: 503618 - RNA, 19 nt, Homo sapiens
  misc_RNA (1)...(19): siRNA sense strand
aaauucaccagccgagaua

SEQ ID NO: 503619 - RNA, 19 nt, Homo sapiens
  misc_RNA (1)...(19): siRNA sense strand
caacaaccaguuccagaag

SEQ ID NO: 503620 - RNA, 19 nt, Homo sapiens
  misc_RNA (1)...(19): siRNA sense strand
ccucaucaccuuccucuuc

SEQ ID NO: 503621 - RNA, 19 nt, Homo sapiens
  misc_RNA (1)...(19): siRNA sense strand
cacaaaccguggagaccaa

SEQ ID NO: 503622 - RNA, 19 nt, Homo sapiens
  misc_RNA (1)...(19): siRNA sense strand
gauccuguuucaagcuuag

SEQ ID NO: 503623 - RNA, 19 nt, Homo sapiens
  misc_RNA (1)...(19): siRNA sense strand
gaagaucucagaggaacuc

SEQ ID NO: 503624 - RNA, 19 nt, Homo sapiens
  misc_RNA (1)...(19): siRNA sense strand
ucgagaccaucuucuacaa

SEQ ID NO: 503625 - RNA, 19 nt, Homo sapiens
  misc_RNA (1)...(19): siRNA sense strand
uggaggagguggagaagag

SEQ ID NO: 503626 - RNA, 19 nt, Homo sapiens
  misc_RNA (1)...(19): siRNA sense strand
gggaugaggaguuugagau

SEQ ID NO: 503627 - RNA, 19 nt, Homo sapiens
  misc_RNA (1)...(19): siRNA sense strand
ccaagugggaugaggaguu

SEQ ID NO: 503628 - RNA, 19 nt, Homo sapiens
  misc_RNA (1)...(19): siRNA sense strand
gcacgucuuccucuuuaca

SEQ ID NO: 503629 - RNA, 19 nt, Homo sapiens
  misc_RNA (1)...(19): siRNA sense strand
acacgucugucaccaugga

SEQ ID NO: 503630 - RNA, 19 nt, Homo sapiens
  misc_RNA (1)...(19): siRNA sense strand
ggagcacccuaguccuaca

SEQ ID NO: 503631 - RNA, 19 nt, Homo sapiens
  misc_RNA (1)...(19): siRNA sense strand
gcagaacucaagcggaaca

SEQ ID NO: 503632 - RNA, 19 nt, Homo sapiens
  misc_RNA (1)...(19): siRNA sense strand
gaucgagaccaucuucuac

SEQ ID NO: 503633 - RNA, 19 nt, Homo sapiens
  misc_RNA (1)...(19): siRNA sense strand
gaugaacgggaucaaagug

SEQ ID NO: 503634 - RNA, 19 nt, Homo sapiens
  misc_RNA (1)...(19): siRNA sense strand
ggucaacaaggacaacaau

SEQ ID NO: 503635 - RNA, 19 nt, Homo sapiens
  misc_RNA (1)...(19): siRNA sense strand
agaguuaccuguuccuacu

SEQ ID NO: 503636 - RNA, 19 nt, Homo sapiens
  misc_RNA (1)...(19): siRNA sense strand
aagaagaagauguuugaga

SEQ ID NO: 503637 - RNA, 19 nt, Homo sapiens
  misc_RNA (1)...(19): siRNA sense strand
acaaccaguuccagaagau

SEQ ID NO: 503638 - RNA, 19 nt, Homo sapiens
  misc_RNA (1)...(19): siRNA sense strand
cgaggagguuggcaucuac

SEQ ID NO: 503639 - RNA, 19 nt, Homo sapiens
  misc_RNA (1)...(19): siRNA sense strand
ccaucgagcgccugaagaa

SEQ ID NO: 503640 - RNA, 19 nt, Homo sapiens
  misc_RNA (1)...(19): siRNA sense strand
ggacgugauugagaugaac

SEQ ID NO: 503641 - RNA, 19 nt, Homo sapiens
  misc_RNA (1)...(19): siRNA sense strand
guuucaagcuuaggacugu

SEQ ID NO: 503642 - RNA, 19 nt, Homo sapiens
  misc_RNA (1)...(19): siRNA sense strand
gccgagauaugagccugaa

SEQ ID NO: 503643 - RNA, 19 nt, Homo sapiens
  misc_RNA (1)...(19): siRNA sense strand
uggauuccuucggcuauuu

SEQ ID NO: 503644 - RNA, 19 nt, Homo sapiens
  misc_RNA (1)...(19): siRNA sense strand
gcgaagagaucuacauuaa

SEQ ID NO: 503645 - RNA, 19 nt, Homo sapiens
  misc_RNA (1)...(19): siRNA sense strand
gaagaucucugcccucaag

SEQ ID NO: 503646 - RNA, 19 nt, Homo sapiens
  misc_RNA (1)...(19): siRNA sense strand
caaccuggcuaccguguuu

SEQ ID NO: 503647 - RNA, 19 nt, Homo sapiens
  misc_RNA (1)...(19): siRNA sense strand
agaagaagauguuugagaa

SEQ ID NO: 503648 - RNA, 19 nt, Homo sapiens
  misc_RNA (1)...(19): siRNA sense strand
gaagagaucuacauuaacc

SEQ ID NO: 503649 - RNA, 19 nt, Homo sapiens
  misc_RNA (1)...(19): siRNA sense strand
ggaaaggccuggagaugag

SEQ ID NO: 503650 - RNA, 19 nt, Homo sapiens
  misc_RNA (1)...(19): siRNA sense strand
gagagaagcaauucagaaa

SEQ ID NO: 503651 - RNA, 19 nt, Homo sapiens
  misc_RNA (1)...(19): siRNA sense strand
ggaagcaccagcaguauga

SEQ ID NO: 503652 - RNA, 19 nt, Homo sapiens
  misc_RNA (1)...(19): siRNA sense strand
cagaggaacucaaagugaa

SEQ ID NO: 503653 - RNA, 19 nt, Homo sapiens
  misc_RNA (1)...(19): siRNA sense strand
caagugggaugaggaguuu

SEQ ID NO: 503654 - RNA, 19 nt, Homo sapiens
  misc_RNA (1)...(19): siRNA sense strand
gcaauaaagacgacgauga

SEQ ID NO: 503655 - RNA, 19 nt, Homo sapiens
  misc_RNA (1)...(19): siRNA sense strand
gagaagcaauucagaaacu

SEQ ID NO: 503656 - RNA, 19 nt, Homo sapiens
  misc_RNA (1)...(19): siRNA sense strand
cggcacgucuuccucuuua

SEQ ID NO: 503657 - RNA, 19 nt, Homo sapiens
  misc_RNA (1)...(19): siRNA sense strand
gaaggagcccaucaacaaa

SEQ ID NO: 503658 - RNA, 19 nt, Homo sapiens
  misc_RNA (1)...(19): siRNA sense strand
acaaugagaucguggacaa

SEQ ID NO: 503659 - RNA, 19 nt, Homo sapiens
  misc_RNA (1)...(19): siRNA sense strand
gagaagugcuaugacaaga

SEQ ID NO: 503660 - RNA, 19 nt, Homo sapiens
  misc_RNA (1)...(19): siRNA sense strand
ugaagaagaagauguuuga

SEQ ID NO: 503661 - RNA, 19 nt, Homo sapiens
  misc_RNA (1)...(19): siRNA sense strand
ggagagaagcaauucagaa

SEQ ID NO: 503662 - RNA, 19 nt, Homo sapiens
  misc_RNA (1)...(19): siRNA sense strand
uaaagucgcucuggagaca

SEQ ID NO: 503663 - RNA, 19 nt, Homo sapiens
  misc_RNA (1)...(19): siRNA sense strand
ucuaugagauccacaagga

SEQ ID NO: 503664 - RNA, 19 nt, Homo sapiens
  misc_RNA (1)...(19): siRNA sense strand
agaaggagcccaucaacaa

SEQ ID NO: 503665 - RNA, 19 nt, Homo sapiens
  misc_RNA (1)...(19): siRNA sense strand
agaagauguuugagaauga

SEQ ID NO: 503666 - RNA, 19 nt, Homo sapiens
  misc_RNA (1)...(19): siRNA sense strand
acaaggaguucuaugacaa

SEQ ID NO: 503667 - RNA, 19 nt, Homo sapiens
  misc_RNA (1)...(19): siRNA sense strand
gccaagggauuuaagcaau

SEQ ID NO: 503668 - RNA, 19 nt, Homo sapiens
  misc_RNA (1)...(19): siRNA sense strand
guacacaacauuccuguca

SEQ ID NO: 503669 - RNA, 19 nt, Homo sapiens
  misc_RNA (1)...(19): siRNA sense strand
gaaggagaaagccaacaaa

SEQ ID NO: 503670 - RNA, 19 nt, Homo sapiens
  misc_RNA (1)...(19): siRNA sense strand
gaucucagaggaacucaaa

SEQ ID NO: 503671 - RNA, 19 nt, Homo sapiens
  misc_RNA (1)...(19): siRNA sense strand
gaaauucaccagccgagau

SEQ ID NO: 503672 - RNA, 19 nt, Homo sapiens
  misc_RNA (1)...(19): siRNA sense strand
ggaacacacuguacuucuc

SEQ ID NO: 503673 - RNA, 19 nt, Homo sapiens
  misc_RNA (1)...(19): siRNA sense strand
uggaagcucugcucuacaa

SEQ ID NO: 503674 - RNA, 19 nt, Homo sapiens
  misc_RNA (1)...(19): siRNA sense strand
ucaacaaggacaacaauga

SEQ ID NO: 503675 - RNA, 19 nt, Homo sapiens
  misc_RNA (1)...(19): siRNA sense strand
gggaaaggccuggagauga

SEQ ID NO: 503676 - RNA, 19 nt, Homo sapiens
  misc_RNA (1)...(19): siRNA sense strand
agagugaaauccagaagga

SEQ ID NO: 503677 - RNA, 19 nt, Homo sapiens
  misc_RNA (1)...(19): siRNA sense strand
gcaaucagccaaccuguac

SEQ ID NO: 503678 - RNA, 19 nt, Homo sapiens
  misc_RNA (1)...(19): siRNA sense strand
gaagaagauguuugagaau

SEQ ID NO: 503679 - RNA, 19 nt, Homo sapiens
  misc_RNA (1)...(19): siRNA sense strand
gcuaugagaagugcuauga

SEQ ID NO: 503680 - RNA, 19 nt, Homo sapiens
  misc_RNA (1)...(19): siRNA sense strand
ccucagaaguggagagcaa

SEQ ID NO: 503681 - RNA, 19 nt, Homo sapiens
  misc_RNA (1)...(19): siRNA sense strand
ugagugacauggacaucaa

SEQ ID NO: 503682 - RNA, 19 nt, Homo sapiens
  misc_RNA (1)...(19): siRNA sense strand
uaugagaagugcuaugaca

SEQ ID NO: 503683 - RNA, 19 nt, Homo sapiens
  misc_RNA (1)...(19): siRNA sense strand
aagaagauguuugagaaug

SEQ ID NO: 503684 - RNA, 19 nt, Homo sapiens
  misc_RNA (1)...(19): siRNA sense strand
gcucaaggccgucuucgau

SEQ ID NO: 503685 - RNA, 19 nt, Homo sapiens
  misc_RNA (1)...(19): siRNA sense strand
cagggaagcaccagcagua

SEQ ID NO: 503686 - RNA, 19 nt, Homo sapiens
  misc_RNA (1)...(19): siRNA sense strand
ccgggacgcucaagcugua

SEQ ID NO: 503687 - RNA, 19 nt, Homo sapiens
  misc_RNA (1)...(19): siRNA sense strand
gcuccaaggugcccuacau

SEQ ID NO: 503688 - RNA, 19 nt, Homo sapiens
  misc_RNA (1)...(19): siRNA sense strand
gagaugaacgggaucaaag

SEQ ID NO: 503689 - RNA, 19 nt, Homo sapiens
  misc_RNA (1)...(19): siRNA sense strand
gaagauguuugagaaugag

SEQ ID NO: 503690 - RNA, 19 nt, Homo sapiens
  misc_RNA (1)...(19): siRNA sense strand
uggaggacaugaagaugaa

SEQ ID NO: 503691 - RNA, 19 nt, Homo sapiens
  misc_RNA (1)...(19): siRNA sense strand
gaaaaggguugccgagaag

SEQ ID NO: 503692 - RNA, 19 nt, Homo sapiens
  misc_RNA (1)...(19): siRNA sense strand
gugccaagcugaagaagac

SEQ ID NO: 503693 - RNA, 19 nt, Homo sapiens
  misc_RNA (1)...(19): siRNA sense strand
gaacgggaucaaaguggaa

SEQ ID NO: 503694 - RNA, 19 nt, Homo sapiens
  misc_RNA (1)...(19): siRNA sense strand
ggauccuguuucaagcuua

SEQ ID NO: 503695 - RNA, 19 nt, Homo sapiens
  misc_RNA (1)...(19): siRNA sense strand
uggaaagaguuaccuguuc

SEQ ID NO: 503696 - RNA, 19 nt, Homo sapiens
  misc_RNA (1)...(19): siRNA sense strand
ucagaggaacucaaaguga

SEQ ID NO: 503697 - RNA, 19 nt, Homo sapiens
  misc_RNA (1)...(19): siRNA sense strand
guuggcaucuacaggauau

SEQ ID NO: 503698 - RNA, 19 nt, Homo sapiens
  misc_RNA (1)...(19): siRNA sense strand
cauggaagcucugcucuac

SEQ ID NO: 503699 - RNA, 19 nt, Homo sapiens
  misc_RNA (1)...(19): siRNA sense strand
ccaacaaccaguuccagaa

SEQ ID NO: 503700 - RNA, 19 nt, Homo sapiens
  misc_RNA (1)...(19): siRNA sense strand
ugaggauccugugcuauga

SEQ ID NO: 503701 - RNA, 19 nt, Homo sapiens
  misc_RNA (1)...(19): siRNA sense strand
caauaaagacgacgaugag

SEQ ID NO: 503702 - RNA, 19 nt, Homo sapiens
  misc_RNA (1)...(19): siRNA sense strand
gcaauucagaaacuacaga

SEQ ID NO: 503703 - RNA, 19 nt, Homo sapiens
  misc_RNA (1)...(19): siRNA sense strand
cgcgacagcuggugaagga

SEQ ID NO: 503704 - RNA, 19 nt, Homo sapiens
  misc_RNA (1)...(19): siRNA sense strand
ccagccagcucggugugua

SEQ ID NO: 503705 - RNA, 19 nt, Homo sapiens
  misc_RNA (1)...(19): siRNA sense strand
gagaaggagcccaucaaca

SEQ ID NO: 503706 - RNA, 19 nt, Homo sapiens
  misc_RNA (1)...(19): siRNA sense strand
cgagauaugagccugaaga

SEQ ID NO: 503707 - RNA, 19 nt, Homo sapiens
  misc_RNA (1)...(19): siRNA sense strand
cacaaggaguucuaugaca

SEQ ID NO: 503708 - RNA, 19 nt, Homo sapiens
  misc_RNA (1)...(19): siRNA sense strand
agaagcaauucagaaacua

SEQ ID NO: 503709 - RNA, 19 nt, Homo sapiens
  misc_RNA (1)...(19): siRNA sense strand
caacaaggacaacaaugag

SEQ ID NO: 503710 - RNA, 19 nt, Homo sapiens
  misc_RNA (1)...(19): siRNA sense strand
ccagcucgguguguacaaa

SEQ ID NO: 503711 - RNA, 19 nt, Homo sapiens
  misc_RNA (1)...(19): siRNA sense strand
ugaaaaggguugccgagaa

SEQ ID NO: 503712 - RNA, 19 nt, Homo sapiens
  misc_RNA (1)...(19): siRNA sense strand
gcuuaggacuguacacaac

SEQ ID NO: 503713 - RNA, 19 nt, Homo sapiens
  misc_RNA (1)...(19): siRNA sense strand
uucagaaacuacagaagaa

SEQ ID NO: 503714 - RNA, 19 nt, Homo sapiens
  misc_RNA (1)...(19): siRNA sense strand
cagcgaagagaucuacauu

SEQ ID NO: 503715 - RNA, 19 nt, Homo sapiens
  misc_RNA (1)...(19): siRNA sense strand
aagcguuugucgauaacua

SEQ ID NO: 503716 - RNA, 19 nt, Homo sapiens
  misc_RNA (1)...(19): siRNA sense strand
ucgagcgccugaagaagaa

SEQ ID NO: 503717 - RNA, 19 nt, Homo sapiens
  misc_RNA (1)...(19): siRNA sense strand
ucgaggagguuggcaucua

SEQ ID NO: 503718 - RNA, 19 nt, Homo sapiens
  misc_RNA (1)...(19): siRNA sense strand
aaauucaccagccgagaua

SEQ ID NO: 503719 - RNA, 19 nt, Homo sapiens
  misc_RNA (1)...(19): siRNA sense strand
caacaaccaguuccagaag

SEQ ID NO: 503720 - RNA, 19 nt, Homo sapiens
  misc_RNA (1)...(19): siRNA sense strand
ccucaucaccuuccucuuc

SEQ ID NO: 503721 - RNA, 19 nt, Homo sapiens
  misc_RNA (1)...(19): siRNA sense strand
cacaaaccguggagaccaa

SEQ ID NO: 503722 - RNA, 19 nt, Homo sapiens
  misc_RNA (1)...(19): siRNA sense strand
gauccuguuucaagcuuag

SEQ ID NO: 503723 - RNA, 19 nt, Homo sapiens
  misc_RNA (1)...(19): siRNA sense strand
gaagaucucagaggaacuc

SEQ ID NO: 503724 - RNA, 19 nt, Homo sapiens
  misc_RNA (1)...(19): siRNA sense strand
ucgagaccaucuucuacaa

SEQ ID NO: 503725 - RNA, 19 nt, Homo sapiens
  misc_RNA (1)...(19): siRNA sense strand
uggaggagguggagaagag

SEQ ID NO: 503726 - RNA, 19 nt, Homo sapiens
  misc_RNA (1)...(19): siRNA sense strand
gggaugaggaguuugagau

SEQ ID NO: 503727 - RNA, 19 nt, Homo sapiens
  misc_RNA (1)...(19): siRNA sense strand
ccaagugggaugaggaguu

SEQ ID NO: 503728 - RNA, 19 nt, Homo sapiens
  misc_RNA (1)...(19): siRNA sense strand
gcacgucuuccucuuuaca

SEQ ID NO: 503729 - RNA, 19 nt, Homo sapiens
  misc_RNA (1)...(19): siRNA sense strand
acacgucugucaccaugga

SEQ ID NO: 503730 - RNA, 19 nt, Homo sapiens
  misc_RNA (1)...(19): siRNA sense strand
ggagcacccuaguccuaca

SEQ ID NO: 503731 - RNA, 19 nt, Homo sapiens
  misc_RNA (1)...(19): siRNA sense strand
gcagaacucaagcggaaca

SEQ ID NO: 503732 - RNA, 19 nt, Homo sapiens
  misc_RNA (1)...(19): siRNA sense strand
gaucgagaccaucuucuac

SEQ ID NO: 503733 - RNA, 19 nt, Homo sapiens
  misc_RNA (1)...(19): siRNA sense strand
gaugaacgggaucaaagug

SEQ ID NO: 503734 - RNA, 19 nt, Homo sapiens
  misc_RNA (1)...(19): siRNA sense strand
ggucaacaaggacaacaau

SEQ ID NO: 503735 - RNA, 19 nt, Homo sapiens
  misc_RNA (1)...(19): siRNA sense strand
agaguuaccuguuccuacu

SEQ ID NO: 503736 - RNA, 19 nt, Homo sapiens
  misc_RNA (1)...(19): siRNA sense strand
aagaagaagauguuugaga

SEQ ID NO: 503737 - RNA, 19 nt, Homo sapiens
  misc_RNA (1)...(19): siRNA sense strand
acaaccaguuccagaagau

SEQ ID NO: 503738 - RNA, 19 nt, Homo sapiens
  misc_RNA (1)...(19): siRNA sense strand
cgaggagguuggcaucuac

SEQ ID NO: 503739 - RNA, 19 nt, Homo sapiens
  misc_RNA (1)...(19): siRNA sense strand
ccaucgagcgccugaagaa

SEQ ID NO: 503740 - RNA, 19 nt, Homo sapiens
  misc_RNA (1)...(19): siRNA sense strand
ggacgugauugagaugaac

SEQ ID NO: 503741 - RNA, 19 nt, Homo sapiens
  misc_RNA (1)...(19): siRNA sense strand
guuucaagcuuaggacugu

SEQ ID NO: 503742 - RNA, 19 nt, Homo sapiens
  misc_RNA (1)...(19): siRNA sense strand
gccgagauaugagccugaa

SEQ ID NO: 503743 - RNA, 19 nt, Homo sapiens
  misc_RNA (1)...(19): siRNA sense strand
uggauuccuucggcuauuu

SEQ ID NO: 503744 - RNA, 19 nt, Homo sapiens
  misc_RNA (1)...(19): siRNA sense strand
ggccagaacugcagcauug

SEQ ID NO: 503745 - RNA, 19 nt, Homo sapiens
  misc_RNA (1)...(19): siRNA sense strand
ggucgaagauggugugugu

SEQ ID NO: 503746 - RNA, 19 nt, Homo sapiens
  misc_RNA (1)...(19): siRNA sense strand
gugaggacgucauaguuaa

SEQ ID NO: 503747 - RNA, 19 nt, Homo sapiens
  misc_RNA (1)...(19): siRNA sense strand
ggugaggacgucauaguua

SEQ ID NO: 503748 - RNA, 19 nt, Homo sapiens
  misc_RNA (1)...(19): siRNA sense strand
ggagaagccacagguguuu

SEQ ID NO: 503749 - RNA, 19 nt, Homo sapiens
  misc_RNA (1)...(19): siRNA sense strand
gaucaacgcaggcauguac

SEQ ID NO: 503750 - RNA, 19 nt, Homo sapiens
  misc_RNA (1)...(19): siRNA sense strand
cugguggacuucugcaaua

SEQ ID NO: 503751 - RNA, 19 nt, Homo sapiens
  misc_RNA (1)...(19): siRNA sense strand
cuacguccauugagaagga

SEQ ID NO: 503752 - RNA, 19 nt, Homo sapiens
  misc_RNA (1)...(19): siRNA sense strand
gcuauaugccauggaguua

SEQ ID NO: 503753 - RNA, 19 nt, Homo sapiens
  misc_RNA (1)...(19): siRNA sense strand
cagccuacguccauugaga

SEQ ID NO: 503754 - RNA, 19 nt, Homo sapiens
  misc_RNA (1)...(19): siRNA sense strand
gccagagccucguaucauc

SEQ ID NO: 503755 - RNA, 19 nt, Homo sapiens
  misc_RNA (1)...(19): siRNA sense strand
ggaauccgaaucuccaugu

SEQ ID NO: 503756 - RNA, 19 nt, Homo sapiens
  misc_RNA (1)...(19): siRNA sense strand
aaggaggucuuccccauua

SEQ ID NO: 503757 - RNA, 19 nt, Homo sapiens
  misc_RNA (1)...(19): siRNA sense strand
guguuuguguccaauaaga

SEQ ID NO: 503758 - RNA, 19 nt, Homo sapiens
  misc_RNA (1)...(19): siRNA sense strand
ccucaacagugacgugauc

SEQ ID NO: 503759 - RNA, 19 nt, Homo sapiens
  misc_RNA (1)...(19): siRNA sense strand
gcccggauccguucccauu

SEQ ID NO: 503760 - RNA, 19 nt, Homo sapiens
  misc_RNA (1)...(19): siRNA sense strand
uauaugccauggaguuaca

SEQ ID NO: 503761 - RNA, 19 nt, Homo sapiens
  misc_RNA (1)...(19): siRNA sense strand
ugucgcaggugcuggagaa

SEQ ID NO: 503762 - RNA, 19 nt, Homo sapiens
  misc_RNA (1)...(19): siRNA sense strand
uggcuugaguccugcauug

SEQ ID NO: 503763 - RNA, 19 nt, Homo sapiens
  misc_RNA (1)...(19): siRNA sense strand
cccgugaccuacucucuga

SEQ ID NO: 503764 - RNA, 19 nt, Homo sapiens
  misc_RNA (1)...(19): siRNA sense strand
gaagaugguguguguaucc

SEQ ID NO: 503765 - RNA, 19 nt, Homo sapiens
  misc_RNA (1)...(19): siRNA sense strand
gcauggagaacgugacagu

SEQ ID NO: 503766 - RNA, 19 nt, Homo sapiens
  misc_RNA (1)...(19): siRNA sense strand
gaggacgucauaguuaaug

SEQ ID NO: 503767 - RNA, 19 nt, Homo sapiens
  misc_RNA (1)...(19): siRNA sense strand
cgcaggugcuggagaagga

SEQ ID NO: 503768 - RNA, 19 nt, Homo sapiens
  misc_RNA (1)...(19): siRNA sense strand
gggugaggacgucauaguu

SEQ ID NO: 503769 - RNA, 19 nt, Homo sapiens
  misc_RNA (1)...(19): siRNA sense strand
ucgaagaugguguguguau

SEQ ID NO: 503770 - RNA, 19 nt, Homo sapiens
  misc_RNA (1)...(19): siRNA sense strand
gugacgugaucugcgauuu

SEQ ID NO: 503771 - RNA, 19 nt, Homo sapiens
  misc_RNA (1)...(19): siRNA sense strand
gagcagaggcugggaaucc

SEQ ID NO: 503772 - RNA, 19 nt, Homo sapiens
  misc_RNA (1)...(19): siRNA sense strand
gaauccgaaucuccauguc

SEQ ID NO: 503773 - RNA, 19 nt, Homo sapiens
  misc_RNA (1)...(19): siRNA sense strand
uccaagccauggugcaguu

SEQ ID NO: 503774 - RNA, 19 nt, Homo sapiens
  misc_RNA (1)...(19): siRNA sense strand
gcugggugaggacgucaua

SEQ ID NO: 503775 - RNA, 19 nt, Homo sapiens
  misc_RNA (1)...(19): siRNA sense strand
cgaagaugguguguguauc

SEQ ID NO: 503776 - RNA, 19 nt, Homo sapiens
  misc_RNA (1)...(19): siRNA sense strand
caagucuauuggcgaguca

SEQ ID NO: 503777 - RNA, 19 nt, Homo sapiens
  misc_RNA (1)...(19): siRNA sense strand
ccagagccucguaucauca

SEQ ID NO: 503778 - RNA, 19 nt, Homo sapiens
  misc_RNA (1)...(19): siRNA sense strand
gagaagccacagguguuug

SEQ ID NO: 503779 - RNA, 19 nt, Homo sapiens
  misc_RNA (1)...(19): siRNA sense strand
ugguggacuucugcaauaa

SEQ ID NO: 503780 - RNA, 19 nt, Homo sapiens
  misc_RNA (1)...(19): siRNA sense strand
uggagaagccacagguguu

SEQ ID NO: 503781 - RNA, 19 nt, Homo sapiens
  misc_RNA (1)...(19): siRNA sense strand
ccaaggaggggcagcuaua

SEQ ID NO: 503782 - RNA, 19 nt, Homo sapiens
  misc_RNA (1)...(19): siRNA sense strand
gacgugaucugcgauuucc

SEQ ID NO: 503783 - RNA, 19 nt, Homo sapiens
  misc_RNA (1)...(19): siRNA sense strand
gcuucuggauggacauugg

SEQ ID NO: 503784 - RNA, 19 nt, Homo sapiens
  misc_RNA (1)...(19): siRNA sense strand
agguguuuguguccaauaa

SEQ ID NO: 503785 - RNA, 19 nt, Homo sapiens
  misc_RNA (1)...(19): siRNA sense strand
gacugcagacccuuucuuc

SEQ ID NO: 503786 - RNA, 19 nt, Homo sapiens
  misc_RNA (1)...(19): siRNA sense strand
gagccucguaucaucaugu

SEQ ID NO: 503787 - RNA, 19 nt, Homo sapiens
  misc_RNA (1)...(19): siRNA sense strand
caacgcaggcauguacauc

SEQ ID NO: 503788 - RNA, 19 nt, Homo sapiens
  misc_RNA (1)...(19): siRNA sense strand
ugacgugaucugcgauuuc

SEQ ID NO: 503789 - RNA, 19 nt, Homo sapiens
  misc_RNA (1)...(19): siRNA sense strand
ggccagaacugcagcauug

SEQ ID NO: 503790 - RNA, 19 nt, Homo sapiens
  misc_RNA (1)...(19): siRNA sense strand
ggucgaagauggugugugu

SEQ ID NO: 503791 - RNA, 19 nt, Homo sapiens
  misc_RNA (1)...(19): siRNA sense strand
gugaggacgucauaguuaa

SEQ ID NO: 503792 - RNA, 19 nt, Homo sapiens
  misc_RNA (1)...(19): siRNA sense strand
ggugaggacgucauaguua

SEQ ID NO: 503793 - RNA, 19 nt, Homo sapiens
  misc_RNA (1)...(19): siRNA sense strand
ggagaagccacagguguuu

SEQ ID NO: 503794 - RNA, 19 nt, Homo sapiens
  misc_RNA (1)...(19): siRNA sense strand
gaucaacgcaggcauguac

SEQ ID NO: 503795 - RNA, 19 nt, Homo sapiens
  misc_RNA (1)...(19): siRNA sense strand
cugguggacuucugcaaua

SEQ ID NO: 503796 - RNA, 19 nt, Homo sapiens
  misc_RNA (1)...(19): siRNA sense strand
cuacguccauugagaagga

SEQ ID NO: 503797 - RNA, 19 nt, Homo sapiens
  misc_RNA (1)...(19): siRNA sense strand
gcuauaugccauggaguua

SEQ ID NO: 503798 - RNA, 19 nt, Homo sapiens
  misc_RNA (1)...(19): siRNA sense strand
cagccuacguccauugaga

SEQ ID NO: 503799 - RNA, 19 nt, Homo sapiens
  misc_RNA (1)...(19): siRNA sense strand
gccagagccucguaucauc

SEQ ID NO: 503800 - RNA, 19 nt, Homo sapiens
  misc_RNA (1)...(19): siRNA sense strand
ggaauccgaaucuccaugu

SEQ ID NO: 503801 - RNA, 19 nt, Homo sapiens
  misc_RNA (1)...(19): siRNA sense strand
aaggaggucuuccccauua

SEQ ID NO: 503802 - RNA, 19 nt, Homo sapiens
  misc_RNA (1)...(19): siRNA sense strand
guguuuguguccaauaaga

SEQ ID NO: 503803 - RNA, 19 nt, Homo sapiens
  misc_RNA (1)...(19): siRNA sense strand
ccucaacagugacgugauc

SEQ ID NO: 503804 - RNA, 19 nt, Homo sapiens
  misc_RNA (1)...(19): siRNA sense strand
gcccggauccguucccauu

SEQ ID NO: 503805 - RNA, 19 nt, Homo sapiens
  misc_RNA (1)...(19): siRNA sense strand
uauaugccauggaguuaca

SEQ ID NO: 503806 - RNA, 19 nt, Homo sapiens
  misc_RNA (1)...(19): siRNA sense strand
ugucgcaggugcuggagaa

SEQ ID NO: 503807 - RNA, 19 nt, Homo sapiens
  misc_RNA (1)...(19): siRNA sense strand
uggcuugaguccugcauug

SEQ ID NO: 503808 - RNA, 19 nt, Homo sapiens
  misc_RNA (1)...(19): siRNA sense strand
cccgugaccuacucucuga

SEQ ID NO: 503809 - RNA, 19 nt, Homo sapiens
  misc_RNA (1)...(19): siRNA sense strand
gaagaugguguguguaucc

SEQ ID NO: 503810 - RNA, 19 nt, Homo sapiens
  misc_RNA (1)...(19): siRNA sense strand
gcauggagaacgugacagu

SEQ ID NO: 503811 - RNA, 19 nt, Homo sapiens
  misc_RNA (1)...(19): siRNA sense strand
gaggacgucauaguuaaug

SEQ ID NO: 503812 - RNA, 19 nt, Homo sapiens
  misc_RNA (1)...(19): siRNA sense strand
cgcaggugcuggagaagga

SEQ ID NO: 503813 - RNA, 19 nt, Homo sapiens
  misc_RNA (1)...(19): siRNA sense strand
gggugaggacgucauaguu

SEQ ID NO: 503814 - RNA, 19 nt, Homo sapiens
  misc_RNA (1)...(19): siRNA sense strand
ucgaagaugguguguguau

SEQ ID NO: 503815 - RNA, 19 nt, Homo sapiens
  misc_RNA (1)...(19): siRNA sense strand
gugacgugaucugcgauuu

SEQ ID NO: 503816 - RNA, 19 nt, Homo sapiens
  misc_RNA (1)...(19): siRNA sense strand
gagcagaggcugggaaucc

SEQ ID NO: 503817 - RNA, 19 nt, Homo sapiens
  misc_RNA (1)...(19): siRNA sense strand
gaauccgaaucuccauguc

SEQ ID NO: 503818 - RNA, 19 nt, Homo sapiens
  misc_RNA (1)...(19): siRNA sense strand
uccaagccauggugcaguu

SEQ ID NO: 503819 - RNA, 19 nt, Homo sapiens
  misc_RNA (1)...(19): siRNA sense strand
gcugggugaggacgucaua

SEQ ID NO: 503820 - RNA, 19 nt, Homo sapiens
  misc_RNA (1)...(19): siRNA sense strand
cgaagaugguguguguauc

SEQ ID NO: 503821 - RNA, 19 nt, Homo sapiens
  misc_RNA (1)...(19): siRNA sense strand
caagucuauuggcgaguca

SEQ ID NO: 503822 - RNA, 19 nt, Homo sapiens
  misc_RNA (1)...(19): siRNA sense strand
ccagagccucguaucauca

SEQ ID NO: 503823 - RNA, 19 nt, Homo sapiens
  misc_RNA (1)...(19): siRNA sense strand
gagaagccacagguguuug

SEQ ID NO: 503824 - RNA, 19 nt, Homo sapiens
  misc_RNA (1)...(19): siRNA sense strand
ugguggacuucugcaauaa

SEQ ID NO: 503825 - RNA, 19 nt, Homo sapiens
  misc_RNA (1)...(19): siRNA sense strand
uggagaagccacagguguu

SEQ ID NO: 503826 - RNA, 19 nt, Homo sapiens
  misc_RNA (1)...(19): siRNA sense strand
ccaaggaggggcagcuaua

SEQ ID NO: 503827 - RNA, 19 nt, Homo sapiens
  misc_RNA (1)...(19): siRNA sense strand
gacgugaucugcgauuucc

SEQ ID NO: 503828 - RNA, 19 nt, Homo sapiens
  misc_RNA (1)...(19): siRNA sense strand
gcuucuggauggacauugg

SEQ ID NO: 503829 - RNA, 19 nt, Homo sapiens
  misc_RNA (1)...(19): siRNA sense strand
agguguuuguguccaauaa

SEQ ID NO: 503830 - RNA, 19 nt, Homo sapiens
  misc_RNA (1)...(19): siRNA sense strand
gacugcagacccuuucuuc

SEQ ID NO: 503831 - RNA, 19 nt, Homo sapiens
  misc_RNA (1)...(19): siRNA sense strand
gagccucguaucaucaugu

SEQ ID NO: 503832 - RNA, 19 nt, Homo sapiens
  misc_RNA (1)...(19): siRNA sense strand
caacgcaggcauguacauc

SEQ ID NO: 503833 - RNA, 19 nt, Homo sapiens
  misc_RNA (1)...(19): siRNA sense strand
ugacgugaucugcgauuuc

SEQ ID NO: 503834 - RNA, 19 nt, Homo sapiens
  misc_RNA (1)...(19): siRNA sense strand
gaaacaaagucaacugaga

SEQ ID NO: 503835 - RNA, 19 nt, Homo sapiens
  misc_RNA (1)...(19): siRNA sense strand
acacuauccugaguaauua

SEQ ID NO: 503836 - RNA, 19 nt, Homo sapiens
  misc_RNA (1)...(19): siRNA sense strand
ugaacacuauccugaguaa

SEQ ID NO: 503837 - RNA, 19 nt, Homo sapiens
  misc_RNA (1)...(19): siRNA sense strand
gaguaauuaugaccacaaa

SEQ ID NO: 503838 - RNA, 19 nt, Homo sapiens
  misc_RNA (1)...(19): siRNA sense strand
gggaucaccucuguucuga

SEQ ID NO: 503839 - RNA, 19 nt, Homo sapiens
  misc_RNA (1)...(19): siRNA sense strand
ucacagccuuggauuucua

SEQ ID NO: 503840 - RNA, 19 nt, Homo sapiens
  misc_RNA (1)...(19): siRNA sense strand
ccgcgugucuccuauauca

SEQ ID NO: 503841 - RNA, 19 nt, Homo sapiens
  misc_RNA (1)...(19): siRNA sense strand
ggaauacaccauugacauc

SEQ ID NO: 503842 - RNA, 19 nt, Homo sapiens
  misc_RNA (1)...(19): siRNA sense strand
gcaagcguuuuaagaagua

SEQ ID NO: 503843 - RNA, 19 nt, Homo sapiens
  misc_RNA (1)...(19): siRNA sense strand
ucaacuuccugaucuacaa

SEQ ID NO: 503844 - RNA, 19 nt, Homo sapiens
  misc_RNA (1)...(19): siRNA sense strand
gaauacaccauugacauca

SEQ ID NO: 503845 - RNA, 19 nt, Homo sapiens
  misc_RNA (1)...(19): siRNA sense strand
cagacugaaucaaagaaug

SEQ ID NO: 503846 - RNA, 19 nt, Homo sapiens
  misc_RNA (1)...(19): siRNA sense strand
gugcucaacuuccugaucu

SEQ ID NO: 503847 - RNA, 19 nt, Homo sapiens
  misc_RNA (1)...(19): siRNA sense strand
gccaacaucaggaagcuuu

SEQ ID NO: 503848 - RNA, 19 nt, Homo sapiens
  misc_RNA (1)...(19): siRNA sense strand
acgaugcucuccuggguuu

SEQ ID NO: 503849 - RNA, 19 nt, Homo sapiens
  misc_RNA (1)...(19): siRNA sense strand
aaacuccgccauccucgua

SEQ ID NO: 503850 - RNA, 19 nt, Homo sapiens
  misc_RNA (1)...(19): siRNA sense strand
aaacugcgcccuggcauug

SEQ ID NO: 503851 - RNA, 19 nt, Homo sapiens
  misc_RNA (1)...(19): siRNA sense strand
cccagugacuuucuucuuc

SEQ ID NO: 503852 - RNA, 19 nt, Homo sapiens
  misc_RNA (1)...(19): siRNA sense strand
guaauuaugaccacaaacu

SEQ ID NO: 503853 - RNA, 19 nt, Homo sapiens
  misc_RNA (1)...(19): siRNA sense strand
agacugaaucaaagaauga

SEQ ID NO: 503854 - RNA, 19 nt, Homo sapiens
  misc_RNA (1)...(19): siRNA sense strand
caauggauucucacucuug

SEQ ID NO: 503855 - RNA, 19 nt, Homo sapiens
  misc_RNA (1)...(19): siRNA sense strand
ggaguuugcugugcucaac

SEQ ID NO: 503856 - RNA, 19 nt, Homo sapiens
  misc_RNA (1)...(19): siRNA sense strand
aacacuauccugaguaauu

SEQ ID NO: 503857 - RNA, 19 nt, Homo sapiens
  misc_RNA (1)...(19): siRNA sense strand
gccagauugucaccacuga

SEQ ID NO: 503858 - RNA, 19 nt, Homo sapiens
  misc_RNA (1)...(19): siRNA sense strand
uaucacagccuuggauuuc

SEQ ID NO: 503859 - RNA, 19 nt, Homo sapiens
  misc_RNA (1)...(19): siRNA sense strand
gcaggcgguuuggcuaugu

SEQ ID NO: 503860 - RNA, 19 nt, Homo sapiens
  misc_RNA (1)...(19): siRNA sense strand
ccaauggauucucacucuu

SEQ ID NO: 503861 - RNA, 19 nt, Homo sapiens
  misc_RNA (1)...(19): siRNA sense strand
ugaaaucaaugagaagaac

SEQ ID NO: 503862 - RNA, 19 nt, Homo sapiens
  misc_RNA (1)...(19): siRNA sense strand
uuacaggagugagcaacaa

SEQ ID NO: 503863 - RNA, 19 nt, Homo sapiens
  misc_RNA (1)...(19): siRNA sense strand
guuuggcuauguugccuuu

SEQ ID NO: 503864 - RNA, 19 nt, Homo sapiens
  misc_RNA (1)...(19): siRNA sense strand
gagacugggagcagaguug

SEQ ID NO: 503865 - RNA, 19 nt, Homo sapiens
  misc_RNA (1)...(19): siRNA sense strand
ccagugacuuucuucuucu

SEQ ID NO: 503866 - RNA, 19 nt, Homo sapiens
  misc_RNA (1)...(19): siRNA sense strand
gagcaggcgguuuggcuau

SEQ ID NO: 503867 - RNA, 19 nt, Homo sapiens
  misc_RNA (1)...(19): siRNA sense strand
gagcaacaaaacugaaaua

SEQ ID NO: 503868 - RNA, 19 nt, Homo sapiens
  misc_RNA (1)...(19): siRNA sense strand
acucuugcccucuaucuuu

SEQ ID NO: 503869 - RNA, 19 nt, Homo sapiens
  misc_RNA (1)...(19): siRNA sense strand
uuuccuauccugagaauga

SEQ ID NO: 503870 - RNA, 19 nt, Homo sapiens
  misc_RNA (1)...(19): siRNA sense strand
ucuaccgccuggauaacua

SEQ ID NO: 503871 - RNA, 19 nt, Homo sapiens
  misc_RNA (1)...(19): siRNA sense strand
ccuccuaggcaucuuauug

SEQ ID NO: 503872 - RNA, 19 nt, Homo sapiens
  misc_RNA (1)...(19): siRNA sense strand
ccauugacaucaucuucuc

SEQ ID NO: 503873 - RNA, 19 nt, Homo sapiens
  misc_RNA (1)...(19): siRNA sense strand
ugacuuucuucuucuucaa

SEQ ID NO: 503874 - RNA, 19 nt, Homo sapiens
  misc_RNA (1)...(19): siRNA sense strand
ccugaacacuauccugagu

SEQ ID NO: 503875 - RNA, 19 nt, Homo sapiens
  misc_RNA (1)...(19): siRNA sense strand
gugacuuucuucuucuuca

SEQ ID NO: 503876 - RNA, 19 nt, Homo sapiens
  misc_RNA (1)...(19): siRNA sense strand
gaggaaacaaagucaacug

SEQ ID NO: 503877 - RNA, 19 nt, Homo sapiens
  misc_RNA (1)...(19): siRNA sense strand
uaagaggacccacgagcau

SEQ ID NO: 503878 - RNA, 19 nt, Homo sapiens
  misc_RNA (1)...(19): siRNA sense strand
caaacugcgcccuggcauu

SEQ ID NO: 503879 - RNA, 19 nt, Homo sapiens
  misc_RNA (1)...(19): siRNA sense strand
gcccaugcuucuccuaaac

SEQ ID NO: 503880 - RNA, 19 nt, Homo sapiens
  misc_RNA (1)...(19): siRNA sense strand
aagcuggccugcugugagu

SEQ ID NO: 503881 - RNA, 19 nt, Homo sapiens
  misc_RNA (1)...(19): siRNA sense strand
uguggucacuguugagauc

SEQ ID NO: 503882 - RNA, 19 nt, Homo sapiens
  misc_RNA (1)...(19): siRNA sense strand
cuagggaucaccucuguuc

SEQ ID NO: 503883 - RNA, 19 nt, Homo sapiens
  misc_RNA (1)...(19): siRNA sense strand
aaaacuaugucccuucuuc

SEQ ID NO: 503884 - RNA, 19 nt, Homo sapiens
  misc_RNA (1)...(19): siRNA sense strand
ucucgcauccugaacacua

SEQ ID NO: 503885 - RNA, 19 nt, Homo sapiens
  misc_RNA (1)...(19): siRNA sense strand
gaugcucacuccacaugcu

SEQ ID NO: 503886 - RNA, 19 nt, Homo sapiens
  misc_RNA (1)...(19): siRNA sense strand
cgccauccucguaucaaua

SEQ ID NO: 503887 - RNA, 19 nt, Homo sapiens
  misc_RNA (1)...(19): siRNA sense strand
gcccuggcauuggagagaa

SEQ ID NO: 503888 - RNA, 19 nt, Homo sapiens
  misc_RNA (1)...(19): siRNA sense strand
aaugugagcaggcgguuug

SEQ ID NO: 503889 - RNA, 19 nt, Homo sapiens
  misc_RNA (1)...(19): siRNA sense strand
cccgugauguugucuaugg

SEQ ID NO: 503890 - RNA, 19 nt, Homo sapiens
  misc_RNA (1)...(19): siRNA sense strand
augcucagauuuccaaugg

SEQ ID NO: 503891 - RNA, 19 nt, Homo sapiens
  misc_RNA (1)...(19): siRNA sense strand
gaaaucaaugagaagaacu

SEQ ID NO: 503892 - RNA, 19 nt, Homo sapiens
  misc_RNA (1)...(19): siRNA sense strand
cccaguuggugacuucaug

SEQ ID NO: 503893 - RNA, 19 nt, Homo sapiens
  misc_RNA (1)...(19): siRNA sense strand
agccuuggauuucuauauc

SEQ ID NO: 503894 - RNA, 19 nt, Homo sapiens
  misc_RNA (1)...(19): siRNA sense strand
ucaccucuguucugaccau

SEQ ID NO: 503895 - RNA, 19 nt, Homo sapiens
  misc_RNA (1)...(19): siRNA sense strand
ucugcgcucuguuggaguu

SEQ ID NO: 503896 - RNA, 19 nt, Homo sapiens
  misc_RNA (1)...(19): siRNA sense strand
auacaccauugacaucauc

SEQ ID NO: 503897 - RNA, 19 nt, Homo sapiens
  misc_RNA (1)...(19): siRNA sense strand
gccauccucguaucaauag

SEQ ID NO: 503898 - RNA, 19 nt, Homo sapiens
  misc_RNA (1)...(19): siRNA sense strand
ccgccauccucguaucaau

SEQ ID NO: 503899 - RNA, 19 nt, Homo sapiens
  misc_RNA (1)...(19): siRNA sense strand
cagccuuggauuucuauau

SEQ ID NO: 503900 - RNA, 19 nt, Homo sapiens
  misc_RNA (1)...(19): siRNA sense strand
gcucuccuggguuuccuuu

SEQ ID NO: 503901 - RNA, 19 nt, Homo sapiens
  misc_RNA (1)...(19): siRNA sense strand
caccaugcccaaccagaug

SEQ ID NO: 503902 - RNA, 19 nt, Homo sapiens
  misc_RNA (1)...(19): siRNA sense strand
agaggacccacgagcauga

SEQ ID NO: 503903 - RNA, 19 nt, Homo sapiens
  misc_RNA (1)...(19): siRNA sense strand
gggaucaccucuguucuga

SEQ ID NO: 503904 - RNA, 19 nt, Homo sapiens
  misc_RNA (1)...(19): siRNA sense strand
ucacagccuuggauuucua

SEQ ID NO: 503905 - RNA, 19 nt, Homo sapiens
  misc_RNA (1)...(19): siRNA sense strand
ccgcgugucuccuauauca

SEQ ID NO: 503906 - RNA, 19 nt, Homo sapiens
  misc_RNA (1)...(19): siRNA sense strand
ggaauacaccauugacauc

SEQ ID NO: 503907 - RNA, 19 nt, Homo sapiens
  misc_RNA (1)...(19): siRNA sense strand
gcaagcguuuuaagaagua

SEQ ID NO: 503908 - RNA, 19 nt, Homo sapiens
  misc_RNA (1)...(19): siRNA sense strand
ucaacuuccugaucuacaa

SEQ ID NO: 503909 - RNA, 19 nt, Homo sapiens
  misc_RNA (1)...(19): siRNA sense strand
gaauacaccauugacauca

SEQ ID NO: 503910 - RNA, 19 nt, Homo sapiens
  misc_RNA (1)...(19): siRNA sense strand
gugcucaacuuccugaucu

SEQ ID NO: 503911 - RNA, 19 nt, Homo sapiens
  misc_RNA (1)...(19): siRNA sense strand
gccaacaucaggaagcuuu

SEQ ID NO: 503912 - RNA, 19 nt, Homo sapiens
  misc_RNA (1)...(19): siRNA sense strand
acgaugcucuccuggguuu

SEQ ID NO: 503913 - RNA, 19 nt, Homo sapiens
  misc_RNA (1)...(19): siRNA sense strand
aaacuccgccauccucgua

SEQ ID NO: 503914 - RNA, 19 nt, Homo sapiens
  misc_RNA (1)...(19): siRNA sense strand
cccagugacuuucuucuuc

SEQ ID NO: 503915 - RNA, 19 nt, Homo sapiens
  misc_RNA (1)...(19): siRNA sense strand
caauggauucucacucuug

SEQ ID NO: 503916 - RNA, 19 nt, Homo sapiens
  misc_RNA (1)...(19): siRNA sense strand
ggaguuugcugugcucaac

SEQ ID NO: 503917 - RNA, 19 nt, Homo sapiens
  misc_RNA (1)...(19): siRNA sense strand
ccaauggauucucacucuu

SEQ ID NO: 503918 - RNA, 19 nt, Homo sapiens
  misc_RNA (1)...(19): siRNA sense strand
gccagauugucaccacuga

SEQ ID NO: 503919 - RNA, 19 nt, Homo sapiens
  misc_RNA (1)...(19): siRNA sense strand
uaucacagccuuggauuuc

SEQ ID NO: 503920 - RNA, 19 nt, Homo sapiens
  misc_RNA (1)...(19): siRNA sense strand
gcaggcgguuuggcuaugu

SEQ ID NO: 503921 - RNA, 19 nt, Homo sapiens
  misc_RNA (1)...(19): siRNA sense strand
ugaaaucaaugagaagaac

SEQ ID NO: 503922 - RNA, 19 nt, Homo sapiens
  misc_RNA (1)...(19): siRNA sense strand
uuacaggagugagcaacaa

SEQ ID NO: 503923 - RNA, 19 nt, Homo sapiens
  misc_RNA (1)...(19): siRNA sense strand
guuuggcuauguugccuuu

SEQ ID NO: 503924 - RNA, 19 nt, Homo sapiens
  misc_RNA (1)...(19): siRNA sense strand
acucuugcccucuaucuuu

SEQ ID NO: 503925 - RNA, 19 nt, Homo sapiens
  misc_RNA (1)...(19): siRNA sense strand
ccagugacuuucuucuucu

SEQ ID NO: 503926 - RNA, 19 nt, Homo sapiens
  misc_RNA (1)...(19): siRNA sense strand
gagcaggcgguuuggcuau

SEQ ID NO: 503927 - RNA, 19 nt, Homo sapiens
  misc_RNA (1)...(19): siRNA sense strand
gagcaacaaaacugaaaua

SEQ ID NO: 503928 - RNA, 19 nt, Homo sapiens
  misc_RNA (1)...(19): siRNA sense strand
uuuccuauccugagaauga

SEQ ID NO: 503929 - RNA, 19 nt, Homo sapiens
  misc_RNA (1)...(19): siRNA sense strand
ucuaccgccuggauaacua

SEQ ID NO: 503930 - RNA, 19 nt, Homo sapiens
  misc_RNA (1)...(19): siRNA sense strand
ccauugacaucaucuucuc

SEQ ID NO: 503931 - RNA, 19 nt, Homo sapiens
  misc_RNA (1)...(19): siRNA sense strand
ugacuuucuucuucuucaa

SEQ ID NO: 503932 - RNA, 19 nt, Homo sapiens
  misc_RNA (1)...(19): siRNA sense strand
uaagaggacccacgagcau

SEQ ID NO: 503933 - RNA, 19 nt, Homo sapiens
  misc_RNA (1)...(19): siRNA sense strand
gugacuuucuucuucuuca

SEQ ID NO: 503934 - RNA, 19 nt, Homo sapiens
  misc_RNA (1)...(19): siRNA sense strand
gcccaugcuucuccuaaac

SEQ ID NO: 503935 - RNA, 19 nt, Homo sapiens
  misc_RNA (1)...(19): siRNA sense strand
aagcuggccugcugugagu

SEQ ID NO: 503936 - RNA, 19 nt, Homo sapiens
  misc_RNA (1)...(19): siRNA sense strand
aaaacuaugucccuucuuc

SEQ ID NO: 503937 - RNA, 19 nt, Homo sapiens
  misc_RNA (1)...(19): siRNA sense strand
cuagggaucaccucuguuc

SEQ ID NO: 503938 - RNA, 19 nt, Homo sapiens
  misc_RNA (1)...(19): siRNA sense strand
gaugcucacuccacaugcu

SEQ ID NO: 503939 - RNA, 19 nt, Homo sapiens
  misc_RNA (1)...(19): siRNA sense strand
cgccauccucguaucaaua

SEQ ID NO: 503940 - RNA, 19 nt, Homo sapiens
  misc_RNA (1)...(19): siRNA sense strand
aaugugagcaggcgguuug

SEQ ID NO: 503941 - RNA, 19 nt, Homo sapiens
  misc_RNA (1)...(19): siRNA sense strand
augcucagauuuccaaugg

SEQ ID NO: 503942 - RNA, 19 nt, Homo sapiens
  misc_RNA (1)...(19): siRNA sense strand
gaaaucaaugagaagaacu

SEQ ID NO: 503943 - RNA, 19 nt, Homo sapiens
  misc_RNA (1)...(19): siRNA sense strand
cccaguuggugacuucaug

SEQ ID NO: 503944 - RNA, 19 nt, Homo sapiens
  misc_RNA (1)...(19): siRNA sense strand
agccuuggauuucuauauc

SEQ ID NO: 503945 - RNA, 19 nt, Homo sapiens
  misc_RNA (1)...(19): siRNA sense strand
ucaccucuguucugaccau

SEQ ID NO: 503946 - RNA, 19 nt, Homo sapiens
  misc_RNA (1)...(19): siRNA sense strand
ucugcgcucuguuggaguu

SEQ ID NO: 503947 - RNA, 19 nt, Homo sapiens
  misc_RNA (1)...(19): siRNA sense strand
caccaugcccaaccagaug

SEQ ID NO: 503948 - RNA, 19 nt, Homo sapiens
  misc_RNA (1)...(19): siRNA sense strand
gccauccucguaucaauag

SEQ ID NO: 503949 - RNA, 19 nt, Homo sapiens
  misc_RNA (1)...(19): siRNA sense strand
ccgccauccucguaucaau

SEQ ID NO: 503950 - RNA, 19 nt, Homo sapiens
  misc_RNA (1)...(19): siRNA sense strand
cagccuuggauuucuauau

SEQ ID NO: 503951 - RNA, 19 nt, Homo sapiens
  misc_RNA (1)...(19): siRNA sense strand
auacaccauugacaucauc

SEQ ID NO: 503952 - RNA, 19 nt, Homo sapiens
  misc_RNA (1)...(19): siRNA sense strand
gcucuccuggguuuccuuu

SEQ ID NO: 503953 - RNA, 19 nt, Homo sapiens
  misc_RNA (1)...(19): siRNA sense strand
agaggacccacgagcauga

SEQ ID NO: 503954 - RNA, 19 nt, Homo sapiens
  misc_RNA (1)...(19): siRNA sense strand
gggaucaccucuguucuga

SEQ ID NO: 503955 - RNA, 19 nt, Homo sapiens
  misc_RNA (1)...(19): siRNA sense strand
ucacagccuuggauuucua

SEQ ID NO: 503956 - RNA, 19 nt, Homo sapiens
  misc_RNA (1)...(19): siRNA sense strand
ccgcgugucuccuauauca

SEQ ID NO: 503957 - RNA, 19 nt, Homo sapiens
  misc_RNA (1)...(19): siRNA sense strand
ggaauacaccauugacauc

SEQ ID NO: 503958 - RNA, 19 nt, Homo sapiens
  misc_RNA (1)...(19): siRNA sense strand
gcaagcguuuuaagaagua

SEQ ID NO: 503959 - RNA, 19 nt, Homo sapiens
  misc_RNA (1)...(19): siRNA sense strand
ucaacuuccugaucuacaa

SEQ ID NO: 503960 - RNA, 19 nt, Homo sapiens
  misc_RNA (1)...(19): siRNA sense strand
gaauacaccauugacauca

SEQ ID NO: 503961 - RNA, 19 nt, Homo sapiens
  misc_RNA (1)...(19): siRNA sense strand
gugcucaacuuccugaucu

SEQ ID NO: 503962 - RNA, 19 nt, Homo sapiens
  misc_RNA (1)...(19): siRNA sense strand
gccaacaucaggaagcuuu

SEQ ID NO: 503963 - RNA, 19 nt, Homo sapiens
  misc_RNA (1)...(19): siRNA sense strand
acgaugcucuccuggguuu

SEQ ID NO: 503964 - RNA, 19 nt, Homo sapiens
  misc_RNA (1)...(19): siRNA sense strand
aaacuccgccauccucgua

SEQ ID NO: 503965 - RNA, 19 nt, Homo sapiens
  misc_RNA (1)...(19): siRNA sense strand
cccagugacuuucuucuuc

SEQ ID NO: 503966 - RNA, 19 nt, Homo sapiens
  misc_RNA (1)...(19): siRNA sense strand
caauggauucucacucuug

SEQ ID NO: 503967 - RNA, 19 nt, Homo sapiens
  misc_RNA (1)...(19): siRNA sense strand
ggaguuugcugugcucaac

SEQ ID NO: 503968 - RNA, 19 nt, Homo sapiens
  misc_RNA (1)...(19): siRNA sense strand
ccaauggauucucacucuu

SEQ ID NO: 503969 - RNA, 19 nt, Homo sapiens
  misc_RNA (1)...(19): siRNA sense strand
gccagauugucaccacuga

SEQ ID NO: 503970 - RNA, 19 nt, Homo sapiens
  misc_RNA (1)...(19): siRNA sense strand
uaucacagccuuggauuuc

SEQ ID NO: 503971 - RNA, 19 nt, Homo sapiens
  misc_RNA (1)...(19): siRNA sense strand
gcaggcgguuuggcuaugu

SEQ ID NO: 503972 - RNA, 19 nt, Homo sapiens
  misc_RNA (1)...(19): siRNA sense strand
ugaaaucaaugagaagaac

SEQ ID NO: 503973 - RNA, 19 nt, Homo sapiens
  misc_RNA (1)...(19): siRNA sense strand
uuacaggagugagcaacaa

SEQ ID NO: 503974 - RNA, 19 nt, Homo sapiens
  misc_RNA (1)...(19): siRNA sense strand
guuuggcuauguugccuuu

SEQ ID NO: 503975 - RNA, 19 nt, Homo sapiens
  misc_RNA (1)...(19): siRNA sense strand
acucuugcccucuaucuuu

SEQ ID NO: 503976 - RNA, 19 nt, Homo sapiens
  misc_RNA (1)...(19): siRNA sense strand
ccagugacuuucuucuucu

SEQ ID NO: 503977 - RNA, 19 nt, Homo sapiens
  misc_RNA (1)...(19): siRNA sense strand
gagcaggcgguuuggcuau

SEQ ID NO: 503978 - RNA, 19 nt, Homo sapiens
  misc_RNA (1)...(19): siRNA sense strand
gagcaacaaaacugaaaua

SEQ ID NO: 503979 - RNA, 19 nt, Homo sapiens
  misc_RNA (1)...(19): siRNA sense strand
uuuccuauccugagaauga

SEQ ID NO: 503980 - RNA, 19 nt, Homo sapiens
  misc_RNA (1)...(19): siRNA sense strand
ucuaccgccuggauaacua

SEQ ID NO: 503981 - RNA, 19 nt, Homo sapiens
  misc_RNA (1)...(19): siRNA sense strand
ccauugacaucaucuucuc

SEQ ID NO: 503982 - RNA, 19 nt, Homo sapiens
  misc_RNA (1)...(19): siRNA sense strand
ugacuuucuucuucuucaa

SEQ ID NO: 503983 - RNA, 19 nt, Homo sapiens
  misc_RNA (1)...(19): siRNA sense strand
uaagaggacccacgagcau

SEQ ID NO: 503984 - RNA, 19 nt, Homo sapiens
  misc_RNA (1)...(19): siRNA sense strand
gugacuuucuucuucuuca

SEQ ID NO: 503985 - RNA, 19 nt, Homo sapiens
  misc_RNA (1)...(19): siRNA sense strand
gcccaugcuucuccuaaac

SEQ ID NO: 503986 - RNA, 19 nt, Homo sapiens
  misc_RNA (1)...(19): siRNA sense strand
aagcuggccugcugugagu

SEQ ID NO: 503987 - RNA, 19 nt, Homo sapiens
  misc_RNA (1)...(19): siRNA sense strand
aaaacuaugucccuucuuc

SEQ ID NO: 503988 - RNA, 19 nt, Homo sapiens
  misc_RNA (1)...(19): siRNA sense strand
cuagggaucaccucuguuc

SEQ ID NO: 503989 - RNA, 19 nt, Homo sapiens
  misc_RNA (1)...(19): siRNA sense strand
gaugcucacuccacaugcu

SEQ ID NO: 503990 - RNA, 19 nt, Homo sapiens
  misc_RNA (1)...(19): siRNA sense strand
cgccauccucguaucaaua

SEQ ID NO: 503991 - RNA, 19 nt, Homo sapiens
  misc_RNA (1)...(19): siRNA sense strand
aaugugagcaggcgguuug

SEQ ID NO: 503992 - RNA, 19 nt, Homo sapiens
  misc_RNA (1)...(19): siRNA sense strand
augcucagauuuccaaugg

SEQ ID NO: 503993 - RNA, 19 nt, Homo sapiens
  misc_RNA (1)...(19): siRNA sense strand
gaaaucaaugagaagaacu

SEQ ID NO: 503994 - RNA, 19 nt, Homo sapiens
  misc_RNA (1)...(19): siRNA sense strand
cccaguuggugacuucaug

SEQ ID NO: 503995 - RNA, 19 nt, Homo sapiens
  misc_RNA (1)...(19): siRNA sense strand
agccuuggauuucuauauc

SEQ ID NO: 503996 - RNA, 19 nt, Homo sapiens
  misc_RNA (1)...(19): siRNA sense strand
ucaccucuguucugaccau

SEQ ID NO: 503997 - RNA, 19 nt, Homo sapiens
  misc_RNA (1)...(19): siRNA sense strand
ucugcgcucuguuggaguu

SEQ ID NO: 503998 - RNA, 19 nt, Homo sapiens
  misc_RNA (1)...(19): siRNA sense strand
caccaugcccaaccagaug

SEQ ID NO: 503999 - RNA, 19 nt, Homo sapiens
  misc_RNA (1)...(19): siRNA sense strand
gccauccucguaucaauag

SEQ ID NO: 504000 - RNA, 19 nt, Homo sapiens
  misc_RNA (1)...(19): siRNA sense strand
ccgccauccucguaucaau

SEQ ID NO: 504001 - RNA, 19 nt, Homo sapiens
  misc_RNA (1)...(19): siRNA sense strand
cagccuuggauuucuauau

SEQ ID NO: 504002 - RNA, 19 nt, Homo sapiens
  misc_RNA (1)...(19): siRNA sense strand
auacaccauugacaucauc

SEQ ID NO: 504003 - RNA, 19 nt, Homo sapiens
  misc_RNA (1)...(19): siRNA sense strand
gcucuccuggguuuccuuu

SEQ ID NO: 504004 - RNA, 19 nt, Homo sapiens
  misc_RNA (1)...(19): siRNA sense strand
agaggacccacgagcauga

SEQ ID NO: 504005 - RNA, 19 nt, Homo sapiens
  misc_RNA (1)...(19): siRNA sense strand
gggaucaccucuguucuga

SEQ ID NO: 504006 - RNA, 19 nt, Homo sapiens
  misc_RNA (1)...(19): siRNA sense strand
ucacagccuuggauuucua

SEQ ID NO: 504007 - RNA, 19 nt, Homo sapiens
  misc_RNA (1)...(19): siRNA sense strand
ccgcgugucuccuauauca

SEQ ID NO: 504008 - RNA, 19 nt, Homo sapiens
  misc_RNA (1)...(19): siRNA sense strand
ggaauacaccauugacauc

SEQ ID NO: 504009 - RNA, 19 nt, Homo sapiens
  misc_RNA (1)...(19): siRNA sense strand
gcaagcguuuuaagaagua

SEQ ID NO: 504010 - RNA, 19 nt, Homo sapiens
  misc_RNA (1)...(19): siRNA sense strand
ucaacuuccugaucuacaa

SEQ ID NO: 504011 - RNA, 19 nt, Homo sapiens
  misc_RNA (1)...(19): siRNA sense strand
gaauacaccauugacauca

SEQ ID NO: 504012 - RNA, 19 nt, Homo sapiens
  misc_RNA (1)...(19): siRNA sense strand
gugcucaacuuccugaucu

SEQ ID NO: 504013 - RNA, 19 nt, Homo sapiens
  misc_RNA (1)...(19): siRNA sense strand
gccaacaucaggaagcuuu

SEQ ID NO: 504014 - RNA, 19 nt, Homo sapiens
  misc_RNA (1)...(19): siRNA sense strand
acgaugcucuccuggguuu

SEQ ID NO: 504015 - RNA, 19 nt, Homo sapiens
  misc_RNA (1)...(19): siRNA sense strand
aaacuccgccauccucgua

SEQ ID NO: 504016 - RNA, 19 nt, Homo sapiens
  misc_RNA (1)...(19): siRNA sense strand
cccagugacuuucuucuuc

SEQ ID NO: 504017 - RNA, 19 nt, Homo sapiens
  misc_RNA (1)...(19): siRNA sense strand
caauggauucucacucuug

SEQ ID NO: 504018 - RNA, 19 nt, Homo sapiens
  misc_RNA (1)...(19): siRNA sense strand
ggaguuugcugugcucaac

SEQ ID NO: 504019 - RNA, 19 nt, Homo sapiens
  misc_RNA (1)...(19): siRNA sense strand
ccaauggauucucacucuu

SEQ ID NO: 504020 - RNA, 19 nt, Homo sapiens
  misc_RNA (1)...(19): siRNA sense strand
gccagauugucaccacuga

SEQ ID NO: 504021 - RNA, 19 nt, Homo sapiens
  misc_RNA (1)...(19): siRNA sense strand
uaucacagccuuggauuuc

SEQ ID NO: 504022 - RNA, 19 nt, Homo sapiens
  misc_RNA (1)...(19): siRNA sense strand
gcaggcgguuuggcuaugu

SEQ ID NO: 504023 - RNA, 19 nt, Homo sapiens
  misc_RNA (1)...(19): siRNA sense strand
ugaaaucaaugagaagaac

SEQ ID NO: 504024 - RNA, 19 nt, Homo sapiens
  misc_RNA (1)...(19): siRNA sense strand
uuacaggagugagcaacaa

SEQ ID NO: 504025 - RNA, 19 nt, Homo sapiens
  misc_RNA (1)...(19): siRNA sense strand
guuuggcuauguugccuuu

SEQ ID NO: 504026 - RNA, 19 nt, Homo sapiens
  misc_RNA (1)...(19): siRNA sense strand
acucuugcccucuaucuuu

SEQ ID NO: 504027 - RNA, 19 nt, Homo sapiens
  misc_RNA (1)...(19): siRNA sense strand
ccagugacuuucuucuucu

SEQ ID NO: 504028 - RNA, 19 nt, Homo sapiens
  misc_RNA (1)...(19): siRNA sense strand
gagcaggcgguuuggcuau

SEQ ID NO: 504029 - RNA, 19 nt, Homo sapiens
  misc_RNA (1)...(19): siRNA sense strand
gagcaacaaaacugaaaua

SEQ ID NO: 504030 - RNA, 19 nt, Homo sapiens
  misc_RNA (1)...(19): siRNA sense strand
uuuccuauccugagaauga

SEQ ID NO: 504031 - RNA, 19 nt, Homo sapiens
  misc_RNA (1)...(19): siRNA sense strand
ucuaccgccuggauaacua

SEQ ID NO: 504032 - RNA, 19 nt, Homo sapiens
  misc_RNA (1)...(19): siRNA sense strand
ccauugacaucaucuucuc

SEQ ID NO: 504033 - RNA, 19 nt, Homo sapiens
  misc_RNA (1)...(19): siRNA sense strand
ugacuuucuucuucuucaa

SEQ ID NO: 504034 - RNA, 19 nt, Homo sapiens
  misc_RNA (1)...(19): siRNA sense strand
uaagaggacccacgagcau

SEQ ID NO: 504035 - RNA, 19 nt, Homo sapiens
  misc_RNA (1)...(19): siRNA sense strand
gugacuuucuucuucuuca

SEQ ID NO: 504036 - RNA, 19 nt, Homo sapiens
  misc_RNA (1)...(19): siRNA sense strand
gcccaugcuucuccuaaac

SEQ ID NO: 504037 - RNA, 19 nt, Homo sapiens
  misc_RNA (1)...(19): siRNA sense strand
aagcuggccugcugugagu

SEQ ID NO: 504038 - RNA, 19 nt, Homo sapiens
  misc_RNA (1)...(19): siRNA sense strand
aaaacuaugucccuucuuc

SEQ ID NO: 504039 - RNA, 19 nt, Homo sapiens
  misc_RNA (1)...(19): siRNA sense strand
cuagggaucaccucuguuc

SEQ ID NO: 504040 - RNA, 19 nt, Homo sapiens
  misc_RNA (1)...(19): siRNA sense strand
gaugcucacuccacaugcu

SEQ ID NO: 504041 - RNA, 19 nt, Homo sapiens
  misc_RNA (1)...(19): siRNA sense strand
cgccauccucguaucaaua

SEQ ID NO: 504042 - RNA, 19 nt, Homo sapiens
  misc_RNA (1)...(19): siRNA sense strand
aaugugagcaggcgguuug

SEQ ID NO: 504043 - RNA, 19 nt, Homo sapiens
  misc_RNA (1)...(19): siRNA sense strand
augcucagauuuccaaugg

SEQ ID NO: 504044 - RNA, 19 nt, Homo sapiens
  misc_RNA (1)...(19): siRNA sense strand
gaaaucaaugagaagaacu

SEQ ID NO: 504045 - RNA, 19 nt, Homo sapiens
  misc_RNA (1)...(19): siRNA sense strand
cccaguuggugacuucaug

SEQ ID NO: 504046 - RNA, 19 nt, Homo sapiens
  misc_RNA (1)...(19): siRNA sense strand
agccuuggauuucuauauc

SEQ ID NO: 504047 - RNA, 19 nt, Homo sapiens
  misc_RNA (1)...(19): siRNA sense strand
ucaccucuguucugaccau

SEQ ID NO: 504048 - RNA, 19 nt, Homo sapiens
  misc_RNA (1)...(19): siRNA sense strand
ucugcgcucuguuggaguu

SEQ ID NO: 504049 - RNA, 19 nt, Homo sapiens
  misc_RNA (1)...(19): siRNA sense strand
caccaugcccaaccagaug

SEQ ID NO: 504050 - RNA, 19 nt, Homo sapiens
  misc_RNA (1)...(19): siRNA sense strand
gccauccucguaucaauag

SEQ ID NO: 504051 - RNA, 19 nt, Homo sapiens
  misc_RNA (1)...(19): siRNA sense strand
ccgccauccucguaucaau

SEQ ID NO: 504052 - RNA, 19 nt, Homo sapiens
  misc_RNA (1)...(19): siRNA sense strand
cagccuuggauuucuauau

SEQ ID NO: 504053 - RNA, 19 nt, Homo sapiens
  misc_RNA (1)...(19): siRNA sense strand
auacaccauugacaucauc

SEQ ID NO: 504054 - RNA, 19 nt, Homo sapiens
  misc_RNA (1)...(19): siRNA sense strand
gcucuccuggguuuccuuu

SEQ ID NO: 504055 - RNA, 19 nt, Homo sapiens
  misc_RNA (1)...(19): siRNA sense strand
agaggacccacgagcauga

SEQ ID NO: 504056 - RNA, 19 nt, Homo sapiens
  misc_RNA (1)...(19): siRNA sense strand
ggacagugacgaacuauuu

SEQ ID NO: 504057 - RNA, 19 nt, Homo sapiens
  misc_RNA (1)...(19): siRNA sense strand
ccaaacaucuccacuaaca

SEQ ID NO: 504058 - RNA, 19 nt, Homo sapiens
  misc_RNA (1)...(19): siRNA sense strand
cgaacaagauuuaugagaa

SEQ ID NO: 504059 - RNA, 19 nt, Homo sapiens
  misc_RNA (1)...(19): siRNA sense strand
gaaaguguaccacaucugu

SEQ ID NO: 504060 - RNA, 19 nt, Homo sapiens
  misc_RNA (1)...(19): siRNA sense strand
ugacugugcugaucuacuu

SEQ ID NO: 504061 - RNA, 19 nt, Homo sapiens
  misc_RNA (1)...(19): siRNA sense strand
ccaaaguggucaucugugu

SEQ ID NO: 504062 - RNA, 19 nt, Homo sapiens
  misc_RNA (1)...(19): siRNA sense strand
ccagaucucuaccugaaga

SEQ ID NO: 504063 - RNA, 19 nt, Homo sapiens
  misc_RNA (1)...(19): siRNA sense strand
ucaauacaguggugaacuu

SEQ ID NO: 504064 - RNA, 19 nt, Homo sapiens
  misc_RNA (1)...(19): siRNA sense strand
ugaggacagugacgaacua

SEQ ID NO: 504065 - RNA, 19 nt, Homo sapiens
  misc_RNA (1)...(19): siRNA sense strand
guacauggccaucauacau

SEQ ID NO: 504066 - RNA, 19 nt, Homo sapiens
  misc_RNA (1)...(19): siRNA sense strand
ugacggcuguggccuuuga

SEQ ID NO: 504067 - RNA, 19 nt, Homo sapiens
  misc_RNA (1)...(19): siRNA sense strand
gagaaaguguaccacaucu

SEQ ID NO: 504068 - RNA, 19 nt, Homo sapiens
  misc_RNA (1)...(19): siRNA sense strand
ggccagagcauccgaacaa

SEQ ID NO: 504069 - RNA, 19 nt, Homo sapiens
  misc_RNA (1)...(19): siRNA sense strand
caagauuuaugagaaagug

SEQ ID NO: 504070 - RNA, 19 nt, Homo sapiens
  misc_RNA (1)...(19): siRNA sense strand
gagcauccgaacaagauuu

SEQ ID NO: 504071 - RNA, 19 nt, Homo sapiens
  misc_RNA (1)...(19): siRNA sense strand
caugacggcuguggccuuu

SEQ ID NO: 504072 - RNA, 19 nt, Homo sapiens
  misc_RNA (1)...(19): siRNA sense strand
gaucaucuuagcccacaaa

SEQ ID NO: 504073 - RNA, 19 nt, Homo sapiens
  misc_RNA (1)...(19): siRNA sense strand
gaaugaggacagugacgaa

SEQ ID NO: 504074 - RNA, 19 nt, Homo sapiens
  misc_RNA (1)...(19): siRNA sense strand
cuccauggcugcauucaau

SEQ ID NO: 504075 - RNA, 19 nt, Homo sapiens
  misc_RNA (1)...(19): siRNA sense strand
gcaacgugguagugaugug

SEQ ID NO: 504076 - RNA, 19 nt, Homo sapiens
  misc_RNA (1)...(19): siRNA sense strand
acccagaucucuaccugaa

SEQ ID NO: 504077 - RNA, 19 nt, Homo sapiens
  misc_RNA (1)...(19): siRNA sense strand
ccucggaacccaaucaguu

SEQ ID NO: 504078 - RNA, 19 nt, Homo sapiens
  misc_RNA (1)...(19): siRNA sense strand
cagagcauccgaacaagau

SEQ ID NO: 504079 - RNA, 19 nt, Homo sapiens
  misc_RNA (1)...(19): siRNA sense strand
gugauuggcuaugcauaca

SEQ ID NO: 504080 - RNA, 19 nt, Homo sapiens
  misc_RNA (1)...(19): siRNA sense strand
gcagagucgugugcaugau

SEQ ID NO: 504081 - RNA, 19 nt, Homo sapiens
  misc_RNA (1)...(19): siRNA sense strand
ccccaaacaucuccacuaa

SEQ ID NO: 504082 - RNA, 19 nt, Homo sapiens
  misc_RNA (1)...(19): siRNA sense strand
gcaagguggucaaaaugau

SEQ ID NO: 504083 - RNA, 19 nt, Homo sapiens
  misc_RNA (1)...(19): siRNA sense strand
ccuaugcuguccacaacga

SEQ ID NO: 504084 - RNA, 19 nt, Homo sapiens
  misc_RNA (1)...(19): siRNA sense strand
uaacaccucggaacccaau

SEQ ID NO: 504085 - RNA, 19 nt, Homo sapiens
  misc_RNA (1)...(19): siRNA sense strand
gcuguggccuuugauaggu

SEQ ID NO: 504086 - RNA, 19 nt, Homo sapiens
  misc_RNA (1)...(19): siRNA sense strand
gggcaacgugguagugaug

SEQ ID NO: 504087 - RNA, 19 nt, Homo sapiens
  misc_RNA (1)...(19): siRNA sense strand
ugagaaaguguaccacauc

SEQ ID NO: 504088 - RNA, 19 nt, Homo sapiens
  misc_RNA (1)...(19): siRNA sense strand
aaaguggucaucuguguca

SEQ ID NO: 504089 - RNA, 19 nt, Homo sapiens
  misc_RNA (1)...(19): siRNA sense strand
gugugacugugcugaucua

SEQ ID NO: 504090 - RNA, 19 nt, Homo sapiens
  misc_RNA (1)...(19): siRNA sense strand
caucaacccagaucucuac

SEQ ID NO: 504091 - RNA, 19 nt, Homo sapiens
  misc_RNA (1)...(19): siRNA sense strand
gguacuacggccuguucua

SEQ ID NO: 504092 - RNA, 19 nt, Homo sapiens
  misc_RNA (1)...(19): siRNA sense strand
ccagagcauccgaacaaga

SEQ ID NO: 504093 - RNA, 19 nt, Homo sapiens
  misc_RNA (1)...(19): siRNA sense strand
ucauuguggugaccucugu

SEQ ID NO: 504094 - RNA, 19 nt, Homo sapiens
  misc_RNA (1)...(19): siRNA sense strand
ccgaacaagauuuaugaga

SEQ ID NO: 504095 - RNA, 19 nt, Homo sapiens
  misc_RNA (1)...(19): siRNA sense strand
ucaccuaugcuguccacaa

SEQ ID NO: 504096 - RNA, 19 nt, Homo sapiens
  misc_RNA (1)...(19): siRNA sense strand
gaucucuaccugaagaagu

SEQ ID NO: 504097 - RNA, 19 nt, Homo sapiens
  misc_RNA (1)...(19): siRNA sense strand
uggcugcccuuccacaucu

SEQ ID NO: 504098 - RNA, 19 nt, Homo sapiens
  misc_RNA (1)...(19): siRNA sense strand
cauccgaacaagauuuaug

SEQ ID NO: 504099 - RNA, 19 nt, Homo sapiens
  misc_RNA (1)...(19): siRNA sense strand
gaucgaauggccagagcau

SEQ ID NO: 504100 - RNA, 19 nt, Homo sapiens
  misc_RNA (1)...(19): siRNA sense strand
gccgcugucuucgccagua

SEQ ID NO: 504101 - RNA, 19 nt, Homo sapiens
  misc_RNA (1)...(19): siRNA sense strand
caccuaugcuguccacaac

SEQ ID NO: 504102 - RNA, 19 nt, Homo sapiens
  misc_RNA (1)...(19): siRNA sense strand
guacuacggccuguucuac

SEQ ID NO: 504103 - RNA, 19 nt, Homo sapiens
  misc_RNA (1)...(19): siRNA sense strand
caucuacugcugccucaau

SEQ ID NO: 504104 - RNA, 19 nt, Homo sapiens
  misc_RNA (1)...(19): siRNA sense strand
acucagaccucuccccaaa

SEQ ID NO: 504105 - RNA, 19 nt, Homo sapiens
  misc_RNA (1)...(19): siRNA sense strand
ccacaacgaaugguacuac

SEQ ID NO: 504106 - RNA, 19 nt, Homo sapiens
  misc_RNA (1)...(19): siRNA sense strand
ggugauuggcuaugcauac

SEQ ID NO: 504107 - RNA, 19 nt, Homo sapiens
  misc_RNA (1)...(19): siRNA sense strand
ggacagugacgaacuauuu

SEQ ID NO: 504108 - RNA, 19 nt, Homo sapiens
  misc_RNA (1)...(19): siRNA sense strand
ccaaacaucuccacuaaca

SEQ ID NO: 504109 - RNA, 19 nt, Homo sapiens
  misc_RNA (1)...(19): siRNA sense strand
cgaacaagauuuaugagaa

SEQ ID NO: 504110 - RNA, 19 nt, Homo sapiens
  misc_RNA (1)...(19): siRNA sense strand
gaaaguguaccacaucugu

SEQ ID NO: 504111 - RNA, 19 nt, Homo sapiens
  misc_RNA (1)...(19): siRNA sense strand
ugacugugcugaucuacuu

SEQ ID NO: 504112 - RNA, 19 nt, Homo sapiens
  misc_RNA (1)...(19): siRNA sense strand
ccaaaguggucaucugugu

SEQ ID NO: 504113 - RNA, 19 nt, Homo sapiens
  misc_RNA (1)...(19): siRNA sense strand
ccagaucucuaccugaaga

SEQ ID NO: 504114 - RNA, 19 nt, Homo sapiens
  misc_RNA (1)...(19): siRNA sense strand
ucaauacaguggugaacuu

SEQ ID NO: 504115 - RNA, 19 nt, Homo sapiens
  misc_RNA (1)...(19): siRNA sense strand
ugaggacagugacgaacua

SEQ ID NO: 504116 - RNA, 19 nt, Homo sapiens
  misc_RNA (1)...(19): siRNA sense strand
guacauggccaucauacau

SEQ ID NO: 504117 - RNA, 19 nt, Homo sapiens
  misc_RNA (1)...(19): siRNA sense strand
ugacggcuguggccuuuga

SEQ ID NO: 504118 - RNA, 19 nt, Homo sapiens
  misc_RNA (1)...(19): siRNA sense strand
gagaaaguguaccacaucu

SEQ ID NO: 504119 - RNA, 19 nt, Homo sapiens
  misc_RNA (1)...(19): siRNA sense strand
ggccagagcauccgaacaa

SEQ ID NO: 504120 - RNA, 19 nt, Homo sapiens
  misc_RNA (1)...(19): siRNA sense strand
caagauuuaugagaaagug

SEQ ID NO: 504121 - RNA, 19 nt, Homo sapiens
  misc_RNA (1)...(19): siRNA sense strand
gagcauccgaacaagauuu

SEQ ID NO: 504122 - RNA, 19 nt, Homo sapiens
  misc_RNA (1)...(19): siRNA sense strand
caugacggcuguggccuuu

SEQ ID NO: 504123 - RNA, 19 nt, Homo sapiens
  misc_RNA (1)...(19): siRNA sense strand
gaucaucuuagcccacaaa

SEQ ID NO: 504124 - RNA, 19 nt, Homo sapiens
  misc_RNA (1)...(19): siRNA sense strand
gaaugaggacagugacgaa

SEQ ID NO: 504125 - RNA, 19 nt, Homo sapiens
  misc_RNA (1)...(19): siRNA sense strand
cuccauggcugcauucaau

SEQ ID NO: 504126 - RNA, 19 nt, Homo sapiens
  misc_RNA (1)...(19): siRNA sense strand
gcaacgugguagugaugug

SEQ ID NO: 504127 - RNA, 19 nt, Homo sapiens
  misc_RNA (1)...(19): siRNA sense strand
acccagaucucuaccugaa

SEQ ID NO: 504128 - RNA, 19 nt, Homo sapiens
  misc_RNA (1)...(19): siRNA sense strand
ccucggaacccaaucaguu

SEQ ID NO: 504129 - RNA, 19 nt, Homo sapiens
  misc_RNA (1)...(19): siRNA sense strand
cagagcauccgaacaagau

SEQ ID NO: 504130 - RNA, 19 nt, Homo sapiens
  misc_RNA (1)...(19): siRNA sense strand
gugauuggcuaugcauaca

SEQ ID NO: 504131 - RNA, 19 nt, Homo sapiens
  misc_RNA (1)...(19): siRNA sense strand
gcagagucgugugcaugau

SEQ ID NO: 504132 - RNA, 19 nt, Homo sapiens
  misc_RNA (1)...(19): siRNA sense strand
ccccaaacaucuccacuaa

SEQ ID NO: 504133 - RNA, 19 nt, Homo sapiens
  misc_RNA (1)...(19): siRNA sense strand
gcaagguggucaaaaugau

SEQ ID NO: 504134 - RNA, 19 nt, Homo sapiens
  misc_RNA (1)...(19): siRNA sense strand
ccuaugcuguccacaacga

SEQ ID NO: 504135 - RNA, 19 nt, Homo sapiens
  misc_RNA (1)...(19): siRNA sense strand
uaacaccucggaacccaau

SEQ ID NO: 504136 - RNA, 19 nt, Homo sapiens
  misc_RNA (1)...(19): siRNA sense strand
gcuguggccuuugauaggu

SEQ ID NO: 504137 - RNA, 19 nt, Homo sapiens
  misc_RNA (1)...(19): siRNA sense strand
gggcaacgugguagugaug

SEQ ID NO: 504138 - RNA, 19 nt, Homo sapiens
  misc_RNA (1)...(19): siRNA sense strand
ugagaaaguguaccacauc

SEQ ID NO: 504139 - RNA, 19 nt, Homo sapiens
  misc_RNA (1)...(19): siRNA sense strand
aaaguggucaucuguguca

SEQ ID NO: 504140 - RNA, 19 nt, Homo sapiens
  misc_RNA (1)...(19): siRNA sense strand
gugugacugugcugaucua

SEQ ID NO: 504141 - RNA, 19 nt, Homo sapiens
  misc_RNA (1)...(19): siRNA sense strand
caucaacccagaucucuac

SEQ ID NO: 504142 - RNA, 19 nt, Homo sapiens
  misc_RNA (1)...(19): siRNA sense strand
gguacuacggccuguucua

SEQ ID NO: 504143 - RNA, 19 nt, Homo sapiens
  misc_RNA (1)...(19): siRNA sense strand
ccagagcauccgaacaaga

SEQ ID NO: 504144 - RNA, 19 nt, Homo sapiens
  misc_RNA (1)...(19): siRNA sense strand
ucauuguggugaccucugu

SEQ ID NO: 504145 - RNA, 19 nt, Homo sapiens
  misc_RNA (1)...(19): siRNA sense strand
ccgaacaagauuuaugaga

SEQ ID NO: 504146 - RNA, 19 nt, Homo sapiens
  misc_RNA (1)...(19): siRNA sense strand
ucaccuaugcuguccacaa

SEQ ID NO: 504147 - RNA, 19 nt, Homo sapiens
  misc_RNA (1)...(19): siRNA sense strand
gaucucuaccugaagaagu

SEQ ID NO: 504148 - RNA, 19 nt, Homo sapiens
  misc_RNA (1)...(19): siRNA sense strand
uggcugcccuuccacaucu

SEQ ID NO: 504149 - RNA, 19 nt, Homo sapiens
  misc_RNA (1)...(19): siRNA sense strand
cauccgaacaagauuuaug

SEQ ID NO: 504150 - RNA, 19 nt, Homo sapiens
  misc_RNA (1)...(19): siRNA sense strand
gaucgaauggccagagcau

SEQ ID NO: 504151 - RNA, 19 nt, Homo sapiens
  misc_RNA (1)...(19): siRNA sense strand
gccgcugucuucgccagua

SEQ ID NO: 504152 - RNA, 19 nt, Homo sapiens
  misc_RNA (1)...(19): siRNA sense strand
caccuaugcuguccacaac

SEQ ID NO: 504153 - RNA, 19 nt, Homo sapiens
  misc_RNA (1)...(19): siRNA sense strand
guacuacggccuguucuac

SEQ ID NO: 504154 - RNA, 19 nt, Homo sapiens
  misc_RNA (1)...(19): siRNA sense strand
caucuacugcugccucaau

SEQ ID NO: 504155 - RNA, 19 nt, Homo sapiens
  misc_RNA (1)...(19): siRNA sense strand
acucagaccucuccccaaa

SEQ ID NO: 504156 - RNA, 19 nt, Homo sapiens
  misc_RNA (1)...(19): siRNA sense strand
ccacaacgaaugguacuac

SEQ ID NO: 504157 - RNA, 19 nt, Homo sapiens
  misc_RNA (1)...(19): siRNA sense strand
ggugauuggcuaugcauac

SEQ ID NO: 504158 - RNA, 19 nt, Homo sapiens
  misc_RNA (1)...(19): siRNA sense strand
ggacagugacgaacuauuu

SEQ ID NO: 504159 - RNA, 19 nt, Homo sapiens
  misc_RNA (1)...(19): siRNA sense strand
ccaaacaucuccacuaaca

SEQ ID NO: 504160 - RNA, 19 nt, Homo sapiens
  misc_RNA (1)...(19): siRNA sense strand
cgaacaagauuuaugagaa

SEQ ID NO: 504161 - RNA, 19 nt, Homo sapiens
  misc_RNA (1)...(19): siRNA sense strand
gaaaguguaccacaucugu

SEQ ID NO: 504162 - RNA, 19 nt, Homo sapiens
  misc_RNA (1)...(19): siRNA sense strand
ugacugugcugaucuacuu

SEQ ID NO: 504163 - RNA, 19 nt, Homo sapiens
  misc_RNA (1)...(19): siRNA sense strand
ccaaaguggucaucugugu

SEQ ID NO: 504164 - RNA, 19 nt, Homo sapiens
  misc_RNA (1)...(19): siRNA sense strand
ccagaucucuaccugaaga

SEQ ID NO: 504165 - RNA, 19 nt, Homo sapiens
  misc_RNA (1)...(19): siRNA sense strand
ucaauacaguggugaacuu

SEQ ID NO: 504166 - RNA, 19 nt, Homo sapiens
  misc_RNA (1)...(19): siRNA sense strand
ugaggacagugacgaacua

SEQ ID NO: 504167 - RNA, 19 nt, Homo sapiens
  misc_RNA (1)...(19): siRNA sense strand
guacauggccaucauacau

SEQ ID NO: 504168 - RNA, 19 nt, Homo sapiens
  misc_RNA (1)...(19): siRNA sense strand
ugacggcuguggccuuuga

SEQ ID NO: 504169 - RNA, 19 nt, Homo sapiens
  misc_RNA (1)...(19): siRNA sense strand
gagaaaguguaccacaucu

SEQ ID NO: 504170 - RNA, 19 nt, Homo sapiens
  misc_RNA (1)...(19): siRNA sense strand
ggccagagcauccgaacaa

SEQ ID NO: 504171 - RNA, 19 nt, Homo sapiens
  misc_RNA (1)...(19): siRNA sense strand
caagauuuaugagaaagug

SEQ ID NO: 504172 - RNA, 19 nt, Homo sapiens
  misc_RNA (1)...(19): siRNA sense strand
gagcauccgaacaagauuu

SEQ ID NO: 504173 - RNA, 19 nt, Homo sapiens
  misc_RNA (1)...(19): siRNA sense strand
caugacggcuguggccuuu

SEQ ID NO: 504174 - RNA, 19 nt, Homo sapiens
  misc_RNA (1)...(19): siRNA sense strand
gaucaucuuagcccacaaa

SEQ ID NO: 504175 - RNA, 19 nt, Homo sapiens
  misc_RNA (1)...(19): siRNA sense strand
gaaugaggacagugacgaa

SEQ ID NO: 504176 - RNA, 19 nt, Homo sapiens
  misc_RNA (1)...(19): siRNA sense strand
cuccauggcugcauucaau

SEQ ID NO: 504177 - RNA, 19 nt, Homo sapiens
  misc_RNA (1)...(19): siRNA sense strand
gcaacgugguagugaugug

SEQ ID NO: 504178 - RNA, 19 nt, Homo sapiens
  misc_RNA (1)...(19): siRNA sense strand
acccagaucucuaccugaa

SEQ ID NO: 504179 - RNA, 19 nt, Homo sapiens
  misc_RNA (1)...(19): siRNA sense strand
ccucggaacccaaucaguu

SEQ ID NO: 504180 - RNA, 19 nt, Homo sapiens
  misc_RNA (1)...(19): siRNA sense strand
cagagcauccgaacaagau

SEQ ID NO: 504181 - RNA, 19 nt, Homo sapiens
  misc_RNA (1)...(19): siRNA sense strand
gugauuggcuaugcauaca

SEQ ID NO: 504182 - RNA, 19 nt, Homo sapiens
  misc_RNA (1)...(19): siRNA sense strand
gcagagucgugugcaugau

SEQ ID NO: 504183 - RNA, 19 nt, Homo sapiens
  misc_RNA (1)...(19): siRNA sense strand
ccccaaacaucuccacuaa

SEQ ID NO: 504184 - RNA, 19 nt, Homo sapiens
  misc_RNA (1)...(19): siRNA sense strand
gcaagguggucaaaaugau

SEQ ID NO: 504185 - RNA, 19 nt, Homo sapiens
  misc_RNA (1)...(19): siRNA sense strand
ccuaugcuguccacaacga

SEQ ID NO: 504186 - RNA, 19 nt, Homo sapiens
  misc_RNA (1)...(19): siRNA sense strand
uaacaccucggaacccaau

SEQ ID NO: 504187 - RNA, 19 nt, Homo sapiens
  misc_RNA (1)...(19): siRNA sense strand
gcuguggccuuugauaggu

SEQ ID NO: 504188 - RNA, 19 nt, Homo sapiens
  misc_RNA (1)...(19): siRNA sense strand
gggcaacgugguagugaug

SEQ ID NO: 504189 - RNA, 19 nt, Homo sapiens
  misc_RNA (1)...(19): siRNA sense strand
ugagaaaguguaccacauc

SEQ ID NO: 504190 - RNA, 19 nt, Homo sapiens
  misc_RNA (1)...(19): siRNA sense strand
aaaguggucaucuguguca

SEQ ID NO: 504191 - RNA, 19 nt, Homo sapiens
  misc_RNA (1)...(19): siRNA sense strand
gugugacugugcugaucua

SEQ ID NO: 504192 - RNA, 19 nt, Homo sapiens
  misc_RNA (1)...(19): siRNA sense strand
caucaacccagaucucuac

SEQ ID NO: 504193 - RNA, 19 nt, Homo sapiens
  misc_RNA (1)...(19): siRNA sense strand
gguacuacggccuguucua

SEQ ID NO: 504194 - RNA, 19 nt, Homo sapiens
  misc_RNA (1)...(19): siRNA sense strand
ccagagcauccgaacaaga

SEQ ID NO: 504195 - RNA, 19 nt, Homo sapiens
  misc_RNA (1)...(19): siRNA sense strand
ucauuguggugaccucugu

SEQ ID NO: 504196 - RNA, 19 nt, Homo sapiens
  misc_RNA (1)...(19): siRNA sense strand
ccgaacaagauuuaugaga

SEQ ID NO: 504197 - RNA, 19 nt, Homo sapiens
  misc_RNA (1)...(19): siRNA sense strand
ucaccuaugcuguccacaa

SEQ ID NO: 504198 - RNA, 19 nt, Homo sapiens
  misc_RNA (1)...(19): siRNA sense strand
gaucucuaccugaagaagu

SEQ ID NO: 504199 - RNA, 19 nt, Homo sapiens
  misc_RNA (1)...(19): siRNA sense strand
uggcugcccuuccacaucu

SEQ ID NO: 504200 - RNA, 19 nt, Homo sapiens
  misc_RNA (1)...(19): siRNA sense strand
cauccgaacaagauuuaug

SEQ ID NO: 504201 - RNA, 19 nt, Homo sapiens
  misc_RNA (1)...(19): siRNA sense strand
gaucgaauggccagagcau

SEQ ID NO: 504202 - RNA, 19 nt, Homo sapiens
  misc_RNA (1)...(19): siRNA sense strand
gccgcugucuucgccagua

SEQ ID NO: 504203 - RNA, 19 nt, Homo sapiens
  misc_RNA (1)...(19): siRNA sense strand
caccuaugcuguccacaac

SEQ ID NO: 504204 - RNA, 19 nt, Homo sapiens
  misc_RNA (1)...(19): siRNA sense strand
guacuacggccuguucuac

SEQ ID NO: 504205 - RNA, 19 nt, Homo sapiens
  misc_RNA (1)...(19): siRNA sense strand
caucuacugcugccucaau

SEQ ID NO: 504206 - RNA, 19 nt, Homo sapiens
  misc_RNA (1)...(19): siRNA sense strand
acucagaccucuccccaaa

SEQ ID NO: 504207 - RNA, 19 nt, Homo sapiens
  misc_RNA (1)...(19): siRNA sense strand
ccacaacgaaugguacuac

SEQ ID NO: 504208 - RNA, 19 nt, Homo sapiens
  misc_RNA (1)...(19): siRNA sense strand
ggugauuggcuaugcauac

SEQ ID NO: 504209 - RNA, 19 nt, Homo sapiens
  misc_RNA (1)...(19): siRNA sense strand
ggacagugacgaacuauuu

SEQ ID NO: 504210 - RNA, 19 nt, Homo sapiens
  misc_RNA (1)...(19): siRNA sense strand
ccaaacaucuccacuaaca

SEQ ID NO: 504211 - RNA, 19 nt, Homo sapiens
  misc_RNA (1)...(19): siRNA sense strand
cgaacaagauuuaugagaa

SEQ ID NO: 504212 - RNA, 19 nt, Homo sapiens
  misc_RNA (1)...(19): siRNA sense strand
gaaaguguaccacaucugu

SEQ ID NO: 504213 - RNA, 19 nt, Homo sapiens
  misc_RNA (1)...(19): siRNA sense strand
ugacugugcugaucuacuu

SEQ ID NO: 504214 - RNA, 19 nt, Homo sapiens
  misc_RNA (1)...(19): siRNA sense strand
ccaaaguggucaucugugu

SEQ ID NO: 504215 - RNA, 19 nt, Homo sapiens
  misc_RNA (1)...(19): siRNA sense strand
ccagaucucuaccugaaga

SEQ ID NO: 504216 - RNA, 19 nt, Homo sapiens
  misc_RNA (1)...(19): siRNA sense strand
ucaauacaguggugaacuu

SEQ ID NO: 504217 - RNA, 19 nt, Homo sapiens
  misc_RNA (1)...(19): siRNA sense strand
ugaggacagugacgaacua

SEQ ID NO: 504218 - RNA, 19 nt, Homo sapiens
  misc_RNA (1)...(19): siRNA sense strand
guacauggccaucauacau

SEQ ID NO: 504219 - RNA, 19 nt, Homo sapiens
  misc_RNA (1)...(19): siRNA sense strand
ugacggcuguggccuuuga

SEQ ID NO: 504220 - RNA, 19 nt, Homo sapiens
  misc_RNA (1)...(19): siRNA sense strand
gagaaaguguaccacaucu

SEQ ID NO: 504221 - RNA, 19 nt, Homo sapiens
  misc_RNA (1)...(19): siRNA sense strand
ggccagagcauccgaacaa

SEQ ID NO: 504222 - RNA, 19 nt, Homo sapiens
  misc_RNA (1)...(19): siRNA sense strand
caagauuuaugagaaagug

SEQ ID NO: 504223 - RNA, 19 nt, Homo sapiens
  misc_RNA (1)...(19): siRNA sense strand
gagcauccgaacaagauuu

SEQ ID NO: 504224 - RNA, 19 nt, Homo sapiens
  misc_RNA (1)...(19): siRNA sense strand
caugacggcuguggccuuu

SEQ ID NO: 504225 - RNA, 19 nt, Homo sapiens
  misc_RNA (1)...(19): siRNA sense strand
gaucaucuuagcccacaaa

SEQ ID NO: 504226 - RNA, 19 nt, Homo sapiens
  misc_RNA (1)...(19): siRNA sense strand
gaaugaggacagugacgaa

SEQ ID NO: 504227 - RNA, 19 nt, Homo sapiens
  misc_RNA (1)...(19): siRNA sense strand
cuccauggcugcauucaau

SEQ ID NO: 504228 - RNA, 19 nt, Homo sapiens
  misc_RNA (1)...(19): siRNA sense strand
gcaacgugguagugaugug

SEQ ID NO: 504229 - RNA, 19 nt, Homo sapiens
  misc_RNA (1)...(19): siRNA sense strand
acccagaucucuaccugaa

SEQ ID NO: 504230 - RNA, 19 nt, Homo sapiens
  misc_RNA (1)...(19): siRNA sense strand
ccucggaacccaaucaguu

SEQ ID NO: 504231 - RNA, 19 nt, Homo sapiens
  misc_RNA (1)...(19): siRNA sense strand
cagagcauccgaacaagau

SEQ ID NO: 504232 - RNA, 19 nt, Homo sapiens
  misc_RNA (1)...(19): siRNA sense strand
gugauuggcuaugcauaca

SEQ ID NO: 504233 - RNA, 19 nt, Homo sapiens
  misc_RNA (1)...(19): siRNA sense strand
gcagagucgugugcaugau

SEQ ID NO: 504234 - RNA, 19 nt, Homo sapiens
  misc_RNA (1)...(19): siRNA sense strand
ccccaaacaucuccacuaa

SEQ ID NO: 504235 - RNA, 19 nt, Homo sapiens
  misc_RNA (1)...(19): siRNA sense strand
gcaagguggucaaaaugau

SEQ ID NO: 504236 - RNA, 19 nt, Homo sapiens
  misc_RNA (1)...(19): siRNA sense strand
ccuaugcuguccacaacga

SEQ ID NO: 504237 - RNA, 19 nt, Homo sapiens
  misc_RNA (1)...(19): siRNA sense strand
uaacaccucggaacccaau

SEQ ID NO: 504238 - RNA, 19 nt, Homo sapiens
  misc_RNA (1)...(19): siRNA sense strand
gcuguggccuuugauaggu

SEQ ID NO: 504239 - RNA, 19 nt, Homo sapiens
  misc_RNA (1)...(19): siRNA sense strand
gggcaacgugguagugaug

SEQ ID NO: 504240 - RNA, 19 nt, Homo sapiens
  misc_RNA (1)...(19): siRNA sense strand
ugagaaaguguaccacauc

SEQ ID NO: 504241 - RNA, 19 nt, Homo sapiens
  misc_RNA (1)...(19): siRNA sense strand
aaaguggucaucuguguca

SEQ ID NO: 504242 - RNA, 19 nt, Homo sapiens
  misc_RNA (1)...(19): siRNA sense strand
gugugacugugcugaucua

SEQ ID NO: 504243 - RNA, 19 nt, Homo sapiens
  misc_RNA (1)...(19): siRNA sense strand
caucaacccagaucucuac

SEQ ID NO: 504244 - RNA, 19 nt, Homo sapiens
  misc_RNA (1)...(19): siRNA sense strand
gguacuacggccuguucua

SEQ ID NO: 504245 - RNA, 19 nt, Homo sapiens
  misc_RNA (1)...(19): siRNA sense strand
ccagagcauccgaacaaga

SEQ ID NO: 504246 - RNA, 19 nt, Homo sapiens
  misc_RNA (1)...(19): siRNA sense strand
ucauuguggugaccucugu

SEQ ID NO: 504247 - RNA, 19 nt, Homo sapiens
  misc_RNA (1)...(19): siRNA sense strand
ccgaacaagauuuaugaga

SEQ ID NO: 504248 - RNA, 19 nt, Homo sapiens
  misc_RNA (1)...(19): siRNA sense strand
ucaccuaugcuguccacaa

SEQ ID NO: 504249 - RNA, 19 nt, Homo sapiens
  misc_RNA (1)...(19): siRNA sense strand
gaucucuaccugaagaagu

SEQ ID NO: 504250 - RNA, 19 nt, Homo sapiens
  misc_RNA (1)...(19): siRNA sense strand
uggcugcccuuccacaucu

SEQ ID NO: 504251 - RNA, 19 nt, Homo sapiens
  misc_RNA (1)...(19): siRNA sense strand
cauccgaacaagauuuaug

SEQ ID NO: 504252 - RNA, 19 nt, Homo sapiens
  misc_RNA (1)...(19): siRNA sense strand
gaucgaauggccagagcau

SEQ ID NO: 504253 - RNA, 19 nt, Homo sapiens
  misc_RNA (1)...(19): siRNA sense strand
gccgcugucuucgccagua

SEQ ID NO: 504254 - RNA, 19 nt, Homo sapiens
  misc_RNA (1)...(19): siRNA sense strand
caccuaugcuguccacaac

SEQ ID NO: 504255 - RNA, 19 nt, Homo sapiens
  misc_RNA (1)...(19): siRNA sense strand
guacuacggccuguucuac

SEQ ID NO: 504256 - RNA, 19 nt, Homo sapiens
  misc_RNA (1)...(19): siRNA sense strand
caucuacugcugccucaau

SEQ ID NO: 504257 - RNA, 19 nt, Homo sapiens
  misc_RNA (1)...(19): siRNA sense strand
acucagaccucuccccaaa

SEQ ID NO: 504258 - RNA, 19 nt, Homo sapiens
  misc_RNA (1)...(19): siRNA sense strand
ccacaacgaaugguacuac

SEQ ID NO: 504259 - RNA, 19 nt, Homo sapiens
  misc_RNA (1)...(19): siRNA sense strand
ggugauuggcuaugcauac

SEQ ID NO: 504260 - RNA, 19 nt, Homo sapiens
  misc_RNA (1)...(19): siRNA sense strand
ugaggaagaugauggauuu

SEQ ID NO: 504261 - RNA, 19 nt, Homo sapiens
  misc_RNA (1)...(19): siRNA sense strand
gccgagagcuuccuacuga

SEQ ID NO: 504262 - RNA, 19 nt, Homo sapiens
  misc_RNA (1)...(19): siRNA sense strand
ggaagaugauggauuugug

SEQ ID NO: 504263 - RNA, 19 nt, Homo sapiens
  misc_RNA (1)...(19): siRNA sense strand
caacaucguggauaaguuu

SEQ ID NO: 504264 - RNA, 19 nt, Homo sapiens
  misc_RNA (1)...(19): siRNA sense strand
gcagauaccccuaugaaua

SEQ ID NO: 504265 - RNA, 19 nt, Homo sapiens
  misc_RNA (1)...(19): siRNA sense strand
cuaggucgcuucucucuga

SEQ ID NO: 504266 - RNA, 19 nt, Homo sapiens
  misc_RNA (1)...(19): siRNA sense strand
gagagcugauuggagauua

SEQ ID NO: 504267 - RNA, 19 nt, Homo sapiens
  misc_RNA (1)...(19): siRNA sense strand
ucagcaacaucguggauaa

SEQ ID NO: 504268 - RNA, 19 nt, Homo sapiens
  misc_RNA (1)...(19): siRNA sense strand
gcaacaucguggauaaguu

SEQ ID NO: 504269 - RNA, 19 nt, Homo sapiens
  misc_RNA (1)...(19): siRNA sense strand
ggauaaguuugugauugua

SEQ ID NO: 504270 - RNA, 19 nt, Homo sapiens
  misc_RNA (1)...(19): siRNA sense strand
aaaaggaccucgucaugua

SEQ ID NO: 504271 - RNA, 19 nt, Homo sapiens
  misc_RNA (1)...(19): siRNA sense strand
ugagauguauauccugaaa

SEQ ID NO: 504272 - RNA, 19 nt, Homo sapiens
  misc_RNA (1)...(19): siRNA sense strand
caagagagucauccucauu

SEQ ID NO: 504273 - RNA, 19 nt, Homo sapiens
  misc_RNA (1)...(19): siRNA sense strand
gauuggagauuacucuaag

SEQ ID NO: 504274 - RNA, 19 nt, Homo sapiens
  misc_RNA (1)...(19): siRNA sense strand
guggauaaguuugugauug

SEQ ID NO: 504275 - RNA, 19 nt, Homo sapiens
  misc_RNA (1)...(19): siRNA sense strand
gaacgagaccgugcuguca

SEQ ID NO: 504276 - RNA, 19 nt, Homo sapiens
  misc_RNA (1)...(19): siRNA sense strand
gcaccaagaccucaaguac

SEQ ID NO: 504277 - RNA, 19 nt, Homo sapiens
  misc_RNA (1)...(19): siRNA sense strand
cuacuacccugagauguau

SEQ ID NO: 504278 - RNA, 19 nt, Homo sapiens
  misc_RNA (1)...(19): siRNA sense strand
ggaagccuuugcccagaga

SEQ ID NO: 504279 - RNA, 19 nt, Homo sapiens
  misc_RNA (1)...(19): siRNA sense strand
aaguacaucucaccagaaa

SEQ ID NO: 504280 - RNA, 19 nt, Homo sapiens
  misc_RNA (1)...(19): siRNA sense strand
aaaggaugaugaugcaguu

SEQ ID NO: 504281 - RNA, 19 nt, Homo sapiens
  misc_RNA (1)...(19): siRNA sense strand
uggauaaguuugugauugu

SEQ ID NO: 504282 - RNA, 19 nt, Homo sapiens
  misc_RNA (1)...(19): siRNA sense strand
gcagccagccggaucauuc

SEQ ID NO: 504283 - RNA, 19 nt, Homo sapiens
  misc_RNA (1)...(19): siRNA sense strand
cauccuagagagugacuua

SEQ ID NO: 504284 - RNA, 19 nt, Homo sapiens
  misc_RNA (1)...(19): siRNA sense strand
aggaugagcuaaagaccuu

SEQ ID NO: 504285 - RNA, 19 nt, Homo sapiens
  misc_RNA (1)...(19): siRNA sense strand
agagugacuuaaaggauga

SEQ ID NO: 504286 - RNA, 19 nt, Homo sapiens
  misc_RNA (1)...(19): siRNA sense strand
aauccucccugucgucuga

SEQ ID NO: 504287 - RNA, 19 nt, Homo sapiens
  misc_RNA (1)...(19): siRNA sense strand
gaaagcaccaagaccucaa

SEQ ID NO: 504288 - RNA, 19 nt, Homo sapiens
  misc_RNA (1)...(19): siRNA sense strand
ccuagagagugacuuaaag

SEQ ID NO: 504289 - RNA, 19 nt, Homo sapiens
  misc_RNA (1)...(19): siRNA sense strand
ggaaaaggaccucgucaug

SEQ ID NO: 504290 - RNA, 19 nt, Homo sapiens
  misc_RNA (1)...(19): siRNA sense strand
ucuacuacccugagaugua

SEQ ID NO: 504291 - RNA, 19 nt, Homo sapiens
  misc_RNA (1)...(19): siRNA sense strand
gauuguagacugcagauac

SEQ ID NO: 504292 - RNA, 19 nt, Homo sapiens
  misc_RNA (1)...(19): siRNA sense strand
accaagaccucaaguacau

SEQ ID NO: 504293 - RNA, 19 nt, Homo sapiens
  misc_RNA (1)...(19): siRNA sense strand
ccagccggaucauucgaaa

SEQ ID NO: 504294 - RNA, 19 nt, Homo sapiens
  misc_RNA (1)...(19): siRNA sense strand
gaaccacgaggccuucaag

SEQ ID NO: 504295 - RNA, 19 nt, Homo sapiens
  misc_RNA (1)...(19): siRNA sense strand
aagagagucauccucauuu

SEQ ID NO: 504296 - RNA, 19 nt, Homo sapiens
  misc_RNA (1)...(19): siRNA sense strand
cuuaaaggaugaugaugca

SEQ ID NO: 504297 - RNA, 19 nt, Homo sapiens
  misc_RNA (1)...(19): siRNA sense strand
gcaggaggcugaggaaccu

SEQ ID NO: 504298 - RNA, 19 nt, Homo sapiens
  misc_RNA (1)...(19): siRNA sense strand
uggcggagcagacguuuga

SEQ ID NO: 504299 - RNA, 19 nt, Homo sapiens
  misc_RNA (1)...(19): siRNA sense strand
gggauacugaggaagauga

SEQ ID NO: 504300 - RNA, 19 nt, Homo sapiens
  misc_RNA (1)...(19): siRNA sense strand
gaaaaggaccucgucaugu

SEQ ID NO: 504301 - RNA, 19 nt, Homo sapiens
  misc_RNA (1)...(19): siRNA sense strand
acugugaauucucaucuga

SEQ ID NO: 504302 - RNA, 19 nt, Homo sapiens
  misc_RNA (1)...(19): siRNA sense strand
guacaucucaccagaaacg

SEQ ID NO: 504303 - RNA, 19 nt, Homo sapiens
  misc_RNA (1)...(19): siRNA sense strand
caaguacaucucaccagaa

SEQ ID NO: 504304 - RNA, 19 nt, Homo sapiens
  misc_RNA (1)...(19): siRNA sense strand
ggcccuaggucgcuucucu

SEQ ID NO: 504305 - RNA, 19 nt, Homo sapiens
  misc_RNA (1)...(19): siRNA sense strand
agauguauauccugaaagg

SEQ ID NO: 504306 - RNA, 19 nt, Homo sapiens
  misc_RNA (1)...(19): siRNA sense strand
caucaagacugcggugaac

SEQ ID NO: 504307 - RNA, 19 nt, Homo sapiens
  misc_RNA (1)...(19): siRNA sense strand
ugacuuaaaggaugaugau

SEQ ID NO: 504308 - RNA, 19 nt, Homo sapiens
  misc_RNA (1)...(19): siRNA sense strand
ucaagacugcggugaacuu

SEQ ID NO: 504309 - RNA, 19 nt, Homo sapiens
  misc_RNA (1)...(19): siRNA sense strand
cuucaaggaugagcuaaag

SEQ ID NO: 504310 - RNA, 19 nt, Homo sapiens
  misc_RNA (1)...(19): siRNA sense strand
ugaaaggcggcuacaagga

SEQ ID NO: 504311 - RNA, 19 nt, Homo sapiens
  misc_RNA (1)...(19): siRNA sense strand
agaaccuccuggacaguga

SEQ ID NO: 504312 - RNA, 19 nt, Homo sapiens
  misc_RNA (1)...(19): siRNA sense strand
cacccgaacuucugugaac

SEQ ID NO: 504313 - RNA, 19 nt, Homo sapiens
  misc_RNA (1)...(19): siRNA sense strand
gauaaguuugugauuguag

SEQ ID NO: 504314 - RNA, 19 nt, Homo sapiens
  misc_RNA (1)...(19): siRNA sense strand
caucguggauaaguuugug

SEQ ID NO: 504315 - RNA, 19 nt, Homo sapiens
  misc_RNA (1)...(19): siRNA sense strand
cgagcaguuugccaucaga

SEQ ID NO: 504316 - RNA, 19 nt, Homo sapiens
  misc_RNA (1)...(19): siRNA sense strand
ugauuggagauuacucuaa

SEQ ID NO: 504317 - RNA, 19 nt, Homo sapiens
  misc_RNA (1)...(19): siRNA sense strand
ccuguagccuggacaagag

SEQ ID NO: 504318 - RNA, 19 nt, Homo sapiens
  misc_RNA (1)...(19): siRNA sense strand
cuccgaaucuucugaugca

SEQ ID NO: 504319 - RNA, 19 nt, Homo sapiens
  misc_RNA (1)...(19): siRNA sense strand
gcacccgaacuucugugaa

SEQ ID NO: 504320 - RNA, 19 nt, Homo sapiens
  misc_RNA (1)...(19): siRNA sense strand
cagauaccccuaugaauau

SEQ ID NO: 504321 - RNA, 19 nt, Homo sapiens
  misc_RNA (1)...(19): siRNA sense strand
uacagacaguagacggaaa

SEQ ID NO: 504322 - RNA, 19 nt, Homo sapiens
  misc_RNA (1)...(19): siRNA sense strand
gaccaccgagagcugauug

SEQ ID NO: 504323 - RNA, 19 nt, Homo sapiens
  misc_RNA (1)...(19): siRNA sense strand
ccugaaaggcggcuacaag

SEQ ID NO: 504324 - RNA, 19 nt, Homo sapiens
  misc_RNA (1)...(19): siRNA sense strand
acaagagagucauccucau

SEQ ID NO: 504325 - RNA, 19 nt, Homo sapiens
  misc_RNA (1)...(19): siRNA sense strand
caccaagaccucaaguaca

SEQ ID NO: 504326 - RNA, 19 nt, Homo sapiens
  misc_RNA (1)...(19): siRNA sense strand
uaaagaccuuccgccucaa

SEQ ID NO: 504327 - RNA, 19 nt, Homo sapiens
  misc_RNA (1)...(19): siRNA sense strand
ggaggcugaggaaccuaaa

SEQ ID NO: 504328 - RNA, 19 nt, Homo sapiens
  misc_RNA (1)...(19): siRNA sense strand
ccgagagcuuccuacugaa

SEQ ID NO: 504329 - RNA, 19 nt, Homo sapiens
  misc_RNA (1)...(19): siRNA sense strand
cgagagcugauuggagauu

SEQ ID NO: 504330 - RNA, 19 nt, Homo sapiens
  misc_RNA (1)...(19): siRNA sense strand
ugaggaagaugauggauuu

SEQ ID NO: 504331 - RNA, 19 nt, Homo sapiens
  misc_RNA (1)...(19): siRNA sense strand
gccgagagcuuccuacuga

SEQ ID NO: 504332 - RNA, 19 nt, Homo sapiens
  misc_RNA (1)...(19): siRNA sense strand
ggaagaugauggauuugug

SEQ ID NO: 504333 - RNA, 19 nt, Homo sapiens
  misc_RNA (1)...(19): siRNA sense strand
caacaucguggauaaguuu

SEQ ID NO: 504334 - RNA, 19 nt, Homo sapiens
  misc_RNA (1)...(19): siRNA sense strand
gcagauaccccuaugaaua

SEQ ID NO: 504335 - RNA, 19 nt, Homo sapiens
  misc_RNA (1)...(19): siRNA sense strand
cuaggucgcuucucucuga

SEQ ID NO: 504336 - RNA, 19 nt, Homo sapiens
  misc_RNA (1)...(19): siRNA sense strand
gagagcugauuggagauua

SEQ ID NO: 504337 - RNA, 19 nt, Homo sapiens
  misc_RNA (1)...(19): siRNA sense strand
ucagcaacaucguggauaa

SEQ ID NO: 504338 - RNA, 19 nt, Homo sapiens
  misc_RNA (1)...(19): siRNA sense strand
gcaacaucguggauaaguu

SEQ ID NO: 504339 - RNA, 19 nt, Homo sapiens
  misc_RNA (1)...(19): siRNA sense strand
ggauaaguuugugauugua

SEQ ID NO: 504340 - RNA, 19 nt, Homo sapiens
  misc_RNA (1)...(19): siRNA sense strand
aaaaggaccucgucaugua

SEQ ID NO: 504341 - RNA, 19 nt, Homo sapiens
  misc_RNA (1)...(19): siRNA sense strand
ugagauguauauccugaaa

SEQ ID NO: 504342 - RNA, 19 nt, Homo sapiens
  misc_RNA (1)...(19): siRNA sense strand
caagagagucauccucauu

SEQ ID NO: 504343 - RNA, 19 nt, Homo sapiens
  misc_RNA (1)...(19): siRNA sense strand
gauuggagauuacucuaag

SEQ ID NO: 504344 - RNA, 19 nt, Homo sapiens
  misc_RNA (1)...(19): siRNA sense strand
guggauaaguuugugauug

SEQ ID NO: 504345 - RNA, 19 nt, Homo sapiens
  misc_RNA (1)...(19): siRNA sense strand
gaacgagaccgugcuguca

SEQ ID NO: 504346 - RNA, 19 nt, Homo sapiens
  misc_RNA (1)...(19): siRNA sense strand
gcaccaagaccucaaguac

SEQ ID NO: 504347 - RNA, 19 nt, Homo sapiens
  misc_RNA (1)...(19): siRNA sense strand
cuacuacccugagauguau

SEQ ID NO: 504348 - RNA, 19 nt, Homo sapiens
  misc_RNA (1)...(19): siRNA sense strand
ggaagccuuugcccagaga

SEQ ID NO: 504349 - RNA, 19 nt, Homo sapiens
  misc_RNA (1)...(19): siRNA sense strand
aaguacaucucaccagaaa

SEQ ID NO: 504350 - RNA, 19 nt, Homo sapiens
  misc_RNA (1)...(19): siRNA sense strand
aaaggaugaugaugcaguu

SEQ ID NO: 504351 - RNA, 19 nt, Homo sapiens
  misc_RNA (1)...(19): siRNA sense strand
uggauaaguuugugauugu

SEQ ID NO: 504352 - RNA, 19 nt, Homo sapiens
  misc_RNA (1)...(19): siRNA sense strand
gcagccagccggaucauuc

SEQ ID NO: 504353 - RNA, 19 nt, Homo sapiens
  misc_RNA (1)...(19): siRNA sense strand
cauccuagagagugacuua

SEQ ID NO: 504354 - RNA, 19 nt, Homo sapiens
  misc_RNA (1)...(19): siRNA sense strand
aggaugagcuaaagaccuu

SEQ ID NO: 504355 - RNA, 19 nt, Homo sapiens
  misc_RNA (1)...(19): siRNA sense strand
agagugacuuaaaggauga

SEQ ID NO: 504356 - RNA, 19 nt, Homo sapiens
  misc_RNA (1)...(19): siRNA sense strand
aauccucccugucgucuga

SEQ ID NO: 504357 - RNA, 19 nt, Homo sapiens
  misc_RNA (1)...(19): siRNA sense strand
gaaagcaccaagaccucaa

SEQ ID NO: 504358 - RNA, 19 nt, Homo sapiens
  misc_RNA (1)...(19): siRNA sense strand
ccuagagagugacuuaaag

SEQ ID NO: 504359 - RNA, 19 nt, Homo sapiens
  misc_RNA (1)...(19): siRNA sense strand
ggaaaaggaccucgucaug

SEQ ID NO: 504360 - RNA, 19 nt, Homo sapiens
  misc_RNA (1)...(19): siRNA sense strand
ucuacuacccugagaugua

SEQ ID NO: 504361 - RNA, 19 nt, Homo sapiens
  misc_RNA (1)...(19): siRNA sense strand
gauuguagacugcagauac

SEQ ID NO: 504362 - RNA, 19 nt, Homo sapiens
  misc_RNA (1)...(19): siRNA sense strand
accaagaccucaaguacau

SEQ ID NO: 504363 - RNA, 19 nt, Homo sapiens
  misc_RNA (1)...(19): siRNA sense strand
ccagccggaucauucgaaa

SEQ ID NO: 504364 - RNA, 19 nt, Homo sapiens
  misc_RNA (1)...(19): siRNA sense strand
gaaccacgaggccuucaag

SEQ ID NO: 504365 - RNA, 19 nt, Homo sapiens
  misc_RNA (1)...(19): siRNA sense strand
aagagagucauccucauuu

SEQ ID NO: 504366 - RNA, 19 nt, Homo sapiens
  misc_RNA (1)...(19): siRNA sense strand
cuuaaaggaugaugaugca

SEQ ID NO: 504367 - RNA, 19 nt, Homo sapiens
  misc_RNA (1)...(19): siRNA sense strand
gcaggaggcugaggaaccu

SEQ ID NO: 504368 - RNA, 19 nt, Homo sapiens
  misc_RNA (1)...(19): siRNA sense strand
uggcggagcagacguuuga

SEQ ID NO: 504369 - RNA, 19 nt, Homo sapiens
  misc_RNA (1)...(19): siRNA sense strand
gggauacugaggaagauga

SEQ ID NO: 504370 - RNA, 19 nt, Homo sapiens
  misc_RNA (1)...(19): siRNA sense strand
gaaaaggaccucgucaugu

SEQ ID NO: 504371 - RNA, 19 nt, Homo sapiens
  misc_RNA (1)...(19): siRNA sense strand
acugugaauucucaucuga

SEQ ID NO: 504372 - RNA, 19 nt, Homo sapiens
  misc_RNA (1)...(19): siRNA sense strand
guacaucucaccagaaacg

SEQ ID NO: 504373 - RNA, 19 nt, Homo sapiens
  misc_RNA (1)...(19): siRNA sense strand
caaguacaucucaccagaa

SEQ ID NO: 504374 - RNA, 19 nt, Homo sapiens
  misc_RNA (1)...(19): siRNA sense strand
ggcccuaggucgcuucucu

SEQ ID NO: 504375 - RNA, 19 nt, Homo sapiens
  misc_RNA (1)...(19): siRNA sense strand
agauguauauccugaaagg

SEQ ID NO: 504376 - RNA, 19 nt, Homo sapiens
  misc_RNA (1)...(19): siRNA sense strand
caucaagacugcggugaac

SEQ ID NO: 504377 - RNA, 19 nt, Homo sapiens
  misc_RNA (1)...(19): siRNA sense strand
ugacuuaaaggaugaugau

SEQ ID NO: 504378 - RNA, 19 nt, Homo sapiens
  misc_RNA (1)...(19): siRNA sense strand
ucaagacugcggugaacuu

SEQ ID NO: 504379 - RNA, 19 nt, Homo sapiens
  misc_RNA (1)...(19): siRNA sense strand
cuucaaggaugagcuaaag

SEQ ID NO: 504380 - RNA, 19 nt, Homo sapiens
  misc_RNA (1)...(19): siRNA sense strand
ugaaaggcggcuacaagga

SEQ ID NO: 504381 - RNA, 19 nt, Homo sapiens
  misc_RNA (1)...(19): siRNA sense strand
agaaccuccuggacaguga

SEQ ID NO: 504382 - RNA, 19 nt, Homo sapiens
  misc_RNA (1)...(19): siRNA sense strand
cacccgaacuucugugaac

SEQ ID NO: 504383 - RNA, 19 nt, Homo sapiens
  misc_RNA (1)...(19): siRNA sense strand
gauaaguuugugauuguag

SEQ ID NO: 504384 - RNA, 19 nt, Homo sapiens
  misc_RNA (1)...(19): siRNA sense strand
caucguggauaaguuugug

SEQ ID NO: 504385 - RNA, 19 nt, Homo sapiens
  misc_RNA (1)...(19): siRNA sense strand
cgagcaguuugccaucaga

SEQ ID NO: 504386 - RNA, 19 nt, Homo sapiens
  misc_RNA (1)...(19): siRNA sense strand
ugauuggagauuacucuaa

SEQ ID NO: 504387 - RNA, 19 nt, Homo sapiens
  misc_RNA (1)...(19): siRNA sense strand
ccuguagccuggacaagag

SEQ ID NO: 504388 - RNA, 19 nt, Homo sapiens
  misc_RNA (1)...(19): siRNA sense strand
cuccgaaucuucugaugca

SEQ ID NO: 504389 - RNA, 19 nt, Homo sapiens
  misc_RNA (1)...(19): siRNA sense strand
gcacccgaacuucugugaa

SEQ ID NO: 504390 - RNA, 19 nt, Homo sapiens
  misc_RNA (1)...(19): siRNA sense strand
cagauaccccuaugaauau

SEQ ID NO: 504391 - RNA, 19 nt, Homo sapiens
  misc_RNA (1)...(19): siRNA sense strand
uacagacaguagacggaaa

SEQ ID NO: 504392 - RNA, 19 nt, Homo sapiens
  misc_RNA (1)...(19): siRNA sense strand
gaccaccgagagcugauug

SEQ ID NO: 504393 - RNA, 19 nt, Homo sapiens
  misc_RNA (1)...(19): siRNA sense strand
ccugaaaggcggcuacaag

SEQ ID NO: 504394 - RNA, 19 nt, Homo sapiens
  misc_RNA (1)...(19): siRNA sense strand
acaagagagucauccucau

SEQ ID NO: 504395 - RNA, 19 nt, Homo sapiens
  misc_RNA (1)...(19): siRNA sense strand
caccaagaccucaaguaca

SEQ ID NO: 504396 - RNA, 19 nt, Homo sapiens
  misc_RNA (1)...(19): siRNA sense strand
uaaagaccuuccgccucaa

SEQ ID NO: 504397 - RNA, 19 nt, Homo sapiens
  misc_RNA (1)...(19): siRNA sense strand
ggaggcugaggaaccuaaa

SEQ ID NO: 504398 - RNA, 19 nt, Homo sapiens
  misc_RNA (1)...(19): siRNA sense strand
ccgagagcuuccuacugaa

SEQ ID NO: 504399 - RNA, 19 nt, Homo sapiens
  misc_RNA (1)...(19): siRNA sense strand
cgagagcugauuggagauu

SEQ ID NO: 504400 - RNA, 19 nt, Homo sapiens
  misc_RNA (1)...(19): siRNA sense strand
ugaggaagaugauggauuu

SEQ ID NO: 504401 - RNA, 19 nt, Homo sapiens
  misc_RNA (1)...(19): siRNA sense strand
gccgagagcuuccuacuga

SEQ ID NO: 504402 - RNA, 19 nt, Homo sapiens
  misc_RNA (1)...(19): siRNA sense strand
ggaagaugauggauuugug

SEQ ID NO: 504403 - RNA, 19 nt, Homo sapiens
  misc_RNA (1)...(19): siRNA sense strand
caacaucguggauaaguuu

SEQ ID NO: 504404 - RNA, 19 nt, Homo sapiens
  misc_RNA (1)...(19): siRNA sense strand
gcagauaccccuaugaaua

SEQ ID NO: 504405 - RNA, 19 nt, Homo sapiens
  misc_RNA (1)...(19): siRNA sense strand
cuaggucgcuucucucuga

SEQ ID NO: 504406 - RNA, 19 nt, Homo sapiens
  misc_RNA (1)...(19): siRNA sense strand
gagagcugauuggagauua

SEQ ID NO: 504407 - RNA, 19 nt, Homo sapiens
  misc_RNA (1)...(19): siRNA sense strand
ucagcaacaucguggauaa

SEQ ID NO: 504408 - RNA, 19 nt, Homo sapiens
  misc_RNA (1)...(19): siRNA sense strand
gcaacaucguggauaaguu

SEQ ID NO: 504409 - RNA, 19 nt, Homo sapiens
  misc_RNA (1)...(19): siRNA sense strand
ggauaaguuugugauugua

SEQ ID NO: 504410 - RNA, 19 nt, Homo sapiens
  misc_RNA (1)...(19): siRNA sense strand
aaaaggaccucgucaugua

SEQ ID NO: 504411 - RNA, 19 nt, Homo sapiens
  misc_RNA (1)...(19): siRNA sense strand
ugagauguauauccugaaa

SEQ ID NO: 504412 - RNA, 19 nt, Homo sapiens
  misc_RNA (1)...(19): siRNA sense strand
caagagagucauccucauu

SEQ ID NO: 504413 - RNA, 19 nt, Homo sapiens
  misc_RNA (1)...(19): siRNA sense strand
gauuggagauuacucuaag

SEQ ID NO: 504414 - RNA, 19 nt, Homo sapiens
  misc_RNA (1)...(19): siRNA sense strand
guggauaaguuugugauug

SEQ ID NO: 504415 - RNA, 19 nt, Homo sapiens
  misc_RNA (1)...(19): siRNA sense strand
gaacgagaccgugcuguca

SEQ ID NO: 504416 - RNA, 19 nt, Homo sapiens
  misc_RNA (1)...(19): siRNA sense strand
gcaccaagaccucaaguac

SEQ ID NO: 504417 - RNA, 19 nt, Homo sapiens
  misc_RNA (1)...(19): siRNA sense strand
cuacuacccugagauguau

SEQ ID NO: 504418 - RNA, 19 nt, Homo sapiens
  misc_RNA (1)...(19): siRNA sense strand
ggaagccuuugcccagaga

SEQ ID NO: 504419 - RNA, 19 nt, Homo sapiens
  misc_RNA (1)...(19): siRNA sense strand
aaguacaucucaccagaaa

SEQ ID NO: 504420 - RNA, 19 nt, Homo sapiens
  misc_RNA (1)...(19): siRNA sense strand
aaaggaugaugaugcaguu

SEQ ID NO: 504421 - RNA, 19 nt, Homo sapiens
  misc_RNA (1)...(19): siRNA sense strand
uggauaaguuugugauugu

SEQ ID NO: 504422 - RNA, 19 nt, Homo sapiens
  misc_RNA (1)...(19): siRNA sense strand
gcagccagccggaucauuc

SEQ ID NO: 504423 - RNA, 19 nt, Homo sapiens
  misc_RNA (1)...(19): siRNA sense strand
cauccuagagagugacuua

SEQ ID NO: 504424 - RNA, 19 nt, Homo sapiens
  misc_RNA (1)...(19): siRNA sense strand
aggaugagcuaaagaccuu

SEQ ID NO: 504425 - RNA, 19 nt, Homo sapiens
  misc_RNA (1)...(19): siRNA sense strand
agagugacuuaaaggauga

SEQ ID NO: 504426 - RNA, 19 nt, Homo sapiens
  misc_RNA (1)...(19): siRNA sense strand
aauccucccugucgucuga

SEQ ID NO: 504427 - RNA, 19 nt, Homo sapiens
  misc_RNA (1)...(19): siRNA sense strand
gaaagcaccaagaccucaa

SEQ ID NO: 504428 - RNA, 19 nt, Homo sapiens
  misc_RNA (1)...(19): siRNA sense strand
ccuagagagugacuuaaag

SEQ ID NO: 504429 - RNA, 19 nt, Homo sapiens
  misc_RNA (1)...(19): siRNA sense strand
ggaaaaggaccucgucaug

SEQ ID NO: 504430 - RNA, 19 nt, Homo sapiens
  misc_RNA (1)...(19): siRNA sense strand
ucuacuacccugagaugua

SEQ ID NO: 504431 - RNA, 19 nt, Homo sapiens
  misc_RNA (1)...(19): siRNA sense strand
gauuguagacugcagauac

SEQ ID NO: 504432 - RNA, 19 nt, Homo sapiens
  misc_RNA (1)...(19): siRNA sense strand
accaagaccucaaguacau

SEQ ID NO: 504433 - RNA, 19 nt, Homo sapiens
  misc_RNA (1)...(19): siRNA sense strand
ccagccggaucauucgaaa

SEQ ID NO: 504434 - RNA, 19 nt, Homo sapiens
  misc_RNA (1)...(19): siRNA sense strand
gaaccacgaggccuucaag

SEQ ID NO: 504435 - RNA, 19 nt, Homo sapiens
  misc_RNA (1)...(19): siRNA sense strand
aagagagucauccucauuu

SEQ ID NO: 504436 - RNA, 19 nt, Homo sapiens
  misc_RNA (1)...(19): siRNA sense strand
cuuaaaggaugaugaugca

SEQ ID NO: 504437 - RNA, 19 nt, Homo sapiens
  misc_RNA (1)...(19): siRNA sense strand
gcaggaggcugaggaaccu

SEQ ID NO: 504438 - RNA, 19 nt, Homo sapiens
  misc_RNA (1)...(19): siRNA sense strand
uggcggagcagacguuuga

SEQ ID NO: 504439 - RNA, 19 nt, Homo sapiens
  misc_RNA (1)...(19): siRNA sense strand
gggauacugaggaagauga

SEQ ID NO: 504440 - RNA, 19 nt, Homo sapiens
  misc_RNA (1)...(19): siRNA sense strand
gaaaaggaccucgucaugu

SEQ ID NO: 504441 - RNA, 19 nt, Homo sapiens
  misc_RNA (1)...(19): siRNA sense strand
acugugaauucucaucuga

SEQ ID NO: 504442 - RNA, 19 nt, Homo sapiens
  misc_RNA (1)...(19): siRNA sense strand
guacaucucaccagaaacg

SEQ ID NO: 504443 - RNA, 19 nt, Homo sapiens
  misc_RNA (1)...(19): siRNA sense strand
caaguacaucucaccagaa

SEQ ID NO: 504444 - RNA, 19 nt, Homo sapiens
  misc_RNA (1)...(19): siRNA sense strand
ggcccuaggucgcuucucu

SEQ ID NO: 504445 - RNA, 19 nt, Homo sapiens
  misc_RNA (1)...(19): siRNA sense strand
agauguauauccugaaagg

SEQ ID NO: 504446 - RNA, 19 nt, Homo sapiens
  misc_RNA (1)...(19): siRNA sense strand
caucaagacugcggugaac

SEQ ID NO: 504447 - RNA, 19 nt, Homo sapiens
  misc_RNA (1)...(19): siRNA sense strand
ugacuuaaaggaugaugau

SEQ ID NO: 504448 - RNA, 19 nt, Homo sapiens
  misc_RNA (1)...(19): siRNA sense strand
ucaagacugcggugaacuu

SEQ ID NO: 504449 - RNA, 19 nt, Homo sapiens
  misc_RNA (1)...(19): siRNA sense strand
cuucaaggaugagcuaaag

SEQ ID NO: 504450 - RNA, 19 nt, Homo sapiens
  misc_RNA (1)...(19): siRNA sense strand
ugaaaggcggcuacaagga

SEQ ID NO: 504451 - RNA, 19 nt, Homo sapiens
  misc_RNA (1)...(19): siRNA sense strand
agaaccuccuggacaguga

SEQ ID NO: 504452 - RNA, 19 nt, Homo sapiens
  misc_RNA (1)...(19): siRNA sense strand
cacccgaacuucugugaac

SEQ ID NO: 504453 - RNA, 19 nt, Homo sapiens
  misc_RNA (1)...(19): siRNA sense strand
gauaaguuugugauuguag

SEQ ID NO: 504454 - RNA, 19 nt, Homo sapiens
  misc_RNA (1)...(19): siRNA sense strand
caucguggauaaguuugug

SEQ ID NO: 504455 - RNA, 19 nt, Homo sapiens
  misc_RNA (1)...(19): siRNA sense strand
cgagcaguuugccaucaga

SEQ ID NO: 504456 - RNA, 19 nt, Homo sapiens
  misc_RNA (1)...(19): siRNA sense strand
ugauuggagauuacucuaa

SEQ ID NO: 504457 - RNA, 19 nt, Homo sapiens
  misc_RNA (1)...(19): siRNA sense strand
ccuguagccuggacaagag

SEQ ID NO: 504458 - RNA, 19 nt, Homo sapiens
  misc_RNA (1)...(19): siRNA sense strand
cuccgaaucuucugaugca

SEQ ID NO: 504459 - RNA, 19 nt, Homo sapiens
  misc_RNA (1)...(19): siRNA sense strand
gcacccgaacuucugugaa

SEQ ID NO: 504460 - RNA, 19 nt, Homo sapiens
  misc_RNA (1)...(19): siRNA sense strand
cagauaccccuaugaauau

SEQ ID NO: 504461 - RNA, 19 nt, Homo sapiens
  misc_RNA (1)...(19): siRNA sense strand
uacagacaguagacggaaa

SEQ ID NO: 504462 - RNA, 19 nt, Homo sapiens
  misc_RNA (1)...(19): siRNA sense strand
gaccaccgagagcugauug

SEQ ID NO: 504463 - RNA, 19 nt, Homo sapiens
  misc_RNA (1)...(19): siRNA sense strand
ccugaaaggcggcuacaag

SEQ ID NO: 504464 - RNA, 19 nt, Homo sapiens
  misc_RNA (1)...(19): siRNA sense strand
acaagagagucauccucau

SEQ ID NO: 504465 - RNA, 19 nt, Homo sapiens
  misc_RNA (1)...(19): siRNA sense strand
caccaagaccucaaguaca

SEQ ID NO: 504466 - RNA, 19 nt, Homo sapiens
  misc_RNA (1)...(19): siRNA sense strand
uaaagaccuuccgccucaa

SEQ ID NO: 504467 - RNA, 19 nt, Homo sapiens
  misc_RNA (1)...(19): siRNA sense strand
ggaggcugaggaaccuaaa

SEQ ID NO: 504468 - RNA, 19 nt, Homo sapiens
  misc_RNA (1)...(19): siRNA sense strand
ccgagagcuuccuacugaa

SEQ ID NO: 504469 - RNA, 19 nt, Homo sapiens
  misc_RNA (1)...(19): siRNA sense strand
cgagagcugauuggagauu

SEQ ID NO: 504470 - RNA, 19 nt, Homo sapiens
  misc_RNA (1)...(19): siRNA sense strand
ugaggaagaugauggauuu

SEQ ID NO: 504471 - RNA, 19 nt, Homo sapiens
  misc_RNA (1)...(19): siRNA sense strand
gccgagagcuuccuacuga

SEQ ID NO: 504472 - RNA, 19 nt, Homo sapiens
  misc_RNA (1)...(19): siRNA sense strand
ggaagaugauggauuugug

SEQ ID NO: 504473 - RNA, 19 nt, Homo sapiens
  misc_RNA (1)...(19): siRNA sense strand
caacaucguggauaaguuu

SEQ ID NO: 504474 - RNA, 19 nt, Homo sapiens
  misc_RNA (1)...(19): siRNA sense strand
gcagauaccccuaugaaua

SEQ ID NO: 504475 - RNA, 19 nt, Homo sapiens
  misc_RNA (1)...(19): siRNA sense strand
cuaggucgcuucucucuga

SEQ ID NO: 504476 - RNA, 19 nt, Homo sapiens
  misc_RNA (1)...(19): siRNA sense strand
gagagcugauuggagauua

SEQ ID NO: 504477 - RNA, 19 nt, Homo sapiens
  misc_RNA (1)...(19): siRNA sense strand
ucagcaacaucguggauaa

SEQ ID NO: 504478 - RNA, 19 nt, Homo sapiens
  misc_RNA (1)...(19): siRNA sense strand
gcaacaucguggauaaguu

SEQ ID NO: 504479 - RNA, 19 nt, Homo sapiens
  misc_RNA (1)...(19): siRNA sense strand
ggauaaguuugugauugua

SEQ ID NO: 504480 - RNA, 19 nt, Homo sapiens
  misc_RNA (1)...(19): siRNA sense strand
aaaaggaccucgucaugua

SEQ ID NO: 504481 - RNA, 19 nt, Homo sapiens
  misc_RNA (1)...(19): siRNA sense strand
ugagauguauauccugaaa

SEQ ID NO: 504482 - RNA, 19 nt, Homo sapiens
  misc_RNA (1)...(19): siRNA sense strand
caagagagucauccucauu

SEQ ID NO: 504483 - RNA, 19 nt, Homo sapiens
  misc_RNA (1)...(19): siRNA sense strand
gauuggagauuacucuaag

SEQ ID NO: 504484 - RNA, 19 nt, Homo sapiens
  misc_RNA (1)...(19): siRNA sense strand
guggauaaguuugugauug

SEQ ID NO: 504485 - RNA, 19 nt, Homo sapiens
  misc_RNA (1)...(19): siRNA sense strand
gaacgagaccgugcuguca

SEQ ID NO: 504486 - RNA, 19 nt, Homo sapiens
  misc_RNA (1)...(19): siRNA sense strand
gcaccaagaccucaaguac

SEQ ID NO: 504487 - RNA, 19 nt, Homo sapiens
  misc_RNA (1)...(19): siRNA sense strand
cuacuacccugagauguau

SEQ ID NO: 504488 - RNA, 19 nt, Homo sapiens
  misc_RNA (1)...(19): siRNA sense strand
ggaagccuuugcccagaga

SEQ ID NO: 504489 - RNA, 19 nt, Homo sapiens
  misc_RNA (1)...(19): siRNA sense strand
aaguacaucucaccagaaa

SEQ ID NO: 504490 - RNA, 19 nt, Homo sapiens
  misc_RNA (1)...(19): siRNA sense strand
aaaggaugaugaugcaguu

SEQ ID NO: 504491 - RNA, 19 nt, Homo sapiens
  misc_RNA (1)...(19): siRNA sense strand
uggauaaguuugugauugu

SEQ ID NO: 504492 - RNA, 19 nt, Homo sapiens
  misc_RNA (1)...(19): siRNA sense strand
gcagccagccggaucauuc

SEQ ID NO: 504493 - RNA, 19 nt, Homo sapiens
  misc_RNA (1)...(19): siRNA sense strand
cauccuagagagugacuua

SEQ ID NO: 504494 - RNA, 19 nt, Homo sapiens
  misc_RNA (1)...(19): siRNA sense strand
aggaugagcuaaagaccuu

SEQ ID NO: 504495 - RNA, 19 nt, Homo sapiens
  misc_RNA (1)...(19): siRNA sense strand
agagugacuuaaaggauga

SEQ ID NO: 504496 - RNA, 19 nt, Homo sapiens
  misc_RNA (1)...(19): siRNA sense strand
aauccucccugucgucuga

SEQ ID NO: 504497 - RNA, 19 nt, Homo sapiens
  misc_RNA (1)...(19): siRNA sense strand
gaaagcaccaagaccucaa

SEQ ID NO: 504498 - RNA, 19 nt, Homo sapiens
  misc_RNA (1)...(19): siRNA sense strand
ccuagagagugacuuaaag

SEQ ID NO: 504499 - RNA, 19 nt, Homo sapiens
  misc_RNA (1)...(19): siRNA sense strand
ggaaaaggaccucgucaug

SEQ ID NO: 504500 - RNA, 19 nt, Homo sapiens
  misc_RNA (1)...(19): siRNA sense strand
ucuacuacccugagaugua

SEQ ID NO: 504501 - RNA, 19 nt, Homo sapiens
  misc_RNA (1)...(19): siRNA sense strand
gauuguagacugcagauac

SEQ ID NO: 504502 - RNA, 19 nt, Homo sapiens
  misc_RNA (1)...(19): siRNA sense strand
accaagaccucaaguacau

SEQ ID NO: 504503 - RNA, 19 nt, Homo sapiens
  misc_RNA (1)...(19): siRNA sense strand
ccagccggaucauucgaaa

SEQ ID NO: 504504 - RNA, 19 nt, Homo sapiens
  misc_RNA (1)...(19): siRNA sense strand
gaaccacgaggccuucaag

SEQ ID NO: 504505 - RNA, 19 nt, Homo sapiens
  misc_RNA (1)...(19): siRNA sense strand
aagagagucauccucauuu

SEQ ID NO: 504506 - RNA, 19 nt, Homo sapiens
  misc_RNA (1)...(19): siRNA sense strand
cuuaaaggaugaugaugca

SEQ ID NO: 504507 - RNA, 19 nt, Homo sapiens
  misc_RNA (1)...(19): siRNA sense strand
gcaggaggcugaggaaccu

SEQ ID NO: 504508 - RNA, 19 nt, Homo sapiens
  misc_RNA (1)...(19): siRNA sense strand
uggcggagcagacguuuga

SEQ ID NO: 504509 - RNA, 19 nt, Homo sapiens
  misc_RNA (1)...(19): siRNA sense strand
gggauacugaggaagauga

SEQ ID NO: 504510 - RNA, 19 nt, Homo sapiens
  misc_RNA (1)...(19): siRNA sense strand
gaaaaggaccucgucaugu

SEQ ID NO: 504511 - RNA, 19 nt, Homo sapiens
  misc_RNA (1)...(19): siRNA sense strand
acugugaauucucaucuga

SEQ ID NO: 504512 - RNA, 19 nt, Homo sapiens
  misc_RNA (1)...(19): siRNA sense strand
guacaucucaccagaaacg

SEQ ID NO: 504513 - RNA, 19 nt, Homo sapiens
  misc_RNA (1)...(19): siRNA sense strand
caaguacaucucaccagaa

SEQ ID NO: 504514 - RNA, 19 nt, Homo sapiens
  misc_RNA (1)...(19): siRNA sense strand
ggcccuaggucgcuucucu

SEQ ID NO: 504515 - RNA, 19 nt, Homo sapiens
  misc_RNA (1)...(19): siRNA sense strand
agauguauauccugaaagg

SEQ ID NO: 504516 - RNA, 19 nt, Homo sapiens
  misc_RNA (1)...(19): siRNA sense strand
caucaagacugcggugaac

SEQ ID NO: 504517 - RNA, 19 nt, Homo sapiens
  misc_RNA (1)...(19): siRNA sense strand
ugacuuaaaggaugaugau

SEQ ID NO: 504518 - RNA, 19 nt, Homo sapiens
  misc_RNA (1)...(19): siRNA sense strand
ucaagacugcggugaacuu

SEQ ID NO: 504519 - RNA, 19 nt, Homo sapiens
  misc_RNA (1)...(19): siRNA sense strand
cuucaaggaugagcuaaag

SEQ ID NO: 504520 - RNA, 19 nt, Homo sapiens
  misc_RNA (1)...(19): siRNA sense strand
ugaaaggcggcuacaagga

SEQ ID NO: 504521 - RNA, 19 nt, Homo sapiens
  misc_RNA (1)...(19): siRNA sense strand
agaaccuccuggacaguga

SEQ ID NO: 504522 - RNA, 19 nt, Homo sapiens
  misc_RNA (1)...(19): siRNA sense strand
cacccgaacuucugugaac

SEQ ID NO: 504523 - RNA, 19 nt, Homo sapiens
  misc_RNA (1)...(19): siRNA sense strand
gauaaguuugugauuguag

SEQ ID NO: 504524 - RNA, 19 nt, Homo sapiens
  misc_RNA (1)...(19): siRNA sense strand
caucguggauaaguuugug

SEQ ID NO: 504525 - RNA, 19 nt, Homo sapiens
  misc_RNA (1)...(19): siRNA sense strand
cgagcaguuugccaucaga

SEQ ID NO: 504526 - RNA, 19 nt, Homo sapiens
  misc_RNA (1)...(19): siRNA sense strand
ugauuggagauuacucuaa

SEQ ID NO: 504527 - RNA, 19 nt, Homo sapiens
  misc_RNA (1)...(19): siRNA sense strand
ccuguagccuggacaagag

SEQ ID NO: 504528 - RNA, 19 nt, Homo sapiens
  misc_RNA (1)...(19): siRNA sense strand
cuccgaaucuucugaugca

SEQ ID NO: 504529 - RNA, 19 nt, Homo sapiens
  misc_RNA (1)...(19): siRNA sense strand
gcacccgaacuucugugaa

SEQ ID NO: 504530 - RNA, 19 nt, Homo sapiens
  misc_RNA (1)...(19): siRNA sense strand
cagauaccccuaugaauau

SEQ ID NO: 504531 - RNA, 19 nt, Homo sapiens
  misc_RNA (1)...(19): siRNA sense strand
uacagacaguagacggaaa

SEQ ID NO: 504532 - RNA, 19 nt, Homo sapiens
  misc_RNA (1)...(19): siRNA sense strand
gaccaccgagagcugauug

SEQ ID NO: 504533 - RNA, 19 nt, Homo sapiens
  misc_RNA (1)...(19): siRNA sense strand
ccugaaaggcggcuacaag

SEQ ID NO: 504534 - RNA, 19 nt, Homo sapiens
  misc_RNA (1)...(19): siRNA sense strand
acaagagagucauccucau

SEQ ID NO: 504535 - RNA, 19 nt, Homo sapiens
  misc_RNA (1)...(19): siRNA sense strand
caccaagaccucaaguaca

SEQ ID NO: 504536 - RNA, 19 nt, Homo sapiens
  misc_RNA (1)...(19): siRNA sense strand
uaaagaccuuccgccucaa

SEQ ID NO: 504537 - RNA, 19 nt, Homo sapiens
  misc_RNA (1)...(19): siRNA sense strand
ggaggcugaggaaccuaaa

SEQ ID NO: 504538 - RNA, 19 nt, Homo sapiens
  misc_RNA (1)...(19): siRNA sense strand
ccgagagcuuccuacugaa

SEQ ID NO: 504539 - RNA, 19 nt, Homo sapiens
  misc_RNA (1)...(19): siRNA sense strand
cgagagcugauuggagauu

SEQ ID NO: 504540 - RNA, 19 nt, Homo sapiens
  misc_RNA (1)...(19): siRNA sense strand
ggaagaagauugcuaccau

SEQ ID NO: 504541 - RNA, 19 nt, Homo sapiens
  misc_RNA (1)...(19): siRNA sense strand
ccacugaggucuucacuuc

SEQ ID NO: 504542 - RNA, 19 nt, Homo sapiens
  misc_RNA (1)...(19): siRNA sense strand
gaaggaggcuggaauugag

SEQ ID NO: 504543 - RNA, 19 nt, Homo sapiens
  misc_RNA (1)...(19): siRNA sense strand
ccaggaagaugaauacaug

SEQ ID NO: 504544 - RNA, 19 nt, Homo sapiens
  misc_RNA (1)...(19): siRNA sense strand
gaaucuuccuugcuuauga

SEQ ID NO: 504545 - RNA, 19 nt, Homo sapiens
  misc_RNA (1)...(19): siRNA sense strand
ggagaaccgugaacuggaa

SEQ ID NO: 504546 - RNA, 19 nt, Homo sapiens
  misc_RNA (1)...(19): siRNA sense strand
gggcauggcuaucuacaau

SEQ ID NO: 504547 - RNA, 19 nt, Homo sapiens
  misc_RNA (1)...(19): siRNA sense strand
acaagaagauuggcuacua

SEQ ID NO: 504548 - RNA, 19 nt, Homo sapiens
  misc_RNA (1)...(19): siRNA sense strand
ccacugagaagaucaauga

SEQ ID NO: 504549 - RNA, 19 nt, Homo sapiens
  misc_RNA (1)...(19): siRNA sense strand
caagaagauuggcuacuau

SEQ ID NO: 504550 - RNA, 19 nt, Homo sapiens
  misc_RNA (1)...(19): siRNA sense strand
guacaaggagcgucucuuu

SEQ ID NO: 504551 - RNA, 19 nt, Homo sapiens
  misc_RNA (1)...(19): siRNA sense strand
gagugcauuugcuuuauaa

SEQ ID NO: 504552 - RNA, 19 nt, Homo sapiens
  misc_RNA (1)...(19): siRNA sense strand
gccaauacccgcagcauuu

SEQ ID NO: 504553 - RNA, 19 nt, Homo sapiens
  misc_RNA (1)...(19): siRNA sense strand
cgagugcauuugcuuuaua

SEQ ID NO: 504554 - RNA, 19 nt, Homo sapiens
  misc_RNA (1)...(19): siRNA sense strand
gcauuugcuuuauaaguga

SEQ ID NO: 504555 - RNA, 19 nt, Homo sapiens
  misc_RNA (1)...(19): siRNA sense strand
gcauggcuaucuacaaugu

SEQ ID NO: 504556 - RNA, 19 nt, Homo sapiens
  misc_RNA (1)...(19): siRNA sense strand
caacgacccuaucaagauc

SEQ ID NO: 504557 - RNA, 19 nt, Homo sapiens
  misc_RNA (1)...(19): siRNA sense strand
aaagaucauugcugagaaa

SEQ ID NO: 504558 - RNA, 19 nt, Homo sapiens
  misc_RNA (1)...(19): siRNA sense strand
ggaugcagccuuugccuuu

SEQ ID NO: 504559 - RNA, 19 nt, Homo sapiens
  misc_RNA (1)...(19): siRNA sense strand
gcacuggcccugaacaaga

SEQ ID NO: 504560 - RNA, 19 nt, Homo sapiens
  misc_RNA (1)...(19): siRNA sense strand
gauauugacgucucuauuc

SEQ ID NO: 504561 - RNA, 19 nt, Homo sapiens
  misc_RNA (1)...(19): siRNA sense strand
caacaugacaucccaggaa

SEQ ID NO: 504562 - RNA, 19 nt, Homo sapiens
  misc_RNA (1)...(19): siRNA sense strand
gaucauugcugagaaagag

SEQ ID NO: 504563 - RNA, 19 nt, Homo sapiens
  misc_RNA (1)...(19): siRNA sense strand
ggaggaaccuaaggaagau

SEQ ID NO: 504564 - RNA, 19 nt, Homo sapiens
  misc_RNA (1)...(19): siRNA sense strand
gggcuacgguuccauguuc

SEQ ID NO: 504565 - RNA, 19 nt, Homo sapiens
  misc_RNA (1)...(19): siRNA sense strand
acaauugguucaagaucua

SEQ ID NO: 504566 - RNA, 19 nt, Homo sapiens
  misc_RNA (1)...(19): siRNA sense strand
ggaagaaguacgucugguu

SEQ ID NO: 504567 - RNA, 19 nt, Homo sapiens
  misc_RNA (1)...(19): siRNA sense strand
gguggcagcuacaagaaga

SEQ ID NO: 504568 - RNA, 19 nt, Homo sapiens
  misc_RNA (1)...(19): siRNA sense strand
gacaauugguucaagaucu

SEQ ID NO: 504569 - RNA, 19 nt, Homo sapiens
  misc_RNA (1)...(19): siRNA sense strand
cggauggcauggacgcuua

SEQ ID NO: 504570 - RNA, 19 nt, Homo sapiens
  misc_RNA (1)...(19): siRNA sense strand
ggugguaugcugacaauug

SEQ ID NO: 504571 - RNA, 19 nt, Homo sapiens
  misc_RNA (1)...(19): siRNA sense strand
uacaacaaccagaccauua

SEQ ID NO: 504572 - RNA, 19 nt, Homo sapiens
  misc_RNA (1)...(19): siRNA sense strand
gcugacaauugguucaaga

SEQ ID NO: 504573 - RNA, 19 nt, Homo sapiens
  misc_RNA (1)...(19): siRNA sense strand
ccagcaggaugcagccuuu

SEQ ID NO: 504574 - RNA, 19 nt, Homo sapiens
  misc_RNA (1)...(19): siRNA sense strand
gcauggauguccucacucu

SEQ ID NO: 504575 - RNA, 19 nt, Homo sapiens
  misc_RNA (1)...(19): siRNA sense strand
gaauuuguggagaaacuaa

SEQ ID NO: 504576 - RNA, 19 nt, Homo sapiens
  misc_RNA (1)...(19): siRNA sense strand
ggagaagucccggcuguug

SEQ ID NO: 504577 - RNA, 19 nt, Homo sapiens
  misc_RNA (1)...(19): siRNA sense strand
gaaccuaaggaagauauug

SEQ ID NO: 504578 - RNA, 19 nt, Homo sapiens
  misc_RNA (1)...(19): siRNA sense strand
caugacaucccaggaauuu

SEQ ID NO: 504579 - RNA, 19 nt, Homo sapiens
  misc_RNA (1)...(19): siRNA sense strand
gcaguccugugccucauca

SEQ ID NO: 504580 - RNA, 19 nt, Homo sapiens
  misc_RNA (1)...(19): siRNA sense strand
cauugcagcuccaggaaga

SEQ ID NO: 504581 - RNA, 19 nt, Homo sapiens
  misc_RNA (1)...(19): siRNA sense strand
ccaccaaguaccuauauga

SEQ ID NO: 504582 - RNA, 19 nt, Homo sapiens
  misc_RNA (1)...(19): siRNA sense strand
cuauaucacucuuguugug

SEQ ID NO: 504583 - RNA, 19 nt, Homo sapiens
  misc_RNA (1)...(19): siRNA sense strand
gaauacauggcuuggcauu

SEQ ID NO: 504584 - RNA, 19 nt, Homo sapiens
  misc_RNA (1)...(19): siRNA sense strand
gggcauggauguccucacu

SEQ ID NO: 504585 - RNA, 19 nt, Homo sapiens
  misc_RNA (1)...(19): siRNA sense strand
gcaccaaggaugaucuuuc

SEQ ID NO: 504586 - RNA, 19 nt, Homo sapiens
  misc_RNA (1)...(19): siRNA sense strand
aaacuaaccaagcgacuga

SEQ ID NO: 504587 - RNA, 19 nt, Homo sapiens
  misc_RNA (1)...(19): siRNA sense strand
ccaggaauuuguggagaaa

SEQ ID NO: 504588 - RNA, 19 nt, Homo sapiens
  misc_RNA (1)...(19): siRNA sense strand
gaaaagaucauugcugaga

SEQ ID NO: 504589 - RNA, 19 nt, Homo sapiens
  misc_RNA (1)...(19): siRNA sense strand
ugaaggaggcuggaauuga

SEQ ID NO: 504590 - RNA, 19 nt, Homo sapiens
  misc_RNA (1)...(19): siRNA sense strand
gaaggagaaccgugaacug

SEQ ID NO: 504591 - RNA, 19 nt, Homo sapiens
  misc_RNA (1)...(19): siRNA sense strand
aagaaggaguggaggaaga

SEQ ID NO: 504592 - RNA, 19 nt, Homo sapiens
  misc_RNA (1)...(19): siRNA sense strand
cuaucaagaucauccuuau

SEQ ID NO: 504593 - RNA, 19 nt, Homo sapiens
  misc_RNA (1)...(19): siRNA sense strand
ggaagauauugacgucucu

SEQ ID NO: 504594 - RNA, 19 nt, Homo sapiens
  misc_RNA (1)...(19): siRNA sense strand
aagauuggcuacuaugaca

SEQ ID NO: 504595 - RNA, 19 nt, Homo sapiens
  misc_RNA (1)...(19): siRNA sense strand
cagaguuucuucucagauc

SEQ ID NO: 504596 - RNA, 19 nt, Homo sapiens
  misc_RNA (1)...(19): siRNA sense strand
gaucuuuccugguccaaaa

SEQ ID NO: 504597 - RNA, 19 nt, Homo sapiens
  misc_RNA (1)...(19): siRNA sense strand
ucauugugcuuuccuaugg

SEQ ID NO: 504598 - RNA, 19 nt, Homo sapiens
  misc_RNA (1)...(19): siRNA sense strand
gcgcaggacaccaugaaga

SEQ ID NO: 504599 - RNA, 19 nt, Homo sapiens
  misc_RNA (1)...(19): siRNA sense strand
ugacaucccaggaauuugu

SEQ ID NO: 504600 - RNA, 19 nt, Homo sapiens
  misc_RNA (1)...(19): siRNA sense strand
cuacgacccuucuaucaac

SEQ ID NO: 504601 - RNA, 19 nt, Homo sapiens
  misc_RNA (1)...(19): siRNA sense strand
guacgucugguuccucauu

SEQ ID NO: 504602 - RNA, 19 nt, Homo sapiens
  misc_RNA (1)...(19): siRNA sense strand
cgaaucaucgugggacuuu

SEQ ID NO: 504603 - RNA, 19 nt, Homo sapiens
  misc_RNA (1)...(19): siRNA sense strand
gcgugaaacucuuugaaaa

SEQ ID NO: 504604 - RNA, 19 nt, Homo sapiens
  misc_RNA (1)...(19): siRNA sense strand
ggacuucaacuacaacaac

SEQ ID NO: 504605 - RNA, 19 nt, Homo sapiens
  misc_RNA (1)...(19): siRNA sense strand
ugcauuugcuuuauaagug

SEQ ID NO: 504606 - RNA, 19 nt, Homo sapiens
  misc_RNA (1)...(19): siRNA sense strand
caaggaggaaccuaaggaa

SEQ ID NO: 504607 - RNA, 19 nt, Homo sapiens
  misc_RNA (1)...(19): siRNA sense strand
gaccauuaccgaccaaauc

SEQ ID NO: 504608 - RNA, 19 nt, Homo sapiens
  misc_RNA (1)...(19): siRNA sense strand
gaggcuggaauugagauua

SEQ ID NO: 504609 - RNA, 19 nt, Homo sapiens
  misc_RNA (1)...(19): siRNA sense strand
gaugcagccuuugccuuug

SEQ ID NO: 504610 - RNA, 19 nt, Homo sapiens
  misc_RNA (1)...(19): siRNA sense strand
gggacauccugccggacua

SEQ ID NO: 504611 - RNA, 19 nt, Homo sapiens
  misc_RNA (1)...(19): siRNA sense strand
gaucuacgacccuucuauc

SEQ ID NO: 504612 - RNA, 19 nt, Homo sapiens
  misc_RNA (1)...(19): siRNA sense strand
gaagauuggcuacuaugac

SEQ ID NO: 504613 - RNA, 19 nt, Homo sapiens
  misc_RNA (1)...(19): siRNA sense strand
gccagaguuucuucucaga

SEQ ID NO: 504614 - RNA, 19 nt, Homo sapiens
  misc_RNA (1)...(19): siRNA sense strand
ccaaggaggaaccuaagga

SEQ ID NO: 504615 - RNA, 19 nt, Homo sapiens
  misc_RNA (1)...(19): siRNA sense strand
uggaggacuucaacuacaa

SEQ ID NO: 504616 - RNA, 19 nt, Homo sapiens
  misc_RNA (1)...(19): siRNA sense strand
ccgcagcauuuccaacaug

SEQ ID NO: 504617 - RNA, 19 nt, Homo sapiens
  misc_RNA (1)...(19): siRNA sense strand
ucucugaacugcgccauca

SEQ ID NO: 504618 - RNA, 19 nt, Homo sapiens
  misc_RNA (1)...(19): siRNA sense strand
acaacgacccuaucaagau

SEQ ID NO: 504619 - RNA, 19 nt, Homo sapiens
  misc_RNA (1)...(19): siRNA sense strand
ggagaaggagaaccgugaa

SEQ ID NO: 504620 - RNA, 19 nt, Homo sapiens
  misc_RNA (1)...(19): siRNA sense strand
auacauggcuuggcauuuu

SEQ ID NO: 504621 - RNA, 19 nt, Homo sapiens
  misc_RNA (1)...(19): siRNA sense strand
ucacaaagaaggaagaaaa

SEQ ID NO: 504622 - RNA, 19 nt, Homo sapiens
  misc_RNA (1)...(19): siRNA sense strand
ccuaucaagaucauccuua

SEQ ID NO: 504623 - RNA, 19 nt, Homo sapiens
  misc_RNA (1)...(19): siRNA sense strand
caaaucuaccgggcaauga

SEQ ID NO: 504624 - RNA, 19 nt, Homo sapiens
  misc_RNA (1)...(19): siRNA sense strand
ggaauuuguggagaaacua

SEQ ID NO: 504625 - RNA, 19 nt, Homo sapiens
  misc_RNA (1)...(19): siRNA sense strand
gacugaagcccggaaaguu

SEQ ID NO: 504626 - RNA, 19 nt, Homo sapiens
  misc_RNA (1)...(19): siRNA sense strand
gggcugcucacuggcuuua

SEQ ID NO: 504627 - RNA, 19 nt, Homo sapiens
  misc_RNA (1)...(19): siRNA sense strand
cuacaacgacccuaucaag

SEQ ID NO: 504628 - RNA, 19 nt, Homo sapiens
  misc_RNA (1)...(19): siRNA sense strand
gcucaccagcccugucaaa

SEQ ID NO: 504629 - RNA, 19 nt, Homo sapiens
  misc_RNA (1)...(19): siRNA sense strand
acaaggagcgucucuuugg

SEQ ID NO: 504630 - RNA, 19 nt, Homo sapiens
  misc_RNA (1)...(19): siRNA sense strand
ggaaccucauugugcuuuc

SEQ ID NO: 504631 - RNA, 19 nt, Homo sapiens
  misc_RNA (1)...(19): siRNA sense strand
gucgagugcauuugcuuua

SEQ ID NO: 504632 - RNA, 19 nt, Homo sapiens
  misc_RNA (1)...(19): siRNA sense strand
gaagauauugacgucucua

SEQ ID NO: 504633 - RNA, 19 nt, Homo sapiens
  misc_RNA (1)...(19): siRNA sense strand
ggccacaucacaacugaga

SEQ ID NO: 504634 - RNA, 19 nt, Homo sapiens
  misc_RNA (1)...(19): siRNA sense strand
gugguaugcugacaauugg

SEQ ID NO: 504635 - RNA, 19 nt, Homo sapiens
  misc_RNA (1)...(19): siRNA sense strand
caaagaaggaagaaaagaa

SEQ ID NO: 504636 - RNA, 19 nt, Homo sapiens
  misc_RNA (1)...(19): siRNA sense strand
ccuccuauaucacucuugu

SEQ ID NO: 504637 - RNA, 19 nt, Homo sapiens
  misc_RNA (1)...(19): siRNA sense strand
acugaagcccggaaaguuu

SEQ ID NO: 504638 - RNA, 19 nt, Homo sapiens
  misc_RNA (1)...(19): siRNA sense strand
gggugucucuggccaugug

SEQ ID NO: 504639 - RNA, 19 nt, Homo sapiens
  misc_RNA (1)...(19): siRNA sense strand
cccaggaauuuguggagaa

SEQ ID NO: 504640 - RNA, 19 nt, Homo sapiens
  misc_RNA (1)...(19): siRNA sense strand
ggaagaagauugcuaccau

SEQ ID NO: 504641 - RNA, 19 nt, Homo sapiens
  misc_RNA (1)...(19): siRNA sense strand
ccacugaggucuucacuuc

SEQ ID NO: 504642 - RNA, 19 nt, Homo sapiens
  misc_RNA (1)...(19): siRNA sense strand
gaaggaggcuggaauugag

SEQ ID NO: 504643 - RNA, 19 nt, Homo sapiens
  misc_RNA (1)...(19): siRNA sense strand
ccaggaagaugaauacaug

SEQ ID NO: 504644 - RNA, 19 nt, Homo sapiens
  misc_RNA (1)...(19): siRNA sense strand
gaaucuuccuugcuuauga

SEQ ID NO: 504645 - RNA, 19 nt, Homo sapiens
  misc_RNA (1)...(19): siRNA sense strand
ggagaaccgugaacuggaa

SEQ ID NO: 504646 - RNA, 19 nt, Homo sapiens
  misc_RNA (1)...(19): siRNA sense strand
gggcauggcuaucuacaau

SEQ ID NO: 504647 - RNA, 19 nt, Homo sapiens
  misc_RNA (1)...(19): siRNA sense strand
acaagaagauuggcuacua

SEQ ID NO: 504648 - RNA, 19 nt, Homo sapiens
  misc_RNA (1)...(19): siRNA sense strand
ccacugagaagaucaauga

SEQ ID NO: 504649 - RNA, 19 nt, Homo sapiens
  misc_RNA (1)...(19): siRNA sense strand
caagaagauuggcuacuau

SEQ ID NO: 504650 - RNA, 19 nt, Homo sapiens
  misc_RNA (1)...(19): siRNA sense strand
guacaaggagcgucucuuu

SEQ ID NO: 504651 - RNA, 19 nt, Homo sapiens
  misc_RNA (1)...(19): siRNA sense strand
gagugcauuugcuuuauaa

SEQ ID NO: 504652 - RNA, 19 nt, Homo sapiens
  misc_RNA (1)...(19): siRNA sense strand
gccaauacccgcagcauuu

SEQ ID NO: 504653 - RNA, 19 nt, Homo sapiens
  misc_RNA (1)...(19): siRNA sense strand
cgagugcauuugcuuuaua

SEQ ID NO: 504654 - RNA, 19 nt, Homo sapiens
  misc_RNA (1)...(19): siRNA sense strand
gcauuugcuuuauaaguga

SEQ ID NO: 504655 - RNA, 19 nt, Homo sapiens
  misc_RNA (1)...(19): siRNA sense strand
gcauggcuaucuacaaugu

SEQ ID NO: 504656 - RNA, 19 nt, Homo sapiens
  misc_RNA (1)...(19): siRNA sense strand
caacgacccuaucaagauc

SEQ ID NO: 504657 - RNA, 19 nt, Homo sapiens
  misc_RNA (1)...(19): siRNA sense strand
aaagaucauugcugagaaa

SEQ ID NO: 504658 - RNA, 19 nt, Homo sapiens
  misc_RNA (1)...(19): siRNA sense strand
ggaugcagccuuugccuuu

SEQ ID NO: 504659 - RNA, 19 nt, Homo sapiens
  misc_RNA (1)...(19): siRNA sense strand
gcacuggcccugaacaaga

SEQ ID NO: 504660 - RNA, 19 nt, Homo sapiens
  misc_RNA (1)...(19): siRNA sense strand
gauauugacgucucuauuc

SEQ ID NO: 504661 - RNA, 19 nt, Homo sapiens
  misc_RNA (1)...(19): siRNA sense strand
caacaugacaucccaggaa

SEQ ID NO: 504662 - RNA, 19 nt, Homo sapiens
  misc_RNA (1)...(19): siRNA sense strand
gaucauugcugagaaagag

SEQ ID NO: 504663 - RNA, 19 nt, Homo sapiens
  misc_RNA (1)...(19): siRNA sense strand
ggaggaaccuaaggaagau

SEQ ID NO: 504664 - RNA, 19 nt, Homo sapiens
  misc_RNA (1)...(19): siRNA sense strand
gggcuacgguuccauguuc

SEQ ID NO: 504665 - RNA, 19 nt, Homo sapiens
  misc_RNA (1)...(19): siRNA sense strand
acaauugguucaagaucua

SEQ ID NO: 504666 - RNA, 19 nt, Homo sapiens
  misc_RNA (1)...(19): siRNA sense strand
ggaagaaguacgucugguu

SEQ ID NO: 504667 - RNA, 19 nt, Homo sapiens
  misc_RNA (1)...(19): siRNA sense strand
gguggcagcuacaagaaga

SEQ ID NO: 504668 - RNA, 19 nt, Homo sapiens
  misc_RNA (1)...(19): siRNA sense strand
gacaauugguucaagaucu

SEQ ID NO: 504669 - RNA, 19 nt, Homo sapiens
  misc_RNA (1)...(19): siRNA sense strand
cggauggcauggacgcuua

SEQ ID NO: 504670 - RNA, 19 nt, Homo sapiens
  misc_RNA (1)...(19): siRNA sense strand
ggugguaugcugacaauug

SEQ ID NO: 504671 - RNA, 19 nt, Homo sapiens
  misc_RNA (1)...(19): siRNA sense strand
uacaacaaccagaccauua

SEQ ID NO: 504672 - RNA, 19 nt, Homo sapiens
  misc_RNA (1)...(19): siRNA sense strand
gcugacaauugguucaaga

SEQ ID NO: 504673 - RNA, 19 nt, Homo sapiens
  misc_RNA (1)...(19): siRNA sense strand
ccagcaggaugcagccuuu

SEQ ID NO: 504674 - RNA, 19 nt, Homo sapiens
  misc_RNA (1)...(19): siRNA sense strand
gcauggauguccucacucu

SEQ ID NO: 504675 - RNA, 19 nt, Homo sapiens
  misc_RNA (1)...(19): siRNA sense strand
gaauuuguggagaaacuaa

SEQ ID NO: 504676 - RNA, 19 nt, Homo sapiens
  misc_RNA (1)...(19): siRNA sense strand
ggagaagucccggcuguug

SEQ ID NO: 504677 - RNA, 19 nt, Homo sapiens
  misc_RNA (1)...(19): siRNA sense strand
gaaccuaaggaagauauug

SEQ ID NO: 504678 - RNA, 19 nt, Homo sapiens
  misc_RNA (1)...(19): siRNA sense strand
caugacaucccaggaauuu

SEQ ID NO: 504679 - RNA, 19 nt, Homo sapiens
  misc_RNA (1)...(19): siRNA sense strand
gcaguccugugccucauca

SEQ ID NO: 504680 - RNA, 19 nt, Homo sapiens
  misc_RNA (1)...(19): siRNA sense strand
cauugcagcuccaggaaga

SEQ ID NO: 504681 - RNA, 19 nt, Homo sapiens
  misc_RNA (1)...(19): siRNA sense strand
ccaccaaguaccuauauga

SEQ ID NO: 504682 - RNA, 19 nt, Homo sapiens
  misc_RNA (1)...(19): siRNA sense strand
cuauaucacucuuguugug

SEQ ID NO: 504683 - RNA, 19 nt, Homo sapiens
  misc_RNA (1)...(19): siRNA sense strand
gaauacauggcuuggcauu

SEQ ID NO: 504684 - RNA, 19 nt, Homo sapiens
  misc_RNA (1)...(19): siRNA sense strand
gggcauggauguccucacu

SEQ ID NO: 504685 - RNA, 19 nt, Homo sapiens
  misc_RNA (1)...(19): siRNA sense strand
gcaccaaggaugaucuuuc

SEQ ID NO: 504686 - RNA, 19 nt, Homo sapiens
  misc_RNA (1)...(19): siRNA sense strand
aaacuaaccaagcgacuga

SEQ ID NO: 504687 - RNA, 19 nt, Homo sapiens
  misc_RNA (1)...(19): siRNA sense strand
ccaggaauuuguggagaaa

SEQ ID NO: 504688 - RNA, 19 nt, Homo sapiens
  misc_RNA (1)...(19): siRNA sense strand
gaaaagaucauugcugaga

SEQ ID NO: 504689 - RNA, 19 nt, Homo sapiens
  misc_RNA (1)...(19): siRNA sense strand
ugaaggaggcuggaauuga

SEQ ID NO: 504690 - RNA, 19 nt, Homo sapiens
  misc_RNA (1)...(19): siRNA sense strand
gaaggagaaccgugaacug

SEQ ID NO: 504691 - RNA, 19 nt, Homo sapiens
  misc_RNA (1)...(19): siRNA sense strand
aagaaggaguggaggaaga

SEQ ID NO: 504692 - RNA, 19 nt, Homo sapiens
  misc_RNA (1)...(19): siRNA sense strand
cuaucaagaucauccuuau

SEQ ID NO: 504693 - RNA, 19 nt, Homo sapiens
  misc_RNA (1)...(19): siRNA sense strand
ggaagauauugacgucucu

SEQ ID NO: 504694 - RNA, 19 nt, Homo sapiens
  misc_RNA (1)...(19): siRNA sense strand
aagauuggcuacuaugaca

SEQ ID NO: 504695 - RNA, 19 nt, Homo sapiens
  misc_RNA (1)...(19): siRNA sense strand
cagaguuucuucucagauc

SEQ ID NO: 504696 - RNA, 19 nt, Homo sapiens
  misc_RNA (1)...(19): siRNA sense strand
gaucuuuccugguccaaaa

SEQ ID NO: 504697 - RNA, 19 nt, Homo sapiens
  misc_RNA (1)...(19): siRNA sense strand
ucauugugcuuuccuaugg

SEQ ID NO: 504698 - RNA, 19 nt, Homo sapiens
  misc_RNA (1)...(19): siRNA sense strand
gcgcaggacaccaugaaga

SEQ ID NO: 504699 - RNA, 19 nt, Homo sapiens
  misc_RNA (1)...(19): siRNA sense strand
ugacaucccaggaauuugu

SEQ ID NO: 504700 - RNA, 19 nt, Homo sapiens
  misc_RNA (1)...(19): siRNA sense strand
cuacgacccuucuaucaac

SEQ ID NO: 504701 - RNA, 19 nt, Homo sapiens
  misc_RNA (1)...(19): siRNA sense strand
guacgucugguuccucauu

SEQ ID NO: 504702 - RNA, 19 nt, Homo sapiens
  misc_RNA (1)...(19): siRNA sense strand
cgaaucaucgugggacuuu

SEQ ID NO: 504703 - RNA, 19 nt, Homo sapiens
  misc_RNA (1)...(19): siRNA sense strand
gcgugaaacucuuugaaaa

SEQ ID NO: 504704 - RNA, 19 nt, Homo sapiens
  misc_RNA (1)...(19): siRNA sense strand
ggacuucaacuacaacaac

SEQ ID NO: 504705 - RNA, 19 nt, Homo sapiens
  misc_RNA (1)...(19): siRNA sense strand
ugcauuugcuuuauaagug

SEQ ID NO: 504706 - RNA, 19 nt, Homo sapiens
  misc_RNA (1)...(19): siRNA sense strand
caaggaggaaccuaaggaa

SEQ ID NO: 504707 - RNA, 19 nt, Homo sapiens
  misc_RNA (1)...(19): siRNA sense strand
gaccauuaccgaccaaauc

SEQ ID NO: 504708 - RNA, 19 nt, Homo sapiens
  misc_RNA (1)...(19): siRNA sense strand
gaggcuggaauugagauua

SEQ ID NO: 504709 - RNA, 19 nt, Homo sapiens
  misc_RNA (1)...(19): siRNA sense strand
gaugcagccuuugccuuug

SEQ ID NO: 504710 - RNA, 19 nt, Homo sapiens
  misc_RNA (1)...(19): siRNA sense strand
gggacauccugccggacua

SEQ ID NO: 504711 - RNA, 19 nt, Homo sapiens
  misc_RNA (1)...(19): siRNA sense strand
gaucuacgacccuucuauc

SEQ ID NO: 504712 - RNA, 19 nt, Homo sapiens
  misc_RNA (1)...(19): siRNA sense strand
gaagauuggcuacuaugac

SEQ ID NO: 504713 - RNA, 19 nt, Homo sapiens
  misc_RNA (1)...(19): siRNA sense strand
gccagaguuucuucucaga

SEQ ID NO: 504714 - RNA, 19 nt, Homo sapiens
  misc_RNA (1)...(19): siRNA sense strand
ccaaggaggaaccuaagga

SEQ ID NO: 504715 - RNA, 19 nt, Homo sapiens
  misc_RNA (1)...(19): siRNA sense strand
uggaggacuucaacuacaa

SEQ ID NO: 504716 - RNA, 19 nt, Homo sapiens
  misc_RNA (1)...(19): siRNA sense strand
ccgcagcauuuccaacaug

SEQ ID NO: 504717 - RNA, 19 nt, Homo sapiens
  misc_RNA (1)...(19): siRNA sense strand
ucucugaacugcgccauca

SEQ ID NO: 504718 - RNA, 19 nt, Homo sapiens
  misc_RNA (1)...(19): siRNA sense strand
acaacgacccuaucaagau

SEQ ID NO: 504719 - RNA, 19 nt, Homo sapiens
  misc_RNA (1)...(19): siRNA sense strand
ggagaaggagaaccgugaa

SEQ ID NO: 504720 - RNA, 19 nt, Homo sapiens
  misc_RNA (1)...(19): siRNA sense strand
auacauggcuuggcauuuu

SEQ ID NO: 504721 - RNA, 19 nt, Homo sapiens
  misc_RNA (1)...(19): siRNA sense strand
ucacaaagaaggaagaaaa

SEQ ID NO: 504722 - RNA, 19 nt, Homo sapiens
  misc_RNA (1)...(19): siRNA sense strand
ccuaucaagaucauccuua

SEQ ID NO: 504723 - RNA, 19 nt, Homo sapiens
  misc_RNA (1)...(19): siRNA sense strand
caaaucuaccgggcaauga

SEQ ID NO: 504724 - RNA, 19 nt, Homo sapiens
  misc_RNA (1)...(19): siRNA sense strand
ggaauuuguggagaaacua

SEQ ID NO: 504725 - RNA, 19 nt, Homo sapiens
  misc_RNA (1)...(19): siRNA sense strand
gacugaagcccggaaaguu

SEQ ID NO: 504726 - RNA, 19 nt, Homo sapiens
  misc_RNA (1)...(19): siRNA sense strand
gggcugcucacuggcuuua

SEQ ID NO: 504727 - RNA, 19 nt, Homo sapiens
  misc_RNA (1)...(19): siRNA sense strand
cuacaacgacccuaucaag

SEQ ID NO: 504728 - RNA, 19 nt, Homo sapiens
  misc_RNA (1)...(19): siRNA sense strand
gcucaccagcccugucaaa

SEQ ID NO: 504729 - RNA, 19 nt, Homo sapiens
  misc_RNA (1)...(19): siRNA sense strand
acaaggagcgucucuuugg

SEQ ID NO: 504730 - RNA, 19 nt, Homo sapiens
  misc_RNA (1)...(19): siRNA sense strand
ggaaccucauugugcuuuc

SEQ ID NO: 504731 - RNA, 19 nt, Homo sapiens
  misc_RNA (1)...(19): siRNA sense strand
gucgagugcauuugcuuua

SEQ ID NO: 504732 - RNA, 19 nt, Homo sapiens
  misc_RNA (1)...(19): siRNA sense strand
gaagauauugacgucucua

SEQ ID NO: 504733 - RNA, 19 nt, Homo sapiens
  misc_RNA (1)...(19): siRNA sense strand
ggccacaucacaacugaga

SEQ ID NO: 504734 - RNA, 19 nt, Homo sapiens
  misc_RNA (1)...(19): siRNA sense strand
gugguaugcugacaauugg

SEQ ID NO: 504735 - RNA, 19 nt, Homo sapiens
  misc_RNA (1)...(19): siRNA sense strand
caaagaaggaagaaaagaa

SEQ ID NO: 504736 - RNA, 19 nt, Homo sapiens
  misc_RNA (1)...(19): siRNA sense strand
ccuccuauaucacucuugu

SEQ ID NO: 504737 - RNA, 19 nt, Homo sapiens
  misc_RNA (1)...(19): siRNA sense strand
acugaagcccggaaaguuu

SEQ ID NO: 504738 - RNA, 19 nt, Homo sapiens
  misc_RNA (1)...(19): siRNA sense strand
gggugucucuggccaugug

SEQ ID NO: 504739 - RNA, 19 nt, Homo sapiens
  misc_RNA (1)...(19): siRNA sense strand
cccaggaauuuguggagaa

SEQ ID NO: 504740 - RNA, 19 nt, Homo sapiens
  misc_RNA (1)...(19): siRNA sense strand
ggaagaagauugcuaccau

SEQ ID NO: 504741 - RNA, 19 nt, Homo sapiens
  misc_RNA (1)...(19): siRNA sense strand
ccacugaggucuucacuuc

SEQ ID NO: 504742 - RNA, 19 nt, Homo sapiens
  misc_RNA (1)...(19): siRNA sense strand
gaaggaggcuggaauugag

SEQ ID NO: 504743 - RNA, 19 nt, Homo sapiens
  misc_RNA (1)...(19): siRNA sense strand
ccaggaagaugaauacaug

SEQ ID NO: 504744 - RNA, 19 nt, Homo sapiens
  misc_RNA (1)...(19): siRNA sense strand
gaaucuuccuugcuuauga

SEQ ID NO: 504745 - RNA, 19 nt, Homo sapiens
  misc_RNA (1)...(19): siRNA sense strand
ggagaaccgugaacuggaa

SEQ ID NO: 504746 - RNA, 19 nt, Homo sapiens
  misc_RNA (1)...(19): siRNA sense strand
gggcauggcuaucuacaau

SEQ ID NO: 504747 - RNA, 19 nt, Homo sapiens
  misc_RNA (1)...(19): siRNA sense strand
acaagaagauuggcuacua

SEQ ID NO: 504748 - RNA, 19 nt, Homo sapiens
  misc_RNA (1)...(19): siRNA sense strand
ccacugagaagaucaauga

SEQ ID NO: 504749 - RNA, 19 nt, Homo sapiens
  misc_RNA (1)...(19): siRNA sense strand
caagaagauuggcuacuau

SEQ ID NO: 504750 - RNA, 19 nt, Homo sapiens
  misc_RNA (1)...(19): siRNA sense strand
guacaaggagcgucucuuu

SEQ ID NO: 504751 - RNA, 19 nt, Homo sapiens
  misc_RNA (1)...(19): siRNA sense strand
gagugcauuugcuuuauaa

SEQ ID NO: 504752 - RNA, 19 nt, Homo sapiens
  misc_RNA (1)...(19): siRNA sense strand
gccaauacccgcagcauuu

SEQ ID NO: 504753 - RNA, 19 nt, Homo sapiens
  misc_RNA (1)...(19): siRNA sense strand
cgagugcauuugcuuuaua

SEQ ID NO: 504754 - RNA, 19 nt, Homo sapiens
  misc_RNA (1)...(19): siRNA sense strand
gcauuugcuuuauaaguga

SEQ ID NO: 504755 - RNA, 19 nt, Homo sapiens
  misc_RNA (1)...(19): siRNA sense strand
gcauggcuaucuacaaugu

SEQ ID NO: 504756 - RNA, 19 nt, Homo sapiens
  misc_RNA (1)...(19): siRNA sense strand
caacgacccuaucaagauc

SEQ ID NO: 504757 - RNA, 19 nt, Homo sapiens
  misc_RNA (1)...(19): siRNA sense strand
aaagaucauugcugagaaa

SEQ ID NO: 504758 - RNA, 19 nt, Homo sapiens
  misc_RNA (1)...(19): siRNA sense strand
ggaugcagccuuugccuuu

SEQ ID NO: 504759 - RNA, 19 nt, Homo sapiens
  misc_RNA (1)...(19): siRNA sense strand
gcacuggcccugaacaaga

SEQ ID NO: 504760 - RNA, 19 nt, Homo sapiens
  misc_RNA (1)...(19): siRNA sense strand
gauauugacgucucuauuc

SEQ ID NO: 504761 - RNA, 19 nt, Homo sapiens
  misc_RNA (1)...(19): siRNA sense strand
caacaugacaucccaggaa

SEQ ID NO: 504762 - RNA, 19 nt, Homo sapiens
  misc_RNA (1)...(19): siRNA sense strand
gaucauugcugagaaagag

SEQ ID NO: 504763 - RNA, 19 nt, Homo sapiens
  misc_RNA (1)...(19): siRNA sense strand
ggaggaaccuaaggaagau

SEQ ID NO: 504764 - RNA, 19 nt, Homo sapiens
  misc_RNA (1)...(19): siRNA sense strand
gggcuacgguuccauguuc

SEQ ID NO: 504765 - RNA, 19 nt, Homo sapiens
  misc_RNA (1)...(19): siRNA sense strand
acaauugguucaagaucua

SEQ ID NO: 504766 - RNA, 19 nt, Homo sapiens
  misc_RNA (1)...(19): siRNA sense strand
ggaagaaguacgucugguu

SEQ ID NO: 504767 - RNA, 19 nt, Homo sapiens
  misc_RNA (1)...(19): siRNA sense strand
gguggcagcuacaagaaga

SEQ ID NO: 504768 - RNA, 19 nt, Homo sapiens
  misc_RNA (1)...(19): siRNA sense strand
gacaauugguucaagaucu

SEQ ID NO: 504769 - RNA, 19 nt, Homo sapiens
  misc_RNA (1)...(19): siRNA sense strand
cggauggcauggacgcuua

SEQ ID NO: 504770 - RNA, 19 nt, Homo sapiens
  misc_RNA (1)...(19): siRNA sense strand
ggugguaugcugacaauug

SEQ ID NO: 504771 - RNA, 19 nt, Homo sapiens
  misc_RNA (1)...(19): siRNA sense strand
uacaacaaccagaccauua

SEQ ID NO: 504772 - RNA, 19 nt, Homo sapiens
  misc_RNA (1)...(19): siRNA sense strand
gcugacaauugguucaaga

SEQ ID NO: 504773 - RNA, 19 nt, Homo sapiens
  misc_RNA (1)...(19): siRNA sense strand
ccagcaggaugcagccuuu

SEQ ID NO: 504774 - RNA, 19 nt, Homo sapiens
  misc_RNA (1)...(19): siRNA sense strand
gcauggauguccucacucu

SEQ ID NO: 504775 - RNA, 19 nt, Homo sapiens
  misc_RNA (1)...(19): siRNA sense strand
gaauuuguggagaaacuaa

SEQ ID NO: 504776 - RNA, 19 nt, Homo sapiens
  misc_RNA (1)...(19): siRNA sense strand
ggagaagucccggcuguug

SEQ ID NO: 504777 - RNA, 19 nt, Homo sapiens
  misc_RNA (1)...(19): siRNA sense strand
gaaccuaaggaagauauug

SEQ ID NO: 504778 - RNA, 19 nt, Homo sapiens
  misc_RNA (1)...(19): siRNA sense strand
caugacaucccaggaauuu

SEQ ID NO: 504779 - RNA, 19 nt, Homo sapiens
  misc_RNA (1)...(19): siRNA sense strand
gcaguccugugccucauca

SEQ ID NO: 504780 - RNA, 19 nt, Homo sapiens
  misc_RNA (1)...(19): siRNA sense strand
cauugcagcuccaggaaga

SEQ ID NO: 504781 - RNA, 19 nt, Homo sapiens
  misc_RNA (1)...(19): siRNA sense strand
ccaccaaguaccuauauga

SEQ ID NO: 504782 - RNA, 19 nt, Homo sapiens
  misc_RNA (1)...(19): siRNA sense strand
cuauaucacucuuguugug

SEQ ID NO: 504783 - RNA, 19 nt, Homo sapiens
  misc_RNA (1)...(19): siRNA sense strand
gaauacauggcuuggcauu

SEQ ID NO: 504784 - RNA, 19 nt, Homo sapiens
  misc_RNA (1)...(19): siRNA sense strand
gggcauggauguccucacu

SEQ ID NO: 504785 - RNA, 19 nt, Homo sapiens
  misc_RNA (1)...(19): siRNA sense strand
gcaccaaggaugaucuuuc

SEQ ID NO: 504786 - RNA, 19 nt, Homo sapiens
  misc_RNA (1)...(19): siRNA sense strand
aaacuaaccaagcgacuga

SEQ ID NO: 504787 - RNA, 19 nt, Homo sapiens
  misc_RNA (1)...(19): siRNA sense strand
ccaggaauuuguggagaaa

SEQ ID NO: 504788 - RNA, 19 nt, Homo sapiens
  misc_RNA (1)...(19): siRNA sense strand
gaaaagaucauugcugaga

SEQ ID NO: 504789 - RNA, 19 nt, Homo sapiens
  misc_RNA (1)...(19): siRNA sense strand
ugaaggaggcuggaauuga

SEQ ID NO: 504790 - RNA, 19 nt, Homo sapiens
  misc_RNA (1)...(19): siRNA sense strand
gaaggagaaccgugaacug

SEQ ID NO: 504791 - RNA, 19 nt, Homo sapiens
  misc_RNA (1)...(19): siRNA sense strand
aagaaggaguggaggaaga

SEQ ID NO: 504792 - RNA, 19 nt, Homo sapiens
  misc_RNA (1)...(19): siRNA sense strand
cuaucaagaucauccuuau

SEQ ID NO: 504793 - RNA, 19 nt, Homo sapiens
  misc_RNA (1)...(19): siRNA sense strand
ggaagauauugacgucucu

SEQ ID NO: 504794 - RNA, 19 nt, Homo sapiens
  misc_RNA (1)...(19): siRNA sense strand
aagauuggcuacuaugaca

SEQ ID NO: 504795 - RNA, 19 nt, Homo sapiens
  misc_RNA (1)...(19): siRNA sense strand
cagaguuucuucucagauc

SEQ ID NO: 504796 - RNA, 19 nt, Homo sapiens
  misc_RNA (1)...(19): siRNA sense strand
gaucuuuccugguccaaaa

SEQ ID NO: 504797 - RNA, 19 nt, Homo sapiens
  misc_RNA (1)...(19): siRNA sense strand
ucauugugcuuuccuaugg

SEQ ID NO: 504798 - RNA, 19 nt, Homo sapiens
  misc_RNA (1)...(19): siRNA sense strand
gcgcaggacaccaugaaga

SEQ ID NO: 504799 - RNA, 19 nt, Homo sapiens
  misc_RNA (1)...(19): siRNA sense strand
ugacaucccaggaauuugu

SEQ ID NO: 504800 - RNA, 19 nt, Homo sapiens
  misc_RNA (1)...(19): siRNA sense strand
cuacgacccuucuaucaac

SEQ ID NO: 504801 - RNA, 19 nt, Homo sapiens
  misc_RNA (1)...(19): siRNA sense strand
guacgucugguuccucauu

SEQ ID NO: 504802 - RNA, 19 nt, Homo sapiens
  misc_RNA (1)...(19): siRNA sense strand
cgaaucaucgugggacuuu

SEQ ID NO: 504803 - RNA, 19 nt, Homo sapiens
  misc_RNA (1)...(19): siRNA sense strand
gcgugaaacucuuugaaaa

SEQ ID NO: 504804 - RNA, 19 nt, Homo sapiens
  misc_RNA (1)...(19): siRNA sense strand
ggacuucaacuacaacaac

SEQ ID NO: 504805 - RNA, 19 nt, Homo sapiens
  misc_RNA (1)...(19): siRNA sense strand
ugcauuugcuuuauaagug

SEQ ID NO: 504806 - RNA, 19 nt, Homo sapiens
  misc_RNA (1)...(19): siRNA sense strand
caaggaggaaccuaaggaa

SEQ ID NO: 504807 - RNA, 19 nt, Homo sapiens
  misc_RNA (1)...(19): siRNA sense strand
gaccauuaccgaccaaauc

SEQ ID NO: 504808 - RNA, 19 nt, Homo sapiens
  misc_RNA (1)...(19): siRNA sense strand
gaggcuggaauugagauua

SEQ ID NO: 504809 - RNA, 19 nt, Homo sapiens
  misc_RNA (1)...(19): siRNA sense strand
gaugcagccuuugccuuug

SEQ ID NO: 504810 - RNA, 19 nt, Homo sapiens
  misc_RNA (1)...(19): siRNA sense strand
gggacauccugccggacua

SEQ ID NO: 504811 - RNA, 19 nt, Homo sapiens
  misc_RNA (1)...(19): siRNA sense strand
gaucuacgacccuucuauc

SEQ ID NO: 504812 - RNA, 19 nt, Homo sapiens
  misc_RNA (1)...(19): siRNA sense strand
gaagauuggcuacuaugac

SEQ ID NO: 504813 - RNA, 19 nt, Homo sapiens
  misc_RNA (1)...(19): siRNA sense strand
gccagaguuucuucucaga

SEQ ID NO: 504814 - RNA, 19 nt, Homo sapiens
  misc_RNA (1)...(19): siRNA sense strand
ccaaggaggaaccuaagga

SEQ ID NO: 504815 - RNA, 19 nt, Homo sapiens
  misc_RNA (1)...(19): siRNA sense strand
uggaggacuucaacuacaa

SEQ ID NO: 504816 - RNA, 19 nt, Homo sapiens
  misc_RNA (1)...(19): siRNA sense strand
ccgcagcauuuccaacaug

SEQ ID NO: 504817 - RNA, 19 nt, Homo sapiens
  misc_RNA (1)...(19): siRNA sense strand
ucucugaacugcgccauca

SEQ ID NO: 504818 - RNA, 19 nt, Homo sapiens
  misc_RNA (1)...(19): siRNA sense strand
acaacgacccuaucaagau

SEQ ID NO: 504819 - RNA, 19 nt, Homo sapiens
  misc_RNA (1)...(19): siRNA sense strand
ggagaaggagaaccgugaa

SEQ ID NO: 504820 - RNA, 19 nt, Homo sapiens
  misc_RNA (1)...(19): siRNA sense strand
auacauggcuuggcauuuu

SEQ ID NO: 504821 - RNA, 19 nt, Homo sapiens
  misc_RNA (1)...(19): siRNA sense strand
ucacaaagaaggaagaaaa

SEQ ID NO: 504822 - RNA, 19 nt, Homo sapiens
  misc_RNA (1)...(19): siRNA sense strand
ccuaucaagaucauccuua

SEQ ID NO: 504823 - RNA, 19 nt, Homo sapiens
  misc_RNA (1)...(19): siRNA sense strand
caaaucuaccgggcaauga

SEQ ID NO: 504824 - RNA, 19 nt, Homo sapiens
  misc_RNA (1)...(19): siRNA sense strand
ggaauuuguggagaaacua

SEQ ID NO: 504825 - RNA, 19 nt, Homo sapiens
  misc_RNA (1)...(19): siRNA sense strand
gacugaagcccggaaaguu

SEQ ID NO: 504826 - RNA, 19 nt, Homo sapiens
  misc_RNA (1)...(19): siRNA sense strand
gggcugcucacuggcuuua

SEQ ID NO: 504827 - RNA, 19 nt, Homo sapiens
  misc_RNA (1)...(19): siRNA sense strand
cuacaacgacccuaucaag

SEQ ID NO: 504828 - RNA, 19 nt, Homo sapiens
  misc_RNA (1)...(19): siRNA sense strand
gcucaccagcccugucaaa

SEQ ID NO: 504829 - RNA, 19 nt, Homo sapiens
  misc_RNA (1)...(19): siRNA sense strand
acaaggagcgucucuuugg

SEQ ID NO: 504830 - RNA, 19 nt, Homo sapiens
  misc_RNA (1)...(19): siRNA sense strand
ggaaccucauugugcuuuc

SEQ ID NO: 504831 - RNA, 19 nt, Homo sapiens
  misc_RNA (1)...(19): siRNA sense strand
gucgagugcauuugcuuua

SEQ ID NO: 504832 - RNA, 19 nt, Homo sapiens
  misc_RNA (1)...(19): siRNA sense strand
gaagauauugacgucucua

SEQ ID NO: 504833 - RNA, 19 nt, Homo sapiens
  misc_RNA (1)...(19): siRNA sense strand
ggccacaucacaacugaga

SEQ ID NO: 504834 - RNA, 19 nt, Homo sapiens
  misc_RNA (1)...(19): siRNA sense strand
gugguaugcugacaauugg

SEQ ID NO: 504835 - RNA, 19 nt, Homo sapiens
  misc_RNA (1)...(19): siRNA sense strand
caaagaaggaagaaaagaa

SEQ ID NO: 504836 - RNA, 19 nt, Homo sapiens
  misc_RNA (1)...(19): siRNA sense strand
ccuccuauaucacucuugu

SEQ ID NO: 504837 - RNA, 19 nt, Homo sapiens
  misc_RNA (1)...(19): siRNA sense strand
acugaagcccggaaaguuu

SEQ ID NO: 504838 - RNA, 19 nt, Homo sapiens
  misc_RNA (1)...(19): siRNA sense strand
gggugucucuggccaugug

SEQ ID NO: 504839 - RNA, 19 nt, Homo sapiens
  misc_RNA (1)...(19): siRNA sense strand
cccaggaauuuguggagaa

SEQ ID NO: 504840 - RNA, 19 nt, Homo sapiens
  misc_RNA (1)...(19): siRNA sense strand
ggaagaagauugcuaccau

SEQ ID NO: 504841 - RNA, 19 nt, Homo sapiens
  misc_RNA (1)...(19): siRNA sense strand
ccacugaggucuucacuuc

SEQ ID NO: 504842 - RNA, 19 nt, Homo sapiens
  misc_RNA (1)...(19): siRNA sense strand
gaaggaggcuggaauugag

SEQ ID NO: 504843 - RNA, 19 nt, Homo sapiens
  misc_RNA (1)...(19): siRNA sense strand
acaagaagauuggcuacua

SEQ ID NO: 504844 - RNA, 19 nt, Homo sapiens
  misc_RNA (1)...(19): siRNA sense strand
caagaagauuggcuacuau

SEQ ID NO: 504845 - RNA, 19 nt, Homo sapiens
  misc_RNA (1)...(19): siRNA sense strand
guacaaggagcgucucuuu

SEQ ID NO: 504846 - RNA, 19 nt, Homo sapiens
  misc_RNA (1)...(19): siRNA sense strand
gccaauacccgcagcauuu

SEQ ID NO: 504847 - RNA, 19 nt, Homo sapiens
  misc_RNA (1)...(19): siRNA sense strand
caacgacccuaucaagauc

SEQ ID NO: 504848 - RNA, 19 nt, Homo sapiens
  misc_RNA (1)...(19): siRNA sense strand
gcacuggcccugaacaaga

SEQ ID NO: 504849 - RNA, 19 nt, Homo sapiens
  misc_RNA (1)...(19): siRNA sense strand
caacaugacaucccaggaa

SEQ ID NO: 504850 - RNA, 19 nt, Homo sapiens
  misc_RNA (1)...(19): siRNA sense strand
acaauugguucaagaucua

SEQ ID NO: 504851 - RNA, 19 nt, Homo sapiens
  misc_RNA (1)...(19): siRNA sense strand
ggaagaaguacgucugguu

SEQ ID NO: 504852 - RNA, 19 nt, Homo sapiens
  misc_RNA (1)...(19): siRNA sense strand
gguggcagcuacaagaaga

SEQ ID NO: 504853 - RNA, 19 nt, Homo sapiens
  misc_RNA (1)...(19): siRNA sense strand
gacaauugguucaagaucu

SEQ ID NO: 504854 - RNA, 19 nt, Homo sapiens
  misc_RNA (1)...(19): siRNA sense strand
cggauggcauggacgcuua

SEQ ID NO: 504855 - RNA, 19 nt, Homo sapiens
  misc_RNA (1)...(19): siRNA sense strand
ggugguaugcugacaauug

SEQ ID NO: 504856 - RNA, 19 nt, Homo sapiens
  misc_RNA (1)...(19): siRNA sense strand
uacaacaaccagaccauua

SEQ ID NO: 504857 - RNA, 19 nt, Homo sapiens
  misc_RNA (1)...(19): siRNA sense strand
gcugacaauugguucaaga

SEQ ID NO: 504858 - RNA, 19 nt, Homo sapiens
  misc_RNA (1)...(19): siRNA sense strand
gaauuuguggagaaacuaa

SEQ ID NO: 504859 - RNA, 19 nt, Homo sapiens
  misc_RNA (1)...(19): siRNA sense strand
caugacaucccaggaauuu

SEQ ID NO: 504860 - RNA, 19 nt, Homo sapiens
  misc_RNA (1)...(19): siRNA sense strand
ccaccaaguaccuauauga

SEQ ID NO: 504861 - RNA, 19 nt, Homo sapiens
  misc_RNA (1)...(19): siRNA sense strand
gcaccaaggaugaucuuuc

SEQ ID NO: 504862 - RNA, 19 nt, Homo sapiens
  misc_RNA (1)...(19): siRNA sense strand
aaacuaaccaagcgacuga

SEQ ID NO: 504863 - RNA, 19 nt, Homo sapiens
  misc_RNA (1)...(19): siRNA sense strand
ccaggaauuuguggagaaa

SEQ ID NO: 504864 - RNA, 19 nt, Homo sapiens
  misc_RNA (1)...(19): siRNA sense strand
ugaaggaggcuggaauuga

SEQ ID NO: 504865 - RNA, 19 nt, Homo sapiens
  misc_RNA (1)...(19): siRNA sense strand
cuaucaagaucauccuuau

SEQ ID NO: 504866 - RNA, 19 nt, Homo sapiens
  misc_RNA (1)...(19): siRNA sense strand
aagauuggcuacuaugaca

SEQ ID NO: 504867 - RNA, 19 nt, Homo sapiens
  misc_RNA (1)...(19): siRNA sense strand
cagaguuucuucucagauc

SEQ ID NO: 504868 - RNA, 19 nt, Homo sapiens
  misc_RNA (1)...(19): siRNA sense strand
gaucuuuccugguccaaaa

SEQ ID NO: 504869 - RNA, 19 nt, Homo sapiens
  misc_RNA (1)...(19): siRNA sense strand
ucauugugcuuuccuaugg

SEQ ID NO: 504870 - RNA, 19 nt, Homo sapiens
  misc_RNA (1)...(19): siRNA sense strand
ugacaucccaggaauuugu

SEQ ID NO: 504871 - RNA, 19 nt, Homo sapiens
  misc_RNA (1)...(19): siRNA sense strand
cuacgacccuucuaucaac

SEQ ID NO: 504872 - RNA, 19 nt, Homo sapiens
  misc_RNA (1)...(19): siRNA sense strand
guacgucugguuccucauu

SEQ ID NO: 504873 - RNA, 19 nt, Homo sapiens
  misc_RNA (1)...(19): siRNA sense strand
cgaaucaucgugggacuuu

SEQ ID NO: 504874 - RNA, 19 nt, Homo sapiens
  misc_RNA (1)...(19): siRNA sense strand
gcgugaaacucuuugaaaa

SEQ ID NO: 504875 - RNA, 19 nt, Homo sapiens
  misc_RNA (1)...(19): siRNA sense strand
ggacuucaacuacaacaac

SEQ ID NO: 504876 - RNA, 19 nt, Homo sapiens
  misc_RNA (1)...(19): siRNA sense strand
gaccauuaccgaccaaauc

SEQ ID NO: 504877 - RNA, 19 nt, Homo sapiens
  misc_RNA (1)...(19): siRNA sense strand
gaggcuggaauugagauua

SEQ ID NO: 504878 - RNA, 19 nt, Homo sapiens
  misc_RNA (1)...(19): siRNA sense strand
gggacauccugccggacua

SEQ ID NO: 504879 - RNA, 19 nt, Homo sapiens
  misc_RNA (1)...(19): siRNA sense strand
gaucuacgacccuucuauc

SEQ ID NO: 504880 - RNA, 19 nt, Homo sapiens
  misc_RNA (1)...(19): siRNA sense strand
gaagauuggcuacuaugac

SEQ ID NO: 504881 - RNA, 19 nt, Homo sapiens
  misc_RNA (1)...(19): siRNA sense strand
gccagaguuucuucucaga

SEQ ID NO: 504882 - RNA, 19 nt, Homo sapiens
  misc_RNA (1)...(19): siRNA sense strand
uggaggacuucaacuacaa

SEQ ID NO: 504883 - RNA, 19 nt, Homo sapiens
  misc_RNA (1)...(19): siRNA sense strand
acaacgacccuaucaagau

SEQ ID NO: 504884 - RNA, 19 nt, Homo sapiens
  misc_RNA (1)...(19): siRNA sense strand
caaaucuaccgggcaauga

SEQ ID NO: 504885 - RNA, 19 nt, Homo sapiens
  misc_RNA (1)...(19): siRNA sense strand
ggaauuuguggagaaacua

SEQ ID NO: 504886 - RNA, 19 nt, Homo sapiens
  misc_RNA (1)...(19): siRNA sense strand
ccgcagcauuuccaacaug

SEQ ID NO: 504887 - RNA, 19 nt, Homo sapiens
  misc_RNA (1)...(19): siRNA sense strand
ccuaucaagaucauccuua

SEQ ID NO: 504888 - RNA, 19 nt, Homo sapiens
  misc_RNA (1)...(19): siRNA sense strand
cuacaacgacccuaucaag

SEQ ID NO: 504889 - RNA, 19 nt, Homo sapiens
  misc_RNA (1)...(19): siRNA sense strand
acaaggagcgucucuuugg

SEQ ID NO: 504890 - RNA, 19 nt, Homo sapiens
  misc_RNA (1)...(19): siRNA sense strand
gacugaagcccggaaaguu

SEQ ID NO: 504891 - RNA, 19 nt, Homo sapiens
  misc_RNA (1)...(19): siRNA sense strand
gcucaccagcccugucaaa

SEQ ID NO: 504892 - RNA, 19 nt, Homo sapiens
  misc_RNA (1)...(19): siRNA sense strand
ggaaccucauugugcuuuc

SEQ ID NO: 504893 - RNA, 19 nt, Homo sapiens
  misc_RNA (1)...(19): siRNA sense strand
ggccacaucacaacugaga

SEQ ID NO: 504894 - RNA, 19 nt, Homo sapiens
  misc_RNA (1)...(19): siRNA sense strand
gugguaugcugacaauugg

SEQ ID NO: 504895 - RNA, 19 nt, Homo sapiens
  misc_RNA (1)...(19): siRNA sense strand
ggauguggaaccucauugu

SEQ ID NO: 504896 - RNA, 19 nt, Homo sapiens
  misc_RNA (1)...(19): siRNA sense strand
gggugucucuggccaugug

SEQ ID NO: 504897 - RNA, 19 nt, Homo sapiens
  misc_RNA (1)...(19): siRNA sense strand
cccaggaauuuguggagaa

SEQ ID NO: 504898 - RNA, 19 nt, Homo sapiens
  misc_RNA (1)...(19): siRNA sense strand
acugaagcccggaaaguuu

SEQ ID NO: 504899 - RNA, 19 nt, Homo sapiens
  misc_RNA (1)...(19): siRNA sense strand
guacaucggggcacuguuu

SEQ ID NO: 504900 - RNA, 19 nt, Homo sapiens
  misc_RNA (1)...(19): siRNA sense strand
gguaugcugacaauugguu

SEQ ID NO: 504901 - RNA, 19 nt, Homo sapiens
  misc_RNA (1)...(19): siRNA sense strand
ccaaaucuaccgggcaaug

SEQ ID NO: 504902 - RNA, 19 nt, Homo sapiens
  misc_RNA (1)...(19): siRNA sense strand
gauguggaaccucauugug

SEQ ID NO: 504903 - RNA, 19 nt, Homo sapiens
  misc_RNA (1)...(19): siRNA sense strand
caccaaggaugaucuuucc

SEQ ID NO: 504904 - RNA, 19 nt, Homo sapiens
  misc_RNA (1)...(19): siRNA sense strand
cgcagcauuuccaacauga

SEQ ID NO: 504905 - RNA, 19 nt, Homo sapiens
  misc_RNA (1)...(19): siRNA sense strand
uuacuuuccgccagaguuu

SEQ ID NO: 504906 - RNA, 19 nt, Homo sapiens
  misc_RNA (1)...(19): siRNA sense strand
aacaugacaucccaggaau

SEQ ID NO: 504907 - RNA, 19 nt, Homo sapiens
  misc_RNA (1)...(19): siRNA sense strand
caagaucuacgacccuucu

SEQ ID NO: 504908 - RNA, 19 nt, Homo sapiens
  misc_RNA (1)...(19): siRNA sense strand
ggacauccugccggacuau

SEQ ID NO: 504909 - RNA, 19 nt, Homo sapiens
  misc_RNA (1)...(19): siRNA sense strand
caacccuacccgcgugaaa

SEQ ID NO: 504910 - RNA, 19 nt, Homo sapiens
  misc_RNA (1)...(19): siRNA sense strand
gcagcuacaagaagauugg

SEQ ID NO: 504911 - RNA, 19 nt, Homo sapiens
  misc_RNA (1)...(19): siRNA sense strand
caggguggcagcuacaaga

SEQ ID NO: 504912 - RNA, 19 nt, Homo sapiens
  misc_RNA (1)...(19): siRNA sense strand
gcaccgcuggccuaugaug

SEQ ID NO: 504913 - RNA, 19 nt, Homo sapiens
  misc_RNA (1)...(19): siRNA sense strand
gaaaaguggggcuggaaga

SEQ ID NO: 504914 - RNA, 19 nt, Homo sapiens
  misc_RNA (1)...(19): siRNA sense strand
ccgccagaguuucuucuca

SEQ ID NO: 504915 - RNA, 19 nt, Homo sapiens
  misc_RNA (1)...(19): siRNA sense strand
agaagauuggcuacuauga

SEQ ID NO: 504916 - RNA, 19 nt, Homo sapiens
  misc_RNA (1)...(19): siRNA sense strand
acugaggucuucacuucga

SEQ ID NO: 504917 - RNA, 19 nt, Homo sapiens
  misc_RNA (1)...(19): siRNA sense strand
cuacaacaaccagaccauu

SEQ ID NO: 504918 - RNA, 19 nt, Homo sapiens
  misc_RNA (1)...(19): siRNA sense strand
cuggaggacuucaacuaca

SEQ ID NO: 504919 - RNA, 19 nt, Homo sapiens
  misc_RNA (1)...(19): siRNA sense strand
gccuggaggacuucaacua

SEQ ID NO: 504920 - RNA, 19 nt, Homo sapiens
  misc_RNA (1)...(19): siRNA sense strand
uacaacgacccuaucaaga

SEQ ID NO: 504921 - RNA, 19 nt, Homo sapiens
  misc_RNA (1)...(19): siRNA sense strand
ccauccagcagaccacuga

SEQ ID NO: 504922 - RNA, 19 nt, Homo sapiens
  misc_RNA (1)...(19): siRNA sense strand
ccaauacccgcagcauuuc

SEQ ID NO: 504923 - RNA, 19 nt, Homo sapiens
  misc_RNA (1)...(19): siRNA sense strand
gccaccaaguaccuauaug

SEQ ID NO: 504924 - RNA, 19 nt, Homo sapiens
  misc_RNA (1)...(19): siRNA sense strand
cgcgugaaacucuuugaaa

SEQ ID NO: 504925 - RNA, 19 nt, Homo sapiens
  misc_RNA (1)...(19): siRNA sense strand
ggccaugugguguuugaug

SEQ ID NO: 504926 - RNA, 19 nt, Homo sapiens
  misc_RNA (1)...(19): siRNA sense strand
gcauuuccaacaugacauc

SEQ ID NO: 504927 - RNA, 19 nt, Homo sapiens
  misc_RNA (1)...(19): siRNA sense strand
gcacaguggaugagaugac

SEQ ID NO: 504928 - RNA, 19 nt, Homo sapiens
  misc_RNA (1)...(19): siRNA sense strand
gagugaaggaggcuggaau

SEQ ID NO: 504929 - RNA, 19 nt, Homo sapiens
  misc_RNA (1)...(19): siRNA sense strand
caggccaagccaccaagua

SEQ ID NO: 504930 - RNA, 19 nt, Homo sapiens
  misc_RNA (1)...(19): siRNA sense strand
aaaucuaccgggcaaugaa

SEQ ID NO: 504931 - RNA, 19 nt, Homo sapiens
  misc_RNA (1)...(19): siRNA sense strand
gaaccucauugugcuuucc

SEQ ID NO: 504932 - RNA, 19 nt, Homo sapiens
  misc_RNA (1)...(19): siRNA sense strand
ggaagaagauugcuaccau

SEQ ID NO: 504933 - RNA, 19 nt, Homo sapiens
  misc_RNA (1)...(19): siRNA sense strand
ccacugaggucuucacuuc

SEQ ID NO: 504934 - RNA, 19 nt, Homo sapiens
  misc_RNA (1)...(19): siRNA sense strand
gaaggaggcuggaauugag

SEQ ID NO: 504935 - RNA, 19 nt, Homo sapiens
  misc_RNA (1)...(19): siRNA sense strand
ccaggaagaugaauacaug

SEQ ID NO: 504936 - RNA, 19 nt, Homo sapiens
  misc_RNA (1)...(19): siRNA sense strand
gaaucuuccuugcuuauga

SEQ ID NO: 504937 - RNA, 19 nt, Homo sapiens
  misc_RNA (1)...(19): siRNA sense strand
ggagaaccgugaacuggaa

SEQ ID NO: 504938 - RNA, 19 nt, Homo sapiens
  misc_RNA (1)...(19): siRNA sense strand
gggcauggcuaucuacaau

SEQ ID NO: 504939 - RNA, 19 nt, Homo sapiens
  misc_RNA (1)...(19): siRNA sense strand
acaagaagauuggcuacua

SEQ ID NO: 504940 - RNA, 19 nt, Homo sapiens
  misc_RNA (1)...(19): siRNA sense strand
ccacugagaagaucaauga

SEQ ID NO: 504941 - RNA, 19 nt, Homo sapiens
  misc_RNA (1)...(19): siRNA sense strand
caagaagauuggcuacuau

SEQ ID NO: 504942 - RNA, 19 nt, Homo sapiens
  misc_RNA (1)...(19): siRNA sense strand
guacaaggagcgucucuuu

SEQ ID NO: 504943 - RNA, 19 nt, Homo sapiens
  misc_RNA (1)...(19): siRNA sense strand
gagugcauuugcuuuauaa

SEQ ID NO: 504944 - RNA, 19 nt, Homo sapiens
  misc_RNA (1)...(19): siRNA sense strand
gccaauacccgcagcauuu

SEQ ID NO: 504945 - RNA, 19 nt, Homo sapiens
  misc_RNA (1)...(19): siRNA sense strand
cgagugcauuugcuuuaua

SEQ ID NO: 504946 - RNA, 19 nt, Homo sapiens
  misc_RNA (1)...(19): siRNA sense strand
gcauuugcuuuauaaguga

SEQ ID NO: 504947 - RNA, 19 nt, Homo sapiens
  misc_RNA (1)...(19): siRNA sense strand
gcauggcuaucuacaaugu

SEQ ID NO: 504948 - RNA, 19 nt, Homo sapiens
  misc_RNA (1)...(19): siRNA sense strand
caacgacccuaucaagauc

SEQ ID NO: 504949 - RNA, 19 nt, Homo sapiens
  misc_RNA (1)...(19): siRNA sense strand
aaagaucauugcugagaaa

SEQ ID NO: 504950 - RNA, 19 nt, Homo sapiens
  misc_RNA (1)...(19): siRNA sense strand
ggaugcagccuuugccuuu

SEQ ID NO: 504951 - RNA, 19 nt, Homo sapiens
  misc_RNA (1)...(19): siRNA sense strand
gcacuggcccugaacaaga

SEQ ID NO: 504952 - RNA, 19 nt, Homo sapiens
  misc_RNA (1)...(19): siRNA sense strand
gauauugacgucucuauuc

SEQ ID NO: 504953 - RNA, 19 nt, Homo sapiens
  misc_RNA (1)...(19): siRNA sense strand
caacaugacaucccaggaa

SEQ ID NO: 504954 - RNA, 19 nt, Homo sapiens
  misc_RNA (1)...(19): siRNA sense strand
gaucauugcugagaaagag

SEQ ID NO: 504955 - RNA, 19 nt, Homo sapiens
  misc_RNA (1)...(19): siRNA sense strand
ggaggaaccuaaggaagau

SEQ ID NO: 504956 - RNA, 19 nt, Homo sapiens
  misc_RNA (1)...(19): siRNA sense strand
gggcuacgguuccauguuc

SEQ ID NO: 504957 - RNA, 19 nt, Homo sapiens
  misc_RNA (1)...(19): siRNA sense strand
acaauugguucaagaucua

SEQ ID NO: 504958 - RNA, 19 nt, Homo sapiens
  misc_RNA (1)...(19): siRNA sense strand
ggaagaaguacgucugguu

SEQ ID NO: 504959 - RNA, 19 nt, Homo sapiens
  misc_RNA (1)...(19): siRNA sense strand
gguggcagcuacaagaaga

SEQ ID NO: 504960 - RNA, 19 nt, Homo sapiens
  misc_RNA (1)...(19): siRNA sense strand
gacaauugguucaagaucu

SEQ ID NO: 504961 - RNA, 19 nt, Homo sapiens
  misc_RNA (1)...(19): siRNA sense strand
cggauggcauggacgcuua

SEQ ID NO: 504962 - RNA, 19 nt, Homo sapiens
  misc_RNA (1)...(19): siRNA sense strand
ggugguaugcugacaauug

SEQ ID NO: 504963 - RNA, 19 nt, Homo sapiens
  misc_RNA (1)...(19): siRNA sense strand
uacaacaaccagaccauua

SEQ ID NO: 504964 - RNA, 19 nt, Homo sapiens
  misc_RNA (1)...(19): siRNA sense strand
gcugacaauugguucaaga

SEQ ID NO: 504965 - RNA, 19 nt, Homo sapiens
  misc_RNA (1)...(19): siRNA sense strand
ccagcaggaugcagccuuu

SEQ ID NO: 504966 - RNA, 19 nt, Homo sapiens
  misc_RNA (1)...(19): siRNA sense strand
gcauggauguccucacucu

SEQ ID NO: 504967 - RNA, 19 nt, Homo sapiens
  misc_RNA (1)...(19): siRNA sense strand
gaauuuguggagaaacuaa

SEQ ID NO: 504968 - RNA, 19 nt, Homo sapiens
  misc_RNA (1)...(19): siRNA sense strand
ggagaagucccggcuguug

SEQ ID NO: 504969 - RNA, 19 nt, Homo sapiens
  misc_RNA (1)...(19): siRNA sense strand
gaaccuaaggaagauauug

SEQ ID NO: 504970 - RNA, 19 nt, Homo sapiens
  misc_RNA (1)...(19): siRNA sense strand
caugacaucccaggaauuu

SEQ ID NO: 504971 - RNA, 19 nt, Homo sapiens
  misc_RNA (1)...(19): siRNA sense strand
gcaguccugugccucauca

SEQ ID NO: 504972 - RNA, 19 nt, Homo sapiens
  misc_RNA (1)...(19): siRNA sense strand
cauugcagcuccaggaaga

SEQ ID NO: 504973 - RNA, 19 nt, Homo sapiens
  misc_RNA (1)...(19): siRNA sense strand
ccaccaaguaccuauauga

SEQ ID NO: 504974 - RNA, 19 nt, Homo sapiens
  misc_RNA (1)...(19): siRNA sense strand
cuauaucacucuuguugug

SEQ ID NO: 504975 - RNA, 19 nt, Homo sapiens
  misc_RNA (1)...(19): siRNA sense strand
gaauacauggcuuggcauu

SEQ ID NO: 504976 - RNA, 19 nt, Homo sapiens
  misc_RNA (1)...(19): siRNA sense strand
gggcauggauguccucacu

SEQ ID NO: 504977 - RNA, 19 nt, Homo sapiens
  misc_RNA (1)...(19): siRNA sense strand
gcaccaaggaugaucuuuc

SEQ ID NO: 504978 - RNA, 19 nt, Homo sapiens
  misc_RNA (1)...(19): siRNA sense strand
aaacuaaccaagcgacuga

SEQ ID NO: 504979 - RNA, 19 nt, Homo sapiens
  misc_RNA (1)...(19): siRNA sense strand
ccaggaauuuguggagaaa

SEQ ID NO: 504980 - RNA, 19 nt, Homo sapiens
  misc_RNA (1)...(19): siRNA sense strand
gaaaagaucauugcugaga

SEQ ID NO: 504981 - RNA, 19 nt, Homo sapiens
  misc_RNA (1)...(19): siRNA sense strand
ugaaggaggcuggaauuga

SEQ ID NO: 504982 - RNA, 19 nt, Homo sapiens
  misc_RNA (1)...(19): siRNA sense strand
gaaggagaaccgugaacug

SEQ ID NO: 504983 - RNA, 19 nt, Homo sapiens
  misc_RNA (1)...(19): siRNA sense strand
aagaaggaguggaggaaga

SEQ ID NO: 504984 - RNA, 19 nt, Homo sapiens
  misc_RNA (1)...(19): siRNA sense strand
cuaucaagaucauccuuau

SEQ ID NO: 504985 - RNA, 19 nt, Homo sapiens
  misc_RNA (1)...(19): siRNA sense strand
ggaagauauugacgucucu

SEQ ID NO: 504986 - RNA, 19 nt, Homo sapiens
  misc_RNA (1)...(19): siRNA sense strand
aagauuggcuacuaugaca

SEQ ID NO: 504987 - RNA, 19 nt, Homo sapiens
  misc_RNA (1)...(19): siRNA sense strand
cagaguuucuucucagauc

SEQ ID NO: 504988 - RNA, 19 nt, Homo sapiens
  misc_RNA (1)...(19): siRNA sense strand
gaucuuuccugguccaaaa

SEQ ID NO: 504989 - RNA, 19 nt, Homo sapiens
  misc_RNA (1)...(19): siRNA sense strand
ucauugugcuuuccuaugg

SEQ ID NO: 504990 - RNA, 19 nt, Homo sapiens
  misc_RNA (1)...(19): siRNA sense strand
gcgcaggacaccaugaaga

SEQ ID NO: 504991 - RNA, 19 nt, Homo sapiens
  misc_RNA (1)...(19): siRNA sense strand
ugacaucccaggaauuugu

SEQ ID NO: 504992 - RNA, 19 nt, Homo sapiens
  misc_RNA (1)...(19): siRNA sense strand
cuacgacccuucuaucaac

SEQ ID NO: 504993 - RNA, 19 nt, Homo sapiens
  misc_RNA (1)...(19): siRNA sense strand
guacgucugguuccucauu

SEQ ID NO: 504994 - RNA, 19 nt, Homo sapiens
  misc_RNA (1)...(19): siRNA sense strand
cgaaucaucgugggacuuu

SEQ ID NO: 504995 - RNA, 19 nt, Homo sapiens
  misc_RNA (1)...(19): siRNA sense strand
gcgugaaacucuuugaaaa

SEQ ID NO: 504996 - RNA, 19 nt, Homo sapiens
  misc_RNA (1)...(19): siRNA sense strand
ggacuucaacuacaacaac

SEQ ID NO: 504997 - RNA, 19 nt, Homo sapiens
  misc_RNA (1)...(19): siRNA sense strand
ugcauuugcuuuauaagug

SEQ ID NO: 504998 - RNA, 19 nt, Homo sapiens
  misc_RNA (1)...(19): siRNA sense strand
caaggaggaaccuaaggaa

SEQ ID NO: 504999 - RNA, 19 nt, Homo sapiens
  misc_RNA (1)...(19): siRNA sense strand
gaccauuaccgaccaaauc

SEQ ID NO: 505000 - RNA, 19 nt, Homo sapiens
  misc_RNA (1)...(19): siRNA sense strand
gaggcuggaauugagauua

SEQ ID NO: 505001 - RNA, 19 nt, Homo sapiens
  misc_RNA (1)...(19): siRNA sense strand
gaugcagccuuugccuuug

SEQ ID NO: 505002 - RNA, 19 nt, Homo sapiens
  misc_RNA (1)...(19): siRNA sense strand
gggacauccugccggacua

SEQ ID NO: 505003 - RNA, 19 nt, Homo sapiens
  misc_RNA (1)...(19): siRNA sense strand
gaucuacgacccuucuauc

SEQ ID NO: 505004 - RNA, 19 nt, Homo sapiens
  misc_RNA (1)...(19): siRNA sense strand
gaagauuggcuacuaugac

SEQ ID NO: 505005 - RNA, 19 nt, Homo sapiens
  misc_RNA (1)...(19): siRNA sense strand
gccagaguuucuucucaga

SEQ ID NO: 505006 - RNA, 19 nt, Homo sapiens
  misc_RNA (1)...(19): siRNA sense strand
ccaaggaggaaccuaagga

SEQ ID NO: 505007 - RNA, 19 nt, Homo sapiens
  misc_RNA (1)...(19): siRNA sense strand
uggaggacuucaacuacaa

SEQ ID NO: 505008 - RNA, 19 nt, Homo sapiens
  misc_RNA (1)...(19): siRNA sense strand
ccgcagcauuuccaacaug

SEQ ID NO: 505009 - RNA, 19 nt, Homo sapiens
  misc_RNA (1)...(19): siRNA sense strand
ucucugaacugcgccauca

SEQ ID NO: 505010 - RNA, 19 nt, Homo sapiens
  misc_RNA (1)...(19): siRNA sense strand
acaacgacccuaucaagau

SEQ ID NO: 505011 - RNA, 19 nt, Homo sapiens
  misc_RNA (1)...(19): siRNA sense strand
ggagaaggagaaccgugaa

SEQ ID NO: 505012 - RNA, 19 nt, Homo sapiens
  misc_RNA (1)...(19): siRNA sense strand
auacauggcuuggcauuuu

SEQ ID NO: 505013 - RNA, 19 nt, Homo sapiens
  misc_RNA (1)...(19): siRNA sense strand
ucacaaagaaggaagaaaa

SEQ ID NO: 505014 - RNA, 19 nt, Homo sapiens
  misc_RNA (1)...(19): siRNA sense strand
ccuaucaagaucauccuua

SEQ ID NO: 505015 - RNA, 19 nt, Homo sapiens
  misc_RNA (1)...(19): siRNA sense strand
caaaucuaccgggcaauga

SEQ ID NO: 505016 - RNA, 19 nt, Homo sapiens
  misc_RNA (1)...(19): siRNA sense strand
ggaauuuguggagaaacua

SEQ ID NO: 505017 - RNA, 19 nt, Homo sapiens
  misc_RNA (1)...(19): siRNA sense strand
gacugaagcccggaaaguu

SEQ ID NO: 505018 - RNA, 19 nt, Homo sapiens
  misc_RNA (1)...(19): siRNA sense strand
gggcugcucacuggcuuua

SEQ ID NO: 505019 - RNA, 19 nt, Homo sapiens
  misc_RNA (1)...(19): siRNA sense strand
cuacaacgacccuaucaag

SEQ ID NO: 505020 - RNA, 19 nt, Homo sapiens
  misc_RNA (1)...(19): siRNA sense strand
gcucaccagcccugucaaa

SEQ ID NO: 505021 - RNA, 19 nt, Homo sapiens
  misc_RNA (1)...(19): siRNA sense strand
acaaggagcgucucuuugg

SEQ ID NO: 505022 - RNA, 19 nt, Homo sapiens
  misc_RNA (1)...(19): siRNA sense strand
ggaaccucauugugcuuuc

SEQ ID NO: 505023 - RNA, 19 nt, Homo sapiens
  misc_RNA (1)...(19): siRNA sense strand
gucgagugcauuugcuuua

SEQ ID NO: 505024 - RNA, 19 nt, Homo sapiens
  misc_RNA (1)...(19): siRNA sense strand
gaagauauugacgucucua

SEQ ID NO: 505025 - RNA, 19 nt, Homo sapiens
  misc_RNA (1)...(19): siRNA sense strand
ggccacaucacaacugaga

SEQ ID NO: 505026 - RNA, 19 nt, Homo sapiens
  misc_RNA (1)...(19): siRNA sense strand
gugguaugcugacaauugg

SEQ ID NO: 505027 - RNA, 19 nt, Homo sapiens
  misc_RNA (1)...(19): siRNA sense strand
caaagaaggaagaaaagaa

SEQ ID NO: 505028 - RNA, 19 nt, Homo sapiens
  misc_RNA (1)...(19): siRNA sense strand
ccuccuauaucacucuugu

SEQ ID NO: 505029 - RNA, 19 nt, Homo sapiens
  misc_RNA (1)...(19): siRNA sense strand
acugaagcccggaaaguuu

SEQ ID NO: 505030 - RNA, 19 nt, Homo sapiens
  misc_RNA (1)...(19): siRNA sense strand
gggugucucuggccaugug

SEQ ID NO: 505031 - RNA, 19 nt, Homo sapiens
  misc_RNA (1)...(19): siRNA sense strand
cccaggaauuuguggagaa

SEQ ID NO: 505032 - RNA, 19 nt, Homo sapiens
  misc_RNA (1)...(19): siRNA sense strand
ggaagaagauugcuaccau

SEQ ID NO: 505033 - RNA, 19 nt, Homo sapiens
  misc_RNA (1)...(19): siRNA sense strand
ccacugaggucuucacuuc

SEQ ID NO: 505034 - RNA, 19 nt, Homo sapiens
  misc_RNA (1)...(19): siRNA sense strand
gaaggaggcuggaauugag

SEQ ID NO: 505035 - RNA, 19 nt, Homo sapiens
  misc_RNA (1)...(19): siRNA sense strand
ccaggaagaugaauacaug

SEQ ID NO: 505036 - RNA, 19 nt, Homo sapiens
  misc_RNA (1)...(19): siRNA sense strand
gaaucuuccuugcuuauga

SEQ ID NO: 505037 - RNA, 19 nt, Homo sapiens
  misc_RNA (1)...(19): siRNA sense strand
ggagaaccgugaacuggaa

SEQ ID NO: 505038 - RNA, 19 nt, Homo sapiens
  misc_RNA (1)...(19): siRNA sense strand
gggcauggcuaucuacaau

SEQ ID NO: 505039 - RNA, 19 nt, Homo sapiens
  misc_RNA (1)...(19): siRNA sense strand
acaagaagauuggcuacua

SEQ ID NO: 505040 - RNA, 19 nt, Homo sapiens
  misc_RNA (1)...(19): siRNA sense strand
ccacugagaagaucaauga

SEQ ID NO: 505041 - RNA, 19 nt, Homo sapiens
  misc_RNA (1)...(19): siRNA sense strand
caagaagauuggcuacuau

SEQ ID NO: 505042 - RNA, 19 nt, Homo sapiens
  misc_RNA (1)...(19): siRNA sense strand
guacaaggagcgucucuuu

SEQ ID NO: 505043 - RNA, 19 nt, Homo sapiens
  misc_RNA (1)...(19): siRNA sense strand
gagugcauuugcuuuauaa

SEQ ID NO: 505044 - RNA, 19 nt, Homo sapiens
  misc_RNA (1)...(19): siRNA sense strand
gccaauacccgcagcauuu

SEQ ID NO: 505045 - RNA, 19 nt, Homo sapiens
  misc_RNA (1)...(19): siRNA sense strand
cgagugcauuugcuuuaua

SEQ ID NO: 505046 - RNA, 19 nt, Homo sapiens
  misc_RNA (1)...(19): siRNA sense strand
gcauuugcuuuauaaguga

SEQ ID NO: 505047 - RNA, 19 nt, Homo sapiens
  misc_RNA (1)...(19): siRNA sense strand
gcauggcuaucuacaaugu

SEQ ID NO: 505048 - RNA, 19 nt, Homo sapiens
  misc_RNA (1)...(19): siRNA sense strand
caacgacccuaucaagauc

SEQ ID NO: 505049 - RNA, 19 nt, Homo sapiens
  misc_RNA (1)...(19): siRNA sense strand
aaagaucauugcugagaaa

SEQ ID NO: 505050 - RNA, 19 nt, Homo sapiens
  misc_RNA (1)...(19): siRNA sense strand
ggaugcagccuuugccuuu

SEQ ID NO: 505051 - RNA, 19 nt, Homo sapiens
  misc_RNA (1)...(19): siRNA sense strand
gcacuggcccugaacaaga

SEQ ID NO: 505052 - RNA, 19 nt, Homo sapiens
  misc_RNA (1)...(19): siRNA sense strand
gauauugacgucucuauuc

SEQ ID NO: 505053 - RNA, 19 nt, Homo sapiens
  misc_RNA (1)...(19): siRNA sense strand
caacaugacaucccaggaa

SEQ ID NO: 505054 - RNA, 19 nt, Homo sapiens
  misc_RNA (1)...(19): siRNA sense strand
gaucauugcugagaaagag

SEQ ID NO: 505055 - RNA, 19 nt, Homo sapiens
  misc_RNA (1)...(19): siRNA sense strand
ggaggaaccuaaggaagau

SEQ ID NO: 505056 - RNA, 19 nt, Homo sapiens
  misc_RNA (1)...(19): siRNA sense strand
gggcuacgguuccauguuc

SEQ ID NO: 505057 - RNA, 19 nt, Homo sapiens
  misc_RNA (1)...(19): siRNA sense strand
acaauugguucaagaucua

SEQ ID NO: 505058 - RNA, 19 nt, Homo sapiens
  misc_RNA (1)...(19): siRNA sense strand
ggaagaaguacgucugguu

SEQ ID NO: 505059 - RNA, 19 nt, Homo sapiens
  misc_RNA (1)...(19): siRNA sense strand
gguggcagcuacaagaaga

SEQ ID NO: 505060 - RNA, 19 nt, Homo sapiens
  misc_RNA (1)...(19): siRNA sense strand
gacaauugguucaagaucu

SEQ ID NO: 505061 - RNA, 19 nt, Homo sapiens
  misc_RNA (1)...(19): siRNA sense strand
cggauggcauggacgcuua

SEQ ID NO: 505062 - RNA, 19 nt, Homo sapiens
  misc_RNA (1)...(19): siRNA sense strand
ggugguaugcugacaauug

SEQ ID NO: 505063 - RNA, 19 nt, Homo sapiens
  misc_RNA (1)...(19): siRNA sense strand
uacaacaaccagaccauua

SEQ ID NO: 505064 - RNA, 19 nt, Homo sapiens
  misc_RNA (1)...(19): siRNA sense strand
gcugacaauugguucaaga

SEQ ID NO: 505065 - RNA, 19 nt, Homo sapiens
  misc_RNA (1)...(19): siRNA sense strand
ccagcaggaugcagccuuu

SEQ ID NO: 505066 - RNA, 19 nt, Homo sapiens
  misc_RNA (1)...(19): siRNA sense strand
gcauggauguccucacucu

SEQ ID NO: 505067 - RNA, 19 nt, Homo sapiens
  misc_RNA (1)...(19): siRNA sense strand
gaauuuguggagaaacuaa

SEQ ID NO: 505068 - RNA, 19 nt, Homo sapiens
  misc_RNA (1)...(19): siRNA sense strand
ggagaagucccggcuguug

SEQ ID NO: 505069 - RNA, 19 nt, Homo sapiens
  misc_RNA (1)...(19): siRNA sense strand
gaaccuaaggaagauauug

SEQ ID NO: 505070 - RNA, 19 nt, Homo sapiens
  misc_RNA (1)...(19): siRNA sense strand
caugacaucccaggaauuu

SEQ ID NO: 505071 - RNA, 19 nt, Homo sapiens
  misc_RNA (1)...(19): siRNA sense strand
gcaguccugugccucauca

SEQ ID NO: 505072 - RNA, 19 nt, Homo sapiens
  misc_RNA (1)...(19): siRNA sense strand
cauugcagcuccaggaaga

SEQ ID NO: 505073 - RNA, 19 nt, Homo sapiens
  misc_RNA (1)...(19): siRNA sense strand
ccaccaaguaccuauauga

SEQ ID NO: 505074 - RNA, 19 nt, Homo sapiens
  misc_RNA (1)...(19): siRNA sense strand
cuauaucacucuuguugug

SEQ ID NO: 505075 - RNA, 19 nt, Homo sapiens
  misc_RNA (1)...(19): siRNA sense strand
gaauacauggcuuggcauu

SEQ ID NO: 505076 - RNA, 19 nt, Homo sapiens
  misc_RNA (1)...(19): siRNA sense strand
gggcauggauguccucacu

SEQ ID NO: 505077 - RNA, 19 nt, Homo sapiens
  misc_RNA (1)...(19): siRNA sense strand
gcaccaaggaugaucuuuc

SEQ ID NO: 505078 - RNA, 19 nt, Homo sapiens
  misc_RNA (1)...(19): siRNA sense strand
aaacuaaccaagcgacuga

SEQ ID NO: 505079 - RNA, 19 nt, Homo sapiens
  misc_RNA (1)...(19): siRNA sense strand
ccaggaauuuguggagaaa

SEQ ID NO: 505080 - RNA, 19 nt, Homo sapiens
  misc_RNA (1)...(19): siRNA sense strand
gaaaagaucauugcugaga

SEQ ID NO: 505081 - RNA, 19 nt, Homo sapiens
  misc_RNA (1)...(19): siRNA sense strand
ugaaggaggcuggaauuga

SEQ ID NO: 505082 - RNA, 19 nt, Homo sapiens
  misc_RNA (1)...(19): siRNA sense strand
gaaggagaaccgugaacug

SEQ ID NO: 505083 - RNA, 19 nt, Homo sapiens
  misc_RNA (1)...(19): siRNA sense strand
aagaaggaguggaggaaga

SEQ ID NO: 505084 - RNA, 19 nt, Homo sapiens
  misc_RNA (1)...(19): siRNA sense strand
cuaucaagaucauccuuau

SEQ ID NO: 505085 - RNA, 19 nt, Homo sapiens
  misc_RNA (1)...(19): siRNA sense strand
ggaagauauugacgucucu

SEQ ID NO: 505086 - RNA, 19 nt, Homo sapiens
  misc_RNA (1)...(19): siRNA sense strand
aagauuggcuacuaugaca

SEQ ID NO: 505087 - RNA, 19 nt, Homo sapiens
  misc_RNA (1)...(19): siRNA sense strand
cagaguuucuucucagauc

SEQ ID NO: 505088 - RNA, 19 nt, Homo sapiens
  misc_RNA (1)...(19): siRNA sense strand
gaucuuuccugguccaaaa

SEQ ID NO: 505089 - RNA, 19 nt, Homo sapiens
  misc_RNA (1)...(19): siRNA sense strand
ucauugugcuuuccuaugg

SEQ ID NO: 505090 - RNA, 19 nt, Homo sapiens
  misc_RNA (1)...(19): siRNA sense strand
gcgcaggacaccaugaaga

SEQ ID NO: 505091 - RNA, 19 nt, Homo sapiens
  misc_RNA (1)...(19): siRNA sense strand
ugacaucccaggaauuugu

SEQ ID NO: 505092 - RNA, 19 nt, Homo sapiens
  misc_RNA (1)...(19): siRNA sense strand
cuacgacccuucuaucaac

SEQ ID NO: 505093 - RNA, 19 nt, Homo sapiens
  misc_RNA (1)...(19): siRNA sense strand
guacgucugguuccucauu

SEQ ID NO: 505094 - RNA, 19 nt, Homo sapiens
  misc_RNA (1)...(19): siRNA sense strand
cgaaucaucgugggacuuu

SEQ ID NO: 505095 - RNA, 19 nt, Homo sapiens
  misc_RNA (1)...(19): siRNA sense strand
gcgugaaacucuuugaaaa

SEQ ID NO: 505096 - RNA, 19 nt, Homo sapiens
  misc_RNA (1)...(19): siRNA sense strand
ggacuucaacuacaacaac

SEQ ID NO: 505097 - RNA, 19 nt, Homo sapiens
  misc_RNA (1)...(19): siRNA sense strand
ugcauuugcuuuauaagug

SEQ ID NO: 505098 - RNA, 19 nt, Homo sapiens
  misc_RNA (1)...(19): siRNA sense strand
caaggaggaaccuaaggaa

SEQ ID NO: 505099 - RNA, 19 nt, Homo sapiens
  misc_RNA (1)...(19): siRNA sense strand
gaccauuaccgaccaaauc

SEQ ID NO: 505100 - RNA, 19 nt, Homo sapiens
  misc_RNA (1)...(19): siRNA sense strand
gaggcuggaauugagauua

SEQ ID NO: 505101 - RNA, 19 nt, Homo sapiens
  misc_RNA (1)...(19): siRNA sense strand
gaugcagccuuugccuuug

SEQ ID NO: 505102 - RNA, 19 nt, Homo sapiens
  misc_RNA (1)...(19): siRNA sense strand
gggacauccugccggacua

SEQ ID NO: 505103 - RNA, 19 nt, Homo sapiens
  misc_RNA (1)...(19): siRNA sense strand
gaucuacgacccuucuauc

SEQ ID NO: 505104 - RNA, 19 nt, Homo sapiens
  misc_RNA (1)...(19): siRNA sense strand
gaagauuggcuacuaugac

SEQ ID NO: 505105 - RNA, 19 nt, Homo sapiens
  misc_RNA (1)...(19): siRNA sense strand
gccagaguuucuucucaga

SEQ ID NO: 505106 - RNA, 19 nt, Homo sapiens
  misc_RNA (1)...(19): siRNA sense strand
ccaaggaggaaccuaagga

SEQ ID NO: 505107 - RNA, 19 nt, Homo sapiens
  misc_RNA (1)...(19): siRNA sense strand
uggaggacuucaacuacaa

SEQ ID NO: 505108 - RNA, 19 nt, Homo sapiens
  misc_RNA (1)...(19): siRNA sense strand
ccgcagcauuuccaacaug

SEQ ID NO: 505109 - RNA, 19 nt, Homo sapiens
  misc_RNA (1)...(19): siRNA sense strand
ucucugaacugcgccauca

SEQ ID NO: 505110 - RNA, 19 nt, Homo sapiens
  misc_RNA (1)...(19): siRNA sense strand
acaacgacccuaucaagau

SEQ ID NO: 505111 - RNA, 19 nt, Homo sapiens
  misc_RNA (1)...(19): siRNA sense strand
ggagaaggagaaccgugaa

SEQ ID NO: 505112 - RNA, 19 nt, Homo sapiens
  misc_RNA (1)...(19): siRNA sense strand
auacauggcuuggcauuuu

SEQ ID NO: 505113 - RNA, 19 nt, Homo sapiens
  misc_RNA (1)...(19): siRNA sense strand
ucacaaagaaggaagaaaa

SEQ ID NO: 505114 - RNA, 19 nt, Homo sapiens
  misc_RNA (1)...(19): siRNA sense strand
ccuaucaagaucauccuua

SEQ ID NO: 505115 - RNA, 19 nt, Homo sapiens
  misc_RNA (1)...(19): siRNA sense strand
caaaucuaccgggcaauga

SEQ ID NO: 505116 - RNA, 19 nt, Homo sapiens
  misc_RNA (1)...(19): siRNA sense strand
ggaauuuguggagaaacua

SEQ ID NO: 505117 - RNA, 19 nt, Homo sapiens
  misc_RNA (1)...(19): siRNA sense strand
gacugaagcccggaaaguu

SEQ ID NO: 505118 - RNA, 19 nt, Homo sapiens
  misc_RNA (1)...(19): siRNA sense strand
gggcugcucacuggcuuua

SEQ ID NO: 505119 - RNA, 19 nt, Homo sapiens
  misc_RNA (1)...(19): siRNA sense strand
cuacaacgacccuaucaag

SEQ ID NO: 505120 - RNA, 19 nt, Homo sapiens
  misc_RNA (1)...(19): siRNA sense strand
gcucaccagcccugucaaa

SEQ ID NO: 505121 - RNA, 19 nt, Homo sapiens
  misc_RNA (1)...(19): siRNA sense strand
acaaggagcgucucuuugg

SEQ ID NO: 505122 - RNA, 19 nt, Homo sapiens
  misc_RNA (1)...(19): siRNA sense strand
ggaaccucauugugcuuuc

SEQ ID NO: 505123 - RNA, 19 nt, Homo sapiens
  misc_RNA (1)...(19): siRNA sense strand
gucgagugcauuugcuuua

SEQ ID NO: 505124 - RNA, 19 nt, Homo sapiens
  misc_RNA (1)...(19): siRNA sense strand
gaagauauugacgucucua

SEQ ID NO: 505125 - RNA, 19 nt, Homo sapiens
  misc_RNA (1)...(19): siRNA sense strand
ggccacaucacaacugaga

SEQ ID NO: 505126 - RNA, 19 nt, Homo sapiens
  misc_RNA (1)...(19): siRNA sense strand
gugguaugcugacaauugg

SEQ ID NO: 505127 - RNA, 19 nt, Homo sapiens
  misc_RNA (1)...(19): siRNA sense strand
caaagaaggaagaaaagaa

SEQ ID NO: 505128 - RNA, 19 nt, Homo sapiens
  misc_RNA (1)...(19): siRNA sense strand
ccuccuauaucacucuugu

SEQ ID NO: 505129 - RNA, 19 nt, Homo sapiens
  misc_RNA (1)...(19): siRNA sense strand
acugaagcccggaaaguuu

SEQ ID NO: 505130 - RNA, 19 nt, Homo sapiens
  misc_RNA (1)...(19): siRNA sense strand
gggugucucuggccaugug

SEQ ID NO: 505131 - RNA, 19 nt, Homo sapiens
  misc_RNA (1)...(19): siRNA sense strand
cccaggaauuuguggagaa

SEQ ID NO: 505132 - RNA, 19 nt, Homo sapiens
  misc_RNA (1)...(19): siRNA sense strand
ggaagaagauugcuaccau

SEQ ID NO: 505133 - RNA, 19 nt, Homo sapiens
  misc_RNA (1)...(19): siRNA sense strand
ccacugaggucuucacuuc

SEQ ID NO: 505134 - RNA, 19 nt, Homo sapiens
  misc_RNA (1)...(19): siRNA sense strand
gaaggaggcuggaauugag

SEQ ID NO: 505135 - RNA, 19 nt, Homo sapiens
  misc_RNA (1)...(19): siRNA sense strand
ccaggaagaugaauacaug

SEQ ID NO: 505136 - RNA, 19 nt, Homo sapiens
  misc_RNA (1)...(19): siRNA sense strand
gaaucuuccuugcuuauga

SEQ ID NO: 505137 - RNA, 19 nt, Homo sapiens
  misc_RNA (1)...(19): siRNA sense strand
ggagaaccgugaacuggaa

SEQ ID NO: 505138 - RNA, 19 nt, Homo sapiens
  misc_RNA (1)...(19): siRNA sense strand
gggcauggcuaucuacaau

SEQ ID NO: 505139 - RNA, 19 nt, Homo sapiens
  misc_RNA (1)...(19): siRNA sense strand
acaagaagauuggcuacua

SEQ ID NO: 505140 - RNA, 19 nt, Homo sapiens
  misc_RNA (1)...(19): siRNA sense strand
ccacugagaagaucaauga

SEQ ID NO: 505141 - RNA, 19 nt, Homo sapiens
  misc_RNA (1)...(19): siRNA sense strand
caagaagauuggcuacuau

SEQ ID NO: 505142 - RNA, 19 nt, Homo sapiens
  misc_RNA (1)...(19): siRNA sense strand
guacaaggagcgucucuuu

SEQ ID NO: 505143 - RNA, 19 nt, Homo sapiens
  misc_RNA (1)...(19): siRNA sense strand
gagugcauuugcuuuauaa

SEQ ID NO: 505144 - RNA, 19 nt, Homo sapiens
  misc_RNA (1)...(19): siRNA sense strand
gccaauacccgcagcauuu

SEQ ID NO: 505145 - RNA, 19 nt, Homo sapiens
  misc_RNA (1)...(19): siRNA sense strand
cgagugcauuugcuuuaua

SEQ ID NO: 505146 - RNA, 19 nt, Homo sapiens
  misc_RNA (1)...(19): siRNA sense strand
gcauuugcuuuauaaguga

SEQ ID NO: 505147 - RNA, 19 nt, Homo sapiens
  misc_RNA (1)...(19): siRNA sense strand
gcauggcuaucuacaaugu

SEQ ID NO: 505148 - RNA, 19 nt, Homo sapiens
  misc_RNA (1)...(19): siRNA sense strand
caacgacccuaucaagauc

SEQ ID NO: 505149 - RNA, 19 nt, Homo sapiens
  misc_RNA (1)...(19): siRNA sense strand
aaagaucauugcugagaaa

SEQ ID NO: 505150 - RNA, 19 nt, Homo sapiens
  misc_RNA (1)...(19): siRNA sense strand
ggaugcagccuuugccuuu

SEQ ID NO: 505151 - RNA, 19 nt, Homo sapiens
  misc_RNA (1)...(19): siRNA sense strand
gcacuggcccugaacaaga

SEQ ID NO: 505152 - RNA, 19 nt, Homo sapiens
  misc_RNA (1)...(19): siRNA sense strand
gauauugacgucucuauuc

SEQ ID NO: 505153 - RNA, 19 nt, Homo sapiens
  misc_RNA (1)...(19): siRNA sense strand
caacaugacaucccaggaa

SEQ ID NO: 505154 - RNA, 19 nt, Homo sapiens
  misc_RNA (1)...(19): siRNA sense strand
gaucauugcugagaaagag

SEQ ID NO: 505155 - RNA, 19 nt, Homo sapiens
  misc_RNA (1)...(19): siRNA sense strand
ggaggaaccuaaggaagau

SEQ ID NO: 505156 - RNA, 19 nt, Homo sapiens
  misc_RNA (1)...(19): siRNA sense strand
gggcuacgguuccauguuc

SEQ ID NO: 505157 - RNA, 19 nt, Homo sapiens
  misc_RNA (1)...(19): siRNA sense strand
acaauugguucaagaucua

SEQ ID NO: 505158 - RNA, 19 nt, Homo sapiens
  misc_RNA (1)...(19): siRNA sense strand
ggaagaaguacgucugguu

SEQ ID NO: 505159 - RNA, 19 nt, Homo sapiens
  misc_RNA (1)...(19): siRNA sense strand
gguggcagcuacaagaaga

SEQ ID NO: 505160 - RNA, 19 nt, Homo sapiens
  misc_RNA (1)...(19): siRNA sense strand
gacaauugguucaagaucu

SEQ ID NO: 505161 - RNA, 19 nt, Homo sapiens
  misc_RNA (1)...(19): siRNA sense strand
cggauggcauggacgcuua

SEQ ID NO: 505162 - RNA, 19 nt, Homo sapiens
  misc_RNA (1)...(19): siRNA sense strand
ggugguaugcugacaauug

SEQ ID NO: 505163 - RNA, 19 nt, Homo sapiens
  misc_RNA (1)...(19): siRNA sense strand
uacaacaaccagaccauua

SEQ ID NO: 505164 - RNA, 19 nt, Homo sapiens
  misc_RNA (1)...(19): siRNA sense strand
gcugacaauugguucaaga

SEQ ID NO: 505165 - RNA, 19 nt, Homo sapiens
  misc_RNA (1)...(19): siRNA sense strand
ccagcaggaugcagccuuu

SEQ ID NO: 505166 - RNA, 19 nt, Homo sapiens
  misc_RNA (1)...(19): siRNA sense strand
gcauggauguccucacucu

SEQ ID NO: 505167 - RNA, 19 nt, Homo sapiens
  misc_RNA (1)...(19): siRNA sense strand
gaauuuguggagaaacuaa

SEQ ID NO: 505168 - RNA, 19 nt, Homo sapiens
  misc_RNA (1)...(19): siRNA sense strand
ggagaagucccggcuguug

SEQ ID NO: 505169 - RNA, 19 nt, Homo sapiens
  misc_RNA (1)...(19): siRNA sense strand
gaaccuaaggaagauauug

SEQ ID NO: 505170 - RNA, 19 nt, Homo sapiens
  misc_RNA (1)...(19): siRNA sense strand
caugacaucccaggaauuu

SEQ ID NO: 505171 - RNA, 19 nt, Homo sapiens
  misc_RNA (1)...(19): siRNA sense strand
gcaguccugugccucauca

SEQ ID NO: 505172 - RNA, 19 nt, Homo sapiens
  misc_RNA (1)...(19): siRNA sense strand
cauugcagcuccaggaaga

SEQ ID NO: 505173 - RNA, 19 nt, Homo sapiens
  misc_RNA (1)...(19): siRNA sense strand
ccaccaaguaccuauauga

SEQ ID NO: 505174 - RNA, 19 nt, Homo sapiens
  misc_RNA (1)...(19): siRNA sense strand
cuauaucacucuuguugug

SEQ ID NO: 505175 - RNA, 19 nt, Homo sapiens
  misc_RNA (1)...(19): siRNA sense strand
gaauacauggcuuggcauu

SEQ ID NO: 505176 - RNA, 19 nt, Homo sapiens
  misc_RNA (1)...(19): siRNA sense strand
gggcauggauguccucacu

SEQ ID NO: 505177 - RNA, 19 nt, Homo sapiens
  misc_RNA (1)...(19): siRNA sense strand
gcaccaaggaugaucuuuc

SEQ ID NO: 505178 - RNA, 19 nt, Homo sapiens
  misc_RNA (1)...(19): siRNA sense strand
aaacuaaccaagcgacuga

SEQ ID NO: 505179 - RNA, 19 nt, Homo sapiens
  misc_RNA (1)...(19): siRNA sense strand
ccaggaauuuguggagaaa

SEQ ID NO: 505180 - RNA, 19 nt, Homo sapiens
  misc_RNA (1)...(19): siRNA sense strand
gaaaagaucauugcugaga

SEQ ID NO: 505181 - RNA, 19 nt, Homo sapiens
  misc_RNA (1)...(19): siRNA sense strand
ugaaggaggcuggaauuga

SEQ ID NO: 505182 - RNA, 19 nt, Homo sapiens
  misc_RNA (1)...(19): siRNA sense strand
gaaggagaaccgugaacug

SEQ ID NO: 505183 - RNA, 19 nt, Homo sapiens
  misc_RNA (1)...(19): siRNA sense strand
aagaaggaguggaggaaga

SEQ ID NO: 505184 - RNA, 19 nt, Homo sapiens
  misc_RNA (1)...(19): siRNA sense strand
cuaucaagaucauccuuau

SEQ ID NO: 505185 - RNA, 19 nt, Homo sapiens
  misc_RNA (1)...(19): siRNA sense strand
ggaagauauugacgucucu

SEQ ID NO: 505186 - RNA, 19 nt, Homo sapiens
  misc_RNA (1)...(19): siRNA sense strand
aagauuggcuacuaugaca

SEQ ID NO: 505187 - RNA, 19 nt, Homo sapiens
  misc_RNA (1)...(19): siRNA sense strand
cagaguuucuucucagauc

SEQ ID NO: 505188 - RNA, 19 nt, Homo sapiens
  misc_RNA (1)...(19): siRNA sense strand
gaucuuuccugguccaaaa

SEQ ID NO: 505189 - RNA, 19 nt, Homo sapiens
  misc_RNA (1)...(19): siRNA sense strand
ucauugugcuuuccuaugg

SEQ ID NO: 505190 - RNA, 19 nt, Homo sapiens
  misc_RNA (1)...(19): siRNA sense strand
gcgcaggacaccaugaaga

SEQ ID NO: 505191 - RNA, 19 nt, Homo sapiens
  misc_RNA (1)...(19): siRNA sense strand
ugacaucccaggaauuugu

SEQ ID NO: 505192 - RNA, 19 nt, Homo sapiens
  misc_RNA (1)...(19): siRNA sense strand
cuacgacccuucuaucaac

SEQ ID NO: 505193 - RNA, 19 nt, Homo sapiens
  misc_RNA (1)...(19): siRNA sense strand
guacgucugguuccucauu

SEQ ID NO: 505194 - RNA, 19 nt, Homo sapiens
  misc_RNA (1)...(19): siRNA sense strand
cgaaucaucgugggacuuu

SEQ ID NO: 505195 - RNA, 19 nt, Homo sapiens
  misc_RNA (1)...(19): siRNA sense strand
gcgugaaacucuuugaaaa

SEQ ID NO: 505196 - RNA, 19 nt, Homo sapiens
  misc_RNA (1)...(19): siRNA sense strand
ggacuucaacuacaacaac

SEQ ID NO: 505197 - RNA, 19 nt, Homo sapiens
  misc_RNA (1)...(19): siRNA sense strand
ugcauuugcuuuauaagug

SEQ ID NO: 505198 - RNA, 19 nt, Homo sapiens
  misc_RNA (1)...(19): siRNA sense strand
caaggaggaaccuaaggaa

SEQ ID NO: 505199 - RNA, 19 nt, Homo sapiens
  misc_RNA (1)...(19): siRNA sense strand
gaccauuaccgaccaaauc

SEQ ID NO: 505200 - RNA, 19 nt, Homo sapiens
  misc_RNA (1)...(19): siRNA sense strand
gaggcuggaauugagauua

SEQ ID NO: 505201 - RNA, 19 nt, Homo sapiens
  misc_RNA (1)...(19): siRNA sense strand
gaugcagccuuugccuuug

SEQ ID NO: 505202 - RNA, 19 nt, Homo sapiens
  misc_RNA (1)...(19): siRNA sense strand
gggacauccugccggacua

SEQ ID NO: 505203 - RNA, 19 nt, Homo sapiens
  misc_RNA (1)...(19): siRNA sense strand
gaucuacgacccuucuauc

SEQ ID NO: 505204 - RNA, 19 nt, Homo sapiens
  misc_RNA (1)...(19): siRNA sense strand
gaagauuggcuacuaugac

SEQ ID NO: 505205 - RNA, 19 nt, Homo sapiens
  misc_RNA (1)...(19): siRNA sense strand
gccagaguuucuucucaga

SEQ ID NO: 505206 - RNA, 19 nt, Homo sapiens
  misc_RNA (1)...(19): siRNA sense strand
ccaaggaggaaccuaagga

SEQ ID NO: 505207 - RNA, 19 nt, Homo sapiens
  misc_RNA (1)...(19): siRNA sense strand
uggaggacuucaacuacaa

SEQ ID NO: 505208 - RNA, 19 nt, Homo sapiens
  misc_RNA (1)...(19): siRNA sense strand
ccgcagcauuuccaacaug

SEQ ID NO: 505209 - RNA, 19 nt, Homo sapiens
  misc_RNA (1)...(19): siRNA sense strand
ucucugaacugcgccauca

SEQ ID NO: 505210 - RNA, 19 nt, Homo sapiens
  misc_RNA (1)...(19): siRNA sense strand
acaacgacccuaucaagau

SEQ ID NO: 505211 - RNA, 19 nt, Homo sapiens
  misc_RNA (1)...(19): siRNA sense strand
ggagaaggagaaccgugaa

SEQ ID NO: 505212 - RNA, 19 nt, Homo sapiens
  misc_RNA (1)...(19): siRNA sense strand
auacauggcuuggcauuuu

SEQ ID NO: 505213 - RNA, 19 nt, Homo sapiens
  misc_RNA (1)...(19): siRNA sense strand
ucacaaagaaggaagaaaa

SEQ ID NO: 505214 - RNA, 19 nt, Homo sapiens
  misc_RNA (1)...(19): siRNA sense strand
ccuaucaagaucauccuua

SEQ ID NO: 505215 - RNA, 19 nt, Homo sapiens
  misc_RNA (1)...(19): siRNA sense strand
caaaucuaccgggcaauga

SEQ ID NO: 505216 - RNA, 19 nt, Homo sapiens
  misc_RNA (1)...(19): siRNA sense strand
ggaauuuguggagaaacua

SEQ ID NO: 505217 - RNA, 19 nt, Homo sapiens
  misc_RNA (1)...(19): siRNA sense strand
gacugaagcccggaaaguu

SEQ ID NO: 505218 - RNA, 19 nt, Homo sapiens
  misc_RNA (1)...(19): siRNA sense strand
gggcugcucacuggcuuua

SEQ ID NO: 505219 - RNA, 19 nt, Homo sapiens
  misc_RNA (1)...(19): siRNA sense strand
cuacaacgacccuaucaag

SEQ ID NO: 505220 - RNA, 19 nt, Homo sapiens
  misc_RNA (1)...(19): siRNA sense strand
gcucaccagcccugucaaa

SEQ ID NO: 505221 - RNA, 19 nt, Homo sapiens
  misc_RNA (1)...(19): siRNA sense strand
acaaggagcgucucuuugg

SEQ ID NO: 505222 - RNA, 19 nt, Homo sapiens
  misc_RNA (1)...(19): siRNA sense strand
ggaaccucauugugcuuuc

SEQ ID NO: 505223 - RNA, 19 nt, Homo sapiens
  misc_RNA (1)...(19): siRNA sense strand
gucgagugcauuugcuuua

SEQ ID NO: 505224 - RNA, 19 nt, Homo sapiens
  misc_RNA (1)...(19): siRNA sense strand
gaagauauugacgucucua

SEQ ID NO: 505225 - RNA, 19 nt, Homo sapiens
  misc_RNA (1)...(19): siRNA sense strand
ggccacaucacaacugaga

SEQ ID NO: 505226 - RNA, 19 nt, Homo sapiens
  misc_RNA (1)...(19): siRNA sense strand
gugguaugcugacaauugg

SEQ ID NO: 505227 - RNA, 19 nt, Homo sapiens
  misc_RNA (1)...(19): siRNA sense strand
caaagaaggaagaaaagaa

SEQ ID NO: 505228 - RNA, 19 nt, Homo sapiens
  misc_RNA (1)...(19): siRNA sense strand
ccuccuauaucacucuugu

SEQ ID NO: 505229 - RNA, 19 nt, Homo sapiens
  misc_RNA (1)...(19): siRNA sense strand
acugaagcccggaaaguuu

SEQ ID NO: 505230 - RNA, 19 nt, Homo sapiens
  misc_RNA (1)...(19): siRNA sense strand
gggugucucuggccaugug

SEQ ID NO: 505231 - RNA, 19 nt, Homo sapiens
  misc_RNA (1)...(19): siRNA sense strand
cccaggaauuuguggagaa

SEQ ID NO: 505232 - RNA, 19 nt, Homo sapiens
  misc_RNA (1)...(19): siRNA sense strand
ggaagaagauugcuaccau

SEQ ID NO: 505233 - RNA, 19 nt, Homo sapiens
  misc_RNA (1)...(19): siRNA sense strand
ccacugaggucuucacuuc

SEQ ID NO: 505234 - RNA, 19 nt, Homo sapiens
  misc_RNA (1)...(19): siRNA sense strand
gaaggaggcuggaauugag

SEQ ID NO: 505235 - RNA, 19 nt, Homo sapiens
  misc_RNA (1)...(19): siRNA sense strand
acaagaagauuggcuacua

SEQ ID NO: 505236 - RNA, 19 nt, Homo sapiens
  misc_RNA (1)...(19): siRNA sense strand
caagaagauuggcuacuau

SEQ ID NO: 505237 - RNA, 19 nt, Homo sapiens
  misc_RNA (1)...(19): siRNA sense strand
guacaaggagcgucucuuu

SEQ ID NO: 505238 - RNA, 19 nt, Homo sapiens
  misc_RNA (1)...(19): siRNA sense strand
gccaauacccgcagcauuu

SEQ ID NO: 505239 - RNA, 19 nt, Homo sapiens
  misc_RNA (1)...(19): siRNA sense strand
caacgacccuaucaagauc

SEQ ID NO: 505240 - RNA, 19 nt, Homo sapiens
  misc_RNA (1)...(19): siRNA sense strand
gcacuggcccugaacaaga

SEQ ID NO: 505241 - RNA, 19 nt, Homo sapiens
  misc_RNA (1)...(19): siRNA sense strand
caacaugacaucccaggaa

SEQ ID NO: 505242 - RNA, 19 nt, Homo sapiens
  misc_RNA (1)...(19): siRNA sense strand
acaauugguucaagaucua

SEQ ID NO: 505243 - RNA, 19 nt, Homo sapiens
  misc_RNA (1)...(19): siRNA sense strand
ggaagaaguacgucugguu

SEQ ID NO: 505244 - RNA, 19 nt, Homo sapiens
  misc_RNA (1)...(19): siRNA sense strand
gguggcagcuacaagaaga

SEQ ID NO: 505245 - RNA, 19 nt, Homo sapiens
  misc_RNA (1)...(19): siRNA sense strand
gacaauugguucaagaucu

SEQ ID NO: 505246 - RNA, 19 nt, Homo sapiens
  misc_RNA (1)...(19): siRNA sense strand
cggauggcauggacgcuua

SEQ ID NO: 505247 - RNA, 19 nt, Homo sapiens
  misc_RNA (1)...(19): siRNA sense strand
ggugguaugcugacaauug

SEQ ID NO: 505248 - RNA, 19 nt, Homo sapiens
  misc_RNA (1)...(19): siRNA sense strand
uacaacaaccagaccauua

SEQ ID NO: 505249 - RNA, 19 nt, Homo sapiens
  misc_RNA (1)...(19): siRNA sense strand
gcugacaauugguucaaga

SEQ ID NO: 505250 - RNA, 19 nt, Homo sapiens
  misc_RNA (1)...(19): siRNA sense strand
gaauuuguggagaaacuaa

SEQ ID NO: 505251 - RNA, 19 nt, Homo sapiens
  misc_RNA (1)...(19): siRNA sense strand
caugacaucccaggaauuu

SEQ ID NO: 505252 - RNA, 19 nt, Homo sapiens
  misc_RNA (1)...(19): siRNA sense strand
ccaccaaguaccuauauga

SEQ ID NO: 505253 - RNA, 19 nt, Homo sapiens
  misc_RNA (1)...(19): siRNA sense strand
gcaccaaggaugaucuuuc

SEQ ID NO: 505254 - RNA, 19 nt, Homo sapiens
  misc_RNA (1)...(19): siRNA sense strand
aaacuaaccaagcgacuga

SEQ ID NO: 505255 - RNA, 19 nt, Homo sapiens
  misc_RNA (1)...(19): siRNA sense strand
ccaggaauuuguggagaaa

SEQ ID NO: 505256 - RNA, 19 nt, Homo sapiens
  misc_RNA (1)...(19): siRNA sense strand
ugaaggaggcuggaauuga

SEQ ID NO: 505257 - RNA, 19 nt, Homo sapiens
  misc_RNA (1)...(19): siRNA sense strand
cuaucaagaucauccuuau

SEQ ID NO: 505258 - RNA, 19 nt, Homo sapiens
  misc_RNA (1)...(19): siRNA sense strand
aagauuggcuacuaugaca

SEQ ID NO: 505259 - RNA, 19 nt, Homo sapiens
  misc_RNA (1)...(19): siRNA sense strand
cagaguuucuucucagauc

SEQ ID NO: 505260 - RNA, 19 nt, Homo sapiens
  misc_RNA (1)...(19): siRNA sense strand
gaucuuuccugguccaaaa

SEQ ID NO: 505261 - RNA, 19 nt, Homo sapiens
  misc_RNA (1)...(19): siRNA sense strand
ucauugugcuuuccuaugg

SEQ ID NO: 505262 - RNA, 19 nt, Homo sapiens
  misc_RNA (1)...(19): siRNA sense strand
ugacaucccaggaauuugu

SEQ ID NO: 505263 - RNA, 19 nt, Homo sapiens
  misc_RNA (1)...(19): siRNA sense strand
cuacgacccuucuaucaac

SEQ ID NO: 505264 - RNA, 19 nt, Homo sapiens
  misc_RNA (1)...(19): siRNA sense strand
guacgucugguuccucauu

SEQ ID NO: 505265 - RNA, 19 nt, Homo sapiens
  misc_RNA (1)...(19): siRNA sense strand
cgaaucaucgugggacuuu

SEQ ID NO: 505266 - RNA, 19 nt, Homo sapiens
  misc_RNA (1)...(19): siRNA sense strand
gcgugaaacucuuugaaaa

SEQ ID NO: 505267 - RNA, 19 nt, Homo sapiens
  misc_RNA (1)...(19): siRNA sense strand
ggacuucaacuacaacaac

SEQ ID NO: 505268 - RNA, 19 nt, Homo sapiens
  misc_RNA (1)...(19): siRNA sense strand
gaccauuaccgaccaaauc

SEQ ID NO: 505269 - RNA, 19 nt, Homo sapiens
  misc_RNA (1)...(19): siRNA sense strand
gaggcuggaauugagauua

SEQ ID NO: 505270 - RNA, 19 nt, Homo sapiens
  misc_RNA (1)...(19): siRNA sense strand
gggacauccugccggacua

SEQ ID NO: 505271 - RNA, 19 nt, Homo sapiens
  misc_RNA (1)...(19): siRNA sense strand
gaucuacgacccuucuauc

SEQ ID NO: 505272 - RNA, 19 nt, Homo sapiens
  misc_RNA (1)...(19): siRNA sense strand
gaagauuggcuacuaugac

SEQ ID NO: 505273 - RNA, 19 nt, Homo sapiens
  misc_RNA (1)...(19): siRNA sense strand
gccagaguuucuucucaga

SEQ ID NO: 505274 - RNA, 19 nt, Homo sapiens
  misc_RNA (1)...(19): siRNA sense strand
uggaggacuucaacuacaa

SEQ ID NO: 505275 - RNA, 19 nt, Homo sapiens
  misc_RNA (1)...(19): siRNA sense strand
acaacgacccuaucaagau

SEQ ID NO: 505276 - RNA, 19 nt, Homo sapiens
  misc_RNA (1)...(19): siRNA sense strand
caaaucuaccgggcaauga

SEQ ID NO: 505277 - RNA, 19 nt, Homo sapiens
  misc_RNA (1)...(19): siRNA sense strand
ggaauuuguggagaaacua

SEQ ID NO: 505278 - RNA, 19 nt, Homo sapiens
  misc_RNA (1)...(19): siRNA sense strand
ccgcagcauuuccaacaug

SEQ ID NO: 505279 - RNA, 19 nt, Homo sapiens
  misc_RNA (1)...(19): siRNA sense strand
ccuaucaagaucauccuua

SEQ ID NO: 505280 - RNA, 19 nt, Homo sapiens
  misc_RNA (1)...(19): siRNA sense strand
cuacaacgacccuaucaag

SEQ ID NO: 505281 - RNA, 19 nt, Homo sapiens
  misc_RNA (1)...(19): siRNA sense strand
acaaggagcgucucuuugg

SEQ ID NO: 505282 - RNA, 19 nt, Homo sapiens
  misc_RNA (1)...(19): siRNA sense strand
gacugaagcccggaaaguu

SEQ ID NO: 505283 - RNA, 19 nt, Homo sapiens
  misc_RNA (1)...(19): siRNA sense strand
gcucaccagcccugucaaa

SEQ ID NO: 505284 - RNA, 19 nt, Homo sapiens
  misc_RNA (1)...(19): siRNA sense strand
ggaaccucauugugcuuuc

SEQ ID NO: 505285 - RNA, 19 nt, Homo sapiens
  misc_RNA (1)...(19): siRNA sense strand
ggccacaucacaacugaga

SEQ ID NO: 505286 - RNA, 19 nt, Homo sapiens
  misc_RNA (1)...(19): siRNA sense strand
gugguaugcugacaauugg

SEQ ID NO: 505287 - RNA, 19 nt, Homo sapiens
  misc_RNA (1)...(19): siRNA sense strand
ggauguggaaccucauugu

SEQ ID NO: 505288 - RNA, 19 nt, Homo sapiens
  misc_RNA (1)...(19): siRNA sense strand
gggugucucuggccaugug

SEQ ID NO: 505289 - RNA, 19 nt, Homo sapiens
  misc_RNA (1)...(19): siRNA sense strand
cccaggaauuuguggagaa

SEQ ID NO: 505290 - RNA, 19 nt, Homo sapiens
  misc_RNA (1)...(19): siRNA sense strand
acugaagcccggaaaguuu

SEQ ID NO: 505291 - RNA, 19 nt, Homo sapiens
  misc_RNA (1)...(19): siRNA sense strand
guacaucggggcacuguuu

SEQ ID NO: 505292 - RNA, 19 nt, Homo sapiens
  misc_RNA (1)...(19): siRNA sense strand
gguaugcugacaauugguu

SEQ ID NO: 505293 - RNA, 19 nt, Homo sapiens
  misc_RNA (1)...(19): siRNA sense strand
ccaaaucuaccgggcaaug

SEQ ID NO: 505294 - RNA, 19 nt, Homo sapiens
  misc_RNA (1)...(19): siRNA sense strand
gauguggaaccucauugug

SEQ ID NO: 505295 - RNA, 19 nt, Homo sapiens
  misc_RNA (1)...(19): siRNA sense strand
caccaaggaugaucuuucc

SEQ ID NO: 505296 - RNA, 19 nt, Homo sapiens
  misc_RNA (1)...(19): siRNA sense strand
cgcagcauuuccaacauga

SEQ ID NO: 505297 - RNA, 19 nt, Homo sapiens
  misc_RNA (1)...(19): siRNA sense strand
uuacuuuccgccagaguuu

SEQ ID NO: 505298 - RNA, 19 nt, Homo sapiens
  misc_RNA (1)...(19): siRNA sense strand
aacaugacaucccaggaau

SEQ ID NO: 505299 - RNA, 19 nt, Homo sapiens
  misc_RNA (1)...(19): siRNA sense strand
caagaucuacgacccuucu

SEQ ID NO: 505300 - RNA, 19 nt, Homo sapiens
  misc_RNA (1)...(19): siRNA sense strand
ggacauccugccggacuau

SEQ ID NO: 505301 - RNA, 19 nt, Homo sapiens
  misc_RNA (1)...(19): siRNA sense strand
caacccuacccgcgugaaa

SEQ ID NO: 505302 - RNA, 19 nt, Homo sapiens
  misc_RNA (1)...(19): siRNA sense strand
gcagcuacaagaagauugg

SEQ ID NO: 505303 - RNA, 19 nt, Homo sapiens
  misc_RNA (1)...(19): siRNA sense strand
caggguggcagcuacaaga

SEQ ID NO: 505304 - RNA, 19 nt, Homo sapiens
  misc_RNA (1)...(19): siRNA sense strand
gcaccgcuggccuaugaug

SEQ ID NO: 505305 - RNA, 19 nt, Homo sapiens
  misc_RNA (1)...(19): siRNA sense strand
gaaaaguggggcuggaaga

SEQ ID NO: 505306 - RNA, 19 nt, Homo sapiens
  misc_RNA (1)...(19): siRNA sense strand
ccgccagaguuucuucuca

SEQ ID NO: 505307 - RNA, 19 nt, Homo sapiens
  misc_RNA (1)...(19): siRNA sense strand
agaagauuggcuacuauga

SEQ ID NO: 505308 - RNA, 19 nt, Homo sapiens
  misc_RNA (1)...(19): siRNA sense strand
acugaggucuucacuucga

SEQ ID NO: 505309 - RNA, 19 nt, Homo sapiens
  misc_RNA (1)...(19): siRNA sense strand
cuacaacaaccagaccauu

SEQ ID NO: 505310 - RNA, 19 nt, Homo sapiens
  misc_RNA (1)...(19): siRNA sense strand
cuggaggacuucaacuaca

SEQ ID NO: 505311 - RNA, 19 nt, Homo sapiens
  misc_RNA (1)...(19): siRNA sense strand
gccuggaggacuucaacua

SEQ ID NO: 505312 - RNA, 19 nt, Homo sapiens
  misc_RNA (1)...(19): siRNA sense strand
uacaacgacccuaucaaga

SEQ ID NO: 505313 - RNA, 19 nt, Homo sapiens
  misc_RNA (1)...(19): siRNA sense strand
ccauccagcagaccacuga

SEQ ID NO: 505314 - RNA, 19 nt, Homo sapiens
  misc_RNA (1)...(19): siRNA sense strand
ccaauacccgcagcauuuc

SEQ ID NO: 505315 - RNA, 19 nt, Homo sapiens
  misc_RNA (1)...(19): siRNA sense strand
gccaccaaguaccuauaug

SEQ ID NO: 505316 - RNA, 19 nt, Homo sapiens
  misc_RNA (1)...(19): siRNA sense strand
cgcgugaaacucuuugaaa

SEQ ID NO: 505317 - RNA, 19 nt, Homo sapiens
  misc_RNA (1)...(19): siRNA sense strand
ggccaugugguguuugaug

SEQ ID NO: 505318 - RNA, 19 nt, Homo sapiens
  misc_RNA (1)...(19): siRNA sense strand
gcauuuccaacaugacauc

SEQ ID NO: 505319 - RNA, 19 nt, Homo sapiens
  misc_RNA (1)...(19): siRNA sense strand
gcacaguggaugagaugac

SEQ ID NO: 505320 - RNA, 19 nt, Homo sapiens
  misc_RNA (1)...(19): siRNA sense strand
gagugaaggaggcuggaau

SEQ ID NO: 505321 - RNA, 19 nt, Homo sapiens
  misc_RNA (1)...(19): siRNA sense strand
caggccaagccaccaagua

SEQ ID NO: 505322 - RNA, 19 nt, Homo sapiens
  misc_RNA (1)...(19): siRNA sense strand
aaaucuaccgggcaaugaa

SEQ ID NO: 505323 - RNA, 19 nt, Homo sapiens
  misc_RNA (1)...(19): siRNA sense strand
gaaccucauugugcuuucc

SEQ ID NO: 505324 - RNA, 19 nt, Homo sapiens
  misc_RNA (1)...(19): siRNA sense strand
ggaagaagauugcuaccau

SEQ ID NO: 505325 - RNA, 19 nt, Homo sapiens
  misc_RNA (1)...(19): siRNA sense strand
ccacugaggucuucacuuc

SEQ ID NO: 505326 - RNA, 19 nt, Homo sapiens
  misc_RNA (1)...(19): siRNA sense strand
gaaggaggcuggaauugag

SEQ ID NO: 505327 - RNA, 19 nt, Homo sapiens
  misc_RNA (1)...(19): siRNA sense strand
ccaggaagaugaauacaug

SEQ ID NO: 505328 - RNA, 19 nt, Homo sapiens
  misc_RNA (1)...(19): siRNA sense strand
gaaucuuccuugcuuauga

SEQ ID NO: 505329 - RNA, 19 nt, Homo sapiens
  misc_RNA (1)...(19): siRNA sense strand
ggagaaccgugaacuggaa

SEQ ID NO: 505330 - RNA, 19 nt, Homo sapiens
  misc_RNA (1)...(19): siRNA sense strand
gggcauggcuaucuacaau

SEQ ID NO: 505331 - RNA, 19 nt, Homo sapiens
  misc_RNA (1)...(19): siRNA sense strand
acaagaagauuggcuacua

SEQ ID NO: 505332 - RNA, 19 nt, Homo sapiens
  misc_RNA (1)...(19): siRNA sense strand
ccacugagaagaucaauga

SEQ ID NO: 505333 - RNA, 19 nt, Homo sapiens
  misc_RNA (1)...(19): siRNA sense strand
caagaagauuggcuacuau

SEQ ID NO: 505334 - RNA, 19 nt, Homo sapiens
  misc_RNA (1)...(19): siRNA sense strand
guacaaggagcgucucuuu

SEQ ID NO: 505335 - RNA, 19 nt, Homo sapiens
  misc_RNA (1)...(19): siRNA sense strand
gagugcauuugcuuuauaa

SEQ ID NO: 505336 - RNA, 19 nt, Homo sapiens
  misc_RNA (1)...(19): siRNA sense strand
gccaauacccgcagcauuu

SEQ ID NO: 505337 - RNA, 19 nt, Homo sapiens
  misc_RNA (1)...(19): siRNA sense strand
cgagugcauuugcuuuaua

SEQ ID NO: 505338 - RNA, 19 nt, Homo sapiens
  misc_RNA (1)...(19): siRNA sense strand
gcauuugcuuuauaaguga

SEQ ID NO: 505339 - RNA, 19 nt, Homo sapiens
  misc_RNA (1)...(19): siRNA sense strand
gcauggcuaucuacaaugu

SEQ ID NO: 505340 - RNA, 19 nt, Homo sapiens
  misc_RNA (1)...(19): siRNA sense strand
caacgacccuaucaagauc

SEQ ID NO: 505341 - RNA, 19 nt, Homo sapiens
  misc_RNA (1)...(19): siRNA sense strand
aaagaucauugcugagaaa

SEQ ID NO: 505342 - RNA, 19 nt, Homo sapiens
  misc_RNA (1)...(19): siRNA sense strand
ggaugcagccuuugccuuu

SEQ ID NO: 505343 - RNA, 19 nt, Homo sapiens
  misc_RNA (1)...(19): siRNA sense strand
gcacuggcccugaacaaga

SEQ ID NO: 505344 - RNA, 19 nt, Homo sapiens
  misc_RNA (1)...(19): siRNA sense strand
gauauugacgucucuauuc

SEQ ID NO: 505345 - RNA, 19 nt, Homo sapiens
  misc_RNA (1)...(19): siRNA sense strand
caacaugacaucccaggaa

SEQ ID NO: 505346 - RNA, 19 nt, Homo sapiens
  misc_RNA (1)...(19): siRNA sense strand
gaucauugcugagaaagag

SEQ ID NO: 505347 - RNA, 19 nt, Homo sapiens
  misc_RNA (1)...(19): siRNA sense strand
ggaggaaccuaaggaagau

SEQ ID NO: 505348 - RNA, 19 nt, Homo sapiens
  misc_RNA (1)...(19): siRNA sense strand
gggcuacgguuccauguuc

SEQ ID NO: 505349 - RNA, 19 nt, Homo sapiens
  misc_RNA (1)...(19): siRNA sense strand
acaauugguucaagaucua

SEQ ID NO: 505350 - RNA, 19 nt, Homo sapiens
  misc_RNA (1)...(19): siRNA sense strand
ggaagaaguacgucugguu

SEQ ID NO: 505351 - RNA, 19 nt, Homo sapiens
  misc_RNA (1)...(19): siRNA sense strand
gguggcagcuacaagaaga

SEQ ID NO: 505352 - RNA, 19 nt, Homo sapiens
  misc_RNA (1)...(19): siRNA sense strand
gacaauugguucaagaucu

SEQ ID NO: 505353 - RNA, 19 nt, Homo sapiens
  misc_RNA (1)...(19): siRNA sense strand
cggauggcauggacgcuua

SEQ ID NO: 505354 - RNA, 19 nt, Homo sapiens
  misc_RNA (1)...(19): siRNA sense strand
ggugguaugcugacaauug

SEQ ID NO: 505355 - RNA, 19 nt, Homo sapiens
  misc_RNA (1)...(19): siRNA sense strand
uacaacaaccagaccauua

SEQ ID NO: 505356 - RNA, 19 nt, Homo sapiens
  misc_RNA (1)...(19): siRNA sense strand
gcugacaauugguucaaga

SEQ ID NO: 505357 - RNA, 19 nt, Homo sapiens
  misc_RNA (1)...(19): siRNA sense strand
ccagcaggaugcagccuuu

SEQ ID NO: 505358 - RNA, 19 nt, Homo sapiens
  misc_RNA (1)...(19): siRNA sense strand
gcauggauguccucacucu

SEQ ID NO: 505359 - RNA, 19 nt, Homo sapiens
  misc_RNA (1)...(19): siRNA sense strand
gaauuuguggagaaacuaa

SEQ ID NO: 505360 - RNA, 19 nt, Homo sapiens
  misc_RNA (1)...(19): siRNA sense strand
ggagaagucccggcuguug

SEQ ID NO: 505361 - RNA, 19 nt, Homo sapiens
  misc_RNA (1)...(19): siRNA sense strand
gaaccuaaggaagauauug

SEQ ID NO: 505362 - RNA, 19 nt, Homo sapiens
  misc_RNA (1)...(19): siRNA sense strand
caugacaucccaggaauuu

SEQ ID NO: 505363 - RNA, 19 nt, Homo sapiens
  misc_RNA (1)...(19): siRNA sense strand
gcaguccugugccucauca

SEQ ID NO: 505364 - RNA, 19 nt, Homo sapiens
  misc_RNA (1)...(19): siRNA sense strand
cauugcagcuccaggaaga

SEQ ID NO: 505365 - RNA, 19 nt, Homo sapiens
  misc_RNA (1)...(19): siRNA sense strand
ccaccaaguaccuauauga

SEQ ID NO: 505366 - RNA, 19 nt, Homo sapiens
  misc_RNA (1)...(19): siRNA sense strand
cuauaucacucuuguugug

SEQ ID NO: 505367 - RNA, 19 nt, Homo sapiens
  misc_RNA (1)...(19): siRNA sense strand
gaauacauggcuuggcauu

SEQ ID NO: 505368 - RNA, 19 nt, Homo sapiens
  misc_RNA (1)...(19): siRNA sense strand
gggcauggauguccucacu

SEQ ID NO: 505369 - RNA, 19 nt, Homo sapiens
  misc_RNA (1)...(19): siRNA sense strand
gcaccaaggaugaucuuuc

SEQ ID NO: 505370 - RNA, 19 nt, Homo sapiens
  misc_RNA (1)...(19): siRNA sense strand
aaacuaaccaagcgacuga

SEQ ID NO: 505371 - RNA, 19 nt, Homo sapiens
  misc_RNA (1)...(19): siRNA sense strand
ccaggaauuuguggagaaa

SEQ ID NO: 505372 - RNA, 19 nt, Homo sapiens
  misc_RNA (1)...(19): siRNA sense strand
gaaaagaucauugcugaga

SEQ ID NO: 505373 - RNA, 19 nt, Homo sapiens
  misc_RNA (1)...(19): siRNA sense strand
ugaaggaggcuggaauuga

SEQ ID NO: 505374 - RNA, 19 nt, Homo sapiens
  misc_RNA (1)...(19): siRNA sense strand
gaaggagaaccgugaacug

SEQ ID NO: 505375 - RNA, 19 nt, Homo sapiens
  misc_RNA (1)...(19): siRNA sense strand
aagaaggaguggaggaaga

SEQ ID NO: 505376 - RNA, 19 nt, Homo sapiens
  misc_RNA (1)...(19): siRNA sense strand
cuaucaagaucauccuuau

SEQ ID NO: 505377 - RNA, 19 nt, Homo sapiens
  misc_RNA (1)...(19): siRNA sense strand
ggaagauauugacgucucu

SEQ ID NO: 505378 - RNA, 19 nt, Homo sapiens
  misc_RNA (1)...(19): siRNA sense strand
aagauuggcuacuaugaca

SEQ ID NO: 505379 - RNA, 19 nt, Homo sapiens
  misc_RNA (1)...(19): siRNA sense strand
cagaguuucuucucagauc

SEQ ID NO: 505380 - RNA, 19 nt, Homo sapiens
  misc_RNA (1)...(19): siRNA sense strand
gaucuuuccugguccaaaa

SEQ ID NO: 505381 - RNA, 19 nt, Homo sapiens
  misc_RNA (1)...(19): siRNA sense strand
ucauugugcuuuccuaugg

SEQ ID NO: 505382 - RNA, 19 nt, Homo sapiens
  misc_RNA (1)...(19): siRNA sense strand
gcgcaggacaccaugaaga

SEQ ID NO: 505383 - RNA, 19 nt, Homo sapiens
  misc_RNA (1)...(19): siRNA sense strand
ugacaucccaggaauuugu

SEQ ID NO: 505384 - RNA, 19 nt, Homo sapiens
  misc_RNA (1)...(19): siRNA sense strand
cuacgacccuucuaucaac

SEQ ID NO: 505385 - RNA, 19 nt, Homo sapiens
  misc_RNA (1)...(19): siRNA sense strand
guacgucugguuccucauu

SEQ ID NO: 505386 - RNA, 19 nt, Homo sapiens
  misc_RNA (1)...(19): siRNA sense strand
cgaaucaucgugggacuuu

SEQ ID NO: 505387 - RNA, 19 nt, Homo sapiens
  misc_RNA (1)...(19): siRNA sense strand
gcgugaaacucuuugaaaa

SEQ ID NO: 505388 - RNA, 19 nt, Homo sapiens
  misc_RNA (1)...(19): siRNA sense strand
ggacuucaacuacaacaac

SEQ ID NO: 505389 - RNA, 19 nt, Homo sapiens
  misc_RNA (1)...(19): siRNA sense strand
ugcauuugcuuuauaagug

SEQ ID NO: 505390 - RNA, 19 nt, Homo sapiens
  misc_RNA (1)...(19): siRNA sense strand
caaggaggaaccuaaggaa

SEQ ID NO: 505391 - RNA, 19 nt, Homo sapiens
  misc_RNA (1)...(19): siRNA sense strand
gaccauuaccgaccaaauc

SEQ ID NO: 505392 - RNA, 19 nt, Homo sapiens
  misc_RNA (1)...(19): siRNA sense strand
gaggcuggaauugagauua

SEQ ID NO: 505393 - RNA, 19 nt, Homo sapiens
  misc_RNA (1)...(19): siRNA sense strand
gaugcagccuuugccuuug

SEQ ID NO: 505394 - RNA, 19 nt, Homo sapiens
  misc_RNA (1)...(19): siRNA sense strand
gggacauccugccggacua

SEQ ID NO: 505395 - RNA, 19 nt, Homo sapiens
  misc_RNA (1)...(19): siRNA sense strand
gaucuacgacccuucuauc

SEQ ID NO: 505396 - RNA, 19 nt, Homo sapiens
  misc_RNA (1)...(19): siRNA sense strand
gaagauuggcuacuaugac

SEQ ID NO: 505397 - RNA, 19 nt, Homo sapiens
  misc_RNA (1)...(19): siRNA sense strand
gccagaguuucuucucaga

SEQ ID NO: 505398 - RNA, 19 nt, Homo sapiens
  misc_RNA (1)...(19): siRNA sense strand
ccaaggaggaaccuaagga

SEQ ID NO: 505399 - RNA, 19 nt, Homo sapiens
  misc_RNA (1)...(19): siRNA sense strand
uggaggacuucaacuacaa

SEQ ID NO: 505400 - RNA, 19 nt, Homo sapiens
  misc_RNA (1)...(19): siRNA sense strand
ccgcagcauuuccaacaug

SEQ ID NO: 505401 - RNA, 19 nt, Homo sapiens
  misc_RNA (1)...(19): siRNA sense strand
ucucugaacugcgccauca

SEQ ID NO: 505402 - RNA, 19 nt, Homo sapiens
  misc_RNA (1)...(19): siRNA sense strand
acaacgacccuaucaagau

SEQ ID NO: 505403 - RNA, 19 nt, Homo sapiens
  misc_RNA (1)...(19): siRNA sense strand
ggagaaggagaaccgugaa

SEQ ID NO: 505404 - RNA, 19 nt, Homo sapiens
  misc_RNA (1)...(19): siRNA sense strand
auacauggcuuggcauuuu

SEQ ID NO: 505405 - RNA, 19 nt, Homo sapiens
  misc_RNA (1)...(19): siRNA sense strand
ucacaaagaaggaagaaaa

SEQ ID NO: 505406 - RNA, 19 nt, Homo sapiens
  misc_RNA (1)...(19): siRNA sense strand
ccuaucaagaucauccuua

SEQ ID NO: 505407 - RNA, 19 nt, Homo sapiens
  misc_RNA (1)...(19): siRNA sense strand
caaaucuaccgggcaauga

SEQ ID NO: 505408 - RNA, 19 nt, Homo sapiens
  misc_RNA (1)...(19): siRNA sense strand
ggaauuuguggagaaacua

SEQ ID NO: 505409 - RNA, 19 nt, Homo sapiens
  misc_RNA (1)...(19): siRNA sense strand
gacugaagcccggaaaguu

SEQ ID NO: 505410 - RNA, 19 nt, Homo sapiens
  misc_RNA (1)...(19): siRNA sense strand
gggcugcucacuggcuuua

SEQ ID NO: 505411 - RNA, 19 nt, Homo sapiens
  misc_RNA (1)...(19): siRNA sense strand
cuacaacgacccuaucaag

SEQ ID NO: 505412 - RNA, 19 nt, Homo sapiens
  misc_RNA (1)...(19): siRNA sense strand
gcucaccagcccugucaaa

SEQ ID NO: 505413 - RNA, 19 nt, Homo sapiens
  misc_RNA (1)...(19): siRNA sense strand
acaaggagcgucucuuugg

SEQ ID NO: 505414 - RNA, 19 nt, Homo sapiens
  misc_RNA (1)...(19): siRNA sense strand
ggaaccucauugugcuuuc

SEQ ID NO: 505415 - RNA, 19 nt, Homo sapiens
  misc_RNA (1)...(19): siRNA sense strand
gucgagugcauuugcuuua

SEQ ID NO: 505416 - RNA, 19 nt, Homo sapiens
  misc_RNA (1)...(19): siRNA sense strand
gaagauauugacgucucua

SEQ ID NO: 505417 - RNA, 19 nt, Homo sapiens
  misc_RNA (1)...(19): siRNA sense strand
ggccacaucacaacugaga

SEQ ID NO: 505418 - RNA, 19 nt, Homo sapiens
  misc_RNA (1)...(19): siRNA sense strand
gugguaugcugacaauugg

SEQ ID NO: 505419 - RNA, 19 nt, Homo sapiens
  misc_RNA (1)...(19): siRNA sense strand
caaagaaggaagaaaagaa

SEQ ID NO: 505420 - RNA, 19 nt, Homo sapiens
  misc_RNA (1)...(19): siRNA sense strand
ccuccuauaucacucuugu

SEQ ID NO: 505421 - RNA, 19 nt, Homo sapiens
  misc_RNA (1)...(19): siRNA sense strand
acugaagcccggaaaguuu

SEQ ID NO: 505422 - RNA, 19 nt, Homo sapiens
  misc_RNA (1)...(19): siRNA sense strand
gggugucucuggccaugug

SEQ ID NO: 505423 - RNA, 19 nt, Homo sapiens
  misc_RNA (1)...(19): siRNA sense strand
cccaggaauuuguggagaa

SEQ ID NO: 505424 - RNA, 19 nt, Homo sapiens
  misc_RNA (1)...(19): siRNA sense strand
ggaagaagauugcuaccau

SEQ ID NO: 505425 - RNA, 19 nt, Homo sapiens
  misc_RNA (1)...(19): siRNA sense strand
ccacugaggucuucacuuc

SEQ ID NO: 505426 - RNA, 19 nt, Homo sapiens
  misc_RNA (1)...(19): siRNA sense strand
gaaggaggcuggaauugag

SEQ ID NO: 505427 - RNA, 19 nt, Homo sapiens
  misc_RNA (1)...(19): siRNA sense strand
ccaggaagaugaauacaug

SEQ ID NO: 505428 - RNA, 19 nt, Homo sapiens
  misc_RNA (1)...(19): siRNA sense strand
gaaucuuccuugcuuauga

SEQ ID NO: 505429 - RNA, 19 nt, Homo sapiens
  misc_RNA (1)...(19): siRNA sense strand
ggagaaccgugaacuggaa

SEQ ID NO: 505430 - RNA, 19 nt, Homo sapiens
  misc_RNA (1)...(19): siRNA sense strand
gggcauggcuaucuacaau

SEQ ID NO: 505431 - RNA, 19 nt, Homo sapiens
  misc_RNA (1)...(19): siRNA sense strand
acaagaagauuggcuacua

SEQ ID NO: 505432 - RNA, 19 nt, Homo sapiens
  misc_RNA (1)...(19): siRNA sense strand
ccacugagaagaucaauga

SEQ ID NO: 505433 - RNA, 19 nt, Homo sapiens
  misc_RNA (1)...(19): siRNA sense strand
caagaagauuggcuacuau

SEQ ID NO: 505434 - RNA, 19 nt, Homo sapiens
  misc_RNA (1)...(19): siRNA sense strand
guacaaggagcgucucuuu

SEQ ID NO: 505435 - RNA, 19 nt, Homo sapiens
  misc_RNA (1)...(19): siRNA sense strand
gagugcauuugcuuuauaa

SEQ ID NO: 505436 - RNA, 19 nt, Homo sapiens
  misc_RNA (1)...(19): siRNA sense strand
gccaauacccgcagcauuu

SEQ ID NO: 505437 - RNA, 19 nt, Homo sapiens
  misc_RNA (1)...(19): siRNA sense strand
cgagugcauuugcuuuaua

SEQ ID NO: 505438 - RNA, 19 nt, Homo sapiens
  misc_RNA (1)...(19): siRNA sense strand
gcauuugcuuuauaaguga

SEQ ID NO: 505439 - RNA, 19 nt, Homo sapiens
  misc_RNA (1)...(19): siRNA sense strand
gcauggcuaucuacaaugu

SEQ ID NO: 505440 - RNA, 19 nt, Homo sapiens
  misc_RNA (1)...(19): siRNA sense strand
caacgacccuaucaagauc

SEQ ID NO: 505441 - RNA, 19 nt, Homo sapiens
  misc_RNA (1)...(19): siRNA sense strand
aaagaucauugcugagaaa

SEQ ID NO: 505442 - RNA, 19 nt, Homo sapiens
  misc_RNA (1)...(19): siRNA sense strand
ggaugcagccuuugccuuu

SEQ ID NO: 505443 - RNA, 19 nt, Homo sapiens
  misc_RNA (1)...(19): siRNA sense strand
gcacuggcccugaacaaga

SEQ ID NO: 505444 - RNA, 19 nt, Homo sapiens
  misc_RNA (1)...(19): siRNA sense strand
gauauugacgucucuauuc

SEQ ID NO: 505445 - RNA, 19 nt, Homo sapiens
  misc_RNA (1)...(19): siRNA sense strand
caacaugacaucccaggaa

SEQ ID NO: 505446 - RNA, 19 nt, Homo sapiens
  misc_RNA (1)...(19): siRNA sense strand
gaucauugcugagaaagag

SEQ ID NO: 505447 - RNA, 19 nt, Homo sapiens
  misc_RNA (1)...(19): siRNA sense strand
ggaggaaccuaaggaagau

SEQ ID NO: 505448 - RNA, 19 nt, Homo sapiens
  misc_RNA (1)...(19): siRNA sense strand
gggcuacgguuccauguuc

SEQ ID NO: 505449 - RNA, 19 nt, Homo sapiens
  misc_RNA (1)...(19): siRNA sense strand
acaauugguucaagaucua

SEQ ID NO: 505450 - RNA, 19 nt, Homo sapiens
  misc_RNA (1)...(19): siRNA sense strand
ggaagaaguacgucugguu

SEQ ID NO: 505451 - RNA, 19 nt, Homo sapiens
  misc_RNA (1)...(19): siRNA sense strand
gguggcagcuacaagaaga

SEQ ID NO: 505452 - RNA, 19 nt, Homo sapiens
  misc_RNA (1)...(19): siRNA sense strand
gacaauugguucaagaucu

SEQ ID NO: 505453 - RNA, 19 nt, Homo sapiens
  misc_RNA (1)...(19): siRNA sense strand
cggauggcauggacgcuua

SEQ ID NO: 505454 - RNA, 19 nt, Homo sapiens
  misc_RNA (1)...(19): siRNA sense strand
ggugguaugcugacaauug

SEQ ID NO: 505455 - RNA, 19 nt, Homo sapiens
  misc_RNA (1)...(19): siRNA sense strand
uacaacaaccagaccauua

SEQ ID NO: 505456 - RNA, 19 nt, Homo sapiens
  misc_RNA (1)...(19): siRNA sense strand
gcugacaauugguucaaga

SEQ ID NO: 505457 - RNA, 19 nt, Homo sapiens
  misc_RNA (1)...(19): siRNA sense strand
ccagcaggaugcagccuuu

SEQ ID NO: 505458 - RNA, 19 nt, Homo sapiens
  misc_RNA (1)...(19): siRNA sense strand
gcauggauguccucacucu

SEQ ID NO: 505459 - RNA, 19 nt, Homo sapiens
  misc_RNA (1)...(19): siRNA sense strand
gaauuuguggagaaacuaa

SEQ ID NO: 505460 - RNA, 19 nt, Homo sapiens
  misc_RNA (1)...(19): siRNA sense strand
ggagaagucccggcuguug

SEQ ID NO: 505461 - RNA, 19 nt, Homo sapiens
  misc_RNA (1)...(19): siRNA sense strand
gaaccuaaggaagauauug

SEQ ID NO: 505462 - RNA, 19 nt, Homo sapiens
  misc_RNA (1)...(19): siRNA sense strand
caugacaucccaggaauuu

SEQ ID NO: 505463 - RNA, 19 nt, Homo sapiens
  misc_RNA (1)...(19): siRNA sense strand
gcaguccugugccucauca

SEQ ID NO: 505464 - RNA, 19 nt, Homo sapiens
  misc_RNA (1)...(19): siRNA sense strand
cauugcagcuccaggaaga

SEQ ID NO: 505465 - RNA, 19 nt, Homo sapiens
  misc_RNA (1)...(19): siRNA sense strand
ccaccaaguaccuauauga

SEQ ID NO: 505466 - RNA, 19 nt, Homo sapiens
  misc_RNA (1)...(19): siRNA sense strand
cuauaucacucuuguugug

SEQ ID NO: 505467 - RNA, 19 nt, Homo sapiens
  misc_RNA (1)...(19): siRNA sense strand
gaauacauggcuuggcauu

SEQ ID NO: 505468 - RNA, 19 nt, Homo sapiens
  misc_RNA (1)...(19): siRNA sense strand
gggcauggauguccucacu

SEQ ID NO: 505469 - RNA, 19 nt, Homo sapiens
  misc_RNA (1)...(19): siRNA sense strand
gcaccaaggaugaucuuuc

SEQ ID NO: 505470 - RNA, 19 nt, Homo sapiens
  misc_RNA (1)...(19): siRNA sense strand
aaacuaaccaagcgacuga

SEQ ID NO: 505471 - RNA, 19 nt, Homo sapiens
  misc_RNA (1)...(19): siRNA sense strand
ccaggaauuuguggagaaa

SEQ ID NO: 505472 - RNA, 19 nt, Homo sapiens
  misc_RNA (1)...(19): siRNA sense strand
gaaaagaucauugcugaga

SEQ ID NO: 505473 - RNA, 19 nt, Homo sapiens
  misc_RNA (1)...(19): siRNA sense strand
ugaaggaggcuggaauuga

SEQ ID NO: 505474 - RNA, 19 nt, Homo sapiens
  misc_RNA (1)...(19): siRNA sense strand
gaaggagaaccgugaacug

SEQ ID NO: 505475 - RNA, 19 nt, Homo sapiens
  misc_RNA (1)...(19): siRNA sense strand
aagaaggaguggaggaaga

SEQ ID NO: 505476 - RNA, 19 nt, Homo sapiens
  misc_RNA (1)...(19): siRNA sense strand
cuaucaagaucauccuuau

SEQ ID NO: 505477 - RNA, 19 nt, Homo sapiens
  misc_RNA (1)...(19): siRNA sense strand
ggaagauauugacgucucu

SEQ ID NO: 505478 - RNA, 19 nt, Homo sapiens
  misc_RNA (1)...(19): siRNA sense strand
aagauuggcuacuaugaca

SEQ ID NO: 505479 - RNA, 19 nt, Homo sapiens
  misc_RNA (1)...(19): siRNA sense strand
cagaguuucuucucagauc

SEQ ID NO: 505480 - RNA, 19 nt, Homo sapiens
  misc_RNA (1)...(19): siRNA sense strand
gaucuuuccugguccaaaa

SEQ ID NO: 505481 - RNA, 19 nt, Homo sapiens
  misc_RNA (1)...(19): siRNA sense strand
ucauugugcuuuccuaugg

SEQ ID NO: 505482 - RNA, 19 nt, Homo sapiens
  misc_RNA (1)...(19): siRNA sense strand
gcgcaggacaccaugaaga

SEQ ID NO: 505483 - RNA, 19 nt, Homo sapiens
  misc_RNA (1)...(19): siRNA sense strand
ugacaucccaggaauuugu

SEQ ID NO: 505484 - RNA, 19 nt, Homo sapiens
  misc_RNA (1)...(19): siRNA sense strand
cuacgacccuucuaucaac

SEQ ID NO: 505485 - RNA, 19 nt, Homo sapiens
  misc_RNA (1)...(19): siRNA sense strand
guacgucugguuccucauu

SEQ ID NO: 505486 - RNA, 19 nt, Homo sapiens
  misc_RNA (1)...(19): siRNA sense strand
cgaaucaucgugggacuuu

SEQ ID NO: 505487 - RNA, 19 nt, Homo sapiens
  misc_RNA (1)...(19): siRNA sense strand
gcgugaaacucuuugaaaa

SEQ ID NO: 505488 - RNA, 19 nt, Homo sapiens
  misc_RNA (1)...(19): siRNA sense strand
ggacuucaacuacaacaac

SEQ ID NO: 505489 - RNA, 19 nt, Homo sapiens
  misc_RNA (1)...(19): siRNA sense strand
ugcauuugcuuuauaagug

SEQ ID NO: 505490 - RNA, 19 nt, Homo sapiens
  misc_RNA (1)...(19): siRNA sense strand
caaggaggaaccuaaggaa

SEQ ID NO: 505491 - RNA, 19 nt, Homo sapiens
  misc_RNA (1)...(19): siRNA sense strand
gaccauuaccgaccaaauc

SEQ ID NO: 505492 - RNA, 19 nt, Homo sapiens
  misc_RNA (1)...(19): siRNA sense strand
gaggcuggaauugagauua

SEQ ID NO: 505493 - RNA, 19 nt, Homo sapiens
  misc_RNA (1)...(19): siRNA sense strand
gaugcagccuuugccuuug

SEQ ID NO: 505494 - RNA, 19 nt, Homo sapiens
  misc_RNA (1)...(19): siRNA sense strand
gggacauccugccggacua

SEQ ID NO: 505495 - RNA, 19 nt, Homo sapiens
  misc_RNA (1)...(19): siRNA sense strand
gaucuacgacccuucuauc

SEQ ID NO: 505496 - RNA, 19 nt, Homo sapiens
  misc_RNA (1)...(19): siRNA sense strand
gaagauuggcuacuaugac

SEQ ID NO: 505497 - RNA, 19 nt, Homo sapiens
  misc_RNA (1)...(19): siRNA sense strand
gccagaguuucuucucaga

SEQ ID NO: 505498 - RNA, 19 nt, Homo sapiens
  misc_RNA (1)...(19): siRNA sense strand
ccaaggaggaaccuaagga

SEQ ID NO: 505499 - RNA, 19 nt, Homo sapiens
  misc_RNA (1)...(19): siRNA sense strand
uggaggacuucaacuacaa

SEQ ID NO: 505500 - RNA, 19 nt, Homo sapiens
  misc_RNA (1)...(19): siRNA sense strand
ccgcagcauuuccaacaug

SEQ ID NO: 505501 - RNA, 19 nt, Homo sapiens
  misc_RNA (1)...(19): siRNA sense strand
ucucugaacugcgccauca

SEQ ID NO: 505502 - RNA, 19 nt, Homo sapiens
  misc_RNA (1)...(19): siRNA sense strand
acaacgacccuaucaagau

SEQ ID NO: 505503 - RNA, 19 nt, Homo sapiens
  misc_RNA (1)...(19): siRNA sense strand
ggagaaggagaaccgugaa

SEQ ID NO: 505504 - RNA, 19 nt, Homo sapiens
  misc_RNA (1)...(19): siRNA sense strand
auacauggcuuggcauuuu

SEQ ID NO: 505505 - RNA, 19 nt, Homo sapiens
  misc_RNA (1)...(19): siRNA sense strand
ucacaaagaaggaagaaaa

SEQ ID NO: 505506 - RNA, 19 nt, Homo sapiens
  misc_RNA (1)...(19): siRNA sense strand
ccuaucaagaucauccuua

SEQ ID NO: 505507 - RNA, 19 nt, Homo sapiens
  misc_RNA (1)...(19): siRNA sense strand
caaaucuaccgggcaauga

SEQ ID NO: 505508 - RNA, 19 nt, Homo sapiens
  misc_RNA (1)...(19): siRNA sense strand
ggaauuuguggagaaacua

SEQ ID NO: 505509 - RNA, 19 nt, Homo sapiens
  misc_RNA (1)...(19): siRNA sense strand
gacugaagcccggaaaguu

SEQ ID NO: 505510 - RNA, 19 nt, Homo sapiens
  misc_RNA (1)...(19): siRNA sense strand
gggcugcucacuggcuuua

SEQ ID NO: 505511 - RNA, 19 nt, Homo sapiens
  misc_RNA (1)...(19): siRNA sense strand
cuacaacgacccuaucaag

SEQ ID NO: 505512 - RNA, 19 nt, Homo sapiens
  misc_RNA (1)...(19): siRNA sense strand
gcucaccagcccugucaaa

SEQ ID NO: 505513 - RNA, 19 nt, Homo sapiens
  misc_RNA (1)...(19): siRNA sense strand
acaaggagcgucucuuugg

SEQ ID NO: 505514 - RNA, 19 nt, Homo sapiens
  misc_RNA (1)...(19): siRNA sense strand
ggaaccucauugugcuuuc

SEQ ID NO: 505515 - RNA, 19 nt, Homo sapiens
  misc_RNA (1)...(19): siRNA sense strand
gucgagugcauuugcuuua

SEQ ID NO: 505516 - RNA, 19 nt, Homo sapiens
  misc_RNA (1)...(19): siRNA sense strand
gaagauauugacgucucua

SEQ ID NO: 505517 - RNA, 19 nt, Homo sapiens
  misc_RNA (1)...(19): siRNA sense strand
ggccacaucacaacugaga

SEQ ID NO: 505518 - RNA, 19 nt, Homo sapiens
  misc_RNA (1)...(19): siRNA sense strand
gugguaugcugacaauugg

SEQ ID NO: 505519 - RNA, 19 nt, Homo sapiens
  misc_RNA (1)...(19): siRNA sense strand
caaagaaggaagaaaagaa

SEQ ID NO: 505520 - RNA, 19 nt, Homo sapiens
  misc_RNA (1)...(19): siRNA sense strand
ccuccuauaucacucuugu

SEQ ID NO: 505521 - RNA, 19 nt, Homo sapiens
  misc_RNA (1)...(19): siRNA sense strand
acugaagcccggaaaguuu

SEQ ID NO: 505522 - RNA, 19 nt, Homo sapiens
  misc_RNA (1)...(19): siRNA sense strand
gggugucucuggccaugug

SEQ ID NO: 505523 - RNA, 19 nt, Homo sapiens
  misc_RNA (1)...(19): siRNA sense strand
cccaggaauuuguggagaa

SEQ ID NO: 505524 - RNA, 19 nt, Homo sapiens
  misc_RNA (1)...(19): siRNA sense strand
ggaagaagauugcuaccau

SEQ ID NO: 505525 - RNA, 19 nt, Homo sapiens
  misc_RNA (1)...(19): siRNA sense strand
ccacugaggucuucacuuc

SEQ ID NO: 505526 - RNA, 19 nt, Homo sapiens
  misc_RNA (1)...(19): siRNA sense strand
gaaggaggcuggaauugag

SEQ ID NO: 505527 - RNA, 19 nt, Homo sapiens
  misc_RNA (1)...(19): siRNA sense strand
ccaggaagaugaauacaug

SEQ ID NO: 505528 - RNA, 19 nt, Homo sapiens
  misc_RNA (1)...(19): siRNA sense strand
gaaucuuccuugcuuauga

SEQ ID NO: 505529 - RNA, 19 nt, Homo sapiens
  misc_RNA (1)...(19): siRNA sense strand
ggagaaccgugaacuggaa

SEQ ID NO: 505530 - RNA, 19 nt, Homo sapiens
  misc_RNA (1)...(19): siRNA sense strand
gggcauggcuaucuacaau

SEQ ID NO: 505531 - RNA, 19 nt, Homo sapiens
  misc_RNA (1)...(19): siRNA sense strand
acaagaagauuggcuacua

SEQ ID NO: 505532 - RNA, 19 nt, Homo sapiens
  misc_RNA (1)...(19): siRNA sense strand
ccacugagaagaucaauga

SEQ ID NO: 505533 - RNA, 19 nt, Homo sapiens
  misc_RNA (1)...(19): siRNA sense strand
caagaagauuggcuacuau

SEQ ID NO: 505534 - RNA, 19 nt, Homo sapiens
  misc_RNA (1)...(19): siRNA sense strand
guacaaggagcgucucuuu

SEQ ID NO: 505535 - RNA, 19 nt, Homo sapiens
  misc_RNA (1)...(19): siRNA sense strand
gagugcauuugcuuuauaa

SEQ ID NO: 505536 - RNA, 19 nt, Homo sapiens
  misc_RNA (1)...(19): siRNA sense strand
gccaauacccgcagcauuu

SEQ ID NO: 505537 - RNA, 19 nt, Homo sapiens
  misc_RNA (1)...(19): siRNA sense strand
cgagugcauuugcuuuaua

SEQ ID NO: 505538 - RNA, 19 nt, Homo sapiens
  misc_RNA (1)...(19): siRNA sense strand
gcauuugcuuuauaaguga

SEQ ID NO: 505539 - RNA, 19 nt, Homo sapiens
  misc_RNA (1)...(19): siRNA sense strand
gcauggcuaucuacaaugu

SEQ ID NO: 505540 - RNA, 19 nt, Homo sapiens
  misc_RNA (1)...(19): siRNA sense strand
caacgacccuaucaagauc

SEQ ID NO: 505541 - RNA, 19 nt, Homo sapiens
  misc_RNA (1)...(19): siRNA sense strand
aaagaucauugcugagaaa

SEQ ID NO: 505542 - RNA, 19 nt, Homo sapiens
  misc_RNA (1)...(19): siRNA sense strand
ggaugcagccuuugccuuu

SEQ ID NO: 505543 - RNA, 19 nt, Homo sapiens
  misc_RNA (1)...(19): siRNA sense strand
gcacuggcccugaacaaga

SEQ ID NO: 505544 - RNA, 19 nt, Homo sapiens
  misc_RNA (1)...(19): siRNA sense strand
gauauugacgucucuauuc

SEQ ID NO: 505545 - RNA, 19 nt, Homo sapiens
  misc_RNA (1)...(19): siRNA sense strand
caacaugacaucccaggaa

SEQ ID NO: 505546 - RNA, 19 nt, Homo sapiens
  misc_RNA (1)...(19): siRNA sense strand
gaucauugcugagaaagag

SEQ ID NO: 505547 - RNA, 19 nt, Homo sapiens
  misc_RNA (1)...(19): siRNA sense strand
ggaggaaccuaaggaagau

SEQ ID NO: 505548 - RNA, 19 nt, Homo sapiens
  misc_RNA (1)...(19): siRNA sense strand
gggcuacgguuccauguuc

SEQ ID NO: 505549 - RNA, 19 nt, Homo sapiens
  misc_RNA (1)...(19): siRNA sense strand
acaauugguucaagaucua

SEQ ID NO: 505550 - RNA, 19 nt, Homo sapiens
  misc_RNA (1)...(19): siRNA sense strand
ggaagaaguacgucugguu

SEQ ID NO: 505551 - RNA, 19 nt, Homo sapiens
  misc_RNA (1)...(19): siRNA sense strand
gguggcagcuacaagaaga

SEQ ID NO: 505552 - RNA, 19 nt, Homo sapiens
  misc_RNA (1)...(19): siRNA sense strand
gacaauugguucaagaucu

SEQ ID NO: 505553 - RNA, 19 nt, Homo sapiens
  misc_RNA (1)...(19): siRNA sense strand
cggauggcauggacgcuua

SEQ ID NO: 505554 - RNA, 19 nt, Homo sapiens
  misc_RNA (1)...(19): siRNA sense strand
ggugguaugcugacaauug

SEQ ID NO: 505555 - RNA, 19 nt, Homo sapiens
  misc_RNA (1)...(19): siRNA sense strand
uacaacaaccagaccauua

SEQ ID NO: 505556 - RNA, 19 nt, Homo sapiens
  misc_RNA (1)...(19): siRNA sense strand
gcugacaauugguucaaga

SEQ ID NO: 505557 - RNA, 19 nt, Homo sapiens
  misc_RNA (1)...(19): siRNA sense strand
ccagcaggaugcagccuuu

SEQ ID NO: 505558 - RNA, 19 nt, Homo sapiens
  misc_RNA (1)...(19): siRNA sense strand
gcauggauguccucacucu

SEQ ID NO: 505559 - RNA, 19 nt, Homo sapiens
  misc_RNA (1)...(19): siRNA sense strand
gaauuuguggagaaacuaa

SEQ ID NO: 505560 - RNA, 19 nt, Homo sapiens
  misc_RNA (1)...(19): siRNA sense strand
ggagaagucccggcuguug

SEQ ID NO: 505561 - RNA, 19 nt, Homo sapiens
  misc_RNA (1)...(19): siRNA sense strand
gaaccuaaggaagauauug

SEQ ID NO: 505562 - RNA, 19 nt, Homo sapiens
  misc_RNA (1)...(19): siRNA sense strand
caugacaucccaggaauuu

SEQ ID NO: 505563 - RNA, 19 nt, Homo sapiens
  misc_RNA (1)...(19): siRNA sense strand
gcaguccugugccucauca

SEQ ID NO: 505564 - RNA, 19 nt, Homo sapiens
  misc_RNA (1)...(19): siRNA sense strand
cauugcagcuccaggaaga

SEQ ID NO: 505565 - RNA, 19 nt, Homo sapiens
  misc_RNA (1)...(19): siRNA sense strand
ccaccaaguaccuauauga

SEQ ID NO: 505566 - RNA, 19 nt, Homo sapiens
  misc_RNA (1)...(19): siRNA sense strand
cuauaucacucuuguugug

SEQ ID NO: 505567 - RNA, 19 nt, Homo sapiens
  misc_RNA (1)...(19): siRNA sense strand
gaauacauggcuuggcauu

SEQ ID NO: 505568 - RNA, 19 nt, Homo sapiens
  misc_RNA (1)...(19): siRNA sense strand
gggcauggauguccucacu

SEQ ID NO: 505569 - RNA, 19 nt, Homo sapiens
  misc_RNA (1)...(19): siRNA sense strand
gcaccaaggaugaucuuuc

SEQ ID NO: 505570 - RNA, 19 nt, Homo sapiens
  misc_RNA (1)...(19): siRNA sense strand
aaacuaaccaagcgacuga

SEQ ID NO: 505571 - RNA, 19 nt, Homo sapiens
  misc_RNA (1)...(19): siRNA sense strand
ccaggaauuuguggagaaa

SEQ ID NO: 505572 - RNA, 19 nt, Homo sapiens
  misc_RNA (1)...(19): siRNA sense strand
gaaaagaucauugcugaga

SEQ ID NO: 505573 - RNA, 19 nt, Homo sapiens
  misc_RNA (1)...(19): siRNA sense strand
ugaaggaggcuggaauuga

SEQ ID NO: 505574 - RNA, 19 nt, Homo sapiens
  misc_RNA (1)...(19): siRNA sense strand
gaaggagaaccgugaacug

SEQ ID NO: 505575 - RNA, 19 nt, Homo sapiens
  misc_RNA (1)...(19): siRNA sense strand
aagaaggaguggaggaaga

SEQ ID NO: 505576 - RNA, 19 nt, Homo sapiens
  misc_RNA (1)...(19): siRNA sense strand
cuaucaagaucauccuuau

SEQ ID NO: 505577 - RNA, 19 nt, Homo sapiens
  misc_RNA (1)...(19): siRNA sense strand
ggaagauauugacgucucu

SEQ ID NO: 505578 - RNA, 19 nt, Homo sapiens
  misc_RNA (1)...(19): siRNA sense strand
aagauuggcuacuaugaca

SEQ ID NO: 505579 - RNA, 19 nt, Homo sapiens
  misc_RNA (1)...(19): siRNA sense strand
cagaguuucuucucagauc

SEQ ID NO: 505580 - RNA, 19 nt, Homo sapiens
  misc_RNA (1)...(19): siRNA sense strand
gaucuuuccugguccaaaa

SEQ ID NO: 505581 - RNA, 19 nt, Homo sapiens
  misc_RNA (1)...(19): siRNA sense strand
ucauugugcuuuccuaugg

SEQ ID NO: 505582 - RNA, 19 nt, Homo sapiens
  misc_RNA (1)...(19): siRNA sense strand
gcgcaggacaccaugaaga

SEQ ID NO: 505583 - RNA, 19 nt, Homo sapiens
  misc_RNA (1)...(19): siRNA sense strand
ugacaucccaggaauuugu

SEQ ID NO: 505584 - RNA, 19 nt, Homo sapiens
  misc_RNA (1)...(19): siRNA sense strand
cuacgacccuucuaucaac

SEQ ID NO: 505585 - RNA, 19 nt, Homo sapiens
  misc_RNA (1)...(19): siRNA sense strand
guacgucugguuccucauu

SEQ ID NO: 505586 - RNA, 19 nt, Homo sapiens
  misc_RNA (1)...(19): siRNA sense strand
cgaaucaucgugggacuuu

SEQ ID NO: 505587 - RNA, 19 nt, Homo sapiens
  misc_RNA (1)...(19): siRNA sense strand
gcgugaaacucuuugaaaa

SEQ ID NO: 505588 - RNA, 19 nt, Homo sapiens
  misc_RNA (1)...(19): siRNA sense strand
ggacuucaacuacaacaac

SEQ ID NO: 505589 - RNA, 19 nt, Homo sapiens
  misc_RNA (1)...(19): siRNA sense strand
ugcauuugcuuuauaagug

SEQ ID NO: 505590 - RNA, 19 nt, Homo sapiens
  misc_RNA (1)...(19): siRNA sense strand
caaggaggaaccuaaggaa

SEQ ID NO: 505591 - RNA, 19 nt, Homo sapiens
  misc_RNA (1)...(19): siRNA sense strand
gaccauuaccgaccaaauc

SEQ ID NO: 505592 - RNA, 19 nt, Homo sapiens
  misc_RNA (1)...(19): siRNA sense strand
gaggcuggaauugagauua

SEQ ID NO: 505593 - RNA, 19 nt, Homo sapiens
  misc_RNA (1)...(19): siRNA sense strand
gaugcagccuuugccuuug

SEQ ID NO: 505594 - RNA, 19 nt, Homo sapiens
  misc_RNA (1)...(19): siRNA sense strand
gggacauccugccggacua

SEQ ID NO: 505595 - RNA, 19 nt, Homo sapiens
  misc_RNA (1)...(19): siRNA sense strand
gaucuacgacccuucuauc

SEQ ID NO: 505596 - RNA, 19 nt, Homo sapiens
  misc_RNA (1)...(19): siRNA sense strand
gaagauuggcuacuaugac

SEQ ID NO: 505597 - RNA, 19 nt, Homo sapiens
  misc_RNA (1)...(19): siRNA sense strand
gccagaguuucuucucaga

SEQ ID NO: 505598 - RNA, 19 nt, Homo sapiens
  misc_RNA (1)...(19): siRNA sense strand
ccaaggaggaaccuaagga

SEQ ID NO: 505599 - RNA, 19 nt, Homo sapiens
  misc_RNA (1)...(19): siRNA sense strand
uggaggacuucaacuacaa

SEQ ID NO: 505600 - RNA, 19 nt, Homo sapiens
  misc_RNA (1)...(19): siRNA sense strand
ccgcagcauuuccaacaug

SEQ ID NO: 505601 - RNA, 19 nt, Homo sapiens
  misc_RNA (1)...(19): siRNA sense strand
ucucugaacugcgccauca

SEQ ID NO: 505602 - RNA, 19 nt, Homo sapiens
  misc_RNA (1)...(19): siRNA sense strand
acaacgacccuaucaagau

SEQ ID NO: 505603 - RNA, 19 nt, Homo sapiens
  misc_RNA (1)...(19): siRNA sense strand
ggagaaggagaaccgugaa

SEQ ID NO: 505604 - RNA, 19 nt, Homo sapiens
  misc_RNA (1)...(19): siRNA sense strand
auacauggcuuggcauuuu

SEQ ID NO: 505605 - RNA, 19 nt, Homo sapiens
  misc_RNA (1)...(19): siRNA sense strand
ucacaaagaaggaagaaaa

SEQ ID NO: 505606 - RNA, 19 nt, Homo sapiens
  misc_RNA (1)...(19): siRNA sense strand
ccuaucaagaucauccuua

SEQ ID NO: 505607 - RNA, 19 nt, Homo sapiens
  misc_RNA (1)...(19): siRNA sense strand
caaaucuaccgggcaauga

SEQ ID NO: 505608 - RNA, 19 nt, Homo sapiens
  misc_RNA (1)...(19): siRNA sense strand
ggaauuuguggagaaacua

SEQ ID NO: 505609 - RNA, 19 nt, Homo sapiens
  misc_RNA (1)...(19): siRNA sense strand
gacugaagcccggaaaguu

SEQ ID NO: 505610 - RNA, 19 nt, Homo sapiens
  misc_RNA (1)...(19): siRNA sense strand
gggcugcucacuggcuuua

SEQ ID NO: 505611 - RNA, 19 nt, Homo sapiens
  misc_RNA (1)...(19): siRNA sense strand
cuacaacgacccuaucaag

SEQ ID NO: 505612 - RNA, 19 nt, Homo sapiens
  misc_RNA (1)...(19): siRNA sense strand
gcucaccagcccugucaaa

SEQ ID NO: 505613 - RNA, 19 nt, Homo sapiens
  misc_RNA (1)...(19): siRNA sense strand
acaaggagcgucucuuugg

SEQ ID NO: 505614 - RNA, 19 nt, Homo sapiens
  misc_RNA (1)...(19): siRNA sense strand
ggaaccucauugugcuuuc

SEQ ID NO: 505615 - RNA, 19 nt, Homo sapiens
  misc_RNA (1)...(19): siRNA sense strand
gucgagugcauuugcuuua

SEQ ID NO: 505616 - RNA, 19 nt, Homo sapiens
  misc_RNA (1)...(19): siRNA sense strand
gaagauauugacgucucua

SEQ ID NO: 505617 - RNA, 19 nt, Homo sapiens
  misc_RNA (1)...(19): siRNA sense strand
ggccacaucacaacugaga

SEQ ID NO: 505618 - RNA, 19 nt, Homo sapiens
  misc_RNA (1)...(19): siRNA sense strand
gugguaugcugacaauugg

SEQ ID NO: 505619 - RNA, 19 nt, Homo sapiens
  misc_RNA (1)...(19): siRNA sense strand
caaagaaggaagaaaagaa

SEQ ID NO: 505620 - RNA, 19 nt, Homo sapiens
  misc_RNA (1)...(19): siRNA sense strand
ccuccuauaucacucuugu

SEQ ID NO: 505621 - RNA, 19 nt, Homo sapiens
  misc_RNA (1)...(19): siRNA sense strand
acugaagcccggaaaguuu

SEQ ID NO: 505622 - RNA, 19 nt, Homo sapiens
  misc_RNA (1)...(19): siRNA sense strand
gggugucucuggccaugug

SEQ ID NO: 505623 - RNA, 19 nt, Homo sapiens
  misc_RNA (1)...(19): siRNA sense strand
cccaggaauuuguggagaa

SEQ ID NO: 505624 - RNA, 19 nt, Homo sapiens
  misc_RNA (1)...(19): siRNA sense strand
ggaagaagauugcuaccau

SEQ ID NO: 505625 - RNA, 19 nt, Homo sapiens
  misc_RNA (1)...(19): siRNA sense strand
ccacugaggucuucacuuc

SEQ ID NO: 505626 - RNA, 19 nt, Homo sapiens
  misc_RNA (1)...(19): siRNA sense strand
gaaggaggcuggaauugag

SEQ ID NO: 505627 - RNA, 19 nt, Homo sapiens
  misc_RNA (1)...(19): siRNA sense strand
acaagaagauuggcuacua

SEQ ID NO: 505628 - RNA, 19 nt, Homo sapiens
  misc_RNA (1)...(19): siRNA sense strand
caagaagauuggcuacuau

SEQ ID NO: 505629 - RNA, 19 nt, Homo sapiens
  misc_RNA (1)...(19): siRNA sense strand
guacaaggagcgucucuuu

SEQ ID NO: 505630 - RNA, 19 nt, Homo sapiens
  misc_RNA (1)...(19): siRNA sense strand
gccaauacccgcagcauuu

SEQ ID NO: 505631 - RNA, 19 nt, Homo sapiens
  misc_RNA (1)...(19): siRNA sense strand
caacgacccuaucaagauc

SEQ ID NO: 505632 - RNA, 19 nt, Homo sapiens
  misc_RNA (1)...(19): siRNA sense strand
gcacuggcccugaacaaga

SEQ ID NO: 505633 - RNA, 19 nt, Homo sapiens
  misc_RNA (1)...(19): siRNA sense strand
caacaugacaucccaggaa

SEQ ID NO: 505634 - RNA, 19 nt, Homo sapiens
  misc_RNA (1)...(19): siRNA sense strand
acaauugguucaagaucua

SEQ ID NO: 505635 - RNA, 19 nt, Homo sapiens
  misc_RNA (1)...(19): siRNA sense strand
ggaagaaguacgucugguu

SEQ ID NO: 505636 - RNA, 19 nt, Homo sapiens
  misc_RNA (1)...(19): siRNA sense strand
gguggcagcuacaagaaga

SEQ ID NO: 505637 - RNA, 19 nt, Homo sapiens
  misc_RNA (1)...(19): siRNA sense strand
gacaauugguucaagaucu

SEQ ID NO: 505638 - RNA, 19 nt, Homo sapiens
  misc_RNA (1)...(19): siRNA sense strand
cggauggcauggacgcuua

SEQ ID NO: 505639 - RNA, 19 nt, Homo sapiens
  misc_RNA (1)...(19): siRNA sense strand
ggugguaugcugacaauug

SEQ ID NO: 505640 - RNA, 19 nt, Homo sapiens
  misc_RNA (1)...(19): siRNA sense strand
uacaacaaccagaccauua

SEQ ID NO: 505641 - RNA, 19 nt, Homo sapiens
  misc_RNA (1)...(19): siRNA sense strand
gcugacaauugguucaaga

SEQ ID NO: 505642 - RNA, 19 nt, Homo sapiens
  misc_RNA (1)...(19): siRNA sense strand
gaauuuguggagaaacuaa

SEQ ID NO: 505643 - RNA, 19 nt, Homo sapiens
  misc_RNA (1)...(19): siRNA sense strand
caugacaucccaggaauuu

SEQ ID NO: 505644 - RNA, 19 nt, Homo sapiens
  misc_RNA (1)...(19): siRNA sense strand
ccaccaaguaccuauauga

SEQ ID NO: 505645 - RNA, 19 nt, Homo sapiens
  misc_RNA (1)...(19): siRNA sense strand
gcaccaaggaugaucuuuc

SEQ ID NO: 505646 - RNA, 19 nt, Homo sapiens
  misc_RNA (1)...(19): siRNA sense strand
aaacuaaccaagcgacuga

SEQ ID NO: 505647 - RNA, 19 nt, Homo sapiens
  misc_RNA (1)...(19): siRNA sense strand
ccaggaauuuguggagaaa

SEQ ID NO: 505648 - RNA, 19 nt, Homo sapiens
  misc_RNA (1)...(19): siRNA sense strand
ugaaggaggcuggaauuga

SEQ ID NO: 505649 - RNA, 19 nt, Homo sapiens
  misc_RNA (1)...(19): siRNA sense strand
cuaucaagaucauccuuau

SEQ ID NO: 505650 - RNA, 19 nt, Homo sapiens
  misc_RNA (1)...(19): siRNA sense strand
aagauuggcuacuaugaca

SEQ ID NO: 505651 - RNA, 19 nt, Homo sapiens
  misc_RNA (1)...(19): siRNA sense strand
cagaguuucuucucagauc

SEQ ID NO: 505652 - RNA, 19 nt, Homo sapiens
  misc_RNA (1)...(19): siRNA sense strand
gaucuuuccugguccaaaa

SEQ ID NO: 505653 - RNA, 19 nt, Homo sapiens
  misc_RNA (1)...(19): siRNA sense strand
ucauugugcuuuccuaugg

SEQ ID NO: 505654 - RNA, 19 nt, Homo sapiens
  misc_RNA (1)...(19): siRNA sense strand
ugacaucccaggaauuugu

SEQ ID NO: 505655 - RNA, 19 nt, Homo sapiens
  misc_RNA (1)...(19): siRNA sense strand
cuacgacccuucuaucaac

SEQ ID NO: 505656 - RNA, 19 nt, Homo sapiens
  misc_RNA (1)...(19): siRNA sense strand
guacgucugguuccucauu

SEQ ID NO: 505657 - RNA, 19 nt, Homo sapiens
  misc_RNA (1)...(19): siRNA sense strand
cgaaucaucgugggacuuu

SEQ ID NO: 505658 - RNA, 19 nt, Homo sapiens
  misc_RNA (1)...(19): siRNA sense strand
gcgugaaacucuuugaaaa

SEQ ID NO: 505659 - RNA, 19 nt, Homo sapiens
  misc_RNA (1)...(19): siRNA sense strand
ggacuucaacuacaacaac

SEQ ID NO: 505660 - RNA, 19 nt, Homo sapiens
  misc_RNA (1)...(19): siRNA sense strand
gaccauuaccgaccaaauc

SEQ ID NO: 505661 - RNA, 19 nt, Homo sapiens
  misc_RNA (1)...(19): siRNA sense strand
gaggcuggaauugagauua

SEQ ID NO: 505662 - RNA, 19 nt, Homo sapiens
  misc_RNA (1)...(19): siRNA sense strand
gggacauccugccggacua

SEQ ID NO: 505663 - RNA, 19 nt, Homo sapiens
  misc_RNA (1)...(19): siRNA sense strand
gaucuacgacccuucuauc

SEQ ID NO: 505664 - RNA, 19 nt, Homo sapiens
  misc_RNA (1)...(19): siRNA sense strand
gaagauuggcuacuaugac

SEQ ID NO: 505665 - RNA, 19 nt, Homo sapiens
  misc_RNA (1)...(19): siRNA sense strand
gccagaguuucuucucaga

SEQ ID NO: 505666 - RNA, 19 nt, Homo sapiens
  misc_RNA (1)...(19): siRNA sense strand
uggaggacuucaacuacaa

SEQ ID NO: 505667 - RNA, 19 nt, Homo sapiens
  misc_RNA (1)...(19): siRNA sense strand
acaacgacccuaucaagau

SEQ ID NO: 505668 - RNA, 19 nt, Homo sapiens
  misc_RNA (1)...(19): siRNA sense strand
caaaucuaccgggcaauga

SEQ ID NO: 505669 - RNA, 19 nt, Homo sapiens
  misc_RNA (1)...(19): siRNA sense strand
ggaauuuguggagaaacua

SEQ ID NO: 505670 - RNA, 19 nt, Homo sapiens
  misc_RNA (1)...(19): siRNA sense strand
ccgcagcauuuccaacaug

SEQ ID NO: 505671 - RNA, 19 nt, Homo sapiens
  misc_RNA (1)...(19): siRNA sense strand
ccuaucaagaucauccuua

SEQ ID NO: 505672 - RNA, 19 nt, Homo sapiens
  misc_RNA (1)...(19): siRNA sense strand
cuacaacgacccuaucaag

SEQ ID NO: 505673 - RNA, 19 nt, Homo sapiens
  misc_RNA (1)...(19): siRNA sense strand
acaaggagcgucucuuugg

SEQ ID NO: 505674 - RNA, 19 nt, Homo sapiens
  misc_RNA (1)...(19): siRNA sense strand
gacugaagcccggaaaguu

SEQ ID NO: 505675 - RNA, 19 nt, Homo sapiens
  misc_RNA (1)...(19): siRNA sense strand
gcucaccagcccugucaaa

SEQ ID NO: 505676 - RNA, 19 nt, Homo sapiens
  misc_RNA (1)...(19): siRNA sense strand
ggaaccucauugugcuuuc

SEQ ID NO: 505677 - RNA, 19 nt, Homo sapiens
  misc_RNA (1)...(19): siRNA sense strand
ggccacaucacaacugaga

SEQ ID NO: 505678 - RNA, 19 nt, Homo sapiens
  misc_RNA (1)...(19): siRNA sense strand
gugguaugcugacaauugg

SEQ ID NO: 505679 - RNA, 19 nt, Homo sapiens
  misc_RNA (1)...(19): siRNA sense strand
ggauguggaaccucauugu

SEQ ID NO: 505680 - RNA, 19 nt, Homo sapiens
  misc_RNA (1)...(19): siRNA sense strand
gggugucucuggccaugug

SEQ ID NO: 505681 - RNA, 19 nt, Homo sapiens
  misc_RNA (1)...(19): siRNA sense strand
cccaggaauuuguggagaa

SEQ ID NO: 505682 - RNA, 19 nt, Homo sapiens
  misc_RNA (1)...(19): siRNA sense strand
acugaagcccggaaaguuu

SEQ ID NO: 505683 - RNA, 19 nt, Homo sapiens
  misc_RNA (1)...(19): siRNA sense strand
guacaucggggcacuguuu

SEQ ID NO: 505684 - RNA, 19 nt, Homo sapiens
  misc_RNA (1)...(19): siRNA sense strand
gguaugcugacaauugguu

SEQ ID NO: 505685 - RNA, 19 nt, Homo sapiens
  misc_RNA (1)...(19): siRNA sense strand
ccaaaucuaccgggcaaug

SEQ ID NO: 505686 - RNA, 19 nt, Homo sapiens
  misc_RNA (1)...(19): siRNA sense strand
gauguggaaccucauugug

SEQ ID NO: 505687 - RNA, 19 nt, Homo sapiens
  misc_RNA (1)...(19): siRNA sense strand
caccaaggaugaucuuucc

SEQ ID NO: 505688 - RNA, 19 nt, Homo sapiens
  misc_RNA (1)...(19): siRNA sense strand
cgcagcauuuccaacauga

SEQ ID NO: 505689 - RNA, 19 nt, Homo sapiens
  misc_RNA (1)...(19): siRNA sense strand
uuacuuuccgccagaguuu

SEQ ID NO: 505690 - RNA, 19 nt, Homo sapiens
  misc_RNA (1)...(19): siRNA sense strand
aacaugacaucccaggaau

SEQ ID NO: 505691 - RNA, 19 nt, Homo sapiens
  misc_RNA (1)...(19): siRNA sense strand
caagaucuacgacccuucu

SEQ ID NO: 505692 - RNA, 19 nt, Homo sapiens
  misc_RNA (1)...(19): siRNA sense strand
ggacauccugccggacuau

SEQ ID NO: 505693 - RNA, 19 nt, Homo sapiens
  misc_RNA (1)...(19): siRNA sense strand
caacccuacccgcgugaaa

SEQ ID NO: 505694 - RNA, 19 nt, Homo sapiens
  misc_RNA (1)...(19): siRNA sense strand
gcagcuacaagaagauugg

SEQ ID NO: 505695 - RNA, 19 nt, Homo sapiens
  misc_RNA (1)...(19): siRNA sense strand
caggguggcagcuacaaga

SEQ ID NO: 505696 - RNA, 19 nt, Homo sapiens
  misc_RNA (1)...(19): siRNA sense strand
gcaccgcuggccuaugaug

SEQ ID NO: 505697 - RNA, 19 nt, Homo sapiens
  misc_RNA (1)...(19): siRNA sense strand
gaaaaguggggcuggaaga

SEQ ID NO: 505698 - RNA, 19 nt, Homo sapiens
  misc_RNA (1)...(19): siRNA sense strand
ccgccagaguuucuucuca

SEQ ID NO: 505699 - RNA, 19 nt, Homo sapiens
  misc_RNA (1)...(19): siRNA sense strand
agaagauuggcuacuauga

SEQ ID NO: 505700 - RNA, 19 nt, Homo sapiens
  misc_RNA (1)...(19): siRNA sense strand
acugaggucuucacuucga

SEQ ID NO: 505701 - RNA, 19 nt, Homo sapiens
  misc_RNA (1)...(19): siRNA sense strand
cuacaacaaccagaccauu

SEQ ID NO: 505702 - RNA, 19 nt, Homo sapiens
  misc_RNA (1)...(19): siRNA sense strand
cuggaggacuucaacuaca

SEQ ID NO: 505703 - RNA, 19 nt, Homo sapiens
  misc_RNA (1)...(19): siRNA sense strand
gccuggaggacuucaacua

SEQ ID NO: 505704 - RNA, 19 nt, Homo sapiens
  misc_RNA (1)...(19): siRNA sense strand
uacaacgacccuaucaaga

SEQ ID NO: 505705 - RNA, 19 nt, Homo sapiens
  misc_RNA (1)...(19): siRNA sense strand
ccauccagcagaccacuga

SEQ ID NO: 505706 - RNA, 19 nt, Homo sapiens
  misc_RNA (1)...(19): siRNA sense strand
ccaauacccgcagcauuuc

SEQ ID NO: 505707 - RNA, 19 nt, Homo sapiens
  misc_RNA (1)...(19): siRNA sense strand
gccaccaaguaccuauaug

SEQ ID NO: 505708 - RNA, 19 nt, Homo sapiens
  misc_RNA (1)...(19): siRNA sense strand
cgcgugaaacucuuugaaa

SEQ ID NO: 505709 - RNA, 19 nt, Homo sapiens
  misc_RNA (1)...(19): siRNA sense strand
ggccaugugguguuugaug

SEQ ID NO: 505710 - RNA, 19 nt, Homo sapiens
  misc_RNA (1)...(19): siRNA sense strand
gcauuuccaacaugacauc

SEQ ID NO: 505711 - RNA, 19 nt, Homo sapiens
  misc_RNA (1)...(19): siRNA sense strand
gcacaguggaugagaugac

SEQ ID NO: 505712 - RNA, 19 nt, Homo sapiens
  misc_RNA (1)...(19): siRNA sense strand
gagugaaggaggcuggaau

SEQ ID NO: 505713 - RNA, 19 nt, Homo sapiens
  misc_RNA (1)...(19): siRNA sense strand
caggccaagccaccaagua

SEQ ID NO: 505714 - RNA, 19 nt, Homo sapiens
  misc_RNA (1)...(19): siRNA sense strand
aaaucuaccgggcaaugaa

SEQ ID NO: 505715 - RNA, 19 nt, Homo sapiens
  misc_RNA (1)...(19): siRNA sense strand
gaaccucauugugcuuucc

SEQ ID NO: 505716 - RNA, 19 nt, Homo sapiens
  misc_RNA (1)...(19): siRNA sense strand
acacagcccuccaagauga

SEQ ID NO: 505717 - RNA, 19 nt, Homo sapiens
  misc_RNA (1)...(19): siRNA sense strand
acacagacauccacacaca

SEQ ID NO: 505718 - RNA, 19 nt, Homo sapiens
  misc_RNA (1)...(19): siRNA sense strand
ucacacagcccuccaagau

SEQ ID NO: 505719 - RNA, 19 nt, Homo sapiens
  misc_RNA (1)...(19): siRNA sense strand
ucaauaagcugcucaucac

SEQ ID NO: 505720 - RNA, 19 nt, Homo sapiens
  misc_RNA (1)...(19): siRNA sense strand
gcuccuaccucaauaagcu

SEQ ID NO: 505721 - RNA, 19 nt, Homo sapiens
  misc_RNA (1)...(19): siRNA sense strand
ggacacugagccugaagaa

SEQ ID NO: 505722 - RNA, 19 nt, Homo sapiens
  misc_RNA (1)...(19): siRNA sense strand
gaggacagcggcaaauaca

SEQ ID NO: 505723 - RNA, 19 nt, Homo sapiens
  misc_RNA (1)...(19): siRNA sense strand
gaacacgacgguggacuuc

SEQ ID NO: 505724 - RNA, 19 nt, Homo sapiens
  misc_RNA (1)...(19): siRNA sense strand
cgacggcuccuaccucaau

SEQ ID NO: 505725 - RNA, 19 nt, Homo sapiens
  misc_RNA (1)...(19): siRNA sense strand
gacggcuccuaccucaaua

SEQ ID NO: 505726 - RNA, 19 nt, Homo sapiens
  misc_RNA (1)...(19): siRNA sense strand
ccacguccuuccagugcaa

SEQ ID NO: 505727 - RNA, 19 nt, Homo sapiens
  misc_RNA (1)...(19): siRNA sense strand
ggaggacagcggcaaauac

SEQ ID NO: 505728 - RNA, 19 nt, Homo sapiens
  misc_RNA (1)...(19): siRNA sense strand
ccgcugagcccaggaagaa

SEQ ID NO: 505729 - RNA, 19 nt, Homo sapiens
  misc_RNA (1)...(19): siRNA sense strand
caucaacgccaccuacaag

SEQ ID NO: 505730 - RNA, 19 nt, Homo sapiens
  misc_RNA (1)...(19): siRNA sense strand
gcugagcccaggaagaaga

SEQ ID NO: 505731 - RNA, 19 nt, Homo sapiens
  misc_RNA (1)...(19): siRNA sense strand
ccuacaagguggaugugau

SEQ ID NO: 505732 - RNA, 19 nt, Homo sapiens
  misc_RNA (1)...(19): siRNA sense strand
ggcugaagcgcguggagua

SEQ ID NO: 505733 - RNA, 19 nt, Homo sapiens
  misc_RNA (1)...(19): siRNA sense strand
caaagauggcggacaaggu

SEQ ID NO: 505734 - RNA, 19 nt, Homo sapiens
  misc_RNA (1)...(19): siRNA sense strand
cccaaacucuacacagaca

SEQ ID NO: 505735 - RNA, 19 nt, Homo sapiens
  misc_RNA (1)...(19): siRNA sense strand
cagcacauccacuaucagu

SEQ ID NO: 505736 - RNA, 19 nt, Homo sapiens
  misc_RNA (1)...(19): siRNA sense strand
cuacacagacauccacaca

SEQ ID NO: 505737 - RNA, 19 nt, Homo sapiens
  misc_RNA (1)...(19): siRNA sense strand
ggcccgacaucacguggau

SEQ ID NO: 505738 - RNA, 19 nt, Homo sapiens
  misc_RNA (1)...(19): siRNA sense strand
acacacacacucucacaca

SEQ ID NO: 505739 - RNA, 19 nt, Homo sapiens
  misc_RNA (1)...(19): siRNA sense strand
ccacacacacacacacaca

SEQ ID NO: 505740 - RNA, 19 nt, Homo sapiens
  misc_RNA (1)...(19): siRNA sense strand
cggaggacagcggcaaaua

SEQ ID NO: 505741 - RNA, 19 nt, Homo sapiens
  misc_RNA (1)...(19): siRNA sense strand
uugcuggcccuaaguugua

SEQ ID NO: 505742 - RNA, 19 nt, Homo sapiens
  misc_RNA (1)...(19): siRNA sense strand
caaacucuacacagacauc

SEQ ID NO: 505743 - RNA, 19 nt, Homo sapiens
  misc_RNA (1)...(19): siRNA sense strand
acacacacacacacucuca

SEQ ID NO: 505744 - RNA, 19 nt, Homo sapiens
  misc_RNA (1)...(19): siRNA sense strand
accagcacauccacuauca

SEQ ID NO: 505745 - RNA, 19 nt, Homo sapiens
  misc_RNA (1)...(19): siRNA sense strand
gaacaaggacaucuuugaa

SEQ ID NO: 505746 - RNA, 19 nt, Homo sapiens
  misc_RNA (1)...(19): siRNA sense strand
gccaucacauaucgaauua

SEQ ID NO: 505747 - RNA, 19 nt, Homo sapiens
  misc_RNA (1)...(19): siRNA sense strand
caacgugacuccugauuac

SEQ ID NO: 505748 - RNA, 19 nt, Homo sapiens
  misc_RNA (1)...(19): siRNA sense strand
ggacaucuuugaaguagag

SEQ ID NO: 505749 - RNA, 19 nt, Homo sapiens
  misc_RNA (1)...(19): siRNA sense strand
gaggagaacacaaauguca

SEQ ID NO: 505750 - RNA, 19 nt, Homo sapiens
  misc_RNA (1)...(19): siRNA sense strand
gcccaguacugcucuguga

SEQ ID NO: 505751 - RNA, 19 nt, Homo sapiens
  misc_RNA (1)...(19): siRNA sense strand
caaggacaucuuugaagua

SEQ ID NO: 505752 - RNA, 19 nt, Homo sapiens
  misc_RNA (1)...(19): siRNA sense strand
acaaggacaucuuugaagu

SEQ ID NO: 505753 - RNA, 19 nt, Homo sapiens
  misc_RNA (1)...(19): siRNA sense strand
gaggaggacacgaaaguga

SEQ ID NO: 505754 - RNA, 19 nt, Homo sapiens
  misc_RNA (1)...(19): siRNA sense strand
caacucggccaucacauau

SEQ ID NO: 505755 - RNA, 19 nt, Homo sapiens
  misc_RNA (1)...(19): siRNA sense strand
guacugcucugugaacaag

SEQ ID NO: 505756 - RNA, 19 nt, Homo sapiens
  misc_RNA (1)...(19): siRNA sense strand
ucaacucggccaucacaua

SEQ ID NO: 505757 - RNA, 19 nt, Homo sapiens
  misc_RNA (1)...(19): siRNA sense strand
ucaacgugacuccugauua

SEQ ID NO: 505758 - RNA, 19 nt, Homo sapiens
  misc_RNA (1)...(19): siRNA sense strand
ucacauaucgaauuaccaa

SEQ ID NO: 505759 - RNA, 19 nt, Homo sapiens
  misc_RNA (1)...(19): siRNA sense strand
caucaucuacagcaucuuu

SEQ ID NO: 505760 - RNA, 19 nt, Homo sapiens
  misc_RNA (1)...(19): siRNA sense strand
ugaacaaggacaucuuuga

SEQ ID NO: 505761 - RNA, 19 nt, Homo sapiens
  misc_RNA (1)...(19): siRNA sense strand
ggccaucacauaucgaauu

SEQ ID NO: 505762 - RNA, 19 nt, Homo sapiens
  misc_RNA (1)...(19): siRNA sense strand
ucaaccagcccaucaucua

SEQ ID NO: 505763 - RNA, 19 nt, Homo sapiens
  misc_RNA (1)...(19): siRNA sense strand
gaccucaacucggccauca

SEQ ID NO: 505764 - RNA, 19 nt, Homo sapiens
  misc_RNA (1)...(19): siRNA sense strand
uagaggagaacacaaaugu

SEQ ID NO: 505765 - RNA, 19 nt, Homo sapiens
  misc_RNA (1)...(19): siRNA sense strand
ggacgacauucuguucuac

SEQ ID NO: 505766 - RNA, 19 nt, Homo sapiens
  misc_RNA (1)...(19): siRNA sense strand
cgacaaggacgacauucug

SEQ ID NO: 505767 - RNA, 19 nt, Homo sapiens
  misc_RNA (1)...(19): siRNA sense strand
caaggacgacauucuguuc

SEQ ID NO: 505768 - RNA, 19 nt, Homo sapiens
  misc_RNA (1)...(19): siRNA sense strand
aaggacaucuuugaaguag

SEQ ID NO: 505769 - RNA, 19 nt, Homo sapiens
  misc_RNA (1)...(19): siRNA sense strand
ggccgaacaugaccuucug

SEQ ID NO: 505770 - RNA, 19 nt, Homo sapiens
  misc_RNA (1)...(19): siRNA sense strand
guucuacacccuccaggaa

SEQ ID NO: 505771 - RNA, 19 nt, Homo sapiens
  misc_RNA (1)...(19): siRNA sense strand
ugacagcaggugccaguga

SEQ ID NO: 505772 - RNA, 19 nt, Homo sapiens
  misc_RNA (1)...(19): siRNA sense strand
guagaggagaacacaaaug

SEQ ID NO: 505773 - RNA, 19 nt, Homo sapiens
  misc_RNA (1)...(19): siRNA sense strand
aggacgacauucuguucua

SEQ ID NO: 505774 - RNA, 19 nt, Homo sapiens
  misc_RNA (1)...(19): siRNA sense strand
ugucagugcuggacgucaa

SEQ ID NO: 505775 - RNA, 19 nt, Homo sapiens
  misc_RNA (1)...(19): siRNA sense strand
ucagagcggaggcacauug

SEQ ID NO: 505776 - RNA, 19 nt, Homo sapiens
  misc_RNA (1)...(19): siRNA sense strand
gaaguagaggagaacacaa

SEQ ID NO: 505777 - RNA, 19 nt, Homo sapiens
  misc_RNA (1)...(19): siRNA sense strand
gcuaaggguguucguguca

SEQ ID NO: 505778 - RNA, 19 nt, Homo sapiens
  misc_RNA (1)...(19): siRNA sense strand
gacaaggacgacauucugu

SEQ ID NO: 505779 - RNA, 19 nt, Homo sapiens
  misc_RNA (1)...(19): siRNA sense strand
ucuacacccuccaggaaau

SEQ ID NO: 505780 - RNA, 19 nt, Homo sapiens
  misc_RNA (1)...(19): siRNA sense strand
gaauuaccaaccacucaca

SEQ ID NO: 505781 - RNA, 19 nt, Homo sapiens
  misc_RNA (1)...(19): siRNA sense strand
aaguagaggagaacacaaa

SEQ ID NO: 505782 - RNA, 19 nt, Homo sapiens
  misc_RNA (1)...(19): siRNA sense strand
cauaucgaauuaccaacca

SEQ ID NO: 505783 - RNA, 19 nt, Homo sapiens
  misc_RNA (1)...(19): siRNA sense strand
caucacauaucgaauuacc

SEQ ID NO: 505784 - RNA, 19 nt, Homo sapiens
  misc_RNA (1)...(19): siRNA sense strand
uaaggguguucgugucagu

SEQ ID NO: 505785 - RNA, 19 nt, Homo sapiens
  misc_RNA (1)...(19): siRNA sense strand
cgaccuugcccgcuacuca

SEQ ID NO: 505786 - RNA, 19 nt, Homo sapiens
  misc_RNA (1)...(19): siRNA sense strand
ggaguucucggaccucaac

SEQ ID NO: 505787 - RNA, 19 nt, Homo sapiens
  misc_RNA (1)...(19): siRNA sense strand
ugugaacaaggacaucuuu

SEQ ID NO: 505788 - RNA, 19 nt, Homo sapiens
  misc_RNA (1)...(19): siRNA sense strand
caaccagcccaucaucuac

SEQ ID NO: 505789 - RNA, 19 nt, Homo sapiens
  misc_RNA (1)...(19): siRNA sense strand
ggaggaggacacgaaagug

SEQ ID NO: 505790 - RNA, 19 nt, Homo sapiens
  misc_RNA (1)...(19): siRNA sense strand
ugaaguagaggagaacaca

SEQ ID NO: 505791 - RNA, 19 nt, Homo sapiens
  misc_RNA (1)...(19): siRNA sense strand
ccacacuagugcugaacgu

SEQ ID NO: 505792 - RNA, 19 nt, Homo sapiens
  misc_RNA (1)...(19): siRNA sense strand
gguggaggaggacacgaaa

SEQ ID NO: 505793 - RNA, 19 nt, Homo sapiens
  misc_RNA (1)...(19): siRNA sense strand
acaaggacgacauucuguu

SEQ ID NO: 505794 - RNA, 19 nt, Homo sapiens
  misc_RNA (1)...(19): siRNA sense strand
ggcuacgucugcauucaag

SEQ ID NO: 505795 - RNA, 19 nt, Homo sapiens
  misc_RNA (1)...(19): siRNA sense strand
uuuaagaccaaggagauaa

SEQ ID NO: 505796 - RNA, 19 nt, Homo sapiens
  misc_RNA (1)...(19): siRNA sense strand
ucuuugaaguagaggagaa

SEQ ID NO: 505797 - RNA, 19 nt, Homo sapiens
  misc_RNA (1)...(19): siRNA sense strand
ggagaagucacugcuugag

SEQ ID NO: 505798 - RNA, 19 nt, Homo sapiens
  misc_RNA (1)...(19): siRNA sense strand
gaacaaggacaucuuugaa

SEQ ID NO: 505799 - RNA, 19 nt, Homo sapiens
  misc_RNA (1)...(19): siRNA sense strand
gccaucacauaucgaauua

SEQ ID NO: 505800 - RNA, 19 nt, Homo sapiens
  misc_RNA (1)...(19): siRNA sense strand
caacgugacuccugauuac

SEQ ID NO: 505801 - RNA, 19 nt, Homo sapiens
  misc_RNA (1)...(19): siRNA sense strand
ggacaucuuugaaguagag

SEQ ID NO: 505802 - RNA, 19 nt, Homo sapiens
  misc_RNA (1)...(19): siRNA sense strand
gaggagaacacaaauguca

SEQ ID NO: 505803 - RNA, 19 nt, Homo sapiens
  misc_RNA (1)...(19): siRNA sense strand
gcccaguacugcucuguga

SEQ ID NO: 505804 - RNA, 19 nt, Homo sapiens
  misc_RNA (1)...(19): siRNA sense strand
caaggacaucuuugaagua

SEQ ID NO: 505805 - RNA, 19 nt, Homo sapiens
  misc_RNA (1)...(19): siRNA sense strand
acaaggacaucuuugaagu

SEQ ID NO: 505806 - RNA, 19 nt, Homo sapiens
  misc_RNA (1)...(19): siRNA sense strand
gaggaggacacgaaaguga

SEQ ID NO: 505807 - RNA, 19 nt, Homo sapiens
  misc_RNA (1)...(19): siRNA sense strand
caacucggccaucacauau

SEQ ID NO: 505808 - RNA, 19 nt, Homo sapiens
  misc_RNA (1)...(19): siRNA sense strand
guacugcucugugaacaag

SEQ ID NO: 505809 - RNA, 19 nt, Homo sapiens
  misc_RNA (1)...(19): siRNA sense strand
ucaacucggccaucacaua

SEQ ID NO: 505810 - RNA, 19 nt, Homo sapiens
  misc_RNA (1)...(19): siRNA sense strand
ucaacgugacuccugauua

SEQ ID NO: 505811 - RNA, 19 nt, Homo sapiens
  misc_RNA (1)...(19): siRNA sense strand
ucacauaucgaauuaccaa

SEQ ID NO: 505812 - RNA, 19 nt, Homo sapiens
  misc_RNA (1)...(19): siRNA sense strand
caucaucuacagcaucuuu

SEQ ID NO: 505813 - RNA, 19 nt, Homo sapiens
  misc_RNA (1)...(19): siRNA sense strand
ugaacaaggacaucuuuga

SEQ ID NO: 505814 - RNA, 19 nt, Homo sapiens
  misc_RNA (1)...(19): siRNA sense strand
ggccaucacauaucgaauu

SEQ ID NO: 505815 - RNA, 19 nt, Homo sapiens
  misc_RNA (1)...(19): siRNA sense strand
ucaaccagcccaucaucua

SEQ ID NO: 505816 - RNA, 19 nt, Homo sapiens
  misc_RNA (1)...(19): siRNA sense strand
gaccucaacucggccauca

SEQ ID NO: 505817 - RNA, 19 nt, Homo sapiens
  misc_RNA (1)...(19): siRNA sense strand
uagaggagaacacaaaugu

SEQ ID NO: 505818 - RNA, 19 nt, Homo sapiens
  misc_RNA (1)...(19): siRNA sense strand
ggacgacauucuguucuac

SEQ ID NO: 505819 - RNA, 19 nt, Homo sapiens
  misc_RNA (1)...(19): siRNA sense strand
cgacaaggacgacauucug

SEQ ID NO: 505820 - RNA, 19 nt, Homo sapiens
  misc_RNA (1)...(19): siRNA sense strand
caaggacgacauucuguuc

SEQ ID NO: 505821 - RNA, 19 nt, Homo sapiens
  misc_RNA (1)...(19): siRNA sense strand
aaggacaucuuugaaguag

SEQ ID NO: 505822 - RNA, 19 nt, Homo sapiens
  misc_RNA (1)...(19): siRNA sense strand
ggccgaacaugaccuucug

SEQ ID NO: 505823 - RNA, 19 nt, Homo sapiens
  misc_RNA (1)...(19): siRNA sense strand
guucuacacccuccaggaa

SEQ ID NO: 505824 - RNA, 19 nt, Homo sapiens
  misc_RNA (1)...(19): siRNA sense strand
ugacagcaggugccaguga

SEQ ID NO: 505825 - RNA, 19 nt, Homo sapiens
  misc_RNA (1)...(19): siRNA sense strand
guagaggagaacacaaaug

SEQ ID NO: 505826 - RNA, 19 nt, Homo sapiens
  misc_RNA (1)...(19): siRNA sense strand
aggacgacauucuguucua

SEQ ID NO: 505827 - RNA, 19 nt, Homo sapiens
  misc_RNA (1)...(19): siRNA sense strand
ugucagugcuggacgucaa

SEQ ID NO: 505828 - RNA, 19 nt, Homo sapiens
  misc_RNA (1)...(19): siRNA sense strand
ucagagcggaggcacauug

SEQ ID NO: 505829 - RNA, 19 nt, Homo sapiens
  misc_RNA (1)...(19): siRNA sense strand
gaaguagaggagaacacaa

SEQ ID NO: 505830 - RNA, 19 nt, Homo sapiens
  misc_RNA (1)...(19): siRNA sense strand
gcuaaggguguucguguca

SEQ ID NO: 505831 - RNA, 19 nt, Homo sapiens
  misc_RNA (1)...(19): siRNA sense strand
gacaaggacgacauucugu

SEQ ID NO: 505832 - RNA, 19 nt, Homo sapiens
  misc_RNA (1)...(19): siRNA sense strand
ucuacacccuccaggaaau

SEQ ID NO: 505833 - RNA, 19 nt, Homo sapiens
  misc_RNA (1)...(19): siRNA sense strand
gaauuaccaaccacucaca

SEQ ID NO: 505834 - RNA, 19 nt, Homo sapiens
  misc_RNA (1)...(19): siRNA sense strand
aaguagaggagaacacaaa

SEQ ID NO: 505835 - RNA, 19 nt, Homo sapiens
  misc_RNA (1)...(19): siRNA sense strand
cauaucgaauuaccaacca

SEQ ID NO: 505836 - RNA, 19 nt, Homo sapiens
  misc_RNA (1)...(19): siRNA sense strand
caucacauaucgaauuacc

SEQ ID NO: 505837 - RNA, 19 nt, Homo sapiens
  misc_RNA (1)...(19): siRNA sense strand
uaaggguguucgugucagu

SEQ ID NO: 505838 - RNA, 19 nt, Homo sapiens
  misc_RNA (1)...(19): siRNA sense strand
cgaccuugcccgcuacuca

SEQ ID NO: 505839 - RNA, 19 nt, Homo sapiens
  misc_RNA (1)...(19): siRNA sense strand
ggaguucucggaccucaac

SEQ ID NO: 505840 - RNA, 19 nt, Homo sapiens
  misc_RNA (1)...(19): siRNA sense strand
ugugaacaaggacaucuuu

SEQ ID NO: 505841 - RNA, 19 nt, Homo sapiens
  misc_RNA (1)...(19): siRNA sense strand
caaccagcccaucaucuac

SEQ ID NO: 505842 - RNA, 19 nt, Homo sapiens
  misc_RNA (1)...(19): siRNA sense strand
ggaggaggacacgaaagug

SEQ ID NO: 505843 - RNA, 19 nt, Homo sapiens
  misc_RNA (1)...(19): siRNA sense strand
ugaaguagaggagaacaca

SEQ ID NO: 505844 - RNA, 19 nt, Homo sapiens
  misc_RNA (1)...(19): siRNA sense strand
ccacacuagugcugaacgu

SEQ ID NO: 505845 - RNA, 19 nt, Homo sapiens
  misc_RNA (1)...(19): siRNA sense strand
gguggaggaggacacgaaa

SEQ ID NO: 505846 - RNA, 19 nt, Homo sapiens
  misc_RNA (1)...(19): siRNA sense strand
acaaggacgacauucuguu

SEQ ID NO: 505847 - RNA, 19 nt, Homo sapiens
  misc_RNA (1)...(19): siRNA sense strand
ggcuacgucugcauucaag

SEQ ID NO: 505848 - RNA, 19 nt, Homo sapiens
  misc_RNA (1)...(19): siRNA sense strand
uuuaagaccaaggagauaa

SEQ ID NO: 505849 - RNA, 19 nt, Homo sapiens
  misc_RNA (1)...(19): siRNA sense strand
ucuuugaaguagaggagaa

SEQ ID NO: 505850 - RNA, 19 nt, Homo sapiens
  misc_RNA (1)...(19): siRNA sense strand
ggagaagucacugcuugag

SEQ ID NO: 505851 - RNA, 19 nt, Homo sapiens
  misc_RNA (1)...(19): siRNA sense strand
gaacaaggacaucuuugaa

SEQ ID NO: 505852 - RNA, 19 nt, Homo sapiens
  misc_RNA (1)...(19): siRNA sense strand
gccaucacauaucgaauua

SEQ ID NO: 505853 - RNA, 19 nt, Homo sapiens
  misc_RNA (1)...(19): siRNA sense strand
caacgugacuccugauuac

SEQ ID NO: 505854 - RNA, 19 nt, Homo sapiens
  misc_RNA (1)...(19): siRNA sense strand
ggacaucuuugaaguagag

SEQ ID NO: 505855 - RNA, 19 nt, Homo sapiens
  misc_RNA (1)...(19): siRNA sense strand
gaggagaacacaaauguca

SEQ ID NO: 505856 - RNA, 19 nt, Homo sapiens
  misc_RNA (1)...(19): siRNA sense strand
gcccaguacugcucuguga

SEQ ID NO: 505857 - RNA, 19 nt, Homo sapiens
  misc_RNA (1)...(19): siRNA sense strand
caaggacaucuuugaagua

SEQ ID NO: 505858 - RNA, 19 nt, Homo sapiens
  misc_RNA (1)...(19): siRNA sense strand
acaaggacaucuuugaagu

SEQ ID NO: 505859 - RNA, 19 nt, Homo sapiens
  misc_RNA (1)...(19): siRNA sense strand
gaggaggacacgaaaguga

SEQ ID NO: 505860 - RNA, 19 nt, Homo sapiens
  misc_RNA (1)...(19): siRNA sense strand
caacucggccaucacauau

SEQ ID NO: 505861 - RNA, 19 nt, Homo sapiens
  misc_RNA (1)...(19): siRNA sense strand
guacugcucugugaacaag

SEQ ID NO: 505862 - RNA, 19 nt, Homo sapiens
  misc_RNA (1)...(19): siRNA sense strand
ucaacucggccaucacaua

SEQ ID NO: 505863 - RNA, 19 nt, Homo sapiens
  misc_RNA (1)...(19): siRNA sense strand
ucaacgugacuccugauua

SEQ ID NO: 505864 - RNA, 19 nt, Homo sapiens
  misc_RNA (1)...(19): siRNA sense strand
ucacauaucgaauuaccaa

SEQ ID NO: 505865 - RNA, 19 nt, Homo sapiens
  misc_RNA (1)...(19): siRNA sense strand
caucaucuacagcaucuuu

SEQ ID NO: 505866 - RNA, 19 nt, Homo sapiens
  misc_RNA (1)...(19): siRNA sense strand
ugaacaaggacaucuuuga

SEQ ID NO: 505867 - RNA, 19 nt, Homo sapiens
  misc_RNA (1)...(19): siRNA sense strand
ggccaucacauaucgaauu

SEQ ID NO: 505868 - RNA, 19 nt, Homo sapiens
  misc_RNA (1)...(19): siRNA sense strand
ucaaccagcccaucaucua

SEQ ID NO: 505869 - RNA, 19 nt, Homo sapiens
  misc_RNA (1)...(19): siRNA sense strand
gaccucaacucggccauca

SEQ ID NO: 505870 - RNA, 19 nt, Homo sapiens
  misc_RNA (1)...(19): siRNA sense strand
uagaggagaacacaaaugu

SEQ ID NO: 505871 - RNA, 19 nt, Homo sapiens
  misc_RNA (1)...(19): siRNA sense strand
ggacgacauucuguucuac

SEQ ID NO: 505872 - RNA, 19 nt, Homo sapiens
  misc_RNA (1)...(19): siRNA sense strand
cgacaaggacgacauucug

SEQ ID NO: 505873 - RNA, 19 nt, Homo sapiens
  misc_RNA (1)...(19): siRNA sense strand
caaggacgacauucuguuc

SEQ ID NO: 505874 - RNA, 19 nt, Homo sapiens
  misc_RNA (1)...(19): siRNA sense strand
aaggacaucuuugaaguag

SEQ ID NO: 505875 - RNA, 19 nt, Homo sapiens
  misc_RNA (1)...(19): siRNA sense strand
ggccgaacaugaccuucug

SEQ ID NO: 505876 - RNA, 19 nt, Homo sapiens
  misc_RNA (1)...(19): siRNA sense strand
guucuacacccuccaggaa

SEQ ID NO: 505877 - RNA, 19 nt, Homo sapiens
  misc_RNA (1)...(19): siRNA sense strand
ugacagcaggugccaguga

SEQ ID NO: 505878 - RNA, 19 nt, Homo sapiens
  misc_RNA (1)...(19): siRNA sense strand
guagaggagaacacaaaug

SEQ ID NO: 505879 - RNA, 19 nt, Homo sapiens
  misc_RNA (1)...(19): siRNA sense strand
aggacgacauucuguucua

SEQ ID NO: 505880 - RNA, 19 nt, Homo sapiens
  misc_RNA (1)...(19): siRNA sense strand
ugucagugcuggacgucaa

SEQ ID NO: 505881 - RNA, 19 nt, Homo sapiens
  misc_RNA (1)...(19): siRNA sense strand
ucagagcggaggcacauug

SEQ ID NO: 505882 - RNA, 19 nt, Homo sapiens
  misc_RNA (1)...(19): siRNA sense strand
gaaguagaggagaacacaa

SEQ ID NO: 505883 - RNA, 19 nt, Homo sapiens
  misc_RNA (1)...(19): siRNA sense strand
gcuaaggguguucguguca

SEQ ID NO: 505884 - RNA, 19 nt, Homo sapiens
  misc_RNA (1)...(19): siRNA sense strand
gacaaggacgacauucugu

SEQ ID NO: 505885 - RNA, 19 nt, Homo sapiens
  misc_RNA (1)...(19): siRNA sense strand
ucuacacccuccaggaaau

SEQ ID NO: 505886 - RNA, 19 nt, Homo sapiens
  misc_RNA (1)...(19): siRNA sense strand
gaauuaccaaccacucaca

SEQ ID NO: 505887 - RNA, 19 nt, Homo sapiens
  misc_RNA (1)...(19): siRNA sense strand
aaguagaggagaacacaaa

SEQ ID NO: 505888 - RNA, 19 nt, Homo sapiens
  misc_RNA (1)...(19): siRNA sense strand
cauaucgaauuaccaacca

SEQ ID NO: 505889 - RNA, 19 nt, Homo sapiens
  misc_RNA (1)...(19): siRNA sense strand
caucacauaucgaauuacc

SEQ ID NO: 505890 - RNA, 19 nt, Homo sapiens
  misc_RNA (1)...(19): siRNA sense strand
uaaggguguucgugucagu

SEQ ID NO: 505891 - RNA, 19 nt, Homo sapiens
  misc_RNA (1)...(19): siRNA sense strand
cgaccuugcccgcuacuca

SEQ ID NO: 505892 - RNA, 19 nt, Homo sapiens
  misc_RNA (1)...(19): siRNA sense strand
ggaguucucggaccucaac

SEQ ID NO: 505893 - RNA, 19 nt, Homo sapiens
  misc_RNA (1)...(19): siRNA sense strand
ugugaacaaggacaucuuu

SEQ ID NO: 505894 - RNA, 19 nt, Homo sapiens
  misc_RNA (1)...(19): siRNA sense strand
caaccagcccaucaucuac

SEQ ID NO: 505895 - RNA, 19 nt, Homo sapiens
  misc_RNA (1)...(19): siRNA sense strand
ggaggaggacacgaaagug

SEQ ID NO: 505896 - RNA, 19 nt, Homo sapiens
  misc_RNA (1)...(19): siRNA sense strand
ugaaguagaggagaacaca

SEQ ID NO: 505897 - RNA, 19 nt, Homo sapiens
  misc_RNA (1)...(19): siRNA sense strand
ccacacuagugcugaacgu

SEQ ID NO: 505898 - RNA, 19 nt, Homo sapiens
  misc_RNA (1)...(19): siRNA sense strand
gguggaggaggacacgaaa

SEQ ID NO: 505899 - RNA, 19 nt, Homo sapiens
  misc_RNA (1)...(19): siRNA sense strand
acaaggacgacauucuguu

SEQ ID NO: 505900 - RNA, 19 nt, Homo sapiens
  misc_RNA (1)...(19): siRNA sense strand
ggcuacgucugcauucaag

SEQ ID NO: 505901 - RNA, 19 nt, Homo sapiens
  misc_RNA (1)...(19): siRNA sense strand
uuuaagaccaaggagauaa

SEQ ID NO: 505902 - RNA, 19 nt, Homo sapiens
  misc_RNA (1)...(19): siRNA sense strand
ucuuugaaguagaggagaa

SEQ ID NO: 505903 - RNA, 19 nt, Homo sapiens
  misc_RNA (1)...(19): siRNA sense strand
ggagaagucacugcuugag

SEQ ID NO: 505904 - RNA, 19 nt, Homo sapiens
  misc_RNA (1)...(19): siRNA sense strand
gaacaaggacaucuuugaa

SEQ ID NO: 505905 - RNA, 19 nt, Homo sapiens
  misc_RNA (1)...(19): siRNA sense strand
caacgugacuccugauuac

SEQ ID NO: 505906 - RNA, 19 nt, Homo sapiens
  misc_RNA (1)...(19): siRNA sense strand
ggacaucuuugaaguagag

SEQ ID NO: 505907 - RNA, 19 nt, Homo sapiens
  misc_RNA (1)...(19): siRNA sense strand
gaggagaacacaaauguca

SEQ ID NO: 505908 - RNA, 19 nt, Homo sapiens
  misc_RNA (1)...(19): siRNA sense strand
gcccaguacugcucuguga

SEQ ID NO: 505909 - RNA, 19 nt, Homo sapiens
  misc_RNA (1)...(19): siRNA sense strand
caaggacaucuuugaagua

SEQ ID NO: 505910 - RNA, 19 nt, Homo sapiens
  misc_RNA (1)...(19): siRNA sense strand
acaaggacaucuuugaagu

SEQ ID NO: 505911 - RNA, 19 nt, Homo sapiens
  misc_RNA (1)...(19): siRNA sense strand
guacugcucugugaacaag

SEQ ID NO: 505912 - RNA, 19 nt, Homo sapiens
  misc_RNA (1)...(19): siRNA sense strand
ucaacgugacuccugauua

SEQ ID NO: 505913 - RNA, 19 nt, Homo sapiens
  misc_RNA (1)...(19): siRNA sense strand
ugaacaaggacaucuuuga

SEQ ID NO: 505914 - RNA, 19 nt, Homo sapiens
  misc_RNA (1)...(19): siRNA sense strand
uagaggagaacacaaaugu

SEQ ID NO: 505915 - RNA, 19 nt, Homo sapiens
  misc_RNA (1)...(19): siRNA sense strand
aaggacaucuuugaaguag

SEQ ID NO: 505916 - RNA, 19 nt, Homo sapiens
  misc_RNA (1)...(19): siRNA sense strand
gaaguagaggagaacacaa

SEQ ID NO: 505917 - RNA, 19 nt, Homo sapiens
  misc_RNA (1)...(19): siRNA sense strand
guagaggagaacacaaaug

SEQ ID NO: 505918 - RNA, 19 nt, Homo sapiens
  misc_RNA (1)...(19): siRNA sense strand
aaguagaggagaacacaaa

SEQ ID NO: 505919 - RNA, 19 nt, Homo sapiens
  misc_RNA (1)...(19): siRNA sense strand
ugugaacaaggacaucuuu

SEQ ID NO: 505920 - RNA, 19 nt, Homo sapiens
  misc_RNA (1)...(19): siRNA sense strand
ugaaguagaggagaacaca

SEQ ID NO: 505921 - RNA, 19 nt, Homo sapiens
  misc_RNA (1)...(19): siRNA sense strand
ucuuugaaguagaggagaa

SEQ ID NO: 505922 - RNA, 19 nt, Homo sapiens
  misc_RNA (1)...(19): siRNA sense strand
gcacacagauuccucagua

SEQ ID NO: 505923 - RNA, 19 nt, Homo sapiens
  misc_RNA (1)...(19): siRNA sense strand
gcagaaaccucuaucacaa

SEQ ID NO: 505924 - RNA, 19 nt, Homo sapiens
  misc_RNA (1)...(19): siRNA sense strand
gagaguagcugaagaaagg

SEQ ID NO: 505925 - RNA, 19 nt, Homo sapiens
  misc_RNA (1)...(19): siRNA sense strand
gaacgcaccugucucugaa

SEQ ID NO: 505926 - RNA, 19 nt, Homo sapiens
  misc_RNA (1)...(19): siRNA sense strand
ggacagcuauugaaugcuu

SEQ ID NO: 505927 - RNA, 19 nt, Homo sapiens
  misc_RNA (1)...(19): siRNA sense strand
gcagcgagguuucauucua

SEQ ID NO: 505928 - RNA, 19 nt, Homo sapiens
  misc_RNA (1)...(19): siRNA sense strand
gaucuucgauugauuguag

SEQ ID NO: 505929 - RNA, 19 nt, Homo sapiens
  misc_RNA (1)...(19): siRNA sense strand
ccagaagucucacgcaauu

SEQ ID NO: 505930 - RNA, 19 nt, Homo sapiens
  misc_RNA (1)...(19): siRNA sense strand
gaacauuuccgguggauau

SEQ ID NO: 505931 - RNA, 19 nt, Homo sapiens
  misc_RNA (1)...(19): siRNA sense strand
gcagacaaauuccgggauu

SEQ ID NO: 505932 - RNA, 19 nt, Homo sapiens
  misc_RNA (1)...(19): siRNA sense strand
gcacugggaugaagagaca

SEQ ID NO: 505933 - RNA, 19 nt, Homo sapiens
  misc_RNA (1)...(19): siRNA sense strand
caaaucaacugucgaaacu

SEQ ID NO: 505934 - RNA, 19 nt, Homo sapiens
  misc_RNA (1)...(19): siRNA sense strand
gaagagacaccuccgaguu

SEQ ID NO: 505935 - RNA, 19 nt, Homo sapiens
  misc_RNA (1)...(19): siRNA sense strand
gaacauuuccugaauuaca

SEQ ID NO: 505936 - RNA, 19 nt, Homo sapiens
  misc_RNA (1)...(19): siRNA sense strand
gaaacaggaugugggaaga

SEQ ID NO: 505937 - RNA, 19 nt, Homo sapiens
  misc_RNA (1)...(19): siRNA sense strand
gcugaaagcacuaggaauu

SEQ ID NO: 505938 - RNA, 19 nt, Homo sapiens
  misc_RNA (1)...(19): siRNA sense strand
gaugguugauccguuguua

SEQ ID NO: 505939 - RNA, 19 nt, Homo sapiens
  misc_RNA (1)...(19): siRNA sense strand
ggucaucuauaacgaaguu

SEQ ID NO: 505940 - RNA, 19 nt, Homo sapiens
  misc_RNA (1)...(19): siRNA sense strand
aaaguccuguuccagauua

SEQ ID NO: 505941 - RNA, 19 nt, Homo sapiens
  misc_RNA (1)...(19): siRNA sense strand
gggaagagcacacagauuc

SEQ ID NO: 505942 - RNA, 19 nt, Homo sapiens
  misc_RNA (1)...(19): siRNA sense strand
ggaagccuuugacaaguug

SEQ ID NO: 505943 - RNA, 19 nt, Homo sapiens
  misc_RNA (1)...(19): siRNA sense strand
gagaugcagcguaguaauu

SEQ ID NO: 505944 - RNA, 19 nt, Homo sapiens
  misc_RNA (1)...(19): siRNA sense strand
ugaaagcacuaggaauuga

SEQ ID NO: 505945 - RNA, 19 nt, Homo sapiens
  misc_RNA (1)...(19): siRNA sense strand
cagcuggccacgagaauua

SEQ ID NO: 505946 - RNA, 19 nt, Homo sapiens
  misc_RNA (1)...(19): siRNA sense strand
ugucagagcugcgacugua

SEQ ID NO: 505947 - RNA, 19 nt, Homo sapiens
  misc_RNA (1)...(19): siRNA sense strand
ucagggaaaugaugguuga

SEQ ID NO: 505948 - RNA, 19 nt, Homo sapiens
  misc_RNA (1)...(19): siRNA sense strand
ggaacgcaccugucucuga

SEQ ID NO: 505949 - RNA, 19 nt, Homo sapiens
  misc_RNA (1)...(19): siRNA sense strand
ugaugcagauccagaauau

SEQ ID NO: 505950 - RNA, 19 nt, Homo sapiens
  misc_RNA (1)...(19): siRNA sense strand
gaagagguagaaacuguug

SEQ ID NO: 505951 - RNA, 19 nt, Homo sapiens
  misc_RNA (1)...(19): siRNA sense strand
gaucgacuguggcuuugug

SEQ ID NO: 505952 - RNA, 19 nt, Homo sapiens
  misc_RNA (1)...(19): siRNA sense strand
caaagacugucgccuaacu

SEQ ID NO: 505953 - RNA, 19 nt, Homo sapiens
  misc_RNA (1)...(19): siRNA sense strand
gacaaagucuggcugaaaa

SEQ ID NO: 505954 - RNA, 19 nt, Homo sapiens
  misc_RNA (1)...(19): siRNA sense strand
guuaucgccuuuauacaga

SEQ ID NO: 505955 - RNA, 19 nt, Homo sapiens
  misc_RNA (1)...(19): siRNA sense strand
acaauaaggacucuaaaug

SEQ ID NO: 505956 - RNA, 19 nt, Homo sapiens
  misc_RNA (1)...(19): siRNA sense strand
guucugaggugcauugucu

SEQ ID NO: 505957 - RNA, 19 nt, Homo sapiens
  misc_RNA (1)...(19): siRNA sense strand
gagcugcgacuguaagaga

SEQ ID NO: 505958 - RNA, 19 nt, Homo sapiens
  misc_RNA (1)...(19): siRNA sense strand
ugucgaaacuguggugaaa

SEQ ID NO: 505959 - RNA, 19 nt, Homo sapiens
  misc_RNA (1)...(19): siRNA sense strand
gaggaagccuuugacaagu

SEQ ID NO: 505960 - RNA, 19 nt, Homo sapiens
  misc_RNA (1)...(19): siRNA sense strand
ggagugacccagccucgaa

SEQ ID NO: 505961 - RNA, 19 nt, Homo sapiens
  misc_RNA (1)...(19): siRNA sense strand
caauaaggacucuaaaugg

SEQ ID NO: 505962 - RNA, 19 nt, Homo sapiens
  misc_RNA (1)...(19): siRNA sense strand
caggacagcuauugaaugc

SEQ ID NO: 505963 - RNA, 19 nt, Homo sapiens
  misc_RNA (1)...(19): siRNA sense strand
gagaugugacugccauuga

SEQ ID NO: 505964 - RNA, 19 nt, Homo sapiens
  misc_RNA (1)...(19): siRNA sense strand
cgagugcaccguaaauuug

SEQ ID NO: 505965 - RNA, 19 nt, Homo sapiens
  misc_RNA (1)...(19): siRNA sense strand
gaauugcagaguuuccuuu

SEQ ID NO: 505966 - RNA, 19 nt, Homo sapiens
  misc_RNA (1)...(19): siRNA sense strand
ugggaggucuggacaaaga

SEQ ID NO: 505967 - RNA, 19 nt, Homo sapiens
  misc_RNA (1)...(19): siRNA sense strand
cuggacagcugaaggaaga

SEQ ID NO: 505968 - RNA, 19 nt, Homo sapiens
  misc_RNA (1)...(19): siRNA sense strand
aagaguggcugcuguuaca

SEQ ID NO: 505969 - RNA, 19 nt, Homo sapiens
  misc_RNA (1)...(19): siRNA sense strand
aauaaggacucuaaauggu

SEQ ID NO: 505970 - RNA, 19 nt, Homo sapiens
  misc_RNA (1)...(19): siRNA sense strand
caauucgagugcaccguaa

SEQ ID NO: 505971 - RNA, 19 nt, Homo sapiens
  misc_RNA (1)...(19): siRNA sense strand
uugcagaguuuccuuugaa

SEQ ID NO: 505972 - RNA, 19 nt, Homo sapiens
  misc_RNA (1)...(19): siRNA sense strand
aaucaacugucgaaacugu

SEQ ID NO: 505973 - RNA, 19 nt, Homo sapiens
  misc_RNA (1)...(19): siRNA sense strand
acacugacauugccauugg

SEQ ID NO: 505974 - RNA, 19 nt, Homo sapiens
  misc_RNA (1)...(19): siRNA sense strand
uagaaacuguugugucgau

SEQ ID NO: 505975 - RNA, 19 nt, Homo sapiens
  misc_RNA (1)...(19): siRNA sense strand
acaaaguccuguuccagau

SEQ ID NO: 505976 - RNA, 19 nt, Homo sapiens
  misc_RNA (1)...(19): siRNA sense strand
ggaaugcuggucagggaaa

SEQ ID NO: 505977 - RNA, 19 nt, Homo sapiens
  misc_RNA (1)...(19): siRNA sense strand
gaugcagcguaguaauuug

SEQ ID NO: 505978 - RNA, 19 nt, Homo sapiens
  misc_RNA (1)...(19): siRNA sense strand
gauaguggccaccaaugug

SEQ ID NO: 505979 - RNA, 19 nt, Homo sapiens
  misc_RNA (1)...(19): siRNA sense strand
aggaagagguagaaacugu

SEQ ID NO: 505980 - RNA, 19 nt, Homo sapiens
  misc_RNA (1)...(19): siRNA sense strand
gcaagggauacauguguga

SEQ ID NO: 505981 - RNA, 19 nt, Homo sapiens
  misc_RNA (1)...(19): siRNA sense strand
agaaaccucuaucacaauc

SEQ ID NO: 505982 - RNA, 19 nt, Homo sapiens
  misc_RNA (1)...(19): siRNA sense strand
uuauacagaccuccaagua

SEQ ID NO: 505983 - RNA, 19 nt, Homo sapiens
  misc_RNA (1)...(19): siRNA sense strand
ucaggaaacuucggcuguu

SEQ ID NO: 505984 - RNA, 19 nt, Homo sapiens
  misc_RNA (1)...(19): siRNA sense strand
cgacuguggcuuugugaaa

SEQ ID NO: 505985 - RNA, 19 nt, Homo sapiens
  misc_RNA (1)...(19): siRNA sense strand
uaucaaaucaacugucgaa

SEQ ID NO: 505986 - RNA, 19 nt, Homo sapiens
  misc_RNA (1)...(19): siRNA sense strand
gauccagaauaucuuugug

SEQ ID NO: 505987 - RNA, 19 nt, Homo sapiens
  misc_RNA (1)...(19): siRNA sense strand
ggaaaauguuaucgccuuu

SEQ ID NO: 505988 - RNA, 19 nt, Homo sapiens
  misc_RNA (1)...(19): siRNA sense strand
ggaagagguagaaacuguu

SEQ ID NO: 505989 - RNA, 19 nt, Homo sapiens
  misc_RNA (1)...(19): siRNA sense strand
agaugugacugccauugaa

SEQ ID NO: 505990 - RNA, 19 nt, Homo sapiens
  misc_RNA (1)...(19): siRNA sense strand
ccaaaaugcugcuugaauc

SEQ ID NO: 505991 - RNA, 19 nt, Homo sapiens
  misc_RNA (1)...(19): siRNA sense strand
auacagaccuccaaguacu

SEQ ID NO: 505992 - RNA, 19 nt, Homo sapiens
  misc_RNA (1)...(19): siRNA sense strand
uaaauggugucaggaacau

SEQ ID NO: 505993 - RNA, 19 nt, Homo sapiens
  misc_RNA (1)...(19): siRNA sense strand
gaagaguggcugcuguuac

SEQ ID NO: 505994 - RNA, 19 nt, Homo sapiens
  misc_RNA (1)...(19): siRNA sense strand
gguguaagcaucucugaag

SEQ ID NO: 505995 - RNA, 19 nt, Homo sapiens
  misc_RNA (1)...(19): siRNA sense strand
caggaagucuagugaaggu

SEQ ID NO: 505996 - RNA, 19 nt, Homo sapiens
  misc_RNA (1)...(19): siRNA sense strand
gaaacuccgagccuacaau

SEQ ID NO: 505997 - RNA, 19 nt, Homo sapiens
  misc_RNA (1)...(19): siRNA sense strand
ggcagaaaccucuaucaca

SEQ ID NO: 505998 - RNA, 19 nt, Homo sapiens
  misc_RNA (1)...(19): siRNA sense strand
caaaguccuguuccagauu

SEQ ID NO: 505999 - RNA, 19 nt, Homo sapiens
  misc_RNA (1)...(19): siRNA sense strand
gauacaugugugauccuua

SEQ ID NO: 506000 - RNA, 19 nt, Homo sapiens
  misc_RNA (1)...(19): siRNA sense strand
accaugagcugcacauaca

SEQ ID NO: 506001 - RNA, 19 nt, Homo sapiens
  misc_RNA (1)...(19): siRNA sense strand
cagcgagguuucauucuac

SEQ ID NO: 506002 - RNA, 19 nt, Homo sapiens
  misc_RNA (1)...(19): siRNA sense strand
agaggaagccuuugacaag

SEQ ID NO: 506003 - RNA, 19 nt, Homo sapiens
  misc_RNA (1)...(19): siRNA sense strand
guguaagcaucucugaaga

SEQ ID NO: 506004 - RNA, 19 nt, Homo sapiens
  misc_RNA (1)...(19): siRNA sense strand
gagaacauuuccgguggau

SEQ ID NO: 506005 - RNA, 19 nt, Homo sapiens
  misc_RNA (1)...(19): siRNA sense strand
cgaagaguggcugcuguua

SEQ ID NO: 506006 - RNA, 19 nt, Homo sapiens
  misc_RNA (1)...(19): siRNA sense strand
ggaagagugguaggaguga

SEQ ID NO: 506007 - RNA, 19 nt, Homo sapiens
  misc_RNA (1)...(19): siRNA sense strand
cugccgguauucaagcuua

SEQ ID NO: 506008 - RNA, 19 nt, Homo sapiens
  misc_RNA (1)...(19): siRNA sense strand
cggcuguucucaggaaauu

SEQ ID NO: 506009 - RNA, 19 nt, Homo sapiens
  misc_RNA (1)...(19): siRNA sense strand
agaggaccuuguacacuga

SEQ ID NO: 506010 - RNA, 19 nt, Homo sapiens
  misc_RNA (1)...(19): siRNA sense strand
gacuguaagagaacaauug

SEQ ID NO: 506011 - RNA, 19 nt, Homo sapiens
  misc_RNA (1)...(19): siRNA sense strand
ucgagugcaccguaaauuu

SEQ ID NO: 506012 - RNA, 19 nt, Homo sapiens
  misc_RNA (1)...(19): siRNA sense strand
ucagcggcauuguguaugu

SEQ ID NO: 506013 - RNA, 19 nt, Homo sapiens
  misc_RNA (1)...(19): siRNA sense strand
gcuacugcauccgcuuuga

SEQ ID NO: 506014 - RNA, 19 nt, Homo sapiens
  misc_RNA (1)...(19): siRNA sense strand
ccaaguacuacaugagaga

SEQ ID NO: 506015 - RNA, 19 nt, Homo sapiens
  misc_RNA (1)...(19): siRNA sense strand
caagugcccaggaagucua

SEQ ID NO: 506016 - RNA, 19 nt, Homo sapiens
  misc_RNA (1)...(19): siRNA sense strand
ccugagaugcagcguagua

SEQ ID NO: 506017 - RNA, 19 nt, Homo sapiens
  misc_RNA (1)...(19): siRNA sense strand
aggaagccuuugacaaguu

SEQ ID NO: 506018 - RNA, 19 nt, Homo sapiens
  misc_RNA (1)...(19): siRNA sense strand
gcgaggggaucuucgauug

SEQ ID NO: 506019 - RNA, 19 nt, Homo sapiens
  misc_RNA (1)...(19): siRNA sense strand
gaagcugccgguauucaag

SEQ ID NO: 506020 - RNA, 19 nt, Homo sapiens
  misc_RNA (1)...(19): siRNA sense strand
ucugggaggucuggacaaa

SEQ ID NO: 506021 - RNA, 19 nt, Homo sapiens
  misc_RNA (1)...(19): siRNA sense strand
gaaaauguuaucgccuuua

SEQ ID NO: 506022 - RNA, 19 nt, Homo sapiens
  misc_RNA (1)...(19): siRNA sense strand
guaaagcgcuugcugauua

SEQ ID NO: 506023 - RNA, 19 nt, Homo sapiens
  misc_RNA (1)...(19): siRNA sense strand
caacaaauuuggcacuuua

SEQ ID NO: 506024 - RNA, 19 nt, Homo sapiens
  misc_RNA (1)...(19): siRNA sense strand
caaaggagauuuacuagaa

SEQ ID NO: 506025 - RNA, 19 nt, Homo sapiens
  misc_RNA (1)...(19): siRNA sense strand
gaaccugcauuuccacaua

SEQ ID NO: 506026 - RNA, 19 nt, Homo sapiens
  misc_RNA (1)...(19): siRNA sense strand
agacacagcuucugaaauu

SEQ ID NO: 506027 - RNA, 19 nt, Homo sapiens
  misc_RNA (1)...(19): siRNA sense strand
ggaaguagauauagucaug

SEQ ID NO: 506028 - RNA, 19 nt, Homo sapiens
  misc_RNA (1)...(19): siRNA sense strand
agaaaucgcugguauaaau

SEQ ID NO: 506029 - RNA, 19 nt, Homo sapiens
  misc_RNA (1)...(19): siRNA sense strand
ggucaucuuuggucauuua

SEQ ID NO: 506030 - RNA, 19 nt, Homo sapiens
  misc_RNA (1)...(19): siRNA sense strand
gguagucuaugccuuguua

SEQ ID NO: 506031 - RNA, 19 nt, Homo sapiens
  misc_RNA (1)...(19): siRNA sense strand
gcacagcaauaacuacuug

SEQ ID NO: 506032 - RNA, 19 nt, Homo sapiens
  misc_RNA (1)...(19): siRNA sense strand
acacgaugcuuuagaauuu

SEQ ID NO: 506033 - RNA, 19 nt, Homo sapiens
  misc_RNA (1)...(19): siRNA sense strand
caacauugguguccuaaga

SEQ ID NO: 506034 - RNA, 19 nt, Homo sapiens
  misc_RNA (1)...(19): siRNA sense strand
gcucacagcugaacgaaug

SEQ ID NO: 506035 - RNA, 19 nt, Homo sapiens
  misc_RNA (1)...(19): siRNA sense strand
gaaagaagaccauauacug

SEQ ID NO: 506036 - RNA, 19 nt, Homo sapiens
  misc_RNA (1)...(19): siRNA sense strand
gagaugaacuugaaagaag

SEQ ID NO: 506037 - RNA, 19 nt, Homo sapiens
  misc_RNA (1)...(19): siRNA sense strand
gaagauaaaccagcauuaa

SEQ ID NO: 506038 - RNA, 19 nt, Homo sapiens
  misc_RNA (1)...(19): siRNA sense strand
cagaaaaccuuguaacuua

SEQ ID NO: 506039 - RNA, 19 nt, Homo sapiens
  misc_RNA (1)...(19): siRNA sense strand
ccugauagcucuucugauu

SEQ ID NO: 506040 - RNA, 19 nt, Homo sapiens
  misc_RNA (1)...(19): siRNA sense strand
agacuuagauccugauauu

SEQ ID NO: 506041 - RNA, 19 nt, Homo sapiens
  misc_RNA (1)...(19): siRNA sense strand
gaaagagaaugugcaauca

SEQ ID NO: 506042 - RNA, 19 nt, Homo sapiens
  misc_RNA (1)...(19): siRNA sense strand
ucaaagagauauacacgaa

SEQ ID NO: 506043 - RNA, 19 nt, Homo sapiens
  misc_RNA (1)...(19): siRNA sense strand
gaacaauucucccuauguc

SEQ ID NO: 506044 - RNA, 19 nt, Homo sapiens
  misc_RNA (1)...(19): siRNA sense strand
gaugaggcuucaagauaua

SEQ ID NO: 506045 - RNA, 19 nt, Homo sapiens
  misc_RNA (1)...(19): siRNA sense strand
gcagacagguugaugacuu

SEQ ID NO: 506046 - RNA, 19 nt, Homo sapiens
  misc_RNA (1)...(19): siRNA sense strand
caccacagcuugaagauga

SEQ ID NO: 506047 - RNA, 19 nt, Homo sapiens
  misc_RNA (1)...(19): siRNA sense strand
ggaaacagaacguacaauu

SEQ ID NO: 506048 - RNA, 19 nt, Homo sapiens
  misc_RNA (1)...(19): siRNA sense strand
gagccuauaugauggauga

SEQ ID NO: 506049 - RNA, 19 nt, Homo sapiens
  misc_RNA (1)...(19): siRNA sense strand
guaaugugcuucagcuuga

SEQ ID NO: 506050 - RNA, 19 nt, Homo sapiens
  misc_RNA (1)...(19): siRNA sense strand
ggacaagaagaaacuguua

SEQ ID NO: 506051 - RNA, 19 nt, Homo sapiens
  misc_RNA (1)...(19): siRNA sense strand
guacgacgauguauucuca

SEQ ID NO: 506052 - RNA, 19 nt, Homo sapiens
  misc_RNA (1)...(19): siRNA sense strand
gcaauccucaguacacuua

SEQ ID NO: 506053 - RNA, 19 nt, Homo sapiens
  misc_RNA (1)...(19): siRNA sense strand
ugaaaggaauuccagauga

SEQ ID NO: 506054 - RNA, 19 nt, Homo sapiens
  misc_RNA (1)...(19): siRNA sense strand
gcugcuagguuccucuuua

SEQ ID NO: 506055 - RNA, 19 nt, Homo sapiens
  misc_RNA (1)...(19): siRNA sense strand
caccagaccucaucagauu

SEQ ID NO: 506056 - RNA, 19 nt, Homo sapiens
  misc_RNA (1)...(19): siRNA sense strand
agaaaugguuccacaguuu

SEQ ID NO: 506057 - RNA, 19 nt, Homo sapiens
  misc_RNA (1)...(19): siRNA sense strand
ucaaaucgcuucuccgaau

SEQ ID NO: 506058 - RNA, 19 nt, Homo sapiens
  misc_RNA (1)...(19): siRNA sense strand
guacgaaugugaagaaucu

SEQ ID NO: 506059 - RNA, 19 nt, Homo sapiens
  misc_RNA (1)...(19): siRNA sense strand
gggaugauguauuuggaua

SEQ ID NO: 506060 - RNA, 19 nt, Homo sapiens
  misc_RNA (1)...(19): siRNA sense strand
cuauagaucuccucaaaga

SEQ ID NO: 506061 - RNA, 19 nt, Homo sapiens
  misc_RNA (1)...(19): siRNA sense strand
ugaaggcagugaagaagua

SEQ ID NO: 506062 - RNA, 19 nt, Homo sapiens
  misc_RNA (1)...(19): siRNA sense strand
caaagacaguguuaauugu

SEQ ID NO: 506063 - RNA, 19 nt, Homo sapiens
  misc_RNA (1)...(19): siRNA sense strand
ggauacagcagaacaauau

SEQ ID NO: 506064 - RNA, 19 nt, Homo sapiens
  misc_RNA (1)...(19): siRNA sense strand
gauaaaccagcauuaagua

SEQ ID NO: 506065 - RNA, 19 nt, Homo sapiens
  misc_RNA (1)...(19): siRNA sense strand
cuagagaccaugaagauua

SEQ ID NO: 506066 - RNA, 19 nt, Homo sapiens
  misc_RNA (1)...(19): siRNA sense strand
caagacugguuuccacuuu

SEQ ID NO: 506067 - RNA, 19 nt, Homo sapiens
  misc_RNA (1)...(19): siRNA sense strand
uaacagagguagucuaugc

SEQ ID NO: 506068 - RNA, 19 nt, Homo sapiens
  misc_RNA (1)...(19): siRNA sense strand
gaugcucuuucaaugauua

SEQ ID NO: 506069 - RNA, 19 nt, Homo sapiens
  misc_RNA (1)...(19): siRNA sense strand
gaacuucgcacaaaugaca

SEQ ID NO: 506070 - RNA, 19 nt, Homo sapiens
  misc_RNA (1)...(19): siRNA sense strand
gaacaaguuaugugaagaa

SEQ ID NO: 506071 - RNA, 19 nt, Homo sapiens
  misc_RNA (1)...(19): siRNA sense strand
gaugaugaguugauaagau

SEQ ID NO: 506072 - RNA, 19 nt, Homo sapiens
  misc_RNA (1)...(19): siRNA sense strand
ggaaagagaaugugcaauc

SEQ ID NO: 506073 - RNA, 19 nt, Homo sapiens
  misc_RNA (1)...(19): siRNA sense strand
guacaacauugguguccua

SEQ ID NO: 506074 - RNA, 19 nt, Homo sapiens
  misc_RNA (1)...(19): siRNA sense strand
guagugauguagaugauga

SEQ ID NO: 506075 - RNA, 19 nt, Homo sapiens
  misc_RNA (1)...(19): siRNA sense strand
ggacaccggccucuacuuu

SEQ ID NO: 506076 - RNA, 19 nt, Homo sapiens
  misc_RNA (1)...(19): siRNA sense strand
gagcaagaguacuuaugaa

SEQ ID NO: 506077 - RNA, 19 nt, Homo sapiens
  misc_RNA (1)...(19): siRNA sense strand
gaacaacccucagagaacu

SEQ ID NO: 506078 - RNA, 19 nt, Homo sapiens
  misc_RNA (1)...(19): siRNA sense strand
gagaacaaguuaugugaag

SEQ ID NO: 506079 - RNA, 19 nt, Homo sapiens
  misc_RNA (1)...(19): siRNA sense strand
caaaucgcuucuccgaaua

SEQ ID NO: 506080 - RNA, 19 nt, Homo sapiens
  misc_RNA (1)...(19): siRNA sense strand
guacaugggagaaguguuu

SEQ ID NO: 506081 - RNA, 19 nt, Homo sapiens
  misc_RNA (1)...(19): siRNA sense strand
ggaacaguaugucaaagga

SEQ ID NO: 506082 - RNA, 19 nt, Homo sapiens
  misc_RNA (1)...(19): siRNA sense strand
ggaaacaguucaggcuuug

SEQ ID NO: 506083 - RNA, 19 nt, Homo sapiens
  misc_RNA (1)...(19): siRNA sense strand
agagagagcuaaacacuca

SEQ ID NO: 506084 - RNA, 19 nt, Homo sapiens
  misc_RNA (1)...(19): siRNA sense strand
ugauaaagauggugugaug

SEQ ID NO: 506085 - RNA, 19 nt, Homo sapiens
  misc_RNA (1)...(19): siRNA sense strand
ccaagaugcuccagaugaa

SEQ ID NO: 506086 - RNA, 19 nt, Homo sapiens
  misc_RNA (1)...(19): siRNA sense strand
acacagaucaaccaaguua

SEQ ID NO: 506087 - RNA, 19 nt, Homo sapiens
  misc_RNA (1)...(19): siRNA sense strand
guucgaguauuaacuguuu

SEQ ID NO: 506088 - RNA, 19 nt, Homo sapiens
  misc_RNA (1)...(19): siRNA sense strand
ggaaaugcuuagcugagaa

SEQ ID NO: 506089 - RNA, 19 nt, Homo sapiens
  misc_RNA (1)...(19): siRNA sense strand
ucaaucaacuucaacacaa

SEQ ID NO: 506090 - RNA, 19 nt, Homo sapiens
  misc_RNA (1)...(19): siRNA sense strand
guaacuguccuguugcuua

SEQ ID NO: 506091 - RNA, 19 nt, Homo sapiens
  misc_RNA (1)...(19): siRNA sense strand
caaacucacagaauucaua

SEQ ID NO: 506092 - RNA, 19 nt, Homo sapiens
  misc_RNA (1)...(19): siRNA sense strand
gcagaagaaaucacuauga

SEQ ID NO: 506093 - RNA, 19 nt, Homo sapiens
  misc_RNA (1)...(19): siRNA sense strand
ugagagaaguguacggaaa

SEQ ID NO: 506094 - RNA, 19 nt, Homo sapiens
  misc_RNA (1)...(19): siRNA sense strand
gcaaugagccagacuugga

SEQ ID NO: 506095 - RNA, 19 nt, Homo sapiens
  misc_RNA (1)...(19): siRNA sense strand
gaaagcagccuuaguccau

SEQ ID NO: 506096 - RNA, 19 nt, Homo sapiens
  misc_RNA (1)...(19): siRNA sense strand
ggagaaagcagccuuaguc

SEQ ID NO: 506097 - RNA, 19 nt, Homo sapiens
  misc_RNA (1)...(19): siRNA sense strand
gaaugcaguuuaccuuugu

SEQ ID NO: 506098 - RNA, 19 nt, Homo sapiens
  misc_RNA (1)...(19): siRNA sense strand
uaagugguauuccaaguug

SEQ ID NO: 506099 - RNA, 19 nt, Homo sapiens
  misc_RNA (1)...(19): siRNA sense strand
ggaauggcuuggagaugaa

SEQ ID NO: 506100 - RNA, 19 nt, Homo sapiens
  misc_RNA (1)...(19): siRNA sense strand
gaaacagaacguacaauuc

SEQ ID NO: 506101 - RNA, 19 nt, Homo sapiens
  misc_RNA (1)...(19): siRNA sense strand
ccaagaugaugaguugaua

SEQ ID NO: 506102 - RNA, 19 nt, Homo sapiens
  misc_RNA (1)...(19): siRNA sense strand
agaccaagaugaugaguug

SEQ ID NO: 506103 - RNA, 19 nt, Homo sapiens
  misc_RNA (1)...(19): siRNA sense strand
cauggaaccuuacacaguu

SEQ ID NO: 506104 - RNA, 19 nt, Homo sapiens
  misc_RNA (1)...(19): siRNA sense strand
aaacuuaugccgccagaua

SEQ ID NO: 506105 - RNA, 19 nt, Homo sapiens
  misc_RNA (1)...(19): siRNA sense strand
ggagcaagaguacuuauga

SEQ ID NO: 506106 - RNA, 19 nt, Homo sapiens
  misc_RNA (1)...(19): siRNA sense strand
gcugauagauccugcagau

SEQ ID NO: 506107 - RNA, 19 nt, Homo sapiens
  misc_RNA (1)...(19): siRNA sense strand
gaugaacucuuugcucguu

SEQ ID NO: 506108 - RNA, 19 nt, Homo sapiens
  misc_RNA (1)...(19): siRNA sense strand
ucagagaacuggccaacga

SEQ ID NO: 506109 - RNA, 19 nt, Homo sapiens
  misc_RNA (1)...(19): siRNA sense strand
caaguuggaugacaugauc

SEQ ID NO: 506110 - RNA, 19 nt, Homo sapiens
  misc_RNA (1)...(19): siRNA sense strand
uaaagcgauuugacuauga

SEQ ID NO: 506111 - RNA, 19 nt, Homo sapiens
  misc_RNA (1)...(19): siRNA sense strand
gaacgguauucuugccauu

SEQ ID NO: 506112 - RNA, 19 nt, Homo sapiens
  misc_RNA (1)...(19): siRNA sense strand
ucacaagugcuauaucuaa

SEQ ID NO: 506113 - RNA, 19 nt, Homo sapiens
  misc_RNA (1)...(19): siRNA sense strand
acagauaaguuccaauaug

SEQ ID NO: 506114 - RNA, 19 nt, Homo sapiens
  misc_RNA (1)...(19): siRNA sense strand
gcuugauccuucucuguua

SEQ ID NO: 506115 - RNA, 19 nt, Homo sapiens
  misc_RNA (1)...(19): siRNA sense strand
ggauagaucgcuuuauaga

SEQ ID NO: 506116 - RNA, 19 nt, Homo sapiens
  misc_RNA (1)...(19): siRNA sense strand
gagcauuccuaauccauca

SEQ ID NO: 506117 - RNA, 19 nt, Homo sapiens
  misc_RNA (1)...(19): siRNA sense strand
uaugacaacuuaagcuuga

SEQ ID NO: 506118 - RNA, 19 nt, Homo sapiens
  misc_RNA (1)...(19): siRNA sense strand
aaacagaacguacaauuca

SEQ ID NO: 506119 - RNA, 19 nt, Homo sapiens
  misc_RNA (1)...(19): siRNA sense strand
ugccaaggcugcccacaua

SEQ ID NO: 506120 - RNA, 19 nt, Homo sapiens
  misc_RNA (1)...(19): siRNA sense strand
ggacauccagcuaugcuaa

SEQ ID NO: 506121 - RNA, 19 nt, Homo sapiens
  misc_RNA (1)...(19): siRNA sense strand
ugaugaggcuucaagauau

SEQ ID NO: 506122 - RNA, 19 nt, Homo sapiens
  misc_RNA (1)...(19): siRNA sense strand
guaaagcgcuugcugauua

SEQ ID NO: 506123 - RNA, 19 nt, Homo sapiens
  misc_RNA (1)...(19): siRNA sense strand
caacaaauuuggcacuuua

SEQ ID NO: 506124 - RNA, 19 nt, Homo sapiens
  misc_RNA (1)...(19): siRNA sense strand
caaaggagauuuacuagaa

SEQ ID NO: 506125 - RNA, 19 nt, Homo sapiens
  misc_RNA (1)...(19): siRNA sense strand
gaaccugcauuuccacaua

SEQ ID NO: 506126 - RNA, 19 nt, Homo sapiens
  misc_RNA (1)...(19): siRNA sense strand
agacacagcuucugaaauu

SEQ ID NO: 506127 - RNA, 19 nt, Homo sapiens
  misc_RNA (1)...(19): siRNA sense strand
ggaaguagauauagucaug

SEQ ID NO: 506128 - RNA, 19 nt, Homo sapiens
  misc_RNA (1)...(19): siRNA sense strand
agaaaucgcugguauaaau

SEQ ID NO: 506129 - RNA, 19 nt, Homo sapiens
  misc_RNA (1)...(19): siRNA sense strand
ggucaucuuuggucauuua

SEQ ID NO: 506130 - RNA, 19 nt, Homo sapiens
  misc_RNA (1)...(19): siRNA sense strand
gguagucuaugccuuguua

SEQ ID NO: 506131 - RNA, 19 nt, Homo sapiens
  misc_RNA (1)...(19): siRNA sense strand
gcacagcaauaacuacuug

SEQ ID NO: 506132 - RNA, 19 nt, Homo sapiens
  misc_RNA (1)...(19): siRNA sense strand
acacgaugcuuuagaauuu

SEQ ID NO: 506133 - RNA, 19 nt, Homo sapiens
  misc_RNA (1)...(19): siRNA sense strand
caacauugguguccuaaga

SEQ ID NO: 506134 - RNA, 19 nt, Homo sapiens
  misc_RNA (1)...(19): siRNA sense strand
gcucacagcugaacgaaug

SEQ ID NO: 506135 - RNA, 19 nt, Homo sapiens
  misc_RNA (1)...(19): siRNA sense strand
gaaagaagaccauauacug

SEQ ID NO: 506136 - RNA, 19 nt, Homo sapiens
  misc_RNA (1)...(19): siRNA sense strand
gagaugaacuugaaagaag

SEQ ID NO: 506137 - RNA, 19 nt, Homo sapiens
  misc_RNA (1)...(19): siRNA sense strand
gaagauaaaccagcauuaa

SEQ ID NO: 506138 - RNA, 19 nt, Homo sapiens
  misc_RNA (1)...(19): siRNA sense strand
cagaaaaccuuguaacuua

SEQ ID NO: 506139 - RNA, 19 nt, Homo sapiens
  misc_RNA (1)...(19): siRNA sense strand
ccugauagcucuucugauu

SEQ ID NO: 506140 - RNA, 19 nt, Homo sapiens
  misc_RNA (1)...(19): siRNA sense strand
agacuuagauccugauauu

SEQ ID NO: 506141 - RNA, 19 nt, Homo sapiens
  misc_RNA (1)...(19): siRNA sense strand
gaaagagaaugugcaauca

SEQ ID NO: 506142 - RNA, 19 nt, Homo sapiens
  misc_RNA (1)...(19): siRNA sense strand
ucaaagagauauacacgaa

SEQ ID NO: 506143 - RNA, 19 nt, Homo sapiens
  misc_RNA (1)...(19): siRNA sense strand
gaacaauucucccuauguc

SEQ ID NO: 506144 - RNA, 19 nt, Homo sapiens
  misc_RNA (1)...(19): siRNA sense strand
gaugaggcuucaagauaua

SEQ ID NO: 506145 - RNA, 19 nt, Homo sapiens
  misc_RNA (1)...(19): siRNA sense strand
gcagacagguugaugacuu

SEQ ID NO: 506146 - RNA, 19 nt, Homo sapiens
  misc_RNA (1)...(19): siRNA sense strand
caccacagcuugaagauga

SEQ ID NO: 506147 - RNA, 19 nt, Homo sapiens
  misc_RNA (1)...(19): siRNA sense strand
ggaaacagaacguacaauu

SEQ ID NO: 506148 - RNA, 19 nt, Homo sapiens
  misc_RNA (1)...(19): siRNA sense strand
gagccuauaugauggauga

SEQ ID NO: 506149 - RNA, 19 nt, Homo sapiens
  misc_RNA (1)...(19): siRNA sense strand
guaaugugcuucagcuuga

SEQ ID NO: 506150 - RNA, 19 nt, Homo sapiens
  misc_RNA (1)...(19): siRNA sense strand
ggacaagaagaaacuguua

SEQ ID NO: 506151 - RNA, 19 nt, Homo sapiens
  misc_RNA (1)...(19): siRNA sense strand
guacgacgauguauucuca

SEQ ID NO: 506152 - RNA, 19 nt, Homo sapiens
  misc_RNA (1)...(19): siRNA sense strand
gcaauccucaguacacuua

SEQ ID NO: 506153 - RNA, 19 nt, Homo sapiens
  misc_RNA (1)...(19): siRNA sense strand
ugaaaggaauuccagauga

SEQ ID NO: 506154 - RNA, 19 nt, Homo sapiens
  misc_RNA (1)...(19): siRNA sense strand
gcugcuagguuccucuuua

SEQ ID NO: 506155 - RNA, 19 nt, Homo sapiens
  misc_RNA (1)...(19): siRNA sense strand
caccagaccucaucagauu

SEQ ID NO: 506156 - RNA, 19 nt, Homo sapiens
  misc_RNA (1)...(19): siRNA sense strand
agaaaugguuccacaguuu

SEQ ID NO: 506157 - RNA, 19 nt, Homo sapiens
  misc_RNA (1)...(19): siRNA sense strand
ucaaaucgcuucuccgaau

SEQ ID NO: 506158 - RNA, 19 nt, Homo sapiens
  misc_RNA (1)...(19): siRNA sense strand
guacgaaugugaagaaucu

SEQ ID NO: 506159 - RNA, 19 nt, Homo sapiens
  misc_RNA (1)...(19): siRNA sense strand
gggaugauguauuuggaua

SEQ ID NO: 506160 - RNA, 19 nt, Homo sapiens
  misc_RNA (1)...(19): siRNA sense strand
cuauagaucuccucaaaga

SEQ ID NO: 506161 - RNA, 19 nt, Homo sapiens
  misc_RNA (1)...(19): siRNA sense strand
ugaaggcagugaagaagua

SEQ ID NO: 506162 - RNA, 19 nt, Homo sapiens
  misc_RNA (1)...(19): siRNA sense strand
caaagacaguguuaauugu

SEQ ID NO: 506163 - RNA, 19 nt, Homo sapiens
  misc_RNA (1)...(19): siRNA sense strand
ggauacagcagaacaauau

SEQ ID NO: 506164 - RNA, 19 nt, Homo sapiens
  misc_RNA (1)...(19): siRNA sense strand
gauaaaccagcauuaagua

SEQ ID NO: 506165 - RNA, 19 nt, Homo sapiens
  misc_RNA (1)...(19): siRNA sense strand
cuagagaccaugaagauua

SEQ ID NO: 506166 - RNA, 19 nt, Homo sapiens
  misc_RNA (1)...(19): siRNA sense strand
caagacugguuuccacuuu

SEQ ID NO: 506167 - RNA, 19 nt, Homo sapiens
  misc_RNA (1)...(19): siRNA sense strand
uaacagagguagucuaugc

SEQ ID NO: 506168 - RNA, 19 nt, Homo sapiens
  misc_RNA (1)...(19): siRNA sense strand
gaugcucuuucaaugauua

SEQ ID NO: 506169 - RNA, 19 nt, Homo sapiens
  misc_RNA (1)...(19): siRNA sense strand
gaacuucgcacaaaugaca

SEQ ID NO: 506170 - RNA, 19 nt, Homo sapiens
  misc_RNA (1)...(19): siRNA sense strand
gaacaaguuaugugaagaa

SEQ ID NO: 506171 - RNA, 19 nt, Homo sapiens
  misc_RNA (1)...(19): siRNA sense strand
gaugaugaguugauaagau

SEQ ID NO: 506172 - RNA, 19 nt, Homo sapiens
  misc_RNA (1)...(19): siRNA sense strand
ggaaagagaaugugcaauc

SEQ ID NO: 506173 - RNA, 19 nt, Homo sapiens
  misc_RNA (1)...(19): siRNA sense strand
guacaacauugguguccua

SEQ ID NO: 506174 - RNA, 19 nt, Homo sapiens
  misc_RNA (1)...(19): siRNA sense strand
guagugauguagaugauga

SEQ ID NO: 506175 - RNA, 19 nt, Homo sapiens
  misc_RNA (1)...(19): siRNA sense strand
ggacaccggccucuacuuu

SEQ ID NO: 506176 - RNA, 19 nt, Homo sapiens
  misc_RNA (1)...(19): siRNA sense strand
gagcaagaguacuuaugaa

SEQ ID NO: 506177 - RNA, 19 nt, Homo sapiens
  misc_RNA (1)...(19): siRNA sense strand
gaacaacccucagagaacu

SEQ ID NO: 506178 - RNA, 19 nt, Homo sapiens
  misc_RNA (1)...(19): siRNA sense strand
gagaacaaguuaugugaag

SEQ ID NO: 506179 - RNA, 19 nt, Homo sapiens
  misc_RNA (1)...(19): siRNA sense strand
caaaucgcuucuccgaaua

SEQ ID NO: 506180 - RNA, 19 nt, Homo sapiens
  misc_RNA (1)...(19): siRNA sense strand
guacaugggagaaguguuu

SEQ ID NO: 506181 - RNA, 19 nt, Homo sapiens
  misc_RNA (1)...(19): siRNA sense strand
ggaacaguaugucaaagga

SEQ ID NO: 506182 - RNA, 19 nt, Homo sapiens
  misc_RNA (1)...(19): siRNA sense strand
ggaaacaguucaggcuuug

SEQ ID NO: 506183 - RNA, 19 nt, Homo sapiens
  misc_RNA (1)...(19): siRNA sense strand
agagagagcuaaacacuca

SEQ ID NO: 506184 - RNA, 19 nt, Homo sapiens
  misc_RNA (1)...(19): siRNA sense strand
ugauaaagauggugugaug

SEQ ID NO: 506185 - RNA, 19 nt, Homo sapiens
  misc_RNA (1)...(19): siRNA sense strand
ccaagaugcuccagaugaa

SEQ ID NO: 506186 - RNA, 19 nt, Homo sapiens
  misc_RNA (1)...(19): siRNA sense strand
acacagaucaaccaaguua

SEQ ID NO: 506187 - RNA, 19 nt, Homo sapiens
  misc_RNA (1)...(19): siRNA sense strand
guucgaguauuaacuguuu

SEQ ID NO: 506188 - RNA, 19 nt, Homo sapiens
  misc_RNA (1)...(19): siRNA sense strand
ggaaaugcuuagcugagaa

SEQ ID NO: 506189 - RNA, 19 nt, Homo sapiens
  misc_RNA (1)...(19): siRNA sense strand
ucaaucaacuucaacacaa

SEQ ID NO: 506190 - RNA, 19 nt, Homo sapiens
  misc_RNA (1)...(19): siRNA sense strand
guaacuguccuguugcuua

SEQ ID NO: 506191 - RNA, 19 nt, Homo sapiens
  misc_RNA (1)...(19): siRNA sense strand
caaacucacagaauucaua

SEQ ID NO: 506192 - RNA, 19 nt, Homo sapiens
  misc_RNA (1)...(19): siRNA sense strand
gcagaagaaaucacuauga

SEQ ID NO: 506193 - RNA, 19 nt, Homo sapiens
  misc_RNA (1)...(19): siRNA sense strand
ugagagaaguguacggaaa

SEQ ID NO: 506194 - RNA, 19 nt, Homo sapiens
  misc_RNA (1)...(19): siRNA sense strand
gcaaugagccagacuugga

SEQ ID NO: 506195 - RNA, 19 nt, Homo sapiens
  misc_RNA (1)...(19): siRNA sense strand
gaaagcagccuuaguccau

SEQ ID NO: 506196 - RNA, 19 nt, Homo sapiens
  misc_RNA (1)...(19): siRNA sense strand
ggagaaagcagccuuaguc

SEQ ID NO: 506197 - RNA, 19 nt, Homo sapiens
  misc_RNA (1)...(19): siRNA sense strand
gaaugcaguuuaccuuugu

SEQ ID NO: 506198 - RNA, 19 nt, Homo sapiens
  misc_RNA (1)...(19): siRNA sense strand
uaagugguauuccaaguug

SEQ ID NO: 506199 - RNA, 19 nt, Homo sapiens
  misc_RNA (1)...(19): siRNA sense strand
ggaauggcuuggagaugaa

SEQ ID NO: 506200 - RNA, 19 nt, Homo sapiens
  misc_RNA (1)...(19): siRNA sense strand
gaaacagaacguacaauuc

SEQ ID NO: 506201 - RNA, 19 nt, Homo sapiens
  misc_RNA (1)...(19): siRNA sense strand
ccaagaugaugaguugaua

SEQ ID NO: 506202 - RNA, 19 nt, Homo sapiens
  misc_RNA (1)...(19): siRNA sense strand
agaccaagaugaugaguug

SEQ ID NO: 506203 - RNA, 19 nt, Homo sapiens
  misc_RNA (1)...(19): siRNA sense strand
cauggaaccuuacacaguu

SEQ ID NO: 506204 - RNA, 19 nt, Homo sapiens
  misc_RNA (1)...(19): siRNA sense strand
aaacuuaugccgccagaua

SEQ ID NO: 506205 - RNA, 19 nt, Homo sapiens
  misc_RNA (1)...(19): siRNA sense strand
ggagcaagaguacuuauga

SEQ ID NO: 506206 - RNA, 19 nt, Homo sapiens
  misc_RNA (1)...(19): siRNA sense strand
gcugauagauccugcagau

SEQ ID NO: 506207 - RNA, 19 nt, Homo sapiens
  misc_RNA (1)...(19): siRNA sense strand
gaugaacucuuugcucguu

SEQ ID NO: 506208 - RNA, 19 nt, Homo sapiens
  misc_RNA (1)...(19): siRNA sense strand
ucagagaacuggccaacga

SEQ ID NO: 506209 - RNA, 19 nt, Homo sapiens
  misc_RNA (1)...(19): siRNA sense strand
caaguuggaugacaugauc

SEQ ID NO: 506210 - RNA, 19 nt, Homo sapiens
  misc_RNA (1)...(19): siRNA sense strand
uaaagcgauuugacuauga

SEQ ID NO: 506211 - RNA, 19 nt, Homo sapiens
  misc_RNA (1)...(19): siRNA sense strand
gaacgguauucuugccauu

SEQ ID NO: 506212 - RNA, 19 nt, Homo sapiens
  misc_RNA (1)...(19): siRNA sense strand
ucacaagugcuauaucuaa

SEQ ID NO: 506213 - RNA, 19 nt, Homo sapiens
  misc_RNA (1)...(19): siRNA sense strand
acagauaaguuccaauaug

SEQ ID NO: 506214 - RNA, 19 nt, Homo sapiens
  misc_RNA (1)...(19): siRNA sense strand
gcuugauccuucucuguua

SEQ ID NO: 506215 - RNA, 19 nt, Homo sapiens
  misc_RNA (1)...(19): siRNA sense strand
ggauagaucgcuuuauaga

SEQ ID NO: 506216 - RNA, 19 nt, Homo sapiens
  misc_RNA (1)...(19): siRNA sense strand
gagcauuccuaauccauca

SEQ ID NO: 506217 - RNA, 19 nt, Homo sapiens
  misc_RNA (1)...(19): siRNA sense strand
uaugacaacuuaagcuuga

SEQ ID NO: 506218 - RNA, 19 nt, Homo sapiens
  misc_RNA (1)...(19): siRNA sense strand
aaacagaacguacaauuca

SEQ ID NO: 506219 - RNA, 19 nt, Homo sapiens
  misc_RNA (1)...(19): siRNA sense strand
ugccaaggcugcccacaua

SEQ ID NO: 506220 - RNA, 19 nt, Homo sapiens
  misc_RNA (1)...(19): siRNA sense strand
ggacauccagcuaugcuaa

SEQ ID NO: 506221 - RNA, 19 nt, Homo sapiens
  misc_RNA (1)...(19): siRNA sense strand
ugaugaggcuucaagauau

SEQ ID NO: 506222 - RNA, 19 nt, Homo sapiens
  misc_RNA (1)...(19): siRNA sense strand
gauauaagcuuaccaaagu

SEQ ID NO: 506223 - RNA, 19 nt, Homo sapiens
  misc_RNA (1)...(19): siRNA sense strand
caacaacucuuccaacaau

SEQ ID NO: 506224 - RNA, 19 nt, Homo sapiens
  misc_RNA (1)...(19): siRNA sense strand
gagcuucccuucuuuauuc

SEQ ID NO: 506225 - RNA, 19 nt, Homo sapiens
  misc_RNA (1)...(19): siRNA sense strand
gaugagagauuuaaugaag

SEQ ID NO: 506226 - RNA, 19 nt, Homo sapiens
  misc_RNA (1)...(19): siRNA sense strand
gagagcugcuuccaucuuu

SEQ ID NO: 506227 - RNA, 19 nt, Homo sapiens
  misc_RNA (1)...(19): siRNA sense strand
ucacuaauaucagggcuua

SEQ ID NO: 506228 - RNA, 19 nt, Homo sapiens
  misc_RNA (1)...(19): siRNA sense strand
auacggaacuucauucauu

SEQ ID NO: 506229 - RNA, 19 nt, Homo sapiens
  misc_RNA (1)...(19): siRNA sense strand
ggaauucaauccucaugug

SEQ ID NO: 506230 - RNA, 19 nt, Homo sapiens
  misc_RNA (1)...(19): siRNA sense strand
gacaacaacucuuccaaca

SEQ ID NO: 506231 - RNA, 19 nt, Homo sapiens
  misc_RNA (1)...(19): siRNA sense strand
gcaaauacggaacuucauu

SEQ ID NO: 506232 - RNA, 19 nt, Homo sapiens
  misc_RNA (1)...(19): siRNA sense strand
gaagagaggagacagugaa

SEQ ID NO: 506233 - RNA, 19 nt, Homo sapiens
  misc_RNA (1)...(19): siRNA sense strand
ucauagagcuguggaauuc

SEQ ID NO: 506234 - RNA, 19 nt, Homo sapiens
  misc_RNA (1)...(19): siRNA sense strand
ggacucagauuccaauagg

SEQ ID NO: 506235 - RNA, 19 nt, Homo sapiens
  misc_RNA (1)...(19): siRNA sense strand
cagaaagccuggagagaga

SEQ ID NO: 506236 - RNA, 19 nt, Homo sapiens
  misc_RNA (1)...(19): siRNA sense strand
caugaagccuuggagauaa

SEQ ID NO: 506237 - RNA, 19 nt, Homo sapiens
  misc_RNA (1)...(19): siRNA sense strand
ucucuuuacugcuggauua

SEQ ID NO: 506238 - RNA, 19 nt, Homo sapiens
  misc_RNA (1)...(19): siRNA sense strand
gcauaugcauucuuucauc

SEQ ID NO: 506239 - RNA, 19 nt, Homo sapiens
  misc_RNA (1)...(19): siRNA sense strand
caccagacauucuuuacuu

SEQ ID NO: 506240 - RNA, 19 nt, Homo sapiens
  misc_RNA (1)...(19): siRNA sense strand
gcucaaguccugcauaguu

SEQ ID NO: 506241 - RNA, 19 nt, Homo sapiens
  misc_RNA (1)...(19): siRNA sense strand
gagauuuaaugaaggaguu

SEQ ID NO: 506242 - RNA, 19 nt, Homo sapiens
  misc_RNA (1)...(19): siRNA sense strand
aaagaaggcuagcaaugug

SEQ ID NO: 506243 - RNA, 19 nt, Homo sapiens
  misc_RNA (1)...(19): siRNA sense strand
caucauggaucccaguaug

SEQ ID NO: 506244 - RNA, 19 nt, Homo sapiens
  misc_RNA (1)...(19): siRNA sense strand
uccaugaagucucaguuua

SEQ ID NO: 506245 - RNA, 19 nt, Homo sapiens
  misc_RNA (1)...(19): siRNA sense strand
gcaguagaggccauucaua

SEQ ID NO: 506246 - RNA, 19 nt, Homo sapiens
  misc_RNA (1)...(19): siRNA sense strand
gaaaaucaacgacaacuug

SEQ ID NO: 506247 - RNA, 19 nt, Homo sapiens
  misc_RNA (1)...(19): siRNA sense strand
ggcaaagugucucagaaug

SEQ ID NO: 506248 - RNA, 19 nt, Homo sapiens
  misc_RNA (1)...(19): siRNA sense strand
ugagagauuuaaugaagga

SEQ ID NO: 506249 - RNA, 19 nt, Homo sapiens
  misc_RNA (1)...(19): siRNA sense strand
ggaaaaggggcaccuauuu

SEQ ID NO: 506250 - RNA, 19 nt, Homo sapiens
  misc_RNA (1)...(19): siRNA sense strand
caaagugucucagaaugca

SEQ ID NO: 506251 - RNA, 19 nt, Homo sapiens
  misc_RNA (1)...(19): siRNA sense strand
ucaugaagccuuggagaua

SEQ ID NO: 506252 - RNA, 19 nt, Homo sapiens
  misc_RNA (1)...(19): siRNA sense strand
gaaggggcuuugaaucuuu

SEQ ID NO: 506253 - RNA, 19 nt, Homo sapiens
  misc_RNA (1)...(19): siRNA sense strand
agacauucuuuacuuguga

SEQ ID NO: 506254 - RNA, 19 nt, Homo sapiens
  misc_RNA (1)...(19): siRNA sense strand
cagaacauauccugaagag

SEQ ID NO: 506255 - RNA, 19 nt, Homo sapiens
  misc_RNA (1)...(19): siRNA sense strand
gugugcaacugcuuauauu

SEQ ID NO: 506256 - RNA, 19 nt, Homo sapiens
  misc_RNA (1)...(19): siRNA sense strand
gaugauauaagcuuaccaa

SEQ ID NO: 506257 - RNA, 19 nt, Homo sapiens
  misc_RNA (1)...(19): siRNA sense strand
gagcacagugagcauguuu

SEQ ID NO: 506258 - RNA, 19 nt, Homo sapiens
  misc_RNA (1)...(19): siRNA sense strand
aggagacagugaagcaaua

SEQ ID NO: 506259 - RNA, 19 nt, Homo sapiens
  misc_RNA (1)...(19): siRNA sense strand
ggcacuuccucacuaauau

SEQ ID NO: 506260 - RNA, 19 nt, Homo sapiens
  misc_RNA (1)...(19): siRNA sense strand
gaccagggaagcagugaaa

SEQ ID NO: 506261 - RNA, 19 nt, Homo sapiens
  misc_RNA (1)...(19): siRNA sense strand
gagcacagcagagaugaau

SEQ ID NO: 506262 - RNA, 19 nt, Homo sapiens
  misc_RNA (1)...(19): siRNA sense strand
gaaucucucugcccaagac

SEQ ID NO: 506263 - RNA, 19 nt, Homo sapiens
  misc_RNA (1)...(19): siRNA sense strand
caaauacggaacuucauuc

SEQ ID NO: 506264 - RNA, 19 nt, Homo sapiens
  misc_RNA (1)...(19): siRNA sense strand
ggagcuucccuucuuuauu

SEQ ID NO: 506265 - RNA, 19 nt, Homo sapiens
  misc_RNA (1)...(19): siRNA sense strand
gaccaccagacauucuuua

SEQ ID NO: 506266 - RNA, 19 nt, Homo sapiens
  misc_RNA (1)...(19): siRNA sense strand
acaggcacuuccucacuaa

SEQ ID NO: 506267 - RNA, 19 nt, Homo sapiens
  misc_RNA (1)...(19): siRNA sense strand
gaaggcacuuuucggauga

SEQ ID NO: 506268 - RNA, 19 nt, Homo sapiens
  misc_RNA (1)...(19): siRNA sense strand
gcaauagcauaugcauucu

SEQ ID NO: 506269 - RNA, 19 nt, Homo sapiens
  misc_RNA (1)...(19): siRNA sense strand
gagaggagacagugaagca

SEQ ID NO: 506270 - RNA, 19 nt, Homo sapiens
  misc_RNA (1)...(19): siRNA sense strand
caaagucagcaacaauaug

SEQ ID NO: 506271 - RNA, 19 nt, Homo sapiens
  misc_RNA (1)...(19): siRNA sense strand
ccaaagucagcaacaauau

SEQ ID NO: 506272 - RNA, 19 nt, Homo sapiens
  misc_RNA (1)...(19): siRNA sense strand
cagcucaaguccugcauag

SEQ ID NO: 506273 - RNA, 19 nt, Homo sapiens
  misc_RNA (1)...(19): siRNA sense strand
cucaaguccugcauaguuu

SEQ ID NO: 506274 - RNA, 19 nt, Homo sapiens
  misc_RNA (1)...(19): siRNA sense strand
gaggaagcaacaaccauug

SEQ ID NO: 506275 - RNA, 19 nt, Homo sapiens
  misc_RNA (1)...(19): siRNA sense strand
gggcuuauuuugauauuug

SEQ ID NO: 506276 - RNA, 19 nt, Homo sapiens
  misc_RNA (1)...(19): siRNA sense strand
uggauuauguuccuucaca

SEQ ID NO: 506277 - RNA, 19 nt, Homo sapiens
  misc_RNA (1)...(19): siRNA sense strand
gcuuccaucuuuccaugaa

SEQ ID NO: 506278 - RNA, 19 nt, Homo sapiens
  misc_RNA (1)...(19): siRNA sense strand
ggaaggggcuuugaaucuu

SEQ ID NO: 506279 - RNA, 19 nt, Homo sapiens
  misc_RNA (1)...(19): siRNA sense strand
aacaggcacuuccucacua

SEQ ID NO: 506280 - RNA, 19 nt, Homo sapiens
  misc_RNA (1)...(19): siRNA sense strand
gcacagcagagaugaaugc

SEQ ID NO: 506281 - RNA, 19 nt, Homo sapiens
  misc_RNA (1)...(19): siRNA sense strand
gcaaagugucucagaaugc

SEQ ID NO: 506282 - RNA, 19 nt, Homo sapiens
  misc_RNA (1)...(19): siRNA sense strand
cauuaacaccgaaguucua

SEQ ID NO: 506283 - RNA, 19 nt, Homo sapiens
  misc_RNA (1)...(19): siRNA sense strand
gaagaggaagcaacaacca

SEQ ID NO: 506284 - RNA, 19 nt, Homo sapiens
  misc_RNA (1)...(19): siRNA sense strand
ucccgcagaugcaauaaug

SEQ ID NO: 506285 - RNA, 19 nt, Homo sapiens
  misc_RNA (1)...(19): siRNA sense strand
uaugcauucuuucaucuug

SEQ ID NO: 506286 - RNA, 19 nt, Homo sapiens
  misc_RNA (1)...(19): siRNA sense strand
agagaugaaugcaguagag

SEQ ID NO: 506287 - RNA, 19 nt, Homo sapiens
  misc_RNA (1)...(19): siRNA sense strand
gcaacugcuuauauucucu

SEQ ID NO: 506288 - RNA, 19 nt, Homo sapiens
  misc_RNA (1)...(19): siRNA sense strand
uacggaacuucauucauug

SEQ ID NO: 506289 - RNA, 19 nt, Homo sapiens
  misc_RNA (1)...(19): siRNA sense strand
uagcauaugcauucuuuca

SEQ ID NO: 506290 - RNA, 19 nt, Homo sapiens
  misc_RNA (1)...(19): siRNA sense strand
cuucugaguauguucaaua

SEQ ID NO: 506291 - RNA, 19 nt, Homo sapiens
  misc_RNA (1)...(19): siRNA sense strand
ugucucagaaugcaaagua

SEQ ID NO: 506292 - RNA, 19 nt, Homo sapiens
  misc_RNA (1)...(19): siRNA sense strand
uaggcaaagugucucagaa

SEQ ID NO: 506293 - RNA, 19 nt, Homo sapiens
  misc_RNA (1)...(19): siRNA sense strand
cagacauucuuuacuugug

SEQ ID NO: 506294 - RNA, 19 nt, Homo sapiens
  misc_RNA (1)...(19): siRNA sense strand
cauaugcauucuuucaucu

SEQ ID NO: 506295 - RNA, 19 nt, Homo sapiens
  misc_RNA (1)...(19): siRNA sense strand
gaggagacagugaagcaau

SEQ ID NO: 506296 - RNA, 19 nt, Homo sapiens
  misc_RNA (1)...(19): siRNA sense strand
gcucucagcagcuacaaca

SEQ ID NO: 506297 - RNA, 19 nt, Homo sapiens
  misc_RNA (1)...(19): siRNA sense strand
caguagaggccauucauag

SEQ ID NO: 506298 - RNA, 19 nt, Homo sapiens
  misc_RNA (1)...(19): siRNA sense strand
gaagcaauagcauaugcau

SEQ ID NO: 506299 - RNA, 19 nt, Homo sapiens
  misc_RNA (1)...(19): siRNA sense strand
gugaagcaauagcauaugc

SEQ ID NO: 506300 - RNA, 19 nt, Homo sapiens
  misc_RNA (1)...(19): siRNA sense strand
acagugaagcaauagcaua

SEQ ID NO: 506301 - RNA, 19 nt, Homo sapiens
  misc_RNA (1)...(19): siRNA sense strand
guagaggccauucauagag

SEQ ID NO: 506302 - RNA, 19 nt, Homo sapiens
  misc_RNA (1)...(19): siRNA sense strand
cccaagaccaccagacauu

SEQ ID NO: 506303 - RNA, 19 nt, Homo sapiens
  misc_RNA (1)...(19): siRNA sense strand
uauauucucuuggcugaag

SEQ ID NO: 506304 - RNA, 19 nt, Homo sapiens
  misc_RNA (1)...(19): siRNA sense strand
ggauuucugcagcucauga

SEQ ID NO: 506305 - RNA, 19 nt, Homo sapiens
  misc_RNA (1)...(19): siRNA sense strand
ugcaaaguauggcgaaauc

SEQ ID NO: 506306 - RNA, 19 nt, Homo sapiens
  misc_RNA (1)...(19): siRNA sense strand
agcaauagcauaugcauuc

SEQ ID NO: 506307 - RNA, 19 nt, Homo sapiens
  misc_RNA (1)...(19): siRNA sense strand
auagagcuguggaauucaa

SEQ ID NO: 506308 - RNA, 19 nt, Homo sapiens
  misc_RNA (1)...(19): siRNA sense strand
uggcgaaauccacuaaauu

SEQ ID NO: 506309 - RNA, 19 nt, Homo sapiens
  misc_RNA (1)...(19): siRNA sense strand
guauggcgaaauccacuaa

SEQ ID NO: 506310 - RNA, 19 nt, Homo sapiens
  misc_RNA (1)...(19): siRNA sense strand
gaucccuuaucccuuggaa

SEQ ID NO: 506311 - RNA, 19 nt, Homo sapiens
  misc_RNA (1)...(19): siRNA sense strand
ccaaaauaccuacuagaaa

SEQ ID NO: 506312 - RNA, 19 nt, Homo sapiens
  misc_RNA (1)...(19): siRNA sense strand
uuaccaaagucagcaacaa

SEQ ID NO: 506313 - RNA, 19 nt, Homo sapiens
  misc_RNA (1)...(19): siRNA sense strand
agaggaagcaacaaccauu

SEQ ID NO: 506314 - RNA, 19 nt, Homo sapiens
  misc_RNA (1)...(19): siRNA sense strand
gaaagccuggagagagaga

SEQ ID NO: 506315 - RNA, 19 nt, Homo sapiens
  misc_RNA (1)...(19): siRNA sense strand
gcagcuacaacaucaugga

SEQ ID NO: 506316 - RNA, 19 nt, Homo sapiens
  misc_RNA (1)...(19): siRNA sense strand
cagugaagcaauagcauau

SEQ ID NO: 506317 - RNA, 19 nt, Homo sapiens
  misc_RNA (1)...(19): siRNA sense strand
aggcacuuccucacuaaua

SEQ ID NO: 506318 - RNA, 19 nt, Homo sapiens
  misc_RNA (1)...(19): siRNA sense strand
accaaagucagcaacaaua

SEQ ID NO: 506319 - RNA, 19 nt, Homo sapiens
  misc_RNA (1)...(19): siRNA sense strand
ugauauaagcuuaccaaag

SEQ ID NO: 506320 - RNA, 19 nt, Homo sapiens
  misc_RNA (1)...(19): siRNA sense strand
caaaagaaggcuagcaaug

SEQ ID NO: 506321 - RNA, 19 nt, Homo sapiens
  misc_RNA (1)...(19): siRNA sense strand
gcuggauuauguuccuuca

SEQ ID NO: 506322 - RNA, 19 nt, Homo sapiens
  misc_RNA (1)...(19): siRNA sense strand
gauauaagcuuaccaaagu

SEQ ID NO: 506323 - RNA, 19 nt, Homo sapiens
  misc_RNA (1)...(19): siRNA sense strand
caacaacucuuccaacaau

SEQ ID NO: 506324 - RNA, 19 nt, Homo sapiens
  misc_RNA (1)...(19): siRNA sense strand
gagcuucccuucuuuauuc

SEQ ID NO: 506325 - RNA, 19 nt, Homo sapiens
  misc_RNA (1)...(19): siRNA sense strand
gaugagagauuuaaugaag

SEQ ID NO: 506326 - RNA, 19 nt, Homo sapiens
  misc_RNA (1)...(19): siRNA sense strand
gagagcugcuuccaucuuu

SEQ ID NO: 506327 - RNA, 19 nt, Homo sapiens
  misc_RNA (1)...(19): siRNA sense strand
ucacuaauaucagggcuua

SEQ ID NO: 506328 - RNA, 19 nt, Homo sapiens
  misc_RNA (1)...(19): siRNA sense strand
auacggaacuucauucauu

SEQ ID NO: 506329 - RNA, 19 nt, Homo sapiens
  misc_RNA (1)...(19): siRNA sense strand
ggaauucaauccucaugug

SEQ ID NO: 506330 - RNA, 19 nt, Homo sapiens
  misc_RNA (1)...(19): siRNA sense strand
gacaacaacucuuccaaca

SEQ ID NO: 506331 - RNA, 19 nt, Homo sapiens
  misc_RNA (1)...(19): siRNA sense strand
gcaaauacggaacuucauu

SEQ ID NO: 506332 - RNA, 19 nt, Homo sapiens
  misc_RNA (1)...(19): siRNA sense strand
gaagagaggagacagugaa

SEQ ID NO: 506333 - RNA, 19 nt, Homo sapiens
  misc_RNA (1)...(19): siRNA sense strand
ucauagagcuguggaauuc

SEQ ID NO: 506334 - RNA, 19 nt, Homo sapiens
  misc_RNA (1)...(19): siRNA sense strand
ggacucagauuccaauagg

SEQ ID NO: 506335 - RNA, 19 nt, Homo sapiens
  misc_RNA (1)...(19): siRNA sense strand
cagaaagccuggagagaga

SEQ ID NO: 506336 - RNA, 19 nt, Homo sapiens
  misc_RNA (1)...(19): siRNA sense strand
caugaagccuuggagauaa

SEQ ID NO: 506337 - RNA, 19 nt, Homo sapiens
  misc_RNA (1)...(19): siRNA sense strand
ucucuuuacugcuggauua

SEQ ID NO: 506338 - RNA, 19 nt, Homo sapiens
  misc_RNA (1)...(19): siRNA sense strand
gcauaugcauucuuucauc

SEQ ID NO: 506339 - RNA, 19 nt, Homo sapiens
  misc_RNA (1)...(19): siRNA sense strand
caccagacauucuuuacuu

SEQ ID NO: 506340 - RNA, 19 nt, Homo sapiens
  misc_RNA (1)...(19): siRNA sense strand
gcucaaguccugcauaguu

SEQ ID NO: 506341 - RNA, 19 nt, Homo sapiens
  misc_RNA (1)...(19): siRNA sense strand
gagauuuaaugaaggaguu

SEQ ID NO: 506342 - RNA, 19 nt, Homo sapiens
  misc_RNA (1)...(19): siRNA sense strand
aaagaaggcuagcaaugug

SEQ ID NO: 506343 - RNA, 19 nt, Homo sapiens
  misc_RNA (1)...(19): siRNA sense strand
caucauggaucccaguaug

SEQ ID NO: 506344 - RNA, 19 nt, Homo sapiens
  misc_RNA (1)...(19): siRNA sense strand
uccaugaagucucaguuua

SEQ ID NO: 506345 - RNA, 19 nt, Homo sapiens
  misc_RNA (1)...(19): siRNA sense strand
gcaguagaggccauucaua

SEQ ID NO: 506346 - RNA, 19 nt, Homo sapiens
  misc_RNA (1)...(19): siRNA sense strand
gaaaaucaacgacaacuug

SEQ ID NO: 506347 - RNA, 19 nt, Homo sapiens
  misc_RNA (1)...(19): siRNA sense strand
ggcaaagugucucagaaug

SEQ ID NO: 506348 - RNA, 19 nt, Homo sapiens
  misc_RNA (1)...(19): siRNA sense strand
ugagagauuuaaugaagga

SEQ ID NO: 506349 - RNA, 19 nt, Homo sapiens
  misc_RNA (1)...(19): siRNA sense strand
ggaaaaggggcaccuauuu

SEQ ID NO: 506350 - RNA, 19 nt, Homo sapiens
  misc_RNA (1)...(19): siRNA sense strand
caaagugucucagaaugca

SEQ ID NO: 506351 - RNA, 19 nt, Homo sapiens
  misc_RNA (1)...(19): siRNA sense strand
ucaugaagccuuggagaua

SEQ ID NO: 506352 - RNA, 19 nt, Homo sapiens
  misc_RNA (1)...(19): siRNA sense strand
gaaggggcuuugaaucuuu

SEQ ID NO: 506353 - RNA, 19 nt, Homo sapiens
  misc_RNA (1)...(19): siRNA sense strand
agacauucuuuacuuguga

SEQ ID NO: 506354 - RNA, 19 nt, Homo sapiens
  misc_RNA (1)...(19): siRNA sense strand
cagaacauauccugaagag

SEQ ID NO: 506355 - RNA, 19 nt, Homo sapiens
  misc_RNA (1)...(19): siRNA sense strand
gugugcaacugcuuauauu

SEQ ID NO: 506356 - RNA, 19 nt, Homo sapiens
  misc_RNA (1)...(19): siRNA sense strand
gaugauauaagcuuaccaa

SEQ ID NO: 506357 - RNA, 19 nt, Homo sapiens
  misc_RNA (1)...(19): siRNA sense strand
gagcacagugagcauguuu

SEQ ID NO: 506358 - RNA, 19 nt, Homo sapiens
  misc_RNA (1)...(19): siRNA sense strand
aggagacagugaagcaaua

SEQ ID NO: 506359 - RNA, 19 nt, Homo sapiens
  misc_RNA (1)...(19): siRNA sense strand
ggcacuuccucacuaauau

SEQ ID NO: 506360 - RNA, 19 nt, Homo sapiens
  misc_RNA (1)...(19): siRNA sense strand
gaccagggaagcagugaaa

SEQ ID NO: 506361 - RNA, 19 nt, Homo sapiens
  misc_RNA (1)...(19): siRNA sense strand
gagcacagcagagaugaau

SEQ ID NO: 506362 - RNA, 19 nt, Homo sapiens
  misc_RNA (1)...(19): siRNA sense strand
gaaucucucugcccaagac

SEQ ID NO: 506363 - RNA, 19 nt, Homo sapiens
  misc_RNA (1)...(19): siRNA sense strand
caaauacggaacuucauuc

SEQ ID NO: 506364 - RNA, 19 nt, Homo sapiens
  misc_RNA (1)...(19): siRNA sense strand
ggagcuucccuucuuuauu

SEQ ID NO: 506365 - RNA, 19 nt, Homo sapiens
  misc_RNA (1)...(19): siRNA sense strand
gaccaccagacauucuuua

SEQ ID NO: 506366 - RNA, 19 nt, Homo sapiens
  misc_RNA (1)...(19): siRNA sense strand
acaggcacuuccucacuaa

SEQ ID NO: 506367 - RNA, 19 nt, Homo sapiens
  misc_RNA (1)...(19): siRNA sense strand
gaaggcacuuuucggauga

SEQ ID NO: 506368 - RNA, 19 nt, Homo sapiens
  misc_RNA (1)...(19): siRNA sense strand
gcaauagcauaugcauucu

SEQ ID NO: 506369 - RNA, 19 nt, Homo sapiens
  misc_RNA (1)...(19): siRNA sense strand
gagaggagacagugaagca

SEQ ID NO: 506370 - RNA, 19 nt, Homo sapiens
  misc_RNA (1)...(19): siRNA sense strand
caaagucagcaacaauaug

SEQ ID NO: 506371 - RNA, 19 nt, Homo sapiens
  misc_RNA (1)...(19): siRNA sense strand
ccaaagucagcaacaauau

SEQ ID NO: 506372 - RNA, 19 nt, Homo sapiens
  misc_RNA (1)...(19): siRNA sense strand
cagcucaaguccugcauag

SEQ ID NO: 506373 - RNA, 19 nt, Homo sapiens
  misc_RNA (1)...(19): siRNA sense strand
cucaaguccugcauaguuu

SEQ ID NO: 506374 - RNA, 19 nt, Homo sapiens
  misc_RNA (1)...(19): siRNA sense strand
gaggaagcaacaaccauug

SEQ ID NO: 506375 - RNA, 19 nt, Homo sapiens
  misc_RNA (1)...(19): siRNA sense strand
gggcuuauuuugauauuug

SEQ ID NO: 506376 - RNA, 19 nt, Homo sapiens
  misc_RNA (1)...(19): siRNA sense strand
uggauuauguuccuucaca

SEQ ID NO: 506377 - RNA, 19 nt, Homo sapiens
  misc_RNA (1)...(19): siRNA sense strand
gcuuccaucuuuccaugaa

SEQ ID NO: 506378 - RNA, 19 nt, Homo sapiens
  misc_RNA (1)...(19): siRNA sense strand
ggaaggggcuuugaaucuu

SEQ ID NO: 506379 - RNA, 19 nt, Homo sapiens
  misc_RNA (1)...(19): siRNA sense strand
aacaggcacuuccucacua

SEQ ID NO: 506380 - RNA, 19 nt, Homo sapiens
  misc_RNA (1)...(19): siRNA sense strand
gcacagcagagaugaaugc

SEQ ID NO: 506381 - RNA, 19 nt, Homo sapiens
  misc_RNA (1)...(19): siRNA sense strand
gcaaagugucucagaaugc

SEQ ID NO: 506382 - RNA, 19 nt, Homo sapiens
  misc_RNA (1)...(19): siRNA sense strand
cauuaacaccgaaguucua

SEQ ID NO: 506383 - RNA, 19 nt, Homo sapiens
  misc_RNA (1)...(19): siRNA sense strand
gaagaggaagcaacaacca

SEQ ID NO: 506384 - RNA, 19 nt, Homo sapiens
  misc_RNA (1)...(19): siRNA sense strand
ucccgcagaugcaauaaug

SEQ ID NO: 506385 - RNA, 19 nt, Homo sapiens
  misc_RNA (1)...(19): siRNA sense strand
uaugcauucuuucaucuug

SEQ ID NO: 506386 - RNA, 19 nt, Homo sapiens
  misc_RNA (1)...(19): siRNA sense strand
agagaugaaugcaguagag

SEQ ID NO: 506387 - RNA, 19 nt, Homo sapiens
  misc_RNA (1)...(19): siRNA sense strand
gcaacugcuuauauucucu

SEQ ID NO: 506388 - RNA, 19 nt, Homo sapiens
  misc_RNA (1)...(19): siRNA sense strand
uacggaacuucauucauug

SEQ ID NO: 506389 - RNA, 19 nt, Homo sapiens
  misc_RNA (1)...(19): siRNA sense strand
uagcauaugcauucuuuca

SEQ ID NO: 506390 - RNA, 19 nt, Homo sapiens
  misc_RNA (1)...(19): siRNA sense strand
cuucugaguauguucaaua

SEQ ID NO: 506391 - RNA, 19 nt, Homo sapiens
  misc_RNA (1)...(19): siRNA sense strand
ugucucagaaugcaaagua

SEQ ID NO: 506392 - RNA, 19 nt, Homo sapiens
  misc_RNA (1)...(19): siRNA sense strand
uaggcaaagugucucagaa

SEQ ID NO: 506393 - RNA, 19 nt, Homo sapiens
  misc_RNA (1)...(19): siRNA sense strand
cagacauucuuuacuugug

SEQ ID NO: 506394 - RNA, 19 nt, Homo sapiens
  misc_RNA (1)...(19): siRNA sense strand
cauaugcauucuuucaucu

SEQ ID NO: 506395 - RNA, 19 nt, Homo sapiens
  misc_RNA (1)...(19): siRNA sense strand
gaggagacagugaagcaau

SEQ ID NO: 506396 - RNA, 19 nt, Homo sapiens
  misc_RNA (1)...(19): siRNA sense strand
gcucucagcagcuacaaca

SEQ ID NO: 506397 - RNA, 19 nt, Homo sapiens
  misc_RNA (1)...(19): siRNA sense strand
caguagaggccauucauag

SEQ ID NO: 506398 - RNA, 19 nt, Homo sapiens
  misc_RNA (1)...(19): siRNA sense strand
gaagcaauagcauaugcau

SEQ ID NO: 506399 - RNA, 19 nt, Homo sapiens
  misc_RNA (1)...(19): siRNA sense strand
gugaagcaauagcauaugc

SEQ ID NO: 506400 - RNA, 19 nt, Homo sapiens
  misc_RNA (1)...(19): siRNA sense strand
acagugaagcaauagcaua

SEQ ID NO: 506401 - RNA, 19 nt, Homo sapiens
  misc_RNA (1)...(19): siRNA sense strand
guagaggccauucauagag

SEQ ID NO: 506402 - RNA, 19 nt, Homo sapiens
  misc_RNA (1)...(19): siRNA sense strand
cccaagaccaccagacauu

SEQ ID NO: 506403 - RNA, 19 nt, Homo sapiens
  misc_RNA (1)...(19): siRNA sense strand
uauauucucuuggcugaag

SEQ ID NO: 506404 - RNA, 19 nt, Homo sapiens
  misc_RNA (1)...(19): siRNA sense strand
ggauuucugcagcucauga

SEQ ID NO: 506405 - RNA, 19 nt, Homo sapiens
  misc_RNA (1)...(19): siRNA sense strand
ugcaaaguauggcgaaauc

SEQ ID NO: 506406 - RNA, 19 nt, Homo sapiens
  misc_RNA (1)...(19): siRNA sense strand
agcaauagcauaugcauuc

SEQ ID NO: 506407 - RNA, 19 nt, Homo sapiens
  misc_RNA (1)...(19): siRNA sense strand
auagagcuguggaauucaa

SEQ ID NO: 506408 - RNA, 19 nt, Homo sapiens
  misc_RNA (1)...(19): siRNA sense strand
uggcgaaauccacuaaauu

SEQ ID NO: 506409 - RNA, 19 nt, Homo sapiens
  misc_RNA (1)...(19): siRNA sense strand
guauggcgaaauccacuaa

SEQ ID NO: 506410 - RNA, 19 nt, Homo sapiens
  misc_RNA (1)...(19): siRNA sense strand
gaucccuuaucccuuggaa

SEQ ID NO: 506411 - RNA, 19 nt, Homo sapiens
  misc_RNA (1)...(19): siRNA sense strand
ccaaaauaccuacuagaaa

SEQ ID NO: 506412 - RNA, 19 nt, Homo sapiens
  misc_RNA (1)...(19): siRNA sense strand
uuaccaaagucagcaacaa

SEQ ID NO: 506413 - RNA, 19 nt, Homo sapiens
  misc_RNA (1)...(19): siRNA sense strand
agaggaagcaacaaccauu

SEQ ID NO: 506414 - RNA, 19 nt, Homo sapiens
  misc_RNA (1)...(19): siRNA sense strand
gaaagccuggagagagaga

SEQ ID NO: 506415 - RNA, 19 nt, Homo sapiens
  misc_RNA (1)...(19): siRNA sense strand
gcagcuacaacaucaugga

SEQ ID NO: 506416 - RNA, 19 nt, Homo sapiens
  misc_RNA (1)...(19): siRNA sense strand
cagugaagcaauagcauau

SEQ ID NO: 506417 - RNA, 19 nt, Homo sapiens
  misc_RNA (1)...(19): siRNA sense strand
aggcacuuccucacuaaua

SEQ ID NO: 506418 - RNA, 19 nt, Homo sapiens
  misc_RNA (1)...(19): siRNA sense strand
accaaagucagcaacaaua

SEQ ID NO: 506419 - RNA, 19 nt, Homo sapiens
  misc_RNA (1)...(19): siRNA sense strand
ugauauaagcuuaccaaag

SEQ ID NO: 506420 - RNA, 19 nt, Homo sapiens
  misc_RNA (1)...(19): siRNA sense strand
caaaagaaggcuagcaaug

SEQ ID NO: 506421 - RNA, 19 nt, Homo sapiens
  misc_RNA (1)...(19): siRNA sense strand
gcuggauuauguuccuuca

SEQ ID NO: 506422 - RNA, 19 nt, Homo sapiens
  misc_RNA (1)...(19): siRNA sense strand
gauauaagcuuaccaaagu

SEQ ID NO: 506423 - RNA, 19 nt, Homo sapiens
  misc_RNA (1)...(19): siRNA sense strand
caacaacucuuccaacaau

SEQ ID NO: 506424 - RNA, 19 nt, Homo sapiens
  misc_RNA (1)...(19): siRNA sense strand
gagcuucccuucuuuauuc

SEQ ID NO: 506425 - RNA, 19 nt, Homo sapiens
  misc_RNA (1)...(19): siRNA sense strand
gaugagagauuuaaugaag

SEQ ID NO: 506426 - RNA, 19 nt, Homo sapiens
  misc_RNA (1)...(19): siRNA sense strand
gagagcugcuuccaucuuu

SEQ ID NO: 506427 - RNA, 19 nt, Homo sapiens
  misc_RNA (1)...(19): siRNA sense strand
ucacuaauaucagggcuua

SEQ ID NO: 506428 - RNA, 19 nt, Homo sapiens
  misc_RNA (1)...(19): siRNA sense strand
auacggaacuucauucauu

SEQ ID NO: 506429 - RNA, 19 nt, Homo sapiens
  misc_RNA (1)...(19): siRNA sense strand
ggaauucaauccucaugug

SEQ ID NO: 506430 - RNA, 19 nt, Homo sapiens
  misc_RNA (1)...(19): siRNA sense strand
gacaacaacucuuccaaca

SEQ ID NO: 506431 - RNA, 19 nt, Homo sapiens
  misc_RNA (1)...(19): siRNA sense strand
gcaaauacggaacuucauu

SEQ ID NO: 506432 - RNA, 19 nt, Homo sapiens
  misc_RNA (1)...(19): siRNA sense strand
gaagagaggagacagugaa

SEQ ID NO: 506433 - RNA, 19 nt, Homo sapiens
  misc_RNA (1)...(19): siRNA sense strand
ucauagagcuguggaauuc

SEQ ID NO: 506434 - RNA, 19 nt, Homo sapiens
  misc_RNA (1)...(19): siRNA sense strand
ggacucagauuccaauagg

SEQ ID NO: 506435 - RNA, 19 nt, Homo sapiens
  misc_RNA (1)...(19): siRNA sense strand
cagaaagccuggagagaga

SEQ ID NO: 506436 - RNA, 19 nt, Homo sapiens
  misc_RNA (1)...(19): siRNA sense strand
caugaagccuuggagauaa

SEQ ID NO: 506437 - RNA, 19 nt, Homo sapiens
  misc_RNA (1)...(19): siRNA sense strand
ucucuuuacugcuggauua

SEQ ID NO: 506438 - RNA, 19 nt, Homo sapiens
  misc_RNA (1)...(19): siRNA sense strand
gcauaugcauucuuucauc

SEQ ID NO: 506439 - RNA, 19 nt, Homo sapiens
  misc_RNA (1)...(19): siRNA sense strand
caccagacauucuuuacuu

SEQ ID NO: 506440 - RNA, 19 nt, Homo sapiens
  misc_RNA (1)...(19): siRNA sense strand
gcucaaguccugcauaguu

SEQ ID NO: 506441 - RNA, 19 nt, Homo sapiens
  misc_RNA (1)...(19): siRNA sense strand
gagauuuaaugaaggaguu

SEQ ID NO: 506442 - RNA, 19 nt, Homo sapiens
  misc_RNA (1)...(19): siRNA sense strand
aaagaaggcuagcaaugug

SEQ ID NO: 506443 - RNA, 19 nt, Homo sapiens
  misc_RNA (1)...(19): siRNA sense strand
caucauggaucccaguaug

SEQ ID NO: 506444 - RNA, 19 nt, Homo sapiens
  misc_RNA (1)...(19): siRNA sense strand
uccaugaagucucaguuua

SEQ ID NO: 506445 - RNA, 19 nt, Homo sapiens
  misc_RNA (1)...(19): siRNA sense strand
gcaguagaggccauucaua

SEQ ID NO: 506446 - RNA, 19 nt, Homo sapiens
  misc_RNA (1)...(19): siRNA sense strand
gaaaaucaacgacaacuug

SEQ ID NO: 506447 - RNA, 19 nt, Homo sapiens
  misc_RNA (1)...(19): siRNA sense strand
ggcaaagugucucagaaug

SEQ ID NO: 506448 - RNA, 19 nt, Homo sapiens
  misc_RNA (1)...(19): siRNA sense strand
ugagagauuuaaugaagga

SEQ ID NO: 506449 - RNA, 19 nt, Homo sapiens
  misc_RNA (1)...(19): siRNA sense strand
ggaaaaggggcaccuauuu

SEQ ID NO: 506450 - RNA, 19 nt, Homo sapiens
  misc_RNA (1)...(19): siRNA sense strand
caaagugucucagaaugca

SEQ ID NO: 506451 - RNA, 19 nt, Homo sapiens
  misc_RNA (1)...(19): siRNA sense strand
ucaugaagccuuggagaua

SEQ ID NO: 506452 - RNA, 19 nt, Homo sapiens
  misc_RNA (1)...(19): siRNA sense strand
gaaggggcuuugaaucuuu

SEQ ID NO: 506453 - RNA, 19 nt, Homo sapiens
  misc_RNA (1)...(19): siRNA sense strand
agacauucuuuacuuguga

SEQ ID NO: 506454 - RNA, 19 nt, Homo sapiens
  misc_RNA (1)...(19): siRNA sense strand
cagaacauauccugaagag

SEQ ID NO: 506455 - RNA, 19 nt, Homo sapiens
  misc_RNA (1)...(19): siRNA sense strand
gugugcaacugcuuauauu

SEQ ID NO: 506456 - RNA, 19 nt, Homo sapiens
  misc_RNA (1)...(19): siRNA sense strand
gaugauauaagcuuaccaa

SEQ ID NO: 506457 - RNA, 19 nt, Homo sapiens
  misc_RNA (1)...(19): siRNA sense strand
gagcacagugagcauguuu

SEQ ID NO: 506458 - RNA, 19 nt, Homo sapiens
  misc_RNA (1)...(19): siRNA sense strand
aggagacagugaagcaaua

SEQ ID NO: 506459 - RNA, 19 nt, Homo sapiens
  misc_RNA (1)...(19): siRNA sense strand
ggcacuuccucacuaauau

SEQ ID NO: 506460 - RNA, 19 nt, Homo sapiens
  misc_RNA (1)...(19): siRNA sense strand
gaccagggaagcagugaaa

SEQ ID NO: 506461 - RNA, 19 nt, Homo sapiens
  misc_RNA (1)...(19): siRNA sense strand
gagcacagcagagaugaau

SEQ ID NO: 506462 - RNA, 19 nt, Homo sapiens
  misc_RNA (1)...(19): siRNA sense strand
gaaucucucugcccaagac

SEQ ID NO: 506463 - RNA, 19 nt, Homo sapiens
  misc_RNA (1)...(19): siRNA sense strand
caaauacggaacuucauuc

SEQ ID NO: 506464 - RNA, 19 nt, Homo sapiens
  misc_RNA (1)...(19): siRNA sense strand
ggagcuucccuucuuuauu

SEQ ID NO: 506465 - RNA, 19 nt, Homo sapiens
  misc_RNA (1)...(19): siRNA sense strand
gaccaccagacauucuuua

SEQ ID NO: 506466 - RNA, 19 nt, Homo sapiens
  misc_RNA (1)...(19): siRNA sense strand
acaggcacuuccucacuaa

SEQ ID NO: 506467 - RNA, 19 nt, Homo sapiens
  misc_RNA (1)...(19): siRNA sense strand
gaaggcacuuuucggauga

SEQ ID NO: 506468 - RNA, 19 nt, Homo sapiens
  misc_RNA (1)...(19): siRNA sense strand
gcaauagcauaugcauucu

SEQ ID NO: 506469 - RNA, 19 nt, Homo sapiens
  misc_RNA (1)...(19): siRNA sense strand
gagaggagacagugaagca

SEQ ID NO: 506470 - RNA, 19 nt, Homo sapiens
  misc_RNA (1)...(19): siRNA sense strand
caaagucagcaacaauaug

SEQ ID NO: 506471 - RNA, 19 nt, Homo sapiens
  misc_RNA (1)...(19): siRNA sense strand
ccaaagucagcaacaauau

SEQ ID NO: 506472 - RNA, 19 nt, Homo sapiens
  misc_RNA (1)...(19): siRNA sense strand
cagcucaaguccugcauag

SEQ ID NO: 506473 - RNA, 19 nt, Homo sapiens
  misc_RNA (1)...(19): siRNA sense strand
cucaaguccugcauaguuu

SEQ ID NO: 506474 - RNA, 19 nt, Homo sapiens
  misc_RNA (1)...(19): siRNA sense strand
gaggaagcaacaaccauug

SEQ ID NO: 506475 - RNA, 19 nt, Homo sapiens
  misc_RNA (1)...(19): siRNA sense strand
gggcuuauuuugauauuug

SEQ ID NO: 506476 - RNA, 19 nt, Homo sapiens
  misc_RNA (1)...(19): siRNA sense strand
uggauuauguuccuucaca

SEQ ID NO: 506477 - RNA, 19 nt, Homo sapiens
  misc_RNA (1)...(19): siRNA sense strand
gcuuccaucuuuccaugaa

SEQ ID NO: 506478 - RNA, 19 nt, Homo sapiens
  misc_RNA (1)...(19): siRNA sense strand
ggaaggggcuuugaaucuu

SEQ ID NO: 506479 - RNA, 19 nt, Homo sapiens
  misc_RNA (1)...(19): siRNA sense strand
aacaggcacuuccucacua

SEQ ID NO: 506480 - RNA, 19 nt, Homo sapiens
  misc_RNA (1)...(19): siRNA sense strand
gcacagcagagaugaaugc

SEQ ID NO: 506481 - RNA, 19 nt, Homo sapiens
  misc_RNA (1)...(19): siRNA sense strand
gcaaagugucucagaaugc

SEQ ID NO: 506482 - RNA, 19 nt, Homo sapiens
  misc_RNA (1)...(19): siRNA sense strand
cauuaacaccgaaguucua

SEQ ID NO: 506483 - RNA, 19 nt, Homo sapiens
  misc_RNA (1)...(19): siRNA sense strand
gaagaggaagcaacaacca

SEQ ID NO: 506484 - RNA, 19 nt, Homo sapiens
  misc_RNA (1)...(19): siRNA sense strand
ucccgcagaugcaauaaug

SEQ ID NO: 506485 - RNA, 19 nt, Homo sapiens
  misc_RNA (1)...(19): siRNA sense strand
uaugcauucuuucaucuug

SEQ ID NO: 506486 - RNA, 19 nt, Homo sapiens
  misc_RNA (1)...(19): siRNA sense strand
agagaugaaugcaguagag

SEQ ID NO: 506487 - RNA, 19 nt, Homo sapiens
  misc_RNA (1)...(19): siRNA sense strand
gcaacugcuuauauucucu

SEQ ID NO: 506488 - RNA, 19 nt, Homo sapiens
  misc_RNA (1)...(19): siRNA sense strand
uacggaacuucauucauug

SEQ ID NO: 506489 - RNA, 19 nt, Homo sapiens
  misc_RNA (1)...(19): siRNA sense strand
uagcauaugcauucuuuca

SEQ ID NO: 506490 - RNA, 19 nt, Homo sapiens
  misc_RNA (1)...(19): siRNA sense strand
cuucugaguauguucaaua

SEQ ID NO: 506491 - RNA, 19 nt, Homo sapiens
  misc_RNA (1)...(19): siRNA sense strand
ugucucagaaugcaaagua

SEQ ID NO: 506492 - RNA, 19 nt, Homo sapiens
  misc_RNA (1)...(19): siRNA sense strand
uaggcaaagugucucagaa

SEQ ID NO: 506493 - RNA, 19 nt, Homo sapiens
  misc_RNA (1)...(19): siRNA sense strand
cagacauucuuuacuugug

SEQ ID NO: 506494 - RNA, 19 nt, Homo sapiens
  misc_RNA (1)...(19): siRNA sense strand
cauaugcauucuuucaucu

SEQ ID NO: 506495 - RNA, 19 nt, Homo sapiens
  misc_RNA (1)...(19): siRNA sense strand
gaggagacagugaagcaau

SEQ ID NO: 506496 - RNA, 19 nt, Homo sapiens
  misc_RNA (1)...(19): siRNA sense strand
gcucucagcagcuacaaca

SEQ ID NO: 506497 - RNA, 19 nt, Homo sapiens
  misc_RNA (1)...(19): siRNA sense strand
caguagaggccauucauag

SEQ ID NO: 506498 - RNA, 19 nt, Homo sapiens
  misc_RNA (1)...(19): siRNA sense strand
gaagcaauagcauaugcau

SEQ ID NO: 506499 - RNA, 19 nt, Homo sapiens
  misc_RNA (1)...(19): siRNA sense strand
gugaagcaauagcauaugc

SEQ ID NO: 506500 - RNA, 19 nt, Homo sapiens
  misc_RNA (1)...(19): siRNA sense strand
acagugaagcaauagcaua

SEQ ID NO: 506501 - RNA, 19 nt, Homo sapiens
  misc_RNA (1)...(19): siRNA sense strand
guagaggccauucauagag

SEQ ID NO: 506502 - RNA, 19 nt, Homo sapiens
  misc_RNA (1)...(19): siRNA sense strand
cccaagaccaccagacauu

SEQ ID NO: 506503 - RNA, 19 nt, Homo sapiens
  misc_RNA (1)...(19): siRNA sense strand
uauauucucuuggcugaag

SEQ ID NO: 506504 - RNA, 19 nt, Homo sapiens
  misc_RNA (1)...(19): siRNA sense strand
ggauuucugcagcucauga

SEQ ID NO: 506505 - RNA, 19 nt, Homo sapiens
  misc_RNA (1)...(19): siRNA sense strand
ugcaaaguauggcgaaauc

SEQ ID NO: 506506 - RNA, 19 nt, Homo sapiens
  misc_RNA (1)...(19): siRNA sense strand
agcaauagcauaugcauuc

SEQ ID NO: 506507 - RNA, 19 nt, Homo sapiens
  misc_RNA (1)...(19): siRNA sense strand
auagagcuguggaauucaa

SEQ ID NO: 506508 - RNA, 19 nt, Homo sapiens
  misc_RNA (1)...(19): siRNA sense strand
uggcgaaauccacuaaauu

SEQ ID NO: 506509 - RNA, 19 nt, Homo sapiens
  misc_RNA (1)...(19): siRNA sense strand
guauggcgaaauccacuaa

SEQ ID NO: 506510 - RNA, 19 nt, Homo sapiens
  misc_RNA (1)...(19): siRNA sense strand
gaucccuuaucccuuggaa

SEQ ID NO: 506511 - RNA, 19 nt, Homo sapiens
  misc_RNA (1)...(19): siRNA sense strand
ccaaaauaccuacuagaaa

SEQ ID NO: 506512 - RNA, 19 nt, Homo sapiens
  misc_RNA (1)...(19): siRNA sense strand
uuaccaaagucagcaacaa

SEQ ID NO: 506513 - RNA, 19 nt, Homo sapiens
  misc_RNA (1)...(19): siRNA sense strand
agaggaagcaacaaccauu

SEQ ID NO: 506514 - RNA, 19 nt, Homo sapiens
  misc_RNA (1)...(19): siRNA sense strand
gaaagccuggagagagaga

SEQ ID NO: 506515 - RNA, 19 nt, Homo sapiens
  misc_RNA (1)...(19): siRNA sense strand
gcagcuacaacaucaugga

SEQ ID NO: 506516 - RNA, 19 nt, Homo sapiens
  misc_RNA (1)...(19): siRNA sense strand
cagugaagcaauagcauau

SEQ ID NO: 506517 - RNA, 19 nt, Homo sapiens
  misc_RNA (1)...(19): siRNA sense strand
aggcacuuccucacuaaua

SEQ ID NO: 506518 - RNA, 19 nt, Homo sapiens
  misc_RNA (1)...(19): siRNA sense strand
accaaagucagcaacaaua

SEQ ID NO: 506519 - RNA, 19 nt, Homo sapiens
  misc_RNA (1)...(19): siRNA sense strand
ugauauaagcuuaccaaag

SEQ ID NO: 506520 - RNA, 19 nt, Homo sapiens
  misc_RNA (1)...(19): siRNA sense strand
caaaagaaggcuagcaaug

SEQ ID NO: 506521 - RNA, 19 nt, Homo sapiens
  misc_RNA (1)...(19): siRNA sense strand
gcuggauuauguuccuuca

SEQ ID NO: 506522 - RNA, 19 nt, Homo sapiens
  misc_RNA (1)...(19): siRNA sense strand
gauauaagcuuaccaaagu

SEQ ID NO: 506523 - RNA, 19 nt, Homo sapiens
  misc_RNA (1)...(19): siRNA sense strand
caacaacucuuccaacaau

SEQ ID NO: 506524 - RNA, 19 nt, Homo sapiens
  misc_RNA (1)...(19): siRNA sense strand
gagcuucccuucuuuauuc

SEQ ID NO: 506525 - RNA, 19 nt, Homo sapiens
  misc_RNA (1)...(19): siRNA sense strand
gaugagagauuuaaugaag

SEQ ID NO: 506526 - RNA, 19 nt, Homo sapiens
  misc_RNA (1)...(19): siRNA sense strand
gagagcugcuuccaucuuu

SEQ ID NO: 506527 - RNA, 19 nt, Homo sapiens
  misc_RNA (1)...(19): siRNA sense strand
ucacuaauaucagggcuua

SEQ ID NO: 506528 - RNA, 19 nt, Homo sapiens
  misc_RNA (1)...(19): siRNA sense strand
auacggaacuucauucauu

SEQ ID NO: 506529 - RNA, 19 nt, Homo sapiens
  misc_RNA (1)...(19): siRNA sense strand
ggaauucaauccucaugug

SEQ ID NO: 506530 - RNA, 19 nt, Homo sapiens
  misc_RNA (1)...(19): siRNA sense strand
gacaacaacucuuccaaca

SEQ ID NO: 506531 - RNA, 19 nt, Homo sapiens
  misc_RNA (1)...(19): siRNA sense strand
gcaaauacggaacuucauu

SEQ ID NO: 506532 - RNA, 19 nt, Homo sapiens
  misc_RNA (1)...(19): siRNA sense strand
gaagagaggagacagugaa

SEQ ID NO: 506533 - RNA, 19 nt, Homo sapiens
  misc_RNA (1)...(19): siRNA sense strand
ucauagagcuguggaauuc

SEQ ID NO: 506534 - RNA, 19 nt, Homo sapiens
  misc_RNA (1)...(19): siRNA sense strand
ggacucagauuccaauagg

SEQ ID NO: 506535 - RNA, 19 nt, Homo sapiens
  misc_RNA (1)...(19): siRNA sense strand
cagaaagccuggagagaga

SEQ ID NO: 506536 - RNA, 19 nt, Homo sapiens
  misc_RNA (1)...(19): siRNA sense strand
caugaagccuuggagauaa

SEQ ID NO: 506537 - RNA, 19 nt, Homo sapiens
  misc_RNA (1)...(19): siRNA sense strand
ucucuuuacugcuggauua

SEQ ID NO: 506538 - RNA, 19 nt, Homo sapiens
  misc_RNA (1)...(19): siRNA sense strand
gcauaugcauucuuucauc

SEQ ID NO: 506539 - RNA, 19 nt, Homo sapiens
  misc_RNA (1)...(19): siRNA sense strand
caccagacauucuuuacuu

SEQ ID NO: 506540 - RNA, 19 nt, Homo sapiens
  misc_RNA (1)...(19): siRNA sense strand
gcucaaguccugcauaguu

SEQ ID NO: 506541 - RNA, 19 nt, Homo sapiens
  misc_RNA (1)...(19): siRNA sense strand
gagauuuaaugaaggaguu

SEQ ID NO: 506542 - RNA, 19 nt, Homo sapiens
  misc_RNA (1)...(19): siRNA sense strand
aaagaaggcuagcaaugug

SEQ ID NO: 506543 - RNA, 19 nt, Homo sapiens
  misc_RNA (1)...(19): siRNA sense strand
caucauggaucccaguaug

SEQ ID NO: 506544 - RNA, 19 nt, Homo sapiens
  misc_RNA (1)...(19): siRNA sense strand
uccaugaagucucaguuua

SEQ ID NO: 506545 - RNA, 19 nt, Homo sapiens
  misc_RNA (1)...(19): siRNA sense strand
gcaguagaggccauucaua

SEQ ID NO: 506546 - RNA, 19 nt, Homo sapiens
  misc_RNA (1)...(19): siRNA sense strand
gaaaaucaacgacaacuug

SEQ ID NO: 506547 - RNA, 19 nt, Homo sapiens
  misc_RNA (1)...(19): siRNA sense strand
ggcaaagugucucagaaug

SEQ ID NO: 506548 - RNA, 19 nt, Homo sapiens
  misc_RNA (1)...(19): siRNA sense strand
ugagagauuuaaugaagga

SEQ ID NO: 506549 - RNA, 19 nt, Homo sapiens
  misc_RNA (1)...(19): siRNA sense strand
ggaaaaggggcaccuauuu

SEQ ID NO: 506550 - RNA, 19 nt, Homo sapiens
  misc_RNA (1)...(19): siRNA sense strand
caaagugucucagaaugca

SEQ ID NO: 506551 - RNA, 19 nt, Homo sapiens
  misc_RNA (1)...(19): siRNA sense strand
ucaugaagccuuggagaua

SEQ ID NO: 506552 - RNA, 19 nt, Homo sapiens
  misc_RNA (1)...(19): siRNA sense strand
gaaggggcuuugaaucuuu

SEQ ID NO: 506553 - RNA, 19 nt, Homo sapiens
  misc_RNA (1)...(19): siRNA sense strand
agacauucuuuacuuguga

SEQ ID NO: 506554 - RNA, 19 nt, Homo sapiens
  misc_RNA (1)...(19): siRNA sense strand
cagaacauauccugaagag

SEQ ID NO: 506555 - RNA, 19 nt, Homo sapiens
  misc_RNA (1)...(19): siRNA sense strand
gugugcaacugcuuauauu

SEQ ID NO: 506556 - RNA, 19 nt, Homo sapiens
  misc_RNA (1)...(19): siRNA sense strand
gaugauauaagcuuaccaa

SEQ ID NO: 506557 - RNA, 19 nt, Homo sapiens
  misc_RNA (1)...(19): siRNA sense strand
gagcacagugagcauguuu

SEQ ID NO: 506558 - RNA, 19 nt, Homo sapiens
  misc_RNA (1)...(19): siRNA sense strand
aggagacagugaagcaaua

SEQ ID NO: 506559 - RNA, 19 nt, Homo sapiens
  misc_RNA (1)...(19): siRNA sense strand
ggcacuuccucacuaauau

SEQ ID NO: 506560 - RNA, 19 nt, Homo sapiens
  misc_RNA (1)...(19): siRNA sense strand
gaccagggaagcagugaaa

SEQ ID NO: 506561 - RNA, 19 nt, Homo sapiens
  misc_RNA (1)...(19): siRNA sense strand
gagcacagcagagaugaau

SEQ ID NO: 506562 - RNA, 19 nt, Homo sapiens
  misc_RNA (1)...(19): siRNA sense strand
gaaucucucugcccaagac

SEQ ID NO: 506563 - RNA, 19 nt, Homo sapiens
  misc_RNA (1)...(19): siRNA sense strand
caaauacggaacuucauuc

SEQ ID NO: 506564 - RNA, 19 nt, Homo sapiens
  misc_RNA (1)...(19): siRNA sense strand
ggagcuucccuucuuuauu

SEQ ID NO: 506565 - RNA, 19 nt, Homo sapiens
  misc_RNA (1)...(19): siRNA sense strand
gaccaccagacauucuuua

SEQ ID NO: 506566 - RNA, 19 nt, Homo sapiens
  misc_RNA (1)...(19): siRNA sense strand
acaggcacuuccucacuaa

SEQ ID NO: 506567 - RNA, 19 nt, Homo sapiens
  misc_RNA (1)...(19): siRNA sense strand
gaaggcacuuuucggauga

SEQ ID NO: 506568 - RNA, 19 nt, Homo sapiens
  misc_RNA (1)...(19): siRNA sense strand
gcaauagcauaugcauucu

SEQ ID NO: 506569 - RNA, 19 nt, Homo sapiens
  misc_RNA (1)...(19): siRNA sense strand
gagaggagacagugaagca

SEQ ID NO: 506570 - RNA, 19 nt, Homo sapiens
  misc_RNA (1)...(19): siRNA sense strand
caaagucagcaacaauaug

SEQ ID NO: 506571 - RNA, 19 nt, Homo sapiens
  misc_RNA (1)...(19): siRNA sense strand
ccaaagucagcaacaauau

SEQ ID NO: 506572 - RNA, 19 nt, Homo sapiens
  misc_RNA (1)...(19): siRNA sense strand
cagcucaaguccugcauag

SEQ ID NO: 506573 - RNA, 19 nt, Homo sapiens
  misc_RNA (1)...(19): siRNA sense strand
cucaaguccugcauaguuu

SEQ ID NO: 506574 - RNA, 19 nt, Homo sapiens
  misc_RNA (1)...(19): siRNA sense strand
gaggaagcaacaaccauug

SEQ ID NO: 506575 - RNA, 19 nt, Homo sapiens
  misc_RNA (1)...(19): siRNA sense strand
gggcuuauuuugauauuug

SEQ ID NO: 506576 - RNA, 19 nt, Homo sapiens
  misc_RNA (1)...(19): siRNA sense strand
uggauuauguuccuucaca

SEQ ID NO: 506577 - RNA, 19 nt, Homo sapiens
  misc_RNA (1)...(19): siRNA sense strand
gcuuccaucuuuccaugaa

SEQ ID NO: 506578 - RNA, 19 nt, Homo sapiens
  misc_RNA (1)...(19): siRNA sense strand
ggaaggggcuuugaaucuu

SEQ ID NO: 506579 - RNA, 19 nt, Homo sapiens
  misc_RNA (1)...(19): siRNA sense strand
aacaggcacuuccucacua

SEQ ID NO: 506580 - RNA, 19 nt, Homo sapiens
  misc_RNA (1)...(19): siRNA sense strand
gcacagcagagaugaaugc

SEQ ID NO: 506581 - RNA, 19 nt, Homo sapiens
  misc_RNA (1)...(19): siRNA sense strand
gcaaagugucucagaaugc

SEQ ID NO: 506582 - RNA, 19 nt, Homo sapiens
  misc_RNA (1)...(19): siRNA sense strand
cauuaacaccgaaguucua

SEQ ID NO: 506583 - RNA, 19 nt, Homo sapiens
  misc_RNA (1)...(19): siRNA sense strand
gaagaggaagcaacaacca

SEQ ID NO: 506584 - RNA, 19 nt, Homo sapiens
  misc_RNA (1)...(19): siRNA sense strand
ucccgcagaugcaauaaug

SEQ ID NO: 506585 - RNA, 19 nt, Homo sapiens
  misc_RNA (1)...(19): siRNA sense strand
uaugcauucuuucaucuug

SEQ ID NO: 506586 - RNA, 19 nt, Homo sapiens
  misc_RNA (1)...(19): siRNA sense strand
agagaugaaugcaguagag

SEQ ID NO: 506587 - RNA, 19 nt, Homo sapiens
  misc_RNA (1)...(19): siRNA sense strand
gcaacugcuuauauucucu

SEQ ID NO: 506588 - RNA, 19 nt, Homo sapiens
  misc_RNA (1)...(19): siRNA sense strand
uacggaacuucauucauug

SEQ ID NO: 506589 - RNA, 19 nt, Homo sapiens
  misc_RNA (1)...(19): siRNA sense strand
uagcauaugcauucuuuca

SEQ ID NO: 506590 - RNA, 19 nt, Homo sapiens
  misc_RNA (1)...(19): siRNA sense strand
cuucugaguauguucaaua

SEQ ID NO: 506591 - RNA, 19 nt, Homo sapiens
  misc_RNA (1)...(19): siRNA sense strand
ugucucagaaugcaaagua

SEQ ID NO: 506592 - RNA, 19 nt, Homo sapiens
  misc_RNA (1)...(19): siRNA sense strand
uaggcaaagugucucagaa

SEQ ID NO: 506593 - RNA, 19 nt, Homo sapiens
  misc_RNA (1)...(19): siRNA sense strand
cagacauucuuuacuugug

SEQ ID NO: 506594 - RNA, 19 nt, Homo sapiens
  misc_RNA (1)...(19): siRNA sense strand
cauaugcauucuuucaucu

SEQ ID NO: 506595 - RNA, 19 nt, Homo sapiens
  misc_RNA (1)...(19): siRNA sense strand
gaggagacagugaagcaau

SEQ ID NO: 506596 - RNA, 19 nt, Homo sapiens
  misc_RNA (1)...(19): siRNA sense strand
gcucucagcagcuacaaca

SEQ ID NO: 506597 - RNA, 19 nt, Homo sapiens
  misc_RNA (1)...(19): siRNA sense strand
caguagaggccauucauag

SEQ ID NO: 506598 - RNA, 19 nt, Homo sapiens
  misc_RNA (1)...(19): siRNA sense strand
gaagcaauagcauaugcau

SEQ ID NO: 506599 - RNA, 19 nt, Homo sapiens
  misc_RNA (1)...(19): siRNA sense strand
gugaagcaauagcauaugc

SEQ ID NO: 506600 - RNA, 19 nt, Homo sapiens
  misc_RNA (1)...(19): siRNA sense strand
acagugaagcaauagcaua

SEQ ID NO: 506601 - RNA, 19 nt, Homo sapiens
  misc_RNA (1)...(19): siRNA sense strand
guagaggccauucauagag

SEQ ID NO: 506602 - RNA, 19 nt, Homo sapiens
  misc_RNA (1)...(19): siRNA sense strand
cccaagaccaccagacauu

SEQ ID NO: 506603 - RNA, 19 nt, Homo sapiens
  misc_RNA (1)...(19): siRNA sense strand
uauauucucuuggcugaag

SEQ ID NO: 506604 - RNA, 19 nt, Homo sapiens
  misc_RNA (1)...(19): siRNA sense strand
ggauuucugcagcucauga

SEQ ID NO: 506605 - RNA, 19 nt, Homo sapiens
  misc_RNA (1)...(19): siRNA sense strand
ugcaaaguauggcgaaauc

SEQ ID NO: 506606 - RNA, 19 nt, Homo sapiens
  misc_RNA (1)...(19): siRNA sense strand
agcaauagcauaugcauuc

SEQ ID NO: 506607 - RNA, 19 nt, Homo sapiens
  misc_RNA (1)...(19): siRNA sense strand
auagagcuguggaauucaa

SEQ ID NO: 506608 - RNA, 19 nt, Homo sapiens
  misc_RNA (1)...(19): siRNA sense strand
uggcgaaauccacuaaauu

SEQ ID NO: 506609 - RNA, 19 nt, Homo sapiens
  misc_RNA (1)...(19): siRNA sense strand
guauggcgaaauccacuaa

SEQ ID NO: 506610 - RNA, 19 nt, Homo sapiens
  misc_RNA (1)...(19): siRNA sense strand
gaucccuuaucccuuggaa

SEQ ID NO: 506611 - RNA, 19 nt, Homo sapiens
  misc_RNA (1)...(19): siRNA sense strand
ccaaaauaccuacuagaaa

SEQ ID NO: 506612 - RNA, 19 nt, Homo sapiens
  misc_RNA (1)...(19): siRNA sense strand
uuaccaaagucagcaacaa

SEQ ID NO: 506613 - RNA, 19 nt, Homo sapiens
  misc_RNA (1)...(19): siRNA sense strand
agaggaagcaacaaccauu

SEQ ID NO: 506614 - RNA, 19 nt, Homo sapiens
  misc_RNA (1)...(19): siRNA sense strand
gaaagccuggagagagaga

SEQ ID NO: 506615 - RNA, 19 nt, Homo sapiens
  misc_RNA (1)...(19): siRNA sense strand
gcagcuacaacaucaugga

SEQ ID NO: 506616 - RNA, 19 nt, Homo sapiens
  misc_RNA (1)...(19): siRNA sense strand
cagugaagcaauagcauau

SEQ ID NO: 506617 - RNA, 19 nt, Homo sapiens
  misc_RNA (1)...(19): siRNA sense strand
aggcacuuccucacuaaua

SEQ ID NO: 506618 - RNA, 19 nt, Homo sapiens
  misc_RNA (1)...(19): siRNA sense strand
accaaagucagcaacaaua

SEQ ID NO: 506619 - RNA, 19 nt, Homo sapiens
  misc_RNA (1)...(19): siRNA sense strand
ugauauaagcuuaccaaag

SEQ ID NO: 506620 - RNA, 19 nt, Homo sapiens
  misc_RNA (1)...(19): siRNA sense strand
caaaagaaggcuagcaaug

SEQ ID NO: 506621 - RNA, 19 nt, Homo sapiens
  misc_RNA (1)...(19): siRNA sense strand
gcuggauuauguuccuuca

SEQ ID NO: 506622 - RNA, 19 nt, Homo sapiens
  misc_RNA (1)...(19): siRNA sense strand
ggucuacgccuacgucuuu

SEQ ID NO: 506623 - RNA, 19 nt, Homo sapiens
  misc_RNA (1)...(19): siRNA sense strand
gaaagcgucuuccgguucu

SEQ ID NO: 506624 - RNA, 19 nt, Homo sapiens
  misc_RNA (1)...(19): siRNA sense strand
cgacaucagugacgcuguu

SEQ ID NO: 506625 - RNA, 19 nt, Homo sapiens
  misc_RNA (1)...(19): siRNA sense strand
gaugagggcucguauuuuc

SEQ ID NO: 506626 - RNA, 19 nt, Homo sapiens
  misc_RNA (1)...(19): siRNA sense strand
gacaacgagucucucauca

SEQ ID NO: 506627 - RNA, 19 nt, Homo sapiens
  misc_RNA (1)...(19): siRNA sense strand
gcucguauuuucugguuua

SEQ ID NO: 506628 - RNA, 19 nt, Homo sapiens
  misc_RNA (1)...(19): siRNA sense strand
gcuacgagaucgaguucau

SEQ ID NO: 506629 - RNA, 19 nt, Homo sapiens
  misc_RNA (1)...(19): siRNA sense strand
aggcugugguccugcauua

SEQ ID NO: 506630 - RNA, 19 nt, Homo sapiens
  misc_RNA (1)...(19): siRNA sense strand
caaugugggucuccuggau

SEQ ID NO: 506631 - RNA, 19 nt, Homo sapiens
  misc_RNA (1)...(19): siRNA sense strand
cuacaaccuuccagagugu

SEQ ID NO: 506632 - RNA, 19 nt, Homo sapiens
  misc_RNA (1)...(19): siRNA sense strand
caucaacgcgggagacuuc

SEQ ID NO: 506633 - RNA, 19 nt, Homo sapiens
  misc_RNA (1)...(19): siRNA sense strand
gaaugacacagagcuggua

SEQ ID NO: 506634 - RNA, 19 nt, Homo sapiens
  misc_RNA (1)...(19): siRNA sense strand
guacgauggccgcuucuug

SEQ ID NO: 506635 - RNA, 19 nt, Homo sapiens
  misc_RNA (1)...(19): siRNA sense strand
gcacaggggaucccaauga

SEQ ID NO: 506636 - RNA, 19 nt, Homo sapiens
  misc_RNA (1)...(19): siRNA sense strand
gcacgugcugccucaagaa

SEQ ID NO: 506637 - RNA, 19 nt, Homo sapiens
  misc_RNA (1)...(19): siRNA sense strand
gcgauacugggccaacuuu

SEQ ID NO: 506638 - RNA, 19 nt, Homo sapiens
  misc_RNA (1)...(19): siRNA sense strand
aggaugagggcucguauuu

SEQ ID NO: 506639 - RNA, 19 nt, Homo sapiens
  misc_RNA (1)...(19): siRNA sense strand
gaaggaugagggcucguau

SEQ ID NO: 506640 - RNA, 19 nt, Homo sapiens
  misc_RNA (1)...(19): siRNA sense strand
cccagcgacugaugcgaua

SEQ ID NO: 506641 - RNA, 19 nt, Homo sapiens
  misc_RNA (1)...(19): siRNA sense strand
gagcgaggacugccuguac

SEQ ID NO: 506642 - RNA, 19 nt, Homo sapiens
  misc_RNA (1)...(19): siRNA sense strand
ggagacuuccucagugaca

SEQ ID NO: 506643 - RNA, 19 nt, Homo sapiens
  misc_RNA (1)...(19): siRNA sense strand
gggcucagcaguacguuag

SEQ ID NO: 506644 - RNA, 19 nt, Homo sapiens
  misc_RNA (1)...(19): siRNA sense strand
gcucagcaguacguuaguc

SEQ ID NO: 506645 - RNA, 19 nt, Homo sapiens
  misc_RNA (1)...(19): siRNA sense strand
uggguguggugaaggauga

SEQ ID NO: 506646 - RNA, 19 nt, Homo sapiens
  misc_RNA (1)...(19): siRNA sense strand
cuacacggcagaggagaaa

SEQ ID NO: 506647 - RNA, 19 nt, Homo sapiens
  misc_RNA (1)...(19): siRNA sense strand
gcugugguccugcauuaca

SEQ ID NO: 506648 - RNA, 19 nt, Homo sapiens
  misc_RNA (1)...(19): siRNA sense strand
ugaaggaugagggcucgua

SEQ ID NO: 506649 - RNA, 19 nt, Homo sapiens
  misc_RNA (1)...(19): siRNA sense strand
cgauggccgcuucuuggua

SEQ ID NO: 506650 - RNA, 19 nt, Homo sapiens
  misc_RNA (1)...(19): siRNA sense strand
guccucgucuggaucuaug

SEQ ID NO: 506651 - RNA, 19 nt, Homo sapiens
  misc_RNA (1)...(19): siRNA sense strand
ccuacauggugcacuggaa

SEQ ID NO: 506652 - RNA, 19 nt, Homo sapiens
  misc_RNA (1)...(19): siRNA sense strand
auggagacuuccucaguga

SEQ ID NO: 506653 - RNA, 19 nt, Homo sapiens
  misc_RNA (1)...(19): siRNA sense strand
gcugguggguguggugaag

SEQ ID NO: 506654 - RNA, 19 nt, Homo sapiens
  misc_RNA (1)...(19): siRNA sense strand
gauacugggccaacuuugc

SEQ ID NO: 506655 - RNA, 19 nt, Homo sapiens
  misc_RNA (1)...(19): siRNA sense strand
gugcugguguccaugaacu

SEQ ID NO: 506656 - RNA, 19 nt, Homo sapiens
  misc_RNA (1)...(19): siRNA sense strand
ggucuacgccuacgucuuu

SEQ ID NO: 506657 - RNA, 19 nt, Homo sapiens
  misc_RNA (1)...(19): siRNA sense strand
gaaagcgucuuccgguucu

SEQ ID NO: 506658 - RNA, 19 nt, Homo sapiens
  misc_RNA (1)...(19): siRNA sense strand
cgacaucagugacgcuguu

SEQ ID NO: 506659 - RNA, 19 nt, Homo sapiens
  misc_RNA (1)...(19): siRNA sense strand
gaugagggcucguauuuuc

SEQ ID NO: 506660 - RNA, 19 nt, Homo sapiens
  misc_RNA (1)...(19): siRNA sense strand
gacaacgagucucucauca

SEQ ID NO: 506661 - RNA, 19 nt, Homo sapiens
  misc_RNA (1)...(19): siRNA sense strand
gcucguauuuucugguuua

SEQ ID NO: 506662 - RNA, 19 nt, Homo sapiens
  misc_RNA (1)...(19): siRNA sense strand
gcuacgagaucgaguucau

SEQ ID NO: 506663 - RNA, 19 nt, Homo sapiens
  misc_RNA (1)...(19): siRNA sense strand
aggcugugguccugcauua

SEQ ID NO: 506664 - RNA, 19 nt, Homo sapiens
  misc_RNA (1)...(19): siRNA sense strand
caaugugggucuccuggau

SEQ ID NO: 506665 - RNA, 19 nt, Homo sapiens
  misc_RNA (1)...(19): siRNA sense strand
cuacaaccuuccagagugu

SEQ ID NO: 506666 - RNA, 19 nt, Homo sapiens
  misc_RNA (1)...(19): siRNA sense strand
caucaacgcgggagacuuc

SEQ ID NO: 506667 - RNA, 19 nt, Homo sapiens
  misc_RNA (1)...(19): siRNA sense strand
gaaugacacagagcuggua

SEQ ID NO: 506668 - RNA, 19 nt, Homo sapiens
  misc_RNA (1)...(19): siRNA sense strand
guacgauggccgcuucuug

SEQ ID NO: 506669 - RNA, 19 nt, Homo sapiens
  misc_RNA (1)...(19): siRNA sense strand
gcacaggggaucccaauga

SEQ ID NO: 506670 - RNA, 19 nt, Homo sapiens
  misc_RNA (1)...(19): siRNA sense strand
gcacgugcugccucaagaa

SEQ ID NO: 506671 - RNA, 19 nt, Homo sapiens
  misc_RNA (1)...(19): siRNA sense strand
gcgauacugggccaacuuu

SEQ ID NO: 506672 - RNA, 19 nt, Homo sapiens
  misc_RNA (1)...(19): siRNA sense strand
aggaugagggcucguauuu

SEQ ID NO: 506673 - RNA, 19 nt, Homo sapiens
  misc_RNA (1)...(19): siRNA sense strand
gaaggaugagggcucguau

SEQ ID NO: 506674 - RNA, 19 nt, Homo sapiens
  misc_RNA (1)...(19): siRNA sense strand
cccagcgacugaugcgaua

SEQ ID NO: 506675 - RNA, 19 nt, Homo sapiens
  misc_RNA (1)...(19): siRNA sense strand
gagcgaggacugccuguac

SEQ ID NO: 506676 - RNA, 19 nt, Homo sapiens
  misc_RNA (1)...(19): siRNA sense strand
ggagacuuccucagugaca

SEQ ID NO: 506677 - RNA, 19 nt, Homo sapiens
  misc_RNA (1)...(19): siRNA sense strand
gggcucagcaguacguuag

SEQ ID NO: 506678 - RNA, 19 nt, Homo sapiens
  misc_RNA (1)...(19): siRNA sense strand
gcucagcaguacguuaguc

SEQ ID NO: 506679 - RNA, 19 nt, Homo sapiens
  misc_RNA (1)...(19): siRNA sense strand
uggguguggugaaggauga

SEQ ID NO: 506680 - RNA, 19 nt, Homo sapiens
  misc_RNA (1)...(19): siRNA sense strand
cuacacggcagaggagaaa

SEQ ID NO: 506681 - RNA, 19 nt, Homo sapiens
  misc_RNA (1)...(19): siRNA sense strand
gcugugguccugcauuaca

SEQ ID NO: 506682 - RNA, 19 nt, Homo sapiens
  misc_RNA (1)...(19): siRNA sense strand
ugaaggaugagggcucgua

SEQ ID NO: 506683 - RNA, 19 nt, Homo sapiens
  misc_RNA (1)...(19): siRNA sense strand
cgauggccgcuucuuggua

SEQ ID NO: 506684 - RNA, 19 nt, Homo sapiens
  misc_RNA (1)...(19): siRNA sense strand
guccucgucuggaucuaug

SEQ ID NO: 506685 - RNA, 19 nt, Homo sapiens
  misc_RNA (1)...(19): siRNA sense strand
auggagacuuccucaguga

SEQ ID NO: 506686 - RNA, 19 nt, Homo sapiens
  misc_RNA (1)...(19): siRNA sense strand
gcugguggguguggugaag

SEQ ID NO: 506687 - RNA, 19 nt, Homo sapiens
  misc_RNA (1)...(19): siRNA sense strand
gauacugggccaacuuugc

SEQ ID NO: 506688 - RNA, 19 nt, Homo sapiens
  misc_RNA (1)...(19): siRNA sense strand
gugcugguguccaugaacu

SEQ ID NO: 506689 - RNA, 19 nt, Homo sapiens
  misc_RNA (1)...(19): siRNA sense strand
gaaaguggcugcaguugga

SEQ ID NO: 506690 - RNA, 19 nt, Homo sapiens
  misc_RNA (1)...(19): siRNA sense strand
gcaagugacugaccucaaa

SEQ ID NO: 506691 - RNA, 19 nt, Homo sapiens
  misc_RNA (1)...(19): siRNA sense strand
gaaaugaagcgucgccaua

SEQ ID NO: 506692 - RNA, 19 nt, Homo sapiens
  misc_RNA (1)...(19): siRNA sense strand
gauguuaguucuucagauu

SEQ ID NO: 506693 - RNA, 19 nt, Homo sapiens
  misc_RNA (1)...(19): siRNA sense strand
caacaaugcuucaucuuca

SEQ ID NO: 506694 - RNA, 19 nt, Homo sapiens
  misc_RNA (1)...(19): siRNA sense strand
gaaauacgaugacagugau

SEQ ID NO: 506695 - RNA, 19 nt, Homo sapiens
  misc_RNA (1)...(19): siRNA sense strand
ugaaugggcuccuugguaa

SEQ ID NO: 506696 - RNA, 19 nt, Homo sapiens
  misc_RNA (1)...(19): siRNA sense strand
ggaggaagaugaugagaca

SEQ ID NO: 506697 - RNA, 19 nt, Homo sapiens
  misc_RNA (1)...(19): siRNA sense strand
gaaagacccaagaggaaua

SEQ ID NO: 506698 - RNA, 19 nt, Homo sapiens
  misc_RNA (1)...(19): siRNA sense strand
ggacaaguaugggcuuuga

SEQ ID NO: 506699 - RNA, 19 nt, Homo sapiens
  misc_RNA (1)...(19): siRNA sense strand
gggaaggucuguuucucua

SEQ ID NO: 506700 - RNA, 19 nt, Homo sapiens
  misc_RNA (1)...(19): siRNA sense strand
ccaacagcaugguguauuu

SEQ ID NO: 506701 - RNA, 19 nt, Homo sapiens
  misc_RNA (1)...(19): siRNA sense strand
gaagaaauacgaugacagu

SEQ ID NO: 506702 - RNA, 19 nt, Homo sapiens
  misc_RNA (1)...(19): siRNA sense strand
agagagaacuggucaagga

SEQ ID NO: 506703 - RNA, 19 nt, Homo sapiens
  misc_RNA (1)...(19): siRNA sense strand
gagaggaggugucagaucu

SEQ ID NO: 506704 - RNA, 19 nt, Homo sapiens
  misc_RNA (1)...(19): siRNA sense strand
gaaguuacucuaccagauu

SEQ ID NO: 506705 - RNA, 19 nt, Homo sapiens
  misc_RNA (1)...(19): siRNA sense strand
acaaaggcguccucaauga

SEQ ID NO: 506706 - RNA, 19 nt, Homo sapiens
  misc_RNA (1)...(19): siRNA sense strand
gaacaaacuagcagacaug

SEQ ID NO: 506707 - RNA, 19 nt, Homo sapiens
  misc_RNA (1)...(19): siRNA sense strand
agaacaagcuggaagaugu

SEQ ID NO: 506708 - RNA, 19 nt, Homo sapiens
  misc_RNA (1)...(19): siRNA sense strand
gcgcucagguggagaaguu

SEQ ID NO: 506709 - RNA, 19 nt, Homo sapiens
  misc_RNA (1)...(19): siRNA sense strand
cagcacaacuccaguaaag

SEQ ID NO: 506710 - RNA, 19 nt, Homo sapiens
  misc_RNA (1)...(19): siRNA sense strand
gcaacgauguuaguucuuc

SEQ ID NO: 506711 - RNA, 19 nt, Homo sapiens
  misc_RNA (1)...(19): siRNA sense strand
gcagcagaguggccaguuu

SEQ ID NO: 506712 - RNA, 19 nt, Homo sapiens
  misc_RNA (1)...(19): siRNA sense strand
ccacaaacauguucacaac

SEQ ID NO: 506713 - RNA, 19 nt, Homo sapiens
  misc_RNA (1)...(19): siRNA sense strand
gcacaacuccaguaaagau

SEQ ID NO: 506714 - RNA, 19 nt, Homo sapiens
  misc_RNA (1)...(19): siRNA sense strand
aaaggaagccuaagacaga

SEQ ID NO: 506715 - RNA, 19 nt, Homo sapiens
  misc_RNA (1)...(19): siRNA sense strand
ggaacaaacuagcagacau

SEQ ID NO: 506716 - RNA, 19 nt, Homo sapiens
  misc_RNA (1)...(19): siRNA sense strand
ggaagaugaugagacagaa

SEQ ID NO: 506717 - RNA, 19 nt, Homo sapiens
  misc_RNA (1)...(19): siRNA sense strand
gauaucagaccucucuaaa

SEQ ID NO: 506718 - RNA, 19 nt, Homo sapiens
  misc_RNA (1)...(19): siRNA sense strand
agaagcaccucaaaucuca

SEQ ID NO: 506719 - RNA, 19 nt, Homo sapiens
  misc_RNA (1)...(19): siRNA sense strand
gaagaacgggugguacgua

SEQ ID NO: 506720 - RNA, 19 nt, Homo sapiens
  misc_RNA (1)...(19): siRNA sense strand
ccauauagcuaagccauuc

SEQ ID NO: 506721 - RNA, 19 nt, Homo sapiens
  misc_RNA (1)...(19): siRNA sense strand
gaacagcgaggaauaucau

SEQ ID NO: 506722 - RNA, 19 nt, Homo sapiens
  misc_RNA (1)...(19): siRNA sense strand
gaaagcaacgucaugaucu

SEQ ID NO: 506723 - RNA, 19 nt, Homo sapiens
  misc_RNA (1)...(19): siRNA sense strand
ugaccagucuaagggauua

SEQ ID NO: 506724 - RNA, 19 nt, Homo sapiens
  misc_RNA (1)...(19): siRNA sense strand
ggaaagcaacgucaugauc

SEQ ID NO: 506725 - RNA, 19 nt, Homo sapiens
  misc_RNA (1)...(19): siRNA sense strand
agaaggaggugcugaugga

SEQ ID NO: 506726 - RNA, 19 nt, Homo sapiens
  misc_RNA (1)...(19): siRNA sense strand
ucaagaagcaccucaaauc

SEQ ID NO: 506727 - RNA, 19 nt, Homo sapiens
  misc_RNA (1)...(19): siRNA sense strand
gcucaggacuuacggaaac

SEQ ID NO: 506728 - RNA, 19 nt, Homo sapiens
  misc_RNA (1)...(19): siRNA sense strand
ucucagcccuccuggauga

SEQ ID NO: 506729 - RNA, 19 nt, Homo sapiens
  misc_RNA (1)...(19): siRNA sense strand
aaugaagcgucgccauaua

SEQ ID NO: 506730 - RNA, 19 nt, Homo sapiens
  misc_RNA (1)...(19): siRNA sense strand
caucagaacagucagagaa

SEQ ID NO: 506731 - RNA, 19 nt, Homo sapiens
  misc_RNA (1)...(19): siRNA sense strand
gaugagaugcgguuuguca

SEQ ID NO: 506732 - RNA, 19 nt, Homo sapiens
  misc_RNA (1)...(19): siRNA sense strand
uaaagauaguggagccauu

SEQ ID NO: 506733 - RNA, 19 nt, Homo sapiens
  misc_RNA (1)...(19): siRNA sense strand
gaacagucagagaaugaaa

SEQ ID NO: 506734 - RNA, 19 nt, Homo sapiens
  misc_RNA (1)...(19): siRNA sense strand
gaaggucuguuucucuaac

SEQ ID NO: 506735 - RNA, 19 nt, Homo sapiens
  misc_RNA (1)...(19): siRNA sense strand
gcggcaaagugucugguaa

SEQ ID NO: 506736 - RNA, 19 nt, Homo sapiens
  misc_RNA (1)...(19): siRNA sense strand
gacaaaggcguccucaaug

SEQ ID NO: 506737 - RNA, 19 nt, Homo sapiens
  misc_RNA (1)...(19): siRNA sense strand
gugaaugggcuccuuggua

SEQ ID NO: 506738 - RNA, 19 nt, Homo sapiens
  misc_RNA (1)...(19): siRNA sense strand
aagaacgggugguacguaa

SEQ ID NO: 506739 - RNA, 19 nt, Homo sapiens
  misc_RNA (1)...(19): siRNA sense strand
cgaaggcccuggcaagaag

SEQ ID NO: 506740 - RNA, 19 nt, Homo sapiens
  misc_RNA (1)...(19): siRNA sense strand
gauaguggagccauugcua

SEQ ID NO: 506741 - RNA, 19 nt, Homo sapiens
  misc_RNA (1)...(19): siRNA sense strand
ucaguaaacccacaccaaa

SEQ ID NO: 506742 - RNA, 19 nt, Homo sapiens
  misc_RNA (1)...(19): siRNA sense strand
agaaauacgaugacaguga

SEQ ID NO: 506743 - RNA, 19 nt, Homo sapiens
  misc_RNA (1)...(19): siRNA sense strand
uauaagggaaggucuguuu

SEQ ID NO: 506744 - RNA, 19 nt, Homo sapiens
  misc_RNA (1)...(19): siRNA sense strand
guucacaacgggcauguuu

SEQ ID NO: 506745 - RNA, 19 nt, Homo sapiens
  misc_RNA (1)...(19): siRNA sense strand
ggaaagacccaagaggaau

SEQ ID NO: 506746 - RNA, 19 nt, Homo sapiens
  misc_RNA (1)...(19): siRNA sense strand
gccgagggcugaaguugau

SEQ ID NO: 506747 - RNA, 19 nt, Homo sapiens
  misc_RNA (1)...(19): siRNA sense strand
ggacgaugcaucccaagug

SEQ ID NO: 506748 - RNA, 19 nt, Homo sapiens
  misc_RNA (1)...(19): siRNA sense strand
gaacgggugguacguaaag

SEQ ID NO: 506749 - RNA, 19 nt, Homo sapiens
  misc_RNA (1)...(19): siRNA sense strand
uccauacauugacuacuua

SEQ ID NO: 506750 - RNA, 19 nt, Homo sapiens
  misc_RNA (1)...(19): siRNA sense strand
agugcaagcucaacgauga

SEQ ID NO: 506751 - RNA, 19 nt, Homo sapiens
  misc_RNA (1)...(19): siRNA sense strand
gggagcaggcuucagcuaa

SEQ ID NO: 506752 - RNA, 19 nt, Homo sapiens
  misc_RNA (1)...(19): siRNA sense strand
gacgaugcaucccaagugu

SEQ ID NO: 506753 - RNA, 19 nt, Homo sapiens
  misc_RNA (1)...(19): siRNA sense strand
ggacuuacggaaacagguu

SEQ ID NO: 506754 - RNA, 19 nt, Homo sapiens
  misc_RNA (1)...(19): siRNA sense strand
gaacaagcuggaagaugug

SEQ ID NO: 506755 - RNA, 19 nt, Homo sapiens
  misc_RNA (1)...(19): siRNA sense strand
cagccgaaaucgagcaaga

SEQ ID NO: 506756 - RNA, 19 nt, Homo sapiens
  misc_RNA (1)...(19): siRNA sense strand
cgaggaauaucaugagcau

SEQ ID NO: 506757 - RNA, 19 nt, Homo sapiens
  misc_RNA (1)...(19): siRNA sense strand
uagcaacgauguuaguucu

SEQ ID NO: 506758 - RNA, 19 nt, Homo sapiens
  misc_RNA (1)...(19): siRNA sense strand
gaugaggaacagauuauca

SEQ ID NO: 506759 - RNA, 19 nt, Homo sapiens
  misc_RNA (1)...(19): siRNA sense strand
ggcaguggauucccaguag

SEQ ID NO: 506760 - RNA, 19 nt, Homo sapiens
  misc_RNA (1)...(19): siRNA sense strand
guucaagaauucccagaag

SEQ ID NO: 506761 - RNA, 19 nt, Homo sapiens
  misc_RNA (1)...(19): siRNA sense strand
ggaagaggaggaggacaaa

SEQ ID NO: 506762 - RNA, 19 nt, Homo sapiens
  misc_RNA (1)...(19): siRNA sense strand
gaacggacacgugaagaag

SEQ ID NO: 506763 - RNA, 19 nt, Homo sapiens
  misc_RNA (1)...(19): siRNA sense strand
ggagcaggcuucagcuaac

SEQ ID NO: 506764 - RNA, 19 nt, Homo sapiens
  misc_RNA (1)...(19): siRNA sense strand
cagaacagucagagaauga

SEQ ID NO: 506765 - RNA, 19 nt, Homo sapiens
  misc_RNA (1)...(19): siRNA sense strand
uaucgaacagcgaggaaua

SEQ ID NO: 506766 - RNA, 19 nt, Homo sapiens
  misc_RNA (1)...(19): siRNA sense strand
aagaaguggucaaggaaga

SEQ ID NO: 506767 - RNA, 19 nt, Homo sapiens
  misc_RNA (1)...(19): siRNA sense strand
caagaagcaccucaaaucu

SEQ ID NO: 506768 - RNA, 19 nt, Homo sapiens
  misc_RNA (1)...(19): siRNA sense strand
ccaaagucaugcacuaagg

SEQ ID NO: 506769 - RNA, 19 nt, Homo sapiens
  misc_RNA (1)...(19): siRNA sense strand
gaagggccgucgaggaaaa

SEQ ID NO: 506770 - RNA, 19 nt, Homo sapiens
  misc_RNA (1)...(19): siRNA sense strand
ucacgcagauucagcacau

SEQ ID NO: 506771 - RNA, 19 nt, Homo sapiens
  misc_RNA (1)...(19): siRNA sense strand
cggcuggccugcaucaaga

SEQ ID NO: 506772 - RNA, 19 nt, Homo sapiens
  misc_RNA (1)...(19): siRNA sense strand
caacgauguuaguucuuca

SEQ ID NO: 506773 - RNA, 19 nt, Homo sapiens
  misc_RNA (1)...(19): siRNA sense strand
ggguacagcgugucugaaa

SEQ ID NO: 506774 - RNA, 19 nt, Homo sapiens
  misc_RNA (1)...(19): siRNA sense strand
gggauuaggaccagcauca

SEQ ID NO: 506775 - RNA, 19 nt, Homo sapiens
  misc_RNA (1)...(19): siRNA sense strand
ggaaggucuguuucucuaa

SEQ ID NO: 506776 - RNA, 19 nt, Homo sapiens
  misc_RNA (1)...(19): siRNA sense strand
gcaugcagcaagugacuga

SEQ ID NO: 506777 - RNA, 19 nt, Homo sapiens
  misc_RNA (1)...(19): siRNA sense strand
ggucaacacgggagaagga

SEQ ID NO: 506778 - RNA, 19 nt, Homo sapiens
  misc_RNA (1)...(19): siRNA sense strand
ccaacaaugcuucaucuuc

SEQ ID NO: 506779 - RNA, 19 nt, Homo sapiens
  misc_RNA (1)...(19): siRNA sense strand
ugagacagaagacgucaaa

SEQ ID NO: 506780 - RNA, 19 nt, Homo sapiens
  misc_RNA (1)...(19): siRNA sense strand
uaucagaccucucuaaaag

SEQ ID NO: 506781 - RNA, 19 nt, Homo sapiens
  misc_RNA (1)...(19): siRNA sense strand
ggaaguuugcucagucuca

SEQ ID NO: 506782 - RNA, 19 nt, Homo sapiens
  misc_RNA (1)...(19): siRNA sense strand
gauuaucagucuggucaau

SEQ ID NO: 506783 - RNA, 19 nt, Homo sapiens
  misc_RNA (1)...(19): siRNA sense strand
ggaggcuaguggaagagaa

SEQ ID NO: 506784 - RNA, 19 nt, Homo sapiens
  misc_RNA (1)...(19): siRNA sense strand
caacuccaguaaagauagu

SEQ ID NO: 506785 - RNA, 19 nt, Homo sapiens
  misc_RNA (1)...(19): siRNA sense strand
cagaagaaauacgaugaca

SEQ ID NO: 506786 - RNA, 19 nt, Homo sapiens
  misc_RNA (1)...(19): siRNA sense strand
aaucagaucugcggcaaag

SEQ ID NO: 506787 - RNA, 19 nt, Homo sapiens
  misc_RNA (1)...(19): siRNA sense strand
ucagagaggaggugucaga

SEQ ID NO: 506788 - RNA, 19 nt, Homo sapiens
  misc_RNA (1)...(19): siRNA sense strand
agaaguuacucuaccagau

SEQ ID NO: 506789 - RNA, 19 nt, Homo sapiens
  misc_RNA (1)...(19): siRNA sense strand
ugaggaagaugauggauuu

SEQ ID NO: 506790 - RNA, 19 nt, Homo sapiens
  misc_RNA (1)...(19): siRNA sense strand
gccgagagcuuccuacuga

SEQ ID NO: 506791 - RNA, 19 nt, Homo sapiens
  misc_RNA (1)...(19): siRNA sense strand
ggaagaugauggauuugug

SEQ ID NO: 506792 - RNA, 19 nt, Homo sapiens
  misc_RNA (1)...(19): siRNA sense strand
caacaucguggauaaguuu

SEQ ID NO: 506793 - RNA, 19 nt, Homo sapiens
  misc_RNA (1)...(19): siRNA sense strand
gcagauaccccuaugaaua

SEQ ID NO: 506794 - RNA, 19 nt, Homo sapiens
  misc_RNA (1)...(19): siRNA sense strand
cuaggucgcuucucucuga

SEQ ID NO: 506795 - RNA, 19 nt, Homo sapiens
  misc_RNA (1)...(19): siRNA sense strand
gagagcugauuggagauua

SEQ ID NO: 506796 - RNA, 19 nt, Homo sapiens
  misc_RNA (1)...(19): siRNA sense strand
ucagcaacaucguggauaa

SEQ ID NO: 506797 - RNA, 19 nt, Homo sapiens
  misc_RNA (1)...(19): siRNA sense strand
gcaacaucguggauaaguu

SEQ ID NO: 506798 - RNA, 19 nt, Homo sapiens
  misc_RNA (1)...(19): siRNA sense strand
ggauaaguuugugauugua

SEQ ID NO: 506799 - RNA, 19 nt, Homo sapiens
  misc_RNA (1)...(19): siRNA sense strand
aaaaggaccucgucaugua

SEQ ID NO: 506800 - RNA, 19 nt, Homo sapiens
  misc_RNA (1)...(19): siRNA sense strand
ugagauguauauccugaaa

SEQ ID NO: 506801 - RNA, 19 nt, Homo sapiens
  misc_RNA (1)...(19): siRNA sense strand
caagagagucauccucauu

SEQ ID NO: 506802 - RNA, 19 nt, Homo sapiens
  misc_RNA (1)...(19): siRNA sense strand
gauuggagauuacucuaag

SEQ ID NO: 506803 - RNA, 19 nt, Homo sapiens
  misc_RNA (1)...(19): siRNA sense strand
guggauaaguuugugauug

SEQ ID NO: 506804 - RNA, 19 nt, Homo sapiens
  misc_RNA (1)...(19): siRNA sense strand
gaacgagaccgugcuguca

SEQ ID NO: 506805 - RNA, 19 nt, Homo sapiens
  misc_RNA (1)...(19): siRNA sense strand
gcaccaagaccucaaguac

SEQ ID NO: 506806 - RNA, 19 nt, Homo sapiens
  misc_RNA (1)...(19): siRNA sense strand
cuacuacccugagauguau

SEQ ID NO: 506807 - RNA, 19 nt, Homo sapiens
  misc_RNA (1)...(19): siRNA sense strand
ggaagccuuugcccagaga

SEQ ID NO: 506808 - RNA, 19 nt, Homo sapiens
  misc_RNA (1)...(19): siRNA sense strand
aaguacaucucaccagaaa

SEQ ID NO: 506809 - RNA, 19 nt, Homo sapiens
  misc_RNA (1)...(19): siRNA sense strand
aaaggaugaugaugcaguu

SEQ ID NO: 506810 - RNA, 19 nt, Homo sapiens
  misc_RNA (1)...(19): siRNA sense strand
uggauaaguuugugauugu

SEQ ID NO: 506811 - RNA, 19 nt, Homo sapiens
  misc_RNA (1)...(19): siRNA sense strand
gcagccagccggaucauuc

SEQ ID NO: 506812 - RNA, 19 nt, Homo sapiens
  misc_RNA (1)...(19): siRNA sense strand
cauccuagagagugacuua

SEQ ID NO: 506813 - RNA, 19 nt, Homo sapiens
  misc_RNA (1)...(19): siRNA sense strand
aggaugagcuaaagaccuu

SEQ ID NO: 506814 - RNA, 19 nt, Homo sapiens
  misc_RNA (1)...(19): siRNA sense strand
agagugacuuaaaggauga

SEQ ID NO: 506815 - RNA, 19 nt, Homo sapiens
  misc_RNA (1)...(19): siRNA sense strand
aauccucccugucgucuga

SEQ ID NO: 506816 - RNA, 19 nt, Homo sapiens
  misc_RNA (1)...(19): siRNA sense strand
gaaagcaccaagaccucaa

SEQ ID NO: 506817 - RNA, 19 nt, Homo sapiens
  misc_RNA (1)...(19): siRNA sense strand
ccuagagagugacuuaaag

SEQ ID NO: 506818 - RNA, 19 nt, Homo sapiens
  misc_RNA (1)...(19): siRNA sense strand
ggaaaaggaccucgucaug

SEQ ID NO: 506819 - RNA, 19 nt, Homo sapiens
  misc_RNA (1)...(19): siRNA sense strand
ucuacuacccugagaugua

SEQ ID NO: 506820 - RNA, 19 nt, Homo sapiens
  misc_RNA (1)...(19): siRNA sense strand
gauuguagacugcagauac

SEQ ID NO: 506821 - RNA, 19 nt, Homo sapiens
  misc_RNA (1)...(19): siRNA sense strand
accaagaccucaaguacau

SEQ ID NO: 506822 - RNA, 19 nt, Homo sapiens
  misc_RNA (1)...(19): siRNA sense strand
ccagccggaucauucgaaa

SEQ ID NO: 506823 - RNA, 19 nt, Homo sapiens
  misc_RNA (1)...(19): siRNA sense strand
gaaccacgaggccuucaag

SEQ ID NO: 506824 - RNA, 19 nt, Homo sapiens
  misc_RNA (1)...(19): siRNA sense strand
aagagagucauccucauuu

SEQ ID NO: 506825 - RNA, 19 nt, Homo sapiens
  misc_RNA (1)...(19): siRNA sense strand
cuuaaaggaugaugaugca

SEQ ID NO: 506826 - RNA, 19 nt, Homo sapiens
  misc_RNA (1)...(19): siRNA sense strand
gcaggaggcugaggaaccu

SEQ ID NO: 506827 - RNA, 19 nt, Homo sapiens
  misc_RNA (1)...(19): siRNA sense strand
uggcggagcagacguuuga

SEQ ID NO: 506828 - RNA, 19 nt, Homo sapiens
  misc_RNA (1)...(19): siRNA sense strand
gggauacugaggaagauga

SEQ ID NO: 506829 - RNA, 19 nt, Homo sapiens
  misc_RNA (1)...(19): siRNA sense strand
gaaaaggaccucgucaugu

SEQ ID NO: 506830 - RNA, 19 nt, Homo sapiens
  misc_RNA (1)...(19): siRNA sense strand
acugugaauucucaucuga

SEQ ID NO: 506831 - RNA, 19 nt, Homo sapiens
  misc_RNA (1)...(19): siRNA sense strand
guacaucucaccagaaacg

SEQ ID NO: 506832 - RNA, 19 nt, Homo sapiens
  misc_RNA (1)...(19): siRNA sense strand
caaguacaucucaccagaa

SEQ ID NO: 506833 - RNA, 19 nt, Homo sapiens
  misc_RNA (1)...(19): siRNA sense strand
ggcccuaggucgcuucucu

SEQ ID NO: 506834 - RNA, 19 nt, Homo sapiens
  misc_RNA (1)...(19): siRNA sense strand
agauguauauccugaaagg

SEQ ID NO: 506835 - RNA, 19 nt, Homo sapiens
  misc_RNA (1)...(19): siRNA sense strand
caucaagacugcggugaac

SEQ ID NO: 506836 - RNA, 19 nt, Homo sapiens
  misc_RNA (1)...(19): siRNA sense strand
ugacuuaaaggaugaugau

SEQ ID NO: 506837 - RNA, 19 nt, Homo sapiens
  misc_RNA (1)...(19): siRNA sense strand
ucaagacugcggugaacuu

SEQ ID NO: 506838 - RNA, 19 nt, Homo sapiens
  misc_RNA (1)...(19): siRNA sense strand
cuucaaggaugagcuaaag

SEQ ID NO: 506839 - RNA, 19 nt, Homo sapiens
  misc_RNA (1)...(19): siRNA sense strand
ugaaaggcggcuacaagga

SEQ ID NO: 506840 - RNA, 19 nt, Homo sapiens
  misc_RNA (1)...(19): siRNA sense strand
agaaccuccuggacaguga

SEQ ID NO: 506841 - RNA, 19 nt, Homo sapiens
  misc_RNA (1)...(19): siRNA sense strand
cacccgaacuucugugaac

SEQ ID NO: 506842 - RNA, 19 nt, Homo sapiens
  misc_RNA (1)...(19): siRNA sense strand
gauaaguuugugauuguag

SEQ ID NO: 506843 - RNA, 19 nt, Homo sapiens
  misc_RNA (1)...(19): siRNA sense strand
caucguggauaaguuugug

SEQ ID NO: 506844 - RNA, 19 nt, Homo sapiens
  misc_RNA (1)...(19): siRNA sense strand
cgagcaguuugccaucaga

SEQ ID NO: 506845 - RNA, 19 nt, Homo sapiens
  misc_RNA (1)...(19): siRNA sense strand
ugauuggagauuacucuaa

SEQ ID NO: 506846 - RNA, 19 nt, Homo sapiens
  misc_RNA (1)...(19): siRNA sense strand
ccuguagccuggacaagag

SEQ ID NO: 506847 - RNA, 19 nt, Homo sapiens
  misc_RNA (1)...(19): siRNA sense strand
cuccgaaucuucugaugca

SEQ ID NO: 506848 - RNA, 19 nt, Homo sapiens
  misc_RNA (1)...(19): siRNA sense strand
gcacccgaacuucugugaa

SEQ ID NO: 506849 - RNA, 19 nt, Homo sapiens
  misc_RNA (1)...(19): siRNA sense strand
cagauaccccuaugaauau

SEQ ID NO: 506850 - RNA, 19 nt, Homo sapiens
  misc_RNA (1)...(19): siRNA sense strand
uacagacaguagacggaaa

SEQ ID NO: 506851 - RNA, 19 nt, Homo sapiens
  misc_RNA (1)...(19): siRNA sense strand
gaccaccgagagcugauug

SEQ ID NO: 506852 - RNA, 19 nt, Homo sapiens
  misc_RNA (1)...(19): siRNA sense strand
ccugaaaggcggcuacaag

SEQ ID NO: 506853 - RNA, 19 nt, Homo sapiens
  misc_RNA (1)...(19): siRNA sense strand
acaagagagucauccucau

SEQ ID NO: 506854 - RNA, 19 nt, Homo sapiens
  misc_RNA (1)...(19): siRNA sense strand
caccaagaccucaaguaca

SEQ ID NO: 506855 - RNA, 19 nt, Homo sapiens
  misc_RNA (1)...(19): siRNA sense strand
uaaagaccuuccgccucaa

SEQ ID NO: 506856 - RNA, 19 nt, Homo sapiens
  misc_RNA (1)...(19): siRNA sense strand
ggaggcugaggaaccuaaa

SEQ ID NO: 506857 - RNA, 19 nt, Homo sapiens
  misc_RNA (1)...(19): siRNA sense strand
ccgagagcuuccuacugaa

SEQ ID NO: 506858 - RNA, 19 nt, Homo sapiens
  misc_RNA (1)...(19): siRNA sense strand
cgagagcugauuggagauu

SEQ ID NO: 506859 - RNA, 19 nt, Homo sapiens
  misc_RNA (1)...(19): siRNA sense strand
ugaggaagaugauggauuu

SEQ ID NO: 506860 - RNA, 19 nt, Homo sapiens
  misc_RNA (1)...(19): siRNA sense strand
gccgagagcuuccuacuga

SEQ ID NO: 506861 - RNA, 19 nt, Homo sapiens
  misc_RNA (1)...(19): siRNA sense strand
ggaagaugauggauuugug

SEQ ID NO: 506862 - RNA, 19 nt, Homo sapiens
  misc_RNA (1)...(19): siRNA sense strand
caacaucguggauaaguuu

SEQ ID NO: 506863 - RNA, 19 nt, Homo sapiens
  misc_RNA (1)...(19): siRNA sense strand
gcagauaccccuaugaaua

SEQ ID NO: 506864 - RNA, 19 nt, Homo sapiens
  misc_RNA (1)...(19): siRNA sense strand
cuaggucgcuucucucuga

SEQ ID NO: 506865 - RNA, 19 nt, Homo sapiens
  misc_RNA (1)...(19): siRNA sense strand
gagagcugauuggagauua

SEQ ID NO: 506866 - RNA, 19 nt, Homo sapiens
  misc_RNA (1)...(19): siRNA sense strand
ucagcaacaucguggauaa

SEQ ID NO: 506867 - RNA, 19 nt, Homo sapiens
  misc_RNA (1)...(19): siRNA sense strand
gcaacaucguggauaaguu

SEQ ID NO: 506868 - RNA, 19 nt, Homo sapiens
  misc_RNA (1)...(19): siRNA sense strand
ggauaaguuugugauugua

SEQ ID NO: 506869 - RNA, 19 nt, Homo sapiens
  misc_RNA (1)...(19): siRNA sense strand
aaaaggaccucgucaugua

SEQ ID NO: 506870 - RNA, 19 nt, Homo sapiens
  misc_RNA (1)...(19): siRNA sense strand
ugagauguauauccugaaa

SEQ ID NO: 506871 - RNA, 19 nt, Homo sapiens
  misc_RNA (1)...(19): siRNA sense strand
caagagagucauccucauu

SEQ ID NO: 506872 - RNA, 19 nt, Homo sapiens
  misc_RNA (1)...(19): siRNA sense strand
gauuggagauuacucuaag

SEQ ID NO: 506873 - RNA, 19 nt, Homo sapiens
  misc_RNA (1)...(19): siRNA sense strand
guggauaaguuugugauug

SEQ ID NO: 506874 - RNA, 19 nt, Homo sapiens
  misc_RNA (1)...(19): siRNA sense strand
gaacgagaccgugcuguca

SEQ ID NO: 506875 - RNA, 19 nt, Homo sapiens
  misc_RNA (1)...(19): siRNA sense strand
gcaccaagaccucaaguac

SEQ ID NO: 506876 - RNA, 19 nt, Homo sapiens
  misc_RNA (1)...(19): siRNA sense strand
cuacuacccugagauguau

SEQ ID NO: 506877 - RNA, 19 nt, Homo sapiens
  misc_RNA (1)...(19): siRNA sense strand
ggaagccuuugcccagaga

SEQ ID NO: 506878 - RNA, 19 nt, Homo sapiens
  misc_RNA (1)...(19): siRNA sense strand
aaguacaucucaccagaaa

SEQ ID NO: 506879 - RNA, 19 nt, Homo sapiens
  misc_RNA (1)...(19): siRNA sense strand
aaaggaugaugaugcaguu

SEQ ID NO: 506880 - RNA, 19 nt, Homo sapiens
  misc_RNA (1)...(19): siRNA sense strand
uggauaaguuugugauugu

SEQ ID NO: 506881 - RNA, 19 nt, Homo sapiens
  misc_RNA (1)...(19): siRNA sense strand
gcagccagccggaucauuc

SEQ ID NO: 506882 - RNA, 19 nt, Homo sapiens
  misc_RNA (1)...(19): siRNA sense strand
cauccuagagagugacuua

SEQ ID NO: 506883 - RNA, 19 nt, Homo sapiens
  misc_RNA (1)...(19): siRNA sense strand
aggaugagcuaaagaccuu

SEQ ID NO: 506884 - RNA, 19 nt, Homo sapiens
  misc_RNA (1)...(19): siRNA sense strand
agagugacuuaaaggauga

SEQ ID NO: 506885 - RNA, 19 nt, Homo sapiens
  misc_RNA (1)...(19): siRNA sense strand
aauccucccugucgucuga

SEQ ID NO: 506886 - RNA, 19 nt, Homo sapiens
  misc_RNA (1)...(19): siRNA sense strand
gaaagcaccaagaccucaa

SEQ ID NO: 506887 - RNA, 19 nt, Homo sapiens
  misc_RNA (1)...(19): siRNA sense strand
ccuagagagugacuuaaag

SEQ ID NO: 506888 - RNA, 19 nt, Homo sapiens
  misc_RNA (1)...(19): siRNA sense strand
ggaaaaggaccucgucaug

SEQ ID NO: 506889 - RNA, 19 nt, Homo sapiens
  misc_RNA (1)...(19): siRNA sense strand
ucuacuacccugagaugua

SEQ ID NO: 506890 - RNA, 19 nt, Homo sapiens
  misc_RNA (1)...(19): siRNA sense strand
gauuguagacugcagauac

SEQ ID NO: 506891 - RNA, 19 nt, Homo sapiens
  misc_RNA (1)...(19): siRNA sense strand
accaagaccucaaguacau

SEQ ID NO: 506892 - RNA, 19 nt, Homo sapiens
  misc_RNA (1)...(19): siRNA sense strand
ccagccggaucauucgaaa

SEQ ID NO: 506893 - RNA, 19 nt, Homo sapiens
  misc_RNA (1)...(19): siRNA sense strand
gaaccacgaggccuucaag

SEQ ID NO: 506894 - RNA, 19 nt, Homo sapiens
  misc_RNA (1)...(19): siRNA sense strand
aagagagucauccucauuu

SEQ ID NO: 506895 - RNA, 19 nt, Homo sapiens
  misc_RNA (1)...(19): siRNA sense strand
cuuaaaggaugaugaugca

SEQ ID NO: 506896 - RNA, 19 nt, Homo sapiens
  misc_RNA (1)...(19): siRNA sense strand
gcaggaggcugaggaaccu

SEQ ID NO: 506897 - RNA, 19 nt, Homo sapiens
  misc_RNA (1)...(19): siRNA sense strand
uggcggagcagacguuuga

SEQ ID NO: 506898 - RNA, 19 nt, Homo sapiens
  misc_RNA (1)...(19): siRNA sense strand
gggauacugaggaagauga

SEQ ID NO: 506899 - RNA, 19 nt, Homo sapiens
  misc_RNA (1)...(19): siRNA sense strand
gaaaaggaccucgucaugu

SEQ ID NO: 506900 - RNA, 19 nt, Homo sapiens
  misc_RNA (1)...(19): siRNA sense strand
acugugaauucucaucuga

SEQ ID NO: 506901 - RNA, 19 nt, Homo sapiens
  misc_RNA (1)...(19): siRNA sense strand
guacaucucaccagaaacg

SEQ ID NO: 506902 - RNA, 19 nt, Homo sapiens
  misc_RNA (1)...(19): siRNA sense strand
caaguacaucucaccagaa

SEQ ID NO: 506903 - RNA, 19 nt, Homo sapiens
  misc_RNA (1)...(19): siRNA sense strand
ggcccuaggucgcuucucu

SEQ ID NO: 506904 - RNA, 19 nt, Homo sapiens
  misc_RNA (1)...(19): siRNA sense strand
agauguauauccugaaagg

SEQ ID NO: 506905 - RNA, 19 nt, Homo sapiens
  misc_RNA (1)...(19): siRNA sense strand
caucaagacugcggugaac

SEQ ID NO: 506906 - RNA, 19 nt, Homo sapiens
  misc_RNA (1)...(19): siRNA sense strand
ugacuuaaaggaugaugau

SEQ ID NO: 506907 - RNA, 19 nt, Homo sapiens
  misc_RNA (1)...(19): siRNA sense strand
ucaagacugcggugaacuu

SEQ ID NO: 506908 - RNA, 19 nt, Homo sapiens
  misc_RNA (1)...(19): siRNA sense strand
cuucaaggaugagcuaaag

SEQ ID NO: 506909 - RNA, 19 nt, Homo sapiens
  misc_RNA (1)...(19): siRNA sense strand
ugaaaggcggcuacaagga

SEQ ID NO: 506910 - RNA, 19 nt, Homo sapiens
  misc_RNA (1)...(19): siRNA sense strand
agaaccuccuggacaguga

SEQ ID NO: 506911 - RNA, 19 nt, Homo sapiens
  misc_RNA (1)...(19): siRNA sense strand
cacccgaacuucugugaac

SEQ ID NO: 506912 - RNA, 19 nt, Homo sapiens
  misc_RNA (1)...(19): siRNA sense strand
gauaaguuugugauuguag

SEQ ID NO: 506913 - RNA, 19 nt, Homo sapiens
  misc_RNA (1)...(19): siRNA sense strand
caucguggauaaguuugug

SEQ ID NO: 506914 - RNA, 19 nt, Homo sapiens
  misc_RNA (1)...(19): siRNA sense strand
cgagcaguuugccaucaga

SEQ ID NO: 506915 - RNA, 19 nt, Homo sapiens
  misc_RNA (1)...(19): siRNA sense strand
ugauuggagauuacucuaa

SEQ ID NO: 506916 - RNA, 19 nt, Homo sapiens
  misc_RNA (1)...(19): siRNA sense strand
ccuguagccuggacaagag

SEQ ID NO: 506917 - RNA, 19 nt, Homo sapiens
  misc_RNA (1)...(19): siRNA sense strand
cuccgaaucuucugaugca

SEQ ID NO: 506918 - RNA, 19 nt, Homo sapiens
  misc_RNA (1)...(19): siRNA sense strand
gcacccgaacuucugugaa

SEQ ID NO: 506919 - RNA, 19 nt, Homo sapiens
  misc_RNA (1)...(19): siRNA sense strand
cagauaccccuaugaauau

SEQ ID NO: 506920 - RNA, 19 nt, Homo sapiens
  misc_RNA (1)...(19): siRNA sense strand
uacagacaguagacggaaa

SEQ ID NO: 506921 - RNA, 19 nt, Homo sapiens
  misc_RNA (1)...(19): siRNA sense strand
gaccaccgagagcugauug

SEQ ID NO: 506922 - RNA, 19 nt, Homo sapiens
  misc_RNA (1)...(19): siRNA sense strand
ccugaaaggcggcuacaag

SEQ ID NO: 506923 - RNA, 19 nt, Homo sapiens
  misc_RNA (1)...(19): siRNA sense strand
acaagagagucauccucau

SEQ ID NO: 506924 - RNA, 19 nt, Homo sapiens
  misc_RNA (1)...(19): siRNA sense strand
caccaagaccucaaguaca

SEQ ID NO: 506925 - RNA, 19 nt, Homo sapiens
  misc_RNA (1)...(19): siRNA sense strand
uaaagaccuuccgccucaa

SEQ ID NO: 506926 - RNA, 19 nt, Homo sapiens
  misc_RNA (1)...(19): siRNA sense strand
ggaggcugaggaaccuaaa

SEQ ID NO: 506927 - RNA, 19 nt, Homo sapiens
  misc_RNA (1)...(19): siRNA sense strand
ccgagagcuuccuacugaa

SEQ ID NO: 506928 - RNA, 19 nt, Homo sapiens
  misc_RNA (1)...(19): siRNA sense strand
cgagagcugauuggagauu

SEQ ID NO: 506929 - RNA, 19 nt, Homo sapiens
  misc_RNA (1)...(19): siRNA sense strand
ugaggaagaugauggauuu

SEQ ID NO: 506930 - RNA, 19 nt, Homo sapiens
  misc_RNA (1)...(19): siRNA sense strand
gccgagagcuuccuacuga

SEQ ID NO: 506931 - RNA, 19 nt, Homo sapiens
  misc_RNA (1)...(19): siRNA sense strand
ggaagaugauggauuugug

SEQ ID NO: 506932 - RNA, 19 nt, Homo sapiens
  misc_RNA (1)...(19): siRNA sense strand
caacaucguggauaaguuu

SEQ ID NO: 506933 - RNA, 19 nt, Homo sapiens
  misc_RNA (1)...(19): siRNA sense strand
gcagauaccccuaugaaua

SEQ ID NO: 506934 - RNA, 19 nt, Homo sapiens
  misc_RNA (1)...(19): siRNA sense strand
cuaggucgcuucucucuga

SEQ ID NO: 506935 - RNA, 19 nt, Homo sapiens
  misc_RNA (1)...(19): siRNA sense strand
gagagcugauuggagauua

SEQ ID NO: 506936 - RNA, 19 nt, Homo sapiens
  misc_RNA (1)...(19): siRNA sense strand
ucagcaacaucguggauaa

SEQ ID NO: 506937 - RNA, 19 nt, Homo sapiens
  misc_RNA (1)...(19): siRNA sense strand
gcaacaucguggauaaguu

SEQ ID NO: 506938 - RNA, 19 nt, Homo sapiens
  misc_RNA (1)...(19): siRNA sense strand
ggauaaguuugugauugua

SEQ ID NO: 506939 - RNA, 19 nt, Homo sapiens
  misc_RNA (1)...(19): siRNA sense strand
aaaaggaccucgucaugua

SEQ ID NO: 506940 - RNA, 19 nt, Homo sapiens
  misc_RNA (1)...(19): siRNA sense strand
ugagauguauauccugaaa

SEQ ID NO: 506941 - RNA, 19 nt, Homo sapiens
  misc_RNA (1)...(19): siRNA sense strand
caagagagucauccucauu

SEQ ID NO: 506942 - RNA, 19 nt, Homo sapiens
  misc_RNA (1)...(19): siRNA sense strand
gauuggagauuacucuaag

SEQ ID NO: 506943 - RNA, 19 nt, Homo sapiens
  misc_RNA (1)...(19): siRNA sense strand
guggauaaguuugugauug

SEQ ID NO: 506944 - RNA, 19 nt, Homo sapiens
  misc_RNA (1)...(19): siRNA sense strand
gaacgagaccgugcuguca

SEQ ID NO: 506945 - RNA, 19 nt, Homo sapiens
  misc_RNA (1)...(19): siRNA sense strand
gcaccaagaccucaaguac

SEQ ID NO: 506946 - RNA, 19 nt, Homo sapiens
  misc_RNA (1)...(19): siRNA sense strand
cuacuacccugagauguau

SEQ ID NO: 506947 - RNA, 19 nt, Homo sapiens
  misc_RNA (1)...(19): siRNA sense strand
ggaagccuuugcccagaga

SEQ ID NO: 506948 - RNA, 19 nt, Homo sapiens
  misc_RNA (1)...(19): siRNA sense strand
aaguacaucucaccagaaa

SEQ ID NO: 506949 - RNA, 19 nt, Homo sapiens
  misc_RNA (1)...(19): siRNA sense strand
aaaggaugaugaugcaguu

SEQ ID NO: 506950 - RNA, 19 nt, Homo sapiens
  misc_RNA (1)...(19): siRNA sense strand
uggauaaguuugugauugu

SEQ ID NO: 506951 - RNA, 19 nt, Homo sapiens
  misc_RNA (1)...(19): siRNA sense strand
gcagccagccggaucauuc

SEQ ID NO: 506952 - RNA, 19 nt, Homo sapiens
  misc_RNA (1)...(19): siRNA sense strand
cauccuagagagugacuua

SEQ ID NO: 506953 - RNA, 19 nt, Homo sapiens
  misc_RNA (1)...(19): siRNA sense strand
aggaugagcuaaagaccuu

SEQ ID NO: 506954 - RNA, 19 nt, Homo sapiens
  misc_RNA (1)...(19): siRNA sense strand
agagugacuuaaaggauga

SEQ ID NO: 506955 - RNA, 19 nt, Homo sapiens
  misc_RNA (1)...(19): siRNA sense strand
aauccucccugucgucuga

SEQ ID NO: 506956 - RNA, 19 nt, Homo sapiens
  misc_RNA (1)...(19): siRNA sense strand
gaaagcaccaagaccucaa

SEQ ID NO: 506957 - RNA, 19 nt, Homo sapiens
  misc_RNA (1)...(19): siRNA sense strand
ccuagagagugacuuaaag

SEQ ID NO: 506958 - RNA, 19 nt, Homo sapiens
  misc_RNA (1)...(19): siRNA sense strand
ggaaaaggaccucgucaug

SEQ ID NO: 506959 - RNA, 19 nt, Homo sapiens
  misc_RNA (1)...(19): siRNA sense strand
ucuacuacccugagaugua

SEQ ID NO: 506960 - RNA, 19 nt, Homo sapiens
  misc_RNA (1)...(19): siRNA sense strand
gauuguagacugcagauac

SEQ ID NO: 506961 - RNA, 19 nt, Homo sapiens
  misc_RNA (1)...(19): siRNA sense strand
accaagaccucaaguacau

SEQ ID NO: 506962 - RNA, 19 nt, Homo sapiens
  misc_RNA (1)...(19): siRNA sense strand
ccagccggaucauucgaaa

SEQ ID NO: 506963 - RNA, 19 nt, Homo sapiens
  misc_RNA (1)...(19): siRNA sense strand
gaaccacgaggccuucaag

SEQ ID NO: 506964 - RNA, 19 nt, Homo sapiens
  misc_RNA (1)...(19): siRNA sense strand
aagagagucauccucauuu

SEQ ID NO: 506965 - RNA, 19 nt, Homo sapiens
  misc_RNA (1)...(19): siRNA sense strand
cuuaaaggaugaugaugca

SEQ ID NO: 506966 - RNA, 19 nt, Homo sapiens
  misc_RNA (1)...(19): siRNA sense strand
gcaggaggcugaggaaccu

SEQ ID NO: 506967 - RNA, 19 nt, Homo sapiens
  misc_RNA (1)...(19): siRNA sense strand
uggcggagcagacguuuga

SEQ ID NO: 506968 - RNA, 19 nt, Homo sapiens
  misc_RNA (1)...(19): siRNA sense strand
gggauacugaggaagauga

SEQ ID NO: 506969 - RNA, 19 nt, Homo sapiens
  misc_RNA (1)...(19): siRNA sense strand
gaaaaggaccucgucaugu

SEQ ID NO: 506970 - RNA, 19 nt, Homo sapiens
  misc_RNA (1)...(19): siRNA sense strand
acugugaauucucaucuga

SEQ ID NO: 506971 - RNA, 19 nt, Homo sapiens
  misc_RNA (1)...(19): siRNA sense strand
guacaucucaccagaaacg

SEQ ID NO: 506972 - RNA, 19 nt, Homo sapiens
  misc_RNA (1)...(19): siRNA sense strand
caaguacaucucaccagaa

SEQ ID NO: 506973 - RNA, 19 nt, Homo sapiens
  misc_RNA (1)...(19): siRNA sense strand
ggcccuaggucgcuucucu

SEQ ID NO: 506974 - RNA, 19 nt, Homo sapiens
  misc_RNA (1)...(19): siRNA sense strand
agauguauauccugaaagg

SEQ ID NO: 506975 - RNA, 19 nt, Homo sapiens
  misc_RNA (1)...(19): siRNA sense strand
caucaagacugcggugaac

SEQ ID NO: 506976 - RNA, 19 nt, Homo sapiens
  misc_RNA (1)...(19): siRNA sense strand
ugacuuaaaggaugaugau

SEQ ID NO: 506977 - RNA, 19 nt, Homo sapiens
  misc_RNA (1)...(19): siRNA sense strand
ucaagacugcggugaacuu

SEQ ID NO: 506978 - RNA, 19 nt, Homo sapiens
  misc_RNA (1)...(19): siRNA sense strand
cuucaaggaugagcuaaag

SEQ ID NO: 506979 - RNA, 19 nt, Homo sapiens
  misc_RNA (1)...(19): siRNA sense strand
ugaaaggcggcuacaagga

SEQ ID NO: 506980 - RNA, 19 nt, Homo sapiens
  misc_RNA (1)...(19): siRNA sense strand
agaaccuccuggacaguga

SEQ ID NO: 506981 - RNA, 19 nt, Homo sapiens
  misc_RNA (1)...(19): siRNA sense strand
cacccgaacuucugugaac

SEQ ID NO: 506982 - RNA, 19 nt, Homo sapiens
  misc_RNA (1)...(19): siRNA sense strand
gauaaguuugugauuguag

SEQ ID NO: 506983 - RNA, 19 nt, Homo sapiens
  misc_RNA (1)...(19): siRNA sense strand
caucguggauaaguuugug

SEQ ID NO: 506984 - RNA, 19 nt, Homo sapiens
  misc_RNA (1)...(19): siRNA sense strand
cgagcaguuugccaucaga

SEQ ID NO: 506985 - RNA, 19 nt, Homo sapiens
  misc_RNA (1)...(19): siRNA sense strand
ugauuggagauuacucuaa

SEQ ID NO: 506986 - RNA, 19 nt, Homo sapiens
  misc_RNA (1)...(19): siRNA sense strand
ccuguagccuggacaagag

SEQ ID NO: 506987 - RNA, 19 nt, Homo sapiens
  misc_RNA (1)...(19): siRNA sense strand
cuccgaaucuucugaugca

SEQ ID NO: 506988 - RNA, 19 nt, Homo sapiens
  misc_RNA (1)...(19): siRNA sense strand
gcacccgaacuucugugaa

SEQ ID NO: 506989 - RNA, 19 nt, Homo sapiens
  misc_RNA (1)...(19): siRNA sense strand
cagauaccccuaugaauau

SEQ ID NO: 506990 - RNA, 19 nt, Homo sapiens
  misc_RNA (1)...(19): siRNA sense strand
uacagacaguagacggaaa

SEQ ID NO: 506991 - RNA, 19 nt, Homo sapiens
  misc_RNA (1)...(19): siRNA sense strand
gaccaccgagagcugauug

SEQ ID NO: 506992 - RNA, 19 nt, Homo sapiens
  misc_RNA (1)...(19): siRNA sense strand
ccugaaaggcggcuacaag

SEQ ID NO: 506993 - RNA, 19 nt, Homo sapiens
  misc_RNA (1)...(19): siRNA sense strand
acaagagagucauccucau

SEQ ID NO: 506994 - RNA, 19 nt, Homo sapiens
  misc_RNA (1)...(19): siRNA sense strand
caccaagaccucaaguaca

SEQ ID NO: 506995 - RNA, 19 nt, Homo sapiens
  misc_RNA (1)...(19): siRNA sense strand
uaaagaccuuccgccucaa

SEQ ID NO: 506996 - RNA, 19 nt, Homo sapiens
  misc_RNA (1)...(19): siRNA sense strand
ggaggcugaggaaccuaaa

SEQ ID NO: 506997 - RNA, 19 nt, Homo sapiens
  misc_RNA (1)...(19): siRNA sense strand
ccgagagcuuccuacugaa

SEQ ID NO: 506998 - RNA, 19 nt, Homo sapiens
  misc_RNA (1)...(19): siRNA sense strand
cgagagcugauuggagauu

SEQ ID NO: 506999 - RNA, 19 nt, Homo sapiens
  misc_RNA (1)...(19): siRNA sense strand
ugaggaagaugauggauuu

SEQ ID NO: 507000 - RNA, 19 nt, Homo sapiens
  misc_RNA (1)...(19): siRNA sense strand
gccgagagcuuccuacuga

SEQ ID NO: 507001 - RNA, 19 nt, Homo sapiens
  misc_RNA (1)...(19): siRNA sense strand
ggaagaugauggauuugug

SEQ ID NO: 507002 - RNA, 19 nt, Homo sapiens
  misc_RNA (1)...(19): siRNA sense strand
caacaucguggauaaguuu

SEQ ID NO: 507003 - RNA, 19 nt, Homo sapiens
  misc_RNA (1)...(19): siRNA sense strand
gcagauaccccuaugaaua

SEQ ID NO: 507004 - RNA, 19 nt, Homo sapiens
  misc_RNA (1)...(19): siRNA sense strand
cuaggucgcuucucucuga

SEQ ID NO: 507005 - RNA, 19 nt, Homo sapiens
  misc_RNA (1)...(19): siRNA sense strand
gagagcugauuggagauua

SEQ ID NO: 507006 - RNA, 19 nt, Homo sapiens
  misc_RNA (1)...(19): siRNA sense strand
ucagcaacaucguggauaa

SEQ ID NO: 507007 - RNA, 19 nt, Homo sapiens
  misc_RNA (1)...(19): siRNA sense strand
gcaacaucguggauaaguu

SEQ ID NO: 507008 - RNA, 19 nt, Homo sapiens
  misc_RNA (1)...(19): siRNA sense strand
ggauaaguuugugauugua

SEQ ID NO: 507009 - RNA, 19 nt, Homo sapiens
  misc_RNA (1)...(19): siRNA sense strand
aaaaggaccucgucaugua

SEQ ID NO: 507010 - RNA, 19 nt, Homo sapiens
  misc_RNA (1)...(19): siRNA sense strand
ugagauguauauccugaaa

SEQ ID NO: 507011 - RNA, 19 nt, Homo sapiens
  misc_RNA (1)...(19): siRNA sense strand
caagagagucauccucauu

SEQ ID NO: 507012 - RNA, 19 nt, Homo sapiens
  misc_RNA (1)...(19): siRNA sense strand
gauuggagauuacucuaag

SEQ ID NO: 507013 - RNA, 19 nt, Homo sapiens
  misc_RNA (1)...(19): siRNA sense strand
guggauaaguuugugauug

SEQ ID NO: 507014 - RNA, 19 nt, Homo sapiens
  misc_RNA (1)...(19): siRNA sense strand
gaacgagaccgugcuguca

SEQ ID NO: 507015 - RNA, 19 nt, Homo sapiens
  misc_RNA (1)...(19): siRNA sense strand
gcaccaagaccucaaguac

SEQ ID NO: 507016 - RNA, 19 nt, Homo sapiens
  misc_RNA (1)...(19): siRNA sense strand
cuacuacccugagauguau

SEQ ID NO: 507017 - RNA, 19 nt, Homo sapiens
  misc_RNA (1)...(19): siRNA sense strand
ggaagccuuugcccagaga

SEQ ID NO: 507018 - RNA, 19 nt, Homo sapiens
  misc_RNA (1)...(19): siRNA sense strand
aaguacaucucaccagaaa

SEQ ID NO: 507019 - RNA, 19 nt, Homo sapiens
  misc_RNA (1)...(19): siRNA sense strand
aaaggaugaugaugcaguu

SEQ ID NO: 507020 - RNA, 19 nt, Homo sapiens
  misc_RNA (1)...(19): siRNA sense strand
uggauaaguuugugauugu

SEQ ID NO: 507021 - RNA, 19 nt, Homo sapiens
  misc_RNA (1)...(19): siRNA sense strand
gcagccagccggaucauuc

SEQ ID NO: 507022 - RNA, 19 nt, Homo sapiens
  misc_RNA (1)...(19): siRNA sense strand
cauccuagagagugacuua

SEQ ID NO: 507023 - RNA, 19 nt, Homo sapiens
  misc_RNA (1)...(19): siRNA sense strand
aggaugagcuaaagaccuu

SEQ ID NO: 507024 - RNA, 19 nt, Homo sapiens
  misc_RNA (1)...(19): siRNA sense strand
agagugacuuaaaggauga

SEQ ID NO: 507025 - RNA, 19 nt, Homo sapiens
  misc_RNA (1)...(19): siRNA sense strand
aauccucccugucgucuga

SEQ ID NO: 507026 - RNA, 19 nt, Homo sapiens
  misc_RNA (1)...(19): siRNA sense strand
gaaagcaccaagaccucaa

SEQ ID NO: 507027 - RNA, 19 nt, Homo sapiens
  misc_RNA (1)...(19): siRNA sense strand
ccuagagagugacuuaaag

SEQ ID NO: 507028 - RNA, 19 nt, Homo sapiens
  misc_RNA (1)...(19): siRNA sense strand
ggaaaaggaccucgucaug

SEQ ID NO: 507029 - RNA, 19 nt, Homo sapiens
  misc_RNA (1)...(19): siRNA sense strand
ucuacuacccugagaugua

SEQ ID NO: 507030 - RNA, 19 nt, Homo sapiens
  misc_RNA (1)...(19): siRNA sense strand
gauuguagacugcagauac

SEQ ID NO: 507031 - RNA, 19 nt, Homo sapiens
  misc_RNA (1)...(19): siRNA sense strand
accaagaccucaaguacau

SEQ ID NO: 507032 - RNA, 19 nt, Homo sapiens
  misc_RNA (1)...(19): siRNA sense strand
ccagccggaucauucgaaa

SEQ ID NO: 507033 - RNA, 19 nt, Homo sapiens
  misc_RNA (1)...(19): siRNA sense strand
gaaccacgaggccuucaag

SEQ ID NO: 507034 - RNA, 19 nt, Homo sapiens
  misc_RNA (1)...(19): siRNA sense strand
aagagagucauccucauuu

SEQ ID NO: 507035 - RNA, 19 nt, Homo sapiens
  misc_RNA (1)...(19): siRNA sense strand
cuuaaaggaugaugaugca

SEQ ID NO: 507036 - RNA, 19 nt, Homo sapiens
  misc_RNA (1)...(19): siRNA sense strand
gcaggaggcugaggaaccu

SEQ ID NO: 507037 - RNA, 19 nt, Homo sapiens
  misc_RNA (1)...(19): siRNA sense strand
uggcggagcagacguuuga

SEQ ID NO: 507038 - RNA, 19 nt, Homo sapiens
  misc_RNA (1)...(19): siRNA sense strand
gggauacugaggaagauga

SEQ ID NO: 507039 - RNA, 19 nt, Homo sapiens
  misc_RNA (1)...(19): siRNA sense strand
gaaaaggaccucgucaugu

SEQ ID NO: 507040 - RNA, 19 nt, Homo sapiens
  misc_RNA (1)...(19): siRNA sense strand
acugugaauucucaucuga

SEQ ID NO: 507041 - RNA, 19 nt, Homo sapiens
  misc_RNA (1)...(19): siRNA sense strand
guacaucucaccagaaacg

SEQ ID NO: 507042 - RNA, 19 nt, Homo sapiens
  misc_RNA (1)...(19): siRNA sense strand
caaguacaucucaccagaa

SEQ ID NO: 507043 - RNA, 19 nt, Homo sapiens
  misc_RNA (1)...(19): siRNA sense strand
ggcccuaggucgcuucucu

SEQ ID NO: 507044 - RNA, 19 nt, Homo sapiens
  misc_RNA (1)...(19): siRNA sense strand
agauguauauccugaaagg

SEQ ID NO: 507045 - RNA, 19 nt, Homo sapiens
  misc_RNA (1)...(19): siRNA sense strand
caucaagacugcggugaac

SEQ ID NO: 507046 - RNA, 19 nt, Homo sapiens
  misc_RNA (1)...(19): siRNA sense strand
ugacuuaaaggaugaugau

SEQ ID NO: 507047 - RNA, 19 nt, Homo sapiens
  misc_RNA (1)...(19): siRNA sense strand
ucaagacugcggugaacuu

SEQ ID NO: 507048 - RNA, 19 nt, Homo sapiens
  misc_RNA (1)...(19): siRNA sense strand
cuucaaggaugagcuaaag

SEQ ID NO: 507049 - RNA, 19 nt, Homo sapiens
  misc_RNA (1)...(19): siRNA sense strand
ugaaaggcggcuacaagga

SEQ ID NO: 507050 - RNA, 19 nt, Homo sapiens
  misc_RNA (1)...(19): siRNA sense strand
agaaccuccuggacaguga

SEQ ID NO: 507051 - RNA, 19 nt, Homo sapiens
  misc_RNA (1)...(19): siRNA sense strand
cacccgaacuucugugaac

SEQ ID NO: 507052 - RNA, 19 nt, Homo sapiens
  misc_RNA (1)...(19): siRNA sense strand
gauaaguuugugauuguag

SEQ ID NO: 507053 - RNA, 19 nt, Homo sapiens
  misc_RNA (1)...(19): siRNA sense strand
caucguggauaaguuugug

SEQ ID NO: 507054 - RNA, 19 nt, Homo sapiens
  misc_RNA (1)...(19): siRNA sense strand
cgagcaguuugccaucaga

SEQ ID NO: 507055 - RNA, 19 nt, Homo sapiens
  misc_RNA (1)...(19): siRNA sense strand
ugauuggagauuacucuaa

SEQ ID NO: 507056 - RNA, 19 nt, Homo sapiens
  misc_RNA (1)...(19): siRNA sense strand
ccuguagccuggacaagag

SEQ ID NO: 507057 - RNA, 19 nt, Homo sapiens
  misc_RNA (1)...(19): siRNA sense strand
cuccgaaucuucugaugca

SEQ ID NO: 507058 - RNA, 19 nt, Homo sapiens
  misc_RNA (1)...(19): siRNA sense strand
gcacccgaacuucugugaa

SEQ ID NO: 507059 - RNA, 19 nt, Homo sapiens
  misc_RNA (1)...(19): siRNA sense strand
cagauaccccuaugaauau

SEQ ID NO: 507060 - RNA, 19 nt, Homo sapiens
  misc_RNA (1)...(19): siRNA sense strand
uacagacaguagacggaaa

SEQ ID NO: 507061 - RNA, 19 nt, Homo sapiens
  misc_RNA (1)...(19): siRNA sense strand
gaccaccgagagcugauug

SEQ ID NO: 507062 - RNA, 19 nt, Homo sapiens
  misc_RNA (1)...(19): siRNA sense strand
ccugaaaggcggcuacaag

SEQ ID NO: 507063 - RNA, 19 nt, Homo sapiens
  misc_RNA (1)...(19): siRNA sense strand
acaagagagucauccucau

SEQ ID NO: 507064 - RNA, 19 nt, Homo sapiens
  misc_RNA (1)...(19): siRNA sense strand
caccaagaccucaaguaca

SEQ ID NO: 507065 - RNA, 19 nt, Homo sapiens
  misc_RNA (1)...(19): siRNA sense strand
uaaagaccuuccgccucaa

SEQ ID NO: 507066 - RNA, 19 nt, Homo sapiens
  misc_RNA (1)...(19): siRNA sense strand
ggaggcugaggaaccuaaa

SEQ ID NO: 507067 - RNA, 19 nt, Homo sapiens
  misc_RNA (1)...(19): siRNA sense strand
ccgagagcuuccuacugaa

SEQ ID NO: 507068 - RNA, 19 nt, Homo sapiens
  misc_RNA (1)...(19): siRNA sense strand
cgagagcugauuggagauu

SEQ ID NO: 507069 - RNA, 19 nt, Homo sapiens
  misc_RNA (1)...(19): siRNA sense strand
ugaggaagaugauggauuu

SEQ ID NO: 507070 - RNA, 19 nt, Homo sapiens
  misc_RNA (1)...(19): siRNA sense strand
gccgagagcuuccuacuga

SEQ ID NO: 507071 - RNA, 19 nt, Homo sapiens
  misc_RNA (1)...(19): siRNA sense strand
ggaagaugauggauuugug

SEQ ID NO: 507072 - RNA, 19 nt, Homo sapiens
  misc_RNA (1)...(19): siRNA sense strand
caacaucguggauaaguuu

SEQ ID NO: 507073 - RNA, 19 nt, Homo sapiens
  misc_RNA (1)...(19): siRNA sense strand
gcagauaccccuaugaaua

SEQ ID NO: 507074 - RNA, 19 nt, Homo sapiens
  misc_RNA (1)...(19): siRNA sense strand
cuaggucgcuucucucuga

SEQ ID NO: 507075 - RNA, 19 nt, Homo sapiens
  misc_RNA (1)...(19): siRNA sense strand
gagagcugauuggagauua

SEQ ID NO: 507076 - RNA, 19 nt, Homo sapiens
  misc_RNA (1)...(19): siRNA sense strand
ucagcaacaucguggauaa

SEQ ID NO: 507077 - RNA, 19 nt, Homo sapiens
  misc_RNA (1)...(19): siRNA sense strand
gcaacaucguggauaaguu

SEQ ID NO: 507078 - RNA, 19 nt, Homo sapiens
  misc_RNA (1)...(19): siRNA sense strand
ggauaaguuugugauugua

SEQ ID NO: 507079 - RNA, 19 nt, Homo sapiens
  misc_RNA (1)...(19): siRNA sense strand
aaaaggaccucgucaugua

SEQ ID NO: 507080 - RNA, 19 nt, Homo sapiens
  misc_RNA (1)...(19): siRNA sense strand
ugagauguauauccugaaa

SEQ ID NO: 507081 - RNA, 19 nt, Homo sapiens
  misc_RNA (1)...(19): siRNA sense strand
caagagagucauccucauu

SEQ ID NO: 507082 - RNA, 19 nt, Homo sapiens
  misc_RNA (1)...(19): siRNA sense strand
gauuggagauuacucuaag

SEQ ID NO: 507083 - RNA, 19 nt, Homo sapiens
  misc_RNA (1)...(19): siRNA sense strand
guggauaaguuugugauug

SEQ ID NO: 507084 - RNA, 19 nt, Homo sapiens
  misc_RNA (1)...(19): siRNA sense strand
gaacgagaccgugcuguca

SEQ ID NO: 507085 - RNA, 19 nt, Homo sapiens
  misc_RNA (1)...(19): siRNA sense strand
gcaccaagaccucaaguac

SEQ ID NO: 507086 - RNA, 19 nt, Homo sapiens
  misc_RNA (1)...(19): siRNA sense strand
cuacuacccugagauguau

SEQ ID NO: 507087 - RNA, 19 nt, Homo sapiens
  misc_RNA (1)...(19): siRNA sense strand
ggaagccuuugcccagaga

SEQ ID NO: 507088 - RNA, 19 nt, Homo sapiens
  misc_RNA (1)...(19): siRNA sense strand
aaguacaucucaccagaaa

SEQ ID NO: 507089 - RNA, 19 nt, Homo sapiens
  misc_RNA (1)...(19): siRNA sense strand
aaaggaugaugaugcaguu

SEQ ID NO: 507090 - RNA, 19 nt, Homo sapiens
  misc_RNA (1)...(19): siRNA sense strand
uggauaaguuugugauugu

SEQ ID NO: 507091 - RNA, 19 nt, Homo sapiens
  misc_RNA (1)...(19): siRNA sense strand
gcagccagccggaucauuc

SEQ ID NO: 507092 - RNA, 19 nt, Homo sapiens
  misc_RNA (1)...(19): siRNA sense strand
cauccuagagagugacuua

SEQ ID NO: 507093 - RNA, 19 nt, Homo sapiens
  misc_RNA (1)...(19): siRNA sense strand
aggaugagcuaaagaccuu

SEQ ID NO: 507094 - RNA, 19 nt, Homo sapiens
  misc_RNA (1)...(19): siRNA sense strand
agagugacuuaaaggauga

SEQ ID NO: 507095 - RNA, 19 nt, Homo sapiens
  misc_RNA (1)...(19): siRNA sense strand
aauccucccugucgucuga

SEQ ID NO: 507096 - RNA, 19 nt, Homo sapiens
  misc_RNA (1)...(19): siRNA sense strand
gaaagcaccaagaccucaa

SEQ ID NO: 507097 - RNA, 19 nt, Homo sapiens
  misc_RNA (1)...(19): siRNA sense strand
ccuagagagugacuuaaag

SEQ ID NO: 507098 - RNA, 19 nt, Homo sapiens
  misc_RNA (1)...(19): siRNA sense strand
ggaaaaggaccucgucaug

SEQ ID NO: 507099 - RNA, 19 nt, Homo sapiens
  misc_RNA (1)...(19): siRNA sense strand
ucuacuacccugagaugua

SEQ ID NO: 507100 - RNA, 19 nt, Homo sapiens
  misc_RNA (1)...(19): siRNA sense strand
gauuguagacugcagauac

SEQ ID NO: 507101 - RNA, 19 nt, Homo sapiens
  misc_RNA (1)...(19): siRNA sense strand
accaagaccucaaguacau

SEQ ID NO: 507102 - RNA, 19 nt, Homo sapiens
  misc_RNA (1)...(19): siRNA sense strand
ccagccggaucauucgaaa

SEQ ID NO: 507103 - RNA, 19 nt, Homo sapiens
  misc_RNA (1)...(19): siRNA sense strand
gaaccacgaggccuucaag

SEQ ID NO: 507104 - RNA, 19 nt, Homo sapiens
  misc_RNA (1)...(19): siRNA sense strand
aagagagucauccucauuu

SEQ ID NO: 507105 - RNA, 19 nt, Homo sapiens
  misc_RNA (1)...(19): siRNA sense strand
cuuaaaggaugaugaugca

SEQ ID NO: 507106 - RNA, 19 nt, Homo sapiens
  misc_RNA (1)...(19): siRNA sense strand
gcaggaggcugaggaaccu

SEQ ID NO: 507107 - RNA, 19 nt, Homo sapiens
  misc_RNA (1)...(19): siRNA sense strand
uggcggagcagacguuuga

SEQ ID NO: 507108 - RNA, 19 nt, Homo sapiens
  misc_RNA (1)...(19): siRNA sense strand
gggauacugaggaagauga

SEQ ID NO: 507109 - RNA, 19 nt, Homo sapiens
  misc_RNA (1)...(19): siRNA sense strand
gaaaaggaccucgucaugu

SEQ ID NO: 507110 - RNA, 19 nt, Homo sapiens
  misc_RNA (1)...(19): siRNA sense strand
acugugaauucucaucuga

SEQ ID NO: 507111 - RNA, 19 nt, Homo sapiens
  misc_RNA (1)...(19): siRNA sense strand
guacaucucaccagaaacg

SEQ ID NO: 507112 - RNA, 19 nt, Homo sapiens
  misc_RNA (1)...(19): siRNA sense strand
caaguacaucucaccagaa

SEQ ID NO: 507113 - RNA, 19 nt, Homo sapiens
  misc_RNA (1)...(19): siRNA sense strand
ggcccuaggucgcuucucu

SEQ ID NO: 507114 - RNA, 19 nt, Homo sapiens
  misc_RNA (1)...(19): siRNA sense strand
agauguauauccugaaagg

SEQ ID NO: 507115 - RNA, 19 nt, Homo sapiens
  misc_RNA (1)...(19): siRNA sense strand
caucaagacugcggugaac

SEQ ID NO: 507116 - RNA, 19 nt, Homo sapiens
  misc_RNA (1)...(19): siRNA sense strand
ugacuuaaaggaugaugau

SEQ ID NO: 507117 - RNA, 19 nt, Homo sapiens
  misc_RNA (1)...(19): siRNA sense strand
ucaagacugcggugaacuu

SEQ ID NO: 507118 - RNA, 19 nt, Homo sapiens
  misc_RNA (1)...(19): siRNA sense strand
cuucaaggaugagcuaaag

SEQ ID NO: 507119 - RNA, 19 nt, Homo sapiens
  misc_RNA (1)...(19): siRNA sense strand
ugaaaggcggcuacaagga

SEQ ID NO: 507120 - RNA, 19 nt, Homo sapiens
  misc_RNA (1)...(19): siRNA sense strand
agaaccuccuggacaguga

SEQ ID NO: 507121 - RNA, 19 nt, Homo sapiens
  misc_RNA (1)...(19): siRNA sense strand
cacccgaacuucugugaac

SEQ ID NO: 507122 - RNA, 19 nt, Homo sapiens
  misc_RNA (1)...(19): siRNA sense strand
gauaaguuugugauuguag

SEQ ID NO: 507123 - RNA, 19 nt, Homo sapiens
  misc_RNA (1)...(19): siRNA sense strand
caucguggauaaguuugug

SEQ ID NO: 507124 - RNA, 19 nt, Homo sapiens
  misc_RNA (1)...(19): siRNA sense strand
cgagcaguuugccaucaga

SEQ ID NO: 507125 - RNA, 19 nt, Homo sapiens
  misc_RNA (1)...(19): siRNA sense strand
ugauuggagauuacucuaa

SEQ ID NO: 507126 - RNA, 19 nt, Homo sapiens
  misc_RNA (1)...(19): siRNA sense strand
ccuguagccuggacaagag

SEQ ID NO: 507127 - RNA, 19 nt, Homo sapiens
  misc_RNA (1)...(19): siRNA sense strand
cuccgaaucuucugaugca

SEQ ID NO: 507128 - RNA, 19 nt, Homo sapiens
  misc_RNA (1)...(19): siRNA sense strand
gcacccgaacuucugugaa

SEQ ID NO: 507129 - RNA, 19 nt, Homo sapiens
  misc_RNA (1)...(19): siRNA sense strand
cagauaccccuaugaauau

SEQ ID NO: 507130 - RNA, 19 nt, Homo sapiens
  misc_RNA (1)...(19): siRNA sense strand
uacagacaguagacggaaa

SEQ ID NO: 507131 - RNA, 19 nt, Homo sapiens
  misc_RNA (1)...(19): siRNA sense strand
gaccaccgagagcugauug

SEQ ID NO: 507132 - RNA, 19 nt, Homo sapiens
  misc_RNA (1)...(19): siRNA sense strand
ccugaaaggcggcuacaag

SEQ ID NO: 507133 - RNA, 19 nt, Homo sapiens
  misc_RNA (1)...(19): siRNA sense strand
acaagagagucauccucau

SEQ ID NO: 507134 - RNA, 19 nt, Homo sapiens
  misc_RNA (1)...(19): siRNA sense strand
caccaagaccucaaguaca

SEQ ID NO: 507135 - RNA, 19 nt, Homo sapiens
  misc_RNA (1)...(19): siRNA sense strand
uaaagaccuuccgccucaa

SEQ ID NO: 507136 - RNA, 19 nt, Homo sapiens
  misc_RNA (1)...(19): siRNA sense strand
ggaggcugaggaaccuaaa

SEQ ID NO: 507137 - RNA, 19 nt, Homo sapiens
  misc_RNA (1)...(19): siRNA sense strand
ccgagagcuuccuacugaa

SEQ ID NO: 507138 - RNA, 19 nt, Homo sapiens
  misc_RNA (1)...(19): siRNA sense strand
cgagagcugauuggagauu

SEQ ID NO: 507139 - RNA, 19 nt, Homo sapiens
  misc_RNA (1)...(19): siRNA sense strand
ugaggaagaugauggauuu

SEQ ID NO: 507140 - RNA, 19 nt, Homo sapiens
  misc_RNA (1)...(19): siRNA sense strand
gccgagagcuuccuacuga

SEQ ID NO: 507141 - RNA, 19 nt, Homo sapiens
  misc_RNA (1)...(19): siRNA sense strand
ggaagaugauggauuugug

SEQ ID NO: 507142 - RNA, 19 nt, Homo sapiens
  misc_RNA (1)...(19): siRNA sense strand
caacaucguggauaaguuu

SEQ ID NO: 507143 - RNA, 19 nt, Homo sapiens
  misc_RNA (1)...(19): siRNA sense strand
gcagauaccccuaugaaua

SEQ ID NO: 507144 - RNA, 19 nt, Homo sapiens
  misc_RNA (1)...(19): siRNA sense strand
cuaggucgcuucucucuga

SEQ ID NO: 507145 - RNA, 19 nt, Homo sapiens
  misc_RNA (1)...(19): siRNA sense strand
gagagcugauuggagauua

SEQ ID NO: 507146 - RNA, 19 nt, Homo sapiens
  misc_RNA (1)...(19): siRNA sense strand
ucagcaacaucguggauaa

SEQ ID NO: 507147 - RNA, 19 nt, Homo sapiens
  misc_RNA (1)...(19): siRNA sense strand
gcaacaucguggauaaguu

SEQ ID NO: 507148 - RNA, 19 nt, Homo sapiens
  misc_RNA (1)...(19): siRNA sense strand
ggauaaguuugugauugua

SEQ ID NO: 507149 - RNA, 19 nt, Homo sapiens
  misc_RNA (1)...(19): siRNA sense strand
aaaaggaccucgucaugua

SEQ ID NO: 507150 - RNA, 19 nt, Homo sapiens
  misc_RNA (1)...(19): siRNA sense strand
ugagauguauauccugaaa

SEQ ID NO: 507151 - RNA, 19 nt, Homo sapiens
  misc_RNA (1)...(19): siRNA sense strand
caagagagucauccucauu

SEQ ID NO: 507152 - RNA, 19 nt, Homo sapiens
  misc_RNA (1)...(19): siRNA sense strand
gauuggagauuacucuaag

SEQ ID NO: 507153 - RNA, 19 nt, Homo sapiens
  misc_RNA (1)...(19): siRNA sense strand
guggauaaguuugugauug

SEQ ID NO: 507154 - RNA, 19 nt, Homo sapiens
  misc_RNA (1)...(19): siRNA sense strand
gaacgagaccgugcuguca

SEQ ID NO: 507155 - RNA, 19 nt, Homo sapiens
  misc_RNA (1)...(19): siRNA sense strand
gcaccaagaccucaaguac

SEQ ID NO: 507156 - RNA, 19 nt, Homo sapiens
  misc_RNA (1)...(19): siRNA sense strand
cuacuacccugagauguau

SEQ ID NO: 507157 - RNA, 19 nt, Homo sapiens
  misc_RNA (1)...(19): siRNA sense strand
ggaagccuuugcccagaga

SEQ ID NO: 507158 - RNA, 19 nt, Homo sapiens
  misc_RNA (1)...(19): siRNA sense strand
aaguacaucucaccagaaa

SEQ ID NO: 507159 - RNA, 19 nt, Homo sapiens
  misc_RNA (1)...(19): siRNA sense strand
aaaggaugaugaugcaguu

SEQ ID NO: 507160 - RNA, 19 nt, Homo sapiens
  misc_RNA (1)...(19): siRNA sense strand
uggauaaguuugugauugu

SEQ ID NO: 507161 - RNA, 19 nt, Homo sapiens
  misc_RNA (1)...(19): siRNA sense strand
gcagccagccggaucauuc

SEQ ID NO: 507162 - RNA, 19 nt, Homo sapiens
  misc_RNA (1)...(19): siRNA sense strand
cauccuagagagugacuua

SEQ ID NO: 507163 - RNA, 19 nt, Homo sapiens
  misc_RNA (1)...(19): siRNA sense strand
aggaugagcuaaagaccuu

SEQ ID NO: 507164 - RNA, 19 nt, Homo sapiens
  misc_RNA (1)...(19): siRNA sense strand
agagugacuuaaaggauga

SEQ ID NO: 507165 - RNA, 19 nt, Homo sapiens
  misc_RNA (1)...(19): siRNA sense strand
aauccucccugucgucuga

SEQ ID NO: 507166 - RNA, 19 nt, Homo sapiens
  misc_RNA (1)...(19): siRNA sense strand
gaaagcaccaagaccucaa

SEQ ID NO: 507167 - RNA, 19 nt, Homo sapiens
  misc_RNA (1)...(19): siRNA sense strand
ccuagagagugacuuaaag

SEQ ID NO: 507168 - RNA, 19 nt, Homo sapiens
  misc_RNA (1)...(19): siRNA sense strand
ggaaaaggaccucgucaug

SEQ ID NO: 507169 - RNA, 19 nt, Homo sapiens
  misc_RNA (1)...(19): siRNA sense strand
ucuacuacccugagaugua

SEQ ID NO: 507170 - RNA, 19 nt, Homo sapiens
  misc_RNA (1)...(19): siRNA sense strand
gauuguagacugcagauac

SEQ ID NO: 507171 - RNA, 19 nt, Homo sapiens
  misc_RNA (1)...(19): siRNA sense strand
accaagaccucaaguacau

SEQ ID NO: 507172 - RNA, 19 nt, Homo sapiens
  misc_RNA (1)...(19): siRNA sense strand
ccagccggaucauucgaaa

SEQ ID NO: 507173 - RNA, 19 nt, Homo sapiens
  misc_RNA (1)...(19): siRNA sense strand
gaaccacgaggccuucaag

SEQ ID NO: 507174 - RNA, 19 nt, Homo sapiens
  misc_RNA (1)...(19): siRNA sense strand
aagagagucauccucauuu

SEQ ID NO: 507175 - RNA, 19 nt, Homo sapiens
  misc_RNA (1)...(19): siRNA sense strand
cuuaaaggaugaugaugca

SEQ ID NO: 507176 - RNA, 19 nt, Homo sapiens
  misc_RNA (1)...(19): siRNA sense strand
gcaggaggcugaggaaccu

SEQ ID NO: 507177 - RNA, 19 nt, Homo sapiens
  misc_RNA (1)...(19): siRNA sense strand
uggcggagcagacguuuga

SEQ ID NO: 507178 - RNA, 19 nt, Homo sapiens
  misc_RNA (1)...(19): siRNA sense strand
gggauacugaggaagauga

SEQ ID NO: 507179 - RNA, 19 nt, Homo sapiens
  misc_RNA (1)...(19): siRNA sense strand
gaaaaggaccucgucaugu

SEQ ID NO: 507180 - RNA, 19 nt, Homo sapiens
  misc_RNA (1)...(19): siRNA sense strand
acugugaauucucaucuga

SEQ ID NO: 507181 - RNA, 19 nt, Homo sapiens
  misc_RNA (1)...(19): siRNA sense strand
guacaucucaccagaaacg

SEQ ID NO: 507182 - RNA, 19 nt, Homo sapiens
  misc_RNA (1)...(19): siRNA sense strand
caaguacaucucaccagaa

SEQ ID NO: 507183 - RNA, 19 nt, Homo sapiens
  misc_RNA (1)...(19): siRNA sense strand
ggcccuaggucgcuucucu

SEQ ID NO: 507184 - RNA, 19 nt, Homo sapiens
  misc_RNA (1)...(19): siRNA sense strand
agauguauauccugaaagg

SEQ ID NO: 507185 - RNA, 19 nt, Homo sapiens
  misc_RNA (1)...(19): siRNA sense strand
caucaagacugcggugaac

SEQ ID NO: 507186 - RNA, 19 nt, Homo sapiens
  misc_RNA (1)...(19): siRNA sense strand
ugacuuaaaggaugaugau

SEQ ID NO: 507187 - RNA, 19 nt, Homo sapiens
  misc_RNA (1)...(19): siRNA sense strand
ucaagacugcggugaacuu

SEQ ID NO: 507188 - RNA, 19 nt, Homo sapiens
  misc_RNA (1)...(19): siRNA sense strand
cuucaaggaugagcuaaag

SEQ ID NO: 507189 - RNA, 19 nt, Homo sapiens
  misc_RNA (1)...(19): siRNA sense strand
ugaaaggcggcuacaagga

SEQ ID NO: 507190 - RNA, 19 nt, Homo sapiens
  misc_RNA (1)...(19): siRNA sense strand
agaaccuccuggacaguga

SEQ ID NO: 507191 - RNA, 19 nt, Homo sapiens
  misc_RNA (1)...(19): siRNA sense strand
cacccgaacuucugugaac

SEQ ID NO: 507192 - RNA, 19 nt, Homo sapiens
  misc_RNA (1)...(19): siRNA sense strand
gauaaguuugugauuguag

SEQ ID NO: 507193 - RNA, 19 nt, Homo sapiens
  misc_RNA (1)...(19): siRNA sense strand
caucguggauaaguuugug

SEQ ID NO: 507194 - RNA, 19 nt, Homo sapiens
  misc_RNA (1)...(19): siRNA sense strand
cgagcaguuugccaucaga

SEQ ID NO: 507195 - RNA, 19 nt, Homo sapiens
  misc_RNA (1)...(19): siRNA sense strand
ugauuggagauuacucuaa

SEQ ID NO: 507196 - RNA, 19 nt, Homo sapiens
  misc_RNA (1)...(19): siRNA sense strand
ccuguagccuggacaagag

SEQ ID NO: 507197 - RNA, 19 nt, Homo sapiens
  misc_RNA (1)...(19): siRNA sense strand
cuccgaaucuucugaugca

SEQ ID NO: 507198 - RNA, 19 nt, Homo sapiens
  misc_RNA (1)...(19): siRNA sense strand
gcacccgaacuucugugaa

SEQ ID NO: 507199 - RNA, 19 nt, Homo sapiens
  misc_RNA (1)...(19): siRNA sense strand
cagauaccccuaugaauau

SEQ ID NO: 507200 - RNA, 19 nt, Homo sapiens
  misc_RNA (1)...(19): siRNA sense strand
uacagacaguagacggaaa

SEQ ID NO: 507201 - RNA, 19 nt, Homo sapiens
  misc_RNA (1)...(19): siRNA sense strand
gaccaccgagagcugauug

SEQ ID NO: 507202 - RNA, 19 nt, Homo sapiens
  misc_RNA (1)...(19): siRNA sense strand
ccugaaaggcggcuacaag

SEQ ID NO: 507203 - RNA, 19 nt, Homo sapiens
  misc_RNA (1)...(19): siRNA sense strand
acaagagagucauccucau

SEQ ID NO: 507204 - RNA, 19 nt, Homo sapiens
  misc_RNA (1)...(19): siRNA sense strand
caccaagaccucaaguaca

SEQ ID NO: 507205 - RNA, 19 nt, Homo sapiens
  misc_RNA (1)...(19): siRNA sense strand
uaaagaccuuccgccucaa

SEQ ID NO: 507206 - RNA, 19 nt, Homo sapiens
  misc_RNA (1)...(19): siRNA sense strand
ggaggcugaggaaccuaaa

SEQ ID NO: 507207 - RNA, 19 nt, Homo sapiens
  misc_RNA (1)...(19): siRNA sense strand
ccgagagcuuccuacugaa

SEQ ID NO: 507208 - RNA, 19 nt, Homo sapiens
  misc_RNA (1)...(19): siRNA sense strand
cgagagcugauuggagauu

SEQ ID NO: 507209 - RNA, 19 nt, Homo sapiens
  misc_RNA (1)...(19): siRNA sense strand
ugaggaagaugauggauuu

SEQ ID NO: 507210 - RNA, 19 nt, Homo sapiens
  misc_RNA (1)...(19): siRNA sense strand
gccgagagcuuccuacuga

SEQ ID NO: 507211 - RNA, 19 nt, Homo sapiens
  misc_RNA (1)...(19): siRNA sense strand
ggaagaugauggauuugug

SEQ ID NO: 507212 - RNA, 19 nt, Homo sapiens
  misc_RNA (1)...(19): siRNA sense strand
caacaucguggauaaguuu

SEQ ID NO: 507213 - RNA, 19 nt, Homo sapiens
  misc_RNA (1)...(19): siRNA sense strand
gcagauaccccuaugaaua

SEQ ID NO: 507214 - RNA, 19 nt, Homo sapiens
  misc_RNA (1)...(19): siRNA sense strand
cuaggucgcuucucucuga

SEQ ID NO: 507215 - RNA, 19 nt, Homo sapiens
  misc_RNA (1)...(19): siRNA sense strand
gagagcugauuggagauua

SEQ ID NO: 507216 - RNA, 19 nt, Homo sapiens
  misc_RNA (1)...(19): siRNA sense strand
ucagcaacaucguggauaa

SEQ ID NO: 507217 - RNA, 19 nt, Homo sapiens
  misc_RNA (1)...(19): siRNA sense strand
gcaacaucguggauaaguu

SEQ ID NO: 507218 - RNA, 19 nt, Homo sapiens
  misc_RNA (1)...(19): siRNA sense strand
ggauaaguuugugauugua

SEQ ID NO: 507219 - RNA, 19 nt, Homo sapiens
  misc_RNA (1)...(19): siRNA sense strand
aaaaggaccucgucaugua

SEQ ID NO: 507220 - RNA, 19 nt, Homo sapiens
  misc_RNA (1)...(19): siRNA sense strand
ugagauguauauccugaaa

SEQ ID NO: 507221 - RNA, 19 nt, Homo sapiens
  misc_RNA (1)...(19): siRNA sense strand
caagagagucauccucauu

SEQ ID NO: 507222 - RNA, 19 nt, Homo sapiens
  misc_RNA (1)...(19): siRNA sense strand
gauuggagauuacucuaag

SEQ ID NO: 507223 - RNA, 19 nt, Homo sapiens
  misc_RNA (1)...(19): siRNA sense strand
guggauaaguuugugauug

SEQ ID NO: 507224 - RNA, 19 nt, Homo sapiens
  misc_RNA (1)...(19): siRNA sense strand
gaacgagaccgugcuguca

SEQ ID NO: 507225 - RNA, 19 nt, Homo sapiens
  misc_RNA (1)...(19): siRNA sense strand
gcaccaagaccucaaguac

SEQ ID NO: 507226 - RNA, 19 nt, Homo sapiens
  misc_RNA (1)...(19): siRNA sense strand
cuacuacccugagauguau

SEQ ID NO: 507227 - RNA, 19 nt, Homo sapiens
  misc_RNA (1)...(19): siRNA sense strand
ggaagccuuugcccagaga

SEQ ID NO: 507228 - RNA, 19 nt, Homo sapiens
  misc_RNA (1)...(19): siRNA sense strand
aaguacaucucaccagaaa

SEQ ID NO: 507229 - RNA, 19 nt, Homo sapiens
  misc_RNA (1)...(19): siRNA sense strand
aaaggaugaugaugcaguu

SEQ ID NO: 507230 - RNA, 19 nt, Homo sapiens
  misc_RNA (1)...(19): siRNA sense strand
uggauaaguuugugauugu

SEQ ID NO: 507231 - RNA, 19 nt, Homo sapiens
  misc_RNA (1)...(19): siRNA sense strand
gcagccagccggaucauuc

SEQ ID NO: 507232 - RNA, 19 nt, Homo sapiens
  misc_RNA (1)...(19): siRNA sense strand
cauccuagagagugacuua

SEQ ID NO: 507233 - RNA, 19 nt, Homo sapiens
  misc_RNA (1)...(19): siRNA sense strand
aggaugagcuaaagaccuu

SEQ ID NO: 507234 - RNA, 19 nt, Homo sapiens
  misc_RNA (1)...(19): siRNA sense strand
agagugacuuaaaggauga

SEQ ID NO: 507235 - RNA, 19 nt, Homo sapiens
  misc_RNA (1)...(19): siRNA sense strand
aauccucccugucgucuga

SEQ ID NO: 507236 - RNA, 19 nt, Homo sapiens
  misc_RNA (1)...(19): siRNA sense strand
gaaagcaccaagaccucaa

SEQ ID NO: 507237 - RNA, 19 nt, Homo sapiens
  misc_RNA (1)...(19): siRNA sense strand
ccuagagagugacuuaaag

SEQ ID NO: 507238 - RNA, 19 nt, Homo sapiens
  misc_RNA (1)...(19): siRNA sense strand
ggaaaaggaccucgucaug

SEQ ID NO: 507239 - RNA, 19 nt, Homo sapiens
  misc_RNA (1)...(19): siRNA sense strand
ucuacuacccugagaugua

SEQ ID NO: 507240 - RNA, 19 nt, Homo sapiens
  misc_RNA (1)...(19): siRNA sense strand
gauuguagacugcagauac

SEQ ID NO: 507241 - RNA, 19 nt, Homo sapiens
  misc_RNA (1)...(19): siRNA sense strand
accaagaccucaaguacau

SEQ ID NO: 507242 - RNA, 19 nt, Homo sapiens
  misc_RNA (1)...(19): siRNA sense strand
ccagccggaucauucgaaa

SEQ ID NO: 507243 - RNA, 19 nt, Homo sapiens
  misc_RNA (1)...(19): siRNA sense strand
gaaccacgaggccuucaag

SEQ ID NO: 507244 - RNA, 19 nt, Homo sapiens
  misc_RNA (1)...(19): siRNA sense strand
aagagagucauccucauuu

SEQ ID NO: 507245 - RNA, 19 nt, Homo sapiens
  misc_RNA (1)...(19): siRNA sense strand
cuuaaaggaugaugaugca

SEQ ID NO: 507246 - RNA, 19 nt, Homo sapiens
  misc_RNA (1)...(19): siRNA sense strand
gcaggaggcugaggaaccu

SEQ ID NO: 507247 - RNA, 19 nt, Homo sapiens
  misc_RNA (1)...(19): siRNA sense strand
uggcggagcagacguuuga

SEQ ID NO: 507248 - RNA, 19 nt, Homo sapiens
  misc_RNA (1)...(19): siRNA sense strand
gggauacugaggaagauga

SEQ ID NO: 507249 - RNA, 19 nt, Homo sapiens
  misc_RNA (1)...(19): siRNA sense strand
gaaaaggaccucgucaugu

SEQ ID NO: 507250 - RNA, 19 nt, Homo sapiens
  misc_RNA (1)...(19): siRNA sense strand
acugugaauucucaucuga

SEQ ID NO: 507251 - RNA, 19 nt, Homo sapiens
  misc_RNA (1)...(19): siRNA sense strand
guacaucucaccagaaacg

SEQ ID NO: 507252 - RNA, 19 nt, Homo sapiens
  misc_RNA (1)...(19): siRNA sense strand
caaguacaucucaccagaa

SEQ ID NO: 507253 - RNA, 19 nt, Homo sapiens
  misc_RNA (1)...(19): siRNA sense strand
ggcccuaggucgcuucucu

SEQ ID NO: 507254 - RNA, 19 nt, Homo sapiens
  misc_RNA (1)...(19): siRNA sense strand
agauguauauccugaaagg

SEQ ID NO: 507255 - RNA, 19 nt, Homo sapiens
  misc_RNA (1)...(19): siRNA sense strand
caucaagacugcggugaac

SEQ ID NO: 507256 - RNA, 19 nt, Homo sapiens
  misc_RNA (1)...(19): siRNA sense strand
ugacuuaaaggaugaugau

SEQ ID NO: 507257 - RNA, 19 nt, Homo sapiens
  misc_RNA (1)...(19): siRNA sense strand
ucaagacugcggugaacuu

SEQ ID NO: 507258 - RNA, 19 nt, Homo sapiens
  misc_RNA (1)...(19): siRNA sense strand
cuucaaggaugagcuaaag

SEQ ID NO: 507259 - RNA, 19 nt, Homo sapiens
  misc_RNA (1)...(19): siRNA sense strand
ugaaaggcggcuacaagga

SEQ ID NO: 507260 - RNA, 19 nt, Homo sapiens
  misc_RNA (1)...(19): siRNA sense strand
agaaccuccuggacaguga

SEQ ID NO: 507261 - RNA, 19 nt, Homo sapiens
  misc_RNA (1)...(19): siRNA sense strand
cacccgaacuucugugaac

SEQ ID NO: 507262 - RNA, 19 nt, Homo sapiens
  misc_RNA (1)...(19): siRNA sense strand
gauaaguuugugauuguag

SEQ ID NO: 507263 - RNA, 19 nt, Homo sapiens
  misc_RNA (1)...(19): siRNA sense strand
caucguggauaaguuugug

SEQ ID NO: 507264 - RNA, 19 nt, Homo sapiens
  misc_RNA (1)...(19): siRNA sense strand
cgagcaguuugccaucaga

SEQ ID NO: 507265 - RNA, 19 nt, Homo sapiens
  misc_RNA (1)...(19): siRNA sense strand
ugauuggagauuacucuaa

SEQ ID NO: 507266 - RNA, 19 nt, Homo sapiens
  misc_RNA (1)...(19): siRNA sense strand
ccuguagccuggacaagag

SEQ ID NO: 507267 - RNA, 19 nt, Homo sapiens
  misc_RNA (1)...(19): siRNA sense strand
cuccgaaucuucugaugca

SEQ ID NO: 507268 - RNA, 19 nt, Homo sapiens
  misc_RNA (1)...(19): siRNA sense strand
gcacccgaacuucugugaa

SEQ ID NO: 507269 - RNA, 19 nt, Homo sapiens
  misc_RNA (1)...(19): siRNA sense strand
cagauaccccuaugaauau

SEQ ID NO: 507270 - RNA, 19 nt, Homo sapiens
  misc_RNA (1)...(19): siRNA sense strand
uacagacaguagacggaaa

SEQ ID NO: 507271 - RNA, 19 nt, Homo sapiens
  misc_RNA (1)...(19): siRNA sense strand
gaccaccgagagcugauug

SEQ ID NO: 507272 - RNA, 19 nt, Homo sapiens
  misc_RNA (1)...(19): siRNA sense strand
ccugaaaggcggcuacaag

SEQ ID NO: 507273 - RNA, 19 nt, Homo sapiens
  misc_RNA (1)...(19): siRNA sense strand
acaagagagucauccucau

SEQ ID NO: 507274 - RNA, 19 nt, Homo sapiens
  misc_RNA (1)...(19): siRNA sense strand
caccaagaccucaaguaca

SEQ ID NO: 507275 - RNA, 19 nt, Homo sapiens
  misc_RNA (1)...(19): siRNA sense strand
uaaagaccuuccgccucaa

SEQ ID NO: 507276 - RNA, 19 nt, Homo sapiens
  misc_RNA (1)...(19): siRNA sense strand
ggaggcugaggaaccuaaa

SEQ ID NO: 507277 - RNA, 19 nt, Homo sapiens
  misc_RNA (1)...(19): siRNA sense strand
ccgagagcuuccuacugaa

SEQ ID NO: 507278 - RNA, 19 nt, Homo sapiens
  misc_RNA (1)...(19): siRNA sense strand
cgagagcugauuggagauu

SEQ ID NO: 507279 - RNA, 19 nt, Homo sapiens
  misc_RNA (1)...(19): siRNA sense strand
ugaggaagaugauggauuu

SEQ ID NO: 507280 - RNA, 19 nt, Homo sapiens
  misc_RNA (1)...(19): siRNA sense strand
gccgagagcuuccuacuga

SEQ ID NO: 507281 - RNA, 19 nt, Homo sapiens
  misc_RNA (1)...(19): siRNA sense strand
ggaagaugauggauuugug

SEQ ID NO: 507282 - RNA, 19 nt, Homo sapiens
  misc_RNA (1)...(19): siRNA sense strand
caacaucguggauaaguuu

SEQ ID NO: 507283 - RNA, 19 nt, Homo sapiens
  misc_RNA (1)...(19): siRNA sense strand
gcagauaccccuaugaaua

SEQ ID NO: 507284 - RNA, 19 nt, Homo sapiens
  misc_RNA (1)...(19): siRNA sense strand
cuaggucgcuucucucuga

SEQ ID NO: 507285 - RNA, 19 nt, Homo sapiens
  misc_RNA (1)...(19): siRNA sense strand
gagagcugauuggagauua

SEQ ID NO: 507286 - RNA, 19 nt, Homo sapiens
  misc_RNA (1)...(19): siRNA sense strand
ucagcaacaucguggauaa

SEQ ID NO: 507287 - RNA, 19 nt, Homo sapiens
  misc_RNA (1)...(19): siRNA sense strand
gcaacaucguggauaaguu

SEQ ID NO: 507288 - RNA, 19 nt, Homo sapiens
  misc_RNA (1)...(19): siRNA sense strand
ggauaaguuugugauugua

SEQ ID NO: 507289 - RNA, 19 nt, Homo sapiens
  misc_RNA (1)...(19): siRNA sense strand
aaaaggaccucgucaugua

SEQ ID NO: 507290 - RNA, 19 nt, Homo sapiens
  misc_RNA (1)...(19): siRNA sense strand
ugagauguauauccugaaa

SEQ ID NO: 507291 - RNA, 19 nt, Homo sapiens
  misc_RNA (1)...(19): siRNA sense strand
caagagagucauccucauu

SEQ ID NO: 507292 - RNA, 19 nt, Homo sapiens
  misc_RNA (1)...(19): siRNA sense strand
gauuggagauuacucuaag

SEQ ID NO: 507293 - RNA, 19 nt, Homo sapiens
  misc_RNA (1)...(19): siRNA sense strand
guggauaaguuugugauug

SEQ ID NO: 507294 - RNA, 19 nt, Homo sapiens
  misc_RNA (1)...(19): siRNA sense strand
gaacgagaccgugcuguca

SEQ ID NO: 507295 - RNA, 19 nt, Homo sapiens
  misc_RNA (1)...(19): siRNA sense strand
gcaccaagaccucaaguac

SEQ ID NO: 507296 - RNA, 19 nt, Homo sapiens
  misc_RNA (1)...(19): siRNA sense strand
cuacuacccugagauguau

SEQ ID NO: 507297 - RNA, 19 nt, Homo sapiens
  misc_RNA (1)...(19): siRNA sense strand
ggaagccuuugcccagaga

SEQ ID NO: 507298 - RNA, 19 nt, Homo sapiens
  misc_RNA (1)...(19): siRNA sense strand
aaguacaucucaccagaaa

SEQ ID NO: 507299 - RNA, 19 nt, Homo sapiens
  misc_RNA (1)...(19): siRNA sense strand
aaaggaugaugaugcaguu

SEQ ID NO: 507300 - RNA, 19 nt, Homo sapiens
  misc_RNA (1)...(19): siRNA sense strand
uggauaaguuugugauugu

SEQ ID NO: 507301 - RNA, 19 nt, Homo sapiens
  misc_RNA (1)...(19): siRNA sense strand
gcagccagccggaucauuc

SEQ ID NO: 507302 - RNA, 19 nt, Homo sapiens
  misc_RNA (1)...(19): siRNA sense strand
cauccuagagagugacuua

SEQ ID NO: 507303 - RNA, 19 nt, Homo sapiens
  misc_RNA (1)...(19): siRNA sense strand
aggaugagcuaaagaccuu

SEQ ID NO: 507304 - RNA, 19 nt, Homo sapiens
  misc_RNA (1)...(19): siRNA sense strand
agagugacuuaaaggauga

SEQ ID NO: 507305 - RNA, 19 nt, Homo sapiens
  misc_RNA (1)...(19): siRNA sense strand
aauccucccugucgucuga

SEQ ID NO: 507306 - RNA, 19 nt, Homo sapiens
  misc_RNA (1)...(19): siRNA sense strand
gaaagcaccaagaccucaa

SEQ ID NO: 507307 - RNA, 19 nt, Homo sapiens
  misc_RNA (1)...(19): siRNA sense strand
ccuagagagugacuuaaag

SEQ ID NO: 507308 - RNA, 19 nt, Homo sapiens
  misc_RNA (1)...(19): siRNA sense strand
ggaaaaggaccucgucaug

SEQ ID NO: 507309 - RNA, 19 nt, Homo sapiens
  misc_RNA (1)...(19): siRNA sense strand
ucuacuacccugagaugua

SEQ ID NO: 507310 - RNA, 19 nt, Homo sapiens
  misc_RNA (1)...(19): siRNA sense strand
gauuguagacugcagauac

SEQ ID NO: 507311 - RNA, 19 nt, Homo sapiens
  misc_RNA (1)...(19): siRNA sense strand
accaagaccucaaguacau

SEQ ID NO: 507312 - RNA, 19 nt, Homo sapiens
  misc_RNA (1)...(19): siRNA sense strand
ccagccggaucauucgaaa

SEQ ID NO: 507313 - RNA, 19 nt, Homo sapiens
  misc_RNA (1)...(19): siRNA sense strand
gaaccacgaggccuucaag

SEQ ID NO: 507314 - RNA, 19 nt, Homo sapiens
  misc_RNA (1)...(19): siRNA sense strand
aagagagucauccucauuu

SEQ ID NO: 507315 - RNA, 19 nt, Homo sapiens
  misc_RNA (1)...(19): siRNA sense strand
cuuaaaggaugaugaugca

SEQ ID NO: 507316 - RNA, 19 nt, Homo sapiens
  misc_RNA (1)...(19): siRNA sense strand
gcaggaggcugaggaaccu

SEQ ID NO: 507317 - RNA, 19 nt, Homo sapiens
  misc_RNA (1)...(19): siRNA sense strand
uggcggagcagacguuuga

SEQ ID NO: 507318 - RNA, 19 nt, Homo sapiens
  misc_RNA (1)...(19): siRNA sense strand
gggauacugaggaagauga

SEQ ID NO: 507319 - RNA, 19 nt, Homo sapiens
  misc_RNA (1)...(19): siRNA sense strand
gaaaaggaccucgucaugu

SEQ ID NO: 507320 - RNA, 19 nt, Homo sapiens
  misc_RNA (1)...(19): siRNA sense strand
acugugaauucucaucuga

SEQ ID NO: 507321 - RNA, 19 nt, Homo sapiens
  misc_RNA (1)...(19): siRNA sense strand
guacaucucaccagaaacg

SEQ ID NO: 507322 - RNA, 19 nt, Homo sapiens
  misc_RNA (1)...(19): siRNA sense strand
caaguacaucucaccagaa

SEQ ID NO: 507323 - RNA, 19 nt, Homo sapiens
  misc_RNA (1)...(19): siRNA sense strand
ggcccuaggucgcuucucu

SEQ ID NO: 507324 - RNA, 19 nt, Homo sapiens
  misc_RNA (1)...(19): siRNA sense strand
agauguauauccugaaagg

SEQ ID NO: 507325 - RNA, 19 nt, Homo sapiens
  misc_RNA (1)...(19): siRNA sense strand
caucaagacugcggugaac

SEQ ID NO: 507326 - RNA, 19 nt, Homo sapiens
  misc_RNA (1)...(19): siRNA sense strand
ugacuuaaaggaugaugau

SEQ ID NO: 507327 - RNA, 19 nt, Homo sapiens
  misc_RNA (1)...(19): siRNA sense strand
ucaagacugcggugaacuu

SEQ ID NO: 507328 - RNA, 19 nt, Homo sapiens
  misc_RNA (1)...(19): siRNA sense strand
cuucaaggaugagcuaaag

SEQ ID NO: 507329 - RNA, 19 nt, Homo sapiens
  misc_RNA (1)...(19): siRNA sense strand
ugaaaggcggcuacaagga

SEQ ID NO: 507330 - RNA, 19 nt, Homo sapiens
  misc_RNA (1)...(19): siRNA sense strand
agaaccuccuggacaguga

SEQ ID NO: 507331 - RNA, 19 nt, Homo sapiens
  misc_RNA (1)...(19): siRNA sense strand
cacccgaacuucugugaac

SEQ ID NO: 507332 - RNA, 19 nt, Homo sapiens
  misc_RNA (1)...(19): siRNA sense strand
gauaaguuugugauuguag

SEQ ID NO: 507333 - RNA, 19 nt, Homo sapiens
  misc_RNA (1)...(19): siRNA sense strand
caucguggauaaguuugug

SEQ ID NO: 507334 - RNA, 19 nt, Homo sapiens
  misc_RNA (1)...(19): siRNA sense strand
cgagcaguuugccaucaga

SEQ ID NO: 507335 - RNA, 19 nt, Homo sapiens
  misc_RNA (1)...(19): siRNA sense strand
ugauuggagauuacucuaa

SEQ ID NO: 507336 - RNA, 19 nt, Homo sapiens
  misc_RNA (1)...(19): siRNA sense strand
ccuguagccuggacaagag

SEQ ID NO: 507337 - RNA, 19 nt, Homo sapiens
  misc_RNA (1)...(19): siRNA sense strand
cuccgaaucuucugaugca

SEQ ID NO: 507338 - RNA, 19 nt, Homo sapiens
  misc_RNA (1)...(19): siRNA sense strand
gcacccgaacuucugugaa

SEQ ID NO: 507339 - RNA, 19 nt, Homo sapiens
  misc_RNA (1)...(19): siRNA sense strand
cagauaccccuaugaauau

SEQ ID NO: 507340 - RNA, 19 nt, Homo sapiens
  misc_RNA (1)...(19): siRNA sense strand
uacagacaguagacggaaa

SEQ ID NO: 507341 - RNA, 19 nt, Homo sapiens
  misc_RNA (1)...(19): siRNA sense strand
gaccaccgagagcugauug

SEQ ID NO: 507342 - RNA, 19 nt, Homo sapiens
  misc_RNA (1)...(19): siRNA sense strand
ccugaaaggcggcuacaag

SEQ ID NO: 507343 - RNA, 19 nt, Homo sapiens
  misc_RNA (1)...(19): siRNA sense strand
acaagagagucauccucau

SEQ ID NO: 507344 - RNA, 19 nt, Homo sapiens
  misc_RNA (1)...(19): siRNA sense strand
caccaagaccucaaguaca

SEQ ID NO: 507345 - RNA, 19 nt, Homo sapiens
  misc_RNA (1)...(19): siRNA sense strand
uaaagaccuuccgccucaa

SEQ ID NO: 507346 - RNA, 19 nt, Homo sapiens
  misc_RNA (1)...(19): siRNA sense strand
ggaggcugaggaaccuaaa

SEQ ID NO: 507347 - RNA, 19 nt, Homo sapiens
  misc_RNA (1)...(19): siRNA sense strand
ccgagagcuuccuacugaa

SEQ ID NO: 507348 - RNA, 19 nt, Homo sapiens
  misc_RNA (1)...(19): siRNA sense strand
cgagagcugauuggagauu

SEQ ID NO: 507349 - RNA, 19 nt, Homo sapiens
  misc_RNA (1)...(19): siRNA sense strand
gaugaugccuaguaaauua

SEQ ID NO: 507350 - RNA, 19 nt, Homo sapiens
  misc_RNA (1)...(19): siRNA sense strand
gaaagaugaugccuaguaa

SEQ ID NO: 507351 - RNA, 19 nt, Homo sapiens
  misc_RNA (1)...(19): siRNA sense strand
cagaagagauggauauuga

SEQ ID NO: 507352 - RNA, 19 nt, Homo sapiens
  misc_RNA (1)...(19): siRNA sense strand
ggaaagaugaugccuagua

SEQ ID NO: 507353 - RNA, 19 nt, Homo sapiens
  misc_RNA (1)...(19): siRNA sense strand
gaaacgauccucucaauca

SEQ ID NO: 507354 - RNA, 19 nt, Homo sapiens
  misc_RNA (1)...(19): siRNA sense strand
ucacaaaucauccuaguaa

SEQ ID NO: 507355 - RNA, 19 nt, Homo sapiens
  misc_RNA (1)...(19): siRNA sense strand
gaacagccacgucagcuuu

SEQ ID NO: 507356 - RNA, 19 nt, Homo sapiens
  misc_RNA (1)...(19): siRNA sense strand
uaaccaaagucacaaauca

SEQ ID NO: 507357 - RNA, 19 nt, Homo sapiens
  misc_RNA (1)...(19): siRNA sense strand
gaagagauggauauugaaa

SEQ ID NO: 507358 - RNA, 19 nt, Homo sapiens
  misc_RNA (1)...(19): siRNA sense strand
gguaagaaguucagaagca

SEQ ID NO: 507359 - RNA, 19 nt, Homo sapiens
  misc_RNA (1)...(19): siRNA sense strand
gcgaaacgauccucucaau

SEQ ID NO: 507360 - RNA, 19 nt, Homo sapiens
  misc_RNA (1)...(19): siRNA sense strand
caagagcgaugucuacuac

SEQ ID NO: 507361 - RNA, 19 nt, Homo sapiens
  misc_RNA (1)...(19): siRNA sense strand
gaaaucagacccacaacga

SEQ ID NO: 507362 - RNA, 19 nt, Homo sapiens
  misc_RNA (1)...(19): siRNA sense strand
agacaaacagcaucaauuu

SEQ ID NO: 507363 - RNA, 19 nt, Homo sapiens
  misc_RNA (1)...(19): siRNA sense strand
aaaccagacuugaauacaa

SEQ ID NO: 507364 - RNA, 19 nt, Homo sapiens
  misc_RNA (1)...(19): siRNA sense strand
gaaaagaacccugcuguuu

SEQ ID NO: 507365 - RNA, 19 nt, Homo sapiens
  misc_RNA (1)...(19): siRNA sense strand
gcaagguaccugggaaaua

SEQ ID NO: 507366 - RNA, 19 nt, Homo sapiens
  misc_RNA (1)...(19): siRNA sense strand
caagguaccugggaaauac

SEQ ID NO: 507367 - RNA, 19 nt, Homo sapiens
  misc_RNA (1)...(19): siRNA sense strand
cuucagaacuggaaagaug

SEQ ID NO: 507368 - RNA, 19 nt, Homo sapiens
  misc_RNA (1)...(19): siRNA sense strand
agagauggauauugaaaug

SEQ ID NO: 507369 - RNA, 19 nt, Homo sapiens
  misc_RNA (1)...(19): siRNA sense strand
guaagaaguucagaagcaa

SEQ ID NO: 507370 - RNA, 19 nt, Homo sapiens
  misc_RNA (1)...(19): siRNA sense strand
caguggagaugaagccuaa

SEQ ID NO: 507371 - RNA, 19 nt, Homo sapiens
  misc_RNA (1)...(19): siRNA sense strand
gaagaaggaggaagugauc

SEQ ID NO: 507372 - RNA, 19 nt, Homo sapiens
  misc_RNA (1)...(19): siRNA sense strand
gcaaguacgcaagaaauug

SEQ ID NO: 507373 - RNA, 19 nt, Homo sapiens
  misc_RNA (1)...(19): siRNA sense strand
gcaagagcgaugucuacua

SEQ ID NO: 507374 - RNA, 19 nt, Homo sapiens
  misc_RNA (1)...(19): siRNA sense strand
caaacaaccgguaaccaaa

SEQ ID NO: 507375 - RNA, 19 nt, Homo sapiens
  misc_RNA (1)...(19): siRNA sense strand
aaagaacccugcuguuugg

SEQ ID NO: 507376 - RNA, 19 nt, Homo sapiens
  misc_RNA (1)...(19): siRNA sense strand
aaacgauccucucaaucaa

SEQ ID NO: 507377 - RNA, 19 nt, Homo sapiens
  misc_RNA (1)...(19): siRNA sense strand
gcgagcugcugauacagaa

SEQ ID NO: 507378 - RNA, 19 nt, Homo sapiens
  misc_RNA (1)...(19): siRNA sense strand
agacuugaauacaacauug

SEQ ID NO: 507379 - RNA, 19 nt, Homo sapiens
  misc_RNA (1)...(19): siRNA sense strand
gaaauggacaguggagaug

SEQ ID NO: 507380 - RNA, 19 nt, Homo sapiens
  misc_RNA (1)...(19): siRNA sense strand
gguaaaccagacuugaaua

SEQ ID NO: 507381 - RNA, 19 nt, Homo sapiens
  misc_RNA (1)...(19): siRNA sense strand
gaaacaggaagagcgagua

SEQ ID NO: 507382 - RNA, 19 nt, Homo sapiens
  misc_RNA (1)...(19): siRNA sense strand
ucaaacaaccgguaaccaa

SEQ ID NO: 507383 - RNA, 19 nt, Homo sapiens
  misc_RNA (1)...(19): siRNA sense strand
caaaggucuucaaggaguu

SEQ ID NO: 507384 - RNA, 19 nt, Homo sapiens
  misc_RNA (1)...(19): siRNA sense strand
ggaagaaggaggaagugau

SEQ ID NO: 507385 - RNA, 19 nt, Homo sapiens
  misc_RNA (1)...(19): siRNA sense strand
ggaaauacuguugaucuca

SEQ ID NO: 507386 - RNA, 19 nt, Homo sapiens
  misc_RNA (1)...(19): siRNA sense strand
acccaaaggucuucaagga

SEQ ID NO: 507387 - RNA, 19 nt, Homo sapiens
  misc_RNA (1)...(19): siRNA sense strand
gggaaauacuguugaucuc

SEQ ID NO: 507388 - RNA, 19 nt, Homo sapiens
  misc_RNA (1)...(19): siRNA sense strand
ggagaagaggcuacaagga

SEQ ID NO: 507389 - RNA, 19 nt, Homo sapiens
  misc_RNA (1)...(19): siRNA sense strand
aaacagagacugcgaaacg

SEQ ID NO: 507390 - RNA, 19 nt, Homo sapiens
  misc_RNA (1)...(19): siRNA sense strand
ggaacuacccaaaggucuu

SEQ ID NO: 507391 - RNA, 19 nt, Homo sapiens
  misc_RNA (1)...(19): siRNA sense strand
gcgggaagaggauggauug

SEQ ID NO: 507392 - RNA, 19 nt, Homo sapiens
  misc_RNA (1)...(19): siRNA sense strand
agauggauauugaaaugga

SEQ ID NO: 507393 - RNA, 19 nt, Homo sapiens
  misc_RNA (1)...(19): siRNA sense strand
gaacuacccaaaggucuuc

SEQ ID NO: 507394 - RNA, 19 nt, Homo sapiens
  misc_RNA (1)...(19): siRNA sense strand
uagacaaacagcaucaauu

SEQ ID NO: 507395 - RNA, 19 nt, Homo sapiens
  misc_RNA (1)...(19): siRNA sense strand
agagcgaugucuacuacuu

SEQ ID NO: 507396 - RNA, 19 nt, Homo sapiens
  misc_RNA (1)...(19): siRNA sense strand
acaaggacuuagugcauca

SEQ ID NO: 507397 - RNA, 19 nt, Homo sapiens
  misc_RNA (1)...(19): siRNA sense strand
caagaaauuggaagaagca

SEQ ID NO: 507398 - RNA, 19 nt, Homo sapiens
  misc_RNA (1)...(19): siRNA sense strand
aggaggaagugauccgaaa

SEQ ID NO: 507399 - RNA, 19 nt, Homo sapiens
  misc_RNA (1)...(19): siRNA sense strand
ccauggaacuacccaaagg

SEQ ID NO: 507400 - RNA, 19 nt, Homo sapiens
  misc_RNA (1)...(19): siRNA sense strand
aagaugaugccuaguaaau

SEQ ID NO: 507401 - RNA, 19 nt, Homo sapiens
  misc_RNA (1)...(19): siRNA sense strand
gaagaggcuacaaggacuu

SEQ ID NO: 507402 - RNA, 19 nt, Homo sapiens
  misc_RNA (1)...(19): siRNA sense strand
ccaauuagacaaacagcau

SEQ ID NO: 507403 - RNA, 19 nt, Homo sapiens
  misc_RNA (1)...(19): siRNA sense strand
ggguaaaccagacuugaau

SEQ ID NO: 507404 - RNA, 19 nt, Homo sapiens
  misc_RNA (1)...(19): siRNA sense strand
gauggaagaaggaggaagu

SEQ ID NO: 507405 - RNA, 19 nt, Homo sapiens
  misc_RNA (1)...(19): siRNA sense strand
auacagaagagauggauau

SEQ ID NO: 507406 - RNA, 19 nt, Homo sapiens
  misc_RNA (1)...(19): siRNA sense strand
gagcugcugauacagaaga

SEQ ID NO: 507407 - RNA, 19 nt, Homo sapiens
  misc_RNA (1)...(19): siRNA sense strand
cagcaaguacgcaagaaau

SEQ ID NO: 507408 - RNA, 19 nt, Homo sapiens
  misc_RNA (1)...(19): siRNA sense strand
ggaagagcgaguacagcaa

SEQ ID NO: 507409 - RNA, 19 nt, Homo sapiens
  misc_RNA (1)...(19): siRNA sense strand
cuguugaucucagcaguuu

SEQ ID NO: 507410 - RNA, 19 nt, Homo sapiens
  misc_RNA (1)...(19): siRNA sense strand
gcaaugaugagacccuuuu

SEQ ID NO: 507411 - RNA, 19 nt, Homo sapiens
  misc_RNA (1)...(19): siRNA sense strand
cacaacgaaugaaugaaca

SEQ ID NO: 507412 - RNA, 19 nt, Homo sapiens
  misc_RNA (1)...(19): siRNA sense strand
guaaaccagacuugaauac

SEQ ID NO: 507413 - RNA, 19 nt, Homo sapiens
  misc_RNA (1)...(19): siRNA sense strand
gaagugauccgaaaaucug

SEQ ID NO: 507414 - RNA, 19 nt, Homo sapiens
  misc_RNA (1)...(19): siRNA sense strand
caaacagcaucaauuuuca

SEQ ID NO: 507415 - RNA, 19 nt, Homo sapiens
  misc_RNA (1)...(19): siRNA sense strand
cagaagcaagccucaguug

SEQ ID NO: 507416 - RNA, 19 nt, Homo sapiens
  misc_RNA (1)...(19): siRNA sense strand
gauacagaagagauggaua

SEQ ID NO: 507417 - RNA, 19 nt, Homo sapiens
  misc_RNA (1)...(19): siRNA sense strand
caaguacgcaagaaauugg

SEQ ID NO: 507418 - RNA, 19 nt, Homo sapiens
  misc_RNA (1)...(19): siRNA sense strand
ccacaacgaaugaaugaac

SEQ ID NO: 507419 - RNA, 19 nt, Homo sapiens
  misc_RNA (1)...(19): siRNA sense strand
cagcaucaauuuucaaaca

SEQ ID NO: 507420 - RNA, 19 nt, Homo sapiens
  misc_RNA (1)...(19): siRNA sense strand
gagcgaugucuacuacuuc

SEQ ID NO: 507421 - RNA, 19 nt, Homo sapiens
  misc_RNA (1)...(19): siRNA sense strand
ugaaauggacaguggagau

SEQ ID NO: 507422 - RNA, 19 nt, Homo sapiens
  misc_RNA (1)...(19): siRNA sense strand
agucuccgcugcuguggaa

SEQ ID NO: 507423 - RNA, 19 nt, Homo sapiens
  misc_RNA (1)...(19): siRNA sense strand
cacaaaucauccuaguaau

SEQ ID NO: 507424 - RNA, 19 nt, Homo sapiens
  misc_RNA (1)...(19): siRNA sense strand
cuacaaggacuuagugcau

SEQ ID NO: 507425 - RNA, 19 nt, Homo sapiens
  misc_RNA (1)...(19): siRNA sense strand
gucgcgagcugcugauaca

SEQ ID NO: 507426 - RNA, 19 nt, Homo sapiens
  misc_RNA (1)...(19): siRNA sense strand
uuacagaagaacaaacaga

SEQ ID NO: 507427 - RNA, 19 nt, Homo sapiens
  misc_RNA (1)...(19): siRNA sense strand
aauggacaguggagaugaa

SEQ ID NO: 507428 - RNA, 19 nt, Homo sapiens
  misc_RNA (1)...(19): siRNA sense strand
cacaagcucugcgccaauc

SEQ ID NO: 507429 - RNA, 19 nt, Homo sapiens
  misc_RNA (1)...(19): siRNA sense strand
caaggaguugguccaggua

SEQ ID NO: 507430 - RNA, 19 nt, Homo sapiens
  misc_RNA (1)...(19): siRNA sense strand
guaaccaaagucacaaauc

SEQ ID NO: 507431 - RNA, 19 nt, Homo sapiens
  misc_RNA (1)...(19): siRNA sense strand
acaaacagagacugcgaaa

SEQ ID NO: 507432 - RNA, 19 nt, Homo sapiens
  misc_RNA (1)...(19): siRNA sense strand
cugcaaagcuuuuauuguc

SEQ ID NO: 507433 - RNA, 19 nt, Homo sapiens
  misc_RNA (1)...(19): siRNA sense strand
ccagguagcaaugaugaga

SEQ ID NO: 507434 - RNA, 19 nt, Homo sapiens
  misc_RNA (1)...(19): siRNA sense strand
gauccucucaaucaaaaua

SEQ ID NO: 507435 - RNA, 19 nt, Homo sapiens
  misc_RNA (1)...(19): siRNA sense strand
aaaagaacccugcuguuug

SEQ ID NO: 507436 - RNA, 19 nt, Homo sapiens
  misc_RNA (1)...(19): siRNA sense strand
aaucagacccacaacgaau

SEQ ID NO: 507437 - RNA, 19 nt, Homo sapiens
  misc_RNA (1)...(19): siRNA sense strand
aaacaaccgguaaccaaag

SEQ ID NO: 507438 - RNA, 19 nt, Homo sapiens
  misc_RNA (1)...(19): siRNA sense strand
cgcaagaaauuggaagaag

SEQ ID NO: 507439 - RNA, 19 nt, Homo sapiens
  misc_RNA (1)...(19): siRNA sense strand
cauccuaguaauaaaguga

SEQ ID NO: 507440 - RNA, 19 nt, Homo sapiens
  misc_RNA (1)...(19): siRNA sense strand
gguaaccaaagucacaaau

SEQ ID NO: 507441 - RNA, 19 nt, Homo sapiens
  misc_RNA (1)...(19): siRNA sense strand
caaccgguaaccaaaguca

SEQ ID NO: 507442 - RNA, 19 nt, Homo sapiens
  misc_RNA (1)...(19): siRNA sense strand
aaagaugaugccuaguaaa

SEQ ID NO: 507443 - RNA, 19 nt, Homo sapiens
  misc_RNA (1)...(19): siRNA sense strand
ucagacccacaacgaauga

SEQ ID NO: 507444 - RNA, 19 nt, Homo sapiens
  misc_RNA (1)...(19): siRNA sense strand
uaaaccagacuugaauaca

SEQ ID NO: 507445 - RNA, 19 nt, Homo sapiens
  misc_RNA (1)...(19): siRNA sense strand
agccucaguuggcaaggua

SEQ ID NO: 507446 - RNA, 19 nt, Homo sapiens
  misc_RNA (1)...(19): siRNA sense strand
ggaaaagaacccugcuguu

SEQ ID NO: 507447 - RNA, 19 nt, Homo sapiens
  misc_RNA (1)...(19): siRNA sense strand
ucagauguaacagaacaaa

SEQ ID NO: 507448 - RNA, 19 nt, Homo sapiens
  misc_RNA (1)...(19): siRNA sense strand
augaagacaucaggaaaca

SEQ ID NO: 507449 - RNA, 19 nt, Homo sapiens
  misc_RNA (1)...(19): siRNA sense strand
gaugaugccuaguaaauua

SEQ ID NO: 507450 - RNA, 19 nt, Homo sapiens
  misc_RNA (1)...(19): siRNA sense strand
gaaagaugaugccuaguaa

SEQ ID NO: 507451 - RNA, 19 nt, Homo sapiens
  misc_RNA (1)...(19): siRNA sense strand
ggaaagaugaugccuagua

SEQ ID NO: 507452 - RNA, 19 nt, Homo sapiens
  misc_RNA (1)...(19): siRNA sense strand
gaaacgauccucucaauca

SEQ ID NO: 507453 - RNA, 19 nt, Homo sapiens
  misc_RNA (1)...(19): siRNA sense strand
gguaagaaguucagaagca

SEQ ID NO: 507454 - RNA, 19 nt, Homo sapiens
  misc_RNA (1)...(19): siRNA sense strand
gcgaaacgauccucucaau

SEQ ID NO: 507455 - RNA, 19 nt, Homo sapiens
  misc_RNA (1)...(19): siRNA sense strand
caagagcgaugucuacuac

SEQ ID NO: 507456 - RNA, 19 nt, Homo sapiens
  misc_RNA (1)...(19): siRNA sense strand
gcaagguaccugggaaaua

SEQ ID NO: 507457 - RNA, 19 nt, Homo sapiens
  misc_RNA (1)...(19): siRNA sense strand
caagguaccugggaaauac

SEQ ID NO: 507458 - RNA, 19 nt, Homo sapiens
  misc_RNA (1)...(19): siRNA sense strand
cuucagaacuggaaagaug

SEQ ID NO: 507459 - RNA, 19 nt, Homo sapiens
  misc_RNA (1)...(19): siRNA sense strand
guaagaaguucagaagcaa

SEQ ID NO: 507460 - RNA, 19 nt, Homo sapiens
  misc_RNA (1)...(19): siRNA sense strand
gaagaaggaggaagugauc

SEQ ID NO: 507461 - RNA, 19 nt, Homo sapiens
  misc_RNA (1)...(19): siRNA sense strand
gcaagagcgaugucuacua

SEQ ID NO: 507462 - RNA, 19 nt, Homo sapiens
  misc_RNA (1)...(19): siRNA sense strand
aaacgauccucucaaucaa

SEQ ID NO: 507463 - RNA, 19 nt, Homo sapiens
  misc_RNA (1)...(19): siRNA sense strand
ggaagaaggaggaagugau

SEQ ID NO: 507464 - RNA, 19 nt, Homo sapiens
  misc_RNA (1)...(19): siRNA sense strand
ggaaauacuguugaucuca

SEQ ID NO: 507465 - RNA, 19 nt, Homo sapiens
  misc_RNA (1)...(19): siRNA sense strand
gggaaauacuguugaucuc

SEQ ID NO: 507466 - RNA, 19 nt, Homo sapiens
  misc_RNA (1)...(19): siRNA sense strand
aaacagagacugcgaaacg

SEQ ID NO: 507467 - RNA, 19 nt, Homo sapiens
  misc_RNA (1)...(19): siRNA sense strand
gcgggaagaggauggauug

SEQ ID NO: 507468 - RNA, 19 nt, Homo sapiens
  misc_RNA (1)...(19): siRNA sense strand
agagcgaugucuacuacuu

SEQ ID NO: 507469 - RNA, 19 nt, Homo sapiens
  misc_RNA (1)...(19): siRNA sense strand
aggaggaagugauccgaaa

SEQ ID NO: 507470 - RNA, 19 nt, Homo sapiens
  misc_RNA (1)...(19): siRNA sense strand
aagaugaugccuaguaaau

SEQ ID NO: 507471 - RNA, 19 nt, Homo sapiens
  misc_RNA (1)...(19): siRNA sense strand
gauggaagaaggaggaagu

SEQ ID NO: 507472 - RNA, 19 nt, Homo sapiens
  misc_RNA (1)...(19): siRNA sense strand
cuguugaucucagcaguuu

SEQ ID NO: 507473 - RNA, 19 nt, Homo sapiens
  misc_RNA (1)...(19): siRNA sense strand
gaagugauccgaaaaucug

SEQ ID NO: 507474 - RNA, 19 nt, Homo sapiens
  misc_RNA (1)...(19): siRNA sense strand
cagaagcaagccucaguug

SEQ ID NO: 507475 - RNA, 19 nt, Homo sapiens
  misc_RNA (1)...(19): siRNA sense strand
gagcgaugucuacuacuuc

SEQ ID NO: 507476 - RNA, 19 nt, Homo sapiens
  misc_RNA (1)...(19): siRNA sense strand
uuacagaagaacaaacaga

SEQ ID NO: 507477 - RNA, 19 nt, Homo sapiens
  misc_RNA (1)...(19): siRNA sense strand
acaaacagagacugcgaaa

SEQ ID NO: 507478 - RNA, 19 nt, Homo sapiens
  misc_RNA (1)...(19): siRNA sense strand
gauccucucaaucaaaaua

SEQ ID NO: 507479 - RNA, 19 nt, Homo sapiens
  misc_RNA (1)...(19): siRNA sense strand
aaagaugaugccuaguaaa

SEQ ID NO: 507480 - RNA, 19 nt, Homo sapiens
  misc_RNA (1)...(19): siRNA sense strand
agccucaguuggcaaggua

SEQ ID NO: 507481 - RNA, 19 nt, Homo sapiens
  misc_RNA (1)...(19): siRNA sense strand
guccaagugguaagaaguu

SEQ ID NO: 507482 - RNA, 19 nt, Homo sapiens
  misc_RNA (1)...(19): siRNA sense strand
ccugggaaauacuguugau

SEQ ID NO: 507483 - RNA, 19 nt, Homo sapiens
  misc_RNA (1)...(19): siRNA sense strand
ucagaagcaagccucaguu

SEQ ID NO: 507484 - RNA, 19 nt, Homo sapiens
  misc_RNA (1)...(19): siRNA sense strand
acagaagaacaaacagaga

SEQ ID NO: 507485 - RNA, 19 nt, Homo sapiens
  misc_RNA (1)...(19): siRNA sense strand
agaugaugccuaguaaauu

SEQ ID NO: 507486 - RNA, 19 nt, Homo sapiens
  misc_RNA (1)...(19): siRNA sense strand
uuacuacgcuccaagauua

SEQ ID NO: 507487 - RNA, 19 nt, Homo sapiens
  misc_RNA (1)...(19): siRNA sense strand
gaaggagaauguccaguuu

SEQ ID NO: 507488 - RNA, 19 nt, Homo sapiens
  misc_RNA (1)...(19): siRNA sense strand
auacacaacuugagcuuua

SEQ ID NO: 507489 - RNA, 19 nt, Homo sapiens
  misc_RNA (1)...(19): siRNA sense strand
gcccaggacucaaguauga

SEQ ID NO: 507490 - RNA, 19 nt, Homo sapiens
  misc_RNA (1)...(19): siRNA sense strand
gcaauggccacuccaagua

SEQ ID NO: 507491 - RNA, 19 nt, Homo sapiens
  misc_RNA (1)...(19): siRNA sense strand
ggauauagaagaugaagaa

SEQ ID NO: 507492 - RNA, 19 nt, Homo sapiens
  misc_RNA (1)...(19): siRNA sense strand
ggagauccuugcucagauu

SEQ ID NO: 507493 - RNA, 19 nt, Homo sapiens
  misc_RNA (1)...(19): siRNA sense strand
gauagacacccaaaucgua

SEQ ID NO: 507494 - RNA, 19 nt, Homo sapiens
  misc_RNA (1)...(19): siRNA sense strand
gcucucagcucuccaaugg

SEQ ID NO: 507495 - RNA, 19 nt, Homo sapiens
  misc_RNA (1)...(19): siRNA sense strand
gagaaggccuugaggucuu

SEQ ID NO: 507496 - RNA, 19 nt, Homo sapiens
  misc_RNA (1)...(19): siRNA sense strand
ggaagaaucccgugaugau

SEQ ID NO: 507497 - RNA, 19 nt, Homo sapiens
  misc_RNA (1)...(19): siRNA sense strand
gcucagauuucuuuauaca

SEQ ID NO: 507498 - RNA, 19 nt, Homo sapiens
  misc_RNA (1)...(19): siRNA sense strand
gcacugaugugaaggaaaa

SEQ ID NO: 507499 - RNA, 19 nt, Homo sapiens
  misc_RNA (1)...(19): siRNA sense strand
cagcggaucuccaacauag

SEQ ID NO: 507500 - RNA, 19 nt, Homo sapiens
  misc_RNA (1)...(19): siRNA sense strand
caacuugagcuuuacuuaa

SEQ ID NO: 507501 - RNA, 19 nt, Homo sapiens
  misc_RNA (1)...(19): siRNA sense strand
gaucguggccuugcauuaa

SEQ ID NO: 507502 - RNA, 19 nt, Homo sapiens
  misc_RNA (1)...(19): siRNA sense strand
gccaagagcuucgucaugu

SEQ ID NO: 507503 - RNA, 19 nt, Homo sapiens
  misc_RNA (1)...(19): siRNA sense strand
gaccucagcuugucugcuu

SEQ ID NO: 507504 - RNA, 19 nt, Homo sapiens
  misc_RNA (1)...(19): siRNA sense strand
gcagauagacacccaaauc

SEQ ID NO: 507505 - RNA, 19 nt, Homo sapiens
  misc_RNA (1)...(19): siRNA sense strand
caacaagccuuugcucagu

SEQ ID NO: 507506 - RNA, 19 nt, Homo sapiens
  misc_RNA (1)...(19): siRNA sense strand
ggaggugaauggccagguu

SEQ ID NO: 507507 - RNA, 19 nt, Homo sapiens
  misc_RNA (1)...(19): siRNA sense strand
caagguucccucccacuua

SEQ ID NO: 507508 - RNA, 19 nt, Homo sapiens
  misc_RNA (1)...(19): siRNA sense strand
gaacugcgcccaggacuca

SEQ ID NO: 507509 - RNA, 19 nt, Homo sapiens
  misc_RNA (1)...(19): siRNA sense strand
gguuuaggcugaaggagaa

SEQ ID NO: 507510 - RNA, 19 nt, Homo sapiens
  misc_RNA (1)...(19): siRNA sense strand
ggucguggauggucaguuc

SEQ ID NO: 507511 - RNA, 19 nt, Homo sapiens
  misc_RNA (1)...(19): siRNA sense strand
ggaggacccugucugucaa

SEQ ID NO: 507512 - RNA, 19 nt, Homo sapiens
  misc_RNA (1)...(19): siRNA sense strand
ccaaguaccgccugaagaa

SEQ ID NO: 507513 - RNA, 19 nt, Homo sapiens
  misc_RNA (1)...(19): siRNA sense strand
ggugauaaguguuucuaca

SEQ ID NO: 507514 - RNA, 19 nt, Homo sapiens
  misc_RNA (1)...(19): siRNA sense strand
acacggacuucacaucuga

SEQ ID NO: 507515 - RNA, 19 nt, Homo sapiens
  misc_RNA (1)...(19): siRNA sense strand
cagcagcacugaugugaag

SEQ ID NO: 507516 - RNA, 19 nt, Homo sapiens
  misc_RNA (1)...(19): siRNA sense strand
gacacgcucuucaaugguu

SEQ ID NO: 507517 - RNA, 19 nt, Homo sapiens
  misc_RNA (1)...(19): siRNA sense strand
gcucuggucccacaaagaa

SEQ ID NO: 507518 - RNA, 19 nt, Homo sapiens
  misc_RNA (1)...(19): siRNA sense strand
gagaauguccaguuucauc

SEQ ID NO: 507519 - RNA, 19 nt, Homo sapiens
  misc_RNA (1)...(19): siRNA sense strand
gauggucaguucuuugaag

SEQ ID NO: 507520 - RNA, 19 nt, Homo sapiens
  misc_RNA (1)...(19): siRNA sense strand
guaggcgacuccgcuauug

SEQ ID NO: 507521 - RNA, 19 nt, Homo sapiens
  misc_RNA (1)...(19): siRNA sense strand
caucagcaaugcagaagca

SEQ ID NO: 507522 - RNA, 19 nt, Homo sapiens
  misc_RNA (1)...(19): siRNA sense strand
gggaggacccugucuguca

SEQ ID NO: 507523 - RNA, 19 nt, Homo sapiens
  misc_RNA (1)...(19): siRNA sense strand
gaggacagcuacggaccaa

SEQ ID NO: 507524 - RNA, 19 nt, Homo sapiens
  misc_RNA (1)...(19): siRNA sense strand
uaaagaugccaaggugaua

SEQ ID NO: 507525 - RNA, 19 nt, Homo sapiens
  misc_RNA (1)...(19): siRNA sense strand
ugaugcagcugaaugagau

SEQ ID NO: 507526 - RNA, 19 nt, Homo sapiens
  misc_RNA (1)...(19): siRNA sense strand
aggcacagauguuaaagau

SEQ ID NO: 507527 - RNA, 19 nt, Homo sapiens
  misc_RNA (1)...(19): siRNA sense strand
ugaaggagaauguccaguu

SEQ ID NO: 507528 - RNA, 19 nt, Homo sapiens
  misc_RNA (1)...(19): siRNA sense strand
caacacggacuucacaucu

SEQ ID NO: 507529 - RNA, 19 nt, Homo sapiens
  misc_RNA (1)...(19): siRNA sense strand
aguccaagcuggcggcaaa

SEQ ID NO: 507530 - RNA, 19 nt, Homo sapiens
  misc_RNA (1)...(19): siRNA sense strand
gccaaggugauaaguguuu

SEQ ID NO: 507531 - RNA, 19 nt, Homo sapiens
  misc_RNA (1)...(19): siRNA sense strand
gcacgcgccuuuguuuguc

SEQ ID NO: 507532 - RNA, 19 nt, Homo sapiens
  misc_RNA (1)...(19): siRNA sense strand
gcaagguucccucccacuu

SEQ ID NO: 507533 - RNA, 19 nt, Homo sapiens
  misc_RNA (1)...(19): siRNA sense strand
guccugcagugacaagauu

SEQ ID NO: 507534 - RNA, 19 nt, Homo sapiens
  misc_RNA (1)...(19): siRNA sense strand
gaagaaucccgugaugauc

SEQ ID NO: 507535 - RNA, 19 nt, Homo sapiens
  misc_RNA (1)...(19): siRNA sense strand
acaacuugagcuuuacuua

SEQ ID NO: 507536 - RNA, 19 nt, Homo sapiens
  misc_RNA (1)...(19): siRNA sense strand
gguaggcgacuccgcuauu

SEQ ID NO: 507537 - RNA, 19 nt, Homo sapiens
  misc_RNA (1)...(19): siRNA sense strand
uaaagcaagaggacagcua

SEQ ID NO: 507538 - RNA, 19 nt, Homo sapiens
  misc_RNA (1)...(19): siRNA sense strand
aggagaauguccaguuuca

SEQ ID NO: 507539 - RNA, 19 nt, Homo sapiens
  misc_RNA (1)...(19): siRNA sense strand
ugaggucuuucguucaguu

SEQ ID NO: 507540 - RNA, 19 nt, Homo sapiens
  misc_RNA (1)...(19): siRNA sense strand
uguguaagcacgcguugua

SEQ ID NO: 507541 - RNA, 19 nt, Homo sapiens
  misc_RNA (1)...(19): siRNA sense strand
gauccuugcucagauuucu

SEQ ID NO: 507542 - RNA, 19 nt, Homo sapiens
  misc_RNA (1)...(19): siRNA sense strand
gccagccuauucccaguga

SEQ ID NO: 507543 - RNA, 19 nt, Homo sapiens
  misc_RNA (1)...(19): siRNA sense strand
ggacagcuacggaccaaaa

SEQ ID NO: 507544 - RNA, 19 nt, Homo sapiens
  misc_RNA (1)...(19): siRNA sense strand
agaaggccuugaggucuuu

SEQ ID NO: 507545 - RNA, 19 nt, Homo sapiens
  misc_RNA (1)...(19): siRNA sense strand
auaaguguuucuacaggaa

SEQ ID NO: 507546 - RNA, 19 nt, Homo sapiens
  misc_RNA (1)...(19): siRNA sense strand
gggaugacuccuucaguuc

SEQ ID NO: 507547 - RNA, 19 nt, Homo sapiens
  misc_RNA (1)...(19): siRNA sense strand
gaggugaauggccagguuu

SEQ ID NO: 507548 - RNA, 19 nt, Homo sapiens
  misc_RNA (1)...(19): siRNA sense strand
guaagcacgcguuguacug

SEQ ID NO: 507549 - RNA, 19 nt, Homo sapiens
  misc_RNA (1)...(19): siRNA sense strand
ccacgacugggaaggauga

SEQ ID NO: 507550 - RNA, 19 nt, Homo sapiens
  misc_RNA (1)...(19): siRNA sense strand
gagauccuugcucagauuu

SEQ ID NO: 507551 - RNA, 19 nt, Homo sapiens
  misc_RNA (1)...(19): siRNA sense strand
ggggaugacuccuucaguu

SEQ ID NO: 507552 - RNA, 19 nt, Homo sapiens
  misc_RNA (1)...(19): siRNA sense strand
cugacacgcucuucaaugg

SEQ ID NO: 507553 - RNA, 19 nt, Homo sapiens
  misc_RNA (1)...(19): siRNA sense strand
ccaagagcuucgucauguc

SEQ ID NO: 507554 - RNA, 19 nt, Homo sapiens
  misc_RNA (1)...(19): siRNA sense strand
caaguaccgccugaagaaa

SEQ ID NO: 507555 - RNA, 19 nt, Homo sapiens
  misc_RNA (1)...(19): siRNA sense strand
aaagaugccaaggugauaa

SEQ ID NO: 507556 - RNA, 19 nt, Homo sapiens
  misc_RNA (1)...(19): siRNA sense strand
gcauuuaccgcagguuuua

SEQ ID NO: 507557 - RNA, 19 nt, Homo sapiens
  misc_RNA (1)...(19): siRNA sense strand
gaagaugaagaaaacauga

SEQ ID NO: 507558 - RNA, 19 nt, Homo sapiens
  misc_RNA (1)...(19): siRNA sense strand
gcagcugaaugagaucaag

SEQ ID NO: 507559 - RNA, 19 nt, Homo sapiens
  misc_RNA (1)...(19): siRNA sense strand
gaugacuccuucaguucca

SEQ ID NO: 507560 - RNA, 19 nt, Homo sapiens
  misc_RNA (1)...(19): siRNA sense strand
cagcacugaugugaaggaa

SEQ ID NO: 507561 - RNA, 19 nt, Homo sapiens
  misc_RNA (1)...(19): siRNA sense strand
acacccaaaucguaaagca

SEQ ID NO: 507562 - RNA, 19 nt, Homo sapiens
  misc_RNA (1)...(19): siRNA sense strand
auagacacccaaaucguaa

SEQ ID NO: 507563 - RNA, 19 nt, Homo sapiens
  misc_RNA (1)...(19): siRNA sense strand
cagcagauagacacccaaa

SEQ ID NO: 507564 - RNA, 19 nt, Homo sapiens
  misc_RNA (1)...(19): siRNA sense strand
ugaccugaccgacaacuuc

SEQ ID NO: 507565 - RNA, 19 nt, Homo sapiens
  misc_RNA (1)...(19): siRNA sense strand
agaaucccgugaugaucuu

SEQ ID NO: 507566 - RNA, 19 nt, Homo sapiens
  misc_RNA (1)...(19): siRNA sense strand
ugacaacaggcacagaugu

SEQ ID NO: 507567 - RNA, 19 nt, Homo sapiens
  misc_RNA (1)...(19): siRNA sense strand
caucugaccaggccgacuu

SEQ ID NO: 507568 - RNA, 19 nt, Homo sapiens
  misc_RNA (1)...(19): siRNA sense strand
ccaagaacgcccugaugca

SEQ ID NO: 507569 - RNA, 19 nt, Homo sapiens
  misc_RNA (1)...(19): siRNA sense strand
gaagaaaacaugaguucca

SEQ ID NO: 507570 - RNA, 19 nt, Homo sapiens
  misc_RNA (1)...(19): siRNA sense strand
uuaaagaugccaaggugau

SEQ ID NO: 507571 - RNA, 19 nt, Homo sapiens
  misc_RNA (1)...(19): siRNA sense strand
cguggauggucaguucuuu

SEQ ID NO: 507572 - RNA, 19 nt, Homo sapiens
  misc_RNA (1)...(19): siRNA sense strand
ucaugucuguggaggugaa

SEQ ID NO: 507573 - RNA, 19 nt, Homo sapiens
  misc_RNA (1)...(19): siRNA sense strand
ggaccugccaccucucuac

SEQ ID NO: 507574 - RNA, 19 nt, Homo sapiens
  misc_RNA (1)...(19): siRNA sense strand
ccauuuacuucucgagcau

SEQ ID NO: 507575 - RNA, 19 nt, Homo sapiens
  misc_RNA (1)...(19): siRNA sense strand
ccaaggugauaaguguuuc

SEQ ID NO: 507576 - RNA, 19 nt, Homo sapiens
  misc_RNA (1)...(19): siRNA sense strand
caagagcuucgucaugucu

SEQ ID NO: 507577 - RNA, 19 nt, Homo sapiens
  misc_RNA (1)...(19): siRNA sense strand
ccagcggaucuccaacaua

SEQ ID NO: 507578 - RNA, 19 nt, Homo sapiens
  misc_RNA (1)...(19): siRNA sense strand
gcagcaauggccacuccaa

SEQ ID NO: 507579 - RNA, 19 nt, Homo sapiens
  misc_RNA (1)...(19): siRNA sense strand
cggagauccuugcucagau

SEQ ID NO: 507580 - RNA, 19 nt, Homo sapiens
  misc_RNA (1)...(19): siRNA sense strand
uuggugaccugaccgacaa

SEQ ID NO: 507581 - RNA, 19 nt, Homo sapiens
  misc_RNA (1)...(19): siRNA sense strand
uggauggucaguucuuuga

SEQ ID NO: 507582 - RNA, 19 nt, Homo sapiens
  misc_RNA (1)...(19): siRNA sense strand
ugaucguggccuugcauua

SEQ ID NO: 507583 - RNA, 19 nt, Homo sapiens
  misc_RNA (1)...(19): siRNA sense strand
ucguggagcccauuuacuu

SEQ ID NO: 507584 - RNA, 19 nt, Homo sapiens
  misc_RNA (1)...(19): siRNA sense strand
ucaagccugguuugcagua

SEQ ID NO: 507585 - RNA, 19 nt, Homo sapiens
  misc_RNA (1)...(19): siRNA sense strand
gaauguccaguuucaucug

SEQ ID NO: 507586 - RNA, 19 nt, Homo sapiens
  misc_RNA (1)...(19): siRNA sense strand
uuacuacgcuccaagauua

SEQ ID NO: 507587 - RNA, 19 nt, Homo sapiens
  misc_RNA (1)...(19): siRNA sense strand
gaaggagaauguccaguuu

SEQ ID NO: 507588 - RNA, 19 nt, Homo sapiens
  misc_RNA (1)...(19): siRNA sense strand
auacacaacuugagcuuua

SEQ ID NO: 507589 - RNA, 19 nt, Homo sapiens
  misc_RNA (1)...(19): siRNA sense strand
gcccaggacucaaguauga

SEQ ID NO: 507590 - RNA, 19 nt, Homo sapiens
  misc_RNA (1)...(19): siRNA sense strand
gcaauggccacuccaagua

SEQ ID NO: 507591 - RNA, 19 nt, Homo sapiens
  misc_RNA (1)...(19): siRNA sense strand
ggauauagaagaugaagaa

SEQ ID NO: 507592 - RNA, 19 nt, Homo sapiens
  misc_RNA (1)...(19): siRNA sense strand
ggagauccuugcucagauu

SEQ ID NO: 507593 - RNA, 19 nt, Homo sapiens
  misc_RNA (1)...(19): siRNA sense strand
gauagacacccaaaucgua

SEQ ID NO: 507594 - RNA, 19 nt, Homo sapiens
  misc_RNA (1)...(19): siRNA sense strand
gcucucagcucuccaaugg

SEQ ID NO: 507595 - RNA, 19 nt, Homo sapiens
  misc_RNA (1)...(19): siRNA sense strand
gagaaggccuugaggucuu

SEQ ID NO: 507596 - RNA, 19 nt, Homo sapiens
  misc_RNA (1)...(19): siRNA sense strand
ggaagaaucccgugaugau

SEQ ID NO: 507597 - RNA, 19 nt, Homo sapiens
  misc_RNA (1)...(19): siRNA sense strand
gcucagauuucuuuauaca

SEQ ID NO: 507598 - RNA, 19 nt, Homo sapiens
  misc_RNA (1)...(19): siRNA sense strand
gcacugaugugaaggaaaa

SEQ ID NO: 507599 - RNA, 19 nt, Homo sapiens
  misc_RNA (1)...(19): siRNA sense strand
cagcggaucuccaacauag

SEQ ID NO: 507600 - RNA, 19 nt, Homo sapiens
  misc_RNA (1)...(19): siRNA sense strand
caacuugagcuuuacuuaa

SEQ ID NO: 507601 - RNA, 19 nt, Homo sapiens
  misc_RNA (1)...(19): siRNA sense strand
gaucguggccuugcauuaa

SEQ ID NO: 507602 - RNA, 19 nt, Homo sapiens
  misc_RNA (1)...(19): siRNA sense strand
gccaagagcuucgucaugu

SEQ ID NO: 507603 - RNA, 19 nt, Homo sapiens
  misc_RNA (1)...(19): siRNA sense strand
gaccucagcuugucugcuu

SEQ ID NO: 507604 - RNA, 19 nt, Homo sapiens
  misc_RNA (1)...(19): siRNA sense strand
gcagauagacacccaaauc

SEQ ID NO: 507605 - RNA, 19 nt, Homo sapiens
  misc_RNA (1)...(19): siRNA sense strand
caacaagccuuugcucagu

SEQ ID NO: 507606 - RNA, 19 nt, Homo sapiens
  misc_RNA (1)...(19): siRNA sense strand
ggaggugaauggccagguu

SEQ ID NO: 507607 - RNA, 19 nt, Homo sapiens
  misc_RNA (1)...(19): siRNA sense strand
caagguucccucccacuua

SEQ ID NO: 507608 - RNA, 19 nt, Homo sapiens
  misc_RNA (1)...(19): siRNA sense strand
gaacugcgcccaggacuca

SEQ ID NO: 507609 - RNA, 19 nt, Homo sapiens
  misc_RNA (1)...(19): siRNA sense strand
gguuuaggcugaaggagaa

SEQ ID NO: 507610 - RNA, 19 nt, Homo sapiens
  misc_RNA (1)...(19): siRNA sense strand
ggucguggauggucaguuc

SEQ ID NO: 507611 - RNA, 19 nt, Homo sapiens
  misc_RNA (1)...(19): siRNA sense strand
ggaggacccugucugucaa

SEQ ID NO: 507612 - RNA, 19 nt, Homo sapiens
  misc_RNA (1)...(19): siRNA sense strand
ccaaguaccgccugaagaa

SEQ ID NO: 507613 - RNA, 19 nt, Homo sapiens
  misc_RNA (1)...(19): siRNA sense strand
ggugauaaguguuucuaca

SEQ ID NO: 507614 - RNA, 19 nt, Homo sapiens
  misc_RNA (1)...(19): siRNA sense strand
acacggacuucacaucuga

SEQ ID NO: 507615 - RNA, 19 nt, Homo sapiens
  misc_RNA (1)...(19): siRNA sense strand
cagcagcacugaugugaag

SEQ ID NO: 507616 - RNA, 19 nt, Homo sapiens
  misc_RNA (1)...(19): siRNA sense strand
gacacgcucuucaaugguu

SEQ ID NO: 507617 - RNA, 19 nt, Homo sapiens
  misc_RNA (1)...(19): siRNA sense strand
gcucuggucccacaaagaa

SEQ ID NO: 507618 - RNA, 19 nt, Homo sapiens
  misc_RNA (1)...(19): siRNA sense strand
gagaauguccaguuucauc

SEQ ID NO: 507619 - RNA, 19 nt, Homo sapiens
  misc_RNA (1)...(19): siRNA sense strand
gauggucaguucuuugaag

SEQ ID NO: 507620 - RNA, 19 nt, Homo sapiens
  misc_RNA (1)...(19): siRNA sense strand
guaggcgacuccgcuauug

SEQ ID NO: 507621 - RNA, 19 nt, Homo sapiens
  misc_RNA (1)...(19): siRNA sense strand
caucagcaaugcagaagca

SEQ ID NO: 507622 - RNA, 19 nt, Homo sapiens
  misc_RNA (1)...(19): siRNA sense strand
gggaggacccugucuguca

SEQ ID NO: 507623 - RNA, 19 nt, Homo sapiens
  misc_RNA (1)...(19): siRNA sense strand
gaggacagcuacggaccaa

SEQ ID NO: 507624 - RNA, 19 nt, Homo sapiens
  misc_RNA (1)...(19): siRNA sense strand
uaaagaugccaaggugaua

SEQ ID NO: 507625 - RNA, 19 nt, Homo sapiens
  misc_RNA (1)...(19): siRNA sense strand
ugaugcagcugaaugagau

SEQ ID NO: 507626 - RNA, 19 nt, Homo sapiens
  misc_RNA (1)...(19): siRNA sense strand
aggcacagauguuaaagau

SEQ ID NO: 507627 - RNA, 19 nt, Homo sapiens
  misc_RNA (1)...(19): siRNA sense strand
ugaaggagaauguccaguu

SEQ ID NO: 507628 - RNA, 19 nt, Homo sapiens
  misc_RNA (1)...(19): siRNA sense strand
caacacggacuucacaucu

SEQ ID NO: 507629 - RNA, 19 nt, Homo sapiens
  misc_RNA (1)...(19): siRNA sense strand
aguccaagcuggcggcaaa

SEQ ID NO: 507630 - RNA, 19 nt, Homo sapiens
  misc_RNA (1)...(19): siRNA sense strand
gccaaggugauaaguguuu

SEQ ID NO: 507631 - RNA, 19 nt, Homo sapiens
  misc_RNA (1)...(19): siRNA sense strand
gcacgcgccuuuguuuguc

SEQ ID NO: 507632 - RNA, 19 nt, Homo sapiens
  misc_RNA (1)...(19): siRNA sense strand
gcaagguucccucccacuu

SEQ ID NO: 507633 - RNA, 19 nt, Homo sapiens
  misc_RNA (1)...(19): siRNA sense strand
guccugcagugacaagauu

SEQ ID NO: 507634 - RNA, 19 nt, Homo sapiens
  misc_RNA (1)...(19): siRNA sense strand
gaagaaucccgugaugauc

SEQ ID NO: 507635 - RNA, 19 nt, Homo sapiens
  misc_RNA (1)...(19): siRNA sense strand
acaacuugagcuuuacuua

SEQ ID NO: 507636 - RNA, 19 nt, Homo sapiens
  misc_RNA (1)...(19): siRNA sense strand
gguaggcgacuccgcuauu

SEQ ID NO: 507637 - RNA, 19 nt, Homo sapiens
  misc_RNA (1)...(19): siRNA sense strand
uaaagcaagaggacagcua

SEQ ID NO: 507638 - RNA, 19 nt, Homo sapiens
  misc_RNA (1)...(19): siRNA sense strand
aggagaauguccaguuuca

SEQ ID NO: 507639 - RNA, 19 nt, Homo sapiens
  misc_RNA (1)...(19): siRNA sense strand
ugaggucuuucguucaguu

SEQ ID NO: 507640 - RNA, 19 nt, Homo sapiens
  misc_RNA (1)...(19): siRNA sense strand
uguguaagcacgcguugua

SEQ ID NO: 507641 - RNA, 19 nt, Homo sapiens
  misc_RNA (1)...(19): siRNA sense strand
gauccuugcucagauuucu

SEQ ID NO: 507642 - RNA, 19 nt, Homo sapiens
  misc_RNA (1)...(19): siRNA sense strand
gccagccuauucccaguga

SEQ ID NO: 507643 - RNA, 19 nt, Homo sapiens
  misc_RNA (1)...(19): siRNA sense strand
ggacagcuacggaccaaaa

SEQ ID NO: 507644 - RNA, 19 nt, Homo sapiens
  misc_RNA (1)...(19): siRNA sense strand
agaaggccuugaggucuuu

SEQ ID NO: 507645 - RNA, 19 nt, Homo sapiens
  misc_RNA (1)...(19): siRNA sense strand
auaaguguuucuacaggaa

SEQ ID NO: 507646 - RNA, 19 nt, Homo sapiens
  misc_RNA (1)...(19): siRNA sense strand
gggaugacuccuucaguuc

SEQ ID NO: 507647 - RNA, 19 nt, Homo sapiens
  misc_RNA (1)...(19): siRNA sense strand
gaggugaauggccagguuu

SEQ ID NO: 507648 - RNA, 19 nt, Homo sapiens
  misc_RNA (1)...(19): siRNA sense strand
guaagcacgcguuguacug

SEQ ID NO: 507649 - RNA, 19 nt, Homo sapiens
  misc_RNA (1)...(19): siRNA sense strand
ccacgacugggaaggauga

SEQ ID NO: 507650 - RNA, 19 nt, Homo sapiens
  misc_RNA (1)...(19): siRNA sense strand
gagauccuugcucagauuu

SEQ ID NO: 507651 - RNA, 19 nt, Homo sapiens
  misc_RNA (1)...(19): siRNA sense strand
ggggaugacuccuucaguu

SEQ ID NO: 507652 - RNA, 19 nt, Homo sapiens
  misc_RNA (1)...(19): siRNA sense strand
cugacacgcucuucaaugg

SEQ ID NO: 507653 - RNA, 19 nt, Homo sapiens
  misc_RNA (1)...(19): siRNA sense strand
ccaagagcuucgucauguc

SEQ ID NO: 507654 - RNA, 19 nt, Homo sapiens
  misc_RNA (1)...(19): siRNA sense strand
caaguaccgccugaagaaa

SEQ ID NO: 507655 - RNA, 19 nt, Homo sapiens
  misc_RNA (1)...(19): siRNA sense strand
aaagaugccaaggugauaa

SEQ ID NO: 507656 - RNA, 19 nt, Homo sapiens
  misc_RNA (1)...(19): siRNA sense strand
gcauuuaccgcagguuuua

SEQ ID NO: 507657 - RNA, 19 nt, Homo sapiens
  misc_RNA (1)...(19): siRNA sense strand
gaagaugaagaaaacauga

SEQ ID NO: 507658 - RNA, 19 nt, Homo sapiens
  misc_RNA (1)...(19): siRNA sense strand
gcagcugaaugagaucaag

SEQ ID NO: 507659 - RNA, 19 nt, Homo sapiens
  misc_RNA (1)...(19): siRNA sense strand
gaugacuccuucaguucca

SEQ ID NO: 507660 - RNA, 19 nt, Homo sapiens
  misc_RNA (1)...(19): siRNA sense strand
cagcacugaugugaaggaa

SEQ ID NO: 507661 - RNA, 19 nt, Homo sapiens
  misc_RNA (1)...(19): siRNA sense strand
acacccaaaucguaaagca

SEQ ID NO: 507662 - RNA, 19 nt, Homo sapiens
  misc_RNA (1)...(19): siRNA sense strand
auagacacccaaaucguaa

SEQ ID NO: 507663 - RNA, 19 nt, Homo sapiens
  misc_RNA (1)...(19): siRNA sense strand
cagcagauagacacccaaa

SEQ ID NO: 507664 - RNA, 19 nt, Homo sapiens
  misc_RNA (1)...(19): siRNA sense strand
ugaccugaccgacaacuuc

SEQ ID NO: 507665 - RNA, 19 nt, Homo sapiens
  misc_RNA (1)...(19): siRNA sense strand
agaaucccgugaugaucuu

SEQ ID NO: 507666 - RNA, 19 nt, Homo sapiens
  misc_RNA (1)...(19): siRNA sense strand
ugacaacaggcacagaugu

SEQ ID NO: 507667 - RNA, 19 nt, Homo sapiens
  misc_RNA (1)...(19): siRNA sense strand
caucugaccaggccgacuu

SEQ ID NO: 507668 - RNA, 19 nt, Homo sapiens
  misc_RNA (1)...(19): siRNA sense strand
ccaagaacgcccugaugca

SEQ ID NO: 507669 - RNA, 19 nt, Homo sapiens
  misc_RNA (1)...(19): siRNA sense strand
gaagaaaacaugaguucca

SEQ ID NO: 507670 - RNA, 19 nt, Homo sapiens
  misc_RNA (1)...(19): siRNA sense strand
uuaaagaugccaaggugau

SEQ ID NO: 507671 - RNA, 19 nt, Homo sapiens
  misc_RNA (1)...(19): siRNA sense strand
cguggauggucaguucuuu

SEQ ID NO: 507672 - RNA, 19 nt, Homo sapiens
  misc_RNA (1)...(19): siRNA sense strand
ucaugucuguggaggugaa

SEQ ID NO: 507673 - RNA, 19 nt, Homo sapiens
  misc_RNA (1)...(19): siRNA sense strand
ggaccugccaccucucuac

SEQ ID NO: 507674 - RNA, 19 nt, Homo sapiens
  misc_RNA (1)...(19): siRNA sense strand
ccauuuacuucucgagcau

SEQ ID NO: 507675 - RNA, 19 nt, Homo sapiens
  misc_RNA (1)...(19): siRNA sense strand
ccaaggugauaaguguuuc

SEQ ID NO: 507676 - RNA, 19 nt, Homo sapiens
  misc_RNA (1)...(19): siRNA sense strand
caagagcuucgucaugucu

SEQ ID NO: 507677 - RNA, 19 nt, Homo sapiens
  misc_RNA (1)...(19): siRNA sense strand
ccagcggaucuccaacaua

SEQ ID NO: 507678 - RNA, 19 nt, Homo sapiens
  misc_RNA (1)...(19): siRNA sense strand
gcagcaauggccacuccaa

SEQ ID NO: 507679 - RNA, 19 nt, Homo sapiens
  misc_RNA (1)...(19): siRNA sense strand
cggagauccuugcucagau

SEQ ID NO: 507680 - RNA, 19 nt, Homo sapiens
  misc_RNA (1)...(19): siRNA sense strand
uuggugaccugaccgacaa

SEQ ID NO: 507681 - RNA, 19 nt, Homo sapiens
  misc_RNA (1)...(19): siRNA sense strand
uggauggucaguucuuuga

SEQ ID NO: 507682 - RNA, 19 nt, Homo sapiens
  misc_RNA (1)...(19): siRNA sense strand
ugaucguggccuugcauua

SEQ ID NO: 507683 - RNA, 19 nt, Homo sapiens
  misc_RNA (1)...(19): siRNA sense strand
ucguggagcccauuuacuu

SEQ ID NO: 507684 - RNA, 19 nt, Homo sapiens
  misc_RNA (1)...(19): siRNA sense strand
ucaagccugguuugcagua

SEQ ID NO: 507685 - RNA, 19 nt, Homo sapiens
  misc_RNA (1)...(19): siRNA sense strand
gaauguccaguuucaucug

SEQ ID NO: 507686 - RNA, 19 nt, Homo sapiens
  misc_RNA (1)...(19): siRNA sense strand
uuacuacgcuccaagauua

SEQ ID NO: 507687 - RNA, 19 nt, Homo sapiens
  misc_RNA (1)...(19): siRNA sense strand
gaaggagaauguccaguuu

SEQ ID NO: 507688 - RNA, 19 nt, Homo sapiens
  misc_RNA (1)...(19): siRNA sense strand
auacacaacuugagcuuua

SEQ ID NO: 507689 - RNA, 19 nt, Homo sapiens
  misc_RNA (1)...(19): siRNA sense strand
gcccaggacucaaguauga

SEQ ID NO: 507690 - RNA, 19 nt, Homo sapiens
  misc_RNA (1)...(19): siRNA sense strand
gcaauggccacuccaagua

SEQ ID NO: 507691 - RNA, 19 nt, Homo sapiens
  misc_RNA (1)...(19): siRNA sense strand
ggauauagaagaugaagaa

SEQ ID NO: 507692 - RNA, 19 nt, Homo sapiens
  misc_RNA (1)...(19): siRNA sense strand
ggagauccuugcucagauu

SEQ ID NO: 507693 - RNA, 19 nt, Homo sapiens
  misc_RNA (1)...(19): siRNA sense strand
gauagacacccaaaucgua

SEQ ID NO: 507694 - RNA, 19 nt, Homo sapiens
  misc_RNA (1)...(19): siRNA sense strand
gcucucagcucuccaaugg

SEQ ID NO: 507695 - RNA, 19 nt, Homo sapiens
  misc_RNA (1)...(19): siRNA sense strand
gagaaggccuugaggucuu

SEQ ID NO: 507696 - RNA, 19 nt, Homo sapiens
  misc_RNA (1)...(19): siRNA sense strand
ggaagaaucccgugaugau

SEQ ID NO: 507697 - RNA, 19 nt, Homo sapiens
  misc_RNA (1)...(19): siRNA sense strand
gcucagauuucuuuauaca

SEQ ID NO: 507698 - RNA, 19 nt, Homo sapiens
  misc_RNA (1)...(19): siRNA sense strand
gcacugaugugaaggaaaa

SEQ ID NO: 507699 - RNA, 19 nt, Homo sapiens
  misc_RNA (1)...(19): siRNA sense strand
cagcggaucuccaacauag

SEQ ID NO: 507700 - RNA, 19 nt, Homo sapiens
  misc_RNA (1)...(19): siRNA sense strand
caacuugagcuuuacuuaa

SEQ ID NO: 507701 - RNA, 19 nt, Homo sapiens
  misc_RNA (1)...(19): siRNA sense strand
gaucguggccuugcauuaa

SEQ ID NO: 507702 - RNA, 19 nt, Homo sapiens
  misc_RNA (1)...(19): siRNA sense strand
gccaagagcuucgucaugu

SEQ ID NO: 507703 - RNA, 19 nt, Homo sapiens
  misc_RNA (1)...(19): siRNA sense strand
gaccucagcuugucugcuu

SEQ ID NO: 507704 - RNA, 19 nt, Homo sapiens
  misc_RNA (1)...(19): siRNA sense strand
gcagauagacacccaaauc

SEQ ID NO: 507705 - RNA, 19 nt, Homo sapiens
  misc_RNA (1)...(19): siRNA sense strand
caacaagccuuugcucagu

SEQ ID NO: 507706 - RNA, 19 nt, Homo sapiens
  misc_RNA (1)...(19): siRNA sense strand
ggaggugaauggccagguu

SEQ ID NO: 507707 - RNA, 19 nt, Homo sapiens
  misc_RNA (1)...(19): siRNA sense strand
caagguucccucccacuua

SEQ ID NO: 507708 - RNA, 19 nt, Homo sapiens
  misc_RNA (1)...(19): siRNA sense strand
gaacugcgcccaggacuca

SEQ ID NO: 507709 - RNA, 19 nt, Homo sapiens
  misc_RNA (1)...(19): siRNA sense strand
gguuuaggcugaaggagaa

SEQ ID NO: 507710 - RNA, 19 nt, Homo sapiens
  misc_RNA (1)...(19): siRNA sense strand
ggucguggauggucaguuc

SEQ ID NO: 507711 - RNA, 19 nt, Homo sapiens
  misc_RNA (1)...(19): siRNA sense strand
ggaggacccugucugucaa

SEQ ID NO: 507712 - RNA, 19 nt, Homo sapiens
  misc_RNA (1)...(19): siRNA sense strand
ccaaguaccgccugaagaa

SEQ ID NO: 507713 - RNA, 19 nt, Homo sapiens
  misc_RNA (1)...(19): siRNA sense strand
ggugauaaguguuucuaca

SEQ ID NO: 507714 - RNA, 19 nt, Homo sapiens
  misc_RNA (1)...(19): siRNA sense strand
acacggacuucacaucuga

SEQ ID NO: 507715 - RNA, 19 nt, Homo sapiens
  misc_RNA (1)...(19): siRNA sense strand
cagcagcacugaugugaag

SEQ ID NO: 507716 - RNA, 19 nt, Homo sapiens
  misc_RNA (1)...(19): siRNA sense strand
gacacgcucuucaaugguu

SEQ ID NO: 507717 - RNA, 19 nt, Homo sapiens
  misc_RNA (1)...(19): siRNA sense strand
gcucuggucccacaaagaa

SEQ ID NO: 507718 - RNA, 19 nt, Homo sapiens
  misc_RNA (1)...(19): siRNA sense strand
gagaauguccaguuucauc

SEQ ID NO: 507719 - RNA, 19 nt, Homo sapiens
  misc_RNA (1)...(19): siRNA sense strand
gauggucaguucuuugaag

SEQ ID NO: 507720 - RNA, 19 nt, Homo sapiens
  misc_RNA (1)...(19): siRNA sense strand
guaggcgacuccgcuauug

SEQ ID NO: 507721 - RNA, 19 nt, Homo sapiens
  misc_RNA (1)...(19): siRNA sense strand
caucagcaaugcagaagca

SEQ ID NO: 507722 - RNA, 19 nt, Homo sapiens
  misc_RNA (1)...(19): siRNA sense strand
gggaggacccugucuguca

SEQ ID NO: 507723 - RNA, 19 nt, Homo sapiens
  misc_RNA (1)...(19): siRNA sense strand
gaggacagcuacggaccaa

SEQ ID NO: 507724 - RNA, 19 nt, Homo sapiens
  misc_RNA (1)...(19): siRNA sense strand
uaaagaugccaaggugaua

SEQ ID NO: 507725 - RNA, 19 nt, Homo sapiens
  misc_RNA (1)...(19): siRNA sense strand
ugaugcagcugaaugagau

SEQ ID NO: 507726 - RNA, 19 nt, Homo sapiens
  misc_RNA (1)...(19): siRNA sense strand
aggcacagauguuaaagau

SEQ ID NO: 507727 - RNA, 19 nt, Homo sapiens
  misc_RNA (1)...(19): siRNA sense strand
ugaaggagaauguccaguu

SEQ ID NO: 507728 - RNA, 19 nt, Homo sapiens
  misc_RNA (1)...(19): siRNA sense strand
uuaccaagcccaacgugua

SEQ ID NO: 507729 - RNA, 19 nt, Homo sapiens
  misc_RNA (1)...(19): siRNA sense strand
caacacggacuucacaucu

SEQ ID NO: 507730 - RNA, 19 nt, Homo sapiens
  misc_RNA (1)...(19): siRNA sense strand
aguccaagcuggcggcaaa

SEQ ID NO: 507731 - RNA, 19 nt, Homo sapiens
  misc_RNA (1)...(19): siRNA sense strand
gccaaggugauaaguguuu

SEQ ID NO: 507732 - RNA, 19 nt, Homo sapiens
  misc_RNA (1)...(19): siRNA sense strand
gcacgcgccuuuguuuguc

SEQ ID NO: 507733 - RNA, 19 nt, Homo sapiens
  misc_RNA (1)...(19): siRNA sense strand
gcaagguucccucccacuu

SEQ ID NO: 507734 - RNA, 19 nt, Homo sapiens
  misc_RNA (1)...(19): siRNA sense strand
guccugcagugacaagauu

SEQ ID NO: 507735 - RNA, 19 nt, Homo sapiens
  misc_RNA (1)...(19): siRNA sense strand
gaagaaucccgugaugauc

SEQ ID NO: 507736 - RNA, 19 nt, Homo sapiens
  misc_RNA (1)...(19): siRNA sense strand
acaacuugagcuuuacuua

SEQ ID NO: 507737 - RNA, 19 nt, Homo sapiens
  misc_RNA (1)...(19): siRNA sense strand
gguaggcgacuccgcuauu

SEQ ID NO: 507738 - RNA, 19 nt, Homo sapiens
  misc_RNA (1)...(19): siRNA sense strand
uaaagcaagaggacagcua

SEQ ID NO: 507739 - RNA, 19 nt, Homo sapiens
  misc_RNA (1)...(19): siRNA sense strand
aggagaauguccaguuuca

SEQ ID NO: 507740 - RNA, 19 nt, Homo sapiens
  misc_RNA (1)...(19): siRNA sense strand
ugaggucuuucguucaguu

SEQ ID NO: 507741 - RNA, 19 nt, Homo sapiens
  misc_RNA (1)...(19): siRNA sense strand
uguguaagcacgcguugua

SEQ ID NO: 507742 - RNA, 19 nt, Homo sapiens
  misc_RNA (1)...(19): siRNA sense strand
gauccuugcucagauuucu

SEQ ID NO: 507743 - RNA, 19 nt, Homo sapiens
  misc_RNA (1)...(19): siRNA sense strand
gccagccuauucccaguga

SEQ ID NO: 507744 - RNA, 19 nt, Homo sapiens
  misc_RNA (1)...(19): siRNA sense strand
ggacagcuacggaccaaaa

SEQ ID NO: 507745 - RNA, 19 nt, Homo sapiens
  misc_RNA (1)...(19): siRNA sense strand
agaaggccuugaggucuuu

SEQ ID NO: 507746 - RNA, 19 nt, Homo sapiens
  misc_RNA (1)...(19): siRNA sense strand
auaaguguuucuacaggaa

SEQ ID NO: 507747 - RNA, 19 nt, Homo sapiens
  misc_RNA (1)...(19): siRNA sense strand
gggaugacuccuucaguuc

SEQ ID NO: 507748 - RNA, 19 nt, Homo sapiens
  misc_RNA (1)...(19): siRNA sense strand
gaggugaauggccagguuu

SEQ ID NO: 507749 - RNA, 19 nt, Homo sapiens
  misc_RNA (1)...(19): siRNA sense strand
guaagcacgcguuguacug

SEQ ID NO: 507750 - RNA, 19 nt, Homo sapiens
  misc_RNA (1)...(19): siRNA sense strand
ccacgacugggaaggauga

SEQ ID NO: 507751 - RNA, 19 nt, Homo sapiens
  misc_RNA (1)...(19): siRNA sense strand
gagauccuugcucagauuu

SEQ ID NO: 507752 - RNA, 19 nt, Homo sapiens
  misc_RNA (1)...(19): siRNA sense strand
ggggaugacuccuucaguu

SEQ ID NO: 507753 - RNA, 19 nt, Homo sapiens
  misc_RNA (1)...(19): siRNA sense strand
cugacacgcucuucaaugg

SEQ ID NO: 507754 - RNA, 19 nt, Homo sapiens
  misc_RNA (1)...(19): siRNA sense strand
caaguaccgccugaagaaa

SEQ ID NO: 507755 - RNA, 19 nt, Homo sapiens
  misc_RNA (1)...(19): siRNA sense strand
aaagaugccaaggugauaa

SEQ ID NO: 507756 - RNA, 19 nt, Homo sapiens
  misc_RNA (1)...(19): siRNA sense strand
ccaagagcuucgucauguc

SEQ ID NO: 507757 - RNA, 19 nt, Homo sapiens
  misc_RNA (1)...(19): siRNA sense strand
gcauuuaccgcagguuuua

SEQ ID NO: 507758 - RNA, 19 nt, Homo sapiens
  misc_RNA (1)...(19): siRNA sense strand
gaagaugaagaaaacauga

SEQ ID NO: 507759 - RNA, 19 nt, Homo sapiens
  misc_RNA (1)...(19): siRNA sense strand
gcagcugaaugagaucaag

SEQ ID NO: 507760 - RNA, 19 nt, Homo sapiens
  misc_RNA (1)...(19): siRNA sense strand
gaugacuccuucaguucca

SEQ ID NO: 507761 - RNA, 19 nt, Homo sapiens
  misc_RNA (1)...(19): siRNA sense strand
cagcacugaugugaaggaa

SEQ ID NO: 507762 - RNA, 19 nt, Homo sapiens
  misc_RNA (1)...(19): siRNA sense strand
acacccaaaucguaaagca

SEQ ID NO: 507763 - RNA, 19 nt, Homo sapiens
  misc_RNA (1)...(19): siRNA sense strand
auagacacccaaaucguaa

SEQ ID NO: 507764 - RNA, 19 nt, Homo sapiens
  misc_RNA (1)...(19): siRNA sense strand
cagcagauagacacccaaa

SEQ ID NO: 507765 - RNA, 19 nt, Homo sapiens
  misc_RNA (1)...(19): siRNA sense strand
ugaccugaccgacaacuuc

SEQ ID NO: 507766 - RNA, 19 nt, Homo sapiens
  misc_RNA (1)...(19): siRNA sense strand
agaaucccgugaugaucuu

SEQ ID NO: 507767 - RNA, 19 nt, Homo sapiens
  misc_RNA (1)...(19): siRNA sense strand
ugacaacaggcacagaugu

SEQ ID NO: 507768 - RNA, 19 nt, Homo sapiens
  misc_RNA (1)...(19): siRNA sense strand
ccaagaacgcccugaugca

SEQ ID NO: 507769 - RNA, 19 nt, Homo sapiens
  misc_RNA (1)...(19): siRNA sense strand
gaagaaaacaugaguucca

SEQ ID NO: 507770 - RNA, 19 nt, Homo sapiens
  misc_RNA (1)...(19): siRNA sense strand
uuaaagaugccaaggugau

SEQ ID NO: 507771 - RNA, 19 nt, Homo sapiens
  misc_RNA (1)...(19): siRNA sense strand
cguggauggucaguucuuu

SEQ ID NO: 507772 - RNA, 19 nt, Homo sapiens
  misc_RNA (1)...(19): siRNA sense strand
caucugaccaggccgacuu

SEQ ID NO: 507773 - RNA, 19 nt, Homo sapiens
  misc_RNA (1)...(19): siRNA sense strand
ucaugucuguggaggugaa

SEQ ID NO: 507774 - RNA, 19 nt, Homo sapiens
  misc_RNA (1)...(19): siRNA sense strand
ggaccugccaccucucuac

SEQ ID NO: 507775 - RNA, 19 nt, Homo sapiens
  misc_RNA (1)...(19): siRNA sense strand
ccauuuacuucucgagcau

SEQ ID NO: 507776 - RNA, 19 nt, Homo sapiens
  misc_RNA (1)...(19): siRNA sense strand
ccaaggugauaaguguuuc

SEQ ID NO: 507777 - RNA, 19 nt, Homo sapiens
  misc_RNA (1)...(19): siRNA sense strand
caagagcuucgucaugucu

SEQ ID NO: 507778 - RNA, 19 nt, Homo sapiens
  misc_RNA (1)...(19): siRNA sense strand
ccagcggaucuccaacaua

SEQ ID NO: 507779 - RNA, 19 nt, Homo sapiens
  misc_RNA (1)...(19): siRNA sense strand
gcagcaauggccacuccaa

SEQ ID NO: 507780 - RNA, 19 nt, Homo sapiens
  misc_RNA (1)...(19): siRNA sense strand
cggagauccuugcucagau

SEQ ID NO: 507781 - RNA, 19 nt, Homo sapiens
  misc_RNA (1)...(19): siRNA sense strand
uuggugaccugaccgacaa

SEQ ID NO: 507782 - RNA, 19 nt, Homo sapiens
  misc_RNA (1)...(19): siRNA sense strand
uggauggucaguucuuuga

SEQ ID NO: 507783 - RNA, 19 nt, Homo sapiens
  misc_RNA (1)...(19): siRNA sense strand
gaauguccaguuucaucug

SEQ ID NO: 507784 - RNA, 19 nt, Homo sapiens
  misc_RNA (1)...(19): siRNA sense strand
ucaagccugguuugcagua

SEQ ID NO: 507785 - RNA, 19 nt, Homo sapiens
  misc_RNA (1)...(19): siRNA sense strand
ucguggagcccauuuacuu

SEQ ID NO: 507786 - RNA, 19 nt, Homo sapiens
  misc_RNA (1)...(19): siRNA sense strand
gaagaacacguguaaauua

SEQ ID NO: 507787 - RNA, 19 nt, Homo sapiens
  misc_RNA (1)...(19): siRNA sense strand
gaacacguguaaauuauug

SEQ ID NO: 507788 - RNA, 19 nt, Homo sapiens
  misc_RNA (1)...(19): siRNA sense strand
gcacaaagaauuaugguaa

SEQ ID NO: 507789 - RNA, 19 nt, Homo sapiens
  misc_RNA (1)...(19): siRNA sense strand
ggaaagcccuguacaguag

SEQ ID NO: 507790 - RNA, 19 nt, Homo sapiens
  misc_RNA (1)...(19): siRNA sense strand
gaucaucgcuucuacagau

SEQ ID NO: 507791 - RNA, 19 nt, Homo sapiens
  misc_RNA (1)...(19): siRNA sense strand
uaugggaacucuuggauua

SEQ ID NO: 507792 - RNA, 19 nt, Homo sapiens
  misc_RNA (1)...(19): siRNA sense strand
cauaagagaugaugauguu

SEQ ID NO: 507793 - RNA, 19 nt, Homo sapiens
  misc_RNA (1)...(19): siRNA sense strand
gaggaagcaucuaaaguuu

SEQ ID NO: 507794 - RNA, 19 nt, Homo sapiens
  misc_RNA (1)...(19): siRNA sense strand
gaacgcagcaauaaaguuu

SEQ ID NO: 507795 - RNA, 19 nt, Homo sapiens
  misc_RNA (1)...(19): siRNA sense strand
ggaaauaugucauguaucc

SEQ ID NO: 507796 - RNA, 19 nt, Homo sapiens
  misc_RNA (1)...(19): siRNA sense strand
ggauguaauugaacgauuu

SEQ ID NO: 507797 - RNA, 19 nt, Homo sapiens
  misc_RNA (1)...(19): siRNA sense strand
ucaagaauguuucacguuu

SEQ ID NO: 507798 - RNA, 19 nt, Homo sapiens
  misc_RNA (1)...(19): siRNA sense strand
aaaggaagcugaccugguu

SEQ ID NO: 507799 - RNA, 19 nt, Homo sapiens
  misc_RNA (1)...(19): siRNA sense strand
gguuacaacucaugaauug

SEQ ID NO: 507800 - RNA, 19 nt, Homo sapiens
  misc_RNA (1)...(19): siRNA sense strand
aaagagaucuacagacuuc

SEQ ID NO: 507801 - RNA, 19 nt, Homo sapiens
  misc_RNA (1)...(19): siRNA sense strand
gaagagaguacaacuacaa

SEQ ID NO: 507802 - RNA, 19 nt, Homo sapiens
  misc_RNA (1)...(19): siRNA sense strand
gcaaagaaacagagugcua

SEQ ID NO: 507803 - RNA, 19 nt, Homo sapiens
  misc_RNA (1)...(19): siRNA sense strand
gcaaaggcguguccuacug

SEQ ID NO: 507804 - RNA, 19 nt, Homo sapiens
  misc_RNA (1)...(19): siRNA sense strand
gagaguacaacuacaaauu

SEQ ID NO: 507805 - RNA, 19 nt, Homo sapiens
  misc_RNA (1)...(19): siRNA sense strand
gaauacagauagagcagau

SEQ ID NO: 507806 - RNA, 19 nt, Homo sapiens
  misc_RNA (1)...(19): siRNA sense strand
gcacagcugccaagucauu

SEQ ID NO: 507807 - RNA, 19 nt, Homo sapiens
  misc_RNA (1)...(19): siRNA sense strand
aagaagagcugacccagau

SEQ ID NO: 507808 - RNA, 19 nt, Homo sapiens
  misc_RNA (1)...(19): siRNA sense strand
gaggguggaugaaggagaa

SEQ ID NO: 507809 - RNA, 19 nt, Homo sapiens
  misc_RNA (1)...(19): siRNA sense strand
gauuaaugcuacuugcaaa

SEQ ID NO: 507810 - RNA, 19 nt, Homo sapiens
  misc_RNA (1)...(19): siRNA sense strand
ggagauuuguuaaugauac

SEQ ID NO: 507811 - RNA, 19 nt, Homo sapiens
  misc_RNA (1)...(19): siRNA sense strand
gcaguaaacaaucaaucua

SEQ ID NO: 507812 - RNA, 19 nt, Homo sapiens
  misc_RNA (1)...(19): siRNA sense strand
ggaagcaucuaaaguuugc

SEQ ID NO: 507813 - RNA, 19 nt, Homo sapiens
  misc_RNA (1)...(19): siRNA sense strand
caagaauguuucacguuug

SEQ ID NO: 507814 - RNA, 19 nt, Homo sapiens
  misc_RNA (1)...(19): siRNA sense strand
cuacagacuucaacacaug

SEQ ID NO: 507815 - RNA, 19 nt, Homo sapiens
  misc_RNA (1)...(19): siRNA sense strand
caaagaaacagagugcuaa

SEQ ID NO: 507816 - RNA, 19 nt, Homo sapiens
  misc_RNA (1)...(19): siRNA sense strand
gaggcagucucuccuauuc

SEQ ID NO: 507817 - RNA, 19 nt, Homo sapiens
  misc_RNA (1)...(19): siRNA sense strand
cugaagauaucaagaaugu

SEQ ID NO: 507818 - RNA, 19 nt, Homo sapiens
  misc_RNA (1)...(19): siRNA sense strand
ugacgagcacaaagaauua

SEQ ID NO: 507819 - RNA, 19 nt, Homo sapiens
  misc_RNA (1)...(19): siRNA sense strand
ccacuuuggagauuuguua

SEQ ID NO: 507820 - RNA, 19 nt, Homo sapiens
  misc_RNA (1)...(19): siRNA sense strand
caagaacgcagcaauaaag

SEQ ID NO: 507821 - RNA, 19 nt, Homo sapiens
  misc_RNA (1)...(19): siRNA sense strand
aaacugcaguaaacaauca

SEQ ID NO: 507822 - RNA, 19 nt, Homo sapiens
  misc_RNA (1)...(19): siRNA sense strand
ugaggaagcaucuaaaguu

SEQ ID NO: 507823 - RNA, 19 nt, Homo sapiens
  misc_RNA (1)...(19): siRNA sense strand
guaaggcccaggaguguuu

SEQ ID NO: 507824 - RNA, 19 nt, Homo sapiens
  misc_RNA (1)...(19): siRNA sense strand
ucauguaucugaacaacga

SEQ ID NO: 507825 - RNA, 19 nt, Homo sapiens
  misc_RNA (1)...(19): siRNA sense strand
gcucucagacuacgauauu

SEQ ID NO: 507826 - RNA, 19 nt, Homo sapiens
  misc_RNA (1)...(19): siRNA sense strand
cuagagcaauuuagcuuug

SEQ ID NO: 507827 - RNA, 19 nt, Homo sapiens
  misc_RNA (1)...(19): siRNA sense strand
gguaaaaccuggugaaaag

SEQ ID NO: 507828 - RNA, 19 nt, Homo sapiens
  misc_RNA (1)...(19): siRNA sense strand
uaacauagagccacuuugg

SEQ ID NO: 507829 - RNA, 19 nt, Homo sapiens
  misc_RNA (1)...(19): siRNA sense strand
cagcugagcaucaauacuu

SEQ ID NO: 507830 - RNA, 19 nt, Homo sapiens
  misc_RNA (1)...(19): siRNA sense strand
ugauauagcugaggaagca

SEQ ID NO: 507831 - RNA, 19 nt, Homo sapiens
  misc_RNA (1)...(19): siRNA sense strand
gagcagauucgcauucuca

SEQ ID NO: 507832 - RNA, 19 nt, Homo sapiens
  misc_RNA (1)...(19): siRNA sense strand
gaguacaacuacaaauuac

SEQ ID NO: 507833 - RNA, 19 nt, Homo sapiens
  misc_RNA (1)...(19): siRNA sense strand
cuacgauauucucucuuua

SEQ ID NO: 507834 - RNA, 19 nt, Homo sapiens
  misc_RNA (1)...(19): siRNA sense strand
caacacauguagaaacacu

SEQ ID NO: 507835 - RNA, 19 nt, Homo sapiens
  misc_RNA (1)...(19): siRNA sense strand
ggagggaaauaugucaugu

SEQ ID NO: 507836 - RNA, 19 nt, Homo sapiens
  misc_RNA (1)...(19): siRNA sense strand
guccaaaggcuuauuauag

SEQ ID NO: 507837 - RNA, 19 nt, Homo sapiens
  misc_RNA (1)...(19): siRNA sense strand
ggaagagaguacaacuaca

SEQ ID NO: 507838 - RNA, 19 nt, Homo sapiens
  misc_RNA (1)...(19): siRNA sense strand
caucaaguacugaacguuu

SEQ ID NO: 507839 - RNA, 19 nt, Homo sapiens
  misc_RNA (1)...(19): siRNA sense strand
gaccagcugagcaucaaua

SEQ ID NO: 507840 - RNA, 19 nt, Homo sapiens
  misc_RNA (1)...(19): siRNA sense strand
gcgaucacgagaacaauaa

SEQ ID NO: 507841 - RNA, 19 nt, Homo sapiens
  misc_RNA (1)...(19): siRNA sense strand
cggaacacuucaugggaua

SEQ ID NO: 507842 - RNA, 19 nt, Homo sapiens
  misc_RNA (1)...(19): siRNA sense strand
gagccacuuuggagauuug

SEQ ID NO: 507843 - RNA, 19 nt, Homo sapiens
  misc_RNA (1)...(19): siRNA sense strand
ugaagaacacguguaaauu

SEQ ID NO: 507844 - RNA, 19 nt, Homo sapiens
  misc_RNA (1)...(19): siRNA sense strand
acuacgauauucucucuuu

SEQ ID NO: 507845 - RNA, 19 nt, Homo sapiens
  misc_RNA (1)...(19): siRNA sense strand
gaaaggaaagcccuguaca

SEQ ID NO: 507846 - RNA, 19 nt, Homo sapiens
  misc_RNA (1)...(19): siRNA sense strand
agggaaauaugucauguau

SEQ ID NO: 507847 - RNA, 19 nt, Homo sapiens
  misc_RNA (1)...(19): siRNA sense strand
ccaugaagaacacguguaa

SEQ ID NO: 507848 - RNA, 19 nt, Homo sapiens
  misc_RNA (1)...(19): siRNA sense strand
gaauggcaaaugugagaaa

SEQ ID NO: 507849 - RNA, 19 nt, Homo sapiens
  misc_RNA (1)...(19): siRNA sense strand
gagcaauuuagcuuugaua

SEQ ID NO: 507850 - RNA, 19 nt, Homo sapiens
  misc_RNA (1)...(19): siRNA sense strand
uaaaggcuauggaauacag

SEQ ID NO: 507851 - RNA, 19 nt, Homo sapiens
  misc_RNA (1)...(19): siRNA sense strand
aaaguuacccaaaugaaga

SEQ ID NO: 507852 - RNA, 19 nt, Homo sapiens
  misc_RNA (1)...(19): siRNA sense strand
gcacagguaauagcaguga

SEQ ID NO: 507853 - RNA, 19 nt, Homo sapiens
  misc_RNA (1)...(19): siRNA sense strand
ggaacucgaggguggauga

SEQ ID NO: 507854 - RNA, 19 nt, Homo sapiens
  misc_RNA (1)...(19): siRNA sense strand
gaacucuuggauuagcuua

SEQ ID NO: 507855 - RNA, 19 nt, Homo sapiens
  misc_RNA (1)...(19): siRNA sense strand
gguucuagcccacauaaga

SEQ ID NO: 507856 - RNA, 19 nt, Homo sapiens
  misc_RNA (1)...(19): siRNA sense strand
ggacgaggauggguuugag

SEQ ID NO: 507857 - RNA, 19 nt, Homo sapiens
  misc_RNA (1)...(19): siRNA sense strand
guaaugaaacugacaacuc

SEQ ID NO: 507858 - RNA, 19 nt, Homo sapiens
  misc_RNA (1)...(19): siRNA sense strand
aauuauaccugacaucaag

SEQ ID NO: 507859 - RNA, 19 nt, Homo sapiens
  misc_RNA (1)...(19): siRNA sense strand
gggaagagaguacaacuac

SEQ ID NO: 507860 - RNA, 19 nt, Homo sapiens
  misc_RNA (1)...(19): siRNA sense strand
acucaugaauugggacaua

SEQ ID NO: 507861 - RNA, 19 nt, Homo sapiens
  misc_RNA (1)...(19): siRNA sense strand
ggaguccugugcauguaau

SEQ ID NO: 507862 - RNA, 19 nt, Homo sapiens
  misc_RNA (1)...(19): siRNA sense strand
ucaagaacgcagcaauaaa

SEQ ID NO: 507863 - RNA, 19 nt, Homo sapiens
  misc_RNA (1)...(19): siRNA sense strand
gagggaaauaugucaugua

SEQ ID NO: 507864 - RNA, 19 nt, Homo sapiens
  misc_RNA (1)...(19): siRNA sense strand
ccacauaagagaugaugau

SEQ ID NO: 507865 - RNA, 19 nt, Homo sapiens
  misc_RNA (1)...(19): siRNA sense strand
caaaugugagaaacgagua

SEQ ID NO: 507866 - RNA, 19 nt, Homo sapiens
  misc_RNA (1)...(19): siRNA sense strand
ggaugaaggagaagagugu

SEQ ID NO: 507867 - RNA, 19 nt, Homo sapiens
  misc_RNA (1)...(19): siRNA sense strand
ucucaagucuccacaagag

SEQ ID NO: 507868 - RNA, 19 nt, Homo sapiens
  misc_RNA (1)...(19): siRNA sense strand
ucagcauucuuguccauug

SEQ ID NO: 507869 - RNA, 19 nt, Homo sapiens
  misc_RNA (1)...(19): siRNA sense strand
uggcacaccuuuucacaua

SEQ ID NO: 507870 - RNA, 19 nt, Homo sapiens
  misc_RNA (1)...(19): siRNA sense strand
uaaucagaaucaacacaga

SEQ ID NO: 507871 - RNA, 19 nt, Homo sapiens
  misc_RNA (1)...(19): siRNA sense strand
cuaugucgaugcugaacaa

SEQ ID NO: 507872 - RNA, 19 nt, Homo sapiens
  misc_RNA (1)...(19): siRNA sense strand
gaagcugaccugguuacaa

SEQ ID NO: 507873 - RNA, 19 nt, Homo sapiens
  misc_RNA (1)...(19): siRNA sense strand
cagcagcauucgguaagaa

SEQ ID NO: 507874 - RNA, 19 nt, Homo sapiens
  misc_RNA (1)...(19): siRNA sense strand
ccaagucauuugaggaucu

SEQ ID NO: 507875 - RNA, 19 nt, Homo sapiens
  misc_RNA (1)...(19): siRNA sense strand
ggaaaggaaagcccuguac

SEQ ID NO: 507876 - RNA, 19 nt, Homo sapiens
  misc_RNA (1)...(19): siRNA sense strand
agaaccaccugaagagcuu

SEQ ID NO: 507877 - RNA, 19 nt, Homo sapiens
  misc_RNA (1)...(19): siRNA sense strand
gaccagggagggaaauaug

SEQ ID NO: 507878 - RNA, 19 nt, Homo sapiens
  misc_RNA (1)...(19): siRNA sense strand
aagcugaccugguuacaac

SEQ ID NO: 507879 - RNA, 19 nt, Homo sapiens
  misc_RNA (1)...(19): siRNA sense strand
ucuaauauccagcagcauu

SEQ ID NO: 507880 - RNA, 19 nt, Homo sapiens
  misc_RNA (1)...(19): siRNA sense strand
uagcugaggaagcaucuaa

SEQ ID NO: 507881 - RNA, 19 nt, Homo sapiens
  misc_RNA (1)...(19): siRNA sense strand
agacuacgauauucucucu

SEQ ID NO: 507882 - RNA, 19 nt, Homo sapiens
  misc_RNA (1)...(19): siRNA sense strand
aggaaagcccuguacagua

SEQ ID NO: 507883 - RNA, 19 nt, Homo sapiens
  misc_RNA (1)...(19): siRNA sense strand
gugcauguaaugaaacuga

SEQ ID NO: 507884 - RNA, 19 nt, Homo sapiens
  misc_RNA (1)...(19): siRNA sense strand
cggauggucuagcagaaug

SEQ ID NO: 507885 - RNA, 19 nt, Homo sapiens
  misc_RNA (1)...(19): siRNA sense strand
augaagaguugcucccaaa

SEQ ID NO: 507886 - RNA, 19 nt, Homo sapiens
  misc_RNA (1)...(19): siRNA sense strand
gaagaacacguguaaauua

SEQ ID NO: 507887 - RNA, 19 nt, Homo sapiens
  misc_RNA (1)...(19): siRNA sense strand
gaacacguguaaauuauug

SEQ ID NO: 507888 - RNA, 19 nt, Homo sapiens
  misc_RNA (1)...(19): siRNA sense strand
gcacaaagaauuaugguaa

SEQ ID NO: 507889 - RNA, 19 nt, Homo sapiens
  misc_RNA (1)...(19): siRNA sense strand
ggaaagcccuguacaguag

SEQ ID NO: 507890 - RNA, 19 nt, Homo sapiens
  misc_RNA (1)...(19): siRNA sense strand
gaucaucgcuucuacagau

SEQ ID NO: 507891 - RNA, 19 nt, Homo sapiens
  misc_RNA (1)...(19): siRNA sense strand
uaugggaacucuuggauua

SEQ ID NO: 507892 - RNA, 19 nt, Homo sapiens
  misc_RNA (1)...(19): siRNA sense strand
cauaagagaugaugauguu

SEQ ID NO: 507893 - RNA, 19 nt, Homo sapiens
  misc_RNA (1)...(19): siRNA sense strand
gaggaagcaucuaaaguuu

SEQ ID NO: 507894 - RNA, 19 nt, Homo sapiens
  misc_RNA (1)...(19): siRNA sense strand
gaacgcagcaauaaaguuu

SEQ ID NO: 507895 - RNA, 19 nt, Homo sapiens
  misc_RNA (1)...(19): siRNA sense strand
ggaaauaugucauguaucc

SEQ ID NO: 507896 - RNA, 19 nt, Homo sapiens
  misc_RNA (1)...(19): siRNA sense strand
ggauguaauugaacgauuu

SEQ ID NO: 507897 - RNA, 19 nt, Homo sapiens
  misc_RNA (1)...(19): siRNA sense strand
ucaagaauguuucacguuu

SEQ ID NO: 507898 - RNA, 19 nt, Homo sapiens
  misc_RNA (1)...(19): siRNA sense strand
aaaggaagcugaccugguu

SEQ ID NO: 507899 - RNA, 19 nt, Homo sapiens
  misc_RNA (1)...(19): siRNA sense strand
gguuacaacucaugaauug

SEQ ID NO: 507900 - RNA, 19 nt, Homo sapiens
  misc_RNA (1)...(19): siRNA sense strand
aaagagaucuacagacuuc

SEQ ID NO: 507901 - RNA, 19 nt, Homo sapiens
  misc_RNA (1)...(19): siRNA sense strand
gaagagaguacaacuacaa

SEQ ID NO: 507902 - RNA, 19 nt, Homo sapiens
  misc_RNA (1)...(19): siRNA sense strand
gcaaaggcguguccuacug

SEQ ID NO: 507903 - RNA, 19 nt, Homo sapiens
  misc_RNA (1)...(19): siRNA sense strand
gagaguacaacuacaaauu

SEQ ID NO: 507904 - RNA, 19 nt, Homo sapiens
  misc_RNA (1)...(19): siRNA sense strand
gaauacagauagagcagau

SEQ ID NO: 507905 - RNA, 19 nt, Homo sapiens
  misc_RNA (1)...(19): siRNA sense strand
aagaagagcugacccagau

SEQ ID NO: 507906 - RNA, 19 nt, Homo sapiens
  misc_RNA (1)...(19): siRNA sense strand
gaggguggaugaaggagaa

SEQ ID NO: 507907 - RNA, 19 nt, Homo sapiens
  misc_RNA (1)...(19): siRNA sense strand
gauuaaugcuacuugcaaa

SEQ ID NO: 507908 - RNA, 19 nt, Homo sapiens
  misc_RNA (1)...(19): siRNA sense strand
ggagauuuguuaaugauac

SEQ ID NO: 507909 - RNA, 19 nt, Homo sapiens
  misc_RNA (1)...(19): siRNA sense strand
gcaguaaacaaucaaucua

SEQ ID NO: 507910 - RNA, 19 nt, Homo sapiens
  misc_RNA (1)...(19): siRNA sense strand
ggaagcaucuaaaguuugc

SEQ ID NO: 507911 - RNA, 19 nt, Homo sapiens
  misc_RNA (1)...(19): siRNA sense strand
caagaauguuucacguuug

SEQ ID NO: 507912 - RNA, 19 nt, Homo sapiens
  misc_RNA (1)...(19): siRNA sense strand
cuacagacuucaacacaug

SEQ ID NO: 507913 - RNA, 19 nt, Homo sapiens
  misc_RNA (1)...(19): siRNA sense strand
gaggcagucucuccuauuc

SEQ ID NO: 507914 - RNA, 19 nt, Homo sapiens
  misc_RNA (1)...(19): siRNA sense strand
cugaagauaucaagaaugu

SEQ ID NO: 507915 - RNA, 19 nt, Homo sapiens
  misc_RNA (1)...(19): siRNA sense strand
ugacgagcacaaagaauua

SEQ ID NO: 507916 - RNA, 19 nt, Homo sapiens
  misc_RNA (1)...(19): siRNA sense strand
ccacuuuggagauuuguua

SEQ ID NO: 507917 - RNA, 19 nt, Homo sapiens
  misc_RNA (1)...(19): siRNA sense strand
caagaacgcagcaauaaag

SEQ ID NO: 507918 - RNA, 19 nt, Homo sapiens
  misc_RNA (1)...(19): siRNA sense strand
aaacugcaguaaacaauca

SEQ ID NO: 507919 - RNA, 19 nt, Homo sapiens
  misc_RNA (1)...(19): siRNA sense strand
ugaggaagcaucuaaaguu

SEQ ID NO: 507920 - RNA, 19 nt, Homo sapiens
  misc_RNA (1)...(19): siRNA sense strand
guaaggcccaggaguguuu

SEQ ID NO: 507921 - RNA, 19 nt, Homo sapiens
  misc_RNA (1)...(19): siRNA sense strand
ucauguaucugaacaacga

SEQ ID NO: 507922 - RNA, 19 nt, Homo sapiens
  misc_RNA (1)...(19): siRNA sense strand
gguaaaaccuggugaaaag

SEQ ID NO: 507923 - RNA, 19 nt, Homo sapiens
  misc_RNA (1)...(19): siRNA sense strand
gcucucagacuacgauauu

SEQ ID NO: 507924 - RNA, 19 nt, Homo sapiens
  misc_RNA (1)...(19): siRNA sense strand
cuagagcaauuuagcuuug

SEQ ID NO: 507925 - RNA, 19 nt, Homo sapiens
  misc_RNA (1)...(19): siRNA sense strand
uaacauagagccacuuugg

SEQ ID NO: 507926 - RNA, 19 nt, Homo sapiens
  misc_RNA (1)...(19): siRNA sense strand
cagcugagcaucaauacuu

SEQ ID NO: 507927 - RNA, 19 nt, Homo sapiens
  misc_RNA (1)...(19): siRNA sense strand
cuacgauauucucucuuua

SEQ ID NO: 507928 - RNA, 19 nt, Homo sapiens
  misc_RNA (1)...(19): siRNA sense strand
ugauauagcugaggaagca

SEQ ID NO: 507929 - RNA, 19 nt, Homo sapiens
  misc_RNA (1)...(19): siRNA sense strand
gagcagauucgcauucuca

SEQ ID NO: 507930 - RNA, 19 nt, Homo sapiens
  misc_RNA (1)...(19): siRNA sense strand
gaguacaacuacaaauuac

SEQ ID NO: 507931 - RNA, 19 nt, Homo sapiens
  misc_RNA (1)...(19): siRNA sense strand
caacacauguagaaacacu

SEQ ID NO: 507932 - RNA, 19 nt, Homo sapiens
  misc_RNA (1)...(19): siRNA sense strand
ggagggaaauaugucaugu

SEQ ID NO: 507933 - RNA, 19 nt, Homo sapiens
  misc_RNA (1)...(19): siRNA sense strand
guccaaaggcuuauuauag

SEQ ID NO: 507934 - RNA, 19 nt, Homo sapiens
  misc_RNA (1)...(19): siRNA sense strand
ggaagagaguacaacuaca

SEQ ID NO: 507935 - RNA, 19 nt, Homo sapiens
  misc_RNA (1)...(19): siRNA sense strand
caucaaguacugaacguuu

SEQ ID NO: 507936 - RNA, 19 nt, Homo sapiens
  misc_RNA (1)...(19): siRNA sense strand
gaccagcugagcaucaaua

SEQ ID NO: 507937 - RNA, 19 nt, Homo sapiens
  misc_RNA (1)...(19): siRNA sense strand
gcgaucacgagaacaauaa

SEQ ID NO: 507938 - RNA, 19 nt, Homo sapiens
  misc_RNA (1)...(19): siRNA sense strand
cggaacacuucaugggaua

SEQ ID NO: 507939 - RNA, 19 nt, Homo sapiens
  misc_RNA (1)...(19): siRNA sense strand
gagccacuuuggagauuug

SEQ ID NO: 507940 - RNA, 19 nt, Homo sapiens
  misc_RNA (1)...(19): siRNA sense strand
ugaagaacacguguaaauu

SEQ ID NO: 507941 - RNA, 19 nt, Homo sapiens
  misc_RNA (1)...(19): siRNA sense strand
gaaaggaaagcccuguaca

SEQ ID NO: 507942 - RNA, 19 nt, Homo sapiens
  misc_RNA (1)...(19): siRNA sense strand
acuacgauauucucucuuu

SEQ ID NO: 507943 - RNA, 19 nt, Homo sapiens
  misc_RNA (1)...(19): siRNA sense strand
agggaaauaugucauguau

SEQ ID NO: 507944 - RNA, 19 nt, Homo sapiens
  misc_RNA (1)...(19): siRNA sense strand
ccaugaagaacacguguaa

SEQ ID NO: 507945 - RNA, 19 nt, Homo sapiens
  misc_RNA (1)...(19): siRNA sense strand
gaauggcaaaugugagaaa

SEQ ID NO: 507946 - RNA, 19 nt, Homo sapiens
  misc_RNA (1)...(19): siRNA sense strand
gagcaauuuagcuuugaua

SEQ ID NO: 507947 - RNA, 19 nt, Homo sapiens
  misc_RNA (1)...(19): siRNA sense strand
uaaaggcuauggaauacag

SEQ ID NO: 507948 - RNA, 19 nt, Homo sapiens
  misc_RNA (1)...(19): siRNA sense strand
aaaguuacccaaaugaaga

SEQ ID NO: 507949 - RNA, 19 nt, Homo sapiens
  misc_RNA (1)...(19): siRNA sense strand
gcacagguaauagcaguga

SEQ ID NO: 507950 - RNA, 19 nt, Homo sapiens
  misc_RNA (1)...(19): siRNA sense strand
ggaacucgaggguggauga

SEQ ID NO: 507951 - RNA, 19 nt, Homo sapiens
  misc_RNA (1)...(19): siRNA sense strand
gaacucuuggauuagcuua

SEQ ID NO: 507952 - RNA, 19 nt, Homo sapiens
  misc_RNA (1)...(19): siRNA sense strand
gguucuagcccacauaaga

SEQ ID NO: 507953 - RNA, 19 nt, Homo sapiens
  misc_RNA (1)...(19): siRNA sense strand
guaaugaaacugacaacuc

SEQ ID NO: 507954 - RNA, 19 nt, Homo sapiens
  misc_RNA (1)...(19): siRNA sense strand
aauuauaccugacaucaag

SEQ ID NO: 507955 - RNA, 19 nt, Homo sapiens
  misc_RNA (1)...(19): siRNA sense strand
gggaagagaguacaacuac

SEQ ID NO: 507956 - RNA, 19 nt, Homo sapiens
  misc_RNA (1)...(19): siRNA sense strand
acucaugaauugggacaua

SEQ ID NO: 507957 - RNA, 19 nt, Homo sapiens
  misc_RNA (1)...(19): siRNA sense strand
ggaguccugugcauguaau

SEQ ID NO: 507958 - RNA, 19 nt, Homo sapiens
  misc_RNA (1)...(19): siRNA sense strand
ucaagaacgcagcaauaaa

SEQ ID NO: 507959 - RNA, 19 nt, Homo sapiens
  misc_RNA (1)...(19): siRNA sense strand
gagggaaauaugucaugua

SEQ ID NO: 507960 - RNA, 19 nt, Homo sapiens
  misc_RNA (1)...(19): siRNA sense strand
ccacauaagagaugaugau

SEQ ID NO: 507961 - RNA, 19 nt, Homo sapiens
  misc_RNA (1)...(19): siRNA sense strand
caaaugugagaaacgagua

SEQ ID NO: 507962 - RNA, 19 nt, Homo sapiens
  misc_RNA (1)...(19): siRNA sense strand
ggaugaaggagaagagugu

SEQ ID NO: 507963 - RNA, 19 nt, Homo sapiens
  misc_RNA (1)...(19): siRNA sense strand
ucucaagucuccacaagag

SEQ ID NO: 507964 - RNA, 19 nt, Homo sapiens
  misc_RNA (1)...(19): siRNA sense strand
ucagcauucuuguccauug

SEQ ID NO: 507965 - RNA, 19 nt, Homo sapiens
  misc_RNA (1)...(19): siRNA sense strand
uggcacaccuuuucacaua

SEQ ID NO: 507966 - RNA, 19 nt, Homo sapiens
  misc_RNA (1)...(19): siRNA sense strand
uaaucagaaucaacacaga

SEQ ID NO: 507967 - RNA, 19 nt, Homo sapiens
  misc_RNA (1)...(19): siRNA sense strand
cuaugucgaugcugaacaa

SEQ ID NO: 507968 - RNA, 19 nt, Homo sapiens
  misc_RNA (1)...(19): siRNA sense strand
gaagcugaccugguuacaa

SEQ ID NO: 507969 - RNA, 19 nt, Homo sapiens
  misc_RNA (1)...(19): siRNA sense strand
cagcagcauucgguaagaa

SEQ ID NO: 507970 - RNA, 19 nt, Homo sapiens
  misc_RNA (1)...(19): siRNA sense strand
ggaaaggaaagcccuguac

SEQ ID NO: 507971 - RNA, 19 nt, Homo sapiens
  misc_RNA (1)...(19): siRNA sense strand
agaaccaccugaagagcuu

SEQ ID NO: 507972 - RNA, 19 nt, Homo sapiens
  misc_RNA (1)...(19): siRNA sense strand
gaccagggagggaaauaug

SEQ ID NO: 507973 - RNA, 19 nt, Homo sapiens
  misc_RNA (1)...(19): siRNA sense strand
aagcugaccugguuacaac

SEQ ID NO: 507974 - RNA, 19 nt, Homo sapiens
  misc_RNA (1)...(19): siRNA sense strand
ucuaauauccagcagcauu

SEQ ID NO: 507975 - RNA, 19 nt, Homo sapiens
  misc_RNA (1)...(19): siRNA sense strand
uagcugaggaagcaucuaa

SEQ ID NO: 507976 - RNA, 19 nt, Homo sapiens
  misc_RNA (1)...(19): siRNA sense strand
ggccgaauauaacauagag

SEQ ID NO: 507977 - RNA, 19 nt, Homo sapiens
  misc_RNA (1)...(19): siRNA sense strand
aggaaagcccuguacagua

SEQ ID NO: 507978 - RNA, 19 nt, Homo sapiens
  misc_RNA (1)...(19): siRNA sense strand
gugcauguaaugaaacuga

SEQ ID NO: 507979 - RNA, 19 nt, Homo sapiens
  misc_RNA (1)...(19): siRNA sense strand
cggauggucuagcagaaug

SEQ ID NO: 507980 - RNA, 19 nt, Homo sapiens
  misc_RNA (1)...(19): siRNA sense strand
agacuacgauauucucucu

SEQ ID NO: 507981 - RNA, 19 nt, Homo sapiens
  misc_RNA (1)...(19): siRNA sense strand
augaagaguugcucccaaa

SEQ ID NO: 507982 - RNA, 19 nt, Homo sapiens
  misc_RNA (1)...(19): siRNA sense strand
gagcuaauugacagaguug

SEQ ID NO: 507983 - RNA, 19 nt, Homo sapiens
  misc_RNA (1)...(19): siRNA sense strand
uaccugacaucaaguacug

SEQ ID NO: 507984 - RNA, 19 nt, Homo sapiens
  misc_RNA (1)...(19): siRNA sense strand
gauaugggaacucuuggau

SEQ ID NO: 507985 - RNA, 19 nt, Homo sapiens
  misc_RNA (1)...(19): siRNA sense strand
gaacacuucaugggauaau

SEQ ID NO: 507986 - RNA, 19 nt, Homo sapiens
  misc_RNA (1)...(19): siRNA sense strand
gaagaaugccgauauguuu

SEQ ID NO: 507987 - RNA, 19 nt, Homo sapiens
  misc_RNA (1)...(19): siRNA sense strand
gaacacaacccaucuacaa

SEQ ID NO: 507988 - RNA, 19 nt, Homo sapiens
  misc_RNA (1)...(19): siRNA sense strand
guacaucucugaccagguu

SEQ ID NO: 507989 - RNA, 19 nt, Homo sapiens
  misc_RNA (1)...(19): siRNA sense strand
gaaagccaaugaagaguau

SEQ ID NO: 507990 - RNA, 19 nt, Homo sapiens
  misc_RNA (1)...(19): siRNA sense strand
gagcagacgugcccuccua

SEQ ID NO: 507991 - RNA, 19 nt, Homo sapiens
  misc_RNA (1)...(19): siRNA sense strand
gaaaguggacacacacaaa

SEQ ID NO: 507992 - RNA, 19 nt, Homo sapiens
  misc_RNA (1)...(19): siRNA sense strand
gagaguacaucacguugga

SEQ ID NO: 507993 - RNA, 19 nt, Homo sapiens
  misc_RNA (1)...(19): siRNA sense strand
gaaaaucuccuucaucauu

SEQ ID NO: 507994 - RNA, 19 nt, Homo sapiens
  misc_RNA (1)...(19): siRNA sense strand
gaauggauacgcggaauuu

SEQ ID NO: 507995 - RNA, 19 nt, Homo sapiens
  misc_RNA (1)...(19): siRNA sense strand
gcauggaggagaaaucuuu

SEQ ID NO: 507996 - RNA, 19 nt, Homo sapiens
  misc_RNA (1)...(19): siRNA sense strand
cuucagcgaugccaaguuu

SEQ ID NO: 507997 - RNA, 19 nt, Homo sapiens
  misc_RNA (1)...(19): siRNA sense strand
gcauccauauuucacugua

SEQ ID NO: 507998 - RNA, 19 nt, Homo sapiens
  misc_RNA (1)...(19): siRNA sense strand
ggacaugagaccaacgaaa

SEQ ID NO: 507999 - RNA, 19 nt, Homo sapiens
  misc_RNA (1)...(19): siRNA sense strand
ccaacaaggugcugagagu

SEQ ID NO: 508000 - RNA, 19 nt, Homo sapiens
  misc_RNA (1)...(19): siRNA sense strand
ugaccagguugcauccaua

SEQ ID NO: 508001 - RNA, 19 nt, Homo sapiens
  misc_RNA (1)...(19): siRNA sense strand
ccagguugcauccauauuu

SEQ ID NO: 508002 - RNA, 19 nt, Homo sapiens
  misc_RNA (1)...(19): siRNA sense strand
gaggagauggagagcguua

SEQ ID NO: 508003 - RNA, 19 nt, Homo sapiens
  misc_RNA (1)...(19): siRNA sense strand
gcaguggagcagauucuuu

SEQ ID NO: 508004 - RNA, 19 nt, Homo sapiens
  misc_RNA (1)...(19): siRNA sense strand
ugaaagccaaugaagagua

SEQ ID NO: 508005 - RNA, 19 nt, Homo sapiens
  misc_RNA (1)...(19): siRNA sense strand
ggaaaagccacgagaauga

SEQ ID NO: 508006 - RNA, 19 nt, Homo sapiens
  misc_RNA (1)...(19): siRNA sense strand
ugaagaaugccgauauguu

SEQ ID NO: 508007 - RNA, 19 nt, Homo sapiens
  misc_RNA (1)...(19): siRNA sense strand
aagaaugcauggaggagaa

SEQ ID NO: 508008 - RNA, 19 nt, Homo sapiens
  misc_RNA (1)...(19): siRNA sense strand
ggugaaagccaaugaagag

SEQ ID NO: 508009 - RNA, 19 nt, Homo sapiens
  misc_RNA (1)...(19): siRNA sense strand
ggacacacacaaagaacug

SEQ ID NO: 508010 - RNA, 19 nt, Homo sapiens
  misc_RNA (1)...(19): siRNA sense strand
gcgggcagccuuucgacua

SEQ ID NO: 508011 - RNA, 19 nt, Homo sapiens
  misc_RNA (1)...(19): siRNA sense strand
cgaccagucuucgaaagug

SEQ ID NO: 508012 - RNA, 19 nt, Homo sapiens
  misc_RNA (1)...(19): siRNA sense strand
cagguugcauccauauuuc

SEQ ID NO: 508013 - RNA, 19 nt, Homo sapiens
  misc_RNA (1)...(19): siRNA sense strand
ccaccucccugcagacaag

SEQ ID NO: 508014 - RNA, 19 nt, Homo sapiens
  misc_RNA (1)...(19): siRNA sense strand
caaccacccauacaccaaa

SEQ ID NO: 508015 - RNA, 19 nt, Homo sapiens
  misc_RNA (1)...(19): siRNA sense strand
cauccauauuucacuguaa

SEQ ID NO: 508016 - RNA, 19 nt, Homo sapiens
  misc_RNA (1)...(19): siRNA sense strand
acacacaaagaacugauaa

SEQ ID NO: 508017 - RNA, 19 nt, Homo sapiens
  misc_RNA (1)...(19): siRNA sense strand
gcaggugaaagccaaugaa

SEQ ID NO: 508018 - RNA, 19 nt, Homo sapiens
  misc_RNA (1)...(19): siRNA sense strand
gggugggcccuuugaauga

SEQ ID NO: 508019 - RNA, 19 nt, Homo sapiens
  misc_RNA (1)...(19): siRNA sense strand
cacaacccaucuacaagug

SEQ ID NO: 508020 - RNA, 19 nt, Homo sapiens
  misc_RNA (1)...(19): siRNA sense strand
gggcagccuuucgacuauu

SEQ ID NO: 508021 - RNA, 19 nt, Homo sapiens
  misc_RNA (1)...(19): siRNA sense strand
ccagaguccagauaccuuu

SEQ ID NO: 508022 - RNA, 19 nt, Homo sapiens
  misc_RNA (1)...(19): siRNA sense strand
aagccaaugaagaguauua

SEQ ID NO: 508023 - RNA, 19 nt, Homo sapiens
  misc_RNA (1)...(19): siRNA sense strand
guagcgaccagucuucgaa

SEQ ID NO: 508024 - RNA, 19 nt, Homo sapiens
  misc_RNA (1)...(19): siRNA sense strand
ugugaagaaugccgauaug

SEQ ID NO: 508025 - RNA, 19 nt, Homo sapiens
  misc_RNA (1)...(19): siRNA sense strand
gacaugagaccaacgaaaa

SEQ ID NO: 508026 - RNA, 19 nt, Homo sapiens
  misc_RNA (1)...(19): siRNA sense strand
ccuagaauuccuccugaaa

SEQ ID NO: 508027 - RNA, 19 nt, Homo sapiens
  misc_RNA (1)...(19): siRNA sense strand
ccacccauacaccaaauug

SEQ ID NO: 508028 - RNA, 19 nt, Homo sapiens
  misc_RNA (1)...(19): siRNA sense strand
gcaguagcgaccagucuuc

SEQ ID NO: 508029 - RNA, 19 nt, Homo sapiens
  misc_RNA (1)...(19): siRNA sense strand
cccauacaccaaauuguuu

SEQ ID NO: 508030 - RNA, 19 nt, Homo sapiens
  misc_RNA (1)...(19): siRNA sense strand
cagaguccagauaccuuua

SEQ ID NO: 508031 - RNA, 19 nt, Homo sapiens
  misc_RNA (1)...(19): siRNA sense strand
ccaaugaagaguauuacca

SEQ ID NO: 508032 - RNA, 19 nt, Homo sapiens
  misc_RNA (1)...(19): siRNA sense strand
cuucgaaaguggacacaca

SEQ ID NO: 508033 - RNA, 19 nt, Homo sapiens
  misc_RNA (1)...(19): siRNA sense strand
ggcaaaaucugaacacaac

SEQ ID NO: 508034 - RNA, 19 nt, Homo sapiens
  misc_RNA (1)...(19): siRNA sense strand
cgggcagccuuucgacuau

SEQ ID NO: 508035 - RNA, 19 nt, Homo sapiens
  misc_RNA (1)...(19): siRNA sense strand
acacaacccaucuacaagu

SEQ ID NO: 508036 - RNA, 19 nt, Homo sapiens
  misc_RNA (1)...(19): siRNA sense strand
ggcagccuuucgacuauuc

SEQ ID NO: 508037 - RNA, 19 nt, Homo sapiens
  misc_RNA (1)...(19): siRNA sense strand
agaaugaaauccgcuacca

SEQ ID NO: 508038 - RNA, 19 nt, Homo sapiens
  misc_RNA (1)...(19): siRNA sense strand
gaaaagccacgagaaugaa

SEQ ID NO: 508039 - RNA, 19 nt, Homo sapiens
  misc_RNA (1)...(19): siRNA sense strand
cugggaagauccuguacau

SEQ ID NO: 508040 - RNA, 19 nt, Homo sapiens
  misc_RNA (1)...(19): siRNA sense strand
cgaaaguggacacacacaa

SEQ ID NO: 508041 - RNA, 19 nt, Homo sapiens
  misc_RNA (1)...(19): siRNA sense strand
gaccagguugcauccauau

SEQ ID NO: 508042 - RNA, 19 nt, Homo sapiens
  misc_RNA (1)...(19): siRNA sense strand
aaaaucuccuucaucauug

SEQ ID NO: 508043 - RNA, 19 nt, Homo sapiens
  misc_RNA (1)...(19): siRNA sense strand
uuucgacuauucucccauu

SEQ ID NO: 508044 - RNA, 19 nt, Homo sapiens
  misc_RNA (1)...(19): siRNA sense strand
gagcagauucuuuuacuca

SEQ ID NO: 508045 - RNA, 19 nt, Homo sapiens
  misc_RNA (1)...(19): siRNA sense strand
caugugcaguggagcagau

SEQ ID NO: 508046 - RNA, 19 nt, Homo sapiens
  misc_RNA (1)...(19): siRNA sense strand
gagcgugaagcaggugaaa

SEQ ID NO: 508047 - RNA, 19 nt, Homo sapiens
  misc_RNA (1)...(19): siRNA sense strand
caaggugcgggaccaacaa

SEQ ID NO: 508048 - RNA, 19 nt, Homo sapiens
  misc_RNA (1)...(19): siRNA sense strand
guacgcuggccaccuugaa

SEQ ID NO: 508049 - RNA, 19 nt, Homo sapiens
  misc_RNA (1)...(19): siRNA sense strand
ccaguggacaugagaccaa

SEQ ID NO: 508050 - RNA, 19 nt, Homo sapiens
  misc_RNA (1)...(19): siRNA sense strand
ggaaggagcuggggaugcu

SEQ ID NO: 508051 - RNA, 19 nt, Homo sapiens
  misc_RNA (1)...(19): siRNA sense strand
cacacacaaagaacugaua

SEQ ID NO: 508052 - RNA, 19 nt, Homo sapiens
  misc_RNA (1)...(19): siRNA sense strand
agugcacucugguuaugaa

SEQ ID NO: 508053 - RNA, 19 nt, Homo sapiens
  misc_RNA (1)...(19): siRNA sense strand
aagaaugccgauauguuug

SEQ ID NO: 508054 - RNA, 19 nt, Homo sapiens
  misc_RNA (1)...(19): siRNA sense strand
cguuaccucugagcacauu

SEQ ID NO: 508055 - RNA, 19 nt, Homo sapiens
  misc_RNA (1)...(19): siRNA sense strand
gccaagggcaaggccagua

SEQ ID NO: 508056 - RNA, 19 nt, Homo sapiens
  misc_RNA (1)...(19): siRNA sense strand
gaagaaugccgauauguuu

SEQ ID NO: 508057 - RNA, 19 nt, Homo sapiens
  misc_RNA (1)...(19): siRNA sense strand
gaacacaacccaucuacaa

SEQ ID NO: 508058 - RNA, 19 nt, Homo sapiens
  misc_RNA (1)...(19): siRNA sense strand
guacaucucugaccagguu

SEQ ID NO: 508059 - RNA, 19 nt, Homo sapiens
  misc_RNA (1)...(19): siRNA sense strand
gaaagccaaugaagaguau

SEQ ID NO: 508060 - RNA, 19 nt, Homo sapiens
  misc_RNA (1)...(19): siRNA sense strand
gagcagacgugcccuccua

SEQ ID NO: 508061 - RNA, 19 nt, Homo sapiens
  misc_RNA (1)...(19): siRNA sense strand
gaaaguggacacacacaaa

SEQ ID NO: 508062 - RNA, 19 nt, Homo sapiens
  misc_RNA (1)...(19): siRNA sense strand
gagaguacaucacguugga

SEQ ID NO: 508063 - RNA, 19 nt, Homo sapiens
  misc_RNA (1)...(19): siRNA sense strand
gaaaaucuccuucaucauu

SEQ ID NO: 508064 - RNA, 19 nt, Homo sapiens
  misc_RNA (1)...(19): siRNA sense strand
gaauggauacgcggaauuu

SEQ ID NO: 508065 - RNA, 19 nt, Homo sapiens
  misc_RNA (1)...(19): siRNA sense strand
gcauggaggagaaaucuuu

SEQ ID NO: 508066 - RNA, 19 nt, Homo sapiens
  misc_RNA (1)...(19): siRNA sense strand
cuucagcgaugccaaguuu

SEQ ID NO: 508067 - RNA, 19 nt, Homo sapiens
  misc_RNA (1)...(19): siRNA sense strand
gcauccauauuucacugua

SEQ ID NO: 508068 - RNA, 19 nt, Homo sapiens
  misc_RNA (1)...(19): siRNA sense strand
ggacaugagaccaacgaaa

SEQ ID NO: 508069 - RNA, 19 nt, Homo sapiens
  misc_RNA (1)...(19): siRNA sense strand
ccaacaaggugcugagagu

SEQ ID NO: 508070 - RNA, 19 nt, Homo sapiens
  misc_RNA (1)...(19): siRNA sense strand
ugaccagguugcauccaua

SEQ ID NO: 508071 - RNA, 19 nt, Homo sapiens
  misc_RNA (1)...(19): siRNA sense strand
ccagguugcauccauauuu

SEQ ID NO: 508072 - RNA, 19 nt, Homo sapiens
  misc_RNA (1)...(19): siRNA sense strand
gaggagauggagagcguua

SEQ ID NO: 508073 - RNA, 19 nt, Homo sapiens
  misc_RNA (1)...(19): siRNA sense strand
gcaguggagcagauucuuu

SEQ ID NO: 508074 - RNA, 19 nt, Homo sapiens
  misc_RNA (1)...(19): siRNA sense strand
ugaaagccaaugaagagua

SEQ ID NO: 508075 - RNA, 19 nt, Homo sapiens
  misc_RNA (1)...(19): siRNA sense strand
ggaaaagccacgagaauga

SEQ ID NO: 508076 - RNA, 19 nt, Homo sapiens
  misc_RNA (1)...(19): siRNA sense strand
ugaagaaugccgauauguu

SEQ ID NO: 508077 - RNA, 19 nt, Homo sapiens
  misc_RNA (1)...(19): siRNA sense strand
aagaaugcauggaggagaa

SEQ ID NO: 508078 - RNA, 19 nt, Homo sapiens
  misc_RNA (1)...(19): siRNA sense strand
ggugaaagccaaugaagag

SEQ ID NO: 508079 - RNA, 19 nt, Homo sapiens
  misc_RNA (1)...(19): siRNA sense strand
ggacacacacaaagaacug

SEQ ID NO: 508080 - RNA, 19 nt, Homo sapiens
  misc_RNA (1)...(19): siRNA sense strand
gcgggcagccuuucgacua

SEQ ID NO: 508081 - RNA, 19 nt, Homo sapiens
  misc_RNA (1)...(19): siRNA sense strand
cgaccagucuucgaaagug

SEQ ID NO: 508082 - RNA, 19 nt, Homo sapiens
  misc_RNA (1)...(19): siRNA sense strand
cagguugcauccauauuuc

SEQ ID NO: 508083 - RNA, 19 nt, Homo sapiens
  misc_RNA (1)...(19): siRNA sense strand
ccaccucccugcagacaag

SEQ ID NO: 508084 - RNA, 19 nt, Homo sapiens
  misc_RNA (1)...(19): siRNA sense strand
caaccacccauacaccaaa

SEQ ID NO: 508085 - RNA, 19 nt, Homo sapiens
  misc_RNA (1)...(19): siRNA sense strand
cauccauauuucacuguaa

SEQ ID NO: 508086 - RNA, 19 nt, Homo sapiens
  misc_RNA (1)...(19): siRNA sense strand
acacacaaagaacugauaa

SEQ ID NO: 508087 - RNA, 19 nt, Homo sapiens
  misc_RNA (1)...(19): siRNA sense strand
gcaggugaaagccaaugaa

SEQ ID NO: 508088 - RNA, 19 nt, Homo sapiens
  misc_RNA (1)...(19): siRNA sense strand
gggugggcccuuugaauga

SEQ ID NO: 508089 - RNA, 19 nt, Homo sapiens
  misc_RNA (1)...(19): siRNA sense strand
cacaacccaucuacaagug

SEQ ID NO: 508090 - RNA, 19 nt, Homo sapiens
  misc_RNA (1)...(19): siRNA sense strand
gggcagccuuucgacuauu

SEQ ID NO: 508091 - RNA, 19 nt, Homo sapiens
  misc_RNA (1)...(19): siRNA sense strand
ccagaguccagauaccuuu

SEQ ID NO: 508092 - RNA, 19 nt, Homo sapiens
  misc_RNA (1)...(19): siRNA sense strand
aagccaaugaagaguauua

SEQ ID NO: 508093 - RNA, 19 nt, Homo sapiens
  misc_RNA (1)...(19): siRNA sense strand
guagcgaccagucuucgaa

SEQ ID NO: 508094 - RNA, 19 nt, Homo sapiens
  misc_RNA (1)...(19): siRNA sense strand
ugugaagaaugccgauaug

SEQ ID NO: 508095 - RNA, 19 nt, Homo sapiens
  misc_RNA (1)...(19): siRNA sense strand
gacaugagaccaacgaaaa

SEQ ID NO: 508096 - RNA, 19 nt, Homo sapiens
  misc_RNA (1)...(19): siRNA sense strand
ccuagaauuccuccugaaa

SEQ ID NO: 508097 - RNA, 19 nt, Homo sapiens
  misc_RNA (1)...(19): siRNA sense strand
ccacccauacaccaaauug

SEQ ID NO: 508098 - RNA, 19 nt, Homo sapiens
  misc_RNA (1)...(19): siRNA sense strand
gcaguagcgaccagucuuc

SEQ ID NO: 508099 - RNA, 19 nt, Homo sapiens
  misc_RNA (1)...(19): siRNA sense strand
cccauacaccaaauuguuu

SEQ ID NO: 508100 - RNA, 19 nt, Homo sapiens
  misc_RNA (1)...(19): siRNA sense strand
cagaguccagauaccuuua

SEQ ID NO: 508101 - RNA, 19 nt, Homo sapiens
  misc_RNA (1)...(19): siRNA sense strand
ccaaugaagaguauuacca

SEQ ID NO: 508102 - RNA, 19 nt, Homo sapiens
  misc_RNA (1)...(19): siRNA sense strand
cuucgaaaguggacacaca

SEQ ID NO: 508103 - RNA, 19 nt, Homo sapiens
  misc_RNA (1)...(19): siRNA sense strand
ggcaaaaucugaacacaac

SEQ ID NO: 508104 - RNA, 19 nt, Homo sapiens
  misc_RNA (1)...(19): siRNA sense strand
cgggcagccuuucgacuau

SEQ ID NO: 508105 - RNA, 19 nt, Homo sapiens
  misc_RNA (1)...(19): siRNA sense strand
acacaacccaucuacaagu

SEQ ID NO: 508106 - RNA, 19 nt, Homo sapiens
  misc_RNA (1)...(19): siRNA sense strand
ggcagccuuucgacuauuc

SEQ ID NO: 508107 - RNA, 19 nt, Homo sapiens
  misc_RNA (1)...(19): siRNA sense strand
agaaugaaauccgcuacca

SEQ ID NO: 508108 - RNA, 19 nt, Homo sapiens
  misc_RNA (1)...(19): siRNA sense strand
gaaaagccacgagaaugaa

SEQ ID NO: 508109 - RNA, 19 nt, Homo sapiens
  misc_RNA (1)...(19): siRNA sense strand
cugggaagauccuguacau

SEQ ID NO: 508110 - RNA, 19 nt, Homo sapiens
  misc_RNA (1)...(19): siRNA sense strand
cgaaaguggacacacacaa

SEQ ID NO: 508111 - RNA, 19 nt, Homo sapiens
  misc_RNA (1)...(19): siRNA sense strand
gaccagguugcauccauau

SEQ ID NO: 508112 - RNA, 19 nt, Homo sapiens
  misc_RNA (1)...(19): siRNA sense strand
aaaaucuccuucaucauug

SEQ ID NO: 508113 - RNA, 19 nt, Homo sapiens
  misc_RNA (1)...(19): siRNA sense strand
uuucgacuauucucccauu

SEQ ID NO: 508114 - RNA, 19 nt, Homo sapiens
  misc_RNA (1)...(19): siRNA sense strand
gagcagauucuuuuacuca

SEQ ID NO: 508115 - RNA, 19 nt, Homo sapiens
  misc_RNA (1)...(19): siRNA sense strand
caugugcaguggagcagau

SEQ ID NO: 508116 - RNA, 19 nt, Homo sapiens
  misc_RNA (1)...(19): siRNA sense strand
gagcgugaagcaggugaaa

SEQ ID NO: 508117 - RNA, 19 nt, Homo sapiens
  misc_RNA (1)...(19): siRNA sense strand
caaggugcgggaccaacaa

SEQ ID NO: 508118 - RNA, 19 nt, Homo sapiens
  misc_RNA (1)...(19): siRNA sense strand
guacgcuggccaccuugaa

SEQ ID NO: 508119 - RNA, 19 nt, Homo sapiens
  misc_RNA (1)...(19): siRNA sense strand
ccaguggacaugagaccaa

SEQ ID NO: 508120 - RNA, 19 nt, Homo sapiens
  misc_RNA (1)...(19): siRNA sense strand
ggaaggagcuggggaugcu

SEQ ID NO: 508121 - RNA, 19 nt, Homo sapiens
  misc_RNA (1)...(19): siRNA sense strand
cacacacaaagaacugaua

SEQ ID NO: 508122 - RNA, 19 nt, Homo sapiens
  misc_RNA (1)...(19): siRNA sense strand
agugcacucugguuaugaa

SEQ ID NO: 508123 - RNA, 19 nt, Homo sapiens
  misc_RNA (1)...(19): siRNA sense strand
aagaaugccgauauguuug

SEQ ID NO: 508124 - RNA, 19 nt, Homo sapiens
  misc_RNA (1)...(19): siRNA sense strand
cguuaccucugagcacauu

SEQ ID NO: 508125 - RNA, 19 nt, Homo sapiens
  misc_RNA (1)...(19): siRNA sense strand
gccaagggcaaggccagua

SEQ ID NO: 508126 - RNA, 19 nt, Homo sapiens
  misc_RNA (1)...(19): siRNA sense strand
ggaaauggauggacugugu

SEQ ID NO: 508127 - RNA, 19 nt, Homo sapiens
  misc_RNA (1)...(19): siRNA sense strand
gauagacgcugcuacuuug

SEQ ID NO: 508128 - RNA, 19 nt, Homo sapiens
  misc_RNA (1)...(19): siRNA sense strand
gaugaaagauucgguaguu

SEQ ID NO: 508129 - RNA, 19 nt, Homo sapiens
  misc_RNA (1)...(19): siRNA sense strand
caauccaacucacuuauaa

SEQ ID NO: 508130 - RNA, 19 nt, Homo sapiens
  misc_RNA (1)...(19): siRNA sense strand
cagauuuccugucuacuua

SEQ ID NO: 508131 - RNA, 19 nt, Homo sapiens
  misc_RNA (1)...(19): siRNA sense strand
acacaugacucaaguauuc

SEQ ID NO: 508132 - RNA, 19 nt, Homo sapiens
  misc_RNA (1)...(19): siRNA sense strand
acaaggaucuacagucuuu

SEQ ID NO: 508133 - RNA, 19 nt, Homo sapiens
  misc_RNA (1)...(19): siRNA sense strand
gcaaagacacggugcaaau

SEQ ID NO: 508134 - RNA, 19 nt, Homo sapiens
  misc_RNA (1)...(19): siRNA sense strand
gcaaauccaugauaucacu

SEQ ID NO: 508135 - RNA, 19 nt, Homo sapiens
  misc_RNA (1)...(19): siRNA sense strand
gaaagauucgguaguuauu

SEQ ID NO: 508136 - RNA, 19 nt, Homo sapiens
  misc_RNA (1)...(19): siRNA sense strand
gaagguagcccagcuugaa

SEQ ID NO: 508137 - RNA, 19 nt, Homo sapiens
  misc_RNA (1)...(19): siRNA sense strand
gcaauccaacucacuuaua

SEQ ID NO: 508138 - RNA, 19 nt, Homo sapiens
  misc_RNA (1)...(19): siRNA sense strand
uuaaaccucugaaagcuaa

SEQ ID NO: 508139 - RNA, 19 nt, Homo sapiens
  misc_RNA (1)...(19): siRNA sense strand
gaagucaaacagcugauaa

SEQ ID NO: 508140 - RNA, 19 nt, Homo sapiens
  misc_RNA (1)...(19): siRNA sense strand
caucuacuccuaaugguua

SEQ ID NO: 508141 - RNA, 19 nt, Homo sapiens
  misc_RNA (1)...(19): siRNA sense strand
agacaacugcugcaucuua

SEQ ID NO: 508142 - RNA, 19 nt, Homo sapiens
  misc_RNA (1)...(19): siRNA sense strand
gauaaucccauucaacaga

SEQ ID NO: 508143 - RNA, 19 nt, Homo sapiens
  misc_RNA (1)...(19): siRNA sense strand
caauggaguuuauuaccaa

SEQ ID NO: 508144 - RNA, 19 nt, Homo sapiens
  misc_RNA (1)...(19): siRNA sense strand
gaccugaagcugacaagua

SEQ ID NO: 508145 - RNA, 19 nt, Homo sapiens
  misc_RNA (1)...(19): siRNA sense strand
ccaacuaccuguggcauug

SEQ ID NO: 508146 - RNA, 19 nt, Homo sapiens
  misc_RNA (1)...(19): siRNA sense strand
acaaguaccgccuaacaua

SEQ ID NO: 508147 - RNA, 19 nt, Homo sapiens
  misc_RNA (1)...(19): siRNA sense strand
gauggacuguguuucagaa

SEQ ID NO: 508148 - RNA, 19 nt, Homo sapiens
  misc_RNA (1)...(19): siRNA sense strand
gaaauaugaagcaucgauu

SEQ ID NO: 508149 - RNA, 19 nt, Homo sapiens
  misc_RNA (1)...(19): siRNA sense strand
gaaccaguacugcagacua

SEQ ID NO: 508150 - RNA, 19 nt, Homo sapiens
  misc_RNA (1)...(19): siRNA sense strand
gcagauuuccugucuacuu

SEQ ID NO: 508151 - RNA, 19 nt, Homo sapiens
  misc_RNA (1)...(19): siRNA sense strand
gagacuugauggcagugua

SEQ ID NO: 508152 - RNA, 19 nt, Homo sapiens
  misc_RNA (1)...(19): siRNA sense strand
ugacucaaguauucgauau

SEQ ID NO: 508153 - RNA, 19 nt, Homo sapiens
  misc_RNA (1)...(19): siRNA sense strand
gaacaggauggaucugguu

SEQ ID NO: 508154 - RNA, 19 nt, Homo sapiens
  misc_RNA (1)...(19): siRNA sense strand
gcugggaaaugagaagauu

SEQ ID NO: 508155 - RNA, 19 nt, Homo sapiens
  misc_RNA (1)...(19): siRNA sense strand
gaagauaaucccauucaac

SEQ ID NO: 508156 - RNA, 19 nt, Homo sapiens
  misc_RNA (1)...(19): siRNA sense strand
uaacacaugacucaaguau

SEQ ID NO: 508157 - RNA, 19 nt, Homo sapiens
  misc_RNA (1)...(19): siRNA sense strand
ccuaacauaugccuacuuc

SEQ ID NO: 508158 - RNA, 19 nt, Homo sapiens
  misc_RNA (1)...(19): siRNA sense strand
caucccauaugcauuaaga

SEQ ID NO: 508159 - RNA, 19 nt, Homo sapiens
  misc_RNA (1)...(19): siRNA sense strand
ggacuguguuucagaagag

SEQ ID NO: 508160 - RNA, 19 nt, Homo sapiens
  misc_RNA (1)...(19): siRNA sense strand
ccaggaaccuugcaaagac

SEQ ID NO: 508161 - RNA, 19 nt, Homo sapiens
  misc_RNA (1)...(19): siRNA sense strand
aaaccaaaguagacaagga

SEQ ID NO: 508162 - RNA, 19 nt, Homo sapiens
  misc_RNA (1)...(19): siRNA sense strand
ggaucugguugguggauga

SEQ ID NO: 508163 - RNA, 19 nt, Homo sapiens
  misc_RNA (1)...(19): siRNA sense strand
gaaggcaacugugcugaac

SEQ ID NO: 508164 - RNA, 19 nt, Homo sapiens
  misc_RNA (1)...(19): siRNA sense strand
gcugacaaguaccgccuaa

SEQ ID NO: 508165 - RNA, 19 nt, Homo sapiens
  misc_RNA (1)...(19): siRNA sense strand
ucugaaagcuaaccagcaa

SEQ ID NO: 508166 - RNA, 19 nt, Homo sapiens
  misc_RNA (1)...(19): siRNA sense strand
ucacuuauaauccugauga

SEQ ID NO: 508167 - RNA, 19 nt, Homo sapiens
  misc_RNA (1)...(19): siRNA sense strand
cuacuucuaugcucuuuua

SEQ ID NO: 508168 - RNA, 19 nt, Homo sapiens
  misc_RNA (1)...(19): siRNA sense strand
gacaacugcugcaucuuag

SEQ ID NO: 508169 - RNA, 19 nt, Homo sapiens
  misc_RNA (1)...(19): siRNA sense strand
ugauagacgcugcuacuuu

SEQ ID NO: 508170 - RNA, 19 nt, Homo sapiens
  misc_RNA (1)...(19): siRNA sense strand
aaagaaggauuuggacauc

SEQ ID NO: 508171 - RNA, 19 nt, Homo sapiens
  misc_RNA (1)...(19): siRNA sense strand
gggacaaugacaaugauaa

SEQ ID NO: 508172 - RNA, 19 nt, Homo sapiens
  misc_RNA (1)...(19): siRNA sense strand
gaagauucauuugauaagc

SEQ ID NO: 508173 - RNA, 19 nt, Homo sapiens
  misc_RNA (1)...(19): siRNA sense strand
ugaaagauucgguaguuau

SEQ ID NO: 508174 - RNA, 19 nt, Homo sapiens
  misc_RNA (1)...(19): siRNA sense strand
ccuguggcauugcagauuu

SEQ ID NO: 508175 - RNA, 19 nt, Homo sapiens
  misc_RNA (1)...(19): siRNA sense strand
ucaacagacucacaauugg

SEQ ID NO: 508176 - RNA, 19 nt, Homo sapiens
  misc_RNA (1)...(19): siRNA sense strand
ucaauggaguuuauuacca

SEQ ID NO: 508177 - RNA, 19 nt, Homo sapiens
  misc_RNA (1)...(19): siRNA sense strand
guugguggaugaacaagug

SEQ ID NO: 508178 - RNA, 19 nt, Homo sapiens
  misc_RNA (1)...(19): siRNA sense strand
caaguaccgccuaacauau

SEQ ID NO: 508179 - RNA, 19 nt, Homo sapiens
  misc_RNA (1)...(19): siRNA sense strand
gaacuggaagacuggaaug

SEQ ID NO: 508180 - RNA, 19 nt, Homo sapiens
  misc_RNA (1)...(19): siRNA sense strand
agagacaacugcugcaucu

SEQ ID NO: 508181 - RNA, 19 nt, Homo sapiens
  misc_RNA (1)...(19): siRNA sense strand
ggacaaugacaaugauaag

SEQ ID NO: 508182 - RNA, 19 nt, Homo sapiens
  misc_RNA (1)...(19): siRNA sense strand
uggaauggcagaaccagua

SEQ ID NO: 508183 - RNA, 19 nt, Homo sapiens
  misc_RNA (1)...(19): siRNA sense strand
caaaacaucagaagucaaa

SEQ ID NO: 508184 - RNA, 19 nt, Homo sapiens
  misc_RNA (1)...(19): siRNA sense strand
caacagacucacaauugga

SEQ ID NO: 508185 - RNA, 19 nt, Homo sapiens
  misc_RNA (1)...(19): siRNA sense strand
cauaauggcaugcaguuca

SEQ ID NO: 508186 - RNA, 19 nt, Homo sapiens
  misc_RNA (1)...(19): siRNA sense strand
ugaaagcuaaccagcaauu

SEQ ID NO: 508187 - RNA, 19 nt, Homo sapiens
  misc_RNA (1)...(19): siRNA sense strand
cgaugggucuggaaaugga

SEQ ID NO: 508188 - RNA, 19 nt, Homo sapiens
  misc_RNA (1)...(19): siRNA sense strand
uaaagaaggauuuggacau

SEQ ID NO: 508189 - RNA, 19 nt, Homo sapiens
  misc_RNA (1)...(19): siRNA sense strand
gugcaaauccaugauauca

SEQ ID NO: 508190 - RNA, 19 nt, Homo sapiens
  misc_RNA (1)...(19): siRNA sense strand
ugccaucccauaugcauua

SEQ ID NO: 508191 - RNA, 19 nt, Homo sapiens
  misc_RNA (1)...(19): siRNA sense strand
gaaauggauggacuguguu

SEQ ID NO: 508192 - RNA, 19 nt, Homo sapiens
  misc_RNA (1)...(19): siRNA sense strand
ccaauaagggagcuaaaca

SEQ ID NO: 508193 - RNA, 19 nt, Homo sapiens
  misc_RNA (1)...(19): siRNA sense strand
ugauaucacugggaaagau

SEQ ID NO: 508194 - RNA, 19 nt, Homo sapiens
  misc_RNA (1)...(19): siRNA sense strand
gauaucacugggaaagauu

SEQ ID NO: 508195 - RNA, 19 nt, Homo sapiens
  misc_RNA (1)...(19): siRNA sense strand
ggugguauuccaugaagaa

SEQ ID NO: 508196 - RNA, 19 nt, Homo sapiens
  misc_RNA (1)...(19): siRNA sense strand
ucaaaagcaucuacuccua

SEQ ID NO: 508197 - RNA, 19 nt, Homo sapiens
  misc_RNA (1)...(19): siRNA sense strand
aagauucgguaguuauugu

SEQ ID NO: 508198 - RNA, 19 nt, Homo sapiens
  misc_RNA (1)...(19): siRNA sense strand
gcaauucuuagucuacugu

SEQ ID NO: 508199 - RNA, 19 nt, Homo sapiens
  misc_RNA (1)...(19): siRNA sense strand
ucaaacagcugauaaaagc

SEQ ID NO: 508200 - RNA, 19 nt, Homo sapiens
  misc_RNA (1)...(19): siRNA sense strand
aagauaaucccauucaaca

SEQ ID NO: 508201 - RNA, 19 nt, Homo sapiens
  misc_RNA (1)...(19): siRNA sense strand
ugacaaguaccgccuaaca

SEQ ID NO: 508202 - RNA, 19 nt, Homo sapiens
  misc_RNA (1)...(19): siRNA sense strand
aaccaguacugcagacuau

SEQ ID NO: 508203 - RNA, 19 nt, Homo sapiens
  misc_RNA (1)...(19): siRNA sense strand
gcaguguagauuucaagaa

SEQ ID NO: 508204 - RNA, 19 nt, Homo sapiens
  misc_RNA (1)...(19): siRNA sense strand
ugggaaagauugucaagac

SEQ ID NO: 508205 - RNA, 19 nt, Homo sapiens
  misc_RNA (1)...(19): siRNA sense strand
gccaggaaccuugcaaaga

SEQ ID NO: 508206 - RNA, 19 nt, Homo sapiens
  misc_RNA (1)...(19): siRNA sense strand
caagguggcacuuacucaa

SEQ ID NO: 508207 - RNA, 19 nt, Homo sapiens
  misc_RNA (1)...(19): siRNA sense strand
gcgaugauccuagugacaa

SEQ ID NO: 508208 - RNA, 19 nt, Homo sapiens
  misc_RNA (1)...(19): siRNA sense strand
gaaaucgaugggucuggaa

SEQ ID NO: 508209 - RNA, 19 nt, Homo sapiens
  misc_RNA (1)...(19): siRNA sense strand
uuguuaaccugaaagagaa

SEQ ID NO: 508210 - RNA, 19 nt, Homo sapiens
  misc_RNA (1)...(19): siRNA sense strand
agaaggauuuggacaucug

SEQ ID NO: 508211 - RNA, 19 nt, Homo sapiens
  misc_RNA (1)...(19): siRNA sense strand
ugauggcaguguagauuuc

SEQ ID NO: 508212 - RNA, 19 nt, Homo sapiens
  misc_RNA (1)...(19): siRNA sense strand
gaaagcuaaccagcaauuc

SEQ ID NO: 508213 - RNA, 19 nt, Homo sapiens
  misc_RNA (1)...(19): siRNA sense strand
caaagacacggugcaaauc

SEQ ID NO: 508214 - RNA, 19 nt, Homo sapiens
  misc_RNA (1)...(19): siRNA sense strand
aagcaauccaacucacuua

SEQ ID NO: 508215 - RNA, 19 nt, Homo sapiens
  misc_RNA (1)...(19): siRNA sense strand
ggaacuggaagacuggaau

SEQ ID NO: 508216 - RNA, 19 nt, Homo sapiens
  misc_RNA (1)...(19): siRNA sense strand
augaaagauucgguaguua

SEQ ID NO: 508217 - RNA, 19 nt, Homo sapiens
  misc_RNA (1)...(19): siRNA sense strand
cuuauaauccugaugaauc

SEQ ID NO: 508218 - RNA, 19 nt, Homo sapiens
  misc_RNA (1)...(19): siRNA sense strand
gauuuccugucuacuuauc

SEQ ID NO: 508219 - RNA, 19 nt, Homo sapiens
  misc_RNA (1)...(19): siRNA sense strand
ccaacucacuuauaauccu

SEQ ID NO: 508220 - RNA, 19 nt, Homo sapiens
  misc_RNA (1)...(19): siRNA sense strand
uuaccaagguggcacuuac

SEQ ID NO: 508221 - RNA, 19 nt, Homo sapiens
  misc_RNA (1)...(19): siRNA sense strand
ggaucuacagucuuuggaa

SEQ ID NO: 508222 - RNA, 19 nt, Homo sapiens
  misc_RNA (1)...(19): siRNA sense strand
uucaacauguguagcauau

SEQ ID NO: 508223 - RNA, 19 nt, Homo sapiens
  misc_RNA (1)...(19): siRNA sense strand
aauaagggagcuaaacaga

SEQ ID NO: 508224 - RNA, 19 nt, Homo sapiens
  misc_RNA (1)...(19): siRNA sense strand
agacaucuuacaucaaguu

SEQ ID NO: 508225 - RNA, 19 nt, Homo sapiens
  misc_RNA (1)...(19): siRNA sense strand
caggaaccuugcaaagaca

SEQ ID NO: 508226 - RNA, 19 nt, Homo sapiens
  misc_RNA (1)...(19): siRNA sense strand
ggaaauggauggacugugu

SEQ ID NO: 508227 - RNA, 19 nt, Homo sapiens
  misc_RNA (1)...(19): siRNA sense strand
gauagacgcugcuacuuug

SEQ ID NO: 508228 - RNA, 19 nt, Homo sapiens
  misc_RNA (1)...(19): siRNA sense strand
gaugaaagauucgguaguu

SEQ ID NO: 508229 - RNA, 19 nt, Homo sapiens
  misc_RNA (1)...(19): siRNA sense strand
caauccaacucacuuauaa

SEQ ID NO: 508230 - RNA, 19 nt, Homo sapiens
  misc_RNA (1)...(19): siRNA sense strand
cagauuuccugucuacuua

SEQ ID NO: 508231 - RNA, 19 nt, Homo sapiens
  misc_RNA (1)...(19): siRNA sense strand
acacaugacucaaguauuc

SEQ ID NO: 508232 - RNA, 19 nt, Homo sapiens
  misc_RNA (1)...(19): siRNA sense strand
acaaggaucuacagucuuu

SEQ ID NO: 508233 - RNA, 19 nt, Homo sapiens
  misc_RNA (1)...(19): siRNA sense strand
gcaaagacacggugcaaau

SEQ ID NO: 508234 - RNA, 19 nt, Homo sapiens
  misc_RNA (1)...(19): siRNA sense strand
gcaaauccaugauaucacu

SEQ ID NO: 508235 - RNA, 19 nt, Homo sapiens
  misc_RNA (1)...(19): siRNA sense strand
gaaagauucgguaguuauu

SEQ ID NO: 508236 - RNA, 19 nt, Homo sapiens
  misc_RNA (1)...(19): siRNA sense strand
gaagguagcccagcuugaa

SEQ ID NO: 508237 - RNA, 19 nt, Homo sapiens
  misc_RNA (1)...(19): siRNA sense strand
gcaauccaacucacuuaua

SEQ ID NO: 508238 - RNA, 19 nt, Homo sapiens
  misc_RNA (1)...(19): siRNA sense strand
uuaaaccucugaaagcuaa

SEQ ID NO: 508239 - RNA, 19 nt, Homo sapiens
  misc_RNA (1)...(19): siRNA sense strand
gaagucaaacagcugauaa

SEQ ID NO: 508240 - RNA, 19 nt, Homo sapiens
  misc_RNA (1)...(19): siRNA sense strand
caucuacuccuaaugguua

SEQ ID NO: 508241 - RNA, 19 nt, Homo sapiens
  misc_RNA (1)...(19): siRNA sense strand
agacaacugcugcaucuua

SEQ ID NO: 508242 - RNA, 19 nt, Homo sapiens
  misc_RNA (1)...(19): siRNA sense strand
gauaaucccauucaacaga

SEQ ID NO: 508243 - RNA, 19 nt, Homo sapiens
  misc_RNA (1)...(19): siRNA sense strand
caauggaguuuauuaccaa

SEQ ID NO: 508244 - RNA, 19 nt, Homo sapiens
  misc_RNA (1)...(19): siRNA sense strand
gaccugaagcugacaagua

SEQ ID NO: 508245 - RNA, 19 nt, Homo sapiens
  misc_RNA (1)...(19): siRNA sense strand
ccaacuaccuguggcauug

SEQ ID NO: 508246 - RNA, 19 nt, Homo sapiens
  misc_RNA (1)...(19): siRNA sense strand
acaaguaccgccuaacaua

SEQ ID NO: 508247 - RNA, 19 nt, Homo sapiens
  misc_RNA (1)...(19): siRNA sense strand
gauggacuguguuucagaa

SEQ ID NO: 508248 - RNA, 19 nt, Homo sapiens
  misc_RNA (1)...(19): siRNA sense strand
gaaauaugaagcaucgauu

SEQ ID NO: 508249 - RNA, 19 nt, Homo sapiens
  misc_RNA (1)...(19): siRNA sense strand
gaaccaguacugcagacua

SEQ ID NO: 508250 - RNA, 19 nt, Homo sapiens
  misc_RNA (1)...(19): siRNA sense strand
gcagauuuccugucuacuu

SEQ ID NO: 508251 - RNA, 19 nt, Homo sapiens
  misc_RNA (1)...(19): siRNA sense strand
gagacuugauggcagugua

SEQ ID NO: 508252 - RNA, 19 nt, Homo sapiens
  misc_RNA (1)...(19): siRNA sense strand
ugacucaaguauucgauau

SEQ ID NO: 508253 - RNA, 19 nt, Homo sapiens
  misc_RNA (1)...(19): siRNA sense strand
gaacaggauggaucugguu

SEQ ID NO: 508254 - RNA, 19 nt, Homo sapiens
  misc_RNA (1)...(19): siRNA sense strand
gcugggaaaugagaagauu

SEQ ID NO: 508255 - RNA, 19 nt, Homo sapiens
  misc_RNA (1)...(19): siRNA sense strand
gaagauaaucccauucaac

SEQ ID NO: 508256 - RNA, 19 nt, Homo sapiens
  misc_RNA (1)...(19): siRNA sense strand
uaacacaugacucaaguau

SEQ ID NO: 508257 - RNA, 19 nt, Homo sapiens
  misc_RNA (1)...(19): siRNA sense strand
ccuaacauaugccuacuuc

SEQ ID NO: 508258 - RNA, 19 nt, Homo sapiens
  misc_RNA (1)...(19): siRNA sense strand
caucccauaugcauuaaga

SEQ ID NO: 508259 - RNA, 19 nt, Homo sapiens
  misc_RNA (1)...(19): siRNA sense strand
ggacuguguuucagaagag

SEQ ID NO: 508260 - RNA, 19 nt, Homo sapiens
  misc_RNA (1)...(19): siRNA sense strand
ccaggaaccuugcaaagac

SEQ ID NO: 508261 - RNA, 19 nt, Homo sapiens
  misc_RNA (1)...(19): siRNA sense strand
aaaccaaaguagacaagga

SEQ ID NO: 508262 - RNA, 19 nt, Homo sapiens
  misc_RNA (1)...(19): siRNA sense strand
ggaucugguugguggauga

SEQ ID NO: 508263 - RNA, 19 nt, Homo sapiens
  misc_RNA (1)...(19): siRNA sense strand
gaaggcaacugugcugaac

SEQ ID NO: 508264 - RNA, 19 nt, Homo sapiens
  misc_RNA (1)...(19): siRNA sense strand
gcugacaaguaccgccuaa

SEQ ID NO: 508265 - RNA, 19 nt, Homo sapiens
  misc_RNA (1)...(19): siRNA sense strand
ucugaaagcuaaccagcaa

SEQ ID NO: 508266 - RNA, 19 nt, Homo sapiens
  misc_RNA (1)...(19): siRNA sense strand
ucacuuauaauccugauga

SEQ ID NO: 508267 - RNA, 19 nt, Homo sapiens
  misc_RNA (1)...(19): siRNA sense strand
cuacuucuaugcucuuuua

SEQ ID NO: 508268 - RNA, 19 nt, Homo sapiens
  misc_RNA (1)...(19): siRNA sense strand
gacaacugcugcaucuuag

SEQ ID NO: 508269 - RNA, 19 nt, Homo sapiens
  misc_RNA (1)...(19): siRNA sense strand
ugauagacgcugcuacuuu

SEQ ID NO: 508270 - RNA, 19 nt, Homo sapiens
  misc_RNA (1)...(19): siRNA sense strand
aaagaaggauuuggacauc

SEQ ID NO: 508271 - RNA, 19 nt, Homo sapiens
  misc_RNA (1)...(19): siRNA sense strand
gggacaaugacaaugauaa

SEQ ID NO: 508272 - RNA, 19 nt, Homo sapiens
  misc_RNA (1)...(19): siRNA sense strand
gaagauucauuugauaagc

SEQ ID NO: 508273 - RNA, 19 nt, Homo sapiens
  misc_RNA (1)...(19): siRNA sense strand
ugaaagauucgguaguuau

SEQ ID NO: 508274 - RNA, 19 nt, Homo sapiens
  misc_RNA (1)...(19): siRNA sense strand
ccuguggcauugcagauuu

SEQ ID NO: 508275 - RNA, 19 nt, Homo sapiens
  misc_RNA (1)...(19): siRNA sense strand
ucaacagacucacaauugg

SEQ ID NO: 508276 - RNA, 19 nt, Homo sapiens
  misc_RNA (1)...(19): siRNA sense strand
ucaauggaguuuauuacca

SEQ ID NO: 508277 - RNA, 19 nt, Homo sapiens
  misc_RNA (1)...(19): siRNA sense strand
guugguggaugaacaagug

SEQ ID NO: 508278 - RNA, 19 nt, Homo sapiens
  misc_RNA (1)...(19): siRNA sense strand
caaguaccgccuaacauau

SEQ ID NO: 508279 - RNA, 19 nt, Homo sapiens
  misc_RNA (1)...(19): siRNA sense strand
gaacuggaagacuggaaug

SEQ ID NO: 508280 - RNA, 19 nt, Homo sapiens
  misc_RNA (1)...(19): siRNA sense strand
agagacaacugcugcaucu

SEQ ID NO: 508281 - RNA, 19 nt, Homo sapiens
  misc_RNA (1)...(19): siRNA sense strand
ggacaaugacaaugauaag

SEQ ID NO: 508282 - RNA, 19 nt, Homo sapiens
  misc_RNA (1)...(19): siRNA sense strand
uggaauggcagaaccagua

SEQ ID NO: 508283 - RNA, 19 nt, Homo sapiens
  misc_RNA (1)...(19): siRNA sense strand
caaaacaucagaagucaaa

SEQ ID NO: 508284 - RNA, 19 nt, Homo sapiens
  misc_RNA (1)...(19): siRNA sense strand
caacagacucacaauugga

SEQ ID NO: 508285 - RNA, 19 nt, Homo sapiens
  misc_RNA (1)...(19): siRNA sense strand
cauaauggcaugcaguuca

SEQ ID NO: 508286 - RNA, 19 nt, Homo sapiens
  misc_RNA (1)...(19): siRNA sense strand
ugaaagcuaaccagcaauu

SEQ ID NO: 508287 - RNA, 19 nt, Homo sapiens
  misc_RNA (1)...(19): siRNA sense strand
cgaugggucuggaaaugga

SEQ ID NO: 508288 - RNA, 19 nt, Homo sapiens
  misc_RNA (1)...(19): siRNA sense strand
uaaagaaggauuuggacau

SEQ ID NO: 508289 - RNA, 19 nt, Homo sapiens
  misc_RNA (1)...(19): siRNA sense strand
gugcaaauccaugauauca

SEQ ID NO: 508290 - RNA, 19 nt, Homo sapiens
  misc_RNA (1)...(19): siRNA sense strand
ugccaucccauaugcauua

SEQ ID NO: 508291 - RNA, 19 nt, Homo sapiens
  misc_RNA (1)...(19): siRNA sense strand
gaaauggauggacuguguu

SEQ ID NO: 508292 - RNA, 19 nt, Homo sapiens
  misc_RNA (1)...(19): siRNA sense strand
ccaauaagggagcuaaaca

SEQ ID NO: 508293 - RNA, 19 nt, Homo sapiens
  misc_RNA (1)...(19): siRNA sense strand
ugauaucacugggaaagau

SEQ ID NO: 508294 - RNA, 19 nt, Homo sapiens
  misc_RNA (1)...(19): siRNA sense strand
gauaucacugggaaagauu

SEQ ID NO: 508295 - RNA, 19 nt, Homo sapiens
  misc_RNA (1)...(19): siRNA sense strand
ggugguauuccaugaagaa

SEQ ID NO: 508296 - RNA, 19 nt, Homo sapiens
  misc_RNA (1)...(19): siRNA sense strand
ucaaaagcaucuacuccua

SEQ ID NO: 508297 - RNA, 19 nt, Homo sapiens
  misc_RNA (1)...(19): siRNA sense strand
aagauucgguaguuauugu

SEQ ID NO: 508298 - RNA, 19 nt, Homo sapiens
  misc_RNA (1)...(19): siRNA sense strand
gcaauucuuagucuacugu

SEQ ID NO: 508299 - RNA, 19 nt, Homo sapiens
  misc_RNA (1)...(19): siRNA sense strand
ucaaacagcugauaaaagc

SEQ ID NO: 508300 - RNA, 19 nt, Homo sapiens
  misc_RNA (1)...(19): siRNA sense strand
aagauaaucccauucaaca

SEQ ID NO: 508301 - RNA, 19 nt, Homo sapiens
  misc_RNA (1)...(19): siRNA sense strand
ugacaaguaccgccuaaca

SEQ ID NO: 508302 - RNA, 19 nt, Homo sapiens
  misc_RNA (1)...(19): siRNA sense strand
aaccaguacugcagacuau

SEQ ID NO: 508303 - RNA, 19 nt, Homo sapiens
  misc_RNA (1)...(19): siRNA sense strand
gcaguguagauuucaagaa

SEQ ID NO: 508304 - RNA, 19 nt, Homo sapiens
  misc_RNA (1)...(19): siRNA sense strand
ugggaaagauugucaagac

SEQ ID NO: 508305 - RNA, 19 nt, Homo sapiens
  misc_RNA (1)...(19): siRNA sense strand
gccaggaaccuugcaaaga

SEQ ID NO: 508306 - RNA, 19 nt, Homo sapiens
  misc_RNA (1)...(19): siRNA sense strand
caagguggcacuuacucaa

SEQ ID NO: 508307 - RNA, 19 nt, Homo sapiens
  misc_RNA (1)...(19): siRNA sense strand
gcgaugauccuagugacaa

SEQ ID NO: 508308 - RNA, 19 nt, Homo sapiens
  misc_RNA (1)...(19): siRNA sense strand
gaaaucgaugggucuggaa

SEQ ID NO: 508309 - RNA, 19 nt, Homo sapiens
  misc_RNA (1)...(19): siRNA sense strand
uuguuaaccugaaagagaa

SEQ ID NO: 508310 - RNA, 19 nt, Homo sapiens
  misc_RNA (1)...(19): siRNA sense strand
agaaggauuuggacaucug

SEQ ID NO: 508311 - RNA, 19 nt, Homo sapiens
  misc_RNA (1)...(19): siRNA sense strand
ugauggcaguguagauuuc

SEQ ID NO: 508312 - RNA, 19 nt, Homo sapiens
  misc_RNA (1)...(19): siRNA sense strand
gaaagcuaaccagcaauuc

SEQ ID NO: 508313 - RNA, 19 nt, Homo sapiens
  misc_RNA (1)...(19): siRNA sense strand
caaagacacggugcaaauc

SEQ ID NO: 508314 - RNA, 19 nt, Homo sapiens
  misc_RNA (1)...(19): siRNA sense strand
aagcaauccaacucacuua

SEQ ID NO: 508315 - RNA, 19 nt, Homo sapiens
  misc_RNA (1)...(19): siRNA sense strand
ggaacuggaagacuggaau

SEQ ID NO: 508316 - RNA, 19 nt, Homo sapiens
  misc_RNA (1)...(19): siRNA sense strand
augaaagauucgguaguua

SEQ ID NO: 508317 - RNA, 19 nt, Homo sapiens
  misc_RNA (1)...(19): siRNA sense strand
cuuauaauccugaugaauc

SEQ ID NO: 508318 - RNA, 19 nt, Homo sapiens
  misc_RNA (1)...(19): siRNA sense strand
gauuuccugucuacuuauc

SEQ ID NO: 508319 - RNA, 19 nt, Homo sapiens
  misc_RNA (1)...(19): siRNA sense strand
ccaacucacuuauaauccu

SEQ ID NO: 508320 - RNA, 19 nt, Homo sapiens
  misc_RNA (1)...(19): siRNA sense strand
uuaccaagguggcacuuac

SEQ ID NO: 508321 - RNA, 19 nt, Homo sapiens
  misc_RNA (1)...(19): siRNA sense strand
ggaucuacagucuuuggaa

SEQ ID NO: 508322 - RNA, 19 nt, Homo sapiens
  misc_RNA (1)...(19): siRNA sense strand
uucaacauguguagcauau

SEQ ID NO: 508323 - RNA, 19 nt, Homo sapiens
  misc_RNA (1)...(19): siRNA sense strand
aauaagggagcuaaacaga

SEQ ID NO: 508324 - RNA, 19 nt, Homo sapiens
  misc_RNA (1)...(19): siRNA sense strand
agacaucuuacaucaaguu

SEQ ID NO: 508325 - RNA, 19 nt, Homo sapiens
  misc_RNA (1)...(19): siRNA sense strand
caggaaccuugcaaagaca

SEQ ID NO: 508326 - RNA, 19 nt, Homo sapiens
  misc_RNA (1)...(19): siRNA sense strand
caaagaaguuaccaaagaa

SEQ ID NO: 508327 - RNA, 19 nt, Homo sapiens
  misc_RNA (1)...(19): siRNA sense strand
acaaagaaguuaccaaaga

SEQ ID NO: 508328 - RNA, 19 nt, Homo sapiens
  misc_RNA (1)...(19): siRNA sense strand
gaaaccaguuccagacuug

SEQ ID NO: 508329 - RNA, 19 nt, Homo sapiens
  misc_RNA (1)...(19): siRNA sense strand
gcaaacaauuuacuaguag

SEQ ID NO: 508330 - RNA, 19 nt, Homo sapiens
  misc_RNA (1)...(19): siRNA sense strand
ggcuuuagcucgugaagua

SEQ ID NO: 508331 - RNA, 19 nt, Homo sapiens
  misc_RNA (1)...(19): siRNA sense strand
uuacuucccucuagagaua

SEQ ID NO: 508332 - RNA, 19 nt, Homo sapiens
  misc_RNA (1)...(19): siRNA sense strand
ugaaaggguugauugauga

SEQ ID NO: 508333 - RNA, 19 nt, Homo sapiens
  misc_RNA (1)...(19): siRNA sense strand
gaagaggugucaggaaaug

SEQ ID NO: 508334 - RNA, 19 nt, Homo sapiens
  misc_RNA (1)...(19): siRNA sense strand
gaagugaagccgaucauga

SEQ ID NO: 508335 - RNA, 19 nt, Homo sapiens
  misc_RNA (1)...(19): siRNA sense strand
gccaauaaccgugauaaua

SEQ ID NO: 508336 - RNA, 19 nt, Homo sapiens
  misc_RNA (1)...(19): siRNA sense strand
ggacauugauauuaagauc

SEQ ID NO: 508337 - RNA, 19 nt, Homo sapiens
  misc_RNA (1)...(19): siRNA sense strand
gagcucaguugguugauau

SEQ ID NO: 508338 - RNA, 19 nt, Homo sapiens
  misc_RNA (1)...(19): siRNA sense strand
ggucauugccaaagacuua

SEQ ID NO: 508339 - RNA, 19 nt, Homo sapiens
  misc_RNA (1)...(19): siRNA sense strand
uaacagacaugccgcagau

SEQ ID NO: 508340 - RNA, 19 nt, Homo sapiens
  misc_RNA (1)...(19): siRNA sense strand
gaucaugaaggaacacaua

SEQ ID NO: 508341 - RNA, 19 nt, Homo sapiens
  misc_RNA (1)...(19): siRNA sense strand
caagagaggccaugcuaaa

SEQ ID NO: 508342 - RNA, 19 nt, Homo sapiens
  misc_RNA (1)...(19): siRNA sense strand
ucuggcaucuucacaaaua

SEQ ID NO: 508343 - RNA, 19 nt, Homo sapiens
  misc_RNA (1)...(19): siRNA sense strand
gaugaagacuggaacuaca

SEQ ID NO: 508344 - RNA, 19 nt, Homo sapiens
  misc_RNA (1)...(19): siRNA sense strand
uaggagaguuugucaguga

SEQ ID NO: 508345 - RNA, 19 nt, Homo sapiens
  misc_RNA (1)...(19): siRNA sense strand
agagagaccugguggaaau

SEQ ID NO: 508346 - RNA, 19 nt, Homo sapiens
  misc_RNA (1)...(19): siRNA sense strand
gagguggacauugauauua

SEQ ID NO: 508347 - RNA, 19 nt, Homo sapiens
  misc_RNA (1)...(19): siRNA sense strand
ucacaaagaaguuaccaaa

SEQ ID NO: 508348 - RNA, 19 nt, Homo sapiens
  misc_RNA (1)...(19): siRNA sense strand
ucaguugguugauaugaaa

SEQ ID NO: 508349 - RNA, 19 nt, Homo sapiens
  misc_RNA (1)...(19): siRNA sense strand
gacuggagguggacauuga

SEQ ID NO: 508350 - RNA, 19 nt, Homo sapiens
  misc_RNA (1)...(19): siRNA sense strand
gaacuggaaguacuggaaa

SEQ ID NO: 508351 - RNA, 19 nt, Homo sapiens
  misc_RNA (1)...(19): siRNA sense strand
gagaauggaguuagagaga

SEQ ID NO: 508352 - RNA, 19 nt, Homo sapiens
  misc_RNA (1)...(19): siRNA sense strand
gagaggccaugcuaaaucu

SEQ ID NO: 508353 - RNA, 19 nt, Homo sapiens
  misc_RNA (1)...(19): siRNA sense strand
aaguagaucugaaggacua

SEQ ID NO: 508354 - RNA, 19 nt, Homo sapiens
  misc_RNA (1)...(19): siRNA sense strand
caaguuacagcaaacaauu

SEQ ID NO: 508355 - RNA, 19 nt, Homo sapiens
  misc_RNA (1)...(19): siRNA sense strand
ccaauaaccgugauaauac

SEQ ID NO: 508356 - RNA, 19 nt, Homo sapiens
  misc_RNA (1)...(19): siRNA sense strand
cgugguaaaucuucaaguu

SEQ ID NO: 508357 - RNA, 19 nt, Homo sapiens
  misc_RNA (1)...(19): siRNA sense strand
aggcaacacuuaccacuga

SEQ ID NO: 508358 - RNA, 19 nt, Homo sapiens
  misc_RNA (1)...(19): siRNA sense strand
ggagguggacauugauauu

SEQ ID NO: 508359 - RNA, 19 nt, Homo sapiens
  misc_RNA (1)...(19): siRNA sense strand
ggagagaguaccacacaga

SEQ ID NO: 508360 - RNA, 19 nt, Homo sapiens
  misc_RNA (1)...(19): siRNA sense strand
uugaagaggugucaggaaa

SEQ ID NO: 508361 - RNA, 19 nt, Homo sapiens
  misc_RNA (1)...(19): siRNA sense strand
caacacuuaccacugauaa

SEQ ID NO: 508362 - RNA, 19 nt, Homo sapiens
  misc_RNA (1)...(19): siRNA sense strand
caauaaggauucucauucg

SEQ ID NO: 508363 - RNA, 19 nt, Homo sapiens
  misc_RNA (1)...(19): siRNA sense strand
gaacacauagcaccaagag

SEQ ID NO: 508364 - RNA, 19 nt, Homo sapiens
  misc_RNA (1)...(19): siRNA sense strand
gaauucccuucccguggua

SEQ ID NO: 508365 - RNA, 19 nt, Homo sapiens
  misc_RNA (1)...(19): siRNA sense strand
gacacugccucaacuggaa

SEQ ID NO: 508366 - RNA, 19 nt, Homo sapiens
  misc_RNA (1)...(19): siRNA sense strand
cgaagaugguucugacugu

SEQ ID NO: 508367 - RNA, 19 nt, Homo sapiens
  misc_RNA (1)...(19): siRNA sense strand
gaaggacuaugaagaucag

SEQ ID NO: 508368 - RNA, 19 nt, Homo sapiens
  misc_RNA (1)...(19): siRNA sense strand
ggaaguacuggaaaccaaa

SEQ ID NO: 508369 - RNA, 19 nt, Homo sapiens
  misc_RNA (1)...(19): siRNA sense strand
ugaagccgaucaugaagga

SEQ ID NO: 508370 - RNA, 19 nt, Homo sapiens
  misc_RNA (1)...(19): siRNA sense strand
gugguaaaucuucaaguua

SEQ ID NO: 508371 - RNA, 19 nt, Homo sapiens
  misc_RNA (1)...(19): siRNA sense strand
guugaccacuaauauaaug

SEQ ID NO: 508372 - RNA, 19 nt, Homo sapiens
  misc_RNA (1)...(19): siRNA sense strand
ugucgagggucaugcagua

SEQ ID NO: 508373 - RNA, 19 nt, Homo sapiens
  misc_RNA (1)...(19): siRNA sense strand
gcuauaaaauggcagauga

SEQ ID NO: 508374 - RNA, 19 nt, Homo sapiens
  misc_RNA (1)...(19): siRNA sense strand
ggaugaaaggguugauuga

SEQ ID NO: 508375 - RNA, 19 nt, Homo sapiens
  misc_RNA (1)...(19): siRNA sense strand
aaucuggcaucuucacaaa

SEQ ID NO: 508376 - RNA, 19 nt, Homo sapiens
  misc_RNA (1)...(19): siRNA sense strand
gcagaugagaauggaguua

SEQ ID NO: 508377 - RNA, 19 nt, Homo sapiens
  misc_RNA (1)...(19): siRNA sense strand
gaacaggucauugccaaag

SEQ ID NO: 508378 - RNA, 19 nt, Homo sapiens
  misc_RNA (1)...(19): siRNA sense strand
cagaagaacaauaaggauu

SEQ ID NO: 508379 - RNA, 19 nt, Homo sapiens
  misc_RNA (1)...(19): siRNA sense strand
gcaacacuuaccacugaua

SEQ ID NO: 508380 - RNA, 19 nt, Homo sapiens
  misc_RNA (1)...(19): siRNA sense strand
gcccaaggguuguggaaag

SEQ ID NO: 508381 - RNA, 19 nt, Homo sapiens
  misc_RNA (1)...(19): siRNA sense strand
gacaauggcacucugaauc

SEQ ID NO: 508382 - RNA, 19 nt, Homo sapiens
  misc_RNA (1)...(19): siRNA sense strand
acaauaaggauucucauuc

SEQ ID NO: 508383 - RNA, 19 nt, Homo sapiens
  misc_RNA (1)...(19): siRNA sense strand
gaaagcaagagcuauaaaa

SEQ ID NO: 508384 - RNA, 19 nt, Homo sapiens
  misc_RNA (1)...(19): siRNA sense strand
gagagaguaccacacagaa

SEQ ID NO: 508385 - RNA, 19 nt, Homo sapiens
  misc_RNA (1)...(19): siRNA sense strand
ggacaauggcacucugaau

SEQ ID NO: 508386 - RNA, 19 nt, Homo sapiens
  misc_RNA (1)...(19): siRNA sense strand
ggaacuggaaguacuggaa

SEQ ID NO: 508387 - RNA, 19 nt, Homo sapiens
  misc_RNA (1)...(19): siRNA sense strand
ugaaaccaguuccagacuu

SEQ ID NO: 508388 - RNA, 19 nt, Homo sapiens
  misc_RNA (1)...(19): siRNA sense strand
gaagcgcaaagucauagaa

SEQ ID NO: 508389 - RNA, 19 nt, Homo sapiens
  misc_RNA (1)...(19): siRNA sense strand
gauggucacaaagaaguua

SEQ ID NO: 508390 - RNA, 19 nt, Homo sapiens
  misc_RNA (1)...(19): siRNA sense strand
agacuuacuucccucuaga

SEQ ID NO: 508391 - RNA, 19 nt, Homo sapiens
  misc_RNA (1)...(19): siRNA sense strand
uagcacgaguuacaacaga

SEQ ID NO: 508392 - RNA, 19 nt, Homo sapiens
  misc_RNA (1)...(19): siRNA sense strand
uuacuaguagcacgaguua

SEQ ID NO: 508393 - RNA, 19 nt, Homo sapiens
  misc_RNA (1)...(19): siRNA sense strand
uguuagagcucaguugguu

SEQ ID NO: 508394 - RNA, 19 nt, Homo sapiens
  misc_RNA (1)...(19): siRNA sense strand
ucacaaauacaaaggaauc

SEQ ID NO: 508395 - RNA, 19 nt, Homo sapiens
  misc_RNA (1)...(19): siRNA sense strand
gaaucuggcaucuucacaa

SEQ ID NO: 508396 - RNA, 19 nt, Homo sapiens
  misc_RNA (1)...(19): siRNA sense strand
ggaccuggaaguacuggaa

SEQ ID NO: 508397 - RNA, 19 nt, Homo sapiens
  misc_RNA (1)...(19): siRNA sense strand
acaucaaucugccugcaaa

SEQ ID NO: 508398 - RNA, 19 nt, Homo sapiens
  misc_RNA (1)...(19): siRNA sense strand
gaaaggguugauugaugaa

SEQ ID NO: 508399 - RNA, 19 nt, Homo sapiens
  misc_RNA (1)...(19): siRNA sense strand
agguggacauugauauuaa

SEQ ID NO: 508400 - RNA, 19 nt, Homo sapiens
  misc_RNA (1)...(19): siRNA sense strand
cagcauggacugcagauag

SEQ ID NO: 508401 - RNA, 19 nt, Homo sapiens
  misc_RNA (1)...(19): siRNA sense strand
uggcauagguacucuggau

SEQ ID NO: 508402 - RNA, 19 nt, Homo sapiens
  misc_RNA (1)...(19): siRNA sense strand
gaaguacuggaaaccgaaa

SEQ ID NO: 508403 - RNA, 19 nt, Homo sapiens
  misc_RNA (1)...(19): siRNA sense strand
uggugaaggugacuuucua

SEQ ID NO: 508404 - RNA, 19 nt, Homo sapiens
  misc_RNA (1)...(19): siRNA sense strand
ggaaggcauuaacagacau

SEQ ID NO: 508405 - RNA, 19 nt, Homo sapiens
  misc_RNA (1)...(19): siRNA sense strand
gaucagcagaagcaacuug

SEQ ID NO: 508406 - RNA, 19 nt, Homo sapiens
  misc_RNA (1)...(19): siRNA sense strand
gaccacuaauauaauggaa

SEQ ID NO: 508407 - RNA, 19 nt, Homo sapiens
  misc_RNA (1)...(19): siRNA sense strand
cacauugucuggcauaggu

SEQ ID NO: 508408 - RNA, 19 nt, Homo sapiens
  misc_RNA (1)...(19): siRNA sense strand
uuacuaagacuguuauugg

SEQ ID NO: 508409 - RNA, 19 nt, Homo sapiens
  misc_RNA (1)...(19): siRNA sense strand
ggaacgcgaggccuaacaa

SEQ ID NO: 508410 - RNA, 19 nt, Homo sapiens
  misc_RNA (1)...(19): siRNA sense strand
augaaaggguugauugaug

SEQ ID NO: 508411 - RNA, 19 nt, Homo sapiens
  misc_RNA (1)...(19): siRNA sense strand
caaggguuguggaaagaca

SEQ ID NO: 508412 - RNA, 19 nt, Homo sapiens
  misc_RNA (1)...(19): siRNA sense strand
uuucuucucaccuauguua

SEQ ID NO: 508413 - RNA, 19 nt, Homo sapiens
  misc_RNA (1)...(19): siRNA sense strand
aaacuggucacuucuaaag

SEQ ID NO: 508414 - RNA, 19 nt, Homo sapiens
  misc_RNA (1)...(19): siRNA sense strand
ucguugaccacuaauauaa

SEQ ID NO: 508415 - RNA, 19 nt, Homo sapiens
  misc_RNA (1)...(19): siRNA sense strand
ugaaagcaagagcuauaaa

SEQ ID NO: 508416 - RNA, 19 nt, Homo sapiens
  misc_RNA (1)...(19): siRNA sense strand
cuucacaaauacaaaggaa

SEQ ID NO: 508417 - RNA, 19 nt, Homo sapiens
  misc_RNA (1)...(19): siRNA sense strand
guggugaccuccgaagaug

SEQ ID NO: 508418 - RNA, 19 nt, Homo sapiens
  misc_RNA (1)...(19): siRNA sense strand
gaacuacaaaugcccuucu

SEQ ID NO: 508419 - RNA, 19 nt, Homo sapiens
  misc_RNA (1)...(19): siRNA sense strand
uggaaguacuggaaaccaa

SEQ ID NO: 508420 - RNA, 19 nt, Homo sapiens
  misc_RNA (1)...(19): siRNA sense strand
caaaggaauccaguucuca

SEQ ID NO: 508421 - RNA, 19 nt, Homo sapiens
  misc_RNA (1)...(19): siRNA sense strand
ccaagagaggccaugcuaa

SEQ ID NO: 508422 - RNA, 19 nt, Homo sapiens
  misc_RNA (1)...(19): siRNA sense strand
cagaugaggccggaaguga

SEQ ID NO: 508423 - RNA, 19 nt, Homo sapiens
  misc_RNA (1)...(19): siRNA sense strand
agaagaacaauaaggauuc

SEQ ID NO: 508424 - RNA, 19 nt, Homo sapiens
  misc_RNA (1)...(19): siRNA sense strand
ucucauucguugaccacua

SEQ ID NO: 508425 - RNA, 19 nt, Homo sapiens
  misc_RNA (1)...(19): siRNA sense strand
cucauucguugaccacuaa

SEQ ID NO: 508426 - RNA, 19 nt, Homo sapiens
  misc_RNA (1)...(19): siRNA sense strand
caaagaaguuaccaaagaa

SEQ ID NO: 508427 - RNA, 19 nt, Homo sapiens
  misc_RNA (1)...(19): siRNA sense strand
acaaagaaguuaccaaaga

SEQ ID NO: 508428 - RNA, 19 nt, Homo sapiens
  misc_RNA (1)...(19): siRNA sense strand
gaaaccaguuccagacuug

SEQ ID NO: 508429 - RNA, 19 nt, Homo sapiens
  misc_RNA (1)...(19): siRNA sense strand
gcaaacaauuuacuaguag

SEQ ID NO: 508430 - RNA, 19 nt, Homo sapiens
  misc_RNA (1)...(19): siRNA sense strand
ggcuuuagcucgugaagua

SEQ ID NO: 508431 - RNA, 19 nt, Homo sapiens
  misc_RNA (1)...(19): siRNA sense strand
uuacuucccucuagagaua

SEQ ID NO: 508432 - RNA, 19 nt, Homo sapiens
  misc_RNA (1)...(19): siRNA sense strand
ugaaaggguugauugauga

SEQ ID NO: 508433 - RNA, 19 nt, Homo sapiens
  misc_RNA (1)...(19): siRNA sense strand
gaagaggugucaggaaaug

SEQ ID NO: 508434 - RNA, 19 nt, Homo sapiens
  misc_RNA (1)...(19): siRNA sense strand
gaagugaagccgaucauga

SEQ ID NO: 508435 - RNA, 19 nt, Homo sapiens
  misc_RNA (1)...(19): siRNA sense strand
gccaauaaccgugauaaua

SEQ ID NO: 508436 - RNA, 19 nt, Homo sapiens
  misc_RNA (1)...(19): siRNA sense strand
ggacauugauauuaagauc

SEQ ID NO: 508437 - RNA, 19 nt, Homo sapiens
  misc_RNA (1)...(19): siRNA sense strand
gagcucaguugguugauau

SEQ ID NO: 508438 - RNA, 19 nt, Homo sapiens
  misc_RNA (1)...(19): siRNA sense strand
ggucauugccaaagacuua

SEQ ID NO: 508439 - RNA, 19 nt, Homo sapiens
  misc_RNA (1)...(19): siRNA sense strand
uaacagacaugccgcagau

SEQ ID NO: 508440 - RNA, 19 nt, Homo sapiens
  misc_RNA (1)...(19): siRNA sense strand
gaucaugaaggaacacaua

SEQ ID NO: 508441 - RNA, 19 nt, Homo sapiens
  misc_RNA (1)...(19): siRNA sense strand
caagagaggccaugcuaaa

SEQ ID NO: 508442 - RNA, 19 nt, Homo sapiens
  misc_RNA (1)...(19): siRNA sense strand
ucuggcaucuucacaaaua

SEQ ID NO: 508443 - RNA, 19 nt, Homo sapiens
  misc_RNA (1)...(19): siRNA sense strand
gaugaagacuggaacuaca

SEQ ID NO: 508444 - RNA, 19 nt, Homo sapiens
  misc_RNA (1)...(19): siRNA sense strand
uaggagaguuugucaguga

SEQ ID NO: 508445 - RNA, 19 nt, Homo sapiens
  misc_RNA (1)...(19): siRNA sense strand
agagagaccugguggaaau

SEQ ID NO: 508446 - RNA, 19 nt, Homo sapiens
  misc_RNA (1)...(19): siRNA sense strand
gagguggacauugauauua

SEQ ID NO: 508447 - RNA, 19 nt, Homo sapiens
  misc_RNA (1)...(19): siRNA sense strand
ucacaaagaaguuaccaaa

SEQ ID NO: 508448 - RNA, 19 nt, Homo sapiens
  misc_RNA (1)...(19): siRNA sense strand
ucaguugguugauaugaaa

SEQ ID NO: 508449 - RNA, 19 nt, Homo sapiens
  misc_RNA (1)...(19): siRNA sense strand
gacuggagguggacauuga

SEQ ID NO: 508450 - RNA, 19 nt, Homo sapiens
  misc_RNA (1)...(19): siRNA sense strand
gaacuggaaguacuggaaa

SEQ ID NO: 508451 - RNA, 19 nt, Homo sapiens
  misc_RNA (1)...(19): siRNA sense strand
gagaauggaguuagagaga

SEQ ID NO: 508452 - RNA, 19 nt, Homo sapiens
  misc_RNA (1)...(19): siRNA sense strand
gagaggccaugcuaaaucu

SEQ ID NO: 508453 - RNA, 19 nt, Homo sapiens
  misc_RNA (1)...(19): siRNA sense strand
aaguagaucugaaggacua

SEQ ID NO: 508454 - RNA, 19 nt, Homo sapiens
  misc_RNA (1)...(19): siRNA sense strand
caaguuacagcaaacaauu

SEQ ID NO: 508455 - RNA, 19 nt, Homo sapiens
  misc_RNA (1)...(19): siRNA sense strand
ccaauaaccgugauaauac

SEQ ID NO: 508456 - RNA, 19 nt, Homo sapiens
  misc_RNA (1)...(19): siRNA sense strand
cgugguaaaucuucaaguu

SEQ ID NO: 508457 - RNA, 19 nt, Homo sapiens
  misc_RNA (1)...(19): siRNA sense strand
aggcaacacuuaccacuga

SEQ ID NO: 508458 - RNA, 19 nt, Homo sapiens
  misc_RNA (1)...(19): siRNA sense strand
ggagguggacauugauauu

SEQ ID NO: 508459 - RNA, 19 nt, Homo sapiens
  misc_RNA (1)...(19): siRNA sense strand
ggagagaguaccacacaga

SEQ ID NO: 508460 - RNA, 19 nt, Homo sapiens
  misc_RNA (1)...(19): siRNA sense strand
uugaagaggugucaggaaa

SEQ ID NO: 508461 - RNA, 19 nt, Homo sapiens
  misc_RNA (1)...(19): siRNA sense strand
caacacuuaccacugauaa

SEQ ID NO: 508462 - RNA, 19 nt, Homo sapiens
  misc_RNA (1)...(19): siRNA sense strand
caauaaggauucucauucg

SEQ ID NO: 508463 - RNA, 19 nt, Homo sapiens
  misc_RNA (1)...(19): siRNA sense strand
gaacacauagcaccaagag

SEQ ID NO: 508464 - RNA, 19 nt, Homo sapiens
  misc_RNA (1)...(19): siRNA sense strand
gaauucccuucccguggua

SEQ ID NO: 508465 - RNA, 19 nt, Homo sapiens
  misc_RNA (1)...(19): siRNA sense strand
gacacugccucaacuggaa

SEQ ID NO: 508466 - RNA, 19 nt, Homo sapiens
  misc_RNA (1)...(19): siRNA sense strand
cgaagaugguucugacugu

SEQ ID NO: 508467 - RNA, 19 nt, Homo sapiens
  misc_RNA (1)...(19): siRNA sense strand
gaaggacuaugaagaucag

SEQ ID NO: 508468 - RNA, 19 nt, Homo sapiens
  misc_RNA (1)...(19): siRNA sense strand
ggaaguacuggaaaccaaa

SEQ ID NO: 508469 - RNA, 19 nt, Homo sapiens
  misc_RNA (1)...(19): siRNA sense strand
ugaagccgaucaugaagga

SEQ ID NO: 508470 - RNA, 19 nt, Homo sapiens
  misc_RNA (1)...(19): siRNA sense strand
gugguaaaucuucaaguua

SEQ ID NO: 508471 - RNA, 19 nt, Homo sapiens
  misc_RNA (1)...(19): siRNA sense strand
guugaccacuaauauaaug

SEQ ID NO: 508472 - RNA, 19 nt, Homo sapiens
  misc_RNA (1)...(19): siRNA sense strand
ugucgagggucaugcagua

SEQ ID NO: 508473 - RNA, 19 nt, Homo sapiens
  misc_RNA (1)...(19): siRNA sense strand
gcuauaaaauggcagauga

SEQ ID NO: 508474 - RNA, 19 nt, Homo sapiens
  misc_RNA (1)...(19): siRNA sense strand
ggaugaaaggguugauuga

SEQ ID NO: 508475 - RNA, 19 nt, Homo sapiens
  misc_RNA (1)...(19): siRNA sense strand
aaucuggcaucuucacaaa

SEQ ID NO: 508476 - RNA, 19 nt, Homo sapiens
  misc_RNA (1)...(19): siRNA sense strand
gcagaugagaauggaguua

SEQ ID NO: 508477 - RNA, 19 nt, Homo sapiens
  misc_RNA (1)...(19): siRNA sense strand
gaacaggucauugccaaag

SEQ ID NO: 508478 - RNA, 19 nt, Homo sapiens
  misc_RNA (1)...(19): siRNA sense strand
cagaagaacaauaaggauu

SEQ ID NO: 508479 - RNA, 19 nt, Homo sapiens
  misc_RNA (1)...(19): siRNA sense strand
gcaacacuuaccacugaua

SEQ ID NO: 508480 - RNA, 19 nt, Homo sapiens
  misc_RNA (1)...(19): siRNA sense strand
gcccaaggguuguggaaag

SEQ ID NO: 508481 - RNA, 19 nt, Homo sapiens
  misc_RNA (1)...(19): siRNA sense strand
gacaauggcacucugaauc

SEQ ID NO: 508482 - RNA, 19 nt, Homo sapiens
  misc_RNA (1)...(19): siRNA sense strand
acaauaaggauucucauuc

SEQ ID NO: 508483 - RNA, 19 nt, Homo sapiens
  misc_RNA (1)...(19): siRNA sense strand
gaaagcaagagcuauaaaa

SEQ ID NO: 508484 - RNA, 19 nt, Homo sapiens
  misc_RNA (1)...(19): siRNA sense strand
gagagaguaccacacagaa

SEQ ID NO: 508485 - RNA, 19 nt, Homo sapiens
  misc_RNA (1)...(19): siRNA sense strand
ggacaauggcacucugaau

SEQ ID NO: 508486 - RNA, 19 nt, Homo sapiens
  misc_RNA (1)...(19): siRNA sense strand
ggaacuggaaguacuggaa

SEQ ID NO: 508487 - RNA, 19 nt, Homo sapiens
  misc_RNA (1)...(19): siRNA sense strand
ugaaaccaguuccagacuu

SEQ ID NO: 508488 - RNA, 19 nt, Homo sapiens
  misc_RNA (1)...(19): siRNA sense strand
gaagcgcaaagucauagaa

SEQ ID NO: 508489 - RNA, 19 nt, Homo sapiens
  misc_RNA (1)...(19): siRNA sense strand
gauggucacaaagaaguua

SEQ ID NO: 508490 - RNA, 19 nt, Homo sapiens
  misc_RNA (1)...(19): siRNA sense strand
agacuuacuucccucuaga

SEQ ID NO: 508491 - RNA, 19 nt, Homo sapiens
  misc_RNA (1)...(19): siRNA sense strand
uagcacgaguuacaacaga

SEQ ID NO: 508492 - RNA, 19 nt, Homo sapiens
  misc_RNA (1)...(19): siRNA sense strand
uuacuaguagcacgaguua

SEQ ID NO: 508493 - RNA, 19 nt, Homo sapiens
  misc_RNA (1)...(19): siRNA sense strand
uguuagagcucaguugguu

SEQ ID NO: 508494 - RNA, 19 nt, Homo sapiens
  misc_RNA (1)...(19): siRNA sense strand
ucacaaauacaaaggaauc

SEQ ID NO: 508495 - RNA, 19 nt, Homo sapiens
  misc_RNA (1)...(19): siRNA sense strand
gaaucuggcaucuucacaa

SEQ ID NO: 508496 - RNA, 19 nt, Homo sapiens
  misc_RNA (1)...(19): siRNA sense strand
ggaccuggaaguacuggaa

SEQ ID NO: 508497 - RNA, 19 nt, Homo sapiens
  misc_RNA (1)...(19): siRNA sense strand
acaucaaucugccugcaaa

SEQ ID NO: 508498 - RNA, 19 nt, Homo sapiens
  misc_RNA (1)...(19): siRNA sense strand
gaaaggguugauugaugaa

SEQ ID NO: 508499 - RNA, 19 nt, Homo sapiens
  misc_RNA (1)...(19): siRNA sense strand
agguggacauugauauuaa

SEQ ID NO: 508500 - RNA, 19 nt, Homo sapiens
  misc_RNA (1)...(19): siRNA sense strand
cagcauggacugcagauag

SEQ ID NO: 508501 - RNA, 19 nt, Homo sapiens
  misc_RNA (1)...(19): siRNA sense strand
uggcauagguacucuggau

SEQ ID NO: 508502 - RNA, 19 nt, Homo sapiens
  misc_RNA (1)...(19): siRNA sense strand
gaaguacuggaaaccgaaa

SEQ ID NO: 508503 - RNA, 19 nt, Homo sapiens
  misc_RNA (1)...(19): siRNA sense strand
uggugaaggugacuuucua

SEQ ID NO: 508504 - RNA, 19 nt, Homo sapiens
  misc_RNA (1)...(19): siRNA sense strand
ggaaggcauuaacagacau

SEQ ID NO: 508505 - RNA, 19 nt, Homo sapiens
  misc_RNA (1)...(19): siRNA sense strand
gaucagcagaagcaacuug

SEQ ID NO: 508506 - RNA, 19 nt, Homo sapiens
  misc_RNA (1)...(19): siRNA sense strand
gaccacuaauauaauggaa

SEQ ID NO: 508507 - RNA, 19 nt, Homo sapiens
  misc_RNA (1)...(19): siRNA sense strand
cacauugucuggcauaggu

SEQ ID NO: 508508 - RNA, 19 nt, Homo sapiens
  misc_RNA (1)...(19): siRNA sense strand
uuacuaagacuguuauugg

SEQ ID NO: 508509 - RNA, 19 nt, Homo sapiens
  misc_RNA (1)...(19): siRNA sense strand
ggaacgcgaggccuaacaa

SEQ ID NO: 508510 - RNA, 19 nt, Homo sapiens
  misc_RNA (1)...(19): siRNA sense strand
augaaaggguugauugaug

SEQ ID NO: 508511 - RNA, 19 nt, Homo sapiens
  misc_RNA (1)...(19): siRNA sense strand
caaggguuguggaaagaca

SEQ ID NO: 508512 - RNA, 19 nt, Homo sapiens
  misc_RNA (1)...(19): siRNA sense strand
uuucuucucaccuauguua

SEQ ID NO: 508513 - RNA, 19 nt, Homo sapiens
  misc_RNA (1)...(19): siRNA sense strand
aaacuggucacuucuaaag

SEQ ID NO: 508514 - RNA, 19 nt, Homo sapiens
  misc_RNA (1)...(19): siRNA sense strand
ucguugaccacuaauauaa

SEQ ID NO: 508515 - RNA, 19 nt, Homo sapiens
  misc_RNA (1)...(19): siRNA sense strand
ugaaagcaagagcuauaaa

SEQ ID NO: 508516 - RNA, 19 nt, Homo sapiens
  misc_RNA (1)...(19): siRNA sense strand
cuucacaaauacaaaggaa

SEQ ID NO: 508517 - RNA, 19 nt, Homo sapiens
  misc_RNA (1)...(19): siRNA sense strand
guggugaccuccgaagaug

SEQ ID NO: 508518 - RNA, 19 nt, Homo sapiens
  misc_RNA (1)...(19): siRNA sense strand
gaacuacaaaugcccuucu

SEQ ID NO: 508519 - RNA, 19 nt, Homo sapiens
  misc_RNA (1)...(19): siRNA sense strand
uggaaguacuggaaaccaa

SEQ ID NO: 508520 - RNA, 19 nt, Homo sapiens
  misc_RNA (1)...(19): siRNA sense strand
caaaggaauccaguucuca

SEQ ID NO: 508521 - RNA, 19 nt, Homo sapiens
  misc_RNA (1)...(19): siRNA sense strand
ccaagagaggccaugcuaa

SEQ ID NO: 508522 - RNA, 19 nt, Homo sapiens
  misc_RNA (1)...(19): siRNA sense strand
cagaugaggccggaaguga

SEQ ID NO: 508523 - RNA, 19 nt, Homo sapiens
  misc_RNA (1)...(19): siRNA sense strand
agaagaacaauaaggauuc

SEQ ID NO: 508524 - RNA, 19 nt, Homo sapiens
  misc_RNA (1)...(19): siRNA sense strand
ucucauucguugaccacua

SEQ ID NO: 508525 - RNA, 19 nt, Homo sapiens
  misc_RNA (1)...(19): siRNA sense strand
cucauucguugaccacuaa

SEQ ID NO: 508526 - RNA, 19 nt, Homo sapiens
  misc_RNA (1)...(19): siRNA sense strand
gaagucggcuccaugaaga

SEQ ID NO: 508527 - RNA, 19 nt, Homo sapiens
  misc_RNA (1)...(19): siRNA sense strand
ggaggagacuauaaacauu

SEQ ID NO: 508528 - RNA, 19 nt, Homo sapiens
  misc_RNA (1)...(19): siRNA sense strand
gaaaguggcgccuggauug

SEQ ID NO: 508529 - RNA, 19 nt, Homo sapiens
  misc_RNA (1)...(19): siRNA sense strand
ggagaucucugacgacuac

SEQ ID NO: 508530 - RNA, 19 nt, Homo sapiens
  misc_RNA (1)...(19): siRNA sense strand
cauaaggagucuaagauga

SEQ ID NO: 508531 - RNA, 19 nt, Homo sapiens
  misc_RNA (1)...(19): siRNA sense strand
uaucguggguaucaguaua

SEQ ID NO: 508532 - RNA, 19 nt, Homo sapiens
  misc_RNA (1)...(19): siRNA sense strand
ggaaaguggcgccuggauu

SEQ ID NO: 508533 - RNA, 19 nt, Homo sapiens
  misc_RNA (1)...(19): siRNA sense strand
gcgccuggauugguuauga

SEQ ID NO: 508534 - RNA, 19 nt, Homo sapiens
  misc_RNA (1)...(19): siRNA sense strand
gccaugggcugguucaaca

SEQ ID NO: 508535 - RNA, 19 nt, Homo sapiens
  misc_RNA (1)...(19): siRNA sense strand
gaggagacuauaaacauug

SEQ ID NO: 508536 - RNA, 19 nt, Homo sapiens
  misc_RNA (1)...(19): siRNA sense strand
gcaagaggauggaguucac

SEQ ID NO: 508537 - RNA, 19 nt, Homo sapiens
  misc_RNA (1)...(19): siRNA sense strand
caguauaucuuggaaugug

SEQ ID NO: 508538 - RNA, 19 nt, Homo sapiens
  misc_RNA (1)...(19): siRNA sense strand
cuaaucauaaggagucuaa

SEQ ID NO: 508539 - RNA, 19 nt, Homo sapiens
  misc_RNA (1)...(19): siRNA sense strand
gaccaucuuugagaaggaa

SEQ ID NO: 508540 - RNA, 19 nt, Homo sapiens
  misc_RNA (1)...(19): siRNA sense strand
ggaguaaugccuaccacau

SEQ ID NO: 508541 - RNA, 19 nt, Homo sapiens
  misc_RNA (1)...(19): siRNA sense strand
uauaaacauuggagagagu

SEQ ID NO: 508542 - RNA, 19 nt, Homo sapiens
  misc_RNA (1)...(19): siRNA sense strand
gaaggaaaacuuuauugga

SEQ ID NO: 508543 - RNA, 19 nt, Homo sapiens
  misc_RNA (1)...(19): siRNA sense strand
caucauggaggagacuaua

SEQ ID NO: 508544 - RNA, 19 nt, Homo sapiens
  misc_RNA (1)...(19): siRNA sense strand
ucauggaggagacuauaaa

SEQ ID NO: 508545 - RNA, 19 nt, Homo sapiens
  misc_RNA (1)...(19): siRNA sense strand
guaucaguauaucuuggaa

SEQ ID NO: 508546 - RNA, 19 nt, Homo sapiens
  misc_RNA (1)...(19): siRNA sense strand
ggccuggguuugcuaccaa

SEQ ID NO: 508547 - RNA, 19 nt, Homo sapiens
  misc_RNA (1)...(19): siRNA sense strand
ucgcagauccaaucgauuc

SEQ ID NO: 508548 - RNA, 19 nt, Homo sapiens
  misc_RNA (1)...(19): siRNA sense strand
aaucauaaggagucuaaga

SEQ ID NO: 508549 - RNA, 19 nt, Homo sapiens
  misc_RNA (1)...(19): siRNA sense strand
cgaagucggcuccaugaag

SEQ ID NO: 508550 - RNA, 19 nt, Homo sapiens
  misc_RNA (1)...(19): siRNA sense strand
caccagcuccuguccaaau

SEQ ID NO: 508551 - RNA, 19 nt, Homo sapiens
  misc_RNA (1)...(19): siRNA sense strand
ucuaugaucaggagaacuu

SEQ ID NO: 508552 - RNA, 19 nt, Homo sapiens
  misc_RNA (1)...(19): siRNA sense strand
guucagcuaaucauaagga

SEQ ID NO: 508553 - RNA, 19 nt, Homo sapiens
  misc_RNA (1)...(19): siRNA sense strand
gcucucaugcccagacuuc

SEQ ID NO: 508554 - RNA, 19 nt, Homo sapiens
  misc_RNA (1)...(19): siRNA sense strand
agacuucgcagauccaauc

SEQ ID NO: 508555 - RNA, 19 nt, Homo sapiens
  misc_RNA (1)...(19): siRNA sense strand
ucuguucagcuaaucauaa

SEQ ID NO: 508556 - RNA, 19 nt, Homo sapiens
  misc_RNA (1)...(19): siRNA sense strand
ucauaaggagucuaagaug

SEQ ID NO: 508557 - RNA, 19 nt, Homo sapiens
  misc_RNA (1)...(19): siRNA sense strand
gagcgcaguuuugauaaug

SEQ ID NO: 508558 - RNA, 19 nt, Homo sapiens
  misc_RNA (1)...(19): siRNA sense strand
cuucgcagauccaaucgau

SEQ ID NO: 508559 - RNA, 19 nt, Homo sapiens
  misc_RNA (1)...(19): siRNA sense strand
uggaggagacuauaaacau

SEQ ID NO: 508560 - RNA, 19 nt, Homo sapiens
  misc_RNA (1)...(19): siRNA sense strand
gccagugggagaucucuga

SEQ ID NO: 508561 - RNA, 19 nt, Homo sapiens
  misc_RNA (1)...(19): siRNA sense strand
ggacgccagugggagaucu

SEQ ID NO: 508562 - RNA, 19 nt, Homo sapiens
  misc_RNA (1)...(19): siRNA sense strand
ccaagauggcucagaccaa

SEQ ID NO: 508563 - RNA, 19 nt, Homo sapiens
  misc_RNA (1)...(19): siRNA sense strand
gguaucaguauaucuugga

SEQ ID NO: 508564 - RNA, 19 nt, Homo sapiens
  misc_RNA (1)...(19): siRNA sense strand
guggguaucaguauaucuu

SEQ ID NO: 508565 - RNA, 19 nt, Homo sapiens
  misc_RNA (1)...(19): siRNA sense strand
gagaaggaaaacuuuauug

SEQ ID NO: 508566 - RNA, 19 nt, Homo sapiens
  misc_RNA (1)...(19): siRNA sense strand
aucaguauaucuuggaaug

SEQ ID NO: 508567 - RNA, 19 nt, Homo sapiens
  misc_RNA (1)...(19): siRNA sense strand
ugaccaucuuugagaagga

SEQ ID NO: 508568 - RNA, 19 nt, Homo sapiens
  misc_RNA (1)...(19): siRNA sense strand
aguauaucuuggaauguga

SEQ ID NO: 508569 - RNA, 19 nt, Homo sapiens
  misc_RNA (1)...(19): siRNA sense strand
uuacuacgcuccaagauua

SEQ ID NO: 508570 - RNA, 19 nt, Homo sapiens
  misc_RNA (1)...(19): siRNA sense strand
gaaggagaauguccaguuu

SEQ ID NO: 508571 - RNA, 19 nt, Homo sapiens
  misc_RNA (1)...(19): siRNA sense strand
auacacaacuugagcuuua

SEQ ID NO: 508572 - RNA, 19 nt, Homo sapiens
  misc_RNA (1)...(19): siRNA sense strand
gcccaggacucaaguauga

SEQ ID NO: 508573 - RNA, 19 nt, Homo sapiens
  misc_RNA (1)...(19): siRNA sense strand
gcaauggccacuccaagua

SEQ ID NO: 508574 - RNA, 19 nt, Homo sapiens
  misc_RNA (1)...(19): siRNA sense strand
ggauauagaagaugaagaa

SEQ ID NO: 508575 - RNA, 19 nt, Homo sapiens
  misc_RNA (1)...(19): siRNA sense strand
ggagauccuugcucagauu

SEQ ID NO: 508576 - RNA, 19 nt, Homo sapiens
  misc_RNA (1)...(19): siRNA sense strand
gauagacacccaaaucgua

SEQ ID NO: 508577 - RNA, 19 nt, Homo sapiens
  misc_RNA (1)...(19): siRNA sense strand
gcucucagcucuccaaugg

SEQ ID NO: 508578 - RNA, 19 nt, Homo sapiens
  misc_RNA (1)...(19): siRNA sense strand
gagaaggccuugaggucuu

SEQ ID NO: 508579 - RNA, 19 nt, Homo sapiens
  misc_RNA (1)...(19): siRNA sense strand
ggaagaaucccgugaugau

SEQ ID NO: 508580 - RNA, 19 nt, Homo sapiens
  misc_RNA (1)...(19): siRNA sense strand
gcucagauuucuuuauaca

SEQ ID NO: 508581 - RNA, 19 nt, Homo sapiens
  misc_RNA (1)...(19): siRNA sense strand
gcacugaugugaaggaaaa

SEQ ID NO: 508582 - RNA, 19 nt, Homo sapiens
  misc_RNA (1)...(19): siRNA sense strand
cagcggaucuccaacauag

SEQ ID NO: 508583 - RNA, 19 nt, Homo sapiens
  misc_RNA (1)...(19): siRNA sense strand
caacuugagcuuuacuuaa

SEQ ID NO: 508584 - RNA, 19 nt, Homo sapiens
  misc_RNA (1)...(19): siRNA sense strand
gaucguggccuugcauuaa

SEQ ID NO: 508585 - RNA, 19 nt, Homo sapiens
  misc_RNA (1)...(19): siRNA sense strand
gccaagagcuucgucaugu

SEQ ID NO: 508586 - RNA, 19 nt, Homo sapiens
  misc_RNA (1)...(19): siRNA sense strand
gaccucagcuugucugcuu

SEQ ID NO: 508587 - RNA, 19 nt, Homo sapiens
  misc_RNA (1)...(19): siRNA sense strand
gcagauagacacccaaauc

SEQ ID NO: 508588 - RNA, 19 nt, Homo sapiens
  misc_RNA (1)...(19): siRNA sense strand
caacaagccuuugcucagu

SEQ ID NO: 508589 - RNA, 19 nt, Homo sapiens
  misc_RNA (1)...(19): siRNA sense strand
ggaggugaauggccagguu

SEQ ID NO: 508590 - RNA, 19 nt, Homo sapiens
  misc_RNA (1)...(19): siRNA sense strand
caagguucccucccacuua

SEQ ID NO: 508591 - RNA, 19 nt, Homo sapiens
  misc_RNA (1)...(19): siRNA sense strand
gaacugcgcccaggacuca

SEQ ID NO: 508592 - RNA, 19 nt, Homo sapiens
  misc_RNA (1)...(19): siRNA sense strand
gguuuaggcugaaggagaa

SEQ ID NO: 508593 - RNA, 19 nt, Homo sapiens
  misc_RNA (1)...(19): siRNA sense strand
ggucguggauggucaguuc

SEQ ID NO: 508594 - RNA, 19 nt, Homo sapiens
  misc_RNA (1)...(19): siRNA sense strand
ggaggacccugucugucaa

SEQ ID NO: 508595 - RNA, 19 nt, Homo sapiens
  misc_RNA (1)...(19): siRNA sense strand
ccaaguaccgccugaagaa

SEQ ID NO: 508596 - RNA, 19 nt, Homo sapiens
  misc_RNA (1)...(19): siRNA sense strand
ggugauaaguguuucuaca

SEQ ID NO: 508597 - RNA, 19 nt, Homo sapiens
  misc_RNA (1)...(19): siRNA sense strand
acacggacuucacaucuga

SEQ ID NO: 508598 - RNA, 19 nt, Homo sapiens
  misc_RNA (1)...(19): siRNA sense strand
cagcagcacugaugugaag

SEQ ID NO: 508599 - RNA, 19 nt, Homo sapiens
  misc_RNA (1)...(19): siRNA sense strand
gacacgcucuucaaugguu

SEQ ID NO: 508600 - RNA, 19 nt, Homo sapiens
  misc_RNA (1)...(19): siRNA sense strand
gcucuggucccacaaagaa

SEQ ID NO: 508601 - RNA, 19 nt, Homo sapiens
  misc_RNA (1)...(19): siRNA sense strand
gagaauguccaguuucauc

SEQ ID NO: 508602 - RNA, 19 nt, Homo sapiens
  misc_RNA (1)...(19): siRNA sense strand
gauggucaguucuuugaag

SEQ ID NO: 508603 - RNA, 19 nt, Homo sapiens
  misc_RNA (1)...(19): siRNA sense strand
guaggcgacuccgcuauug

SEQ ID NO: 508604 - RNA, 19 nt, Homo sapiens
  misc_RNA (1)...(19): siRNA sense strand
caucagcaaugcagaagca

SEQ ID NO: 508605 - RNA, 19 nt, Homo sapiens
  misc_RNA (1)...(19): siRNA sense strand
gggaggacccugucuguca

SEQ ID NO: 508606 - RNA, 19 nt, Homo sapiens
  misc_RNA (1)...(19): siRNA sense strand
gaggacagcuacggaccaa

SEQ ID NO: 508607 - RNA, 19 nt, Homo sapiens
  misc_RNA (1)...(19): siRNA sense strand
uaaagaugccaaggugaua

SEQ ID NO: 508608 - RNA, 19 nt, Homo sapiens
  misc_RNA (1)...(19): siRNA sense strand
ugaugcagcugaaugagau

SEQ ID NO: 508609 - RNA, 19 nt, Homo sapiens
  misc_RNA (1)...(19): siRNA sense strand
aggcacagauguuaaagau

SEQ ID NO: 508610 - RNA, 19 nt, Homo sapiens
  misc_RNA (1)...(19): siRNA sense strand
ugaaggagaauguccaguu

SEQ ID NO: 508611 - RNA, 19 nt, Homo sapiens
  misc_RNA (1)...(19): siRNA sense strand
caacacggacuucacaucu

SEQ ID NO: 508612 - RNA, 19 nt, Homo sapiens
  misc_RNA (1)...(19): siRNA sense strand
aguccaagcuggcggcaaa

SEQ ID NO: 508613 - RNA, 19 nt, Homo sapiens
  misc_RNA (1)...(19): siRNA sense strand
gccaaggugauaaguguuu

SEQ ID NO: 508614 - RNA, 19 nt, Homo sapiens
  misc_RNA (1)...(19): siRNA sense strand
gcacgcgccuuuguuuguc

SEQ ID NO: 508615 - RNA, 19 nt, Homo sapiens
  misc_RNA (1)...(19): siRNA sense strand
gcaagguucccucccacuu

SEQ ID NO: 508616 - RNA, 19 nt, Homo sapiens
  misc_RNA (1)...(19): siRNA sense strand
guccugcagugacaagauu

SEQ ID NO: 508617 - RNA, 19 nt, Homo sapiens
  misc_RNA (1)...(19): siRNA sense strand
gaagaaucccgugaugauc

SEQ ID NO: 508618 - RNA, 19 nt, Homo sapiens
  misc_RNA (1)...(19): siRNA sense strand
acaacuugagcuuuacuua

SEQ ID NO: 508619 - RNA, 19 nt, Homo sapiens
  misc_RNA (1)...(19): siRNA sense strand
gguaggcgacuccgcuauu

SEQ ID NO: 508620 - RNA, 19 nt, Homo sapiens
  misc_RNA (1)...(19): siRNA sense strand
uaaagcaagaggacagcua

SEQ ID NO: 508621 - RNA, 19 nt, Homo sapiens
  misc_RNA (1)...(19): siRNA sense strand
aggagaauguccaguuuca

SEQ ID NO: 508622 - RNA, 19 nt, Homo sapiens
  misc_RNA (1)...(19): siRNA sense strand
ugaggucuuucguucaguu

SEQ ID NO: 508623 - RNA, 19 nt, Homo sapiens
  misc_RNA (1)...(19): siRNA sense strand
uguguaagcacgcguugua

SEQ ID NO: 508624 - RNA, 19 nt, Homo sapiens
  misc_RNA (1)...(19): siRNA sense strand
gauccuugcucagauuucu

SEQ ID NO: 508625 - RNA, 19 nt, Homo sapiens
  misc_RNA (1)...(19): siRNA sense strand
gccagccuauucccaguga

SEQ ID NO: 508626 - RNA, 19 nt, Homo sapiens
  misc_RNA (1)...(19): siRNA sense strand
ggacagcuacggaccaaaa

SEQ ID NO: 508627 - RNA, 19 nt, Homo sapiens
  misc_RNA (1)...(19): siRNA sense strand
agaaggccuugaggucuuu

SEQ ID NO: 508628 - RNA, 19 nt, Homo sapiens
  misc_RNA (1)...(19): siRNA sense strand
auaaguguuucuacaggaa

SEQ ID NO: 508629 - RNA, 19 nt, Homo sapiens
  misc_RNA (1)...(19): siRNA sense strand
gggaugacuccuucaguuc

SEQ ID NO: 508630 - RNA, 19 nt, Homo sapiens
  misc_RNA (1)...(19): siRNA sense strand
gaggugaauggccagguuu

SEQ ID NO: 508631 - RNA, 19 nt, Homo sapiens
  misc_RNA (1)...(19): siRNA sense strand
guaagcacgcguuguacug

SEQ ID NO: 508632 - RNA, 19 nt, Homo sapiens
  misc_RNA (1)...(19): siRNA sense strand
ccacgacugggaaggauga

SEQ ID NO: 508633 - RNA, 19 nt, Homo sapiens
  misc_RNA (1)...(19): siRNA sense strand
gagauccuugcucagauuu

SEQ ID NO: 508634 - RNA, 19 nt, Homo sapiens
  misc_RNA (1)...(19): siRNA sense strand
ggggaugacuccuucaguu

SEQ ID NO: 508635 - RNA, 19 nt, Homo sapiens
  misc_RNA (1)...(19): siRNA sense strand
cugacacgcucuucaaugg

SEQ ID NO: 508636 - RNA, 19 nt, Homo sapiens
  misc_RNA (1)...(19): siRNA sense strand
ccaagagcuucgucauguc

SEQ ID NO: 508637 - RNA, 19 nt, Homo sapiens
  misc_RNA (1)...(19): siRNA sense strand
caaguaccgccugaagaaa

SEQ ID NO: 508638 - RNA, 19 nt, Homo sapiens
  misc_RNA (1)...(19): siRNA sense strand
aaagaugccaaggugauaa

SEQ ID NO: 508639 - RNA, 19 nt, Homo sapiens
  misc_RNA (1)...(19): siRNA sense strand
gcauuuaccgcagguuuua

SEQ ID NO: 508640 - RNA, 19 nt, Homo sapiens
  misc_RNA (1)...(19): siRNA sense strand
gaagaugaagaaaacauga

SEQ ID NO: 508641 - RNA, 19 nt, Homo sapiens
  misc_RNA (1)...(19): siRNA sense strand
gcagcugaaugagaucaag

SEQ ID NO: 508642 - RNA, 19 nt, Homo sapiens
  misc_RNA (1)...(19): siRNA sense strand
gaugacuccuucaguucca

SEQ ID NO: 508643 - RNA, 19 nt, Homo sapiens
  misc_RNA (1)...(19): siRNA sense strand
cagcacugaugugaaggaa

SEQ ID NO: 508644 - RNA, 19 nt, Homo sapiens
  misc_RNA (1)...(19): siRNA sense strand
acacccaaaucguaaagca

SEQ ID NO: 508645 - RNA, 19 nt, Homo sapiens
  misc_RNA (1)...(19): siRNA sense strand
auagacacccaaaucguaa

SEQ ID NO: 508646 - RNA, 19 nt, Homo sapiens
  misc_RNA (1)...(19): siRNA sense strand
cagcagauagacacccaaa

SEQ ID NO: 508647 - RNA, 19 nt, Homo sapiens
  misc_RNA (1)...(19): siRNA sense strand
ugaccugaccgacaacuuc

SEQ ID NO: 508648 - RNA, 19 nt, Homo sapiens
  misc_RNA (1)...(19): siRNA sense strand
agaaucccgugaugaucuu

SEQ ID NO: 508649 - RNA, 19 nt, Homo sapiens
  misc_RNA (1)...(19): siRNA sense strand
ugacaacaggcacagaugu

SEQ ID NO: 508650 - RNA, 19 nt, Homo sapiens
  misc_RNA (1)...(19): siRNA sense strand
caucugaccaggccgacuu

SEQ ID NO: 508651 - RNA, 19 nt, Homo sapiens
  misc_RNA (1)...(19): siRNA sense strand
ccaagaacgcccugaugca

SEQ ID NO: 508652 - RNA, 19 nt, Homo sapiens
  misc_RNA (1)...(19): siRNA sense strand
gaagaaaacaugaguucca

SEQ ID NO: 508653 - RNA, 19 nt, Homo sapiens
  misc_RNA (1)...(19): siRNA sense strand
uuaaagaugccaaggugau

SEQ ID NO: 508654 - RNA, 19 nt, Homo sapiens
  misc_RNA (1)...(19): siRNA sense strand
cguggauggucaguucuuu

SEQ ID NO: 508655 - RNA, 19 nt, Homo sapiens
  misc_RNA (1)...(19): siRNA sense strand
ucaugucuguggaggugaa

SEQ ID NO: 508656 - RNA, 19 nt, Homo sapiens
  misc_RNA (1)...(19): siRNA sense strand
ggaccugccaccucucuac

SEQ ID NO: 508657 - RNA, 19 nt, Homo sapiens
  misc_RNA (1)...(19): siRNA sense strand
ccauuuacuucucgagcau

SEQ ID NO: 508658 - RNA, 19 nt, Homo sapiens
  misc_RNA (1)...(19): siRNA sense strand
ccaaggugauaaguguuuc

SEQ ID NO: 508659 - RNA, 19 nt, Homo sapiens
  misc_RNA (1)...(19): siRNA sense strand
caagagcuucgucaugucu

SEQ ID NO: 508660 - RNA, 19 nt, Homo sapiens
  misc_RNA (1)...(19): siRNA sense strand
ccagcggaucuccaacaua

SEQ ID NO: 508661 - RNA, 19 nt, Homo sapiens
  misc_RNA (1)...(19): siRNA sense strand
gcagcaauggccacuccaa

SEQ ID NO: 508662 - RNA, 19 nt, Homo sapiens
  misc_RNA (1)...(19): siRNA sense strand
cggagauccuugcucagau

SEQ ID NO: 508663 - RNA, 19 nt, Homo sapiens
  misc_RNA (1)...(19): siRNA sense strand
uuggugaccugaccgacaa

SEQ ID NO: 508664 - RNA, 19 nt, Homo sapiens
  misc_RNA (1)...(19): siRNA sense strand
uggauggucaguucuuuga

SEQ ID NO: 508665 - RNA, 19 nt, Homo sapiens
  misc_RNA (1)...(19): siRNA sense strand
ugaucguggccuugcauua

SEQ ID NO: 508666 - RNA, 19 nt, Homo sapiens
  misc_RNA (1)...(19): siRNA sense strand
ucguggagcccauuuacuu

SEQ ID NO: 508667 - RNA, 19 nt, Homo sapiens
  misc_RNA (1)...(19): siRNA sense strand
ucaagccugguuugcagua

SEQ ID NO: 508668 - RNA, 19 nt, Homo sapiens
  misc_RNA (1)...(19): siRNA sense strand
gaauguccaguuucaucug

SEQ ID NO: 508669 - RNA, 19 nt, Homo sapiens
  misc_RNA (1)...(19): siRNA sense strand
uuacuacgcuccaagauua

SEQ ID NO: 508670 - RNA, 19 nt, Homo sapiens
  misc_RNA (1)...(19): siRNA sense strand
gaaggagaauguccaguuu

SEQ ID NO: 508671 - RNA, 19 nt, Homo sapiens
  misc_RNA (1)...(19): siRNA sense strand
auacacaacuugagcuuua

SEQ ID NO: 508672 - RNA, 19 nt, Homo sapiens
  misc_RNA (1)...(19): siRNA sense strand
gcccaggacucaaguauga

SEQ ID NO: 508673 - RNA, 19 nt, Homo sapiens
  misc_RNA (1)...(19): siRNA sense strand
gcaauggccacuccaagua

SEQ ID NO: 508674 - RNA, 19 nt, Homo sapiens
  misc_RNA (1)...(19): siRNA sense strand
ggauauagaagaugaagaa

SEQ ID NO: 508675 - RNA, 19 nt, Homo sapiens
  misc_RNA (1)...(19): siRNA sense strand
ggagauccuugcucagauu

SEQ ID NO: 508676 - RNA, 19 nt, Homo sapiens
  misc_RNA (1)...(19): siRNA sense strand
gauagacacccaaaucgua

SEQ ID NO: 508677 - RNA, 19 nt, Homo sapiens
  misc_RNA (1)...(19): siRNA sense strand
gcucucagcucuccaaugg

SEQ ID NO: 508678 - RNA, 19 nt, Homo sapiens
  misc_RNA (1)...(19): siRNA sense strand
gagaaggccuugaggucuu

SEQ ID NO: 508679 - RNA, 19 nt, Homo sapiens
  misc_RNA (1)...(19): siRNA sense strand
ggaagaaucccgugaugau

SEQ ID NO: 508680 - RNA, 19 nt, Homo sapiens
  misc_RNA (1)...(19): siRNA sense strand
gcucagauuucuuuauaca

SEQ ID NO: 508681 - RNA, 19 nt, Homo sapiens
  misc_RNA (1)...(19): siRNA sense strand
gcacugaugugaaggaaaa

SEQ ID NO: 508682 - RNA, 19 nt, Homo sapiens
  misc_RNA (1)...(19): siRNA sense strand
cagcggaucuccaacauag

SEQ ID NO: 508683 - RNA, 19 nt, Homo sapiens
  misc_RNA (1)...(19): siRNA sense strand
caacuugagcuuuacuuaa

SEQ ID NO: 508684 - RNA, 19 nt, Homo sapiens
  misc_RNA (1)...(19): siRNA sense strand
gaucguggccuugcauuaa

SEQ ID NO: 508685 - RNA, 19 nt, Homo sapiens
  misc_RNA (1)...(19): siRNA sense strand
gccaagagcuucgucaugu

SEQ ID NO: 508686 - RNA, 19 nt, Homo sapiens
  misc_RNA (1)...(19): siRNA sense strand
gaccucagcuugucugcuu

SEQ ID NO: 508687 - RNA, 19 nt, Homo sapiens
  misc_RNA (1)...(19): siRNA sense strand
gcagauagacacccaaauc

SEQ ID NO: 508688 - RNA, 19 nt, Homo sapiens
  misc_RNA (1)...(19): siRNA sense strand
caacaagccuuugcucagu

SEQ ID NO: 508689 - RNA, 19 nt, Homo sapiens
  misc_RNA (1)...(19): siRNA sense strand
ggaggugaauggccagguu

SEQ ID NO: 508690 - RNA, 19 nt, Homo sapiens
  misc_RNA (1)...(19): siRNA sense strand
caagguucccucccacuua

SEQ ID NO: 508691 - RNA, 19 nt, Homo sapiens
  misc_RNA (1)...(19): siRNA sense strand
gaacugcgcccaggacuca

SEQ ID NO: 508692 - RNA, 19 nt, Homo sapiens
  misc_RNA (1)...(19): siRNA sense strand
gguuuaggcugaaggagaa

SEQ ID NO: 508693 - RNA, 19 nt, Homo sapiens
  misc_RNA (1)...(19): siRNA sense strand
ggucguggauggucaguuc

SEQ ID NO: 508694 - RNA, 19 nt, Homo sapiens
  misc_RNA (1)...(19): siRNA sense strand
ggaggacccugucugucaa

SEQ ID NO: 508695 - RNA, 19 nt, Homo sapiens
  misc_RNA (1)...(19): siRNA sense strand
ccaaguaccgccugaagaa

SEQ ID NO: 508696 - RNA, 19 nt, Homo sapiens
  misc_RNA (1)...(19): siRNA sense strand
ggugauaaguguuucuaca

SEQ ID NO: 508697 - RNA, 19 nt, Homo sapiens
  misc_RNA (1)...(19): siRNA sense strand
acacggacuucacaucuga

SEQ ID NO: 508698 - RNA, 19 nt, Homo sapiens
  misc_RNA (1)...(19): siRNA sense strand
cagcagcacugaugugaag

SEQ ID NO: 508699 - RNA, 19 nt, Homo sapiens
  misc_RNA (1)...(19): siRNA sense strand
gacacgcucuucaaugguu

SEQ ID NO: 508700 - RNA, 19 nt, Homo sapiens
  misc_RNA (1)...(19): siRNA sense strand
gcucuggucccacaaagaa

SEQ ID NO: 508701 - RNA, 19 nt, Homo sapiens
  misc_RNA (1)...(19): siRNA sense strand
gagaauguccaguuucauc

SEQ ID NO: 508702 - RNA, 19 nt, Homo sapiens
  misc_RNA (1)...(19): siRNA sense strand
gauggucaguucuuugaag

SEQ ID NO: 508703 - RNA, 19 nt, Homo sapiens
  misc_RNA (1)...(19): siRNA sense strand
guaggcgacuccgcuauug

SEQ ID NO: 508704 - RNA, 19 nt, Homo sapiens
  misc_RNA (1)...(19): siRNA sense strand
caucagcaaugcagaagca

SEQ ID NO: 508705 - RNA, 19 nt, Homo sapiens
  misc_RNA (1)...(19): siRNA sense strand
gggaggacccugucuguca

SEQ ID NO: 508706 - RNA, 19 nt, Homo sapiens
  misc_RNA (1)...(19): siRNA sense strand
gaggacagcuacggaccaa

SEQ ID NO: 508707 - RNA, 19 nt, Homo sapiens
  misc_RNA (1)...(19): siRNA sense strand
uaaagaugccaaggugaua

SEQ ID NO: 508708 - RNA, 19 nt, Homo sapiens
  misc_RNA (1)...(19): siRNA sense strand
ugaugcagcugaaugagau

SEQ ID NO: 508709 - RNA, 19 nt, Homo sapiens
  misc_RNA (1)...(19): siRNA sense strand
aggcacagauguuaaagau

SEQ ID NO: 508710 - RNA, 19 nt, Homo sapiens
  misc_RNA (1)...(19): siRNA sense strand
ugaaggagaauguccaguu

SEQ ID NO: 508711 - RNA, 19 nt, Homo sapiens
  misc_RNA (1)...(19): siRNA sense strand
caacacggacuucacaucu

SEQ ID NO: 508712 - RNA, 19 nt, Homo sapiens
  misc_RNA (1)...(19): siRNA sense strand
aguccaagcuggcggcaaa

SEQ ID NO: 508713 - RNA, 19 nt, Homo sapiens
  misc_RNA (1)...(19): siRNA sense strand
gccaaggugauaaguguuu

SEQ ID NO: 508714 - RNA, 19 nt, Homo sapiens
  misc_RNA (1)...(19): siRNA sense strand
gcacgcgccuuuguuuguc

SEQ ID NO: 508715 - RNA, 19 nt, Homo sapiens
  misc_RNA (1)...(19): siRNA sense strand
gcaagguucccucccacuu

SEQ ID NO: 508716 - RNA, 19 nt, Homo sapiens
  misc_RNA (1)...(19): siRNA sense strand
guccugcagugacaagauu

SEQ ID NO: 508717 - RNA, 19 nt, Homo sapiens
  misc_RNA (1)...(19): siRNA sense strand
gaagaaucccgugaugauc

SEQ ID NO: 508718 - RNA, 19 nt, Homo sapiens
  misc_RNA (1)...(19): siRNA sense strand
acaacuugagcuuuacuua

SEQ ID NO: 508719 - RNA, 19 nt, Homo sapiens
  misc_RNA (1)...(19): siRNA sense strand
gguaggcgacuccgcuauu

SEQ ID NO: 508720 - RNA, 19 nt, Homo sapiens
  misc_RNA (1)...(19): siRNA sense strand
uaaagcaagaggacagcua

SEQ ID NO: 508721 - RNA, 19 nt, Homo sapiens
  misc_RNA (1)...(19): siRNA sense strand
aggagaauguccaguuuca

SEQ ID NO: 508722 - RNA, 19 nt, Homo sapiens
  misc_RNA (1)...(19): siRNA sense strand
ugaggucuuucguucaguu

SEQ ID NO: 508723 - RNA, 19 nt, Homo sapiens
  misc_RNA (1)...(19): siRNA sense strand
uguguaagcacgcguugua

SEQ ID NO: 508724 - RNA, 19 nt, Homo sapiens
  misc_RNA (1)...(19): siRNA sense strand
gauccuugcucagauuucu

SEQ ID NO: 508725 - RNA, 19 nt, Homo sapiens
  misc_RNA (1)...(19): siRNA sense strand
gccagccuauucccaguga

SEQ ID NO: 508726 - RNA, 19 nt, Homo sapiens
  misc_RNA (1)...(19): siRNA sense strand
ggacagcuacggaccaaaa

SEQ ID NO: 508727 - RNA, 19 nt, Homo sapiens
  misc_RNA (1)...(19): siRNA sense strand
agaaggccuugaggucuuu

SEQ ID NO: 508728 - RNA, 19 nt, Homo sapiens
  misc_RNA (1)...(19): siRNA sense strand
auaaguguuucuacaggaa

SEQ ID NO: 508729 - RNA, 19 nt, Homo sapiens
  misc_RNA (1)...(19): siRNA sense strand
gggaugacuccuucaguuc

SEQ ID NO: 508730 - RNA, 19 nt, Homo sapiens
  misc_RNA (1)...(19): siRNA sense strand
gaggugaauggccagguuu

SEQ ID NO: 508731 - RNA, 19 nt, Homo sapiens
  misc_RNA (1)...(19): siRNA sense strand
guaagcacgcguuguacug

SEQ ID NO: 508732 - RNA, 19 nt, Homo sapiens
  misc_RNA (1)...(19): siRNA sense strand
ccacgacugggaaggauga

SEQ ID NO: 508733 - RNA, 19 nt, Homo sapiens
  misc_RNA (1)...(19): siRNA sense strand
gagauccuugcucagauuu

SEQ ID NO: 508734 - RNA, 19 nt, Homo sapiens
  misc_RNA (1)...(19): siRNA sense strand
ggggaugacuccuucaguu

SEQ ID NO: 508735 - RNA, 19 nt, Homo sapiens
  misc_RNA (1)...(19): siRNA sense strand
cugacacgcucuucaaugg

SEQ ID NO: 508736 - RNA, 19 nt, Homo sapiens
  misc_RNA (1)...(19): siRNA sense strand
ccaagagcuucgucauguc

SEQ ID NO: 508737 - RNA, 19 nt, Homo sapiens
  misc_RNA (1)...(19): siRNA sense strand
caaguaccgccugaagaaa

SEQ ID NO: 508738 - RNA, 19 nt, Homo sapiens
  misc_RNA (1)...(19): siRNA sense strand
aaagaugccaaggugauaa

SEQ ID NO: 508739 - RNA, 19 nt, Homo sapiens
  misc_RNA (1)...(19): siRNA sense strand
gcauuuaccgcagguuuua

SEQ ID NO: 508740 - RNA, 19 nt, Homo sapiens
  misc_RNA (1)...(19): siRNA sense strand
gaagaugaagaaaacauga

SEQ ID NO: 508741 - RNA, 19 nt, Homo sapiens
  misc_RNA (1)...(19): siRNA sense strand
gcagcugaaugagaucaag

SEQ ID NO: 508742 - RNA, 19 nt, Homo sapiens
  misc_RNA (1)...(19): siRNA sense strand
gaugacuccuucaguucca

SEQ ID NO: 508743 - RNA, 19 nt, Homo sapiens
  misc_RNA (1)...(19): siRNA sense strand
cagcacugaugugaaggaa

SEQ ID NO: 508744 - RNA, 19 nt, Homo sapiens
  misc_RNA (1)...(19): siRNA sense strand
acacccaaaucguaaagca

SEQ ID NO: 508745 - RNA, 19 nt, Homo sapiens
  misc_RNA (1)...(19): siRNA sense strand
auagacacccaaaucguaa

SEQ ID NO: 508746 - RNA, 19 nt, Homo sapiens
  misc_RNA (1)...(19): siRNA sense strand
cagcagauagacacccaaa

SEQ ID NO: 508747 - RNA, 19 nt, Homo sapiens
  misc_RNA (1)...(19): siRNA sense strand
ugaccugaccgacaacuuc

SEQ ID NO: 508748 - RNA, 19 nt, Homo sapiens
  misc_RNA (1)...(19): siRNA sense strand
agaaucccgugaugaucuu

SEQ ID NO: 508749 - RNA, 19 nt, Homo sapiens
  misc_RNA (1)...(19): siRNA sense strand
ugacaacaggcacagaugu

SEQ ID NO: 508750 - RNA, 19 nt, Homo sapiens
  misc_RNA (1)...(19): siRNA sense strand
caucugaccaggccgacuu

SEQ ID NO: 508751 - RNA, 19 nt, Homo sapiens
  misc_RNA (1)...(19): siRNA sense strand
ccaagaacgcccugaugca

SEQ ID NO: 508752 - RNA, 19 nt, Homo sapiens
  misc_RNA (1)...(19): siRNA sense strand
gaagaaaacaugaguucca

SEQ ID NO: 508753 - RNA, 19 nt, Homo sapiens
  misc_RNA (1)...(19): siRNA sense strand
uuaaagaugccaaggugau

SEQ ID NO: 508754 - RNA, 19 nt, Homo sapiens
  misc_RNA (1)...(19): siRNA sense strand
cguggauggucaguucuuu

SEQ ID NO: 508755 - RNA, 19 nt, Homo sapiens
  misc_RNA (1)...(19): siRNA sense strand
ucaugucuguggaggugaa

SEQ ID NO: 508756 - RNA, 19 nt, Homo sapiens
  misc_RNA (1)...(19): siRNA sense strand
ggaccugccaccucucuac

SEQ ID NO: 508757 - RNA, 19 nt, Homo sapiens
  misc_RNA (1)...(19): siRNA sense strand
ccauuuacuucucgagcau

SEQ ID NO: 508758 - RNA, 19 nt, Homo sapiens
  misc_RNA (1)...(19): siRNA sense strand
ccaaggugauaaguguuuc

SEQ ID NO: 508759 - RNA, 19 nt, Homo sapiens
  misc_RNA (1)...(19): siRNA sense strand
caagagcuucgucaugucu

SEQ ID NO: 508760 - RNA, 19 nt, Homo sapiens
  misc_RNA (1)...(19): siRNA sense strand
ccagcggaucuccaacaua

SEQ ID NO: 508761 - RNA, 19 nt, Homo sapiens
  misc_RNA (1)...(19): siRNA sense strand
gcagcaauggccacuccaa

SEQ ID NO: 508762 - RNA, 19 nt, Homo sapiens
  misc_RNA (1)...(19): siRNA sense strand
cggagauccuugcucagau

SEQ ID NO: 508763 - RNA, 19 nt, Homo sapiens
  misc_RNA (1)...(19): siRNA sense strand
uuggugaccugaccgacaa

SEQ ID NO: 508764 - RNA, 19 nt, Homo sapiens
  misc_RNA (1)...(19): siRNA sense strand
uggauggucaguucuuuga

SEQ ID NO: 508765 - RNA, 19 nt, Homo sapiens
  misc_RNA (1)...(19): siRNA sense strand
ugaucguggccuugcauua

SEQ ID NO: 508766 - RNA, 19 nt, Homo sapiens
  misc_RNA (1)...(19): siRNA sense strand
ucguggagcccauuuacuu

SEQ ID NO: 508767 - RNA, 19 nt, Homo sapiens
  misc_RNA (1)...(19): siRNA sense strand
ucaagccugguuugcagua

SEQ ID NO: 508768 - RNA, 19 nt, Homo sapiens
  misc_RNA (1)...(19): siRNA sense strand
gaauguccaguuucaucug

SEQ ID NO: 508769 - RNA, 19 nt, Homo sapiens
  misc_RNA (1)...(19): siRNA sense strand
uuacuacgcuccaagauua

SEQ ID NO: 508770 - RNA, 19 nt, Homo sapiens
  misc_RNA (1)...(19): siRNA sense strand
gaaggagaauguccaguuu

SEQ ID NO: 508771 - RNA, 19 nt, Homo sapiens
  misc_RNA (1)...(19): siRNA sense strand
auacacaacuugagcuuua

SEQ ID NO: 508772 - RNA, 19 nt, Homo sapiens
  misc_RNA (1)...(19): siRNA sense strand
gcccaggacucaaguauga

SEQ ID NO: 508773 - RNA, 19 nt, Homo sapiens
  misc_RNA (1)...(19): siRNA sense strand
gcaauggccacuccaagua

SEQ ID NO: 508774 - RNA, 19 nt, Homo sapiens
  misc_RNA (1)...(19): siRNA sense strand
ggauauagaagaugaagaa

SEQ ID NO: 508775 - RNA, 19 nt, Homo sapiens
  misc_RNA (1)...(19): siRNA sense strand
ggagauccuugcucagauu

SEQ ID NO: 508776 - RNA, 19 nt, Homo sapiens
  misc_RNA (1)...(19): siRNA sense strand
gauagacacccaaaucgua

SEQ ID NO: 508777 - RNA, 19 nt, Homo sapiens
  misc_RNA (1)...(19): siRNA sense strand
gcucucagcucuccaaugg

SEQ ID NO: 508778 - RNA, 19 nt, Homo sapiens
  misc_RNA (1)...(19): siRNA sense strand
gagaaggccuugaggucuu

SEQ ID NO: 508779 - RNA, 19 nt, Homo sapiens
  misc_RNA (1)...(19): siRNA sense strand
ggaagaaucccgugaugau

SEQ ID NO: 508780 - RNA, 19 nt, Homo sapiens
  misc_RNA (1)...(19): siRNA sense strand
gcucagauuucuuuauaca

SEQ ID NO: 508781 - RNA, 19 nt, Homo sapiens
  misc_RNA (1)...(19): siRNA sense strand
gcacugaugugaaggaaaa

SEQ ID NO: 508782 - RNA, 19 nt, Homo sapiens
  misc_RNA (1)...(19): siRNA sense strand
cagcggaucuccaacauag

SEQ ID NO: 508783 - RNA, 19 nt, Homo sapiens
  misc_RNA (1)...(19): siRNA sense strand
caacuugagcuuuacuuaa

SEQ ID NO: 508784 - RNA, 19 nt, Homo sapiens
  misc_RNA (1)...(19): siRNA sense strand
gaucguggccuugcauuaa

SEQ ID NO: 508785 - RNA, 19 nt, Homo sapiens
  misc_RNA (1)...(19): siRNA sense strand
gccaagagcuucgucaugu

SEQ ID NO: 508786 - RNA, 19 nt, Homo sapiens
  misc_RNA (1)...(19): siRNA sense strand
gaccucagcuugucugcuu

SEQ ID NO: 508787 - RNA, 19 nt, Homo sapiens
  misc_RNA (1)...(19): siRNA sense strand
gcagauagacacccaaauc

SEQ ID NO: 508788 - RNA, 19 nt, Homo sapiens
  misc_RNA (1)...(19): siRNA sense strand
caacaagccuuugcucagu

SEQ ID NO: 508789 - RNA, 19 nt, Homo sapiens
  misc_RNA (1)...(19): siRNA sense strand
ggaggugaauggccagguu

SEQ ID NO: 508790 - RNA, 19 nt, Homo sapiens
  misc_RNA (1)...(19): siRNA sense strand
caagguucccucccacuua

SEQ ID NO: 508791 - RNA, 19 nt, Homo sapiens
  misc_RNA (1)...(19): siRNA sense strand
gaacugcgcccaggacuca

SEQ ID NO: 508792 - RNA, 19 nt, Homo sapiens
  misc_RNA (1)...(19): siRNA sense strand
gguuuaggcugaaggagaa

SEQ ID NO: 508793 - RNA, 19 nt, Homo sapiens
  misc_RNA (1)...(19): siRNA sense strand
ggucguggauggucaguuc

SEQ ID NO: 508794 - RNA, 19 nt, Homo sapiens
  misc_RNA (1)...(19): siRNA sense strand
ggaggacccugucugucaa

SEQ ID NO: 508795 - RNA, 19 nt, Homo sapiens
  misc_RNA (1)...(19): siRNA sense strand
ccaaguaccgccugaagaa

SEQ ID NO: 508796 - RNA, 19 nt, Homo sapiens
  misc_RNA (1)...(19): siRNA sense strand
ggugauaaguguuucuaca

SEQ ID NO: 508797 - RNA, 19 nt, Homo sapiens
  misc_RNA (1)...(19): siRNA sense strand
acacggacuucacaucuga

SEQ ID NO: 508798 - RNA, 19 nt, Homo sapiens
  misc_RNA (1)...(19): siRNA sense strand
cagcagcacugaugugaag

SEQ ID NO: 508799 - RNA, 19 nt, Homo sapiens
  misc_RNA (1)...(19): siRNA sense strand
gacacgcucuucaaugguu

SEQ ID NO: 508800 - RNA, 19 nt, Homo sapiens
  misc_RNA (1)...(19): siRNA sense strand
gcucuggucccacaaagaa

SEQ ID NO: 508801 - RNA, 19 nt, Homo sapiens
  misc_RNA (1)...(19): siRNA sense strand
gagaauguccaguuucauc

SEQ ID NO: 508802 - RNA, 19 nt, Homo sapiens
  misc_RNA (1)...(19): siRNA sense strand
gauggucaguucuuugaag

SEQ ID NO: 508803 - RNA, 19 nt, Homo sapiens
  misc_RNA (1)...(19): siRNA sense strand
guaggcgacuccgcuauug

SEQ ID NO: 508804 - RNA, 19 nt, Homo sapiens
  misc_RNA (1)...(19): siRNA sense strand
caucagcaaugcagaagca

SEQ ID NO: 508805 - RNA, 19 nt, Homo sapiens
  misc_RNA (1)...(19): siRNA sense strand
gggaggacccugucuguca

SEQ ID NO: 508806 - RNA, 19 nt, Homo sapiens
  misc_RNA (1)...(19): siRNA sense strand
gaggacagcuacggaccaa

SEQ ID NO: 508807 - RNA, 19 nt, Homo sapiens
  misc_RNA (1)...(19): siRNA sense strand
uaaagaugccaaggugaua

SEQ ID NO: 508808 - RNA, 19 nt, Homo sapiens
  misc_RNA (1)...(19): siRNA sense strand
ugaugcagcugaaugagau

SEQ ID NO: 508809 - RNA, 19 nt, Homo sapiens
  misc_RNA (1)...(19): siRNA sense strand
aggcacagauguuaaagau

SEQ ID NO: 508810 - RNA, 19 nt, Homo sapiens
  misc_RNA (1)...(19): siRNA sense strand
ugaaggagaauguccaguu

SEQ ID NO: 508811 - RNA, 19 nt, Homo sapiens
  misc_RNA (1)...(19): siRNA sense strand
uuaccaagcccaacgugua

SEQ ID NO: 508812 - RNA, 19 nt, Homo sapiens
  misc_RNA (1)...(19): siRNA sense strand
caacacggacuucacaucu

SEQ ID NO: 508813 - RNA, 19 nt, Homo sapiens
  misc_RNA (1)...(19): siRNA sense strand
aguccaagcuggcggcaaa

SEQ ID NO: 508814 - RNA, 19 nt, Homo sapiens
  misc_RNA (1)...(19): siRNA sense strand
gccaaggugauaaguguuu

SEQ ID NO: 508815 - RNA, 19 nt, Homo sapiens
  misc_RNA (1)...(19): siRNA sense strand
gcacgcgccuuuguuuguc

SEQ ID NO: 508816 - RNA, 19 nt, Homo sapiens
  misc_RNA (1)...(19): siRNA sense strand
gcaagguucccucccacuu

SEQ ID NO: 508817 - RNA, 19 nt, Homo sapiens
  misc_RNA (1)...(19): siRNA sense strand
guccugcagugacaagauu

SEQ ID NO: 508818 - RNA, 19 nt, Homo sapiens
  misc_RNA (1)...(19): siRNA sense strand
gaagaaucccgugaugauc

SEQ ID NO: 508819 - RNA, 19 nt, Homo sapiens
  misc_RNA (1)...(19): siRNA sense strand
acaacuugagcuuuacuua

SEQ ID NO: 508820 - RNA, 19 nt, Homo sapiens
  misc_RNA (1)...(19): siRNA sense strand
gguaggcgacuccgcuauu

SEQ ID NO: 508821 - RNA, 19 nt, Homo sapiens
  misc_RNA (1)...(19): siRNA sense strand
uaaagcaagaggacagcua

SEQ ID NO: 508822 - RNA, 19 nt, Homo sapiens
  misc_RNA (1)...(19): siRNA sense strand
aggagaauguccaguuuca

SEQ ID NO: 508823 - RNA, 19 nt, Homo sapiens
  misc_RNA (1)...(19): siRNA sense strand
ugaggucuuucguucaguu

SEQ ID NO: 508824 - RNA, 19 nt, Homo sapiens
  misc_RNA (1)...(19): siRNA sense strand
uguguaagcacgcguugua

SEQ ID NO: 508825 - RNA, 19 nt, Homo sapiens
  misc_RNA (1)...(19): siRNA sense strand
gauccuugcucagauuucu

SEQ ID NO: 508826 - RNA, 19 nt, Homo sapiens
  misc_RNA (1)...(19): siRNA sense strand
gccagccuauucccaguga

SEQ ID NO: 508827 - RNA, 19 nt, Homo sapiens
  misc_RNA (1)...(19): siRNA sense strand
ggacagcuacggaccaaaa

SEQ ID NO: 508828 - RNA, 19 nt, Homo sapiens
  misc_RNA (1)...(19): siRNA sense strand
agaaggccuugaggucuuu

SEQ ID NO: 508829 - RNA, 19 nt, Homo sapiens
  misc_RNA (1)...(19): siRNA sense strand
auaaguguuucuacaggaa

SEQ ID NO: 508830 - RNA, 19 nt, Homo sapiens
  misc_RNA (1)...(19): siRNA sense strand
gggaugacuccuucaguuc

SEQ ID NO: 508831 - RNA, 19 nt, Homo sapiens
  misc_RNA (1)...(19): siRNA sense strand
gaggugaauggccagguuu

SEQ ID NO: 508832 - RNA, 19 nt, Homo sapiens
  misc_RNA (1)...(19): siRNA sense strand
guaagcacgcguuguacug

SEQ ID NO: 508833 - RNA, 19 nt, Homo sapiens
  misc_RNA (1)...(19): siRNA sense strand
ccacgacugggaaggauga

SEQ ID NO: 508834 - RNA, 19 nt, Homo sapiens
  misc_RNA (1)...(19): siRNA sense strand
gagauccuugcucagauuu

SEQ ID NO: 508835 - RNA, 19 nt, Homo sapiens
  misc_RNA (1)...(19): siRNA sense strand
ggggaugacuccuucaguu

SEQ ID NO: 508836 - RNA, 19 nt, Homo sapiens
  misc_RNA (1)...(19): siRNA sense strand
cugacacgcucuucaaugg

SEQ ID NO: 508837 - RNA, 19 nt, Homo sapiens
  misc_RNA (1)...(19): siRNA sense strand
caaguaccgccugaagaaa

SEQ ID NO: 508838 - RNA, 19 nt, Homo sapiens
  misc_RNA (1)...(19): siRNA sense strand
aaagaugccaaggugauaa

SEQ ID NO: 508839 - RNA, 19 nt, Homo sapiens
  misc_RNA (1)...(19): siRNA sense strand
ccaagagcuucgucauguc

SEQ ID NO: 508840 - RNA, 19 nt, Homo sapiens
  misc_RNA (1)...(19): siRNA sense strand
gcauuuaccgcagguuuua

SEQ ID NO: 508841 - RNA, 19 nt, Homo sapiens
  misc_RNA (1)...(19): siRNA sense strand
gaagaugaagaaaacauga

SEQ ID NO: 508842 - RNA, 19 nt, Homo sapiens
  misc_RNA (1)...(19): siRNA sense strand
gcagcugaaugagaucaag

SEQ ID NO: 508843 - RNA, 19 nt, Homo sapiens
  misc_RNA (1)...(19): siRNA sense strand
gaugacuccuucaguucca

SEQ ID NO: 508844 - RNA, 19 nt, Homo sapiens
  misc_RNA (1)...(19): siRNA sense strand
cagcacugaugugaaggaa

SEQ ID NO: 508845 - RNA, 19 nt, Homo sapiens
  misc_RNA (1)...(19): siRNA sense strand
acacccaaaucguaaagca

SEQ ID NO: 508846 - RNA, 19 nt, Homo sapiens
  misc_RNA (1)...(19): siRNA sense strand
auagacacccaaaucguaa

SEQ ID NO: 508847 - RNA, 19 nt, Homo sapiens
  misc_RNA (1)...(19): siRNA sense strand
cagcagauagacacccaaa

SEQ ID NO: 508848 - RNA, 19 nt, Homo sapiens
  misc_RNA (1)...(19): siRNA sense strand
ugaccugaccgacaacuuc

SEQ ID NO: 508849 - RNA, 19 nt, Homo sapiens
  misc_RNA (1)...(19): siRNA sense strand
agaaucccgugaugaucuu

SEQ ID NO: 508850 - RNA, 19 nt, Homo sapiens
  misc_RNA (1)...(19): siRNA sense strand
ugacaacaggcacagaugu

SEQ ID NO: 508851 - RNA, 19 nt, Homo sapiens
  misc_RNA (1)...(19): siRNA sense strand
ccaagaacgcccugaugca

SEQ ID NO: 508852 - RNA, 19 nt, Homo sapiens
  misc_RNA (1)...(19): siRNA sense strand
gaagaaaacaugaguucca

SEQ ID NO: 508853 - RNA, 19 nt, Homo sapiens
  misc_RNA (1)...(19): siRNA sense strand
uuaaagaugccaaggugau

SEQ ID NO: 508854 - RNA, 19 nt, Homo sapiens
  misc_RNA (1)...(19): siRNA sense strand
cguggauggucaguucuuu

SEQ ID NO: 508855 - RNA, 19 nt, Homo sapiens
  misc_RNA (1)...(19): siRNA sense strand
caucugaccaggccgacuu

SEQ ID NO: 508856 - RNA, 19 nt, Homo sapiens
  misc_RNA (1)...(19): siRNA sense strand
ucaugucuguggaggugaa

SEQ ID NO: 508857 - RNA, 19 nt, Homo sapiens
  misc_RNA (1)...(19): siRNA sense strand
ggaccugccaccucucuac

SEQ ID NO: 508858 - RNA, 19 nt, Homo sapiens
  misc_RNA (1)...(19): siRNA sense strand
ccauuuacuucucgagcau

SEQ ID NO: 508859 - RNA, 19 nt, Homo sapiens
  misc_RNA (1)...(19): siRNA sense strand
ccaaggugauaaguguuuc

SEQ ID NO: 508860 - RNA, 19 nt, Homo sapiens
  misc_RNA (1)...(19): siRNA sense strand
caagagcuucgucaugucu

SEQ ID NO: 508861 - RNA, 19 nt, Homo sapiens
  misc_RNA (1)...(19): siRNA sense strand
ccagcggaucuccaacaua

SEQ ID NO: 508862 - RNA, 19 nt, Homo sapiens
  misc_RNA (1)...(19): siRNA sense strand
gcagcaauggccacuccaa

SEQ ID NO: 508863 - RNA, 19 nt, Homo sapiens
  misc_RNA (1)...(19): siRNA sense strand
cggagauccuugcucagau

SEQ ID NO: 508864 - RNA, 19 nt, Homo sapiens
  misc_RNA (1)...(19): siRNA sense strand
uuggugaccugaccgacaa

SEQ ID NO: 508865 - RNA, 19 nt, Homo sapiens
  misc_RNA (1)...(19): siRNA sense strand
uggauggucaguucuuuga

SEQ ID NO: 508866 - RNA, 19 nt, Homo sapiens
  misc_RNA (1)...(19): siRNA sense strand
gaauguccaguuucaucug

SEQ ID NO: 508867 - RNA, 19 nt, Homo sapiens
  misc_RNA (1)...(19): siRNA sense strand
ucaagccugguuugcagua

SEQ ID NO: 508868 - RNA, 19 nt, Homo sapiens
  misc_RNA (1)...(19): siRNA sense strand
ucguggagcccauuuacuu

SEQ ID NO: 508869 - RNA, 19 nt, Homo sapiens
  misc_RNA (1)...(19): siRNA sense strand
ccacccugcugcucucuuu

SEQ ID NO: 508870 - RNA, 19 nt, Homo sapiens
  misc_RNA (1)...(19): siRNA sense strand
ggauggcucuguggacuuc

SEQ ID NO: 508871 - RNA, 19 nt, Homo sapiens
  misc_RNA (1)...(19): siRNA sense strand
guguagaccugguggacuu

SEQ ID NO: 508872 - RNA, 19 nt, Homo sapiens
  misc_RNA (1)...(19): siRNA sense strand
ccagcgagcuccguguaga

SEQ ID NO: 508873 - RNA, 19 nt, Homo sapiens
  misc_RNA (1)...(19): siRNA sense strand
acuaccaguuugcuaagua

SEQ ID NO: 508874 - RNA, 19 nt, Homo sapiens
  misc_RNA (1)...(19): siRNA sense strand
ccaguuugcuaaguacaga

SEQ ID NO: 508875 - RNA, 19 nt, Homo sapiens
  misc_RNA (1)...(19): siRNA sense strand
ccgacgaggcggagaagua

SEQ ID NO: 508876 - RNA, 19 nt, Homo sapiens
  misc_RNA (1)...(19): siRNA sense strand
gcuaaguacagaucauuca

SEQ ID NO: 508877 - RNA, 19 nt, Homo sapiens
  misc_RNA (1)...(19): siRNA sense strand
ggacuuugaggacaacuac

SEQ ID NO: 508878 - RNA, 19 nt, Homo sapiens
  misc_RNA (1)...(19): siRNA sense strand
ggacugggccacguacaag

SEQ ID NO: 508879 - RNA, 19 nt, Homo sapiens
  misc_RNA (1)...(19): siRNA sense strand
ugacugugcucugugacau

SEQ ID NO: 508880 - RNA, 19 nt, Homo sapiens
  misc_RNA (1)...(19): siRNA sense strand
gggacugggccacguacaa

SEQ ID NO: 508881 - RNA, 19 nt, Homo sapiens
  misc_RNA (1)...(19): siRNA sense strand
uagaccugguggacuuuga

SEQ ID NO: 508882 - RNA, 19 nt, Homo sapiens
  misc_RNA (1)...(19): siRNA sense strand
gcggcuggcacaccaucua

SEQ ID NO: 508883 - RNA, 19 nt, Homo sapiens
  misc_RNA (1)...(19): siRNA sense strand
cuaaguacagaucauucaa

SEQ ID NO: 508884 - RNA, 19 nt, Homo sapiens
  misc_RNA (1)...(19): siRNA sense strand
uaaguacagaucauucaag

SEQ ID NO: 508885 - RNA, 19 nt, Homo sapiens
  misc_RNA (1)...(19): siRNA sense strand
ccacccugcugcucucuuu

SEQ ID NO: 508886 - RNA, 19 nt, Homo sapiens
  misc_RNA (1)...(19): siRNA sense strand
ggauggcucuguggacuuc

SEQ ID NO: 508887 - RNA, 19 nt, Homo sapiens
  misc_RNA (1)...(19): siRNA sense strand
guguagaccugguggacuu

SEQ ID NO: 508888 - RNA, 19 nt, Homo sapiens
  misc_RNA (1)...(19): siRNA sense strand
ccagcgagcuccguguaga

SEQ ID NO: 508889 - RNA, 19 nt, Homo sapiens
  misc_RNA (1)...(19): siRNA sense strand
acuaccaguuugcuaagua

SEQ ID NO: 508890 - RNA, 19 nt, Homo sapiens
  misc_RNA (1)...(19): siRNA sense strand
ccaguuugcuaaguacaga

SEQ ID NO: 508891 - RNA, 19 nt, Homo sapiens
  misc_RNA (1)...(19): siRNA sense strand
ccgacgaggcggagaagua

SEQ ID NO: 508892 - RNA, 19 nt, Homo sapiens
  misc_RNA (1)...(19): siRNA sense strand
gcuaaguacagaucauuca

SEQ ID NO: 508893 - RNA, 19 nt, Homo sapiens
  misc_RNA (1)...(19): siRNA sense strand
ggacuuugaggacaacuac

SEQ ID NO: 508894 - RNA, 19 nt, Homo sapiens
  misc_RNA (1)...(19): siRNA sense strand
ggacugggccacguacaag

SEQ ID NO: 508895 - RNA, 19 nt, Homo sapiens
  misc_RNA (1)...(19): siRNA sense strand
ugacugugcucugugacau

SEQ ID NO: 508896 - RNA, 19 nt, Homo sapiens
  misc_RNA (1)...(19): siRNA sense strand
gggacugggccacguacaa

SEQ ID NO: 508897 - RNA, 19 nt, Homo sapiens
  misc_RNA (1)...(19): siRNA sense strand
uagaccugguggacuuuga

SEQ ID NO: 508898 - RNA, 19 nt, Homo sapiens
  misc_RNA (1)...(19): siRNA sense strand
gcggcuggcacaccaucua

SEQ ID NO: 508899 - RNA, 19 nt, Homo sapiens
  misc_RNA (1)...(19): siRNA sense strand
cuaaguacagaucauucaa

SEQ ID NO: 508900 - RNA, 19 nt, Homo sapiens
  misc_RNA (1)...(19): siRNA sense strand
uaaguacagaucauucaag

SEQ ID NO: 508901 - RNA, 19 nt, Homo sapiens
  misc_RNA (1)...(19): siRNA sense strand
ccacccugcugcucucuuu

SEQ ID NO: 508902 - RNA, 19 nt, Homo sapiens
  misc_RNA (1)...(19): siRNA sense strand
ugacugugcucugugacau

SEQ ID NO: 508903 - RNA, 19 nt, Homo sapiens
  misc_RNA (1)...(19): siRNA sense strand
gcggcuggcacaccaucua

SEQ ID NO: 508904 - RNA, 19 nt, Homo sapiens
  misc_RNA (1)...(19): siRNA sense strand
ccacccugcugcucucuuu

SEQ ID NO: 508905 - RNA, 19 nt, Homo sapiens
  misc_RNA (1)...(19): siRNA sense strand
aaucagagcuccauaaugu

SEQ ID NO: 508906 - RNA, 19 nt, Homo sapiens
  misc_RNA (1)...(19): siRNA sense strand
gaagaugguuggcccuuug

SEQ ID NO: 508907 - RNA, 19 nt, Homo sapiens
  misc_RNA (1)...(19): siRNA sense strand
ggacagaccuacuugacau

SEQ ID NO: 508908 - RNA, 19 nt, Homo sapiens
  misc_RNA (1)...(19): siRNA sense strand
aaacacagcuccugcaaca

SEQ ID NO: 508909 - RNA, 19 nt, Homo sapiens
  misc_RNA (1)...(19): siRNA sense strand
gaagaugcaaguggaauaa

SEQ ID NO: 508910 - RNA, 19 nt, Homo sapiens
  misc_RNA (1)...(19): siRNA sense strand
ggaagaugcaaguggaaua

SEQ ID NO: 508911 - RNA, 19 nt, Homo sapiens
  misc_RNA (1)...(19): siRNA sense strand
gaagccauccgcagugaaa

SEQ ID NO: 508912 - RNA, 19 nt, Homo sapiens
  misc_RNA (1)...(19): siRNA sense strand
gguugcaacucaugagauu

SEQ ID NO: 508913 - RNA, 19 nt, Homo sapiens
  misc_RNA (1)...(19): siRNA sense strand
gcagugggcccaugaagau

SEQ ID NO: 508914 - RNA, 19 nt, Homo sapiens
  misc_RNA (1)...(19): siRNA sense strand
uccaaaggauccagcauuu

SEQ ID NO: 508915 - RNA, 19 nt, Homo sapiens
  misc_RNA (1)...(19): siRNA sense strand
ucaauuacccacaugauau

SEQ ID NO: 508916 - RNA, 19 nt, Homo sapiens
  misc_RNA (1)...(19): siRNA sense strand
ggaauaagcacacucuaac

SEQ ID NO: 508917 - RNA, 19 nt, Homo sapiens
  misc_RNA (1)...(19): siRNA sense strand
gcagugaaagacaguauau

SEQ ID NO: 508918 - RNA, 19 nt, Homo sapiens
  misc_RNA (1)...(19): siRNA sense strand
ggaaucagagcuccauaau

SEQ ID NO: 508919 - RNA, 19 nt, Homo sapiens
  misc_RNA (1)...(19): siRNA sense strand
cucgucaucuuaagaguua

SEQ ID NO: 508920 - RNA, 19 nt, Homo sapiens
  misc_RNA (1)...(19): siRNA sense strand
acucuaacuuacaggauua

SEQ ID NO: 508921 - RNA, 19 nt, Homo sapiens
  misc_RNA (1)...(19): siRNA sense strand
gggaaucagagcuccauaa

SEQ ID NO: 508922 - RNA, 19 nt, Homo sapiens
  misc_RNA (1)...(19): siRNA sense strand
guucaucugacauaccuua

SEQ ID NO: 508923 - RNA, 19 nt, Homo sapiens
  misc_RNA (1)...(19): siRNA sense strand
gaaugggacagaccuacuu

SEQ ID NO: 508924 - RNA, 19 nt, Homo sapiens
  misc_RNA (1)...(19): siRNA sense strand
gacacuggauauaaucugu

SEQ ID NO: 508925 - RNA, 19 nt, Homo sapiens
  misc_RNA (1)...(19): siRNA sense strand
ugggccaggugguaucuua

SEQ ID NO: 508926 - RNA, 19 nt, Homo sapiens
  misc_RNA (1)...(19): siRNA sense strand
gauuaucaauuacccacau

SEQ ID NO: 508927 - RNA, 19 nt, Homo sapiens
  misc_RNA (1)...(19): siRNA sense strand
ggacuuuguugagggcuau

SEQ ID NO: 508928 - RNA, 19 nt, Homo sapiens
  misc_RNA (1)...(19): siRNA sense strand
gaaucagagcuccauaaug

SEQ ID NO: 508929 - RNA, 19 nt, Homo sapiens
  misc_RNA (1)...(19): siRNA sense strand
uggaauaagcacacucuaa

SEQ ID NO: 508930 - RNA, 19 nt, Homo sapiens
  misc_RNA (1)...(19): siRNA sense strand
aaugaacacuggucagcuu

SEQ ID NO: 508931 - RNA, 19 nt, Homo sapiens
  misc_RNA (1)...(19): siRNA sense strand
acacagcuccugcaacaau

SEQ ID NO: 508932 - RNA, 19 nt, Homo sapiens
  misc_RNA (1)...(19): siRNA sense strand
gcucagugccgaugauauc

SEQ ID NO: 508933 - RNA, 19 nt, Homo sapiens
  misc_RNA (1)...(19): siRNA sense strand
ugaagaugguuggcccuuu

SEQ ID NO: 508934 - RNA, 19 nt, Homo sapiens
  misc_RNA (1)...(19): siRNA sense strand
gggcuauuuccaucaauuu

SEQ ID NO: 508935 - RNA, 19 nt, Homo sapiens
  misc_RNA (1)...(19): siRNA sense strand
cuucagacacuggauauaa

SEQ ID NO: 508936 - RNA, 19 nt, Homo sapiens
  misc_RNA (1)...(19): siRNA sense strand
ggagcaaugugaccccuuu

SEQ ID NO: 508937 - RNA, 19 nt, Homo sapiens
  misc_RNA (1)...(19): siRNA sense strand
ugagggcuauuuccaucaa

SEQ ID NO: 508938 - RNA, 19 nt, Homo sapiens
  misc_RNA (1)...(19): siRNA sense strand
cacucuaacuuacaggauu

SEQ ID NO: 508939 - RNA, 19 nt, Homo sapiens
  misc_RNA (1)...(19): siRNA sense strand
caauuacccacaugauaug

SEQ ID NO: 508940 - RNA, 19 nt, Homo sapiens
  misc_RNA (1)...(19): siRNA sense strand
gaauaagcacacucuaacu

SEQ ID NO: 508941 - RNA, 19 nt, Homo sapiens
  misc_RNA (1)...(19): siRNA sense strand
gaacacuggucagcuucag

SEQ ID NO: 508942 - RNA, 19 nt, Homo sapiens
  misc_RNA (1)...(19): siRNA sense strand
aauaagcacacucuaacuu

SEQ ID NO: 508943 - RNA, 19 nt, Homo sapiens
  misc_RNA (1)...(19): siRNA sense strand
ggauccagcauuuguaugg

SEQ ID NO: 508944 - RNA, 19 nt, Homo sapiens
  misc_RNA (1)...(19): siRNA sense strand
cacagcuccugcaacaauu

SEQ ID NO: 508945 - RNA, 19 nt, Homo sapiens
  misc_RNA (1)...(19): siRNA sense strand
cagcauuuguauggagaaa

SEQ ID NO: 508946 - RNA, 19 nt, Homo sapiens
  misc_RNA (1)...(19): siRNA sense strand
gcagcucgucaucuuaaga

SEQ ID NO: 508947 - RNA, 19 nt, Homo sapiens
  misc_RNA (1)...(19): siRNA sense strand
gagauugggcauucuuugg

SEQ ID NO: 508948 - RNA, 19 nt, Homo sapiens
  misc_RNA (1)...(19): siRNA sense strand
aaaggauccagcauuugua

SEQ ID NO: 508949 - RNA, 19 nt, Homo sapiens
  misc_RNA (1)...(19): siRNA sense strand
cagcuucagacacuggaua

SEQ ID NO: 508950 - RNA, 19 nt, Homo sapiens
  misc_RNA (1)...(19): siRNA sense strand
gcucgucaucuuaagaguu

SEQ ID NO: 508951 - RNA, 19 nt, Homo sapiens
  misc_RNA (1)...(19): siRNA sense strand
gaugguuggcccuuugaug

SEQ ID NO: 508952 - RNA, 19 nt, Homo sapiens
  misc_RNA (1)...(19): siRNA sense strand
augcagacaucaagguuuc

SEQ ID NO: 508953 - RNA, 19 nt, Homo sapiens
  misc_RNA (1)...(19): siRNA sense strand
caaugugaccccuuugaua

SEQ ID NO: 508954 - RNA, 19 nt, Homo sapiens
  misc_RNA (1)...(19): siRNA sense strand
acaucaagguuucuuucug

SEQ ID NO: 508955 - RNA, 19 nt, Homo sapiens
  misc_RNA (1)...(19): siRNA sense strand
gcagacaucaagguuucuu

SEQ ID NO: 508956 - RNA, 19 nt, Homo sapiens
  misc_RNA (1)...(19): siRNA sense strand
uucagacacuggauauaau

SEQ ID NO: 508957 - RNA, 19 nt, Homo sapiens
  misc_RNA (1)...(19): siRNA sense strand
ggcagugggcccaugaaga

SEQ ID NO: 508958 - RNA, 19 nt, Homo sapiens
  misc_RNA (1)...(19): siRNA sense strand
uuacccacaugauaugaag

SEQ ID NO: 508959 - RNA, 19 nt, Homo sapiens
  misc_RNA (1)...(19): siRNA sense strand
ucagagcuccauaauguac

SEQ ID NO: 508960 - RNA, 19 nt, Homo sapiens
  misc_RNA (1)...(19): siRNA sense strand
cacuggauauaaucuguuc

SEQ ID NO: 508961 - RNA, 19 nt, Homo sapiens
  misc_RNA (1)...(19): siRNA sense strand
uggaaauccuggaguuguc

SEQ ID NO: 508962 - RNA, 19 nt, Homo sapiens
  misc_RNA (1)...(19): siRNA sense strand
gggacagaccuacuugaca

SEQ ID NO: 508963 - RNA, 19 nt, Homo sapiens
  misc_RNA (1)...(19): siRNA sense strand
gcaagugcagaauggagau

SEQ ID NO: 508964 - RNA, 19 nt, Homo sapiens
  misc_RNA (1)...(19): siRNA sense strand
auaaugcaguuuccaucug

SEQ ID NO: 508965 - RNA, 19 nt, Homo sapiens
  misc_RNA (1)...(19): siRNA sense strand
agacaucaagguuucuuuc

SEQ ID NO: 508966 - RNA, 19 nt, Homo sapiens
  misc_RNA (1)...(19): siRNA sense strand
caucuuaagaguuacuauc

SEQ ID NO: 508967 - RNA, 19 nt, Homo sapiens
  misc_RNA (1)...(19): siRNA sense strand
uuaccaaauucuggaaauc

SEQ ID NO: 508968 - RNA, 19 nt, Homo sapiens
  misc_RNA (1)...(19): siRNA sense strand
ggaaugggacagaccuacu

SEQ ID NO: 508969 - RNA, 19 nt, Homo sapiens
  misc_RNA (1)...(19): siRNA sense strand
ugagauugggcauucuuug

SEQ ID NO: 508970 - RNA, 19 nt, Homo sapiens
  misc_RNA (1)...(19): siRNA sense strand
cucaugagauugggcauuc

SEQ ID NO: 508971 - RNA, 19 nt, Homo sapiens
  misc_RNA (1)...(19): siRNA sense strand
gaugcaaguggaauaagca

SEQ ID NO: 508972 - RNA, 19 nt, Homo sapiens
  misc_RNA (1)...(19): siRNA sense strand
cagugccgaugauauccaa

SEQ ID NO: 508973 - RNA, 19 nt, Homo sapiens
  misc_RNA (1)...(19): siRNA sense strand
ccagcucagugccgaugau

SEQ ID NO: 508974 - RNA, 19 nt, Homo sapiens
  misc_RNA (1)...(19): siRNA sense strand
gagggcuauuuccaucaau

SEQ ID NO: 508975 - RNA, 19 nt, Homo sapiens
  misc_RNA (1)...(19): siRNA sense strand
cagugaaagacaguauaua

SEQ ID NO: 508976 - RNA, 19 nt, Homo sapiens
  misc_RNA (1)...(19): siRNA sense strand
cuaacuuacaggauuauca

SEQ ID NO: 508977 - RNA, 19 nt, Homo sapiens
  misc_RNA (1)...(19): siRNA sense strand
agggcuauuuccaucaauu

SEQ ID NO: 508978 - RNA, 19 nt, Homo sapiens
  misc_RNA (1)...(19): siRNA sense strand
gcagcacucugggaaucag

SEQ ID NO: 508979 - RNA, 19 nt, Homo sapiens
  misc_RNA (1)...(19): siRNA sense strand
ggacaaaucuguacucuuu

SEQ ID NO: 508980 - RNA, 19 nt, Homo sapiens
  misc_RNA (1)...(19): siRNA sense strand
gaacauaccuuugaagaga

SEQ ID NO: 508981 - RNA, 19 nt, Homo sapiens
  misc_RNA (1)...(19): siRNA sense strand
ccaagaaucuccuuuaauu

SEQ ID NO: 508982 - RNA, 19 nt, Homo sapiens
  misc_RNA (1)...(19): siRNA sense strand
gcacaaaggugacaaugga

SEQ ID NO: 508983 - RNA, 19 nt, Homo sapiens
  misc_RNA (1)...(19): siRNA sense strand
ggagguggauggucuuuaa

SEQ ID NO: 508984 - RNA, 19 nt, Homo sapiens
  misc_RNA (1)...(19): siRNA sense strand
gaagaccuguucuaucaaa

SEQ ID NO: 508985 - RNA, 19 nt, Homo sapiens
  misc_RNA (1)...(19): siRNA sense strand
gagaggagacuaugaagua

SEQ ID NO: 508986 - RNA, 19 nt, Homo sapiens
  misc_RNA (1)...(19): siRNA sense strand
gccauuuacuuacauguua

SEQ ID NO: 508987 - RNA, 19 nt, Homo sapiens
  misc_RNA (1)...(19): siRNA sense strand
gaacgacaaugaaauguac

SEQ ID NO: 508988 - RNA, 19 nt, Homo sapiens
  misc_RNA (1)...(19): siRNA sense strand
gcgaguggcuaauuugaaa

SEQ ID NO: 508989 - RNA, 19 nt, Homo sapiens
  misc_RNA (1)...(19): siRNA sense strand
ccgaagaccuguucuauca

SEQ ID NO: 508990 - RNA, 19 nt, Homo sapiens
  misc_RNA (1)...(19): siRNA sense strand
gaccaaagcaucaaaguga

SEQ ID NO: 508991 - RNA, 19 nt, Homo sapiens
  misc_RNA (1)...(19): siRNA sense strand
gaaauaauggcaaacaguu

SEQ ID NO: 508992 - RNA, 19 nt, Homo sapiens
  misc_RNA (1)...(19): siRNA sense strand
gcaagcagcugaggccauu

SEQ ID NO: 508993 - RNA, 19 nt, Homo sapiens
  misc_RNA (1)...(19): siRNA sense strand
ggacagaaaccaaacauag

SEQ ID NO: 508994 - RNA, 19 nt, Homo sapiens
  misc_RNA (1)...(19): siRNA sense strand
ggacaaauggucugccuuu

SEQ ID NO: 508995 - RNA, 19 nt, Homo sapiens
  misc_RNA (1)...(19): siRNA sense strand
uacagaagcuggacagaaa

SEQ ID NO: 508996 - RNA, 19 nt, Homo sapiens
  misc_RNA (1)...(19): siRNA sense strand
gcaaacgguugaacacaau

SEQ ID NO: 508997 - RNA, 19 nt, Homo sapiens
  misc_RNA (1)...(19): siRNA sense strand
uaauaugacucaaggauuc

SEQ ID NO: 508998 - RNA, 19 nt, Homo sapiens
  misc_RNA (1)...(19): siRNA sense strand
ggacucugccauuuacuua

SEQ ID NO: 508999 - RNA, 19 nt, Homo sapiens
  misc_RNA (1)...(19): siRNA sense strand
gcuaagaaauggagcuaau

SEQ ID NO: 509000 - RNA, 19 nt, Homo sapiens
  misc_RNA (1)...(19): siRNA sense strand
gccauuauaugaagaguau

SEQ ID NO: 509001 - RNA, 19 nt, Homo sapiens
  misc_RNA (1)...(19): siRNA sense strand
ucaagcagcuaaacaugaa

SEQ ID NO: 509002 - RNA, 19 nt, Homo sapiens
  misc_RNA (1)...(19): siRNA sense strand
ggacaaguuuaaccacgaa

SEQ ID NO: 509003 - RNA, 19 nt, Homo sapiens
  misc_RNA (1)...(19): siRNA sense strand
gaaguucuuuguaucuguu

SEQ ID NO: 509004 - RNA, 19 nt, Homo sapiens
  misc_RNA (1)...(19): siRNA sense strand
ugaaagaccagaacaagaa

SEQ ID NO: 509005 - RNA, 19 nt, Homo sapiens
  misc_RNA (1)...(19): siRNA sense strand
caacuacuuugagcccuua

SEQ ID NO: 509006 - RNA, 19 nt, Homo sapiens
  misc_RNA (1)...(19): siRNA sense strand
gaucaucuguugcauaugc

SEQ ID NO: 509007 - RNA, 19 nt, Homo sapiens
  misc_RNA (1)...(19): siRNA sense strand
gggcaaaguugaugaaugc

SEQ ID NO: 509008 - RNA, 19 nt, Homo sapiens
  misc_RNA (1)...(19): siRNA sense strand
ggagaugaagcgagagaua

SEQ ID NO: 509009 - RNA, 19 nt, Homo sapiens
  misc_RNA (1)...(19): siRNA sense strand
aaauggagcuaaugaagga

SEQ ID NO: 509010 - RNA, 19 nt, Homo sapiens
  misc_RNA (1)...(19): siRNA sense strand
uaaggccacugcucaacua

SEQ ID NO: 509011 - RNA, 19 nt, Homo sapiens
  misc_RNA (1)...(19): siRNA sense strand
ccacaagaaugcuuauuac

SEQ ID NO: 509012 - RNA, 19 nt, Homo sapiens
  misc_RNA (1)...(19): siRNA sense strand
ggaacgacaaugaaaugua

SEQ ID NO: 509013 - RNA, 19 nt, Homo sapiens
  misc_RNA (1)...(19): siRNA sense strand
ggagauaaagcauaugaau

SEQ ID NO: 509014 - RNA, 19 nt, Homo sapiens
  misc_RNA (1)...(19): siRNA sense strand
gcaucucuguuccauguuu

SEQ ID NO: 509015 - RNA, 19 nt, Homo sapiens
  misc_RNA (1)...(19): siRNA sense strand
caaacaagcacucacgauu

SEQ ID NO: 509016 - RNA, 19 nt, Homo sapiens
  misc_RNA (1)...(19): siRNA sense strand
aaucagcucuuggagauaa

SEQ ID NO: 509017 - RNA, 19 nt, Homo sapiens
  misc_RNA (1)...(19): siRNA sense strand
aaaccaagaaucuccuuua

SEQ ID NO: 509018 - RNA, 19 nt, Homo sapiens
  misc_RNA (1)...(19): siRNA sense strand
gaauggaacgacaaugaaa

SEQ ID NO: 509019 - RNA, 19 nt, Homo sapiens
  misc_RNA (1)...(19): siRNA sense strand
acaaugaaauguaccuguu

SEQ ID NO: 509020 - RNA, 19 nt, Homo sapiens
  misc_RNA (1)...(19): siRNA sense strand
gauauuagcaaaggagaaa

SEQ ID NO: 509021 - RNA, 19 nt, Homo sapiens
  misc_RNA (1)...(19): siRNA sense strand
ccgaucaucuguugcauau

SEQ ID NO: 509022 - RNA, 19 nt, Homo sapiens
  misc_RNA (1)...(19): siRNA sense strand
ugacaacagccuagaguuu

SEQ ID NO: 509023 - RNA, 19 nt, Homo sapiens
  misc_RNA (1)...(19): siRNA sense strand
acaccaauauuacugaaga

SEQ ID NO: 509024 - RNA, 19 nt, Homo sapiens
  misc_RNA (1)...(19): siRNA sense strand
ucagagaucggaagaagaa

SEQ ID NO: 509025 - RNA, 19 nt, Homo sapiens
  misc_RNA (1)...(19): siRNA sense strand
aaccaagaaucuccuuuaa

SEQ ID NO: 509026 - RNA, 19 nt, Homo sapiens
  misc_RNA (1)...(19): siRNA sense strand
agaagacaaugaaacagaa

SEQ ID NO: 509027 - RNA, 19 nt, Homo sapiens
  misc_RNA (1)...(19): siRNA sense strand
uaagaaauggagcuaauga

SEQ ID NO: 509028 - RNA, 19 nt, Homo sapiens
  misc_RNA (1)...(19): siRNA sense strand
gacaagagcaaacgguuga

SEQ ID NO: 509029 - RNA, 19 nt, Homo sapiens
  misc_RNA (1)...(19): siRNA sense strand
ucacuugcuucuuggaauu

SEQ ID NO: 509030 - RNA, 19 nt, Homo sapiens
  misc_RNA (1)...(19): siRNA sense strand
gaccuguucuaucaaaguu

SEQ ID NO: 509031 - RNA, 19 nt, Homo sapiens
  misc_RNA (1)...(19): siRNA sense strand
ucaaggaggccgagaaguu

SEQ ID NO: 509032 - RNA, 19 nt, Homo sapiens
  misc_RNA (1)...(19): siRNA sense strand
gaucugaggucggcaagca

SEQ ID NO: 509033 - RNA, 19 nt, Homo sapiens
  misc_RNA (1)...(19): siRNA sense strand
ggucuucagugcucucaga

SEQ ID NO: 509034 - RNA, 19 nt, Homo sapiens
  misc_RNA (1)...(19): siRNA sense strand
gagauaaagcauaugaaug

SEQ ID NO: 509035 - RNA, 19 nt, Homo sapiens
  misc_RNA (1)...(19): siRNA sense strand
ccgcaucucuguuccaugu

SEQ ID NO: 509036 - RNA, 19 nt, Homo sapiens
  misc_RNA (1)...(19): siRNA sense strand
ggaacaggccaagacauuu

SEQ ID NO: 509037 - RNA, 19 nt, Homo sapiens
  misc_RNA (1)...(19): siRNA sense strand
gcacaaccuuuucugcuaa

SEQ ID NO: 509038 - RNA, 19 nt, Homo sapiens
  misc_RNA (1)...(19): siRNA sense strand
gaaugccuauccuuccuau

SEQ ID NO: 509039 - RNA, 19 nt, Homo sapiens
  misc_RNA (1)...(19): siRNA sense strand
ggcaagagcaaaucauuau

SEQ ID NO: 509040 - RNA, 19 nt, Homo sapiens
  misc_RNA (1)...(19): siRNA sense strand
ggucuucugucacccgauu

SEQ ID NO: 509041 - RNA, 19 nt, Homo sapiens
  misc_RNA (1)...(19): siRNA sense strand
ccuuaugccuccaucgaua

SEQ ID NO: 509042 - RNA, 19 nt, Homo sapiens
  misc_RNA (1)...(19): siRNA sense strand
cagaaacuguucaauaugc

SEQ ID NO: 509043 - RNA, 19 nt, Homo sapiens
  misc_RNA (1)...(19): siRNA sense strand
ugaaggcccucugcacaaa

SEQ ID NO: 509044 - RNA, 19 nt, Homo sapiens
  misc_RNA (1)...(19): siRNA sense strand
aaacaagcacucacgauug

SEQ ID NO: 509045 - RNA, 19 nt, Homo sapiens
  misc_RNA (1)...(19): siRNA sense strand
uaaacuuccugcucaaaca

SEQ ID NO: 509046 - RNA, 19 nt, Homo sapiens
  misc_RNA (1)...(19): siRNA sense strand
gacagaaaccaaacauaga

SEQ ID NO: 509047 - RNA, 19 nt, Homo sapiens
  misc_RNA (1)...(19): siRNA sense strand
gaagacaaugaaacagaaa

SEQ ID NO: 509048 - RNA, 19 nt, Homo sapiens
  misc_RNA (1)...(19): siRNA sense strand
cccaggaaauguucagaaa

SEQ ID NO: 509049 - RNA, 19 nt, Homo sapiens
  misc_RNA (1)...(19): siRNA sense strand
ccauauggcugauuguuuu

SEQ ID NO: 509050 - RNA, 19 nt, Homo sapiens
  misc_RNA (1)...(19): siRNA sense strand
gauaaagcauaugaaugga

SEQ ID NO: 509051 - RNA, 19 nt, Homo sapiens
  misc_RNA (1)...(19): siRNA sense strand
aaagugaggauaagccuaa

SEQ ID NO: 509052 - RNA, 19 nt, Homo sapiens
  misc_RNA (1)...(19): siRNA sense strand
gauagugguuggcauuguc

SEQ ID NO: 509053 - RNA, 19 nt, Homo sapiens
  misc_RNA (1)...(19): siRNA sense strand
uaacccagauaauccacaa

SEQ ID NO: 509054 - RNA, 19 nt, Homo sapiens
  misc_RNA (1)...(19): siRNA sense strand
ucaagaagacaaugaaaca

SEQ ID NO: 509055 - RNA, 19 nt, Homo sapiens
  misc_RNA (1)...(19): siRNA sense strand
acucaaggauucugggaaa

SEQ ID NO: 509056 - RNA, 19 nt, Homo sapiens
  misc_RNA (1)...(19): siRNA sense strand
cagcugaggccauuauaug

SEQ ID NO: 509057 - RNA, 19 nt, Homo sapiens
  misc_RNA (1)...(19): siRNA sense strand
ggccacugcucaacuacuu

SEQ ID NO: 509058 - RNA, 19 nt, Homo sapiens
  misc_RNA (1)...(19): siRNA sense strand
ugugacaucucaaacucua

SEQ ID NO: 509059 - RNA, 19 nt, Homo sapiens
  misc_RNA (1)...(19): siRNA sense strand
gaacaggccaagacauuuu

SEQ ID NO: 509060 - RNA, 19 nt, Homo sapiens
  misc_RNA (1)...(19): siRNA sense strand
cagauaauccacaagaaug

SEQ ID NO: 509061 - RNA, 19 nt, Homo sapiens
  misc_RNA (1)...(19): siRNA sense strand
gaaaccaagaaucuccuuu

SEQ ID NO: 509062 - RNA, 19 nt, Homo sapiens
  misc_RNA (1)...(19): siRNA sense strand
gaaagaccagaacaagaau

SEQ ID NO: 509063 - RNA, 19 nt, Homo sapiens
  misc_RNA (1)...(19): siRNA sense strand
ucaagaagcacuuugucaa

SEQ ID NO: 509064 - RNA, 19 nt, Homo sapiens
  misc_RNA (1)...(19): siRNA sense strand
ggccugggaugcacagaga

SEQ ID NO: 509065 - RNA, 19 nt, Homo sapiens
  misc_RNA (1)...(19): siRNA sense strand
ugggaaagcuggagaucug

SEQ ID NO: 509066 - RNA, 19 nt, Homo sapiens
  misc_RNA (1)...(19): siRNA sense strand
gaauaaugcuggggacaaa

SEQ ID NO: 509067 - RNA, 19 nt, Homo sapiens
  misc_RNA (1)...(19): siRNA sense strand
ccaaagaccaguggaugaa

SEQ ID NO: 509068 - RNA, 19 nt, Homo sapiens
  misc_RNA (1)...(19): siRNA sense strand
agaggagacuaugaaguaa

SEQ ID NO: 509069 - RNA, 19 nt, Homo sapiens
  misc_RNA (1)...(19): siRNA sense strand
ccaauuccaguuucaagaa

SEQ ID NO: 509070 - RNA, 19 nt, Homo sapiens
  misc_RNA (1)...(19): siRNA sense strand
caggaaauguucagaaagc

SEQ ID NO: 509071 - RNA, 19 nt, Homo sapiens
  misc_RNA (1)...(19): siRNA sense strand
uccacaagaaugcuuauua

SEQ ID NO: 509072 - RNA, 19 nt, Homo sapiens
  misc_RNA (1)...(19): siRNA sense strand
agauaaagcauaugaaugg

SEQ ID NO: 509073 - RNA, 19 nt, Homo sapiens
  misc_RNA (1)...(19): siRNA sense strand
gcccaaauguauccacuac

SEQ ID NO: 509074 - RNA, 19 nt, Homo sapiens
  misc_RNA (1)...(19): siRNA sense strand
cagccacaccuaagcauuu

SEQ ID NO: 509075 - RNA, 19 nt, Homo sapiens
  misc_RNA (1)...(19): siRNA sense strand
gaggagacuaugaaguaaa

SEQ ID NO: 509076 - RNA, 19 nt, Homo sapiens
  misc_RNA (1)...(19): siRNA sense strand
ucugauaucauuccuagaa

SEQ ID NO: 509077 - RNA, 19 nt, Homo sapiens
  misc_RNA (1)...(19): siRNA sense strand
cuacuuugagcccuuauuu

SEQ ID NO: 509078 - RNA, 19 nt, Homo sapiens
  misc_RNA (1)...(19): siRNA sense strand
gccaguugauugaagaugu

SEQ ID NO: 509079 - RNA, 19 nt, Homo sapiens
  misc_RNA (1)...(19): siRNA sense strand
gaaccugggugauaaauua

SEQ ID NO: 509080 - RNA, 19 nt, Homo sapiens
  misc_RNA (1)...(19): siRNA sense strand
caaggaagauuuagaauug

SEQ ID NO: 509081 - RNA, 19 nt, Homo sapiens
  misc_RNA (1)...(19): siRNA sense strand
gaauauggcucaacccaaa

SEQ ID NO: 509082 - RNA, 19 nt, Homo sapiens
  misc_RNA (1)...(19): siRNA sense strand
gaagauaacuaccguuuag

SEQ ID NO: 509083 - RNA, 19 nt, Homo sapiens
  misc_RNA (1)...(19): siRNA sense strand
ggaagaagauuucauaagg

SEQ ID NO: 509084 - RNA, 19 nt, Homo sapiens
  misc_RNA (1)...(19): siRNA sense strand
ggacaucaaggaagauuua

SEQ ID NO: 509085 - RNA, 19 nt, Homo sapiens
  misc_RNA (1)...(19): siRNA sense strand
gcuggaagcucaaguguga

SEQ ID NO: 509086 - RNA, 19 nt, Homo sapiens
  misc_RNA (1)...(19): siRNA sense strand
cuaccaaacuggaugaaua

SEQ ID NO: 509087 - RNA, 19 nt, Homo sapiens
  misc_RNA (1)...(19): siRNA sense strand
ggaggaagaagauuucaua

SEQ ID NO: 509088 - RNA, 19 nt, Homo sapiens
  misc_RNA (1)...(19): siRNA sense strand
ucacagagcgcaucacuaa

SEQ ID NO: 509089 - RNA, 19 nt, Homo sapiens
  misc_RNA (1)...(19): siRNA sense strand
gcuauuaacugaguacuug

SEQ ID NO: 509090 - RNA, 19 nt, Homo sapiens
  misc_RNA (1)...(19): siRNA sense strand
gaugacaacuuaauugaag

SEQ ID NO: 509091 - RNA, 19 nt, Homo sapiens
  misc_RNA (1)...(19): siRNA sense strand
ugaagaagccuacgagaaa

SEQ ID NO: 509092 - RNA, 19 nt, Homo sapiens
  misc_RNA (1)...(19): siRNA sense strand
ccaaaucguuccaggauau

SEQ ID NO: 509093 - RNA, 19 nt, Homo sapiens
  misc_RNA (1)...(19): siRNA sense strand
gagcaggaguugaagcaaa

SEQ ID NO: 509094 - RNA, 19 nt, Homo sapiens
  misc_RNA (1)...(19): siRNA sense strand
guacagcacuacacagaau

SEQ ID NO: 509095 - RNA, 19 nt, Homo sapiens
  misc_RNA (1)...(19): siRNA sense strand
ccaaacagcugaggccaaa

SEQ ID NO: 509096 - RNA, 19 nt, Homo sapiens
  misc_RNA (1)...(19): siRNA sense strand
gcaggaagauaucaaacug

SEQ ID NO: 509097 - RNA, 19 nt, Homo sapiens
  misc_RNA (1)...(19): siRNA sense strand
cagcacaaguuccaguaua

SEQ ID NO: 509098 - RNA, 19 nt, Homo sapiens
  misc_RNA (1)...(19): siRNA sense strand
gaauugagcauaagcaugu

SEQ ID NO: 509099 - RNA, 19 nt, Homo sapiens
  misc_RNA (1)...(19): siRNA sense strand
gaagaagccuacgagaaau

SEQ ID NO: 509100 - RNA, 19 nt, Homo sapiens
  misc_RNA (1)...(19): siRNA sense strand
gaagaucccagaaacaguu

SEQ ID NO: 509101 - RNA, 19 nt, Homo sapiens
  misc_RNA (1)...(19): siRNA sense strand
gacuagagcuucacagcaa

SEQ ID NO: 509102 - RNA, 19 nt, Homo sapiens
  misc_RNA (1)...(19): siRNA sense strand
cgacagccauucgcacaua

SEQ ID NO: 509103 - RNA, 19 nt, Homo sapiens
  misc_RNA (1)...(19): siRNA sense strand
ucagugaacuugccaaauc

SEQ ID NO: 509104 - RNA, 19 nt, Homo sapiens
  misc_RNA (1)...(19): siRNA sense strand
gaagauaucaaacuguaug

SEQ ID NO: 509105 - RNA, 19 nt, Homo sapiens
  misc_RNA (1)...(19): siRNA sense strand
gaacuuguuggaugaaauu

SEQ ID NO: 509106 - RNA, 19 nt, Homo sapiens
  misc_RNA (1)...(19): siRNA sense strand
caaggagucugaaguucuu

SEQ ID NO: 509107 - RNA, 19 nt, Homo sapiens
  misc_RNA (1)...(19): siRNA sense strand
uggaaaguauggauuauga

SEQ ID NO: 509108 - RNA, 19 nt, Homo sapiens
  misc_RNA (1)...(19): siRNA sense strand
agaagcagcuggugggaaa

SEQ ID NO: 509109 - RNA, 19 nt, Homo sapiens
  misc_RNA (1)...(19): siRNA sense strand
gaacugaccacccagaaca

SEQ ID NO: 509110 - RNA, 19 nt, Homo sapiens
  misc_RNA (1)...(19): siRNA sense strand
ugaccuggaugaauugauu

SEQ ID NO: 509111 - RNA, 19 nt, Homo sapiens
  misc_RNA (1)...(19): siRNA sense strand
gaagauccaagauguucua

SEQ ID NO: 509112 - RNA, 19 nt, Homo sapiens
  misc_RNA (1)...(19): siRNA sense strand
acacggagcuggaguacau

SEQ ID NO: 509113 - RNA, 19 nt, Homo sapiens
  misc_RNA (1)...(19): siRNA sense strand
gcagauguaugggugaaga

SEQ ID NO: 509114 - RNA, 19 nt, Homo sapiens
  misc_RNA (1)...(19): siRNA sense strand
gagaggaggaagaagauuu

SEQ ID NO: 509115 - RNA, 19 nt, Homo sapiens
  misc_RNA (1)...(19): siRNA sense strand
cagaaacauuaccgucaua

SEQ ID NO: 509116 - RNA, 19 nt, Homo sapiens
  misc_RNA (1)...(19): siRNA sense strand
aagagaaccugcuuucaug

SEQ ID NO: 509117 - RNA, 19 nt, Homo sapiens
  misc_RNA (1)...(19): siRNA sense strand
ugaaaucucuaccaaacug

SEQ ID NO: 509118 - RNA, 19 nt, Homo sapiens
  misc_RNA (1)...(19): siRNA sense strand
gauaucagcagacucuuga

SEQ ID NO: 509119 - RNA, 19 nt, Homo sapiens
  misc_RNA (1)...(19): siRNA sense strand
gaaagaugcuucuguuccu

SEQ ID NO: 509120 - RNA, 19 nt, Homo sapiens
  misc_RNA (1)...(19): siRNA sense strand
agaauuggauccagaggaa

SEQ ID NO: 509121 - RNA, 19 nt, Homo sapiens
  misc_RNA (1)...(19): siRNA sense strand
gauccaagauguucuacag

SEQ ID NO: 509122 - RNA, 19 nt, Homo sapiens
  misc_RNA (1)...(19): siRNA sense strand
aggaagauaucaaacugua

SEQ ID NO: 509123 - RNA, 19 nt, Homo sapiens
  misc_RNA (1)...(19): siRNA sense strand
ugucagcaguugagucuuu

SEQ ID NO: 509124 - RNA, 19 nt, Homo sapiens
  misc_RNA (1)...(19): siRNA sense strand
cgucauauuccacccauua

SEQ ID NO: 509125 - RNA, 19 nt, Homo sapiens
  misc_RNA (1)...(19): siRNA sense strand
caaaucgacuagccgaguu

SEQ ID NO: 509126 - RNA, 19 nt, Homo sapiens
  misc_RNA (1)...(19): siRNA sense strand
ugaagaagaucccagaaac

SEQ ID NO: 509127 - RNA, 19 nt, Homo sapiens
  misc_RNA (1)...(19): siRNA sense strand
aaacauuaccgucauauuc

SEQ ID NO: 509128 - RNA, 19 nt, Homo sapiens
  misc_RNA (1)...(19): siRNA sense strand
gggaugagcuucggaaacu

SEQ ID NO: 509129 - RNA, 19 nt, Homo sapiens
  misc_RNA (1)...(19): siRNA sense strand
ugacuugagugcauauuca

SEQ ID NO: 509130 - RNA, 19 nt, Homo sapiens
  misc_RNA (1)...(19): siRNA sense strand
cuugauaccucucacuauu

SEQ ID NO: 509131 - RNA, 19 nt, Homo sapiens
  misc_RNA (1)...(19): siRNA sense strand
cgugaaagaugcuucuguu

SEQ ID NO: 509132 - RNA, 19 nt, Homo sapiens
  misc_RNA (1)...(19): siRNA sense strand
gaagaagaucccagaaaca

SEQ ID NO: 509133 - RNA, 19 nt, Homo sapiens
  misc_RNA (1)...(19): siRNA sense strand
uaaaacaucugacccuuug

SEQ ID NO: 509134 - RNA, 19 nt, Homo sapiens
  misc_RNA (1)...(19): siRNA sense strand
gaaacauuaccgucauauu

SEQ ID NO: 509135 - RNA, 19 nt, Homo sapiens
  misc_RNA (1)...(19): siRNA sense strand
uugaaggaauugagcauaa

SEQ ID NO: 509136 - RNA, 19 nt, Homo sapiens
  misc_RNA (1)...(19): siRNA sense strand
uggcugagaucaacaagga

SEQ ID NO: 509137 - RNA, 19 nt, Homo sapiens
  misc_RNA (1)...(19): siRNA sense strand
uaacugaguacuuggauau

SEQ ID NO: 509138 - RNA, 19 nt, Homo sapiens
  misc_RNA (1)...(19): siRNA sense strand
gggugaagauccaagaugu

SEQ ID NO: 509139 - RNA, 19 nt, Homo sapiens
  misc_RNA (1)...(19): siRNA sense strand
ugacaaguuuaaugcugua

SEQ ID NO: 509140 - RNA, 19 nt, Homo sapiens
  misc_RNA (1)...(19): siRNA sense strand
uggcgaaacugaagaagau

SEQ ID NO: 509141 - RNA, 19 nt, Homo sapiens
  misc_RNA (1)...(19): siRNA sense strand
caucaaggaagauuuagaa

SEQ ID NO: 509142 - RNA, 19 nt, Homo sapiens
  misc_RNA (1)...(19): siRNA sense strand
ucacuugguucucauagau

SEQ ID NO: 509143 - RNA, 19 nt, Homo sapiens
  misc_RNA (1)...(19): siRNA sense strand
cagaaacaguuaaggcaau

SEQ ID NO: 509144 - RNA, 19 nt, Homo sapiens
  misc_RNA (1)...(19): siRNA sense strand
cagcagaauuugaccaaca

SEQ ID NO: 509145 - RNA, 19 nt, Homo sapiens
  misc_RNA (1)...(19): siRNA sense strand
uggcuaauguggaaaguau

SEQ ID NO: 509146 - RNA, 19 nt, Homo sapiens
  misc_RNA (1)...(19): siRNA sense strand
gccaaaucguuccaggaua

SEQ ID NO: 509147 - RNA, 19 nt, Homo sapiens
  misc_RNA (1)...(19): siRNA sense strand
ucaggacucugucuacuag

SEQ ID NO: 509148 - RNA, 19 nt, Homo sapiens
  misc_RNA (1)...(19): siRNA sense strand
ucagcuuucuccaaucuuu

SEQ ID NO: 509149 - RNA, 19 nt, Homo sapiens
  misc_RNA (1)...(19): siRNA sense strand
caagguugcuucuagaacu

SEQ ID NO: 509150 - RNA, 19 nt, Homo sapiens
  misc_RNA (1)...(19): siRNA sense strand
caacaaggagauugaagga

SEQ ID NO: 509151 - RNA, 19 nt, Homo sapiens
  misc_RNA (1)...(19): siRNA sense strand
gccaaacaguguccucuuc

SEQ ID NO: 509152 - RNA, 19 nt, Homo sapiens
  misc_RNA (1)...(19): siRNA sense strand
gaacguuacuguggagaac

SEQ ID NO: 509153 - RNA, 19 nt, Homo sapiens
  misc_RNA (1)...(19): siRNA sense strand
gaggaagaagauuucauaa

SEQ ID NO: 509154 - RNA, 19 nt, Homo sapiens
  misc_RNA (1)...(19): siRNA sense strand
ucagaucaauuccucaaca

SEQ ID NO: 509155 - RNA, 19 nt, Homo sapiens
  misc_RNA (1)...(19): siRNA sense strand
gaaccaucagcucaacuaa

SEQ ID NO: 509156 - RNA, 19 nt, Homo sapiens
  misc_RNA (1)...(19): siRNA sense strand
ccaagauguucuacagaug

SEQ ID NO: 509157 - RNA, 19 nt, Homo sapiens
  misc_RNA (1)...(19): siRNA sense strand
ugacucagcaggaagauau

SEQ ID NO: 509158 - RNA, 19 nt, Homo sapiens
  misc_RNA (1)...(19): siRNA sense strand
ucagcucccucgugaaaga

SEQ ID NO: 509159 - RNA, 19 nt, Homo sapiens
  misc_RNA (1)...(19): siRNA sense strand
ggaggcagaccuggacuuu

SEQ ID NO: 509160 - RNA, 19 nt, Homo sapiens
  misc_RNA (1)...(19): siRNA sense strand
aaagagaggaggaagaaga

SEQ ID NO: 509161 - RNA, 19 nt, Homo sapiens
  misc_RNA (1)...(19): siRNA sense strand
ugaagcaaauugugaagag

SEQ ID NO: 509162 - RNA, 19 nt, Homo sapiens
  misc_RNA (1)...(19): siRNA sense strand
gaugauaucagcagacucu

SEQ ID NO: 509163 - RNA, 19 nt, Homo sapiens
  misc_RNA (1)...(19): siRNA sense strand
ccagaaacauuaccgucau

SEQ ID NO: 509164 - RNA, 19 nt, Homo sapiens
  misc_RNA (1)...(19): siRNA sense strand
guuacuguuugacaaguuu

SEQ ID NO: 509165 - RNA, 19 nt, Homo sapiens
  misc_RNA (1)...(19): siRNA sense strand
aucacuaacucccgaaaua

SEQ ID NO: 509166 - RNA, 19 nt, Homo sapiens
  misc_RNA (1)...(19): siRNA sense strand
gauaucagcgccauugaag

SEQ ID NO: 509167 - RNA, 19 nt, Homo sapiens
  misc_RNA (1)...(19): siRNA sense strand
caagacagccacacgaaca

SEQ ID NO: 509168 - RNA, 19 nt, Homo sapiens
  misc_RNA (1)...(19): siRNA sense strand
ucagcagacucuugaaauc

SEQ ID NO: 509169 - RNA, 19 nt, Homo sapiens
  misc_RNA (1)...(19): siRNA sense strand
uacagaugcuauuaacuga

SEQ ID NO: 509170 - RNA, 19 nt, Homo sapiens
  misc_RNA (1)...(19): siRNA sense strand
uguaugauauggcagaugu

SEQ ID NO: 509171 - RNA, 19 nt, Homo sapiens
  misc_RNA (1)...(19): siRNA sense strand
gcauaagcauguccugaac

SEQ ID NO: 509172 - RNA, 19 nt, Homo sapiens
  misc_RNA (1)...(19): siRNA sense strand
ucacuaacucccgaaauaa

SEQ ID NO: 509173 - RNA, 19 nt, Homo sapiens
  misc_RNA (1)...(19): siRNA sense strand
uggucaagcucaacaaaga

SEQ ID NO: 509174 - RNA, 19 nt, Homo sapiens
  misc_RNA (1)...(19): siRNA sense strand
gcaaggagucugaaguucu

SEQ ID NO: 509175 - RNA, 19 nt, Homo sapiens
  misc_RNA (1)...(19): siRNA sense strand
cauauuccacccauuacua

SEQ ID NO: 509176 - RNA, 19 nt, Homo sapiens
  misc_RNA (1)...(19): siRNA sense strand
cuacagaugcuauuaacug

SEQ ID NO: 509177 - RNA, 19 nt, Homo sapiens
  misc_RNA (1)...(19): siRNA sense strand
guuuauggguauccucauu

SEQ ID NO: 509178 - RNA, 19 nt, Homo sapiens
  misc_RNA (1)...(19): siRNA sense strand
cgagaugcuuuacaacaca

SEQ ID NO: 509179 - RNA, 19 nt, Homo sapiens
  misc_RNA (1)...(19): siRNA sense strand
ccaagugucugguggauga

SEQ ID NO: 509180 - RNA, 19 nt, Homo sapiens
  misc_RNA (1)...(19): siRNA sense strand
gggcagaaguggaugauca

SEQ ID NO: 509181 - RNA, 19 nt, Homo sapiens
  misc_RNA (1)...(19): siRNA sense strand
agaaguggaugaucagaaa

SEQ ID NO: 509182 - RNA, 19 nt, Homo sapiens
  misc_RNA (1)...(19): siRNA sense strand
caacgacauugacuacuau

SEQ ID NO: 509183 - RNA, 19 nt, Homo sapiens
  misc_RNA (1)...(19): siRNA sense strand
acaacgacauugacuacua

SEQ ID NO: 509184 - RNA, 19 nt, Homo sapiens
  misc_RNA (1)...(19): siRNA sense strand
gaagaagugugaggaugug

SEQ ID NO: 509185 - RNA, 19 nt, Homo sapiens
  misc_RNA (1)...(19): siRNA sense strand
ccaggaagcccuacaacaa

SEQ ID NO: 509186 - RNA, 19 nt, Homo sapiens
  misc_RNA (1)...(19): siRNA sense strand
caacaacgacauugacuac

SEQ ID NO: 509187 - RNA, 19 nt, Homo sapiens
  misc_RNA (1)...(19): siRNA sense strand
gagaugagggucuacaaca

SEQ ID NO: 509188 - RNA, 19 nt, Homo sapiens
  misc_RNA (1)...(19): siRNA sense strand
guacauggccuggaacauc

SEQ ID NO: 509189 - RNA, 19 nt, Homo sapiens
  misc_RNA (1)...(19): siRNA sense strand
guggauggaugacuucaag

SEQ ID NO: 509190 - RNA, 19 nt, Homo sapiens
  misc_RNA (1)...(19): siRNA sense strand
gaacguguacccggagaug

SEQ ID NO: 509191 - RNA, 19 nt, Homo sapiens
  misc_RNA (1)...(19): siRNA sense strand
agaugagggucuacaacaa

SEQ ID NO: 509192 - RNA, 19 nt, Homo sapiens
  misc_RNA (1)...(19): siRNA sense strand
gcaccaggaagcccuacaa

SEQ ID NO: 509193 - RNA, 19 nt, Homo sapiens
  misc_RNA (1)...(19): siRNA sense strand
acaacaacacccucacgua

SEQ ID NO: 509194 - RNA, 19 nt, Homo sapiens
  misc_RNA (1)...(19): siRNA sense strand
caaacacgcacggcacuga

SEQ ID NO: 509195 - RNA, 19 nt, Homo sapiens
  misc_RNA (1)...(19): siRNA sense strand
ugaagaagugugaggaugu

SEQ ID NO: 509196 - RNA, 19 nt, Homo sapiens
  misc_RNA (1)...(19): siRNA sense strand
cagaaguggaugaucagaa

SEQ ID NO: 509197 - RNA, 19 nt, Homo sapiens
  misc_RNA (1)...(19): siRNA sense strand
ucagaaacuggaucaaaca

SEQ ID NO: 509198 - RNA, 19 nt, Homo sapiens
  misc_RNA (1)...(19): siRNA sense strand
gaugagggucuacaacaac

SEQ ID NO: 509199 - RNA, 19 nt, Homo sapiens
  misc_RNA (1)...(19): siRNA sense strand
gcaugcccacccugaagaa

SEQ ID NO: 509200 - RNA, 19 nt, Homo sapiens
  misc_RNA (1)...(19): siRNA sense strand
acaacaacgacauugacua

SEQ ID NO: 509201 - RNA, 19 nt, Homo sapiens
  misc_RNA (1)...(19): siRNA sense strand
ggagaugagggucuacaac

SEQ ID NO: 509202 - RNA, 19 nt, Homo sapiens
  misc_RNA (1)...(19): siRNA sense strand
gaggugagaaacagcaaag

SEQ ID NO: 509203 - RNA, 19 nt, Homo sapiens
  misc_RNA (1)...(19): siRNA sense strand
ucaagugguaccuggagaa

SEQ ID NO: 509204 - RNA, 19 nt, Homo sapiens
  misc_RNA (1)...(19): siRNA sense strand
ucaagucccacguguacau

SEQ ID NO: 509205 - RNA, 19 nt, Homo sapiens
  misc_RNA (1)...(19): siRNA sense strand
gcagaaguggaugaucaga

SEQ ID NO: 509206 - RNA, 19 nt, Homo sapiens
  misc_RNA (1)...(19): siRNA sense strand
gccuggagguggagauguc

SEQ ID NO: 509207 - RNA, 19 nt, Homo sapiens
  misc_RNA (1)...(19): siRNA sense strand
ccuacaacaacgacauuga

SEQ ID NO: 509208 - RNA, 19 nt, Homo sapiens
  misc_RNA (1)...(19): siRNA sense strand
gcccuacaacaacgacauu

SEQ ID NO: 509209 - RNA, 19 nt, Homo sapiens
  misc_RNA (1)...(19): siRNA sense strand
ggaaguacgugaagaagga

SEQ ID NO: 509210 - RNA, 19 nt, Homo sapiens
  misc_RNA (1)...(19): siRNA sense strand
caaauaagaaggcccaaua

SEQ ID NO: 509211 - RNA, 19 nt, Homo sapiens
  misc_RNA (1)...(19): siRNA sense strand
gaagagaaagcaacagauu

SEQ ID NO: 509212 - RNA, 19 nt, Homo sapiens
  misc_RNA (1)...(19): siRNA sense strand
uaaaguugcucuucaugaa

SEQ ID NO: 509213 - RNA, 19 nt, Homo sapiens
  misc_RNA (1)...(19): siRNA sense strand
gacaagcccuucuuacaga

SEQ ID NO: 509214 - RNA, 19 nt, Homo sapiens
  misc_RNA (1)...(19): siRNA sense strand
uggcugaccuggauacaua

SEQ ID NO: 509215 - RNA, 19 nt, Homo sapiens
  misc_RNA (1)...(19): siRNA sense strand
gcaaauccauaucauacug

SEQ ID NO: 509216 - RNA, 19 nt, Homo sapiens
  misc_RNA (1)...(19): siRNA sense strand
ccaugguucugaagauuua

SEQ ID NO: 509217 - RNA, 19 nt, Homo sapiens
  misc_RNA (1)...(19): siRNA sense strand
gaauuggagcagauuguua

SEQ ID NO: 509218 - RNA, 19 nt, Homo sapiens
  misc_RNA (1)...(19): siRNA sense strand
ggaaucuuaugccuucauu

SEQ ID NO: 509219 - RNA, 19 nt, Homo sapiens
  misc_RNA (1)...(19): siRNA sense strand
caugaagacuacagauauu

SEQ ID NO: 509220 - RNA, 19 nt, Homo sapiens
  misc_RNA (1)...(19): siRNA sense strand
gcagugguaugcccaacaa

SEQ ID NO: 509221 - RNA, 19 nt, Homo sapiens
  misc_RNA (1)...(19): siRNA sense strand
guagaucacacaaauaaga

SEQ ID NO: 509222 - RNA, 19 nt, Homo sapiens
  misc_RNA (1)...(19): siRNA sense strand
gaacuccaauucaaagaac

SEQ ID NO: 509223 - RNA, 19 nt, Homo sapiens
  misc_RNA (1)...(19): siRNA sense strand
uagcagaugucccuagaga

SEQ ID NO: 509224 - RNA, 19 nt, Homo sapiens
  misc_RNA (1)...(19): siRNA sense strand
ggagauguaguuucaagaa

SEQ ID NO: 509225 - RNA, 19 nt, Homo sapiens
  misc_RNA (1)...(19): siRNA sense strand
gagaguugcugcuacaucu

SEQ ID NO: 509226 - RNA, 19 nt, Homo sapiens
  misc_RNA (1)...(19): siRNA sense strand
aaccagaguuuccuuagaa

SEQ ID NO: 509227 - RNA, 19 nt, Homo sapiens
  misc_RNA (1)...(19): siRNA sense strand
ugaaagaauuggagcagau

SEQ ID NO: 509228 - RNA, 19 nt, Homo sapiens
  misc_RNA (1)...(19): siRNA sense strand
ccagaagucuagcagaugu

SEQ ID NO: 509229 - RNA, 19 nt, Homo sapiens
  misc_RNA (1)...(19): siRNA sense strand
gagaagagaaagcaacaga

SEQ ID NO: 509230 - RNA, 19 nt, Homo sapiens
  misc_RNA (1)...(19): siRNA sense strand
gauuaucugcaccuucuua

SEQ ID NO: 509231 - RNA, 19 nt, Homo sapiens
  misc_RNA (1)...(19): siRNA sense strand
caaagaaugccacagaauc

SEQ ID NO: 509232 - RNA, 19 nt, Homo sapiens
  misc_RNA (1)...(19): siRNA sense strand
gaaagaauuggagcagauu

SEQ ID NO: 509233 - RNA, 19 nt, Homo sapiens
  misc_RNA (1)...(19): siRNA sense strand
acagcaaacugaaagaaau

SEQ ID NO: 509234 - RNA, 19 nt, Homo sapiens
  misc_RNA (1)...(19): siRNA sense strand
gcagaugucccuagagagu

SEQ ID NO: 509235 - RNA, 19 nt, Homo sapiens
  misc_RNA (1)...(19): siRNA sense strand
gaaccuauuauguagauca

SEQ ID NO: 509236 - RNA, 19 nt, Homo sapiens
  misc_RNA (1)...(19): siRNA sense strand
gaauuuggaaccuauuaug

SEQ ID NO: 509237 - RNA, 19 nt, Homo sapiens
  misc_RNA (1)...(19): siRNA sense strand
gaggcaugcuucagguauu

SEQ ID NO: 509238 - RNA, 19 nt, Homo sapiens
  misc_RNA (1)...(19): siRNA sense strand
gaaguuaguuuugcuguug

SEQ ID NO: 509239 - RNA, 19 nt, Homo sapiens
  misc_RNA (1)...(19): siRNA sense strand
gcugcuacaucuuuaggaa

SEQ ID NO: 509240 - RNA, 19 nt, Homo sapiens
  misc_RNA (1)...(19): siRNA sense strand
gaaauaugaccacauucug

SEQ ID NO: 509241 - RNA, 19 nt, Homo sapiens
  misc_RNA (1)...(19): siRNA sense strand
ccuuagaacuccaauucaa

SEQ ID NO: 509242 - RNA, 19 nt, Homo sapiens
  misc_RNA (1)...(19): siRNA sense strand
ucuguggacuggacaauga

SEQ ID NO: 509243 - RNA, 19 nt, Homo sapiens
  misc_RNA (1)...(19): siRNA sense strand
caaccaugaucucuuccaa

SEQ ID NO: 509244 - RNA, 19 nt, Homo sapiens
  misc_RNA (1)...(19): siRNA sense strand
gaagacuacagauauuaug

SEQ ID NO: 509245 - RNA, 19 nt, Homo sapiens
  misc_RNA (1)...(19): siRNA sense strand
aagacgaacugauaucugu

SEQ ID NO: 509246 - RNA, 19 nt, Homo sapiens
  misc_RNA (1)...(19): siRNA sense strand
aagagaaagcaacagauua

SEQ ID NO: 509247 - RNA, 19 nt, Homo sapiens
  misc_RNA (1)...(19): siRNA sense strand
agagaaagcaacagauuau

SEQ ID NO: 509248 - RNA, 19 nt, Homo sapiens
  misc_RNA (1)...(19): siRNA sense strand
gaucaaccaccuccuguca

SEQ ID NO: 509249 - RNA, 19 nt, Homo sapiens
  misc_RNA (1)...(19): siRNA sense strand
auacaaccaugaucucuuc

SEQ ID NO: 509250 - RNA, 19 nt, Homo sapiens
  misc_RNA (1)...(19): siRNA sense strand
gaguaugguucuucucagu

SEQ ID NO: 509251 - RNA, 19 nt, Homo sapiens
  misc_RNA (1)...(19): siRNA sense strand
guaugguucuucucaguca

SEQ ID NO: 509252 - RNA, 19 nt, Homo sapiens
  misc_RNA (1)...(19): siRNA sense strand
cacaugaagacuacagaua

SEQ ID NO: 509253 - RNA, 19 nt, Homo sapiens
  misc_RNA (1)...(19): siRNA sense strand
gggaacgaguugagucauc

SEQ ID NO: 509254 - RNA, 19 nt, Homo sapiens
  misc_RNA (1)...(19): siRNA sense strand
aaagaaugccacagaauca

SEQ ID NO: 509255 - RNA, 19 nt, Homo sapiens
  misc_RNA (1)...(19): siRNA sense strand
gaguugcugcuacaucuuu

SEQ ID NO: 509256 - RNA, 19 nt, Homo sapiens
  misc_RNA (1)...(19): siRNA sense strand
aaauaugaccacauucuga

SEQ ID NO: 509257 - RNA, 19 nt, Homo sapiens
  misc_RNA (1)...(19): siRNA sense strand
ucaaccaccuccugucaca

SEQ ID NO: 509258 - RNA, 19 nt, Homo sapiens
  misc_RNA (1)...(19): siRNA sense strand
cagagaaagcggccacuug

SEQ ID NO: 509259 - RNA, 19 nt, Homo sapiens
  misc_RNA (1)...(19): siRNA sense strand
cagacaagcccuucuuaca

SEQ ID NO: 509260 - RNA, 19 nt, Homo sapiens
  misc_RNA (1)...(19): siRNA sense strand
cgaguugagucauccgaau

SEQ ID NO: 509261 - RNA, 19 nt, Homo sapiens
  misc_RNA (1)...(19): siRNA sense strand
ggaggcaugcuucagguau

SEQ ID NO: 509262 - RNA, 19 nt, Homo sapiens
  misc_RNA (1)...(19): siRNA sense strand
acaugaagacuacagauau

SEQ ID NO: 509263 - RNA, 19 nt, Homo sapiens
  misc_RNA (1)...(19): siRNA sense strand
ccaaagaaugccacagaau

SEQ ID NO: 509264 - RNA, 19 nt, Homo sapiens
  misc_RNA (1)...(19): siRNA sense strand
cuaaaguugcucuucauga

SEQ ID NO: 509265 - RNA, 19 nt, Homo sapiens
  misc_RNA (1)...(19): siRNA sense strand
gcacaugaagacuacagau

SEQ ID NO: 509266 - RNA, 19 nt, Homo sapiens
  misc_RNA (1)...(19): siRNA sense strand
ugaaauaugaccacauucu

SEQ ID NO: 509267 - RNA, 19 nt, Homo sapiens
  misc_RNA (1)...(19): siRNA sense strand
ccucugcuucggaaucuua

SEQ ID NO: 509268 - RNA, 19 nt, Homo sapiens
  misc_RNA (1)...(19): siRNA sense strand
gcagagacagcagugguau

SEQ ID NO: 509269 - RNA, 19 nt, Homo sapiens
  misc_RNA (1)...(19): siRNA sense strand
uggaaccuauuauguagau

SEQ ID NO: 509270 - RNA, 19 nt, Homo sapiens
  misc_RNA (1)...(19): siRNA sense strand
uaggaaauuugacuaacca

SEQ ID NO: 509271 - RNA, 19 nt, Homo sapiens
  misc_RNA (1)...(19): siRNA sense strand
agacucugguucccgauau

SEQ ID NO: 509272 - RNA, 19 nt, Homo sapiens
  misc_RNA (1)...(19): siRNA sense strand
aauuggagcagauuguuaa

SEQ ID NO: 509273 - RNA, 19 nt, Homo sapiens
  misc_RNA (1)...(19): siRNA sense strand
ccgaauuuggaaccuauua

SEQ ID NO: 509274 - RNA, 19 nt, Homo sapiens
  misc_RNA (1)...(19): siRNA sense strand
gaguugagucauccgaauu

SEQ ID NO: 509275 - RNA, 19 nt, Homo sapiens
  misc_RNA (1)...(19): siRNA sense strand
uccaaagaaugccacagaa

SEQ ID NO: 509276 - RNA, 19 nt, Homo sapiens
  misc_RNA (1)...(19): siRNA sense strand
agaugucccuagagaguau

SEQ ID NO: 509277 - RNA, 19 nt, Homo sapiens
  misc_RNA (1)...(19): siRNA sense strand
cauaucauacugcagaaau

SEQ ID NO: 509278 - RNA, 19 nt, Homo sapiens
  misc_RNA (1)...(19): siRNA sense strand
ccuaaugccuuuucaacuu

SEQ ID NO: 509279 - RNA, 19 nt, Homo sapiens
  misc_RNA (1)...(19): siRNA sense strand
ccacagcaaacugaaagaa

SEQ ID NO: 509280 - RNA, 19 nt, Homo sapiens
  misc_RNA (1)...(19): siRNA sense strand
ggacaaugagagggagaaa

SEQ ID NO: 509281 - RNA, 19 nt, Homo sapiens
  misc_RNA (1)...(19): siRNA sense strand
gagacucugguucccgaua

SEQ ID NO: 509282 - RNA, 19 nt, Homo sapiens
  misc_RNA (1)...(19): siRNA sense strand
gaaaauggagacucugguu

SEQ ID NO: 509283 - RNA, 19 nt, Homo sapiens
  misc_RNA (1)...(19): siRNA sense strand
ccaacaauuccaagacgaa

SEQ ID NO: 509284 - RNA, 19 nt, Homo sapiens
  misc_RNA (1)...(19): siRNA sense strand
uaucugcaccuucuuaucu

SEQ ID NO: 509285 - RNA, 19 nt, Homo sapiens
  misc_RNA (1)...(19): siRNA sense strand
aaaguugcucuucaugaaa

SEQ ID NO: 509286 - RNA, 19 nt, Homo sapiens
  misc_RNA (1)...(19): siRNA sense strand
aaucuuaugccuucauuca

SEQ ID NO: 509287 - RNA, 19 nt, Homo sapiens
  misc_RNA (1)...(19): siRNA sense strand
gaauacaaccaugaucucu

SEQ ID NO: 509288 - RNA, 19 nt, Homo sapiens
  misc_RNA (1)...(19): siRNA sense strand
ggagaucgugcacaugaag

SEQ ID NO: 509289 - RNA, 19 nt, Homo sapiens
  misc_RNA (1)...(19): siRNA sense strand
ucuuaugccuucauucauc

SEQ ID NO: 509290 - RNA, 19 nt, Homo sapiens
  misc_RNA (1)...(19): siRNA sense strand
cggcaugguccaacaauuc

SEQ ID NO: 509291 - RNA, 19 nt, Homo sapiens
  misc_RNA (1)...(19): siRNA sense strand
cacagcaaacugaaagaaa

SEQ ID NO: 509292 - RNA, 19 nt, Homo sapiens
  misc_RNA (1)...(19): siRNA sense strand
aaccaccuccugucacaua

SEQ ID NO: 509293 - RNA, 19 nt, Homo sapiens
  misc_RNA (1)...(19): siRNA sense strand
ucccugugcuccuagugua

SEQ ID NO: 509294 - RNA, 19 nt, Homo sapiens
  misc_RNA (1)...(19): siRNA sense strand
cauccgaauuuggaaccua

SEQ ID NO: 509295 - RNA, 19 nt, Homo sapiens
  misc_RNA (1)...(19): siRNA sense strand
ugagucauccgaauuugga

SEQ ID NO: 509296 - RNA, 19 nt, Homo sapiens
  misc_RNA (1)...(19): siRNA sense strand
ugagagggagaaaauauua

SEQ ID NO: 509297 - RNA, 19 nt, Homo sapiens
  misc_RNA (1)...(19): siRNA sense strand
ggagaguugcugcuacauc

SEQ ID NO: 509298 - RNA, 19 nt, Homo sapiens
  misc_RNA (1)...(19): siRNA sense strand
gagaaagcggccacuugga

SEQ ID NO: 509299 - RNA, 19 nt, Homo sapiens
  misc_RNA (1)...(19): siRNA sense strand
cugguucccgauauuauua

SEQ ID NO: 509300 - RNA, 19 nt, Homo sapiens
  misc_RNA (1)...(19): siRNA sense strand
uacagacaagcccuucuua

SEQ ID NO: 509301 - RNA, 19 nt, Homo sapiens
  misc_RNA (1)...(19): siRNA sense strand
ccagggaaugcuaaaguug

SEQ ID NO: 509302 - RNA, 19 nt, Homo sapiens
  misc_RNA (1)...(19): siRNA sense strand
aauaugaccacauucugaa

SEQ ID NO: 509303 - RNA, 19 nt, Homo sapiens
  misc_RNA (1)...(19): siRNA sense strand
aaaucagucccuucuggua

SEQ ID NO: 509304 - RNA, 19 nt, Homo sapiens
  misc_RNA (1)...(19): siRNA sense strand
uuuggaaccuauuauguag

SEQ ID NO: 509305 - RNA, 19 nt, Homo sapiens
  misc_RNA (1)...(19): siRNA sense strand
uucaagcccuaaugccuuu

SEQ ID NO: 509306 - RNA, 19 nt, Homo sapiens
  misc_RNA (1)...(19): siRNA sense strand
ggagacgucgccucugcuu

SEQ ID NO: 509307 - RNA, 19 nt, Homo sapiens
  misc_RNA (1)...(19): siRNA sense strand
gcuacaucuuuaggaaauu

SEQ ID NO: 509308 - RNA, 19 nt, Homo sapiens
  misc_RNA (1)...(19): siRNA sense strand
accaugaucucuuccaaag

SEQ ID NO: 509309 - RNA, 19 nt, Homo sapiens
  misc_RNA (1)...(19): siRNA sense strand
gaaaauagcucaucagaaa

SEQ ID NO: 509310 - RNA, 19 nt, Homo sapiens
  misc_RNA (1)...(19): siRNA sense strand
gaugaaagcugcugagaaa

SEQ ID NO: 509311 - RNA, 19 nt, Homo sapiens
  misc_RNA (1)...(19): siRNA sense strand
gaguaaagcuuuccaguuu

SEQ ID NO: 509312 - RNA, 19 nt, Homo sapiens
  misc_RNA (1)...(19): siRNA sense strand
guaguagucuuaagaguaa

SEQ ID NO: 509313 - RNA, 19 nt, Homo sapiens
  misc_RNA (1)...(19): siRNA sense strand
gugaagcccuuaaagauuu

SEQ ID NO: 509314 - RNA, 19 nt, Homo sapiens
  misc_RNA (1)...(19): siRNA sense strand
acagauaggugcccuuuaa

SEQ ID NO: 509315 - RNA, 19 nt, Homo sapiens
  misc_RNA (1)...(19): siRNA sense strand
ggagggaaaucuagaacuu

SEQ ID NO: 509316 - RNA, 19 nt, Homo sapiens
  misc_RNA (1)...(19): siRNA sense strand
gaaauugacagcacugauu

SEQ ID NO: 509317 - RNA, 19 nt, Homo sapiens
  misc_RNA (1)...(19): siRNA sense strand
ugacagcacugauuauguu

SEQ ID NO: 509318 - RNA, 19 nt, Homo sapiens
  misc_RNA (1)...(19): siRNA sense strand
guaaagcuuuccaguuuga

SEQ ID NO: 509319 - RNA, 19 nt, Homo sapiens
  misc_RNA (1)...(19): siRNA sense strand
ggaggcagaauuacgauua

SEQ ID NO: 509320 - RNA, 19 nt, Homo sapiens
  misc_RNA (1)...(19): siRNA sense strand
ggagagcgauacugcaaga

SEQ ID NO: 509321 - RNA, 19 nt, Homo sapiens
  misc_RNA (1)...(19): siRNA sense strand
gaaaggccaccaagaagaa

SEQ ID NO: 509322 - RNA, 19 nt, Homo sapiens
  misc_RNA (1)...(19): siRNA sense strand
gaagagcuccuugguacua

SEQ ID NO: 509323 - RNA, 19 nt, Homo sapiens
  misc_RNA (1)...(19): siRNA sense strand
aagcagacauggaagagua

SEQ ID NO: 509324 - RNA, 19 nt, Homo sapiens
  misc_RNA (1)...(19): siRNA sense strand
gugaagagacuauuaaaug

SEQ ID NO: 509325 - RNA, 19 nt, Homo sapiens
  misc_RNA (1)...(19): siRNA sense strand
cgaauggguuauccaguaa

SEQ ID NO: 509326 - RNA, 19 nt, Homo sapiens
  misc_RNA (1)...(19): siRNA sense strand
ucgaauggguuauccagua

SEQ ID NO: 509327 - RNA, 19 nt, Homo sapiens
  misc_RNA (1)...(19): siRNA sense strand
gaaagaaauauccuggaaa

SEQ ID NO: 509328 - RNA, 19 nt, Homo sapiens
  misc_RNA (1)...(19): siRNA sense strand
agaaagaaauauccuggaa

SEQ ID NO: 509329 - RNA, 19 nt, Homo sapiens
  misc_RNA (1)...(19): siRNA sense strand
uaccaugagucuuggaaua

SEQ ID NO: 509330 - RNA, 19 nt, Homo sapiens
  misc_RNA (1)...(19): siRNA sense strand
ggacuggccuaguguuuac

SEQ ID NO: 509331 - RNA, 19 nt, Homo sapiens
  misc_RNA (1)...(19): siRNA sense strand
ggaaacgcuucuccagaug

SEQ ID NO: 509332 - RNA, 19 nt, Homo sapiens
  misc_RNA (1)...(19): siRNA sense strand
gcauuugacuccuguagca

SEQ ID NO: 509333 - RNA, 19 nt, Homo sapiens
  misc_RNA (1)...(19): siRNA sense strand
caaagaauccgugaagaga

SEQ ID NO: 509334 - RNA, 19 nt, Homo sapiens
  misc_RNA (1)...(19): siRNA sense strand
gaagagacuauuaaaugug

SEQ ID NO: 509335 - RNA, 19 nt, Homo sapiens
  misc_RNA (1)...(19): siRNA sense strand
aaagaaauauccuggaaac

SEQ ID NO: 509336 - RNA, 19 nt, Homo sapiens
  misc_RNA (1)...(19): siRNA sense strand
guacaaagaauccgugaag

SEQ ID NO: 509337 - RNA, 19 nt, Homo sapiens
  misc_RNA (1)...(19): siRNA sense strand
gaggcagaauuacgauuau

SEQ ID NO: 509338 - RNA, 19 nt, Homo sapiens
  misc_RNA (1)...(19): siRNA sense strand
caaggacucugcgugcauu

SEQ ID NO: 509339 - RNA, 19 nt, Homo sapiens
  misc_RNA (1)...(19): siRNA sense strand
gcaaaggagggaaaucuag

SEQ ID NO: 509340 - RNA, 19 nt, Homo sapiens
  misc_RNA (1)...(19): siRNA sense strand
gaaacgcuucuccagauga

SEQ ID NO: 509341 - RNA, 19 nt, Homo sapiens
  misc_RNA (1)...(19): siRNA sense strand
gaugaucacgcaaagaaga

SEQ ID NO: 509342 - RNA, 19 nt, Homo sapiens
  misc_RNA (1)...(19): siRNA sense strand
aaauugacagcacugauua

SEQ ID NO: 509343 - RNA, 19 nt, Homo sapiens
  misc_RNA (1)...(19): siRNA sense strand
gagaagcauuuuccaauug

SEQ ID NO: 509344 - RNA, 19 nt, Homo sapiens
  misc_RNA (1)...(19): siRNA sense strand
ugacuccuguagcaauuaa

SEQ ID NO: 509345 - RNA, 19 nt, Homo sapiens
  misc_RNA (1)...(19): siRNA sense strand
gcacugugaagcccuuaaa

SEQ ID NO: 509346 - RNA, 19 nt, Homo sapiens
  misc_RNA (1)...(19): siRNA sense strand
aaagaagagcuccuuggua

SEQ ID NO: 509347 - RNA, 19 nt, Homo sapiens
  misc_RNA (1)...(19): siRNA sense strand
ggacagugacgagaaaugu

SEQ ID NO: 509348 - RNA, 19 nt, Homo sapiens
  misc_RNA (1)...(19): siRNA sense strand
cagcacugauuauguuuca

SEQ ID NO: 509349 - RNA, 19 nt, Homo sapiens
  misc_RNA (1)...(19): siRNA sense strand
uagaugaucacgcaaagaa

SEQ ID NO: 509350 - RNA, 19 nt, Homo sapiens
  misc_RNA (1)...(19): siRNA sense strand
ccaguugcagcaccauuua

SEQ ID NO: 509351 - RNA, 19 nt, Homo sapiens
  misc_RNA (1)...(19): siRNA sense strand
caaaggagggaaaucuaga

SEQ ID NO: 509352 - RNA, 19 nt, Homo sapiens
  misc_RNA (1)...(19): siRNA sense strand
aaacgcuucuccagaugaa

SEQ ID NO: 509353 - RNA, 19 nt, Homo sapiens
  misc_RNA (1)...(19): siRNA sense strand
aaugaaaggccaccaagaa

SEQ ID NO: 509354 - RNA, 19 nt, Homo sapiens
  misc_RNA (1)...(19): siRNA sense strand
agacauggaagaguauaua

SEQ ID NO: 509355 - RNA, 19 nt, Homo sapiens
  misc_RNA (1)...(19): siRNA sense strand
gcuuuccaguuugaauuua

SEQ ID NO: 509356 - RNA, 19 nt, Homo sapiens
  misc_RNA (1)...(19): siRNA sense strand
gcacugauuauguuucauc

SEQ ID NO: 509357 - RNA, 19 nt, Homo sapiens
  misc_RNA (1)...(19): siRNA sense strand
ugaaaggccaccaagaaga

SEQ ID NO: 509358 - RNA, 19 nt, Homo sapiens
  misc_RNA (1)...(19): siRNA sense strand
gagggaaaucuagaacuuu

SEQ ID NO: 509359 - RNA, 19 nt, Homo sapiens
  misc_RNA (1)...(19): siRNA sense strand
gcuccuugguacuaaagaa

SEQ ID NO: 509360 - RNA, 19 nt, Homo sapiens
  misc_RNA (1)...(19): siRNA sense strand
aaauagcucaucagaaaga

SEQ ID NO: 509361 - RNA, 19 nt, Homo sapiens
  misc_RNA (1)...(19): siRNA sense strand
gaagaguauauaugggaaa

SEQ ID NO: 509362 - RNA, 19 nt, Homo sapiens
  misc_RNA (1)...(19): siRNA sense strand
gcacgaguaguagucuuaa

SEQ ID NO: 509363 - RNA, 19 nt, Homo sapiens
  misc_RNA (1)...(19): siRNA sense strand
acaccuagccugccggaaa

SEQ ID NO: 509364 - RNA, 19 nt, Homo sapiens
  misc_RNA (1)...(19): siRNA sense strand
cgagaaaugugagaagcau

SEQ ID NO: 509365 - RNA, 19 nt, Homo sapiens
  misc_RNA (1)...(19): siRNA sense strand
uuacgauuaugcaguguau

SEQ ID NO: 509366 - RNA, 19 nt, Homo sapiens
  misc_RNA (1)...(19): siRNA sense strand
uaaggaggcagaauuacga

SEQ ID NO: 509367 - RNA, 19 nt, Homo sapiens
  misc_RNA (1)...(19): siRNA sense strand
aaacagauaggugcccuuu

SEQ ID NO: 509368 - RNA, 19 nt, Homo sapiens
  misc_RNA (1)...(19): siRNA sense strand
ucacgcaaagaagaaauua

SEQ ID NO: 509369 - RNA, 19 nt, Homo sapiens
  misc_RNA (1)...(19): siRNA sense strand
ggcaaaggagggaaaucua

SEQ ID NO: 509370 - RNA, 19 nt, Homo sapiens
  misc_RNA (1)...(19): siRNA sense strand
gacugaagcagacauggaa

SEQ ID NO: 509371 - RNA, 19 nt, Homo sapiens
  misc_RNA (1)...(19): siRNA sense strand
agaaaggcacuaccuccua

SEQ ID NO: 509372 - RNA, 19 nt, Homo sapiens
  misc_RNA (1)...(19): siRNA sense strand
aguaguagucuuaagagua

SEQ ID NO: 509373 - RNA, 19 nt, Homo sapiens
  misc_RNA (1)...(19): siRNA sense strand
ugugaagcccuuaaagauu

SEQ ID NO: 509374 - RNA, 19 nt, Homo sapiens
  misc_RNA (1)...(19): siRNA sense strand
aaaaugaggaggaaaauga

SEQ ID NO: 509375 - RNA, 19 nt, Homo sapiens
  misc_RNA (1)...(19): siRNA sense strand
uaaagaagagcuccuuggu

SEQ ID NO: 509376 - RNA, 19 nt, Homo sapiens
  misc_RNA (1)...(19): siRNA sense strand
caguguaucuacuaacagu

SEQ ID NO: 509377 - RNA, 19 nt, Homo sapiens
  misc_RNA (1)...(19): siRNA sense strand
cuuuaaggaggcagaauua

SEQ ID NO: 509378 - RNA, 19 nt, Homo sapiens
  misc_RNA (1)...(19): siRNA sense strand
ugcaguaccucuuccuguu

SEQ ID NO: 509379 - RNA, 19 nt, Homo sapiens
  misc_RNA (1)...(19): siRNA sense strand
gaguaguagucuuaagagu

SEQ ID NO: 509380 - RNA, 19 nt, Homo sapiens
  misc_RNA (1)...(19): siRNA sense strand
gagcacgaguaguagucuu

SEQ ID NO: 509381 - RNA, 19 nt, Homo sapiens
  misc_RNA (1)...(19): siRNA sense strand
ugagaagcauuuuccaauu

SEQ ID NO: 509382 - RNA, 19 nt, Homo sapiens
  misc_RNA (1)...(19): siRNA sense strand
ccauuucucaguacaaaga

SEQ ID NO: 509383 - RNA, 19 nt, Homo sapiens
  misc_RNA (1)...(19): siRNA sense strand
uaugcaguguaucuacuaa

SEQ ID NO: 509384 - RNA, 19 nt, Homo sapiens
  misc_RNA (1)...(19): siRNA sense strand
ccaguuugaauuuagauga

SEQ ID NO: 509385 - RNA, 19 nt, Homo sapiens
  misc_RNA (1)...(19): siRNA sense strand
gcagacauggaagaguaua

SEQ ID NO: 509386 - RNA, 19 nt, Homo sapiens
  misc_RNA (1)...(19): siRNA sense strand
cauggaagaguauauaugg

SEQ ID NO: 509387 - RNA, 19 nt, Homo sapiens
  misc_RNA (1)...(19): siRNA sense strand
gcaguaccucuuccuguuc

SEQ ID NO: 509388 - RNA, 19 nt, Homo sapiens
  misc_RNA (1)...(19): siRNA sense strand
gacauggaagaguauauau

SEQ ID NO: 509389 - RNA, 19 nt, Homo sapiens
  misc_RNA (1)...(19): siRNA sense strand
agaguaaagcuuuccaguu

SEQ ID NO: 509390 - RNA, 19 nt, Homo sapiens
  misc_RNA (1)...(19): siRNA sense strand
gcagaauuacgauuaugca

SEQ ID NO: 509391 - RNA, 19 nt, Homo sapiens
  misc_RNA (1)...(19): siRNA sense strand
aguaaagcuuuccaguuug

SEQ ID NO: 509392 - RNA, 19 nt, Homo sapiens
  misc_RNA (1)...(19): siRNA sense strand
uacaaagaauccgugaaga

SEQ ID NO: 509393 - RNA, 19 nt, Homo sapiens
  misc_RNA (1)...(19): siRNA sense strand
ccuugguacuaaagaaauu

SEQ ID NO: 509394 - RNA, 19 nt, Homo sapiens
  misc_RNA (1)...(19): siRNA sense strand
gcaaggacucugcgugcau

SEQ ID NO: 509395 - RNA, 19 nt, Homo sapiens
  misc_RNA (1)...(19): siRNA sense strand
gaauggguuauccaguaaa

SEQ ID NO: 509396 - RNA, 19 nt, Homo sapiens
  misc_RNA (1)...(19): siRNA sense strand
cagagaaaauggcuguuga

SEQ ID NO: 509397 - RNA, 19 nt, Homo sapiens
  misc_RNA (1)...(19): siRNA sense strand
acagugacgagaaauguga

SEQ ID NO: 509398 - RNA, 19 nt, Homo sapiens
  misc_RNA (1)...(19): siRNA sense strand
caccuagccugccggaaag

SEQ ID NO: 509399 - RNA, 19 nt, Homo sapiens
  misc_RNA (1)...(19): siRNA sense strand
uguuauaccaugagucuug

SEQ ID NO: 509400 - RNA, 19 nt, Homo sapiens
  misc_RNA (1)...(19): siRNA sense strand
gcucaucagaaagaaauau

SEQ ID NO: 509401 - RNA, 19 nt, Homo sapiens
  misc_RNA (1)...(19): siRNA sense strand
uagcucaucagaaagaaau

SEQ ID NO: 509402 - RNA, 19 nt, Homo sapiens
  misc_RNA (1)...(19): siRNA sense strand
aaaggagggaaaucuagaa

SEQ ID NO: 509403 - RNA, 19 nt, Homo sapiens
  misc_RNA (1)...(19): siRNA sense strand
ccuaguguuuacccaguug

SEQ ID NO: 509404 - RNA, 19 nt, Homo sapiens
  misc_RNA (1)...(19): siRNA sense strand
acaaagaauccgugaagag

SEQ ID NO: 509405 - RNA, 19 nt, Homo sapiens
  misc_RNA (1)...(19): siRNA sense strand
uaggagagcgauacugcaa

SEQ ID NO: 509406 - RNA, 19 nt, Homo sapiens
  misc_RNA (1)...(19): siRNA sense strand
ggaaaauagcucaucagaa

SEQ ID NO: 509407 - RNA, 19 nt, Homo sapiens
  misc_RNA (1)...(19): siRNA sense strand
aagaauccgugaagagacu

SEQ ID NO: 509408 - RNA, 19 nt, Homo sapiens
  misc_RNA (1)...(19): siRNA sense strand
aagagcuccuugguacuaa

SEQ ID NO: 509409 - RNA, 19 nt, Homo sapiens
  misc_RNA (1)...(19): siRNA sense strand
ggaauaaucugccuaaaua

SEQ ID NO: 509410 - RNA, 19 nt, Homo sapiens
  misc_RNA (1)...(19): siRNA sense strand
caaccaggcuccacauaaa

SEQ ID NO: 509411 - RNA, 19 nt, Homo sapiens
  misc_RNA (1)...(19): siRNA sense strand
gaccaggacuacaggguua

SEQ ID NO: 509412 - RNA, 19 nt, Homo sapiens
  misc_RNA (1)...(19): siRNA sense strand
agacuuaccuguguuauga

SEQ ID NO: 509413 - RNA, 19 nt, Homo sapiens
  misc_RNA (1)...(19): siRNA sense strand
cacauucacuuucaacuuu

SEQ ID NO: 509414 - RNA, 19 nt, Homo sapiens
  misc_RNA (1)...(19): siRNA sense strand
gaggacggcaugagacuua

SEQ ID NO: 509415 - RNA, 19 nt, Homo sapiens
  misc_RNA (1)...(19): siRNA sense strand
uauaauagacccauccuuu

SEQ ID NO: 509416 - RNA, 19 nt, Homo sapiens
  misc_RNA (1)...(19): siRNA sense strand
caagggauauggccacguu

SEQ ID NO: 509417 - RNA, 19 nt, Homo sapiens
  misc_RNA (1)...(19): siRNA sense strand
gcaaccaggcuccacauaa

SEQ ID NO: 509418 - RNA, 19 nt, Homo sapiens
  misc_RNA (1)...(19): siRNA sense strand
gcaugagacuuaccugugu

SEQ ID NO: 509419 - RNA, 19 nt, Homo sapiens
  misc_RNA (1)...(19): siRNA sense strand
gaaacacaguggagcgaau

SEQ ID NO: 509420 - RNA, 19 nt, Homo sapiens
  misc_RNA (1)...(19): siRNA sense strand
caaugaaccuugggucaga

SEQ ID NO: 509421 - RNA, 19 nt, Homo sapiens
  misc_RNA (1)...(19): siRNA sense strand
gcgaauguaucgagacaca

SEQ ID NO: 509422 - RNA, 19 nt, Homo sapiens
  misc_RNA (1)...(19): siRNA sense strand
cccaggaaauggcuaaauu

SEQ ID NO: 509423 - RNA, 19 nt, Homo sapiens
  misc_RNA (1)...(19): siRNA sense strand
gagcgaauguaucgagaca

SEQ ID NO: 509424 - RNA, 19 nt, Homo sapiens
  misc_RNA (1)...(19): siRNA sense strand
gacauacagugaauuuaag

SEQ ID NO: 509425 - RNA, 19 nt, Homo sapiens
  misc_RNA (1)...(19): siRNA sense strand
cacauucuccuacaacuuu

SEQ ID NO: 509426 - RNA, 19 nt, Homo sapiens
  misc_RNA (1)...(19): siRNA sense strand
ccagguguauuccgaacuu

SEQ ID NO: 509427 - RNA, 19 nt, Homo sapiens
  misc_RNA (1)...(19): siRNA sense strand
gcacugcugggacaccuuu

SEQ ID NO: 509428 - RNA, 19 nt, Homo sapiens
  misc_RNA (1)...(19): siRNA sense strand
gccgaggacccgaagguua

SEQ ID NO: 509429 - RNA, 19 nt, Homo sapiens
  misc_RNA (1)...(19): siRNA sense strand
ucacugcccgcaucuauga

SEQ ID NO: 509430 - RNA, 19 nt, Homo sapiens
  misc_RNA (1)...(19): siRNA sense strand
ccacccacauucacuuuca

SEQ ID NO: 509431 - RNA, 19 nt, Homo sapiens
  misc_RNA (1)...(19): siRNA sense strand
ggagcaaguucguguacag

SEQ ID NO: 509432 - RNA, 19 nt, Homo sapiens
  misc_RNA (1)...(19): siRNA sense strand
gcccugggauggacuagau

SEQ ID NO: 509433 - RNA, 19 nt, Homo sapiens
  misc_RNA (1)...(19): siRNA sense strand
caauaaugacauacaguga

SEQ ID NO: 509434 - RNA, 19 nt, Homo sapiens
  misc_RNA (1)...(19): siRNA sense strand
ccacauucacuuucaacuu

SEQ ID NO: 509435 - RNA, 19 nt, Homo sapiens
  misc_RNA (1)...(19): siRNA sense strand
ggccaaaauuucaauaaug

SEQ ID NO: 509436 - RNA, 19 nt, Homo sapiens
  misc_RNA (1)...(19): siRNA sense strand
gcuacgaagugaaaacaaa

SEQ ID NO: 509437 - RNA, 19 nt, Homo sapiens
  misc_RNA (1)...(19): siRNA sense strand
ugacgaauuucagcacugu

SEQ ID NO: 509438 - RNA, 19 nt, Homo sapiens
  misc_RNA (1)...(19): siRNA sense strand
aagccucacuucagaaaca

SEQ ID NO: 509439 - RNA, 19 nt, Homo sapiens
  misc_RNA (1)...(19): siRNA sense strand
gcacagccaagaccugagu

SEQ ID NO: 509440 - RNA, 19 nt, Homo sapiens
  misc_RNA (1)...(19): siRNA sense strand
guacagccaaagagagcua

SEQ ID NO: 509441 - RNA, 19 nt, Homo sapiens
  misc_RNA (1)...(19): siRNA sense strand
gcugugcuacgaagugaaa

SEQ ID NO: 509442 - RNA, 19 nt, Homo sapiens
  misc_RNA (1)...(19): siRNA sense strand
caggaaauggcuaaauuca

SEQ ID NO: 509443 - RNA, 19 nt, Homo sapiens
  misc_RNA (1)...(19): siRNA sense strand
gagacuuaccuguguuaug

SEQ ID NO: 509444 - RNA, 19 nt, Homo sapiens
  misc_RNA (1)...(19): siRNA sense strand
caugagacuuaccuguguu

SEQ ID NO: 509445 - RNA, 19 nt, Homo sapiens
  misc_RNA (1)...(19): siRNA sense strand
cgauggauccacccacauu

SEQ ID NO: 509446 - RNA, 19 nt, Homo sapiens
  misc_RNA (1)...(19): siRNA sense strand
uggaauaaucugccuaaau

SEQ ID NO: 509447 - RNA, 19 nt, Homo sapiens
  misc_RNA (1)...(19): siRNA sense strand
uaauagacccauccuuucu

SEQ ID NO: 509448 - RNA, 19 nt, Homo sapiens
  misc_RNA (1)...(19): siRNA sense strand
uggagcgcaugcacaauga

SEQ ID NO: 509449 - RNA, 19 nt, Homo sapiens
  misc_RNA (1)...(19): siRNA sense strand
ugagauucuuccacugguu

SEQ ID NO: 509450 - RNA, 19 nt, Homo sapiens
  misc_RNA (1)...(19): siRNA sense strand
ccaggaaauggcuaaauuc

SEQ ID NO: 509451 - RNA, 19 nt, Homo sapiens
  misc_RNA (1)...(19): siRNA sense strand
cagguguauuccgaacuua

SEQ ID NO: 509452 - RNA, 19 nt, Homo sapiens
  misc_RNA (1)...(19): siRNA sense strand
cuucagcugugcccaggaa

SEQ ID NO: 509453 - RNA, 19 nt, Homo sapiens
  misc_RNA (1)...(19): siRNA sense strand
acaccuggguccugcugaa

SEQ ID NO: 509454 - RNA, 19 nt, Homo sapiens
  misc_RNA (1)...(19): siRNA sense strand
caaaguguacaagggauau

SEQ ID NO: 509455 - RNA, 19 nt, Homo sapiens
  misc_RNA (1)...(19): siRNA sense strand
uaaguaccacccagagaug

SEQ ID NO: 509456 - RNA, 19 nt, Homo sapiens
  misc_RNA (1)...(19): siRNA sense strand
gaauuucagcacuguugga

SEQ ID NO: 509457 - RNA, 19 nt, Homo sapiens
  misc_RNA (1)...(19): siRNA sense strand
acaaaguguacaagggaua

SEQ ID NO: 509458 - RNA, 19 nt, Homo sapiens
  misc_RNA (1)...(19): siRNA sense strand
uagaugagcacagccaaga

SEQ ID NO: 509459 - RNA, 19 nt, Homo sapiens
  misc_RNA (1)...(19): siRNA sense strand
guggagcgcaugcacaaug

SEQ ID NO: 509460 - RNA, 19 nt, Homo sapiens
  misc_RNA (1)...(19): siRNA sense strand
gauccacccacauucacuu

SEQ ID NO: 509461 - RNA, 19 nt, Homo sapiens
  misc_RNA (1)...(19): siRNA sense strand
gggccaaaauuucaauaau

SEQ ID NO: 509462 - RNA, 19 nt, Homo sapiens
  misc_RNA (1)...(19): siRNA sense strand
cagccaaagagagcuauuu

SEQ ID NO: 509463 - RNA, 19 nt, Homo sapiens
  misc_RNA (1)...(19): siRNA sense strand
cauccuuucucgucggaau

SEQ ID NO: 509464 - RNA, 19 nt, Homo sapiens
  misc_RNA (1)...(19): siRNA sense strand
uuaaguaccacccagagau

SEQ ID NO: 509465 - RNA, 19 nt, Homo sapiens
  misc_RNA (1)...(19): siRNA sense strand
gacacauucuccuacaacu

SEQ ID NO: 509466 - RNA, 19 nt, Homo sapiens
  misc_RNA (1)...(19): siRNA sense strand
acccagagaugagauucuu

SEQ ID NO: 509467 - RNA, 19 nt, Homo sapiens
  misc_RNA (1)...(19): siRNA sense strand
auaauagacccauccuuuc

SEQ ID NO: 509468 - RNA, 19 nt, Homo sapiens
  misc_RNA (1)...(19): siRNA sense strand
gaugaucaaggaagauguc

SEQ ID NO: 509469 - RNA, 19 nt, Homo sapiens
  misc_RNA (1)...(19): siRNA sense strand
cuucgcagccugugucaga

SEQ ID NO: 509470 - RNA, 19 nt, Homo sapiens
  misc_RNA (1)...(19): siRNA sense strand
uauauuacugcacaucaug

SEQ ID NO: 509471 - RNA, 19 nt, Homo sapiens
  misc_RNA (1)...(19): siRNA sense strand
gauggauccacccacauuc

SEQ ID NO: 509472 - RNA, 19 nt, Homo sapiens
  misc_RNA (1)...(19): siRNA sense strand
gugagccugugcaucuuca

SEQ ID NO: 509473 - RNA, 19 nt, Homo sapiens
  misc_RNA (1)...(19): siRNA sense strand
cacgugagccugugcaucu

SEQ ID NO: 509474 - RNA, 19 nt, Homo sapiens
  misc_RNA (1)...(19): siRNA sense strand
cagcugugcccaggaaaug

SEQ ID NO: 509475 - RNA, 19 nt, Homo sapiens
  misc_RNA (1)...(19): siRNA sense strand
cacaguggagcgaauguau

SEQ ID NO: 509476 - RNA, 19 nt, Homo sapiens
  misc_RNA (1)...(19): siRNA sense strand
gagcgcaugcacaaugaca

SEQ ID NO: 509477 - RNA, 19 nt, Homo sapiens
  misc_RNA (1)...(19): siRNA sense strand
guucguguacagccaaaga

SEQ ID NO: 509478 - RNA, 19 nt, Homo sapiens
  misc_RNA (1)...(19): siRNA sense strand
uggcugugcuacgaaguga

SEQ ID NO: 509479 - RNA, 19 nt, Homo sapiens
  misc_RNA (1)...(19): siRNA sense strand
gcaagacuguuaucgagua

SEQ ID NO: 509480 - RNA, 19 nt, Homo sapiens
  misc_RNA (1)...(19): siRNA sense strand
ggaauucgguguggacaua

SEQ ID NO: 509481 - RNA, 19 nt, Homo sapiens
  misc_RNA (1)...(19): siRNA sense strand
gcacgaaacauaccgguaa

SEQ ID NO: 509482 - RNA, 19 nt, Homo sapiens
  misc_RNA (1)...(19): siRNA sense strand
cagcaaacguucccaagaa

SEQ ID NO: 509483 - RNA, 19 nt, Homo sapiens
  misc_RNA (1)...(19): siRNA sense strand
gaacagcauugccuaucug

SEQ ID NO: 509484 - RNA, 19 nt, Homo sapiens
  misc_RNA (1)...(19): siRNA sense strand
caucaaggauauuguagga

SEQ ID NO: 509485 - RNA, 19 nt, Homo sapiens
  misc_RNA (1)...(19): siRNA sense strand
aaacuuugcugcccagaug

SEQ ID NO: 509486 - RNA, 19 nt, Homo sapiens
  misc_RNA (1)...(19): siRNA sense strand
gcaaagauggugcuaaugg

SEQ ID NO: 509487 - RNA, 19 nt, Homo sapiens
  misc_RNA (1)...(19): siRNA sense strand
gcaaggagacagaggagaa

SEQ ID NO: 509488 - RNA, 19 nt, Homo sapiens
  misc_RNA (1)...(19): siRNA sense strand
caaagauggugcuaaugga

SEQ ID NO: 509489 - RNA, 19 nt, Homo sapiens
  misc_RNA (1)...(19): siRNA sense strand
uggcaaagcuggugagaag

SEQ ID NO: 509490 - RNA, 19 nt, Homo sapiens
  misc_RNA (1)...(19): siRNA sense strand
gcaauagcagguucacgua

SEQ ID NO: 509491 - RNA, 19 nt, Homo sapiens
  misc_RNA (1)...(19): siRNA sense strand
gcuggaggauuugaugaaa

SEQ ID NO: 509492 - RNA, 19 nt, Homo sapiens
  misc_RNA (1)...(19): siRNA sense strand
gcaagagcaaggagaagaa

SEQ ID NO: 509493 - RNA, 19 nt, Homo sapiens
  misc_RNA (1)...(19): siRNA sense strand
uggcaaagauggugcuaau

SEQ ID NO: 509494 - RNA, 19 nt, Homo sapiens
  misc_RNA (1)...(19): siRNA sense strand
uggcaaagauggugagaca

SEQ ID NO: 509495 - RNA, 19 nt, Homo sapiens
  misc_RNA (1)...(19): siRNA sense strand
gcaaggagaagaaacacau

SEQ ID NO: 509496 - RNA, 19 nt, Homo sapiens
  misc_RNA (1)...(19): siRNA sense strand
gaguaccggucacagaaga

SEQ ID NO: 509497 - RNA, 19 nt, Homo sapiens
  misc_RNA (1)...(19): siRNA sense strand
ucaaaggucacagagguua

SEQ ID NO: 509498 - RNA, 19 nt, Homo sapiens
  misc_RNA (1)...(19): siRNA sense strand
gaaggauggcugcacgaaa

SEQ ID NO: 509499 - RNA, 19 nt, Homo sapiens
  misc_RNA (1)...(19): siRNA sense strand
gaagggagagccuggagau

SEQ ID NO: 509500 - RNA, 19 nt, Homo sapiens
  misc_RNA (1)...(19): siRNA sense strand
ggagacaucaaggauauug

SEQ ID NO: 509501 - RNA, 19 nt, Homo sapiens
  misc_RNA (1)...(19): siRNA sense strand
aggagaagcuggugcacaa

SEQ ID NO: 509502 - RNA, 19 nt, Homo sapiens
  misc_RNA (1)...(19): siRNA sense strand
ucaaggauuucaaggcaau

SEQ ID NO: 509503 - RNA, 19 nt, Homo sapiens
  misc_RNA (1)...(19): siRNA sense strand
ucaagucccucaacaacca

SEQ ID NO: 509504 - RNA, 19 nt, Homo sapiens
  misc_RNA (1)...(19): siRNA sense strand
caaacguucccaagaagaa

SEQ ID NO: 509505 - RNA, 19 nt, Homo sapiens
  misc_RNA (1)...(19): siRNA sense strand
cuggagacaucaaggauau

SEQ ID NO: 509506 - RNA, 19 nt, Homo sapiens
  misc_RNA (1)...(19): siRNA sense strand
gcagcaagagcaaggagaa

SEQ ID NO: 509507 - RNA, 19 nt, Homo sapiens
  misc_RNA (1)...(19): siRNA sense strand
agacaucaaggauauugua

SEQ ID NO: 509508 - RNA, 19 nt, Homo sapiens
  misc_RNA (1)...(19): siRNA sense strand
gaguggagacuacuggauu

SEQ ID NO: 509509 - RNA, 19 nt, Homo sapiens
  misc_RNA (1)...(19): siRNA sense strand
ucaaggcaauccuggugaa

SEQ ID NO: 509510 - RNA, 19 nt, Homo sapiens
  misc_RNA (1)...(19): siRNA sense strand
uggagugacugguccuaaa

SEQ ID NO: 509511 - RNA, 19 nt, Homo sapiens
  misc_RNA (1)...(19): siRNA sense strand
agaagaaacacaucugguu

SEQ ID NO: 509512 - RNA, 19 nt, Homo sapiens
  misc_RNA (1)...(19): siRNA sense strand
gcaaacguucccaagaaga

SEQ ID NO: 509513 - RNA, 19 nt, Homo sapiens
  misc_RNA (1)...(19): siRNA sense strand
gauggcugcacgaaacaua

SEQ ID NO: 509514 - RNA, 19 nt, Homo sapiens
  misc_RNA (1)...(19): siRNA sense strand
uggaaagccuggugaugau

SEQ ID NO: 509515 - RNA, 19 nt, Homo sapiens
  misc_RNA (1)...(19): siRNA sense strand
gggugacguuggugagaaa

SEQ ID NO: 509516 - RNA, 19 nt, Homo sapiens
  misc_RNA (1)...(19): siRNA sense strand
ugguauugcuggcuucaaa

SEQ ID NO: 509517 - RNA, 19 nt, Homo sapiens
  misc_RNA (1)...(19): siRNA sense strand
uggaauuccuggagccaaa

SEQ ID NO: 509518 - RNA, 19 nt, Homo sapiens
  misc_RNA (1)...(19): siRNA sense strand
gcacugauggucccaaagg

SEQ ID NO: 509519 - RNA, 19 nt, Homo sapiens
  misc_RNA (1)...(19): siRNA sense strand
caagaaggcccugcucauc

SEQ ID NO: 509520 - RNA, 19 nt, Homo sapiens
  misc_RNA (1)...(19): siRNA sense strand
ggccaagggugagcaagga

SEQ ID NO: 509521 - RNA, 19 nt, Homo sapiens
  misc_RNA (1)...(19): siRNA sense strand
aggagaaccuggagacauc

SEQ ID NO: 509522 - RNA, 19 nt, Homo sapiens
  misc_RNA (1)...(19): siRNA sense strand
ggaaggcucccagaacauc

SEQ ID NO: 509523 - RNA, 19 nt, Homo sapiens
  misc_RNA (1)...(19): siRNA sense strand
ucaagguccucgcggugaa

SEQ ID NO: 509524 - RNA, 19 nt, Homo sapiens
  misc_RNA (1)...(19): siRNA sense strand
ucagggugcucgugguuuc

SEQ ID NO: 509525 - RNA, 19 nt, Homo sapiens
  misc_RNA (1)...(19): siRNA sense strand
acacucaagucccucaaca

SEQ ID NO: 509526 - RNA, 19 nt, Homo sapiens
  misc_RNA (1)...(19): siRNA sense strand
caagaacagcauugccuau

SEQ ID NO: 509527 - RNA, 19 nt, Homo sapiens
  misc_RNA (1)...(19): siRNA sense strand
uggagagccuggcgagaga

SEQ ID NO: 509528 - RNA, 19 nt, Homo sapiens
  misc_RNA (1)...(19): siRNA sense strand
caaucuggcucccaacacu

SEQ ID NO: 509529 - RNA, 19 nt, Homo sapiens
  misc_RNA (1)...(19): siRNA sense strand
uggccugccuggugaaaga

SEQ ID NO: 509530 - RNA, 19 nt, Homo sapiens
  misc_RNA (1)...(19): siRNA sense strand
aaggauggcugcacgaaac

SEQ ID NO: 509531 - RNA, 19 nt, Homo sapiens
  misc_RNA (1)...(19): siRNA sense strand
caagagcaaggagaagaaa

SEQ ID NO: 509532 - RNA, 19 nt, Homo sapiens
  misc_RNA (1)...(19): siRNA sense strand
uggacccgcuggugaagaa

SEQ ID NO: 509533 - RNA, 19 nt, Homo sapiens
  misc_RNA (1)...(19): siRNA sense strand
uggaaaagauggucccaaa

SEQ ID NO: 509534 - RNA, 19 nt, Homo sapiens
  misc_RNA (1)...(19): siRNA sense strand
gggagagccuggagaugac

SEQ ID NO: 509535 - RNA, 19 nt, Homo sapiens
  misc_RNA (1)...(19): siRNA sense strand
cgaaacauaccgguaagug

SEQ ID NO: 509536 - RNA, 19 nt, Homo sapiens
  misc_RNA (1)...(19): siRNA sense strand
ucacguacacugcccugaa

SEQ ID NO: 509537 - RNA, 19 nt, Homo sapiens
  misc_RNA (1)...(19): siRNA sense strand
acggaaggcucccagaaca

SEQ ID NO: 509538 - RNA, 19 nt, Homo sapiens
  misc_RNA (1)...(19): siRNA sense strand
ccacggaaggcucccagaa

SEQ ID NO: 509539 - RNA, 19 nt, Homo sapiens
  misc_RNA (1)...(19): siRNA sense strand
uggcuuccauuucagcuau

SEQ ID NO: 509540 - RNA, 19 nt, Homo sapiens
  misc_RNA (1)...(19): siRNA sense strand
aaagauggugcuaauggaa

SEQ ID NO: 509541 - RNA, 19 nt, Homo sapiens
  misc_RNA (1)...(19): siRNA sense strand
ggaccaaagggacagaaag

SEQ ID NO: 509542 - RNA, 19 nt, Homo sapiens
  misc_RNA (1)...(19): siRNA sense strand
guaaugcaaggaccaaugg

SEQ ID NO: 509543 - RNA, 19 nt, Homo sapiens
  misc_RNA (1)...(19): siRNA sense strand
aauagcagguucacguaca

SEQ ID NO: 509544 - RNA, 19 nt, Homo sapiens
  misc_RNA (1)...(19): siRNA sense strand
agaacagcauugccuaucu

SEQ ID NO: 509545 - RNA, 19 nt, Homo sapiens
  misc_RNA (1)...(19): siRNA sense strand
ccagcaaacguucccaaga

SEQ ID NO: 509546 - RNA, 19 nt, Homo sapiens
  misc_RNA (1)...(19): siRNA sense strand
gaaaagauggucccaaagg

SEQ ID NO: 509547 - RNA, 19 nt, Homo sapiens
  misc_RNA (1)...(19): siRNA sense strand
ggagugacugguccuaaag

SEQ ID NO: 509548 - RNA, 19 nt, Homo sapiens
  misc_RNA (1)...(19): siRNA sense strand
aaagaggugcucccggaaa

SEQ ID NO: 509549 - RNA, 19 nt, Homo sapiens
  misc_RNA (1)...(19): siRNA sense strand
cuggaaagccuggugauga

SEQ ID NO: 509550 - RNA, 19 nt, Homo sapiens
  misc_RNA (1)...(19): siRNA sense strand
guggaagaguggagacuac

SEQ ID NO: 509551 - RNA, 19 nt, Homo sapiens
  misc_RNA (1)...(19): siRNA sense strand
uggcagagauggagaaccu

SEQ ID NO: 509552 - RNA, 19 nt, Homo sapiens
  misc_RNA (1)...(19): siRNA sense strand
caacggugagccuggcaaa

SEQ ID NO: 509553 - RNA, 19 nt, Homo sapiens
  misc_RNA (1)...(19): siRNA sense strand
uggaaaagcuggugaaagg

SEQ ID NO: 509554 - RNA, 19 nt, Homo sapiens
  misc_RNA (1)...(19): siRNA sense strand
cgagaagggagaaguugga

SEQ ID NO: 509555 - RNA, 19 nt, Homo sapiens
  misc_RNA (1)...(19): siRNA sense strand
gaccaaagggacagaaagg

SEQ ID NO: 509556 - RNA, 19 nt, Homo sapiens
  misc_RNA (1)...(19): siRNA sense strand
acacaucugguuuggagaa

SEQ ID NO: 509557 - RNA, 19 nt, Homo sapiens
  misc_RNA (1)...(19): siRNA sense strand
acaaccagauugagagcau

SEQ ID NO: 509558 - RNA, 19 nt, Homo sapiens
  misc_RNA (1)...(19): siRNA sense strand
gaaacuuugcugcccagau

SEQ ID NO: 509559 - RNA, 19 nt, Homo sapiens
  misc_RNA (1)...(19): siRNA sense strand
gauauuguaggacccaaag

SEQ ID NO: 509560 - RNA, 19 nt, Homo sapiens
  misc_RNA (1)...(19): siRNA sense strand
gccggucugcuucuuguaa

SEQ ID NO: 509561 - RNA, 19 nt, Homo sapiens
  misc_RNA (1)...(19): siRNA sense strand
gaaggcucccagaacauca

SEQ ID NO: 509562 - RNA, 19 nt, Homo sapiens
  misc_RNA (1)...(19): siRNA sense strand
cauuucagcuauggagaug

SEQ ID NO: 509563 - RNA, 19 nt, Homo sapiens
  misc_RNA (1)...(19): siRNA sense strand
gacggguccugcaggugaa

SEQ ID NO: 509564 - RNA, 19 nt, Homo sapiens
  misc_RNA (1)...(19): siRNA sense strand
gggugaaccugguauugcu

SEQ ID NO: 509565 - RNA, 19 nt, Homo sapiens
  misc_RNA (1)...(19): siRNA sense strand
ggaucguggugacaaaggu

SEQ ID NO: 509566 - RNA, 19 nt, Homo sapiens
  misc_RNA (1)...(19): siRNA sense strand
ggaaagccuggugaugaug

SEQ ID NO: 509567 - RNA, 19 nt, Homo sapiens
  misc_RNA (1)...(19): siRNA sense strand
agaaggcccugcucaucca

SEQ ID NO: 509568 - RNA, 19 nt, Homo sapiens
  misc_RNA (1)...(19): siRNA sense strand
ggucuugguggaaacuuug

SEQ ID NO: 509569 - RNA, 19 nt, Homo sapiens
  misc_RNA (1)...(19): siRNA sense strand
cgguaacccuggaacagau

SEQ ID NO: 509570 - RNA, 19 nt, Homo sapiens
  misc_RNA (1)...(19): siRNA sense strand
ggauauuguaggacccaaa

SEQ ID NO: 509571 - RNA, 19 nt, Homo sapiens
  misc_RNA (1)...(19): siRNA sense strand
caagacuguuaucgaguac

SEQ ID NO: 509572 - RNA, 19 nt, Homo sapiens
  misc_RNA (1)...(19): siRNA sense strand
ucaccuaccacugcaagaa

SEQ ID NO: 509573 - RNA, 19 nt, Homo sapiens
  misc_RNA (1)...(19): siRNA sense strand
gcucccagaacaucaccua

SEQ ID NO: 509574 - RNA, 19 nt, Homo sapiens
  misc_RNA (1)...(19): siRNA sense strand
aguggagacuacuggauug

SEQ ID NO: 509575 - RNA, 19 nt, Homo sapiens
  misc_RNA (1)...(19): siRNA sense strand
ggaccucguggcagagaug

SEQ ID NO: 509576 - RNA, 19 nt, Homo sapiens
  misc_RNA (1)...(19): siRNA sense strand
ccaugaagguuuucugcaa

SEQ ID NO: 509577 - RNA, 19 nt, Homo sapiens
  misc_RNA (1)...(19): siRNA sense strand
ggaguaaugcaaggaccaa

SEQ ID NO: 509578 - RNA, 19 nt, Homo sapiens
  misc_RNA (1)...(19): siRNA sense strand
cauggagacuggcgagacu

SEQ ID NO: 509579 - RNA, 19 nt, Homo sapiens
  misc_RNA (1)...(19): siRNA sense strand
gcaagacuguuaucgagua

SEQ ID NO: 509580 - RNA, 19 nt, Homo sapiens
  misc_RNA (1)...(19): siRNA sense strand
ggaauucgguguggacaua

SEQ ID NO: 509581 - RNA, 19 nt, Homo sapiens
  misc_RNA (1)...(19): siRNA sense strand
gcacgaaacauaccgguaa

SEQ ID NO: 509582 - RNA, 19 nt, Homo sapiens
  misc_RNA (1)...(19): siRNA sense strand
cagcaaacguucccaagaa

SEQ ID NO: 509583 - RNA, 19 nt, Homo sapiens
  misc_RNA (1)...(19): siRNA sense strand
gaacagcauugccuaucug

SEQ ID NO: 509584 - RNA, 19 nt, Homo sapiens
  misc_RNA (1)...(19): siRNA sense strand
caucaaggauauuguagga

SEQ ID NO: 509585 - RNA, 19 nt, Homo sapiens
  misc_RNA (1)...(19): siRNA sense strand
aaacuuugcugcccagaug

SEQ ID NO: 509586 - RNA, 19 nt, Homo sapiens
  misc_RNA (1)...(19): siRNA sense strand
gcaaagauggugcuaaugg

SEQ ID NO: 509587 - RNA, 19 nt, Homo sapiens
  misc_RNA (1)...(19): siRNA sense strand
gcaaggagacagaggagaa

SEQ ID NO: 509588 - RNA, 19 nt, Homo sapiens
  misc_RNA (1)...(19): siRNA sense strand
caaagauggugcuaaugga

SEQ ID NO: 509589 - RNA, 19 nt, Homo sapiens
  misc_RNA (1)...(19): siRNA sense strand
uggcaaagcuggugagaag

SEQ ID NO: 509590 - RNA, 19 nt, Homo sapiens
  misc_RNA (1)...(19): siRNA sense strand
gcaauagcagguucacgua

SEQ ID NO: 509591 - RNA, 19 nt, Homo sapiens
  misc_RNA (1)...(19): siRNA sense strand
gcuggaggauuugaugaaa

SEQ ID NO: 509592 - RNA, 19 nt, Homo sapiens
  misc_RNA (1)...(19): siRNA sense strand
gcaagagcaaggagaagaa

SEQ ID NO: 509593 - RNA, 19 nt, Homo sapiens
  misc_RNA (1)...(19): siRNA sense strand
uggcaaagauggugcuaau

SEQ ID NO: 509594 - RNA, 19 nt, Homo sapiens
  misc_RNA (1)...(19): siRNA sense strand
uggcaaagauggugagaca

SEQ ID NO: 509595 - RNA, 19 nt, Homo sapiens
  misc_RNA (1)...(19): siRNA sense strand
gcaaggagaagaaacacau

SEQ ID NO: 509596 - RNA, 19 nt, Homo sapiens
  misc_RNA (1)...(19): siRNA sense strand
gaguaccggucacagaaga

SEQ ID NO: 509597 - RNA, 19 nt, Homo sapiens
  misc_RNA (1)...(19): siRNA sense strand
ucaaaggucacagagguua

SEQ ID NO: 509598 - RNA, 19 nt, Homo sapiens
  misc_RNA (1)...(19): siRNA sense strand
gaaggauggcugcacgaaa

SEQ ID NO: 509599 - RNA, 19 nt, Homo sapiens
  misc_RNA (1)...(19): siRNA sense strand
gaagggagagccuggagau

SEQ ID NO: 509600 - RNA, 19 nt, Homo sapiens
  misc_RNA (1)...(19): siRNA sense strand
ggagacaucaaggauauug

SEQ ID NO: 509601 - RNA, 19 nt, Homo sapiens
  misc_RNA (1)...(19): siRNA sense strand
aggagaagcuggugcacaa

SEQ ID NO: 509602 - RNA, 19 nt, Homo sapiens
  misc_RNA (1)...(19): siRNA sense strand
ucaaggauuucaaggcaau

SEQ ID NO: 509603 - RNA, 19 nt, Homo sapiens
  misc_RNA (1)...(19): siRNA sense strand
ucaagucccucaacaacca

SEQ ID NO: 509604 - RNA, 19 nt, Homo sapiens
  misc_RNA (1)...(19): siRNA sense strand
caaacguucccaagaagaa

SEQ ID NO: 509605 - RNA, 19 nt, Homo sapiens
  misc_RNA (1)...(19): siRNA sense strand
cuggagacaucaaggauau

SEQ ID NO: 509606 - RNA, 19 nt, Homo sapiens
  misc_RNA (1)...(19): siRNA sense strand
gcagcaagagcaaggagaa

SEQ ID NO: 509607 - RNA, 19 nt, Homo sapiens
  misc_RNA (1)...(19): siRNA sense strand
agacaucaaggauauugua

SEQ ID NO: 509608 - RNA, 19 nt, Homo sapiens
  misc_RNA (1)...(19): siRNA sense strand
gaguggagacuacuggauu

SEQ ID NO: 509609 - RNA, 19 nt, Homo sapiens
  misc_RNA (1)...(19): siRNA sense strand
ucaaggcaauccuggugaa

SEQ ID NO: 509610 - RNA, 19 nt, Homo sapiens
  misc_RNA (1)...(19): siRNA sense strand
uggagugacugguccuaaa

SEQ ID NO: 509611 - RNA, 19 nt, Homo sapiens
  misc_RNA (1)...(19): siRNA sense strand
agaagaaacacaucugguu

SEQ ID NO: 509612 - RNA, 19 nt, Homo sapiens
  misc_RNA (1)...(19): siRNA sense strand
gcaaacguucccaagaaga

SEQ ID NO: 509613 - RNA, 19 nt, Homo sapiens
  misc_RNA (1)...(19): siRNA sense strand
gauggcugcacgaaacaua

SEQ ID NO: 509614 - RNA, 19 nt, Homo sapiens
  misc_RNA (1)...(19): siRNA sense strand
uggaaagccuggugaugau

SEQ ID NO: 509615 - RNA, 19 nt, Homo sapiens
  misc_RNA (1)...(19): siRNA sense strand
gggugacguuggugagaaa

SEQ ID NO: 509616 - RNA, 19 nt, Homo sapiens
  misc_RNA (1)...(19): siRNA sense strand
ugguauugcuggcuucaaa

SEQ ID NO: 509617 - RNA, 19 nt, Homo sapiens
  misc_RNA (1)...(19): siRNA sense strand
uggaauuccuggagccaaa

SEQ ID NO: 509618 - RNA, 19 nt, Homo sapiens
  misc_RNA (1)...(19): siRNA sense strand
gcacugauggucccaaagg

SEQ ID NO: 509619 - RNA, 19 nt, Homo sapiens
  misc_RNA (1)...(19): siRNA sense strand
caagaaggcccugcucauc

SEQ ID NO: 509620 - RNA, 19 nt, Homo sapiens
  misc_RNA (1)...(19): siRNA sense strand
ggccaagggugagcaagga

SEQ ID NO: 509621 - RNA, 19 nt, Homo sapiens
  misc_RNA (1)...(19): siRNA sense strand
aggagaaccuggagacauc

SEQ ID NO: 509622 - RNA, 19 nt, Homo sapiens
  misc_RNA (1)...(19): siRNA sense strand
ggaaggcucccagaacauc

SEQ ID NO: 509623 - RNA, 19 nt, Homo sapiens
  misc_RNA (1)...(19): siRNA sense strand
ucaagguccucgcggugaa

SEQ ID NO: 509624 - RNA, 19 nt, Homo sapiens
  misc_RNA (1)...(19): siRNA sense strand
ucagggugcucgugguuuc

SEQ ID NO: 509625 - RNA, 19 nt, Homo sapiens
  misc_RNA (1)...(19): siRNA sense strand
acacucaagucccucaaca

SEQ ID NO: 509626 - RNA, 19 nt, Homo sapiens
  misc_RNA (1)...(19): siRNA sense strand
caagaacagcauugccuau

SEQ ID NO: 509627 - RNA, 19 nt, Homo sapiens
  misc_RNA (1)...(19): siRNA sense strand
uggagagccuggcgagaga

SEQ ID NO: 509628 - RNA, 19 nt, Homo sapiens
  misc_RNA (1)...(19): siRNA sense strand
caaucuggcucccaacacu

SEQ ID NO: 509629 - RNA, 19 nt, Homo sapiens
  misc_RNA (1)...(19): siRNA sense strand
uggccugccuggugaaaga

SEQ ID NO: 509630 - RNA, 19 nt, Homo sapiens
  misc_RNA (1)...(19): siRNA sense strand
aaggauggcugcacgaaac

SEQ ID NO: 509631 - RNA, 19 nt, Homo sapiens
  misc_RNA (1)...(19): siRNA sense strand
caagagcaaggagaagaaa

SEQ ID NO: 509632 - RNA, 19 nt, Homo sapiens
  misc_RNA (1)...(19): siRNA sense strand
uggacccgcuggugaagaa

SEQ ID NO: 509633 - RNA, 19 nt, Homo sapiens
  misc_RNA (1)...(19): siRNA sense strand
uggaaaagauggucccaaa

SEQ ID NO: 509634 - RNA, 19 nt, Homo sapiens
  misc_RNA (1)...(19): siRNA sense strand
gggagagccuggagaugac

SEQ ID NO: 509635 - RNA, 19 nt, Homo sapiens
  misc_RNA (1)...(19): siRNA sense strand
cgaaacauaccgguaagug

SEQ ID NO: 509636 - RNA, 19 nt, Homo sapiens
  misc_RNA (1)...(19): siRNA sense strand
ucacguacacugcccugaa

SEQ ID NO: 509637 - RNA, 19 nt, Homo sapiens
  misc_RNA (1)...(19): siRNA sense strand
acggaaggcucccagaaca

SEQ ID NO: 509638 - RNA, 19 nt, Homo sapiens
  misc_RNA (1)...(19): siRNA sense strand
ccacggaaggcucccagaa

SEQ ID NO: 509639 - RNA, 19 nt, Homo sapiens
  misc_RNA (1)...(19): siRNA sense strand
uggcuuccauuucagcuau

SEQ ID NO: 509640 - RNA, 19 nt, Homo sapiens
  misc_RNA (1)...(19): siRNA sense strand
aaagauggugcuaauggaa

SEQ ID NO: 509641 - RNA, 19 nt, Homo sapiens
  misc_RNA (1)...(19): siRNA sense strand
ggaccaaagggacagaaag

SEQ ID NO: 509642 - RNA, 19 nt, Homo sapiens
  misc_RNA (1)...(19): siRNA sense strand
guaaugcaaggaccaaugg

SEQ ID NO: 509643 - RNA, 19 nt, Homo sapiens
  misc_RNA (1)...(19): siRNA sense strand
aauagcagguucacguaca

SEQ ID NO: 509644 - RNA, 19 nt, Homo sapiens
  misc_RNA (1)...(19): siRNA sense strand
agaacagcauugccuaucu

SEQ ID NO: 509645 - RNA, 19 nt, Homo sapiens
  misc_RNA (1)...(19): siRNA sense strand
ccagcaaacguucccaaga

SEQ ID NO: 509646 - RNA, 19 nt, Homo sapiens
  misc_RNA (1)...(19): siRNA sense strand
gaaaagauggucccaaagg

SEQ ID NO: 509647 - RNA, 19 nt, Homo sapiens
  misc_RNA (1)...(19): siRNA sense strand
ggagugacugguccuaaag

SEQ ID NO: 509648 - RNA, 19 nt, Homo sapiens
  misc_RNA (1)...(19): siRNA sense strand
aaagaggugcucccggaaa

SEQ ID NO: 509649 - RNA, 19 nt, Homo sapiens
  misc_RNA (1)...(19): siRNA sense strand
cuggaaagccuggugauga

SEQ ID NO: 509650 - RNA, 19 nt, Homo sapiens
  misc_RNA (1)...(19): siRNA sense strand
guggaagaguggagacuac

SEQ ID NO: 509651 - RNA, 19 nt, Homo sapiens
  misc_RNA (1)...(19): siRNA sense strand
uggcagagauggagaaccu

SEQ ID NO: 509652 - RNA, 19 nt, Homo sapiens
  misc_RNA (1)...(19): siRNA sense strand
caacggugagccuggcaaa

SEQ ID NO: 509653 - RNA, 19 nt, Homo sapiens
  misc_RNA (1)...(19): siRNA sense strand
uggaaaagcuggugaaagg

SEQ ID NO: 509654 - RNA, 19 nt, Homo sapiens
  misc_RNA (1)...(19): siRNA sense strand
cgagaagggagaaguugga

SEQ ID NO: 509655 - RNA, 19 nt, Homo sapiens
  misc_RNA (1)...(19): siRNA sense strand
gaccaaagggacagaaagg

SEQ ID NO: 509656 - RNA, 19 nt, Homo sapiens
  misc_RNA (1)...(19): siRNA sense strand
acacaucugguuuggagaa

SEQ ID NO: 509657 - RNA, 19 nt, Homo sapiens
  misc_RNA (1)...(19): siRNA sense strand
acaaccagauugagagcau

SEQ ID NO: 509658 - RNA, 19 nt, Homo sapiens
  misc_RNA (1)...(19): siRNA sense strand
gaaacuuugcugcccagau

SEQ ID NO: 509659 - RNA, 19 nt, Homo sapiens
  misc_RNA (1)...(19): siRNA sense strand
gauauuguaggacccaaag

SEQ ID NO: 509660 - RNA, 19 nt, Homo sapiens
  misc_RNA (1)...(19): siRNA sense strand
gccggucugcuucuuguaa

SEQ ID NO: 509661 - RNA, 19 nt, Homo sapiens
  misc_RNA (1)...(19): siRNA sense strand
gaaggcucccagaacauca

SEQ ID NO: 509662 - RNA, 19 nt, Homo sapiens
  misc_RNA (1)...(19): siRNA sense strand
cauuucagcuauggagaug

SEQ ID NO: 509663 - RNA, 19 nt, Homo sapiens
  misc_RNA (1)...(19): siRNA sense strand
gacggguccugcaggugaa

SEQ ID NO: 509664 - RNA, 19 nt, Homo sapiens
  misc_RNA (1)...(19): siRNA sense strand
gggugaaccugguauugcu

SEQ ID NO: 509665 - RNA, 19 nt, Homo sapiens
  misc_RNA (1)...(19): siRNA sense strand
ggaucguggugacaaaggu

SEQ ID NO: 509666 - RNA, 19 nt, Homo sapiens
  misc_RNA (1)...(19): siRNA sense strand
ggaaagccuggugaugaug

SEQ ID NO: 509667 - RNA, 19 nt, Homo sapiens
  misc_RNA (1)...(19): siRNA sense strand
agaaggcccugcucaucca

SEQ ID NO: 509668 - RNA, 19 nt, Homo sapiens
  misc_RNA (1)...(19): siRNA sense strand
ggucuugguggaaacuuug

SEQ ID NO: 509669 - RNA, 19 nt, Homo sapiens
  misc_RNA (1)...(19): siRNA sense strand
cgguaacccuggaacagau

SEQ ID NO: 509670 - RNA, 19 nt, Homo sapiens
  misc_RNA (1)...(19): siRNA sense strand
ggauauuguaggacccaaa

SEQ ID NO: 509671 - RNA, 19 nt, Homo sapiens
  misc_RNA (1)...(19): siRNA sense strand
caagacuguuaucgaguac

SEQ ID NO: 509672 - RNA, 19 nt, Homo sapiens
  misc_RNA (1)...(19): siRNA sense strand
ucaccuaccacugcaagaa

SEQ ID NO: 509673 - RNA, 19 nt, Homo sapiens
  misc_RNA (1)...(19): siRNA sense strand
gcucccagaacaucaccua

SEQ ID NO: 509674 - RNA, 19 nt, Homo sapiens
  misc_RNA (1)...(19): siRNA sense strand
aguggagacuacuggauug

SEQ ID NO: 509675 - RNA, 19 nt, Homo sapiens
  misc_RNA (1)...(19): siRNA sense strand
ggaccucguggcagagaug

SEQ ID NO: 509676 - RNA, 19 nt, Homo sapiens
  misc_RNA (1)...(19): siRNA sense strand
ccaugaagguuuucugcaa

SEQ ID NO: 509677 - RNA, 19 nt, Homo sapiens
  misc_RNA (1)...(19): siRNA sense strand
ggaguaaugcaaggaccaa

SEQ ID NO: 509678 - RNA, 19 nt, Homo sapiens
  misc_RNA (1)...(19): siRNA sense strand
cauggagacuggcgagacu

SEQ ID NO: 509679 - RNA, 19 nt, Homo sapiens
  misc_RNA (1)...(19): siRNA sense strand
guggauggauuaagaauaa

SEQ ID NO: 509680 - RNA, 19 nt, Homo sapiens
  misc_RNA (1)...(19): siRNA sense strand
gaugguggauggauuaaga

SEQ ID NO: 509681 - RNA, 19 nt, Homo sapiens
  misc_RNA (1)...(19): siRNA sense strand
gcgcaaagcugagccagaa

SEQ ID NO: 509682 - RNA, 19 nt, Homo sapiens
  misc_RNA (1)...(19): siRNA sense strand
ugaacaagcucaguauaaa

SEQ ID NO: 509683 - RNA, 19 nt, Homo sapiens
  misc_RNA (1)...(19): siRNA sense strand
ggagaugguggauggauua

SEQ ID NO: 509684 - RNA, 19 nt, Homo sapiens
  misc_RNA (1)...(19): siRNA sense strand
ggaugauuguuacuacauu

SEQ ID NO: 509685 - RNA, 19 nt, Homo sapiens
  misc_RNA (1)...(19): siRNA sense strand
aauccuaugugaagcauuu

SEQ ID NO: 509686 - RNA, 19 nt, Homo sapiens
  misc_RNA (1)...(19): siRNA sense strand
ggaggaugauuguuacuac

SEQ ID NO: 509687 - RNA, 19 nt, Homo sapiens
  misc_RNA (1)...(19): siRNA sense strand
ggauuaagaauaaccuuug

SEQ ID NO: 509688 - RNA, 19 nt, Homo sapiens
  misc_RNA (1)...(19): siRNA sense strand
cauaugaacaagcucagua

SEQ ID NO: 509689 - RNA, 19 nt, Homo sapiens
  misc_RNA (1)...(19): siRNA sense strand
aaaggugacuucgucuaaa

SEQ ID NO: 509690 - RNA, 19 nt, Homo sapiens
  misc_RNA (1)...(19): siRNA sense strand
gaauaaccuuugauuacac

SEQ ID NO: 509691 - RNA, 19 nt, Homo sapiens
  misc_RNA (1)...(19): siRNA sense strand
gaggaugauuguuacuaca

SEQ ID NO: 509692 - RNA, 19 nt, Homo sapiens
  misc_RNA (1)...(19): siRNA sense strand
gaacaagcucaguauaaaa

SEQ ID NO: 509693 - RNA, 19 nt, Homo sapiens
  misc_RNA (1)...(19): siRNA sense strand
ggugacuucgucuaaauuu

SEQ ID NO: 509694 - RNA, 19 nt, Homo sapiens
  misc_RNA (1)...(19): siRNA sense strand
ugagaggccucgucaccau

SEQ ID NO: 509695 - RNA, 19 nt, Homo sapiens
  misc_RNA (1)...(19): siRNA sense strand
gcuggaggaugauuguuac

SEQ ID NO: 509696 - RNA, 19 nt, Homo sapiens
  misc_RNA (1)...(19): siRNA sense strand
gguggauggauuaagaaua

SEQ ID NO: 509697 - RNA, 19 nt, Homo sapiens
  misc_RNA (1)...(19): siRNA sense strand
cauuauaucccagcagaaa

SEQ ID NO: 509698 - RNA, 19 nt, Homo sapiens
  misc_RNA (1)...(19): siRNA sense strand
ccaguccgccuuuguugaa

SEQ ID NO: 509699 - RNA, 19 nt, Homo sapiens
  misc_RNA (1)...(19): siRNA sense strand
ccucgucaccaucacguua

SEQ ID NO: 509700 - RNA, 19 nt, Homo sapiens
  misc_RNA (1)...(19): siRNA sense strand
aaggugacuucgucuaaau

SEQ ID NO: 509701 - RNA, 19 nt, Homo sapiens
  misc_RNA (1)...(19): siRNA sense strand
aagcugagccagaagcauu

SEQ ID NO: 509702 - RNA, 19 nt, Homo sapiens
  misc_RNA (1)...(19): siRNA sense strand
ggaauccuaugugaagcau

SEQ ID NO: 509703 - RNA, 19 nt, Homo sapiens
  misc_RNA (1)...(19): siRNA sense strand
cagaagcauugcagucucu

SEQ ID NO: 509704 - RNA, 19 nt, Homo sapiens
  misc_RNA (1)...(19): siRNA sense strand
augaacaagcucaguauaa

SEQ ID NO: 509705 - RNA, 19 nt, Homo sapiens
  misc_RNA (1)...(19): siRNA sense strand
uaugaacaagcucaguaua

SEQ ID NO: 509706 - RNA, 19 nt, Homo sapiens
  misc_RNA (1)...(19): siRNA sense strand
uaacaggagccaggaggaa

SEQ ID NO: 509707 - RNA, 19 nt, Homo sapiens
  misc_RNA (1)...(19): siRNA sense strand
gcagcuggaggaugauugu

SEQ ID NO: 509708 - RNA, 19 nt, Homo sapiens
  misc_RNA (1)...(19): siRNA sense strand
gaagcauugcagucucuga

SEQ ID NO: 509709 - RNA, 19 nt, Homo sapiens
  misc_RNA (1)...(19): siRNA sense strand
accaacaucauaacgauuu

SEQ ID NO: 509710 - RNA, 19 nt, Homo sapiens
  misc_RNA (1)...(19): siRNA sense strand
gagaugguggauggauuaa

SEQ ID NO: 509711 - RNA, 19 nt, Homo sapiens
  misc_RNA (1)...(19): siRNA sense strand
aggagaugguggauggauu

SEQ ID NO: 509712 - RNA, 19 nt, Homo sapiens
  misc_RNA (1)...(19): siRNA sense strand
ugugacaggcuuucugaga

SEQ ID NO: 509713 - RNA, 19 nt, Homo sapiens
  misc_RNA (1)...(19): siRNA sense strand
ccacgccacaguccacaga

SEQ ID NO: 509714 - RNA, 19 nt, Homo sapiens
  misc_RNA (1)...(19): siRNA sense strand
gaaaucccugaaguucuga

SEQ ID NO: 509715 - RNA, 19 nt, Homo sapiens
  misc_RNA (1)...(19): siRNA sense strand
guggauggauuaagaauaa

SEQ ID NO: 509716 - RNA, 19 nt, Homo sapiens
  misc_RNA (1)...(19): siRNA sense strand
gaagggaaauggaagaaag

SEQ ID NO: 509717 - RNA, 19 nt, Homo sapiens
  misc_RNA (1)...(19): siRNA sense strand
gaugguggauggauuaaga

SEQ ID NO: 509718 - RNA, 19 nt, Homo sapiens
  misc_RNA (1)...(19): siRNA sense strand
gcgcaaagcugagccagaa

SEQ ID NO: 509719 - RNA, 19 nt, Homo sapiens
  misc_RNA (1)...(19): siRNA sense strand
ugaacaagcucaguauaaa

SEQ ID NO: 509720 - RNA, 19 nt, Homo sapiens
  misc_RNA (1)...(19): siRNA sense strand
ggagaugguggauggauua

SEQ ID NO: 509721 - RNA, 19 nt, Homo sapiens
  misc_RNA (1)...(19): siRNA sense strand
agacugaagugaaagaaga

SEQ ID NO: 509722 - RNA, 19 nt, Homo sapiens
  misc_RNA (1)...(19): siRNA sense strand
ggaaauggaagaaagaaca

SEQ ID NO: 509723 - RNA, 19 nt, Homo sapiens
  misc_RNA (1)...(19): siRNA sense strand
ggaugauuguuacuacauu

SEQ ID NO: 509724 - RNA, 19 nt, Homo sapiens
  misc_RNA (1)...(19): siRNA sense strand
aauccuaugugaagcauuu

SEQ ID NO: 509725 - RNA, 19 nt, Homo sapiens
  misc_RNA (1)...(19): siRNA sense strand
ggaggaugauuguuacuac

SEQ ID NO: 509726 - RNA, 19 nt, Homo sapiens
  misc_RNA (1)...(19): siRNA sense strand
ggauuaagaauaaccuuug

SEQ ID NO: 509727 - RNA, 19 nt, Homo sapiens
  misc_RNA (1)...(19): siRNA sense strand
cagcguaaauuggcaagaa

SEQ ID NO: 509728 - RNA, 19 nt, Homo sapiens
  misc_RNA (1)...(19): siRNA sense strand
gcacaggaagaaagaagaa

SEQ ID NO: 509729 - RNA, 19 nt, Homo sapiens
  misc_RNA (1)...(19): siRNA sense strand
gguguggacucugucuuaa

SEQ ID NO: 509730 - RNA, 19 nt, Homo sapiens
  misc_RNA (1)...(19): siRNA sense strand
agaaaagacugaagugaaa

SEQ ID NO: 509731 - RNA, 19 nt, Homo sapiens
  misc_RNA (1)...(19): siRNA sense strand
cauaugaacaagcucagua

SEQ ID NO: 509732 - RNA, 19 nt, Homo sapiens
  misc_RNA (1)...(19): siRNA sense strand
aaaggugacuucgucuaaa

SEQ ID NO: 509733 - RNA, 19 nt, Homo sapiens
  misc_RNA (1)...(19): siRNA sense strand
gaauaaccuuugauuacac

SEQ ID NO: 509734 - RNA, 19 nt, Homo sapiens
  misc_RNA (1)...(19): siRNA sense strand
gaggaugauuguuacuaca

SEQ ID NO: 509735 - RNA, 19 nt, Homo sapiens
  misc_RNA (1)...(19): siRNA sense strand
ggauagaugggcagcagaa

SEQ ID NO: 509736 - RNA, 19 nt, Homo sapiens
  misc_RNA (1)...(19): siRNA sense strand
gaacaagcucaguauaaaa

SEQ ID NO: 509737 - RNA, 19 nt, Homo sapiens
  misc_RNA (1)...(19): siRNA sense strand
ggugacuucgucuaaauuu

SEQ ID NO: 509738 - RNA, 19 nt, Homo sapiens
  misc_RNA (1)...(19): siRNA sense strand
caagaagggaaauggaaga

SEQ ID NO: 509739 - RNA, 19 nt, Homo sapiens
  misc_RNA (1)...(19): siRNA sense strand
gcuggaggaugauuguuac

SEQ ID NO: 509740 - RNA, 19 nt, Homo sapiens
  misc_RNA (1)...(19): siRNA sense strand
gguggauggauuaagaaua

SEQ ID NO: 509741 - RNA, 19 nt, Homo sapiens
  misc_RNA (1)...(19): siRNA sense strand
cauuauaucccagcagaaa

SEQ ID NO: 509742 - RNA, 19 nt, Homo sapiens
  misc_RNA (1)...(19): siRNA sense strand
ugagaggccucgucaccau

SEQ ID NO: 509743 - RNA, 19 nt, Homo sapiens
  misc_RNA (1)...(19): siRNA sense strand
ccaguccgccuuuguugaa

SEQ ID NO: 509744 - RNA, 19 nt, Homo sapiens
  misc_RNA (1)...(19): siRNA sense strand
ccucgucaccaucacguua

SEQ ID NO: 509745 - RNA, 19 nt, Homo sapiens
  misc_RNA (1)...(19): siRNA sense strand
aaggugacuucgucuaaau

SEQ ID NO: 509746 - RNA, 19 nt, Homo sapiens
  misc_RNA (1)...(19): siRNA sense strand
aagcugagccagaagcauu

SEQ ID NO: 509747 - RNA, 19 nt, Homo sapiens
  misc_RNA (1)...(19): siRNA sense strand
ggaauccuaugugaagcau

SEQ ID NO: 509748 - RNA, 19 nt, Homo sapiens
  misc_RNA (1)...(19): siRNA sense strand
cagaagcauugcagucucu

SEQ ID NO: 509749 - RNA, 19 nt, Homo sapiens
  misc_RNA (1)...(19): siRNA sense strand
aaacaagaagggaaaugga

SEQ ID NO: 509750 - RNA, 19 nt, Homo sapiens
  misc_RNA (1)...(19): siRNA sense strand
augaacaagcucaguauaa

SEQ ID NO: 509751 - RNA, 19 nt, Homo sapiens
  misc_RNA (1)...(19): siRNA sense strand
gaagaaaagacugaaguga

SEQ ID NO: 509752 - RNA, 19 nt, Homo sapiens
  misc_RNA (1)...(19): siRNA sense strand
gaggagcacaggaagaaag

SEQ ID NO: 509753 - RNA, 19 nt, Homo sapiens
  misc_RNA (1)...(19): siRNA sense strand
uaugaacaagcucaguaua

SEQ ID NO: 509754 - RNA, 19 nt, Homo sapiens
  misc_RNA (1)...(19): siRNA sense strand
caaacaagaagggaaaugg

SEQ ID NO: 509755 - RNA, 19 nt, Homo sapiens
  misc_RNA (1)...(19): siRNA sense strand
gagcacaggaagaaagaag

SEQ ID NO: 509756 - RNA, 19 nt, Homo sapiens
  misc_RNA (1)...(19): siRNA sense strand
uaacaggagccaggaggaa

SEQ ID NO: 509757 - RNA, 19 nt, Homo sapiens
  misc_RNA (1)...(19): siRNA sense strand
agaagaagcgcugcagguu

SEQ ID NO: 509758 - RNA, 19 nt, Homo sapiens
  misc_RNA (1)...(19): siRNA sense strand
gcagcuggaggaugauugu

SEQ ID NO: 509759 - RNA, 19 nt, Homo sapiens
  misc_RNA (1)...(19): siRNA sense strand
gaagcauugcagucucuga

SEQ ID NO: 509760 - RNA, 19 nt, Homo sapiens
  misc_RNA (1)...(19): siRNA sense strand
accaacaucauaacgauuu

SEQ ID NO: 509761 - RNA, 19 nt, Homo sapiens
  misc_RNA (1)...(19): siRNA sense strand
uagaugggcagcagaagau

SEQ ID NO: 509762 - RNA, 19 nt, Homo sapiens
  misc_RNA (1)...(19): siRNA sense strand
ugguguggacucugucuua

SEQ ID NO: 509763 - RNA, 19 nt, Homo sapiens
  misc_RNA (1)...(19): siRNA sense strand
gagaugguggauggauuaa

SEQ ID NO: 509764 - RNA, 19 nt, Homo sapiens
  misc_RNA (1)...(19): siRNA sense strand
uguggacucugucuuaaaa

SEQ ID NO: 509765 - RNA, 19 nt, Homo sapiens
  misc_RNA (1)...(19): siRNA sense strand
aggagaugguggauggauu

SEQ ID NO: 509766 - RNA, 19 nt, Homo sapiens
  misc_RNA (1)...(19): siRNA sense strand
ugugacaggcuuucugaga

SEQ ID NO: 509767 - RNA, 19 nt, Homo sapiens
  misc_RNA (1)...(19): siRNA sense strand
aacaagaagggaaauggaa

SEQ ID NO: 509768 - RNA, 19 nt, Homo sapiens
  misc_RNA (1)...(19): siRNA sense strand
ccacgccacaguccacaga

SEQ ID NO: 509769 - RNA, 19 nt, Homo sapiens
  misc_RNA (1)...(19): siRNA sense strand
agcguaaauuggcaagaaa

SEQ ID NO: 509770 - RNA, 19 nt, Homo sapiens
  misc_RNA (1)...(19): siRNA sense strand
gaaaucccugaaguucuga

SEQ ID NO: 509771 - RNA, 19 nt, Homo sapiens
  misc_RNA (1)...(19): siRNA sense strand
cauuaagcaguuccucuga

SEQ ID NO: 509772 - RNA, 19 nt, Homo sapiens
  misc_RNA (1)...(19): siRNA sense strand
gaugggcagcagaagauca

SEQ ID NO: 509773 - RNA, 19 nt, Homo sapiens
  misc_RNA (1)...(19): siRNA sense strand
guggauggauuaagaauaa

SEQ ID NO: 509774 - RNA, 19 nt, Homo sapiens
  misc_RNA (1)...(19): siRNA sense strand
gaagggaaauggaagaaag

SEQ ID NO: 509775 - RNA, 19 nt, Homo sapiens
  misc_RNA (1)...(19): siRNA sense strand
gaugguggauggauuaaga

SEQ ID NO: 509776 - RNA, 19 nt, Homo sapiens
  misc_RNA (1)...(19): siRNA sense strand
gcgcaaagcugagccagaa

SEQ ID NO: 509777 - RNA, 19 nt, Homo sapiens
  misc_RNA (1)...(19): siRNA sense strand
ugaacaagcucaguauaaa

SEQ ID NO: 509778 - RNA, 19 nt, Homo sapiens
  misc_RNA (1)...(19): siRNA sense strand
ggagaugguggauggauua

SEQ ID NO: 509779 - RNA, 19 nt, Homo sapiens
  misc_RNA (1)...(19): siRNA sense strand
agacugaagugaaagaaga

SEQ ID NO: 509780 - RNA, 19 nt, Homo sapiens
  misc_RNA (1)...(19): siRNA sense strand
ggaaauggaagaaagaaca

SEQ ID NO: 509781 - RNA, 19 nt, Homo sapiens
  misc_RNA (1)...(19): siRNA sense strand
ggaugauuguuacuacauu

SEQ ID NO: 509782 - RNA, 19 nt, Homo sapiens
  misc_RNA (1)...(19): siRNA sense strand
aauccuaugugaagcauuu

SEQ ID NO: 509783 - RNA, 19 nt, Homo sapiens
  misc_RNA (1)...(19): siRNA sense strand
ggaggaugauuguuacuac

SEQ ID NO: 509784 - RNA, 19 nt, Homo sapiens
  misc_RNA (1)...(19): siRNA sense strand
ggauuaagaauaaccuuug

SEQ ID NO: 509785 - RNA, 19 nt, Homo sapiens
  misc_RNA (1)...(19): siRNA sense strand
cagcguaaauuggcaagaa

SEQ ID NO: 509786 - RNA, 19 nt, Homo sapiens
  misc_RNA (1)...(19): siRNA sense strand
gcacaggaagaaagaagaa

SEQ ID NO: 509787 - RNA, 19 nt, Homo sapiens
  misc_RNA (1)...(19): siRNA sense strand
gguguggacucugucuuaa

SEQ ID NO: 509788 - RNA, 19 nt, Homo sapiens
  misc_RNA (1)...(19): siRNA sense strand
agaaaagacugaagugaaa

SEQ ID NO: 509789 - RNA, 19 nt, Homo sapiens
  misc_RNA (1)...(19): siRNA sense strand
cauaugaacaagcucagua

SEQ ID NO: 509790 - RNA, 19 nt, Homo sapiens
  misc_RNA (1)...(19): siRNA sense strand
aaaggugacuucgucuaaa

SEQ ID NO: 509791 - RNA, 19 nt, Homo sapiens
  misc_RNA (1)...(19): siRNA sense strand
gaauaaccuuugauuacac

SEQ ID NO: 509792 - RNA, 19 nt, Homo sapiens
  misc_RNA (1)...(19): siRNA sense strand
gaggaugauuguuacuaca

SEQ ID NO: 509793 - RNA, 19 nt, Homo sapiens
  misc_RNA (1)...(19): siRNA sense strand
ggauagaugggcagcagaa

SEQ ID NO: 509794 - RNA, 19 nt, Homo sapiens
  misc_RNA (1)...(19): siRNA sense strand
gaacaagcucaguauaaaa

SEQ ID NO: 509795 - RNA, 19 nt, Homo sapiens
  misc_RNA (1)...(19): siRNA sense strand
ggugacuucgucuaaauuu

SEQ ID NO: 509796 - RNA, 19 nt, Homo sapiens
  misc_RNA (1)...(19): siRNA sense strand
caagaagggaaauggaaga

SEQ ID NO: 509797 - RNA, 19 nt, Homo sapiens
  misc_RNA (1)...(19): siRNA sense strand
gcuggaggaugauuguuac

SEQ ID NO: 509798 - RNA, 19 nt, Homo sapiens
  misc_RNA (1)...(19): siRNA sense strand
gguggauggauuaagaaua

SEQ ID NO: 509799 - RNA, 19 nt, Homo sapiens
  misc_RNA (1)...(19): siRNA sense strand
cauuauaucccagcagaaa

SEQ ID NO: 509800 - RNA, 19 nt, Homo sapiens
  misc_RNA (1)...(19): siRNA sense strand
ugagaggccucgucaccau

SEQ ID NO: 509801 - RNA, 19 nt, Homo sapiens
  misc_RNA (1)...(19): siRNA sense strand
ccaguccgccuuuguugaa

SEQ ID NO: 509802 - RNA, 19 nt, Homo sapiens
  misc_RNA (1)...(19): siRNA sense strand
ccucgucaccaucacguua

SEQ ID NO: 509803 - RNA, 19 nt, Homo sapiens
  misc_RNA (1)...(19): siRNA sense strand
aaggugacuucgucuaaau

SEQ ID NO: 509804 - RNA, 19 nt, Homo sapiens
  misc_RNA (1)...(19): siRNA sense strand
aagcugagccagaagcauu

SEQ ID NO: 509805 - RNA, 19 nt, Homo sapiens
  misc_RNA (1)...(19): siRNA sense strand
ggaauccuaugugaagcau

SEQ ID NO: 509806 - RNA, 19 nt, Homo sapiens
  misc_RNA (1)...(19): siRNA sense strand
cagaagcauugcagucucu

SEQ ID NO: 509807 - RNA, 19 nt, Homo sapiens
  misc_RNA (1)...(19): siRNA sense strand
aaacaagaagggaaaugga

SEQ ID NO: 509808 - RNA, 19 nt, Homo sapiens
  misc_RNA (1)...(19): siRNA sense strand
augaacaagcucaguauaa

SEQ ID NO: 509809 - RNA, 19 nt, Homo sapiens
  misc_RNA (1)...(19): siRNA sense strand
gaagaaaagacugaaguga

SEQ ID NO: 509810 - RNA, 19 nt, Homo sapiens
  misc_RNA (1)...(19): siRNA sense strand
gaggagcacaggaagaaag

SEQ ID NO: 509811 - RNA, 19 nt, Homo sapiens
  misc_RNA (1)...(19): siRNA sense strand
uaugaacaagcucaguaua

SEQ ID NO: 509812 - RNA, 19 nt, Homo sapiens
  misc_RNA (1)...(19): siRNA sense strand
caaacaagaagggaaaugg

SEQ ID NO: 509813 - RNA, 19 nt, Homo sapiens
  misc_RNA (1)...(19): siRNA sense strand
gagcacaggaagaaagaag

SEQ ID NO: 509814 - RNA, 19 nt, Homo sapiens
  misc_RNA (1)...(19): siRNA sense strand
uaacaggagccaggaggaa

SEQ ID NO: 509815 - RNA, 19 nt, Homo sapiens
  misc_RNA (1)...(19): siRNA sense strand
agaagaagcgcugcagguu

SEQ ID NO: 509816 - RNA, 19 nt, Homo sapiens
  misc_RNA (1)...(19): siRNA sense strand
gcagcuggaggaugauugu

SEQ ID NO: 509817 - RNA, 19 nt, Homo sapiens
  misc_RNA (1)...(19): siRNA sense strand
gaagcauugcagucucuga

SEQ ID NO: 509818 - RNA, 19 nt, Homo sapiens
  misc_RNA (1)...(19): siRNA sense strand
accaacaucauaacgauuu

SEQ ID NO: 509819 - RNA, 19 nt, Homo sapiens
  misc_RNA (1)...(19): siRNA sense strand
uagaugggcagcagaagau

SEQ ID NO: 509820 - RNA, 19 nt, Homo sapiens
  misc_RNA (1)...(19): siRNA sense strand
ugguguggacucugucuua

SEQ ID NO: 509821 - RNA, 19 nt, Homo sapiens
  misc_RNA (1)...(19): siRNA sense strand
gagaugguggauggauuaa

SEQ ID NO: 509822 - RNA, 19 nt, Homo sapiens
  misc_RNA (1)...(19): siRNA sense strand
uguggacucugucuuaaaa

SEQ ID NO: 509823 - RNA, 19 nt, Homo sapiens
  misc_RNA (1)...(19): siRNA sense strand
aggagaugguggauggauu

SEQ ID NO: 509824 - RNA, 19 nt, Homo sapiens
  misc_RNA (1)...(19): siRNA sense strand
ugugacaggcuuucugaga

SEQ ID NO: 509825 - RNA, 19 nt, Homo sapiens
  misc_RNA (1)...(19): siRNA sense strand
aacaagaagggaaauggaa

SEQ ID NO: 509826 - RNA, 19 nt, Homo sapiens
  misc_RNA (1)...(19): siRNA sense strand
ccacgccacaguccacaga

SEQ ID NO: 509827 - RNA, 19 nt, Homo sapiens
  misc_RNA (1)...(19): siRNA sense strand
agcguaaauuggcaagaaa

SEQ ID NO: 509828 - RNA, 19 nt, Homo sapiens
  misc_RNA (1)...(19): siRNA sense strand
gaaaucccugaaguucuga

SEQ ID NO: 509829 - RNA, 19 nt, Homo sapiens
  misc_RNA (1)...(19): siRNA sense strand
cauuaagcaguuccucuga

SEQ ID NO: 509830 - RNA, 19 nt, Homo sapiens
  misc_RNA (1)...(19): siRNA sense strand
gaugggcagcagaagauca

SEQ ID NO: 509831 - RNA, 19 nt, Homo sapiens
  misc_RNA (1)...(19): siRNA sense strand
guggauggauuaagaauaa

SEQ ID NO: 509832 - RNA, 19 nt, Homo sapiens
  misc_RNA (1)...(19): siRNA sense strand
gaagggaaauggaagaaag

SEQ ID NO: 509833 - RNA, 19 nt, Homo sapiens
  misc_RNA (1)...(19): siRNA sense strand
gaugguggauggauuaaga

SEQ ID NO: 509834 - RNA, 19 nt, Homo sapiens
  misc_RNA (1)...(19): siRNA sense strand
gcgcaaagcugagccagaa

SEQ ID NO: 509835 - RNA, 19 nt, Homo sapiens
  misc_RNA (1)...(19): siRNA sense strand
ugaacaagcucaguauaaa

SEQ ID NO: 509836 - RNA, 19 nt, Homo sapiens
  misc_RNA (1)...(19): siRNA sense strand
ggagaugguggauggauua

SEQ ID NO: 509837 - RNA, 19 nt, Homo sapiens
  misc_RNA (1)...(19): siRNA sense strand
agacugaagugaaagaaga

SEQ ID NO: 509838 - RNA, 19 nt, Homo sapiens
  misc_RNA (1)...(19): siRNA sense strand
ggaaauggaagaaagaaca

SEQ ID NO: 509839 - RNA, 19 nt, Homo sapiens
  misc_RNA (1)...(19): siRNA sense strand
ggaugauuguuacuacauu

SEQ ID NO: 509840 - RNA, 19 nt, Homo sapiens
  misc_RNA (1)...(19): siRNA sense strand
aauccuaugugaagcauuu

SEQ ID NO: 509841 - RNA, 19 nt, Homo sapiens
  misc_RNA (1)...(19): siRNA sense strand
ggaggaugauuguuacuac

SEQ ID NO: 509842 - RNA, 19 nt, Homo sapiens
  misc_RNA (1)...(19): siRNA sense strand
ggauuaagaauaaccuuug

SEQ ID NO: 509843 - RNA, 19 nt, Homo sapiens
  misc_RNA (1)...(19): siRNA sense strand
cagcguaaauuggcaagaa

SEQ ID NO: 509844 - RNA, 19 nt, Homo sapiens
  misc_RNA (1)...(19): siRNA sense strand
gcacaggaagaaagaagaa

SEQ ID NO: 509845 - RNA, 19 nt, Homo sapiens
  misc_RNA (1)...(19): siRNA sense strand
gguguggacucugucuuaa

SEQ ID NO: 509846 - RNA, 19 nt, Homo sapiens
  misc_RNA (1)...(19): siRNA sense strand
agaaaagacugaagugaaa

SEQ ID NO: 509847 - RNA, 19 nt, Homo sapiens
  misc_RNA (1)...(19): siRNA sense strand
cauaugaacaagcucagua

SEQ ID NO: 509848 - RNA, 19 nt, Homo sapiens
  misc_RNA (1)...(19): siRNA sense strand
aaaggugacuucgucuaaa

SEQ ID NO: 509849 - RNA, 19 nt, Homo sapiens
  misc_RNA (1)...(19): siRNA sense strand
gaauaaccuuugauuacac

SEQ ID NO: 509850 - RNA, 19 nt, Homo sapiens
  misc_RNA (1)...(19): siRNA sense strand
gaggaugauuguuacuaca

SEQ ID NO: 509851 - RNA, 19 nt, Homo sapiens
  misc_RNA (1)...(19): siRNA sense strand
ggauagaugggcagcagaa

SEQ ID NO: 509852 - RNA, 19 nt, Homo sapiens
  misc_RNA (1)...(19): siRNA sense strand
gaacaagcucaguauaaaa

SEQ ID NO: 509853 - RNA, 19 nt, Homo sapiens
  misc_RNA (1)...(19): siRNA sense strand
ggugacuucgucuaaauuu

SEQ ID NO: 509854 - RNA, 19 nt, Homo sapiens
  misc_RNA (1)...(19): siRNA sense strand
caagaagggaaauggaaga

SEQ ID NO: 509855 - RNA, 19 nt, Homo sapiens
  misc_RNA (1)...(19): siRNA sense strand
gcuggaggaugauuguuac

SEQ ID NO: 509856 - RNA, 19 nt, Homo sapiens
  misc_RNA (1)...(19): siRNA sense strand
gguggauggauuaagaaua

SEQ ID NO: 509857 - RNA, 19 nt, Homo sapiens
  misc_RNA (1)...(19): siRNA sense strand
cauuauaucccagcagaaa

SEQ ID NO: 509858 - RNA, 19 nt, Homo sapiens
  misc_RNA (1)...(19): siRNA sense strand
ugagaggccucgucaccau

SEQ ID NO: 509859 - RNA, 19 nt, Homo sapiens
  misc_RNA (1)...(19): siRNA sense strand
ccaguccgccuuuguugaa

SEQ ID NO: 509860 - RNA, 19 nt, Homo sapiens
  misc_RNA (1)...(19): siRNA sense strand
ccucgucaccaucacguua

SEQ ID NO: 509861 - RNA, 19 nt, Homo sapiens
  misc_RNA (1)...(19): siRNA sense strand
aaggugacuucgucuaaau

SEQ ID NO: 509862 - RNA, 19 nt, Homo sapiens
  misc_RNA (1)...(19): siRNA sense strand
aagcugagccagaagcauu

SEQ ID NO: 509863 - RNA, 19 nt, Homo sapiens
  misc_RNA (1)...(19): siRNA sense strand
ggaauccuaugugaagcau

SEQ ID NO: 509864 - RNA, 19 nt, Homo sapiens
  misc_RNA (1)...(19): siRNA sense strand
cagaagcauugcagucucu

SEQ ID NO: 509865 - RNA, 19 nt, Homo sapiens
  misc_RNA (1)...(19): siRNA sense strand
aaacaagaagggaaaugga

SEQ ID NO: 509866 - RNA, 19 nt, Homo sapiens
  misc_RNA (1)...(19): siRNA sense strand
augaacaagcucaguauaa

SEQ ID NO: 509867 - RNA, 19 nt, Homo sapiens
  misc_RNA (1)...(19): siRNA sense strand
gaagaaaagacugaaguga

SEQ ID NO: 509868 - RNA, 19 nt, Homo sapiens
  misc_RNA (1)...(19): siRNA sense strand
gaggagcacaggaagaaag

SEQ ID NO: 509869 - RNA, 19 nt, Homo sapiens
  misc_RNA (1)...(19): siRNA sense strand
uaugaacaagcucaguaua

SEQ ID NO: 509870 - RNA, 19 nt, Homo sapiens
  misc_RNA (1)...(19): siRNA sense strand
caaacaagaagggaaaugg

SEQ ID NO: 509871 - RNA, 19 nt, Homo sapiens
  misc_RNA (1)...(19): siRNA sense strand
gagcacaggaagaaagaag

SEQ ID NO: 509872 - RNA, 19 nt, Homo sapiens
  misc_RNA (1)...(19): siRNA sense strand
uaacaggagccaggaggaa

SEQ ID NO: 509873 - RNA, 19 nt, Homo sapiens
  misc_RNA (1)...(19): siRNA sense strand
agaagaagcgcugcagguu

SEQ ID NO: 509874 - RNA, 19 nt, Homo sapiens
  misc_RNA (1)...(19): siRNA sense strand
gcagcuggaggaugauugu

SEQ ID NO: 509875 - RNA, 19 nt, Homo sapiens
  misc_RNA (1)...(19): siRNA sense strand
gaagcauugcagucucuga

SEQ ID NO: 509876 - RNA, 19 nt, Homo sapiens
  misc_RNA (1)...(19): siRNA sense strand
accaacaucauaacgauuu

SEQ ID NO: 509877 - RNA, 19 nt, Homo sapiens
  misc_RNA (1)...(19): siRNA sense strand
uagaugggcagcagaagau

SEQ ID NO: 509878 - RNA, 19 nt, Homo sapiens
  misc_RNA (1)...(19): siRNA sense strand
ugguguggacucugucuua

SEQ ID NO: 509879 - RNA, 19 nt, Homo sapiens
  misc_RNA (1)...(19): siRNA sense strand
gagaugguggauggauuaa

SEQ ID NO: 509880 - RNA, 19 nt, Homo sapiens
  misc_RNA (1)...(19): siRNA sense strand
uguggacucugucuuaaaa

SEQ ID NO: 509881 - RNA, 19 nt, Homo sapiens
  misc_RNA (1)...(19): siRNA sense strand
aggagaugguggauggauu

SEQ ID NO: 509882 - RNA, 19 nt, Homo sapiens
  misc_RNA (1)...(19): siRNA sense strand
ugugacaggcuuucugaga

SEQ ID NO: 509883 - RNA, 19 nt, Homo sapiens
  misc_RNA (1)...(19): siRNA sense strand
aacaagaagggaaauggaa

SEQ ID NO: 509884 - RNA, 19 nt, Homo sapiens
  misc_RNA (1)...(19): siRNA sense strand
ccacgccacaguccacaga

SEQ ID NO: 509885 - RNA, 19 nt, Homo sapiens
  misc_RNA (1)...(19): siRNA sense strand
agcguaaauuggcaagaaa

SEQ ID NO: 509886 - RNA, 19 nt, Homo sapiens
  misc_RNA (1)...(19): siRNA sense strand
gaaaucccugaaguucuga

SEQ ID NO: 509887 - RNA, 19 nt, Homo sapiens
  misc_RNA (1)...(19): siRNA sense strand
cauuaagcaguuccucuga

SEQ ID NO: 509888 - RNA, 19 nt, Homo sapiens
  misc_RNA (1)...(19): siRNA sense strand
gaugggcagcagaagauca

SEQ ID NO: 509889 - RNA, 19 nt, Homo sapiens
  misc_RNA (1)...(19): siRNA sense strand
guggauggauuaagaauaa

SEQ ID NO: 509890 - RNA, 19 nt, Homo sapiens
  misc_RNA (1)...(19): siRNA sense strand
gaugguggauggauuaaga

SEQ ID NO: 509891 - RNA, 19 nt, Homo sapiens
  misc_RNA (1)...(19): siRNA sense strand
gcgcaaagcugagccagaa

SEQ ID NO: 509892 - RNA, 19 nt, Homo sapiens
  misc_RNA (1)...(19): siRNA sense strand
ugaacaagcucaguauaaa

SEQ ID NO: 509893 - RNA, 19 nt, Homo sapiens
  misc_RNA (1)...(19): siRNA sense strand
ggagaugguggauggauua

SEQ ID NO: 509894 - RNA, 19 nt, Homo sapiens
  misc_RNA (1)...(19): siRNA sense strand
ggaugauuguuacuacauu

SEQ ID NO: 509895 - RNA, 19 nt, Homo sapiens
  misc_RNA (1)...(19): siRNA sense strand
aauccuaugugaagcauuu

SEQ ID NO: 509896 - RNA, 19 nt, Homo sapiens
  misc_RNA (1)...(19): siRNA sense strand
ggaggaugauuguuacuac

SEQ ID NO: 509897 - RNA, 19 nt, Homo sapiens
  misc_RNA (1)...(19): siRNA sense strand
ggauuaagaauaaccuuug

SEQ ID NO: 509898 - RNA, 19 nt, Homo sapiens
  misc_RNA (1)...(19): siRNA sense strand
cauaugaacaagcucagua

SEQ ID NO: 509899 - RNA, 19 nt, Homo sapiens
  misc_RNA (1)...(19): siRNA sense strand
aaaggugacuucgucuaaa

SEQ ID NO: 509900 - RNA, 19 nt, Homo sapiens
  misc_RNA (1)...(19): siRNA sense strand
gaauaaccuuugauuacac

SEQ ID NO: 509901 - RNA, 19 nt, Homo sapiens
  misc_RNA (1)...(19): siRNA sense strand
gaggaugauuguuacuaca

SEQ ID NO: 509902 - RNA, 19 nt, Homo sapiens
  misc_RNA (1)...(19): siRNA sense strand
gaacaagcucaguauaaaa

SEQ ID NO: 509903 - RNA, 19 nt, Homo sapiens
  misc_RNA (1)...(19): siRNA sense strand
ggugacuucgucuaaauuu

SEQ ID NO: 509904 - RNA, 19 nt, Homo sapiens
  misc_RNA (1)...(19): siRNA sense strand
ugagaggccucgucaccau

SEQ ID NO: 509905 - RNA, 19 nt, Homo sapiens
  misc_RNA (1)...(19): siRNA sense strand
gcuggaggaugauuguuac

SEQ ID NO: 509906 - RNA, 19 nt, Homo sapiens
  misc_RNA (1)...(19): siRNA sense strand
gguggauggauuaagaaua

SEQ ID NO: 509907 - RNA, 19 nt, Homo sapiens
  misc_RNA (1)...(19): siRNA sense strand
cauuauaucccagcagaaa

SEQ ID NO: 509908 - RNA, 19 nt, Homo sapiens
  misc_RNA (1)...(19): siRNA sense strand
ccaguccgccuuuguugaa

SEQ ID NO: 509909 - RNA, 19 nt, Homo sapiens
  misc_RNA (1)...(19): siRNA sense strand
ccucgucaccaucacguua

SEQ ID NO: 509910 - RNA, 19 nt, Homo sapiens
  misc_RNA (1)...(19): siRNA sense strand
aaggugacuucgucuaaau

SEQ ID NO: 509911 - RNA, 19 nt, Homo sapiens
  misc_RNA (1)...(19): siRNA sense strand
aagcugagccagaagcauu

SEQ ID NO: 509912 - RNA, 19 nt, Homo sapiens
  misc_RNA (1)...(19): siRNA sense strand
ggaauccuaugugaagcau

SEQ ID NO: 509913 - RNA, 19 nt, Homo sapiens
  misc_RNA (1)...(19): siRNA sense strand
cagaagcauugcagucucu

SEQ ID NO: 509914 - RNA, 19 nt, Homo sapiens
  misc_RNA (1)...(19): siRNA sense strand
augaacaagcucaguauaa

SEQ ID NO: 509915 - RNA, 19 nt, Homo sapiens
  misc_RNA (1)...(19): siRNA sense strand
uaugaacaagcucaguaua

SEQ ID NO: 509916 - RNA, 19 nt, Homo sapiens
  misc_RNA (1)...(19): siRNA sense strand
uaacaggagccaggaggaa

SEQ ID NO: 509917 - RNA, 19 nt, Homo sapiens
  misc_RNA (1)...(19): siRNA sense strand
gcagcuggaggaugauugu

SEQ ID NO: 509918 - RNA, 19 nt, Homo sapiens
  misc_RNA (1)...(19): siRNA sense strand
gaagcauugcagucucuga

SEQ ID NO: 509919 - RNA, 19 nt, Homo sapiens
  misc_RNA (1)...(19): siRNA sense strand
accaacaucauaacgauuu

SEQ ID NO: 509920 - RNA, 19 nt, Homo sapiens
  misc_RNA (1)...(19): siRNA sense strand
gagaugguggauggauuaa

SEQ ID NO: 509921 - RNA, 19 nt, Homo sapiens
  misc_RNA (1)...(19): siRNA sense strand
aggagaugguggauggauu

SEQ ID NO: 509922 - RNA, 19 nt, Homo sapiens
  misc_RNA (1)...(19): siRNA sense strand
ugugacaggcuuucugaga

SEQ ID NO: 509923 - RNA, 19 nt, Homo sapiens
  misc_RNA (1)...(19): siRNA sense strand
ccacgccacaguccacaga

SEQ ID NO: 509924 - RNA, 19 nt, Homo sapiens
  misc_RNA (1)...(19): siRNA sense strand
gaaaucccugaaguucuga

SEQ ID NO: 509925 - RNA, 19 nt, Homo sapiens
  misc_RNA (1)...(19): siRNA sense strand
guggauggauuaagaauaa

SEQ ID NO: 509926 - RNA, 19 nt, Homo sapiens
  misc_RNA (1)...(19): siRNA sense strand
gaagggaaauggaagaaag

SEQ ID NO: 509927 - RNA, 19 nt, Homo sapiens
  misc_RNA (1)...(19): siRNA sense strand
gaugguggauggauuaaga

SEQ ID NO: 509928 - RNA, 19 nt, Homo sapiens
  misc_RNA (1)...(19): siRNA sense strand
gcgcaaagcugagccagaa

SEQ ID NO: 509929 - RNA, 19 nt, Homo sapiens
  misc_RNA (1)...(19): siRNA sense strand
ugaacaagcucaguauaaa

SEQ ID NO: 509930 - RNA, 19 nt, Homo sapiens
  misc_RNA (1)...(19): siRNA sense strand
ggagaugguggauggauua

SEQ ID NO: 509931 - RNA, 19 nt, Homo sapiens
  misc_RNA (1)...(19): siRNA sense strand
agacugaagugaaagaaga

SEQ ID NO: 509932 - RNA, 19 nt, Homo sapiens
  misc_RNA (1)...(19): siRNA sense strand
ggaaauggaagaaagaaca

SEQ ID NO: 509933 - RNA, 19 nt, Homo sapiens
  misc_RNA (1)...(19): siRNA sense strand
ggaugauuguuacuacauu

SEQ ID NO: 509934 - RNA, 19 nt, Homo sapiens
  misc_RNA (1)...(19): siRNA sense strand
aauccuaugugaagcauuu

SEQ ID NO: 509935 - RNA, 19 nt, Homo sapiens
  misc_RNA (1)...(19): siRNA sense strand
ggaggaugauuguuacuac

SEQ ID NO: 509936 - RNA, 19 nt, Homo sapiens
  misc_RNA (1)...(19): siRNA sense strand
ggauuaagaauaaccuuug

SEQ ID NO: 509937 - RNA, 19 nt, Homo sapiens
  misc_RNA (1)...(19): siRNA sense strand
cagcguaaauuggcaagaa

SEQ ID NO: 509938 - RNA, 19 nt, Homo sapiens
  misc_RNA (1)...(19): siRNA sense strand
gcacaggaagaaagaagaa

SEQ ID NO: 509939 - RNA, 19 nt, Homo sapiens
  misc_RNA (1)...(19): siRNA sense strand
gguguggacucugucuuaa

SEQ ID NO: 509940 - RNA, 19 nt, Homo sapiens
  misc_RNA (1)...(19): siRNA sense strand
agaaaagacugaagugaaa

SEQ ID NO: 509941 - RNA, 19 nt, Homo sapiens
  misc_RNA (1)...(19): siRNA sense strand
cauaugaacaagcucagua

SEQ ID NO: 509942 - RNA, 19 nt, Homo sapiens
  misc_RNA (1)...(19): siRNA sense strand
aaaggugacuucgucuaaa

SEQ ID NO: 509943 - RNA, 19 nt, Homo sapiens
  misc_RNA (1)...(19): siRNA sense strand
gaauaaccuuugauuacac

SEQ ID NO: 509944 - RNA, 19 nt, Homo sapiens
  misc_RNA (1)...(19): siRNA sense strand
gaggaugauuguuacuaca

SEQ ID NO: 509945 - RNA, 19 nt, Homo sapiens
  misc_RNA (1)...(19): siRNA sense strand
ggauagaugggcagcagaa

SEQ ID NO: 509946 - RNA, 19 nt, Homo sapiens
  misc_RNA (1)...(19): siRNA sense strand
gaacaagcucaguauaaaa

SEQ ID NO: 509947 - RNA, 19 nt, Homo sapiens
  misc_RNA (1)...(19): siRNA sense strand
ggugacuucgucuaaauuu

SEQ ID NO: 509948 - RNA, 19 nt, Homo sapiens
  misc_RNA (1)...(19): siRNA sense strand
caagaagggaaauggaaga

SEQ ID NO: 509949 - RNA, 19 nt, Homo sapiens
  misc_RNA (1)...(19): siRNA sense strand
gcuggaggaugauuguuac

SEQ ID NO: 509950 - RNA, 19 nt, Homo sapiens
  misc_RNA (1)...(19): siRNA sense strand
gguggauggauuaagaaua

SEQ ID NO: 509951 - RNA, 19 nt, Homo sapiens
  misc_RNA (1)...(19): siRNA sense strand
cauuauaucccagcagaaa

SEQ ID NO: 509952 - RNA, 19 nt, Homo sapiens
  misc_RNA (1)...(19): siRNA sense strand
ugagaggccucgucaccau

SEQ ID NO: 509953 - RNA, 19 nt, Homo sapiens
  misc_RNA (1)...(19): siRNA sense strand
ccaguccgccuuuguugaa

SEQ ID NO: 509954 - RNA, 19 nt, Homo sapiens
  misc_RNA (1)...(19): siRNA sense strand
ccucgucaccaucacguua

SEQ ID NO: 509955 - RNA, 19 nt, Homo sapiens
  misc_RNA (1)...(19): siRNA sense strand
aaggugacuucgucuaaau

SEQ ID NO: 509956 - RNA, 19 nt, Homo sapiens
  misc_RNA (1)...(19): siRNA sense strand
aagcugagccagaagcauu

SEQ ID NO: 509957 - RNA, 19 nt, Homo sapiens
  misc_RNA (1)...(19): siRNA sense strand
ggaauccuaugugaagcau

SEQ ID NO: 509958 - RNA, 19 nt, Homo sapiens
  misc_RNA (1)...(19): siRNA sense strand
cagaagcauugcagucucu

SEQ ID NO: 509959 - RNA, 19 nt, Homo sapiens
  misc_RNA (1)...(19): siRNA sense strand
aaacaagaagggaaaugga

SEQ ID NO: 509960 - RNA, 19 nt, Homo sapiens
  misc_RNA (1)...(19): siRNA sense strand
augaacaagcucaguauaa

SEQ ID NO: 509961 - RNA, 19 nt, Homo sapiens
  misc_RNA (1)...(19): siRNA sense strand
gaagaaaagacugaaguga

SEQ ID NO: 509962 - RNA, 19 nt, Homo sapiens
  misc_RNA (1)...(19): siRNA sense strand
gaggagcacaggaagaaag

SEQ ID NO: 509963 - RNA, 19 nt, Homo sapiens
  misc_RNA (1)...(19): siRNA sense strand
uaugaacaagcucaguaua

SEQ ID NO: 509964 - RNA, 19 nt, Homo sapiens
  misc_RNA (1)...(19): siRNA sense strand
caaacaagaagggaaaugg

SEQ ID NO: 509965 - RNA, 19 nt, Homo sapiens
  misc_RNA (1)...(19): siRNA sense strand
gagcacaggaagaaagaag

SEQ ID NO: 509966 - RNA, 19 nt, Homo sapiens
  misc_RNA (1)...(19): siRNA sense strand
uaacaggagccaggaggaa

SEQ ID NO: 509967 - RNA, 19 nt, Homo sapiens
  misc_RNA (1)...(19): siRNA sense strand
agaagaagcgcugcagguu

SEQ ID NO: 509968 - RNA, 19 nt, Homo sapiens
  misc_RNA (1)...(19): siRNA sense strand
gcagcuggaggaugauugu

SEQ ID NO: 509969 - RNA, 19 nt, Homo sapiens
  misc_RNA (1)...(19): siRNA sense strand
gaagcauugcagucucuga

SEQ ID NO: 509970 - RNA, 19 nt, Homo sapiens
  misc_RNA (1)...(19): siRNA sense strand
accaacaucauaacgauuu

SEQ ID NO: 509971 - RNA, 19 nt, Homo sapiens
  misc_RNA (1)...(19): siRNA sense strand
uagaugggcagcagaagau

SEQ ID NO: 509972 - RNA, 19 nt, Homo sapiens
  misc_RNA (1)...(19): siRNA sense strand
ugguguggacucugucuua

SEQ ID NO: 509973 - RNA, 19 nt, Homo sapiens
  misc_RNA (1)...(19): siRNA sense strand
gagaugguggauggauuaa

SEQ ID NO: 509974 - RNA, 19 nt, Homo sapiens
  misc_RNA (1)...(19): siRNA sense strand
uguggacucugucuuaaaa

SEQ ID NO: 509975 - RNA, 19 nt, Homo sapiens
  misc_RNA (1)...(19): siRNA sense strand
aggagaugguggauggauu

SEQ ID NO: 509976 - RNA, 19 nt, Homo sapiens
  misc_RNA (1)...(19): siRNA sense strand
ugugacaggcuuucugaga

SEQ ID NO: 509977 - RNA, 19 nt, Homo sapiens
  misc_RNA (1)...(19): siRNA sense strand
aacaagaagggaaauggaa

SEQ ID NO: 509978 - RNA, 19 nt, Homo sapiens
  misc_RNA (1)...(19): siRNA sense strand
ccacgccacaguccacaga

SEQ ID NO: 509979 - RNA, 19 nt, Homo sapiens
  misc_RNA (1)...(19): siRNA sense strand
agcguaaauuggcaagaaa

SEQ ID NO: 509980 - RNA, 19 nt, Homo sapiens
  misc_RNA (1)...(19): siRNA sense strand
gaaaucccugaaguucuga

SEQ ID NO: 509981 - RNA, 19 nt, Homo sapiens
  misc_RNA (1)...(19): siRNA sense strand
cauuaagcaguuccucuga

SEQ ID NO: 509982 - RNA, 19 nt, Homo sapiens
  misc_RNA (1)...(19): siRNA sense strand
gaugggcagcagaagauca

SEQ ID NO: 509983 - RNA, 19 nt, Homo sapiens
  misc_RNA (1)...(19): siRNA sense strand
guggauggauuaagaauaa

SEQ ID NO: 509984 - RNA, 19 nt, Homo sapiens
  misc_RNA (1)...(19): siRNA sense strand
gaagggaaauggaagaaag

SEQ ID NO: 509985 - RNA, 19 nt, Homo sapiens
  misc_RNA (1)...(19): siRNA sense strand
gaugguggauggauuaaga

SEQ ID NO: 509986 - RNA, 19 nt, Homo sapiens
  misc_RNA (1)...(19): siRNA sense strand
gcgcaaagcugagccagaa

SEQ ID NO: 509987 - RNA, 19 nt, Homo sapiens
  misc_RNA (1)...(19): siRNA sense strand
ugaacaagcucaguauaaa

SEQ ID NO: 509988 - RNA, 19 nt, Homo sapiens
  misc_RNA (1)...(19): siRNA sense strand
ggagaugguggauggauua

SEQ ID NO: 509989 - RNA, 19 nt, Homo sapiens
  misc_RNA (1)...(19): siRNA sense strand
agacugaagugaaagaaga

SEQ ID NO: 509990 - RNA, 19 nt, Homo sapiens
  misc_RNA (1)...(19): siRNA sense strand
ggaaauggaagaaagaaca

SEQ ID NO: 509991 - RNA, 19 nt, Homo sapiens
  misc_RNA (1)...(19): siRNA sense strand
ggaugauuguuacuacauu

SEQ ID NO: 509992 - RNA, 19 nt, Homo sapiens
  misc_RNA (1)...(19): siRNA sense strand
aauccuaugugaagcauuu

SEQ ID NO: 509993 - RNA, 19 nt, Homo sapiens
  misc_RNA (1)...(19): siRNA sense strand
ggaggaugauuguuacuac

SEQ ID NO: 509994 - RNA, 19 nt, Homo sapiens
  misc_RNA (1)...(19): siRNA sense strand
ggauuaagaauaaccuuug

SEQ ID NO: 509995 - RNA, 19 nt, Homo sapiens
  misc_RNA (1)...(19): siRNA sense strand
cagcguaaauuggcaagaa

SEQ ID NO: 509996 - RNA, 19 nt, Homo sapiens
  misc_RNA (1)...(19): siRNA sense strand
gcacaggaagaaagaagaa

SEQ ID NO: 509997 - RNA, 19 nt, Homo sapiens
  misc_RNA (1)...(19): siRNA sense strand
gguguggacucugucuuaa

SEQ ID NO: 509998 - RNA, 19 nt, Homo sapiens
  misc_RNA (1)...(19): siRNA sense strand
agaaaagacugaagugaaa

SEQ ID NO: 509999 - RNA, 19 nt, Homo sapiens
  misc_RNA (1)...(19): siRNA sense strand
cauaugaacaagcucagua

SEQ ID NO: 510000 - RNA, 19 nt, Homo sapiens
  misc_RNA (1)...(19): siRNA sense strand
aaaggugacuucgucuaaa

SEQ ID NO: 510001 - RNA, 19 nt, Homo sapiens
  misc_RNA (1)...(19): siRNA sense strand
gaauaaccuuugauuacac

SEQ ID NO: 510002 - RNA, 19 nt, Homo sapiens
  misc_RNA (1)...(19): siRNA sense strand
gaggaugauuguuacuaca

SEQ ID NO: 510003 - RNA, 19 nt, Homo sapiens
  misc_RNA (1)...(19): siRNA sense strand
ggauagaugggcagcagaa

SEQ ID NO: 510004 - RNA, 19 nt, Homo sapiens
  misc_RNA (1)...(19): siRNA sense strand
gaacaagcucaguauaaaa

SEQ ID NO: 510005 - RNA, 19 nt, Homo sapiens
  misc_RNA (1)...(19): siRNA sense strand
ggugacuucgucuaaauuu

SEQ ID NO: 510006 - RNA, 19 nt, Homo sapiens
  misc_RNA (1)...(19): siRNA sense strand
caagaagggaaauggaaga

SEQ ID NO: 510007 - RNA, 19 nt, Homo sapiens
  misc_RNA (1)...(19): siRNA sense strand
gcuggaggaugauuguuac

SEQ ID NO: 510008 - RNA, 19 nt, Homo sapiens
  misc_RNA (1)...(19): siRNA sense strand
gguggauggauuaagaaua

SEQ ID NO: 510009 - RNA, 19 nt, Homo sapiens
  misc_RNA (1)...(19): siRNA sense strand
cauuauaucccagcagaaa

SEQ ID NO: 510010 - RNA, 19 nt, Homo sapiens
  misc_RNA (1)...(19): siRNA sense strand
ugagaggccucgucaccau

SEQ ID NO: 510011 - RNA, 19 nt, Homo sapiens
  misc_RNA (1)...(19): siRNA sense strand
ccaguccgccuuuguugaa

SEQ ID NO: 510012 - RNA, 19 nt, Homo sapiens
  misc_RNA (1)...(19): siRNA sense strand
ccucgucaccaucacguua

SEQ ID NO: 510013 - RNA, 19 nt, Homo sapiens
  misc_RNA (1)...(19): siRNA sense strand
aaggugacuucgucuaaau

SEQ ID NO: 510014 - RNA, 19 nt, Homo sapiens
  misc_RNA (1)...(19): siRNA sense strand
aagcugagccagaagcauu

SEQ ID NO: 510015 - RNA, 19 nt, Homo sapiens
  misc_RNA (1)...(19): siRNA sense strand
ggaauccuaugugaagcau

SEQ ID NO: 510016 - RNA, 19 nt, Homo sapiens
  misc_RNA (1)...(19): siRNA sense strand
cagaagcauugcagucucu

SEQ ID NO: 510017 - RNA, 19 nt, Homo sapiens
  misc_RNA (1)...(19): siRNA sense strand
aaacaagaagggaaaugga

SEQ ID NO: 510018 - RNA, 19 nt, Homo sapiens
  misc_RNA (1)...(19): siRNA sense strand
augaacaagcucaguauaa

SEQ ID NO: 510019 - RNA, 19 nt, Homo sapiens
  misc_RNA (1)...(19): siRNA sense strand
gaagaaaagacugaaguga

SEQ ID NO: 510020 - RNA, 19 nt, Homo sapiens
  misc_RNA (1)...(19): siRNA sense strand
gaggagcacaggaagaaag

SEQ ID NO: 510021 - RNA, 19 nt, Homo sapiens
  misc_RNA (1)...(19): siRNA sense strand
uaugaacaagcucaguaua

SEQ ID NO: 510022 - RNA, 19 nt, Homo sapiens
  misc_RNA (1)...(19): siRNA sense strand
caaacaagaagggaaaugg

SEQ ID NO: 510023 - RNA, 19 nt, Homo sapiens
  misc_RNA (1)...(19): siRNA sense strand
gagcacaggaagaaagaag

SEQ ID NO: 510024 - RNA, 19 nt, Homo sapiens
  misc_RNA (1)...(19): siRNA sense strand
uaacaggagccaggaggaa

SEQ ID NO: 510025 - RNA, 19 nt, Homo sapiens
  misc_RNA (1)...(19): siRNA sense strand
agaagaagcgcugcagguu

SEQ ID NO: 510026 - RNA, 19 nt, Homo sapiens
  misc_RNA (1)...(19): siRNA sense strand
gcagcuggaggaugauugu

SEQ ID NO: 510027 - RNA, 19 nt, Homo sapiens
  misc_RNA (1)...(19): siRNA sense strand
gaagcauugcagucucuga

SEQ ID NO: 510028 - RNA, 19 nt, Homo sapiens
  misc_RNA (1)...(19): siRNA sense strand
accaacaucauaacgauuu

SEQ ID NO: 510029 - RNA, 19 nt, Homo sapiens
  misc_RNA (1)...(19): siRNA sense strand
uagaugggcagcagaagau

SEQ ID NO: 510030 - RNA, 19 nt, Homo sapiens
  misc_RNA (1)...(19): siRNA sense strand
ugguguggacucugucuua

SEQ ID NO: 510031 - RNA, 19 nt, Homo sapiens
  misc_RNA (1)...(19): siRNA sense strand
gagaugguggauggauuaa

SEQ ID NO: 510032 - RNA, 19 nt, Homo sapiens
  misc_RNA (1)...(19): siRNA sense strand
uguggacucugucuuaaaa

SEQ ID NO: 510033 - RNA, 19 nt, Homo sapiens
  misc_RNA (1)...(19): siRNA sense strand
aggagaugguggauggauu

SEQ ID NO: 510034 - RNA, 19 nt, Homo sapiens
  misc_RNA (1)...(19): siRNA sense strand
ugugacaggcuuucugaga

SEQ ID NO: 510035 - RNA, 19 nt, Homo sapiens
  misc_RNA (1)...(19): siRNA sense strand
aacaagaagggaaauggaa

SEQ ID NO: 510036 - RNA, 19 nt, Homo sapiens
  misc_RNA (1)...(19): siRNA sense strand
ccacgccacaguccacaga

SEQ ID NO: 510037 - RNA, 19 nt, Homo sapiens
  misc_RNA (1)...(19): siRNA sense strand
agcguaaauuggcaagaaa

SEQ ID NO: 510038 - RNA, 19 nt, Homo sapiens
  misc_RNA (1)...(19): siRNA sense strand
gaaaucccugaaguucuga

SEQ ID NO: 510039 - RNA, 19 nt, Homo sapiens
  misc_RNA (1)...(19): siRNA sense strand
cauuaagcaguuccucuga

SEQ ID NO: 510040 - RNA, 19 nt, Homo sapiens
  misc_RNA (1)...(19): siRNA sense strand
gaugggcagcagaagauca

SEQ ID NO: 510041 - RNA, 19 nt, Homo sapiens
  misc_RNA (1)...(19): siRNA sense strand
guggauggauuaagaauaa

SEQ ID NO: 510042 - RNA, 19 nt, Homo sapiens
  misc_RNA (1)...(19): siRNA sense strand
gaagggaaauggaagaaag

SEQ ID NO: 510043 - RNA, 19 nt, Homo sapiens
  misc_RNA (1)...(19): siRNA sense strand
gaugguggauggauuaaga

SEQ ID NO: 510044 - RNA, 19 nt, Homo sapiens
  misc_RNA (1)...(19): siRNA sense strand
gcgcaaagcugagccagaa

SEQ ID NO: 510045 - RNA, 19 nt, Homo sapiens
  misc_RNA (1)...(19): siRNA sense strand
ugaacaagcucaguauaaa

SEQ ID NO: 510046 - RNA, 19 nt, Homo sapiens
  misc_RNA (1)...(19): siRNA sense strand
ggagaugguggauggauua

SEQ ID NO: 510047 - RNA, 19 nt, Homo sapiens
  misc_RNA (1)...(19): siRNA sense strand
agacugaagugaaagaaga

SEQ ID NO: 510048 - RNA, 19 nt, Homo sapiens
  misc_RNA (1)...(19): siRNA sense strand
ggaaauggaagaaagaaca

SEQ ID NO: 510049 - RNA, 19 nt, Homo sapiens
  misc_RNA (1)...(19): siRNA sense strand
ggaugauuguuacuacauu

SEQ ID NO: 510050 - RNA, 19 nt, Homo sapiens
  misc_RNA (1)...(19): siRNA sense strand
aauccuaugugaagcauuu

SEQ ID NO: 510051 - RNA, 19 nt, Homo sapiens
  misc_RNA (1)...(19): siRNA sense strand
ggaggaugauuguuacuac

SEQ ID NO: 510052 - RNA, 19 nt, Homo sapiens
  misc_RNA (1)...(19): siRNA sense strand
ggauuaagaauaaccuuug

SEQ ID NO: 510053 - RNA, 19 nt, Homo sapiens
  misc_RNA (1)...(19): siRNA sense strand
cagcguaaauuggcaagaa

SEQ ID NO: 510054 - RNA, 19 nt, Homo sapiens
  misc_RNA (1)...(19): siRNA sense strand
gcacaggaagaaagaagaa

SEQ ID NO: 510055 - RNA, 19 nt, Homo sapiens
  misc_RNA (1)...(19): siRNA sense strand
gguguggacucugucuuaa

SEQ ID NO: 510056 - RNA, 19 nt, Homo sapiens
  misc_RNA (1)...(19): siRNA sense strand
agaaaagacugaagugaaa

SEQ ID NO: 510057 - RNA, 19 nt, Homo sapiens
  misc_RNA (1)...(19): siRNA sense strand
cauaugaacaagcucagua

SEQ ID NO: 510058 - RNA, 19 nt, Homo sapiens
  misc_RNA (1)...(19): siRNA sense strand
aaaggugacuucgucuaaa

SEQ ID NO: 510059 - RNA, 19 nt, Homo sapiens
  misc_RNA (1)...(19): siRNA sense strand
gaauaaccuuugauuacac

SEQ ID NO: 510060 - RNA, 19 nt, Homo sapiens
  misc_RNA (1)...(19): siRNA sense strand
gaggaugauuguuacuaca

SEQ ID NO: 510061 - RNA, 19 nt, Homo sapiens
  misc_RNA (1)...(19): siRNA sense strand
ggauagaugggcagcagaa

SEQ ID NO: 510062 - RNA, 19 nt, Homo sapiens
  misc_RNA (1)...(19): siRNA sense strand
gaacaagcucaguauaaaa

SEQ ID NO: 510063 - RNA, 19 nt, Homo sapiens
  misc_RNA (1)...(19): siRNA sense strand
ggugacuucgucuaaauuu

SEQ ID NO: 510064 - RNA, 19 nt, Homo sapiens
  misc_RNA (1)...(19): siRNA sense strand
caagaagggaaauggaaga

SEQ ID NO: 510065 - RNA, 19 nt, Homo sapiens
  misc_RNA (1)...(19): siRNA sense strand
gcuggaggaugauuguuac

SEQ ID NO: 510066 - RNA, 19 nt, Homo sapiens
  misc_RNA (1)...(19): siRNA sense strand
gguggauggauuaagaaua

SEQ ID NO: 510067 - RNA, 19 nt, Homo sapiens
  misc_RNA (1)...(19): siRNA sense strand
cauuauaucccagcagaaa

SEQ ID NO: 510068 - RNA, 19 nt, Homo sapiens
  misc_RNA (1)...(19): siRNA sense strand
ugagaggccucgucaccau

SEQ ID NO: 510069 - RNA, 19 nt, Homo sapiens
  misc_RNA (1)...(19): siRNA sense strand
ccaguccgccuuuguugaa

SEQ ID NO: 510070 - RNA, 19 nt, Homo sapiens
  misc_RNA (1)...(19): siRNA sense strand
ccucgucaccaucacguua

SEQ ID NO: 510071 - RNA, 19 nt, Homo sapiens
  misc_RNA (1)...(19): siRNA sense strand
aaggugacuucgucuaaau

SEQ ID NO: 510072 - RNA, 19 nt, Homo sapiens
  misc_RNA (1)...(19): siRNA sense strand
aagcugagccagaagcauu

SEQ ID NO: 510073 - RNA, 19 nt, Homo sapiens
  misc_RNA (1)...(19): siRNA sense strand
ggaauccuaugugaagcau

SEQ ID NO: 510074 - RNA, 19 nt, Homo sapiens
  misc_RNA (1)...(19): siRNA sense strand
cagaagcauugcagucucu

SEQ ID NO: 510075 - RNA, 19 nt, Homo sapiens
  misc_RNA (1)...(19): siRNA sense strand
aaacaagaagggaaaugga

SEQ ID NO: 510076 - RNA, 19 nt, Homo sapiens
  misc_RNA (1)...(19): siRNA sense strand
augaacaagcucaguauaa

SEQ ID NO: 510077 - RNA, 19 nt, Homo sapiens
  misc_RNA (1)...(19): siRNA sense strand
gaagaaaagacugaaguga

SEQ ID NO: 510078 - RNA, 19 nt, Homo sapiens
  misc_RNA (1)...(19): siRNA sense strand
gaggagcacaggaagaaag

SEQ ID NO: 510079 - RNA, 19 nt, Homo sapiens
  misc_RNA (1)...(19): siRNA sense strand
uaugaacaagcucaguaua

SEQ ID NO: 510080 - RNA, 19 nt, Homo sapiens
  misc_RNA (1)...(19): siRNA sense strand
caaacaagaagggaaaugg

SEQ ID NO: 510081 - RNA, 19 nt, Homo sapiens
  misc_RNA (1)...(19): siRNA sense strand
gagcacaggaagaaagaag

SEQ ID NO: 510082 - RNA, 19 nt, Homo sapiens
  misc_RNA (1)...(19): siRNA sense strand
uaacaggagccaggaggaa

SEQ ID NO: 510083 - RNA, 19 nt, Homo sapiens
  misc_RNA (1)...(19): siRNA sense strand
agaagaagcgcugcagguu

SEQ ID NO: 510084 - RNA, 19 nt, Homo sapiens
  misc_RNA (1)...(19): siRNA sense strand
gcagcuggaggaugauugu

SEQ ID NO: 510085 - RNA, 19 nt, Homo sapiens
  misc_RNA (1)...(19): siRNA sense strand
gaagcauugcagucucuga

SEQ ID NO: 510086 - RNA, 19 nt, Homo sapiens
  misc_RNA (1)...(19): siRNA sense strand
accaacaucauaacgauuu

SEQ ID NO: 510087 - RNA, 19 nt, Homo sapiens
  misc_RNA (1)...(19): siRNA sense strand
uagaugggcagcagaagau

SEQ ID NO: 510088 - RNA, 19 nt, Homo sapiens
  misc_RNA (1)...(19): siRNA sense strand
ugguguggacucugucuua

SEQ ID NO: 510089 - RNA, 19 nt, Homo sapiens
  misc_RNA (1)...(19): siRNA sense strand
gagaugguggauggauuaa

SEQ ID NO: 510090 - RNA, 19 nt, Homo sapiens
  misc_RNA (1)...(19): siRNA sense strand
uguggacucugucuuaaaa

SEQ ID NO: 510091 - RNA, 19 nt, Homo sapiens
  misc_RNA (1)...(19): siRNA sense strand
aggagaugguggauggauu

SEQ ID NO: 510092 - RNA, 19 nt, Homo sapiens
  misc_RNA (1)...(19): siRNA sense strand
ugugacaggcuuucugaga

SEQ ID NO: 510093 - RNA, 19 nt, Homo sapiens
  misc_RNA (1)...(19): siRNA sense strand
aacaagaagggaaauggaa

SEQ ID NO: 510094 - RNA, 19 nt, Homo sapiens
  misc_RNA (1)...(19): siRNA sense strand
ccacgccacaguccacaga

SEQ ID NO: 510095 - RNA, 19 nt, Homo sapiens
  misc_RNA (1)...(19): siRNA sense strand
agcguaaauuggcaagaaa

SEQ ID NO: 510096 - RNA, 19 nt, Homo sapiens
  misc_RNA (1)...(19): siRNA sense strand
gaaaucccugaaguucuga

SEQ ID NO: 510097 - RNA, 19 nt, Homo sapiens
  misc_RNA (1)...(19): siRNA sense strand
cauuaagcaguuccucuga

SEQ ID NO: 510098 - RNA, 19 nt, Homo sapiens
  misc_RNA (1)...(19): siRNA sense strand
gaugggcagcagaagauca

SEQ ID NO: 510099 - RNA, 19 nt, Homo sapiens
  misc_RNA (1)...(19): siRNA sense strand
guggauggauuaagaauaa

SEQ ID NO: 510100 - RNA, 19 nt, Homo sapiens
  misc_RNA (1)...(19): siRNA sense strand
gaugguggauggauuaaga

SEQ ID NO: 510101 - RNA, 19 nt, Homo sapiens
  misc_RNA (1)...(19): siRNA sense strand
gcgcaaagcugagccagaa

SEQ ID NO: 510102 - RNA, 19 nt, Homo sapiens
  misc_RNA (1)...(19): siRNA sense strand
ugaacaagcucaguauaaa

SEQ ID NO: 510103 - RNA, 19 nt, Homo sapiens
  misc_RNA (1)...(19): siRNA sense strand
ggagaugguggauggauua

SEQ ID NO: 510104 - RNA, 19 nt, Homo sapiens
  misc_RNA (1)...(19): siRNA sense strand
ggaugauuguuacuacauu

SEQ ID NO: 510105 - RNA, 19 nt, Homo sapiens
  misc_RNA (1)...(19): siRNA sense strand
aauccuaugugaagcauuu

SEQ ID NO: 510106 - RNA, 19 nt, Homo sapiens
  misc_RNA (1)...(19): siRNA sense strand
ggaggaugauuguuacuac

SEQ ID NO: 510107 - RNA, 19 nt, Homo sapiens
  misc_RNA (1)...(19): siRNA sense strand
ggauuaagaauaaccuuug

SEQ ID NO: 510108 - RNA, 19 nt, Homo sapiens
  misc_RNA (1)...(19): siRNA sense strand
cauaugaacaagcucagua

SEQ ID NO: 510109 - RNA, 19 nt, Homo sapiens
  misc_RNA (1)...(19): siRNA sense strand
aaaggugacuucgucuaaa

SEQ ID NO: 510110 - RNA, 19 nt, Homo sapiens
  misc_RNA (1)...(19): siRNA sense strand
gaauaaccuuugauuacac

SEQ ID NO: 510111 - RNA, 19 nt, Homo sapiens
  misc_RNA (1)...(19): siRNA sense strand
gaggaugauuguuacuaca

SEQ ID NO: 510112 - RNA, 19 nt, Homo sapiens
  misc_RNA (1)...(19): siRNA sense strand
gaacaagcucaguauaaaa

SEQ ID NO: 510113 - RNA, 19 nt, Homo sapiens
  misc_RNA (1)...(19): siRNA sense strand
ggugacuucgucuaaauuu

SEQ ID NO: 510114 - RNA, 19 nt, Homo sapiens
  misc_RNA (1)...(19): siRNA sense strand
ugagaggccucgucaccau

SEQ ID NO: 510115 - RNA, 19 nt, Homo sapiens
  misc_RNA (1)...(19): siRNA sense strand
gcuggaggaugauuguuac

SEQ ID NO: 510116 - RNA, 19 nt, Homo sapiens
  misc_RNA (1)...(19): siRNA sense strand
gguggauggauuaagaaua

SEQ ID NO: 510117 - RNA, 19 nt, Homo sapiens
  misc_RNA (1)...(19): siRNA sense strand
cauuauaucccagcagaaa

SEQ ID NO: 510118 - RNA, 19 nt, Homo sapiens
  misc_RNA (1)...(19): siRNA sense strand
ccaguccgccuuuguugaa

SEQ ID NO: 510119 - RNA, 19 nt, Homo sapiens
  misc_RNA (1)...(19): siRNA sense strand
ccucgucaccaucacguua

SEQ ID NO: 510120 - RNA, 19 nt, Homo sapiens
  misc_RNA (1)...(19): siRNA sense strand
aaggugacuucgucuaaau

SEQ ID NO: 510121 - RNA, 19 nt, Homo sapiens
  misc_RNA (1)...(19): siRNA sense strand
aagcugagccagaagcauu

SEQ ID NO: 510122 - RNA, 19 nt, Homo sapiens
  misc_RNA (1)...(19): siRNA sense strand
ggaauccuaugugaagcau

SEQ ID NO: 510123 - RNA, 19 nt, Homo sapiens
  misc_RNA (1)...(19): siRNA sense strand
cagaagcauugcagucucu

SEQ ID NO: 510124 - RNA, 19 nt, Homo sapiens
  misc_RNA (1)...(19): siRNA sense strand
augaacaagcucaguauaa

SEQ ID NO: 510125 - RNA, 19 nt, Homo sapiens
  misc_RNA (1)...(19): siRNA sense strand
uaugaacaagcucaguaua

SEQ ID NO: 510126 - RNA, 19 nt, Homo sapiens
  misc_RNA (1)...(19): siRNA sense strand
uaacaggagccaggaggaa

SEQ ID NO: 510127 - RNA, 19 nt, Homo sapiens
  misc_RNA (1)...(19): siRNA sense strand
gcagcuggaggaugauugu

SEQ ID NO: 510128 - RNA, 19 nt, Homo sapiens
  misc_RNA (1)...(19): siRNA sense strand
gaagcauugcagucucuga

SEQ ID NO: 510129 - RNA, 19 nt, Homo sapiens
  misc_RNA (1)...(19): siRNA sense strand
accaacaucauaacgauuu

SEQ ID NO: 510130 - RNA, 19 nt, Homo sapiens
  misc_RNA (1)...(19): siRNA sense strand
gagaugguggauggauuaa

SEQ ID NO: 510131 - RNA, 19 nt, Homo sapiens
  misc_RNA (1)...(19): siRNA sense strand
aggagaugguggauggauu

SEQ ID NO: 510132 - RNA, 19 nt, Homo sapiens
  misc_RNA (1)...(19): siRNA sense strand
ugugacaggcuuucugaga

SEQ ID NO: 510133 - RNA, 19 nt, Homo sapiens
  misc_RNA (1)...(19): siRNA sense strand
ccacgccacaguccacaga

SEQ ID NO: 510134 - RNA, 19 nt, Homo sapiens
  misc_RNA (1)...(19): siRNA sense strand
gaaaucccugaaguucuga

SEQ ID NO: 510135 - RNA, 19 nt, Homo sapiens
  misc_RNA (1)...(19): siRNA sense strand
guggauggauuaagaauaa

SEQ ID NO: 510136 - RNA, 19 nt, Homo sapiens
  misc_RNA (1)...(19): siRNA sense strand
gaagggaaauggaagaaag

SEQ ID NO: 510137 - RNA, 19 nt, Homo sapiens
  misc_RNA (1)...(19): siRNA sense strand
gaugguggauggauuaaga

SEQ ID NO: 510138 - RNA, 19 nt, Homo sapiens
  misc_RNA (1)...(19): siRNA sense strand
gcgcaaagcugagccagaa

SEQ ID NO: 510139 - RNA, 19 nt, Homo sapiens
  misc_RNA (1)...(19): siRNA sense strand
ugaacaagcucaguauaaa

SEQ ID NO: 510140 - RNA, 19 nt, Homo sapiens
  misc_RNA (1)...(19): siRNA sense strand
ggagaugguggauggauua

SEQ ID NO: 510141 - RNA, 19 nt, Homo sapiens
  misc_RNA (1)...(19): siRNA sense strand
agacugaagugaaagaaga

SEQ ID NO: 510142 - RNA, 19 nt, Homo sapiens
  misc_RNA (1)...(19): siRNA sense strand
ggaaauggaagaaagaaca

SEQ ID NO: 510143 - RNA, 19 nt, Homo sapiens
  misc_RNA (1)...(19): siRNA sense strand
ggaugauuguuacuacauu

SEQ ID NO: 510144 - RNA, 19 nt, Homo sapiens
  misc_RNA (1)...(19): siRNA sense strand
aauccuaugugaagcauuu

SEQ ID NO: 510145 - RNA, 19 nt, Homo sapiens
  misc_RNA (1)...(19): siRNA sense strand
ggaggaugauuguuacuac

SEQ ID NO: 510146 - RNA, 19 nt, Homo sapiens
  misc_RNA (1)...(19): siRNA sense strand
ggauuaagaauaaccuuug

SEQ ID NO: 510147 - RNA, 19 nt, Homo sapiens
  misc_RNA (1)...(19): siRNA sense strand
cagcguaaauuggcaagaa

SEQ ID NO: 510148 - RNA, 19 nt, Homo sapiens
  misc_RNA (1)...(19): siRNA sense strand
gcacaggaagaaagaagaa

SEQ ID NO: 510149 - RNA, 19 nt, Homo sapiens
  misc_RNA (1)...(19): siRNA sense strand
gguguggacucugucuuaa

SEQ ID NO: 510150 - RNA, 19 nt, Homo sapiens
  misc_RNA (1)...(19): siRNA sense strand
agaaaagacugaagugaaa

SEQ ID NO: 510151 - RNA, 19 nt, Homo sapiens
  misc_RNA (1)...(19): siRNA sense strand
cauaugaacaagcucagua

SEQ ID NO: 510152 - RNA, 19 nt, Homo sapiens
  misc_RNA (1)...(19): siRNA sense strand
aaaggugacuucgucuaaa

SEQ ID NO: 510153 - RNA, 19 nt, Homo sapiens
  misc_RNA (1)...(19): siRNA sense strand
gaauaaccuuugauuacac

SEQ ID NO: 510154 - RNA, 19 nt, Homo sapiens
  misc_RNA (1)...(19): siRNA sense strand
gaggaugauuguuacuaca

SEQ ID NO: 510155 - RNA, 19 nt, Homo sapiens
  misc_RNA (1)...(19): siRNA sense strand
ggauagaugggcagcagaa

SEQ ID NO: 510156 - RNA, 19 nt, Homo sapiens
  misc_RNA (1)...(19): siRNA sense strand
gaacaagcucaguauaaaa

SEQ ID NO: 510157 - RNA, 19 nt, Homo sapiens
  misc_RNA (1)...(19): siRNA sense strand
ggugacuucgucuaaauuu

SEQ ID NO: 510158 - RNA, 19 nt, Homo sapiens
  misc_RNA (1)...(19): siRNA sense strand
caagaagggaaauggaaga

SEQ ID NO: 510159 - RNA, 19 nt, Homo sapiens
  misc_RNA (1)...(19): siRNA sense strand
gcuggaggaugauuguuac

SEQ ID NO: 510160 - RNA, 19 nt, Homo sapiens
  misc_RNA (1)...(19): siRNA sense strand
gguggauggauuaagaaua

SEQ ID NO: 510161 - RNA, 19 nt, Homo sapiens
  misc_RNA (1)...(19): siRNA sense strand
cauuauaucccagcagaaa

SEQ ID NO: 510162 - RNA, 19 nt, Homo sapiens
  misc_RNA (1)...(19): siRNA sense strand
ugagaggccucgucaccau

SEQ ID NO: 510163 - RNA, 19 nt, Homo sapiens
  misc_RNA (1)...(19): siRNA sense strand
ccaguccgccuuuguugaa

SEQ ID NO: 510164 - RNA, 19 nt, Homo sapiens
  misc_RNA (1)...(19): siRNA sense strand
ccucgucaccaucacguua

SEQ ID NO: 510165 - RNA, 19 nt, Homo sapiens
  misc_RNA (1)...(19): siRNA sense strand
aaggugacuucgucuaaau

SEQ ID NO: 510166 - RNA, 19 nt, Homo sapiens
  misc_RNA (1)...(19): siRNA sense strand
aagcugagccagaagcauu

SEQ ID NO: 510167 - RNA, 19 nt, Homo sapiens
  misc_RNA (1)...(19): siRNA sense strand
ggaauccuaugugaagcau

SEQ ID NO: 510168 - RNA, 19 nt, Homo sapiens
  misc_RNA (1)...(19): siRNA sense strand
cagaagcauugcagucucu

SEQ ID NO: 510169 - RNA, 19 nt, Homo sapiens
  misc_RNA (1)...(19): siRNA sense strand
aaacaagaagggaaaugga

SEQ ID NO: 510170 - RNA, 19 nt, Homo sapiens
  misc_RNA (1)...(19): siRNA sense strand
augaacaagcucaguauaa

SEQ ID NO: 510171 - RNA, 19 nt, Homo sapiens
  misc_RNA (1)...(19): siRNA sense strand
gaagaaaagacugaaguga

SEQ ID NO: 510172 - RNA, 19 nt, Homo sapiens
  misc_RNA (1)...(19): siRNA sense strand
gaggagcacaggaagaaag

SEQ ID NO: 510173 - RNA, 19 nt, Homo sapiens
  misc_RNA (1)...(19): siRNA sense strand
uaugaacaagcucaguaua

SEQ ID NO: 510174 - RNA, 19 nt, Homo sapiens
  misc_RNA (1)...(19): siRNA sense strand
caaacaagaagggaaaugg

SEQ ID NO: 510175 - RNA, 19 nt, Homo sapiens
  misc_RNA (1)...(19): siRNA sense strand
gagcacaggaagaaagaag

SEQ ID NO: 510176 - RNA, 19 nt, Homo sapiens
  misc_RNA (1)...(19): siRNA sense strand
uaacaggagccaggaggaa

SEQ ID NO: 510177 - RNA, 19 nt, Homo sapiens
  misc_RNA (1)...(19): siRNA sense strand
agaagaagcgcugcagguu

SEQ ID NO: 510178 - RNA, 19 nt, Homo sapiens
  misc_RNA (1)...(19): siRNA sense strand
gcagcuggaggaugauugu

SEQ ID NO: 510179 - RNA, 19 nt, Homo sapiens
  misc_RNA (1)...(19): siRNA sense strand
gaagcauugcagucucuga

SEQ ID NO: 510180 - RNA, 19 nt, Homo sapiens
  misc_RNA (1)...(19): siRNA sense strand
accaacaucauaacgauuu

SEQ ID NO: 510181 - RNA, 19 nt, Homo sapiens
  misc_RNA (1)...(19): siRNA sense strand
uagaugggcagcagaagau

SEQ ID NO: 510182 - RNA, 19 nt, Homo sapiens
  misc_RNA (1)...(19): siRNA sense strand
ugguguggacucugucuua

SEQ ID NO: 510183 - RNA, 19 nt, Homo sapiens
  misc_RNA (1)...(19): siRNA sense strand
gagaugguggauggauuaa

SEQ ID NO: 510184 - RNA, 19 nt, Homo sapiens
  misc_RNA (1)...(19): siRNA sense strand
uguggacucugucuuaaaa

SEQ ID NO: 510185 - RNA, 19 nt, Homo sapiens
  misc_RNA (1)...(19): siRNA sense strand
aggagaugguggauggauu

SEQ ID NO: 510186 - RNA, 19 nt, Homo sapiens
  misc_RNA (1)...(19): siRNA sense strand
ugugacaggcuuucugaga

SEQ ID NO: 510187 - RNA, 19 nt, Homo sapiens
  misc_RNA (1)...(19): siRNA sense strand
aacaagaagggaaauggaa

SEQ ID NO: 510188 - RNA, 19 nt, Homo sapiens
  misc_RNA (1)...(19): siRNA sense strand
ccacgccacaguccacaga

SEQ ID NO: 510189 - RNA, 19 nt, Homo sapiens
  misc_RNA (1)...(19): siRNA sense strand
agcguaaauuggcaagaaa

SEQ ID NO: 510190 - RNA, 19 nt, Homo sapiens
  misc_RNA (1)...(19): siRNA sense strand
gaaaucccugaaguucuga

SEQ ID NO: 510191 - RNA, 19 nt, Homo sapiens
  misc_RNA (1)...(19): siRNA sense strand
cauuaagcaguuccucuga

SEQ ID NO: 510192 - RNA, 19 nt, Homo sapiens
  misc_RNA (1)...(19): siRNA sense strand
gaugggcagcagaagauca

SEQ ID NO: 510193 - RNA, 19 nt, Homo sapiens
  misc_RNA (1)...(19): siRNA sense strand
guggauggauuaagaauaa

SEQ ID NO: 510194 - RNA, 19 nt, Homo sapiens
  misc_RNA (1)...(19): siRNA sense strand
gaagggaaauggaagaaag

SEQ ID NO: 510195 - RNA, 19 nt, Homo sapiens
  misc_RNA (1)...(19): siRNA sense strand
gaugguggauggauuaaga

SEQ ID NO: 510196 - RNA, 19 nt, Homo sapiens
  misc_RNA (1)...(19): siRNA sense strand
gcgcaaagcugagccagaa

SEQ ID NO: 510197 - RNA, 19 nt, Homo sapiens
  misc_RNA (1)...(19): siRNA sense strand
ugaacaagcucaguauaaa

SEQ ID NO: 510198 - RNA, 19 nt, Homo sapiens
  misc_RNA (1)...(19): siRNA sense strand
ggagaugguggauggauua

SEQ ID NO: 510199 - RNA, 19 nt, Homo sapiens
  misc_RNA (1)...(19): siRNA sense strand
agacugaagugaaagaaga

SEQ ID NO: 510200 - RNA, 19 nt, Homo sapiens
  misc_RNA (1)...(19): siRNA sense strand
ggaaauggaagaaagaaca

SEQ ID NO: 510201 - RNA, 19 nt, Homo sapiens
  misc_RNA (1)...(19): siRNA sense strand
ggaugauuguuacuacauu

SEQ ID NO: 510202 - RNA, 19 nt, Homo sapiens
  misc_RNA (1)...(19): siRNA sense strand
aauccuaugugaagcauuu

SEQ ID NO: 510203 - RNA, 19 nt, Homo sapiens
  misc_RNA (1)...(19): siRNA sense strand
ggaggaugauuguuacuac

SEQ ID NO: 510204 - RNA, 19 nt, Homo sapiens
  misc_RNA (1)...(19): siRNA sense strand
ggauuaagaauaaccuuug

SEQ ID NO: 510205 - RNA, 19 nt, Homo sapiens
  misc_RNA (1)...(19): siRNA sense strand
cagcguaaauuggcaagaa

SEQ ID NO: 510206 - RNA, 19 nt, Homo sapiens
  misc_RNA (1)...(19): siRNA sense strand
gcacaggaagaaagaagaa

SEQ ID NO: 510207 - RNA, 19 nt, Homo sapiens
  misc_RNA (1)...(19): siRNA sense strand
gguguggacucugucuuaa

SEQ ID NO: 510208 - RNA, 19 nt, Homo sapiens
  misc_RNA (1)...(19): siRNA sense strand
agaaaagacugaagugaaa

SEQ ID NO: 510209 - RNA, 19 nt, Homo sapiens
  misc_RNA (1)...(19): siRNA sense strand
cauaugaacaagcucagua

SEQ ID NO: 510210 - RNA, 19 nt, Homo sapiens
  misc_RNA (1)...(19): siRNA sense strand
aaaggugacuucgucuaaa

SEQ ID NO: 510211 - RNA, 19 nt, Homo sapiens
  misc_RNA (1)...(19): siRNA sense strand
gaauaaccuuugauuacac

SEQ ID NO: 510212 - RNA, 19 nt, Homo sapiens
  misc_RNA (1)...(19): siRNA sense strand
gaggaugauuguuacuaca

SEQ ID NO: 510213 - RNA, 19 nt, Homo sapiens
  misc_RNA (1)...(19): siRNA sense strand
ggauagaugggcagcagaa

SEQ ID NO: 510214 - RNA, 19 nt, Homo sapiens
  misc_RNA (1)...(19): siRNA sense strand
gaacaagcucaguauaaaa

SEQ ID NO: 510215 - RNA, 19 nt, Homo sapiens
  misc_RNA (1)...(19): siRNA sense strand
ggugacuucgucuaaauuu

SEQ ID NO: 510216 - RNA, 19 nt, Homo sapiens
  misc_RNA (1)...(19): siRNA sense strand
caagaagggaaauggaaga

SEQ ID NO: 510217 - RNA, 19 nt, Homo sapiens
  misc_RNA (1)...(19): siRNA sense strand
gcuggaggaugauuguuac

SEQ ID NO: 510218 - RNA, 19 nt, Homo sapiens
  misc_RNA (1)...(19): siRNA sense strand
gguggauggauuaagaaua

SEQ ID NO: 510219 - RNA, 19 nt, Homo sapiens
  misc_RNA (1)...(19): siRNA sense strand
cauuauaucccagcagaaa

SEQ ID NO: 510220 - RNA, 19 nt, Homo sapiens
  misc_RNA (1)...(19): siRNA sense strand
ugagaggccucgucaccau

SEQ ID NO: 510221 - RNA, 19 nt, Homo sapiens
  misc_RNA (1)...(19): siRNA sense strand
ccaguccgccuuuguugaa

SEQ ID NO: 510222 - RNA, 19 nt, Homo sapiens
  misc_RNA (1)...(19): siRNA sense strand
ccucgucaccaucacguua

SEQ ID NO: 510223 - RNA, 19 nt, Homo sapiens
  misc_RNA (1)...(19): siRNA sense strand
aaggugacuucgucuaaau

SEQ ID NO: 510224 - RNA, 19 nt, Homo sapiens
  misc_RNA (1)...(19): siRNA sense strand
aagcugagccagaagcauu

SEQ ID NO: 510225 - RNA, 19 nt, Homo sapiens
  misc_RNA (1)...(19): siRNA sense strand
ggaauccuaugugaagcau

SEQ ID NO: 510226 - RNA, 19 nt, Homo sapiens
  misc_RNA (1)...(19): siRNA sense strand
cagaagcauugcagucucu

SEQ ID NO: 510227 - RNA, 19 nt, Homo sapiens
  misc_RNA (1)...(19): siRNA sense strand
aaacaagaagggaaaugga

SEQ ID NO: 510228 - RNA, 19 nt, Homo sapiens
  misc_RNA (1)...(19): siRNA sense strand
augaacaagcucaguauaa

SEQ ID NO: 510229 - RNA, 19 nt, Homo sapiens
  misc_RNA (1)...(19): siRNA sense strand
gaagaaaagacugaaguga

SEQ ID NO: 510230 - RNA, 19 nt, Homo sapiens
  misc_RNA (1)...(19): siRNA sense strand
gaggagcacaggaagaaag

SEQ ID NO: 510231 - RNA, 19 nt, Homo sapiens
  misc_RNA (1)...(19): siRNA sense strand
uaugaacaagcucaguaua

SEQ ID NO: 510232 - RNA, 19 nt, Homo sapiens
  misc_RNA (1)...(19): siRNA sense strand
caaacaagaagggaaaugg

SEQ ID NO: 510233 - RNA, 19 nt, Homo sapiens
  misc_RNA (1)...(19): siRNA sense strand
gagcacaggaagaaagaag

SEQ ID NO: 510234 - RNA, 19 nt, Homo sapiens
  misc_RNA (1)...(19): siRNA sense strand
uaacaggagccaggaggaa

SEQ ID NO: 510235 - RNA, 19 nt, Homo sapiens
  misc_RNA (1)...(19): siRNA sense strand
agaagaagcgcugcagguu

SEQ ID NO: 510236 - RNA, 19 nt, Homo sapiens
  misc_RNA (1)...(19): siRNA sense strand
gcagcuggaggaugauugu

SEQ ID NO: 510237 - RNA, 19 nt, Homo sapiens
  misc_RNA (1)...(19): siRNA sense strand
gaagcauugcagucucuga

SEQ ID NO: 510238 - RNA, 19 nt, Homo sapiens
  misc_RNA (1)...(19): siRNA sense strand
accaacaucauaacgauuu

SEQ ID NO: 510239 - RNA, 19 nt, Homo sapiens
  misc_RNA (1)...(19): siRNA sense strand
uagaugggcagcagaagau

SEQ ID NO: 510240 - RNA, 19 nt, Homo sapiens
  misc_RNA (1)...(19): siRNA sense strand
ugguguggacucugucuua

SEQ ID NO: 510241 - RNA, 19 nt, Homo sapiens
  misc_RNA (1)...(19): siRNA sense strand
gagaugguggauggauuaa

SEQ ID NO: 510242 - RNA, 19 nt, Homo sapiens
  misc_RNA (1)...(19): siRNA sense strand
uguggacucugucuuaaaa

SEQ ID NO: 510243 - RNA, 19 nt, Homo sapiens
  misc_RNA (1)...(19): siRNA sense strand
aggagaugguggauggauu

SEQ ID NO: 510244 - RNA, 19 nt, Homo sapiens
  misc_RNA (1)...(19): siRNA sense strand
ugugacaggcuuucugaga

SEQ ID NO: 510245 - RNA, 19 nt, Homo sapiens
  misc_RNA (1)...(19): siRNA sense strand
aacaagaagggaaauggaa

SEQ ID NO: 510246 - RNA, 19 nt, Homo sapiens
  misc_RNA (1)...(19): siRNA sense strand
ccacgccacaguccacaga

SEQ ID NO: 510247 - RNA, 19 nt, Homo sapiens
  misc_RNA (1)...(19): siRNA sense strand
agcguaaauuggcaagaaa

SEQ ID NO: 510248 - RNA, 19 nt, Homo sapiens
  misc_RNA (1)...(19): siRNA sense strand
gaaaucccugaaguucuga

SEQ ID NO: 510249 - RNA, 19 nt, Homo sapiens
  misc_RNA (1)...(19): siRNA sense strand
cauuaagcaguuccucuga

SEQ ID NO: 510250 - RNA, 19 nt, Homo sapiens
  misc_RNA (1)...(19): siRNA sense strand
gaugggcagcagaagauca

SEQ ID NO: 510251 - RNA, 19 nt, Homo sapiens
  misc_RNA (1)...(19): siRNA sense strand
guggauggauuaagaauaa

SEQ ID NO: 510252 - RNA, 19 nt, Homo sapiens
  misc_RNA (1)...(19): siRNA sense strand
gaagggaaauggaagaaag

SEQ ID NO: 510253 - RNA, 19 nt, Homo sapiens
  misc_RNA (1)...(19): siRNA sense strand
gaugguggauggauuaaga

SEQ ID NO: 510254 - RNA, 19 nt, Homo sapiens
  misc_RNA (1)...(19): siRNA sense strand
gcgcaaagcugagccagaa

SEQ ID NO: 510255 - RNA, 19 nt, Homo sapiens
  misc_RNA (1)...(19): siRNA sense strand
ugaacaagcucaguauaaa

SEQ ID NO: 510256 - RNA, 19 nt, Homo sapiens
  misc_RNA (1)...(19): siRNA sense strand
ggagaugguggauggauua

SEQ ID NO: 510257 - RNA, 19 nt, Homo sapiens
  misc_RNA (1)...(19): siRNA sense strand
agacugaagugaaagaaga

SEQ ID NO: 510258 - RNA, 19 nt, Homo sapiens
  misc_RNA (1)...(19): siRNA sense strand
ggaaauggaagaaagaaca

SEQ ID NO: 510259 - RNA, 19 nt, Homo sapiens
  misc_RNA (1)...(19): siRNA sense strand
ggaugauuguuacuacauu

SEQ ID NO: 510260 - RNA, 19 nt, Homo sapiens
  misc_RNA (1)...(19): siRNA sense strand
aauccuaugugaagcauuu

SEQ ID NO: 510261 - RNA, 19 nt, Homo sapiens
  misc_RNA (1)...(19): siRNA sense strand
ggaggaugauuguuacuac

SEQ ID NO: 510262 - RNA, 19 nt, Homo sapiens
  misc_RNA (1)...(19): siRNA sense strand
ggauuaagaauaaccuuug

SEQ ID NO: 510263 - RNA, 19 nt, Homo sapiens
  misc_RNA (1)...(19): siRNA sense strand
cagcguaaauuggcaagaa

SEQ ID NO: 510264 - RNA, 19 nt, Homo sapiens
  misc_RNA (1)...(19): siRNA sense strand
gcacaggaagaaagaagaa

SEQ ID NO: 510265 - RNA, 19 nt, Homo sapiens
  misc_RNA (1)...(19): siRNA sense strand
gguguggacucugucuuaa

SEQ ID NO: 510266 - RNA, 19 nt, Homo sapiens
  misc_RNA (1)...(19): siRNA sense strand
agaaaagacugaagugaaa

SEQ ID NO: 510267 - RNA, 19 nt, Homo sapiens
  misc_RNA (1)...(19): siRNA sense strand
cauaugaacaagcucagua

SEQ ID NO: 510268 - RNA, 19 nt, Homo sapiens
  misc_RNA (1)...(19): siRNA sense strand
aaaggugacuucgucuaaa

SEQ ID NO: 510269 - RNA, 19 nt, Homo sapiens
  misc_RNA (1)...(19): siRNA sense strand
gaauaaccuuugauuacac

SEQ ID NO: 510270 - RNA, 19 nt, Homo sapiens
  misc_RNA (1)...(19): siRNA sense strand
gaggaugauuguuacuaca

SEQ ID NO: 510271 - RNA, 19 nt, Homo sapiens
  misc_RNA (1)...(19): siRNA sense strand
ggauagaugggcagcagaa

SEQ ID NO: 510272 - RNA, 19 nt, Homo sapiens
  misc_RNA (1)...(19): siRNA sense strand
gaacaagcucaguauaaaa

SEQ ID NO: 510273 - RNA, 19 nt, Homo sapiens
  misc_RNA (1)...(19): siRNA sense strand
ggugacuucgucuaaauuu

SEQ ID NO: 510274 - RNA, 19 nt, Homo sapiens
  misc_RNA (1)...(19): siRNA sense strand
caagaagggaaauggaaga

SEQ ID NO: 510275 - RNA, 19 nt, Homo sapiens
  misc_RNA (1)...(19): siRNA sense strand
gcuggaggaugauuguuac

SEQ ID NO: 510276 - RNA, 19 nt, Homo sapiens
  misc_RNA (1)...(19): siRNA sense strand
gguggauggauuaagaaua

SEQ ID NO: 510277 - RNA, 19 nt, Homo sapiens
  misc_RNA (1)...(19): siRNA sense strand
cauuauaucccagcagaaa

SEQ ID NO: 510278 - RNA, 19 nt, Homo sapiens
  misc_RNA (1)...(19): siRNA sense strand
ugagaggccucgucaccau

SEQ ID NO: 510279 - RNA, 19 nt, Homo sapiens
  misc_RNA (1)...(19): siRNA sense strand
ccaguccgccuuuguugaa

SEQ ID NO: 510280 - RNA, 19 nt, Homo sapiens
  misc_RNA (1)...(19): siRNA sense strand
ccucgucaccaucacguua

SEQ ID NO: 510281 - RNA, 19 nt, Homo sapiens
  misc_RNA (1)...(19): siRNA sense strand
aaggugacuucgucuaaau

SEQ ID NO: 510282 - RNA, 19 nt, Homo sapiens
  misc_RNA (1)...(19): siRNA sense strand
aagcugagccagaagcauu

SEQ ID NO: 510283 - RNA, 19 nt, Homo sapiens
  misc_RNA (1)...(19): siRNA sense strand
ggaauccuaugugaagcau

SEQ ID NO: 510284 - RNA, 19 nt, Homo sapiens
  misc_RNA (1)...(19): siRNA sense strand
cagaagcauugcagucucu

SEQ ID NO: 510285 - RNA, 19 nt, Homo sapiens
  misc_RNA (1)...(19): siRNA sense strand
aaacaagaagggaaaugga

SEQ ID NO: 510286 - RNA, 19 nt, Homo sapiens
  misc_RNA (1)...(19): siRNA sense strand
augaacaagcucaguauaa

SEQ ID NO: 510287 - RNA, 19 nt, Homo sapiens
  misc_RNA (1)...(19): siRNA sense strand
gaagaaaagacugaaguga

SEQ ID NO: 510288 - RNA, 19 nt, Homo sapiens
  misc_RNA (1)...(19): siRNA sense strand
gaggagcacaggaagaaag

SEQ ID NO: 510289 - RNA, 19 nt, Homo sapiens
  misc_RNA (1)...(19): siRNA sense strand
uaugaacaagcucaguaua

SEQ ID NO: 510290 - RNA, 19 nt, Homo sapiens
  misc_RNA (1)...(19): siRNA sense strand
caaacaagaagggaaaugg

SEQ ID NO: 510291 - RNA, 19 nt, Homo sapiens
  misc_RNA (1)...(19): siRNA sense strand
gagcacaggaagaaagaag

SEQ ID NO: 510292 - RNA, 19 nt, Homo sapiens
  misc_RNA (1)...(19): siRNA sense strand
uaacaggagccaggaggaa

SEQ ID NO: 510293 - RNA, 19 nt, Homo sapiens
  misc_RNA (1)...(19): siRNA sense strand
agaagaagcgcugcagguu

SEQ ID NO: 510294 - RNA, 19 nt, Homo sapiens
  misc_RNA (1)...(19): siRNA sense strand
gcagcuggaggaugauugu

SEQ ID NO: 510295 - RNA, 19 nt, Homo sapiens
  misc_RNA (1)...(19): siRNA sense strand
gaagcauugcagucucuga

SEQ ID NO: 510296 - RNA, 19 nt, Homo sapiens
  misc_RNA (1)...(19): siRNA sense strand
accaacaucauaacgauuu

SEQ ID NO: 510297 - RNA, 19 nt, Homo sapiens
  misc_RNA (1)...(19): siRNA sense strand
uagaugggcagcagaagau

SEQ ID NO: 510298 - RNA, 19 nt, Homo sapiens
  misc_RNA (1)...(19): siRNA sense strand
ugguguggacucugucuua

SEQ ID NO: 510299 - RNA, 19 nt, Homo sapiens
  misc_RNA (1)...(19): siRNA sense strand
gagaugguggauggauuaa

SEQ ID NO: 510300 - RNA, 19 nt, Homo sapiens
  misc_RNA (1)...(19): siRNA sense strand
uguggacucugucuuaaaa

SEQ ID NO: 510301 - RNA, 19 nt, Homo sapiens
  misc_RNA (1)...(19): siRNA sense strand
aggagaugguggauggauu

SEQ ID NO: 510302 - RNA, 19 nt, Homo sapiens
  misc_RNA (1)...(19): siRNA sense strand
ugugacaggcuuucugaga

SEQ ID NO: 510303 - RNA, 19 nt, Homo sapiens
  misc_RNA (1)...(19): siRNA sense strand
aacaagaagggaaauggaa

SEQ ID NO: 510304 - RNA, 19 nt, Homo sapiens
  misc_RNA (1)...(19): siRNA sense strand
ccacgccacaguccacaga

SEQ ID NO: 510305 - RNA, 19 nt, Homo sapiens
  misc_RNA (1)...(19): siRNA sense strand
agcguaaauuggcaagaaa

SEQ ID NO: 510306 - RNA, 19 nt, Homo sapiens
  misc_RNA (1)...(19): siRNA sense strand
gaaaucccugaaguucuga

SEQ ID NO: 510307 - RNA, 19 nt, Homo sapiens
  misc_RNA (1)...(19): siRNA sense strand
cauuaagcaguuccucuga

SEQ ID NO: 510308 - RNA, 19 nt, Homo sapiens
  misc_RNA (1)...(19): siRNA sense strand
gaugggcagcagaagauca

SEQ ID NO: 510309 - RNA, 19 nt, Homo sapiens
  misc_RNA (1)...(19): siRNA sense strand
gaaauuucauggacaagua

SEQ ID NO: 510310 - RNA, 19 nt, Homo sapiens
  misc_RNA (1)...(19): siRNA sense strand
ugaaguggcuggugacaua

SEQ ID NO: 510311 - RNA, 19 nt, Homo sapiens
  misc_RNA (1)...(19): siRNA sense strand
caacauuacagcaccauaa

SEQ ID NO: 510312 - RNA, 19 nt, Homo sapiens
  misc_RNA (1)...(19): siRNA sense strand
aaacucaucuacacaccua

SEQ ID NO: 510313 - RNA, 19 nt, Homo sapiens
  misc_RNA (1)...(19): siRNA sense strand
ggaugacgaguuccaguua

SEQ ID NO: 510314 - RNA, 19 nt, Homo sapiens
  misc_RNA (1)...(19): siRNA sense strand
gagaauaaacucaucuaca

SEQ ID NO: 510315 - RNA, 19 nt, Homo sapiens
  misc_RNA (1)...(19): siRNA sense strand
gaagacacagaagagaaua

SEQ ID NO: 510316 - RNA, 19 nt, Homo sapiens
  misc_RNA (1)...(19): siRNA sense strand
gaugacgaguuccaguuau

SEQ ID NO: 510317 - RNA, 19 nt, Homo sapiens
  misc_RNA (1)...(19): siRNA sense strand
uagaggacauuaucaugga

SEQ ID NO: 510318 - RNA, 19 nt, Homo sapiens
  misc_RNA (1)...(19): siRNA sense strand
gcuuaguggugacuucauu

SEQ ID NO: 510319 - RNA, 19 nt, Homo sapiens
  misc_RNA (1)...(19): siRNA sense strand
agaauaaacucaucuacac

SEQ ID NO: 510320 - RNA, 19 nt, Homo sapiens
  misc_RNA (1)...(19): siRNA sense strand
agagaaauuucauggacaa

SEQ ID NO: 510321 - RNA, 19 nt, Homo sapiens
  misc_RNA (1)...(19): siRNA sense strand
agaauuugaugcugugguu

SEQ ID NO: 510322 - RNA, 19 nt, Homo sapiens
  misc_RNA (1)...(19): siRNA sense strand
aguacuaccuggaguuuga

SEQ ID NO: 510323 - RNA, 19 nt, Homo sapiens
  misc_RNA (1)...(19): siRNA sense strand
cugcucaccuucacagauu

SEQ ID NO: 510324 - RNA, 19 nt, Homo sapiens
  misc_RNA (1)...(19): siRNA sense strand
agaacaaucugcggcacua

SEQ ID NO: 510325 - RNA, 19 nt, Homo sapiens
  misc_RNA (1)...(19): siRNA sense strand
ugacgaguuccaguuauua

SEQ ID NO: 510326 - RNA, 19 nt, Homo sapiens
  misc_RNA (1)...(19): siRNA sense strand
gaauaaacucaucuacaca

SEQ ID NO: 510327 - RNA, 19 nt, Homo sapiens
  misc_RNA (1)...(19): siRNA sense strand
gaguuccaguuauuacaga

SEQ ID NO: 510328 - RNA, 19 nt, Homo sapiens
  misc_RNA (1)...(19): siRNA sense strand
caaguacuaccuggaguuu

SEQ ID NO: 510329 - RNA, 19 nt, Homo sapiens
  misc_RNA (1)...(19): siRNA sense strand
gaagagaauaaacucaucu

SEQ ID NO: 510330 - RNA, 19 nt, Homo sapiens
  misc_RNA (1)...(19): siRNA sense strand
gcagcggauuccugaguuc

SEQ ID NO: 510331 - RNA, 19 nt, Homo sapiens
  misc_RNA (1)...(19): siRNA sense strand
gccgaggacuggacuuaag

SEQ ID NO: 510332 - RNA, 19 nt, Homo sapiens
  misc_RNA (1)...(19): siRNA sense strand
ggaguuugaagacacagaa

SEQ ID NO: 510333 - RNA, 19 nt, Homo sapiens
  misc_RNA (1)...(19): siRNA sense strand
agaagagaauaaacucauc

SEQ ID NO: 510334 - RNA, 19 nt, Homo sapiens
  misc_RNA (1)...(19): siRNA sense strand
ugaagacacagaagagaau

SEQ ID NO: 510335 - RNA, 19 nt, Homo sapiens
  misc_RNA (1)...(19): siRNA sense strand
uugaugcugugguuggaua

SEQ ID NO: 510336 - RNA, 19 nt, Homo sapiens
  misc_RNA (1)...(19): siRNA sense strand
agacacagaagagaauaaa

SEQ ID NO: 510337 - RNA, 19 nt, Homo sapiens
  misc_RNA (1)...(19): siRNA sense strand
ugcugugguuggauauuua

SEQ ID NO: 510338 - RNA, 19 nt, Homo sapiens
  misc_RNA (1)...(19): siRNA sense strand
cauuacagcaccauaagga

SEQ ID NO: 510339 - RNA, 19 nt, Homo sapiens
  misc_RNA (1)...(19): siRNA sense strand
ggauauuuagaggacauua

SEQ ID NO: 510340 - RNA, 19 nt, Homo sapiens
  misc_RNA (1)...(19): siRNA sense strand
ugacuucauugugcaaauc

SEQ ID NO: 510341 - RNA, 19 nt, Homo sapiens
  misc_RNA (1)...(19): siRNA sense strand
gcuuugcgcugucuuucuc

SEQ ID NO: 510342 - RNA, 19 nt, Homo sapiens
  misc_RNA (1)...(19): siRNA sense strand
cagaagagaauaaacucau

SEQ ID NO: 510343 - RNA, 19 nt, Homo sapiens
  misc_RNA (1)...(19): siRNA sense strand
acacagaagagaauaaacu

SEQ ID NO: 510344 - RNA, 19 nt, Homo sapiens
  misc_RNA (1)...(19): siRNA sense strand
augacgaguuccaguuauu

SEQ ID NO: 510345 - RNA, 19 nt, Homo sapiens
  misc_RNA (1)...(19): siRNA sense strand
agccuucaccacaacauua

SEQ ID NO: 510346 - RNA, 19 nt, Homo sapiens
  misc_RNA (1)...(19): siRNA sense strand
gaaguggcuggugacauau

SEQ ID NO: 510347 - RNA, 19 nt, Homo sapiens
  misc_RNA (1)...(19): siRNA sense strand
uacagcaccauaaggauga

SEQ ID NO: 510348 - RNA, 19 nt, Homo sapiens
  misc_RNA (1)...(19): siRNA sense strand
cagcuucccagaacaaucu

SEQ ID NO: 510349 - RNA, 19 nt, Homo sapiens
  misc_RNA (1)...(19): siRNA sense strand
augcugugguuggauauuu

SEQ ID NO: 510350 - RNA, 19 nt, Homo sapiens
  misc_RNA (1)...(19): siRNA sense strand
gugacuucauugugcaaau

SEQ ID NO: 510351 - RNA, 19 nt, Homo sapiens
  misc_RNA (1)...(19): siRNA sense strand
gcaccauaaggaugaagug

SEQ ID NO: 510352 - RNA, 19 nt, Homo sapiens
  misc_RNA (1)...(19): siRNA sense strand
gacaugcugcucaccuuca

SEQ ID NO: 510353 - RNA, 19 nt, Homo sapiens
  misc_RNA (1)...(19): siRNA sense strand
ggccgaggacuggacuuaa

SEQ ID NO: 510354 - RNA, 19 nt, Homo sapiens
  misc_RNA (1)...(19): siRNA sense strand
gcacaaaucccaccaaugc

SEQ ID NO: 510355 - RNA, 19 nt, Homo sapiens
  misc_RNA (1)...(19): siRNA sense strand
gaacaauuucugccuauga

SEQ ID NO: 510356 - RNA, 19 nt, Homo sapiens
  misc_RNA (1)...(19): siRNA sense strand
gaaagaggaagaaguggaa

SEQ ID NO: 510357 - RNA, 19 nt, Homo sapiens
  misc_RNA (1)...(19): siRNA sense strand
gaacaggugauuccaagau

SEQ ID NO: 510358 - RNA, 19 nt, Homo sapiens
  misc_RNA (1)...(19): siRNA sense strand
gaugaaagaggaagaagug

SEQ ID NO: 510359 - RNA, 19 nt, Homo sapiens
  misc_RNA (1)...(19): siRNA sense strand
ucaggaaaguucugggaaa

SEQ ID NO: 510360 - RNA, 19 nt, Homo sapiens
  misc_RNA (1)...(19): siRNA sense strand
ggccaccuaugaagacuuu

SEQ ID NO: 510361 - RNA, 19 nt, Homo sapiens
  misc_RNA (1)...(19): siRNA sense strand
ccaagaaaauugaguuuga

SEQ ID NO: 510362 - RNA, 19 nt, Homo sapiens
  misc_RNA (1)...(19): siRNA sense strand
gcagaggucaggaaaguuc

SEQ ID NO: 510363 - RNA, 19 nt, Homo sapiens
  misc_RNA (1)...(19): siRNA sense strand
gggcacaaaucccaccaau

SEQ ID NO: 510364 - RNA, 19 nt, Homo sapiens
  misc_RNA (1)...(19): siRNA sense strand
ggaccaggccaccuaugaa

SEQ ID NO: 510365 - RNA, 19 nt, Homo sapiens
  misc_RNA (1)...(19): siRNA sense strand
ccaggucggugauguccuu

SEQ ID NO: 510366 - RNA, 19 nt, Homo sapiens
  misc_RNA (1)...(19): siRNA sense strand
gcaaugaagagcugaaugc

SEQ ID NO: 510367 - RNA, 19 nt, Homo sapiens
  misc_RNA (1)...(19): siRNA sense strand
gauggcaggucaagaagac

SEQ ID NO: 510368 - RNA, 19 nt, Homo sapiens
  misc_RNA (1)...(19): siRNA sense strand
gugcugaacuccgccaugu

SEQ ID NO: 510369 - RNA, 19 nt, Homo sapiens
  misc_RNA (1)...(19): siRNA sense strand
cuacgaagcuuuugucaag

SEQ ID NO: 510370 - RNA, 19 nt, Homo sapiens
  misc_RNA (1)...(19): siRNA sense strand
agagcugaaugccaagaaa

SEQ ID NO: 510371 - RNA, 19 nt, Homo sapiens
  misc_RNA (1)...(19): siRNA sense strand
gcaagccauuuccaacaac

SEQ ID NO: 510372 - RNA, 19 nt, Homo sapiens
  misc_RNA (1)...(19): siRNA sense strand
acaaggaccaggccaccua

SEQ ID NO: 510373 - RNA, 19 nt, Homo sapiens
  misc_RNA (1)...(19): siRNA sense strand
ugcaagccauuuccaacaa

SEQ ID NO: 510374 - RNA, 19 nt, Homo sapiens
  misc_RNA (1)...(19): siRNA sense strand
caagccauuuccaacaaca

SEQ ID NO: 510375 - RNA, 19 nt, Homo sapiens
  misc_RNA (1)...(19): siRNA sense strand
ggucggugauguccuucga

SEQ ID NO: 510376 - RNA, 19 nt, Homo sapiens
  misc_RNA (1)...(19): siRNA sense strand
gaaggcaauggcacaguca

SEQ ID NO: 510377 - RNA, 19 nt, Homo sapiens
  misc_RNA (1)...(19): siRNA sense strand
uccaauggcugcaucaacu

SEQ ID NO: 510378 - RNA, 19 nt, Homo sapiens
  misc_RNA (1)...(19): siRNA sense strand
ccaauggcugcaucaacua

SEQ ID NO: 510379 - RNA, 19 nt, Homo sapiens
  misc_RNA (1)...(19): siRNA sense strand
caaugcagaggucaggaaa

SEQ ID NO: 510380 - RNA, 19 nt, Homo sapiens
  misc_RNA (1)...(19): siRNA sense strand
gaagagcugaaugccaaga

SEQ ID NO: 510381 - RNA, 19 nt, Homo sapiens
  misc_RNA (1)...(19): siRNA sense strand
aacaauuucugccuaugau

SEQ ID NO: 510382 - RNA, 19 nt, Homo sapiens
  misc_RNA (1)...(19): siRNA sense strand
uaagccaggucggugaugu

SEQ ID NO: 510383 - RNA, 19 nt, Homo sapiens
  misc_RNA (1)...(19): siRNA sense strand
ccuaugaagacuuuguuga

SEQ ID NO: 510384 - RNA, 19 nt, Homo sapiens
  misc_RNA (1)...(19): siRNA sense strand
ugaauucaaggaggcauuu

SEQ ID NO: 510385 - RNA, 19 nt, Homo sapiens
  misc_RNA (1)...(19): siRNA sense strand
ccaaugcagaggucaggaa

SEQ ID NO: 510386 - RNA, 19 nt, Homo sapiens
  misc_RNA (1)...(19): siRNA sense strand
gcaucaacuacgaagcuuu

SEQ ID NO: 510387 - RNA, 19 nt, Homo sapiens
  misc_RNA (1)...(19): siRNA sense strand
gaccaggccaccuaugaag

SEQ ID NO: 510388 - RNA, 19 nt, Homo sapiens
  misc_RNA (1)...(19): siRNA sense strand
uugaacaauuucugccuau

SEQ ID NO: 510389 - RNA, 19 nt, Homo sapiens
  misc_RNA (1)...(19): siRNA sense strand
aaagaugaaagaggaagaa

SEQ ID NO: 510390 - RNA, 19 nt, Homo sapiens
  misc_RNA (1)...(19): siRNA sense strand
caggaaaguucugggaaac

SEQ ID NO: 510391 - RNA, 19 nt, Homo sapiens
  misc_RNA (1)...(19): siRNA sense strand
agucaugggugcugaacuc

SEQ ID NO: 510392 - RNA, 19 nt, Homo sapiens
  misc_RNA (1)...(19): siRNA sense strand
ugaacaauuucugccuaug

SEQ ID NO: 510393 - RNA, 19 nt, Homo sapiens
  misc_RNA (1)...(19): siRNA sense strand
ugacagaacaggugauucc

SEQ ID NO: 510394 - RNA, 19 nt, Homo sapiens
  misc_RNA (1)...(19): siRNA sense strand
ggucaagaagacuccaaug

SEQ ID NO: 510395 - RNA, 19 nt, Homo sapiens
  misc_RNA (1)...(19): siRNA sense strand
augcagaggucaggaaagu

SEQ ID NO: 510396 - RNA, 19 nt, Homo sapiens
  misc_RNA (1)...(19): siRNA sense strand
ccuaugaugcaagccauuu

SEQ ID NO: 510397 - RNA, 19 nt, Homo sapiens
  misc_RNA (1)...(19): siRNA sense strand
agaaguggaagcccugaug

SEQ ID NO: 510398 - RNA, 19 nt, Homo sapiens
  misc_RNA (1)...(19): siRNA sense strand
caaggaccaggccaccuau

SEQ ID NO: 510399 - RNA, 19 nt, Homo sapiens
  misc_RNA (1)...(19): siRNA sense strand
gcacaaaucccaccaaugc

SEQ ID NO: 510400 - RNA, 19 nt, Homo sapiens
  misc_RNA (1)...(19): siRNA sense strand
gaacaauuucugccuauga

SEQ ID NO: 510401 - RNA, 19 nt, Homo sapiens
  misc_RNA (1)...(19): siRNA sense strand
gaaagaggaagaaguggaa

SEQ ID NO: 510402 - RNA, 19 nt, Homo sapiens
  misc_RNA (1)...(19): siRNA sense strand
gaacaggugauuccaagau

SEQ ID NO: 510403 - RNA, 19 nt, Homo sapiens
  misc_RNA (1)...(19): siRNA sense strand
gaugaaagaggaagaagug

SEQ ID NO: 510404 - RNA, 19 nt, Homo sapiens
  misc_RNA (1)...(19): siRNA sense strand
ucaggaaaguucugggaaa

SEQ ID NO: 510405 - RNA, 19 nt, Homo sapiens
  misc_RNA (1)...(19): siRNA sense strand
ggccaccuaugaagacuuu

SEQ ID NO: 510406 - RNA, 19 nt, Homo sapiens
  misc_RNA (1)...(19): siRNA sense strand
ccaagaaaauugaguuuga

SEQ ID NO: 510407 - RNA, 19 nt, Homo sapiens
  misc_RNA (1)...(19): siRNA sense strand
gcagaggucaggaaaguuc

SEQ ID NO: 510408 - RNA, 19 nt, Homo sapiens
  misc_RNA (1)...(19): siRNA sense strand
gggcacaaaucccaccaau

SEQ ID NO: 510409 - RNA, 19 nt, Homo sapiens
  misc_RNA (1)...(19): siRNA sense strand
ggaccaggccaccuaugaa

SEQ ID NO: 510410 - RNA, 19 nt, Homo sapiens
  misc_RNA (1)...(19): siRNA sense strand
ccaggucggugauguccuu

SEQ ID NO: 510411 - RNA, 19 nt, Homo sapiens
  misc_RNA (1)...(19): siRNA sense strand
gcaaugaagagcugaaugc

SEQ ID NO: 510412 - RNA, 19 nt, Homo sapiens
  misc_RNA (1)...(19): siRNA sense strand
aggcauuucuccuguuuga

SEQ ID NO: 510413 - RNA, 19 nt, Homo sapiens
  misc_RNA (1)...(19): siRNA sense strand
gauggcaggucaagaagac

SEQ ID NO: 510414 - RNA, 19 nt, Homo sapiens
  misc_RNA (1)...(19): siRNA sense strand
gcauuucuccuguuugaca

SEQ ID NO: 510415 - RNA, 19 nt, Homo sapiens
  misc_RNA (1)...(19): siRNA sense strand
gugcugaacuccgccaugu

SEQ ID NO: 510416 - RNA, 19 nt, Homo sapiens
  misc_RNA (1)...(19): siRNA sense strand
cuacgaagcuuuugucaag

SEQ ID NO: 510417 - RNA, 19 nt, Homo sapiens
  misc_RNA (1)...(19): siRNA sense strand
agagcugaaugccaagaaa

SEQ ID NO: 510418 - RNA, 19 nt, Homo sapiens
  misc_RNA (1)...(19): siRNA sense strand
gcaagccauuuccaacaac

SEQ ID NO: 510419 - RNA, 19 nt, Homo sapiens
  misc_RNA (1)...(19): siRNA sense strand
acaaggaccaggccaccua

SEQ ID NO: 510420 - RNA, 19 nt, Homo sapiens
  misc_RNA (1)...(19): siRNA sense strand
ugcaagccauuuccaacaa

SEQ ID NO: 510421 - RNA, 19 nt, Homo sapiens
  misc_RNA (1)...(19): siRNA sense strand
caagccauuuccaacaaca

SEQ ID NO: 510422 - RNA, 19 nt, Homo sapiens
  misc_RNA (1)...(19): siRNA sense strand
ggucggugauguccuucga

SEQ ID NO: 510423 - RNA, 19 nt, Homo sapiens
  misc_RNA (1)...(19): siRNA sense strand
gaaggcaauggcacaguca

SEQ ID NO: 510424 - RNA, 19 nt, Homo sapiens
  misc_RNA (1)...(19): siRNA sense strand
uccaauggcugcaucaacu

SEQ ID NO: 510425 - RNA, 19 nt, Homo sapiens
  misc_RNA (1)...(19): siRNA sense strand
ccaauggcugcaucaacua

SEQ ID NO: 510426 - RNA, 19 nt, Homo sapiens
  misc_RNA (1)...(19): siRNA sense strand
caaugcagaggucaggaaa

SEQ ID NO: 510427 - RNA, 19 nt, Homo sapiens
  misc_RNA (1)...(19): siRNA sense strand
gaagagcugaaugccaaga

SEQ ID NO: 510428 - RNA, 19 nt, Homo sapiens
  misc_RNA (1)...(19): siRNA sense strand
uaagccaggucggugaugu

SEQ ID NO: 510429 - RNA, 19 nt, Homo sapiens
  misc_RNA (1)...(19): siRNA sense strand
aacaauuucugccuaugau

SEQ ID NO: 510430 - RNA, 19 nt, Homo sapiens
  misc_RNA (1)...(19): siRNA sense strand
ugaauucaaggaggcauuu

SEQ ID NO: 510431 - RNA, 19 nt, Homo sapiens
  misc_RNA (1)...(19): siRNA sense strand
ccuaugaagacuuuguuga

SEQ ID NO: 510432 - RNA, 19 nt, Homo sapiens
  misc_RNA (1)...(19): siRNA sense strand
ccaaugcagaggucaggaa

SEQ ID NO: 510433 - RNA, 19 nt, Homo sapiens
  misc_RNA (1)...(19): siRNA sense strand
gcaucaacuacgaagcuuu

SEQ ID NO: 510434 - RNA, 19 nt, Homo sapiens
  misc_RNA (1)...(19): siRNA sense strand
gaccaggccaccuaugaag

SEQ ID NO: 510435 - RNA, 19 nt, Homo sapiens
  misc_RNA (1)...(19): siRNA sense strand
caggaaaguucugggaaac

SEQ ID NO: 510436 - RNA, 19 nt, Homo sapiens
  misc_RNA (1)...(19): siRNA sense strand
aaagaugaaagaggaagaa

SEQ ID NO: 510437 - RNA, 19 nt, Homo sapiens
  misc_RNA (1)...(19): siRNA sense strand
agucaugggugcugaacuc

SEQ ID NO: 510438 - RNA, 19 nt, Homo sapiens
  misc_RNA (1)...(19): siRNA sense strand
ugaacaauuucugccuaug

SEQ ID NO: 510439 - RNA, 19 nt, Homo sapiens
  misc_RNA (1)...(19): siRNA sense strand
uugaacaauuucugccuau

SEQ ID NO: 510440 - RNA, 19 nt, Homo sapiens
  misc_RNA (1)...(19): siRNA sense strand
ggucaagaagacuccaaug

SEQ ID NO: 510441 - RNA, 19 nt, Homo sapiens
  misc_RNA (1)...(19): siRNA sense strand
ugacagaacaggugauucc

SEQ ID NO: 510442 - RNA, 19 nt, Homo sapiens
  misc_RNA (1)...(19): siRNA sense strand
augcagaggucaggaaagu

SEQ ID NO: 510443 - RNA, 19 nt, Homo sapiens
  misc_RNA (1)...(19): siRNA sense strand
ccuaugaugcaagccauuu

SEQ ID NO: 510444 - RNA, 19 nt, Homo sapiens
  misc_RNA (1)...(19): siRNA sense strand
agaaguggaagcccugaug

SEQ ID NO: 510445 - RNA, 19 nt, Homo sapiens
  misc_RNA (1)...(19): siRNA sense strand
caaggaccaggccaccuau

SEQ ID NO: 510446 - RNA, 19 nt, Homo sapiens
  misc_RNA (1)...(19): siRNA sense strand
ccacccugcugcucucuuu

SEQ ID NO: 510447 - RNA, 19 nt, Homo sapiens
  misc_RNA (1)...(19): siRNA sense strand
ggauggcucuguggacuuc

SEQ ID NO: 510448 - RNA, 19 nt, Homo sapiens
  misc_RNA (1)...(19): siRNA sense strand
guguagaccugguggacuu

SEQ ID NO: 510449 - RNA, 19 nt, Homo sapiens
  misc_RNA (1)...(19): siRNA sense strand
ccagcgagcuccguguaga

SEQ ID NO: 510450 - RNA, 19 nt, Homo sapiens
  misc_RNA (1)...(19): siRNA sense strand
acuaccaguuugcuaagua

SEQ ID NO: 510451 - RNA, 19 nt, Homo sapiens
  misc_RNA (1)...(19): siRNA sense strand
ccaguuugcuaaguacaga

SEQ ID NO: 510452 - RNA, 19 nt, Homo sapiens
  misc_RNA (1)...(19): siRNA sense strand
ccgacgaggcggagaagua

SEQ ID NO: 510453 - RNA, 19 nt, Homo sapiens
  misc_RNA (1)...(19): siRNA sense strand
gcuaaguacagaucauuca

SEQ ID NO: 510454 - RNA, 19 nt, Homo sapiens
  misc_RNA (1)...(19): siRNA sense strand
ggacuuugaggacaacuac

SEQ ID NO: 510455 - RNA, 19 nt, Homo sapiens
  misc_RNA (1)...(19): siRNA sense strand
ggacugggccacguacaag

SEQ ID NO: 510456 - RNA, 19 nt, Homo sapiens
  misc_RNA (1)...(19): siRNA sense strand
ugacugugcucugugacau

SEQ ID NO: 510457 - RNA, 19 nt, Homo sapiens
  misc_RNA (1)...(19): siRNA sense strand
gggacugggccacguacaa

SEQ ID NO: 510458 - RNA, 19 nt, Homo sapiens
  misc_RNA (1)...(19): siRNA sense strand
uagaccugguggacuuuga

SEQ ID NO: 510459 - RNA, 19 nt, Homo sapiens
  misc_RNA (1)...(19): siRNA sense strand
gcggcuggcacaccaucua

SEQ ID NO: 510460 - RNA, 19 nt, Homo sapiens
  misc_RNA (1)...(19): siRNA sense strand
cuaaguacagaucauucaa

SEQ ID NO: 510461 - RNA, 19 nt, Homo sapiens
  misc_RNA (1)...(19): siRNA sense strand
uaaguacagaucauucaag

SEQ ID NO: 510462 - RNA, 19 nt, Homo sapiens
  misc_RNA (1)...(19): siRNA sense strand
ccacccugcugcucucuuu

SEQ ID NO: 510463 - RNA, 19 nt, Homo sapiens
  misc_RNA (1)...(19): siRNA sense strand
ggauggcucuguggacuuc

SEQ ID NO: 510464 - RNA, 19 nt, Homo sapiens
  misc_RNA (1)...(19): siRNA sense strand
guguagaccugguggacuu

SEQ ID NO: 510465 - RNA, 19 nt, Homo sapiens
  misc_RNA (1)...(19): siRNA sense strand
ccagcgagcuccguguaga

SEQ ID NO: 510466 - RNA, 19 nt, Homo sapiens
  misc_RNA (1)...(19): siRNA sense strand
acuaccaguuugcuaagua

SEQ ID NO: 510467 - RNA, 19 nt, Homo sapiens
  misc_RNA (1)...(19): siRNA sense strand
ccaguuugcuaaguacaga

SEQ ID NO: 510468 - RNA, 19 nt, Homo sapiens
  misc_RNA (1)...(19): siRNA sense strand
ccgacgaggcggagaagua

SEQ ID NO: 510469 - RNA, 19 nt, Homo sapiens
  misc_RNA (1)...(19): siRNA sense strand
gcuaaguacagaucauuca

SEQ ID NO: 510470 - RNA, 19 nt, Homo sapiens
  misc_RNA (1)...(19): siRNA sense strand
ggacuuugaggacaacuac

SEQ ID NO: 510471 - RNA, 19 nt, Homo sapiens
  misc_RNA (1)...(19): siRNA sense strand
ggacugggccacguacaag

SEQ ID NO: 510472 - RNA, 19 nt, Homo sapiens
  misc_RNA (1)...(19): siRNA sense strand
ugacugugcucugugacau

SEQ ID NO: 510473 - RNA, 19 nt, Homo sapiens
  misc_RNA (1)...(19): siRNA sense strand
gggacugggccacguacaa

SEQ ID NO: 510474 - RNA, 19 nt, Homo sapiens
  misc_RNA (1)...(19): siRNA sense strand
uagaccugguggacuuuga

SEQ ID NO: 510475 - RNA, 19 nt, Homo sapiens
  misc_RNA (1)...(19): siRNA sense strand
gcggcuggcacaccaucua

SEQ ID NO: 510476 - RNA, 19 nt, Homo sapiens
  misc_RNA (1)...(19): siRNA sense strand
cuaaguacagaucauucaa

SEQ ID NO: 510477 - RNA, 19 nt, Homo sapiens
  misc_RNA (1)...(19): siRNA sense strand
uaaguacagaucauucaag

SEQ ID NO: 510478 - RNA, 19 nt, Homo sapiens
  misc_RNA (1)...(19): siRNA sense strand
ccacccugcugcucucuuu

SEQ ID NO: 510479 - RNA, 19 nt, Homo sapiens
  misc_RNA (1)...(19): siRNA sense strand
ugacugugcucugugacau

SEQ ID NO: 510480 - RNA, 19 nt, Homo sapiens
  misc_RNA (1)...(19): siRNA sense strand
gcggcuggcacaccaucua

SEQ ID NO: 510481 - RNA, 19 nt, Homo sapiens
  misc_RNA (1)...(19): siRNA sense strand
ccacccugcugcucucuuu

SEQ ID NO: 510482 - RNA, 19 nt, Homo sapiens
  misc_RNA (1)...(19): siRNA sense strand
ccacccugcugcucucuuu

SEQ ID NO: 510483 - RNA, 19 nt, Homo sapiens
  misc_RNA (1)...(19): siRNA sense strand
ggauggcucuguggacuuc

SEQ ID NO: 510484 - RNA, 19 nt, Homo sapiens
  misc_RNA (1)...(19): siRNA sense strand
guguagaccugguggacuu

SEQ ID NO: 510485 - RNA, 19 nt, Homo sapiens
  misc_RNA (1)...(19): siRNA sense strand
ccagcgagcuccguguaga

SEQ ID NO: 510486 - RNA, 19 nt, Homo sapiens
  misc_RNA (1)...(19): siRNA sense strand
acuaccaguuugcuaagua

SEQ ID NO: 510487 - RNA, 19 nt, Homo sapiens
  misc_RNA (1)...(19): siRNA sense strand
ccaguuugcuaaguacaga

SEQ ID NO: 510488 - RNA, 19 nt, Homo sapiens
  misc_RNA (1)...(19): siRNA sense strand
ccgacgaggcggagaagua

SEQ ID NO: 510489 - RNA, 19 nt, Homo sapiens
  misc_RNA (1)...(19): siRNA sense strand
gcuaaguacagaucauuca

SEQ ID NO: 510490 - RNA, 19 nt, Homo sapiens
  misc_RNA (1)...(19): siRNA sense strand
ggacuuugaggacaacuac

SEQ ID NO: 510491 - RNA, 19 nt, Homo sapiens
  misc_RNA (1)...(19): siRNA sense strand
ggacugggccacguacaag

SEQ ID NO: 510492 - RNA, 19 nt, Homo sapiens
  misc_RNA (1)...(19): siRNA sense strand
ugacugugcucugugacau

SEQ ID NO: 510493 - RNA, 19 nt, Homo sapiens
  misc_RNA (1)...(19): siRNA sense strand
gggacugggccacguacaa

SEQ ID NO: 510494 - RNA, 19 nt, Homo sapiens
  misc_RNA (1)...(19): siRNA sense strand
uagaccugguggacuuuga

SEQ ID NO: 510495 - RNA, 19 nt, Homo sapiens
  misc_RNA (1)...(19): siRNA sense strand
gcggcuggcacaccaucua

SEQ ID NO: 510496 - RNA, 19 nt, Homo sapiens
  misc_RNA (1)...(19): siRNA sense strand
cuaaguacagaucauucaa

SEQ ID NO: 510497 - RNA, 19 nt, Homo sapiens
  misc_RNA (1)...(19): siRNA sense strand
uaaguacagaucauucaag

SEQ ID NO: 510498 - RNA, 19 nt, Homo sapiens
  misc_RNA (1)...(19): siRNA sense strand
ccacccugcugcucucuuu

SEQ ID NO: 510499 - RNA, 19 nt, Homo sapiens
  misc_RNA (1)...(19): siRNA sense strand
ggauggcucuguggacuuc

SEQ ID NO: 510500 - RNA, 19 nt, Homo sapiens
  misc_RNA (1)...(19): siRNA sense strand
guguagaccugguggacuu

SEQ ID NO: 510501 - RNA, 19 nt, Homo sapiens
  misc_RNA (1)...(19): siRNA sense strand
ccagcgagcuccguguaga

SEQ ID NO: 510502 - RNA, 19 nt, Homo sapiens
  misc_RNA (1)...(19): siRNA sense strand
acuaccaguuugcuaagua

SEQ ID NO: 510503 - RNA, 19 nt, Homo sapiens
  misc_RNA (1)...(19): siRNA sense strand
ccaguuugcuaaguacaga

SEQ ID NO: 510504 - RNA, 19 nt, Homo sapiens
  misc_RNA (1)...(19): siRNA sense strand
ccgacgaggcggagaagua

SEQ ID NO: 510505 - RNA, 19 nt, Homo sapiens
  misc_RNA (1)...(19): siRNA sense strand
gcuaaguacagaucauuca

SEQ ID NO: 510506 - RNA, 19 nt, Homo sapiens
  misc_RNA (1)...(19): siRNA sense strand
ggacuuugaggacaacuac

SEQ ID NO: 510507 - RNA, 19 nt, Homo sapiens
  misc_RNA (1)...(19): siRNA sense strand
ggacugggccacguacaag

SEQ ID NO: 510508 - RNA, 19 nt, Homo sapiens
  misc_RNA (1)...(19): siRNA sense strand
ugacugugcucugugacau

SEQ ID NO: 510509 - RNA, 19 nt, Homo sapiens
  misc_RNA (1)...(19): siRNA sense strand
gggacugggccacguacaa

SEQ ID NO: 510510 - RNA, 19 nt, Homo sapiens
  misc_RNA (1)...(19): siRNA sense strand
uagaccugguggacuuuga

SEQ ID NO: 510511 - RNA, 19 nt, Homo sapiens
  misc_RNA (1)...(19): siRNA sense strand
gcggcuggcacaccaucua

SEQ ID NO: 510512 - RNA, 19 nt, Homo sapiens
  misc_RNA (1)...(19): siRNA sense strand
cuaaguacagaucauucaa

SEQ ID NO: 510513 - RNA, 19 nt, Homo sapiens
  misc_RNA (1)...(19): siRNA sense strand
uaaguacagaucauucaag

SEQ ID NO: 510514 - RNA, 19 nt, Homo sapiens
  misc_RNA (1)...(19): siRNA sense strand
ccacccugcugcucucuuu

SEQ ID NO: 510515 - RNA, 19 nt, Homo sapiens
  misc_RNA (1)...(19): siRNA sense strand
ugacugugcucugugacau

SEQ ID NO: 510516 - RNA, 19 nt, Homo sapiens
  misc_RNA (1)...(19): siRNA sense strand
gcggcuggcacaccaucua

SEQ ID NO: 510517 - RNA, 19 nt, Homo sapiens
  misc_RNA (1)...(19): siRNA sense strand
ccacccugcugcucucuuu

SEQ ID NO: 510518 - RNA, 19 nt, Homo sapiens
  misc_RNA (1)...(19): siRNA sense strand
gaacauggauccaaugaca

SEQ ID NO: 510519 - RNA, 19 nt, Homo sapiens
  misc_RNA (1)...(19): siRNA sense strand
gaacaagccuaacaugaau

SEQ ID NO: 510520 - RNA, 19 nt, Homo sapiens
  misc_RNA (1)...(19): siRNA sense strand
ccaaagauguggagaaugg

SEQ ID NO: 510521 - RNA, 19 nt, Homo sapiens
  misc_RNA (1)...(19): siRNA sense strand
gagaauggagggaaagaua

SEQ ID NO: 510522 - RNA, 19 nt, Homo sapiens
  misc_RNA (1)...(19): siRNA sense strand
gcaggaaccucccagaaca

SEQ ID NO: 510523 - RNA, 19 nt, Homo sapiens
  misc_RNA (1)...(19): siRNA sense strand
cuacauacacucuggcuua

SEQ ID NO: 510524 - RNA, 19 nt, Homo sapiens
  misc_RNA (1)...(19): siRNA sense strand
gaugggcaguuuaagcuuu

SEQ ID NO: 510525 - RNA, 19 nt, Homo sapiens
  misc_RNA (1)...(19): siRNA sense strand
cauacacucuggcuuauau

SEQ ID NO: 510526 - RNA, 19 nt, Homo sapiens
  misc_RNA (1)...(19): siRNA sense strand
caccaucugucaucaaauu

SEQ ID NO: 510527 - RNA, 19 nt, Homo sapiens
  misc_RNA (1)...(19): siRNA sense strand
cauuuacucucaacucuuu

SEQ ID NO: 510528 - RNA, 19 nt, Homo sapiens
  misc_RNA (1)...(19): siRNA sense strand
ccgagaaacuggcagagaa

SEQ ID NO: 510529 - RNA, 19 nt, Homo sapiens
  misc_RNA (1)...(19): siRNA sense strand
gauucagucuugcuagaaa

SEQ ID NO: 510530 - RNA, 19 nt, Homo sapiens
  misc_RNA (1)...(19): siRNA sense strand
acacagacauugauucagu

SEQ ID NO: 510531 - RNA, 19 nt, Homo sapiens
  misc_RNA (1)...(19): siRNA sense strand
aagaaacuauccaagcuuu

SEQ ID NO: 510532 - RNA, 19 nt, Homo sapiens
  misc_RNA (1)...(19): siRNA sense strand
ccucagauacuauuaugua

SEQ ID NO: 510533 - RNA, 19 nt, Homo sapiens
  misc_RNA (1)...(19): siRNA sense strand
gagggugacugugaaaguu

SEQ ID NO: 510534 - RNA, 19 nt, Homo sapiens
  misc_RNA (1)...(19): siRNA sense strand
gcagaagccucagaacaag

SEQ ID NO: 510535 - RNA, 19 nt, Homo sapiens
  misc_RNA (1)...(19): siRNA sense strand
ccaaguauuucuccaucuu

SEQ ID NO: 510536 - RNA, 19 nt, Homo sapiens
  misc_RNA (1)...(19): siRNA sense strand
gaauggagggaaagauaaa

SEQ ID NO: 510537 - RNA, 19 nt, Homo sapiens
  misc_RNA (1)...(19): siRNA sense strand
gggugacugugaaaguuua

SEQ ID NO: 510538 - RNA, 19 nt, Homo sapiens
  misc_RNA (1)...(19): siRNA sense strand
acaagcacaugaucuguug

SEQ ID NO: 510539 - RNA, 19 nt, Homo sapiens
  misc_RNA (1)...(19): siRNA sense strand
gaagaaacuauccaagcuu

SEQ ID NO: 510540 - RNA, 19 nt, Homo sapiens
  misc_RNA (1)...(19): siRNA sense strand
agaacaagccuaacaugaa

SEQ ID NO: 510541 - RNA, 19 nt, Homo sapiens
  misc_RNA (1)...(19): siRNA sense strand
gauaaagacugagaaucca

SEQ ID NO: 510542 - RNA, 19 nt, Homo sapiens
  misc_RNA (1)...(19): siRNA sense strand
gaacuccuccaauguaaag

SEQ ID NO: 510543 - RNA, 19 nt, Homo sapiens
  misc_RNA (1)...(19): siRNA sense strand
cagcagcaguuccaaagau

SEQ ID NO: 510544 - RNA, 19 nt, Homo sapiens
  misc_RNA (1)...(19): siRNA sense strand
ggauugagggugacuguga

SEQ ID NO: 510545 - RNA, 19 nt, Homo sapiens
  misc_RNA (1)...(19): siRNA sense strand
uagccgcaaugacuacaua

SEQ ID NO: 510546 - RNA, 19 nt, Homo sapiens
  misc_RNA (1)...(19): siRNA sense strand
agccuaacaugaauuauga

SEQ ID NO: 510547 - RNA, 19 nt, Homo sapiens
  misc_RNA (1)...(19): siRNA sense strand
cuaaugaugggcaguuuaa

SEQ ID NO: 510548 - RNA, 19 nt, Homo sapiens
  misc_RNA (1)...(19): siRNA sense strand
cacaccaucugucaucaaa

SEQ ID NO: 510549 - RNA, 19 nt, Homo sapiens
  misc_RNA (1)...(19): siRNA sense strand
gauugagggugacugugaa

SEQ ID NO: 510550 - RNA, 19 nt, Homo sapiens
  misc_RNA (1)...(19): siRNA sense strand
gcaagaacaagccuaacau

SEQ ID NO: 510551 - RNA, 19 nt, Homo sapiens
  misc_RNA (1)...(19): siRNA sense strand
cgacacagacauugauuca

SEQ ID NO: 510552 - RNA, 19 nt, Homo sapiens
  misc_RNA (1)...(19): siRNA sense strand
ggucagaaguuuguguaca

SEQ ID NO: 510553 - RNA, 19 nt, Homo sapiens
  misc_RNA (1)...(19): siRNA sense strand
acaagccuaacaugaauua

SEQ ID NO: 510554 - RNA, 19 nt, Homo sapiens
  misc_RNA (1)...(19): siRNA sense strand
gaacuuccagagaauuugu

SEQ ID NO: 510555 - RNA, 19 nt, Homo sapiens
  misc_RNA (1)...(19): siRNA sense strand
gaacaagcacaugaucugu

SEQ ID NO: 510556 - RNA, 19 nt, Homo sapiens
  misc_RNA (1)...(19): siRNA sense strand
gcccucagauacuauuaug

SEQ ID NO: 510557 - RNA, 19 nt, Homo sapiens
  misc_RNA (1)...(19): siRNA sense strand
gccgagcccucagauacua

SEQ ID NO: 510558 - RNA, 19 nt, Homo sapiens
  misc_RNA (1)...(19): siRNA sense strand
caagaccucuagccgcaau

SEQ ID NO: 510559 - RNA, 19 nt, Homo sapiens
  misc_RNA (1)...(19): siRNA sense strand
gaaccucccagaacaccuu

SEQ ID NO: 510560 - RNA, 19 nt, Homo sapiens
  misc_RNA (1)...(19): siRNA sense strand
agaagaaacuauccaagcu

SEQ ID NO: 510561 - RNA, 19 nt, Homo sapiens
  misc_RNA (1)...(19): siRNA sense strand
gagcccaucucucccuaca

SEQ ID NO: 510562 - RNA, 19 nt, Homo sapiens
  misc_RNA (1)...(19): siRNA sense strand
caagaacaagccuaacaug

SEQ ID NO: 510563 - RNA, 19 nt, Homo sapiens
  misc_RNA (1)...(19): siRNA sense strand
agacaucgacacagacauu

SEQ ID NO: 510564 - RNA, 19 nt, Homo sapiens
  misc_RNA (1)...(19): siRNA sense strand
caucugucaucaaauuugu

SEQ ID NO: 510565 - RNA, 19 nt, Homo sapiens
  misc_RNA (1)...(19): siRNA sense strand
cuaaagaccaggauucagu

SEQ ID NO: 510566 - RNA, 19 nt, Homo sapiens
  misc_RNA (1)...(19): siRNA sense strand
gaagucagcagcaguucca

SEQ ID NO: 510567 - RNA, 19 nt, Homo sapiens
  misc_RNA (1)...(19): siRNA sense strand
ccucagaacaagcacauga

SEQ ID NO: 510568 - RNA, 19 nt, Homo sapiens
  misc_RNA (1)...(19): siRNA sense strand
uguuggaccucuaaugaug

SEQ ID NO: 510569 - RNA, 19 nt, Homo sapiens
  misc_RNA (1)...(19): siRNA sense strand
cgagaaacuggcagagaaa

SEQ ID NO: 510570 - RNA, 19 nt, Homo sapiens
  misc_RNA (1)...(19): siRNA sense strand
uugaacuccuccaauguaa

SEQ ID NO: 510571 - RNA, 19 nt, Homo sapiens
  misc_RNA (1)...(19): siRNA sense strand
ucuuugaacuccuccaaug

SEQ ID NO: 510572 - RNA, 19 nt, Homo sapiens
  misc_RNA (1)...(19): siRNA sense strand
aagaacaagccuaacauga

SEQ ID NO: 510573 - RNA, 19 nt, Homo sapiens
  misc_RNA (1)...(19): siRNA sense strand
cuaacguaaugacugcuuu

SEQ ID NO: 510574 - RNA, 19 nt, Homo sapiens
  misc_RNA (1)...(19): siRNA sense strand
agaauggagggaaagauaa

SEQ ID NO: 510575 - RNA, 19 nt, Homo sapiens
  misc_RNA (1)...(19): siRNA sense strand
ugaauggucagaaguuugu

SEQ ID NO: 510576 - RNA, 19 nt, Homo sapiens
  misc_RNA (1)...(19): siRNA sense strand
ugcagaagccucagaacaa

SEQ ID NO: 510577 - RNA, 19 nt, Homo sapiens
  misc_RNA (1)...(19): siRNA sense strand
gcacccacccuugugauca

SEQ ID NO: 510578 - RNA, 19 nt, Homo sapiens
  misc_RNA (1)...(19): siRNA sense strand
gcugccaccauuucaauug

SEQ ID NO: 510579 - RNA, 19 nt, Homo sapiens
  misc_RNA (1)...(19): siRNA sense strand
acccagacaucgacacaga

SEQ ID NO: 510580 - RNA, 19 nt, Homo sapiens
  misc_RNA (1)...(19): siRNA sense strand
guauuucuccaucuucaga

SEQ ID NO: 510581 - RNA, 19 nt, Homo sapiens
  misc_RNA (1)...(19): siRNA sense strand
ucuguuggaccucuaauga

SEQ ID NO: 510582 - RNA, 19 nt, Homo sapiens
  misc_RNA (1)...(19): siRNA sense strand
ggauucagucuugcuagaa

SEQ ID NO: 510583 - RNA, 19 nt, Homo sapiens
  misc_RNA (1)...(19): siRNA sense strand
gcuagaaaaggacaaagua

SEQ ID NO: 510584 - RNA, 19 nt, Homo sapiens
  misc_RNA (1)...(19): siRNA sense strand
cccuacagcuucucuuaca

SEQ ID NO: 510585 - RNA, 19 nt, Homo sapiens
  misc_RNA (1)...(19): siRNA sense strand
ucaucaagauccaagaaac

SEQ ID NO: 510586 - RNA, 19 nt, Homo sapiens
  misc_RNA (1)...(19): siRNA sense strand
caugaauuaugacaaacuc

SEQ ID NO: 510587 - RNA, 19 nt, Homo sapiens
  misc_RNA (1)...(19): siRNA sense strand
uacauacacucuggcuuau

SEQ ID NO: 510588 - RNA, 19 nt, Homo sapiens
  misc_RNA (1)...(19): siRNA sense strand
gaauccagccgagaaacug

SEQ ID NO: 510589 - RNA, 19 nt, Homo sapiens
  misc_RNA (1)...(19): siRNA sense strand
uuugaacuccuccaaugua

SEQ ID NO: 510590 - RNA, 19 nt, Homo sapiens
  misc_RNA (1)...(19): siRNA sense strand
cagccgagcccucagauac

SEQ ID NO: 510591 - RNA, 19 nt, Homo sapiens
  misc_RNA (1)...(19): siRNA sense strand
agugaauggucagaaguuu

SEQ ID NO: 510592 - RNA, 19 nt, Homo sapiens
  misc_RNA (1)...(19): siRNA sense strand
ugagaauccagccgagaaa

SEQ ID NO: 510593 - RNA, 19 nt, Homo sapiens
  misc_RNA (1)...(19): siRNA sense strand
cacucuggcuuauauucuu

SEQ ID NO: 510594 - RNA, 19 nt, Homo sapiens
  misc_RNA (1)...(19): siRNA sense strand
ucuaaugaugggcaguuua

SEQ ID NO: 510595 - RNA, 19 nt, Homo sapiens
  misc_RNA (1)...(19): siRNA sense strand
ugauaaagacugagaaucc

SEQ ID NO: 510596 - RNA, 19 nt, Homo sapiens
  misc_RNA (1)...(19): siRNA sense strand
gagcccacaccaucuguca

SEQ ID NO: 510597 - RNA, 19 nt, Homo sapiens
  misc_RNA (1)...(19): siRNA sense strand
gagcccucagauacuauua

SEQ ID NO: 510598 - RNA, 19 nt, Homo sapiens
  misc_RNA (1)...(19): siRNA sense strand
gugaauggucagaaguuug

SEQ ID NO: 510599 - RNA, 19 nt, Homo sapiens
  misc_RNA (1)...(19): siRNA sense strand
gagccuaaagaccaggauu

SEQ ID NO: 510600 - RNA, 19 nt, Homo sapiens
  misc_RNA (1)...(19): siRNA sense strand
ccacccauuucguccauac

SEQ ID NO: 510601 - RNA, 19 nt, Homo sapiens
  misc_RNA (1)...(19): siRNA sense strand
aagccuaacaugaauuaug

SEQ ID NO: 510602 - RNA, 19 nt, Homo sapiens
  misc_RNA (1)...(19): siRNA sense strand
agaacaagcacaugaucug

SEQ ID NO: 510603 - RNA, 19 nt, Homo sapiens
  misc_RNA (1)...(19): siRNA sense strand
uguggagaauggagggaaa

SEQ ID NO: 510604 - RNA, 19 nt, Homo sapiens
  misc_RNA (1)...(19): siRNA sense strand
ccucuagccgcaaugacua

SEQ ID NO: 510605 - RNA, 19 nt, Homo sapiens
  misc_RNA (1)...(19): siRNA sense strand
ccaggauucagucuugcua

SEQ ID NO: 510606 - RNA, 19 nt, Homo sapiens
  misc_RNA (1)...(19): siRNA sense strand
aaguauuucuccaucuuca

SEQ ID NO: 510607 - RNA, 19 nt, Homo sapiens
  misc_RNA (1)...(19): siRNA sense strand
ccaucugucaucaaauuug

SEQ ID NO: 510608 - RNA, 19 nt, Homo sapiens
  misc_RNA (1)...(19): siRNA sense strand
gcagcaguuccaaagaugu

SEQ ID NO: 510609 - RNA, 19 nt, Homo sapiens
  misc_RNA (1)...(19): siRNA sense strand
gauccaagaaacccaaagg

SEQ ID NO: 510610 - RNA, 19 nt, Homo sapiens
  misc_RNA (1)...(19): siRNA sense strand
aggauucagucuugcuaga

SEQ ID NO: 510611 - RNA, 19 nt, Homo sapiens
  misc_RNA (1)...(19): siRNA sense strand
uugauucaguggcuucuca

SEQ ID NO: 510612 - RNA, 19 nt, Homo sapiens
  misc_RNA (1)...(19): siRNA sense strand
caaguauuucuccaucuuc

SEQ ID NO: 510613 - RNA, 19 nt, Homo sapiens
  misc_RNA (1)...(19): siRNA sense strand
ggagaauggagggaaagau

SEQ ID NO: 510614 - RNA, 19 nt, Homo sapiens
  misc_RNA (1)...(19): siRNA sense strand
gcccacaccaucugucauc

SEQ ID NO: 510615 - RNA, 19 nt, Homo sapiens
  misc_RNA (1)...(19): siRNA sense strand
caucgacacagacauugau

SEQ ID NO: 510616 - RNA, 19 nt, Homo sapiens
  misc_RNA (1)...(19): siRNA sense strand
ccaccacaccacccauuuc

SEQ ID NO: 510617 - RNA, 19 nt, Homo sapiens
  misc_RNA (1)...(19): siRNA sense strand
gccaccacaccacccauuu

SEQ ID NO: 510618 - RNA, 19 nt, Homo sapiens
  misc_RNA (1)...(19): siRNA sense strand
gaacauggauccaaugaca

SEQ ID NO: 510619 - RNA, 19 nt, Homo sapiens
  misc_RNA (1)...(19): siRNA sense strand
gaacaagccuaacaugaau

SEQ ID NO: 510620 - RNA, 19 nt, Homo sapiens
  misc_RNA (1)...(19): siRNA sense strand
ccaaagauguggagaaugg

SEQ ID NO: 510621 - RNA, 19 nt, Homo sapiens
  misc_RNA (1)...(19): siRNA sense strand
gagaauggagggaaagaua

SEQ ID NO: 510622 - RNA, 19 nt, Homo sapiens
  misc_RNA (1)...(19): siRNA sense strand
gcaggaaccucccagaaca

SEQ ID NO: 510623 - RNA, 19 nt, Homo sapiens
  misc_RNA (1)...(19): siRNA sense strand
cuacauacacucuggcuua

SEQ ID NO: 510624 - RNA, 19 nt, Homo sapiens
  misc_RNA (1)...(19): siRNA sense strand
gaugggcaguuuaagcuuu

SEQ ID NO: 510625 - RNA, 19 nt, Homo sapiens
  misc_RNA (1)...(19): siRNA sense strand
cauacacucuggcuuauau

SEQ ID NO: 510626 - RNA, 19 nt, Homo sapiens
  misc_RNA (1)...(19): siRNA sense strand
caccaucugucaucaaauu

SEQ ID NO: 510627 - RNA, 19 nt, Homo sapiens
  misc_RNA (1)...(19): siRNA sense strand
cauuuacucucaacucuuu

SEQ ID NO: 510628 - RNA, 19 nt, Homo sapiens
  misc_RNA (1)...(19): siRNA sense strand
ccgagaaacuggcagagaa

SEQ ID NO: 510629 - RNA, 19 nt, Homo sapiens
  misc_RNA (1)...(19): siRNA sense strand
gauucagucuugcuagaaa

SEQ ID NO: 510630 - RNA, 19 nt, Homo sapiens
  misc_RNA (1)...(19): siRNA sense strand
acacagacauugauucagu

SEQ ID NO: 510631 - RNA, 19 nt, Homo sapiens
  misc_RNA (1)...(19): siRNA sense strand
aagaaacuauccaagcuuu

SEQ ID NO: 510632 - RNA, 19 nt, Homo sapiens
  misc_RNA (1)...(19): siRNA sense strand
ccucagauacuauuaugua

SEQ ID NO: 510633 - RNA, 19 nt, Homo sapiens
  misc_RNA (1)...(19): siRNA sense strand
gagggugacugugaaaguu

SEQ ID NO: 510634 - RNA, 19 nt, Homo sapiens
  misc_RNA (1)...(19): siRNA sense strand
gcagaagccucagaacaag

SEQ ID NO: 510635 - RNA, 19 nt, Homo sapiens
  misc_RNA (1)...(19): siRNA sense strand
ccaaguauuucuccaucuu

SEQ ID NO: 510636 - RNA, 19 nt, Homo sapiens
  misc_RNA (1)...(19): siRNA sense strand
gaauggagggaaagauaaa

SEQ ID NO: 510637 - RNA, 19 nt, Homo sapiens
  misc_RNA (1)...(19): siRNA sense strand
gggugacugugaaaguuua

SEQ ID NO: 510638 - RNA, 19 nt, Homo sapiens
  misc_RNA (1)...(19): siRNA sense strand
acaagcacaugaucuguug

SEQ ID NO: 510639 - RNA, 19 nt, Homo sapiens
  misc_RNA (1)...(19): siRNA sense strand
gaagaaacuauccaagcuu

SEQ ID NO: 510640 - RNA, 19 nt, Homo sapiens
  misc_RNA (1)...(19): siRNA sense strand
agaacaagccuaacaugaa

SEQ ID NO: 510641 - RNA, 19 nt, Homo sapiens
  misc_RNA (1)...(19): siRNA sense strand
gauaaagacugagaaucca

SEQ ID NO: 510642 - RNA, 19 nt, Homo sapiens
  misc_RNA (1)...(19): siRNA sense strand
gaacuccuccaauguaaag

SEQ ID NO: 510643 - RNA, 19 nt, Homo sapiens
  misc_RNA (1)...(19): siRNA sense strand
cagcagcaguuccaaagau

SEQ ID NO: 510644 - RNA, 19 nt, Homo sapiens
  misc_RNA (1)...(19): siRNA sense strand
ggauugagggugacuguga

SEQ ID NO: 510645 - RNA, 19 nt, Homo sapiens
  misc_RNA (1)...(19): siRNA sense strand
uagccgcaaugacuacaua

SEQ ID NO: 510646 - RNA, 19 nt, Homo sapiens
  misc_RNA (1)...(19): siRNA sense strand
agccuaacaugaauuauga

SEQ ID NO: 510647 - RNA, 19 nt, Homo sapiens
  misc_RNA (1)...(19): siRNA sense strand
cuaaugaugggcaguuuaa

SEQ ID NO: 510648 - RNA, 19 nt, Homo sapiens
  misc_RNA (1)...(19): siRNA sense strand
cacaccaucugucaucaaa

SEQ ID NO: 510649 - RNA, 19 nt, Homo sapiens
  misc_RNA (1)...(19): siRNA sense strand
gauugagggugacugugaa

SEQ ID NO: 510650 - RNA, 19 nt, Homo sapiens
  misc_RNA (1)...(19): siRNA sense strand
gcaagaacaagccuaacau

SEQ ID NO: 510651 - RNA, 19 nt, Homo sapiens
  misc_RNA (1)...(19): siRNA sense strand
cgacacagacauugauuca

SEQ ID NO: 510652 - RNA, 19 nt, Homo sapiens
  misc_RNA (1)...(19): siRNA sense strand
ggucagaaguuuguguaca

SEQ ID NO: 510653 - RNA, 19 nt, Homo sapiens
  misc_RNA (1)...(19): siRNA sense strand
acaagccuaacaugaauua

SEQ ID NO: 510654 - RNA, 19 nt, Homo sapiens
  misc_RNA (1)...(19): siRNA sense strand
gaacuuccagagaauuugu

SEQ ID NO: 510655 - RNA, 19 nt, Homo sapiens
  misc_RNA (1)...(19): siRNA sense strand
gaacaagcacaugaucugu

SEQ ID NO: 510656 - RNA, 19 nt, Homo sapiens
  misc_RNA (1)...(19): siRNA sense strand
gcccucagauacuauuaug

SEQ ID NO: 510657 - RNA, 19 nt, Homo sapiens
  misc_RNA (1)...(19): siRNA sense strand
gccgagcccucagauacua

SEQ ID NO: 510658 - RNA, 19 nt, Homo sapiens
  misc_RNA (1)...(19): siRNA sense strand
caagaccucuagccgcaau

SEQ ID NO: 510659 - RNA, 19 nt, Homo sapiens
  misc_RNA (1)...(19): siRNA sense strand
gaaccucccagaacaccuu

SEQ ID NO: 510660 - RNA, 19 nt, Homo sapiens
  misc_RNA (1)...(19): siRNA sense strand
agaagaaacuauccaagcu

SEQ ID NO: 510661 - RNA, 19 nt, Homo sapiens
  misc_RNA (1)...(19): siRNA sense strand
gagcccaucucucccuaca

SEQ ID NO: 510662 - RNA, 19 nt, Homo sapiens
  misc_RNA (1)...(19): siRNA sense strand
caagaacaagccuaacaug

SEQ ID NO: 510663 - RNA, 19 nt, Homo sapiens
  misc_RNA (1)...(19): siRNA sense strand
agacaucgacacagacauu

SEQ ID NO: 510664 - RNA, 19 nt, Homo sapiens
  misc_RNA (1)...(19): siRNA sense strand
caucugucaucaaauuugu

SEQ ID NO: 510665 - RNA, 19 nt, Homo sapiens
  misc_RNA (1)...(19): siRNA sense strand
cuaaagaccaggauucagu

SEQ ID NO: 510666 - RNA, 19 nt, Homo sapiens
  misc_RNA (1)...(19): siRNA sense strand
gaagucagcagcaguucca

SEQ ID NO: 510667 - RNA, 19 nt, Homo sapiens
  misc_RNA (1)...(19): siRNA sense strand
ccucagaacaagcacauga

SEQ ID NO: 510668 - RNA, 19 nt, Homo sapiens
  misc_RNA (1)...(19): siRNA sense strand
uguuggaccucuaaugaug

SEQ ID NO: 510669 - RNA, 19 nt, Homo sapiens
  misc_RNA (1)...(19): siRNA sense strand
cgagaaacuggcagagaaa

SEQ ID NO: 510670 - RNA, 19 nt, Homo sapiens
  misc_RNA (1)...(19): siRNA sense strand
uugaacuccuccaauguaa

SEQ ID NO: 510671 - RNA, 19 nt, Homo sapiens
  misc_RNA (1)...(19): siRNA sense strand
ucuuugaacuccuccaaug

SEQ ID NO: 510672 - RNA, 19 nt, Homo sapiens
  misc_RNA (1)...(19): siRNA sense strand
aagaacaagccuaacauga

SEQ ID NO: 510673 - RNA, 19 nt, Homo sapiens
  misc_RNA (1)...(19): siRNA sense strand
cuaacguaaugacugcuuu

SEQ ID NO: 510674 - RNA, 19 nt, Homo sapiens
  misc_RNA (1)...(19): siRNA sense strand
agaauggagggaaagauaa

SEQ ID NO: 510675 - RNA, 19 nt, Homo sapiens
  misc_RNA (1)...(19): siRNA sense strand
ugaauggucagaaguuugu

SEQ ID NO: 510676 - RNA, 19 nt, Homo sapiens
  misc_RNA (1)...(19): siRNA sense strand
ugcagaagccucagaacaa

SEQ ID NO: 510677 - RNA, 19 nt, Homo sapiens
  misc_RNA (1)...(19): siRNA sense strand
gcacccacccuugugauca

SEQ ID NO: 510678 - RNA, 19 nt, Homo sapiens
  misc_RNA (1)...(19): siRNA sense strand
gcugccaccauuucaauug

SEQ ID NO: 510679 - RNA, 19 nt, Homo sapiens
  misc_RNA (1)...(19): siRNA sense strand
acccagacaucgacacaga

SEQ ID NO: 510680 - RNA, 19 nt, Homo sapiens
  misc_RNA (1)...(19): siRNA sense strand
guauuucuccaucuucaga

SEQ ID NO: 510681 - RNA, 19 nt, Homo sapiens
  misc_RNA (1)...(19): siRNA sense strand
ucuguuggaccucuaauga

SEQ ID NO: 510682 - RNA, 19 nt, Homo sapiens
  misc_RNA (1)...(19): siRNA sense strand
ggauucagucuugcuagaa

SEQ ID NO: 510683 - RNA, 19 nt, Homo sapiens
  misc_RNA (1)...(19): siRNA sense strand
gcuagaaaaggacaaagua

SEQ ID NO: 510684 - RNA, 19 nt, Homo sapiens
  misc_RNA (1)...(19): siRNA sense strand
cccuacagcuucucuuaca

SEQ ID NO: 510685 - RNA, 19 nt, Homo sapiens
  misc_RNA (1)...(19): siRNA sense strand
ucaucaagauccaagaaac

SEQ ID NO: 510686 - RNA, 19 nt, Homo sapiens
  misc_RNA (1)...(19): siRNA sense strand
caugaauuaugacaaacuc

SEQ ID NO: 510687 - RNA, 19 nt, Homo sapiens
  misc_RNA (1)...(19): siRNA sense strand
uacauacacucuggcuuau

SEQ ID NO: 510688 - RNA, 19 nt, Homo sapiens
  misc_RNA (1)...(19): siRNA sense strand
gaauccagccgagaaacug

SEQ ID NO: 510689 - RNA, 19 nt, Homo sapiens
  misc_RNA (1)...(19): siRNA sense strand
uuugaacuccuccaaugua

SEQ ID NO: 510690 - RNA, 19 nt, Homo sapiens
  misc_RNA (1)...(19): siRNA sense strand
cagccgagcccucagauac

SEQ ID NO: 510691 - RNA, 19 nt, Homo sapiens
  misc_RNA (1)...(19): siRNA sense strand
agugaauggucagaaguuu

SEQ ID NO: 510692 - RNA, 19 nt, Homo sapiens
  misc_RNA (1)...(19): siRNA sense strand
ugagaauccagccgagaaa

SEQ ID NO: 510693 - RNA, 19 nt, Homo sapiens
  misc_RNA (1)...(19): siRNA sense strand
cacucuggcuuauauucuu

SEQ ID NO: 510694 - RNA, 19 nt, Homo sapiens
  misc_RNA (1)...(19): siRNA sense strand
ucuaaugaugggcaguuua

SEQ ID NO: 510695 - RNA, 19 nt, Homo sapiens
  misc_RNA (1)...(19): siRNA sense strand
ugauaaagacugagaaucc

SEQ ID NO: 510696 - RNA, 19 nt, Homo sapiens
  misc_RNA (1)...(19): siRNA sense strand
gagcccacaccaucuguca

SEQ ID NO: 510697 - RNA, 19 nt, Homo sapiens
  misc_RNA (1)...(19): siRNA sense strand
gagcccucagauacuauua

SEQ ID NO: 510698 - RNA, 19 nt, Homo sapiens
  misc_RNA (1)...(19): siRNA sense strand
gugaauggucagaaguuug

SEQ ID NO: 510699 - RNA, 19 nt, Homo sapiens
  misc_RNA (1)...(19): siRNA sense strand
gagccuaaagaccaggauu

SEQ ID NO: 510700 - RNA, 19 nt, Homo sapiens
  misc_RNA (1)...(19): siRNA sense strand
ccacccauuucguccauac

SEQ ID NO: 510701 - RNA, 19 nt, Homo sapiens
  misc_RNA (1)...(19): siRNA sense strand
aagccuaacaugaauuaug

SEQ ID NO: 510702 - RNA, 19 nt, Homo sapiens
  misc_RNA (1)...(19): siRNA sense strand
agaacaagcacaugaucug

SEQ ID NO: 510703 - RNA, 19 nt, Homo sapiens
  misc_RNA (1)...(19): siRNA sense strand
uguggagaauggagggaaa

SEQ ID NO: 510704 - RNA, 19 nt, Homo sapiens
  misc_RNA (1)...(19): siRNA sense strand
ccucuagccgcaaugacua

SEQ ID NO: 510705 - RNA, 19 nt, Homo sapiens
  misc_RNA (1)...(19): siRNA sense strand
ccaggauucagucuugcua

SEQ ID NO: 510706 - RNA, 19 nt, Homo sapiens
  misc_RNA (1)...(19): siRNA sense strand
aaguauuucuccaucuuca

SEQ ID NO: 510707 - RNA, 19 nt, Homo sapiens
  misc_RNA (1)...(19): siRNA sense strand
ccaucugucaucaaauuug

SEQ ID NO: 510708 - RNA, 19 nt, Homo sapiens
  misc_RNA (1)...(19): siRNA sense strand
gcagcaguuccaaagaugu

SEQ ID NO: 510709 - RNA, 19 nt, Homo sapiens
  misc_RNA (1)...(19): siRNA sense strand
gauccaagaaacccaaagg

SEQ ID NO: 510710 - RNA, 19 nt, Homo sapiens
  misc_RNA (1)...(19): siRNA sense strand
aggauucagucuugcuaga

SEQ ID NO: 510711 - RNA, 19 nt, Homo sapiens
  misc_RNA (1)...(19): siRNA sense strand
uugauucaguggcuucuca

SEQ ID NO: 510712 - RNA, 19 nt, Homo sapiens
  misc_RNA (1)...(19): siRNA sense strand
caaguauuucuccaucuuc

SEQ ID NO: 510713 - RNA, 19 nt, Homo sapiens
  misc_RNA (1)...(19): siRNA sense strand
ggagaauggagggaaagau

SEQ ID NO: 510714 - RNA, 19 nt, Homo sapiens
  misc_RNA (1)...(19): siRNA sense strand
gcccacaccaucugucauc

SEQ ID NO: 510715 - RNA, 19 nt, Homo sapiens
  misc_RNA (1)...(19): siRNA sense strand
caucgacacagacauugau

SEQ ID NO: 510716 - RNA, 19 nt, Homo sapiens
  misc_RNA (1)...(19): siRNA sense strand
ccaccacaccacccauuuc

SEQ ID NO: 510717 - RNA, 19 nt, Homo sapiens
  misc_RNA (1)...(19): siRNA sense strand
gccaccacaccacccauuu

SEQ ID NO: 510718 - RNA, 19 nt, Homo sapiens
  misc_RNA (1)...(19): siRNA sense strand
gcgagcaggacgcagagaa

SEQ ID NO: 510719 - RNA, 19 nt, Homo sapiens
  misc_RNA (1)...(19): siRNA sense strand
gagcaggacgcagagaaca

SEQ ID NO: 510720 - RNA, 19 nt, Homo sapiens
  misc_RNA (1)...(19): siRNA sense strand
gcaaagacucgagcuauga

SEQ ID NO: 510721 - RNA, 19 nt, Homo sapiens
  misc_RNA (1)...(19): siRNA sense strand
gcggagacuucaagaaaug

SEQ ID NO: 510722 - RNA, 19 nt, Homo sapiens
  misc_RNA (1)...(19): siRNA sense strand
cagcggagacuucaagaaa

SEQ ID NO: 510723 - RNA, 19 nt, Homo sapiens
  misc_RNA (1)...(19): siRNA sense strand
ucaguggacucaagaagug

SEQ ID NO: 510724 - RNA, 19 nt, Homo sapiens
  misc_RNA (1)...(19): siRNA sense strand
agggcaagcuucaguauga

SEQ ID NO: 510725 - RNA, 19 nt, Homo sapiens
  misc_RNA (1)...(19): siRNA sense strand
ccaggaguguggcagcuuu

SEQ ID NO: 510726 - RNA, 19 nt, Homo sapiens
  misc_RNA (1)...(19): siRNA sense strand
ggagagggaucggccauac

SEQ ID NO: 510727 - RNA, 19 nt, Homo sapiens
  misc_RNA (1)...(19): siRNA sense strand
ggcaagaccaguaugaaga

SEQ ID NO: 510728 - RNA, 19 nt, Homo sapiens
  misc_RNA (1)...(19): siRNA sense strand
gcgcucagauuacgaagac

SEQ ID NO: 510729 - RNA, 19 nt, Homo sapiens
  misc_RNA (1)...(19): siRNA sense strand
gcagcccuguggaguguga

SEQ ID NO: 510730 - RNA, 19 nt, Homo sapiens
  misc_RNA (1)...(19): siRNA sense strand
ucucaggacaguauaauau

SEQ ID NO: 510731 - RNA, 19 nt, Homo sapiens
  misc_RNA (1)...(19): siRNA sense strand
cuucauggccgacgacauu

SEQ ID NO: 510732 - RNA, 19 nt, Homo sapiens
  misc_RNA (1)...(19): siRNA sense strand
cagcagcccuguggagugu

SEQ ID NO: 510733 - RNA, 19 nt, Homo sapiens
  misc_RNA (1)...(19): siRNA sense strand
gauauggacacguuugaca

SEQ ID NO: 510734 - RNA, 19 nt, Homo sapiens
  misc_RNA (1)...(19): siRNA sense strand
ggauguauuccacuucaug

SEQ ID NO: 510735 - RNA, 19 nt, Homo sapiens
  misc_RNA (1)...(19): siRNA sense strand
aguaugagcugcaguacag

SEQ ID NO: 510736 - RNA, 19 nt, Homo sapiens
  misc_RNA (1)...(19): siRNA sense strand
gaccuucucaggacaguau

SEQ ID NO: 510737 - RNA, 19 nt, Homo sapiens
  misc_RNA (1)...(19): siRNA sense strand
cgcaaagacucgagcuaug

SEQ ID NO: 510738 - RNA, 19 nt, Homo sapiens
  misc_RNA (1)...(19): siRNA sense strand
ccacaggucggcccacaau

SEQ ID NO: 510739 - RNA, 19 nt, Homo sapiens
  misc_RNA (1)...(19): siRNA sense strand
gaucucaguggacucaaga

SEQ ID NO: 510740 - RNA, 19 nt, Homo sapiens
  misc_RNA (1)...(19): siRNA sense strand
ucuccuggcgcucagauua

SEQ ID NO: 510741 - RNA, 19 nt, Homo sapiens
  misc_RNA (1)...(19): siRNA sense strand
gcaagaccaguaugaagag

SEQ ID NO: 510742 - RNA, 19 nt, Homo sapiens
  misc_RNA (1)...(19): siRNA sense strand
ccugaagacccauccauug

SEQ ID NO: 510743 - RNA, 19 nt, Homo sapiens
  misc_RNA (1)...(19): siRNA sense strand
ucaggacaguauaauaucu

SEQ ID NO: 510744 - RNA, 19 nt, Homo sapiens
  misc_RNA (1)...(19): siRNA sense strand
ggucauuccuccgccacuu

SEQ ID NO: 510745 - RNA, 19 nt, Homo sapiens
  misc_RNA (1)...(19): siRNA sense strand
ccagcacgcucacccuuac

SEQ ID NO: 510746 - RNA, 19 nt, Homo sapiens
  misc_RNA (1)...(19): siRNA sense strand
gccuggauauggacacguu

SEQ ID NO: 510747 - RNA, 19 nt, Homo sapiens
  misc_RNA (1)...(19): siRNA sense strand
uggaggcuauggaagaaga

SEQ ID NO: 510748 - RNA, 19 nt, Homo sapiens
  misc_RNA (1)...(19): siRNA sense strand
gcugugaguccgaggagaa

SEQ ID NO: 510749 - RNA, 19 nt, Homo sapiens
  misc_RNA (1)...(19): siRNA sense strand
gacccagucagaggaguua

SEQ ID NO: 510750 - RNA, 19 nt, Homo sapiens
  misc_RNA (1)...(19): siRNA sense strand
ggucaucugcauccuggaa

SEQ ID NO: 510751 - RNA, 19 nt, Homo sapiens
  misc_RNA (1)...(19): siRNA sense strand
gcagcggagacuucaagaa

SEQ ID NO: 510752 - RNA, 19 nt, Homo sapiens
  misc_RNA (1)...(19): siRNA sense strand
agucagaggaguuaaagga

SEQ ID NO: 510753 - RNA, 19 nt, Homo sapiens
  misc_RNA (1)...(19): siRNA sense strand
ccgcaaagacucgagcuau

SEQ ID NO: 510754 - RNA, 19 nt, Homo sapiens
  misc_RNA (1)...(19): siRNA sense strand
uguggaggcuauggaagaa

SEQ ID NO: 510755 - RNA, 19 nt, Homo sapiens
  misc_RNA (1)...(19): siRNA sense strand
ugaagacccauccauugug

SEQ ID NO: 510756 - RNA, 19 nt, Homo sapiens
  misc_RNA (1)...(19): siRNA sense strand
gaagccuccuggacagacu

SEQ ID NO: 510757 - RNA, 19 nt, Homo sapiens
  misc_RNA (1)...(19): siRNA sense strand
cauacggccugguguccau

SEQ ID NO: 510758 - RNA, 19 nt, Homo sapiens
  misc_RNA (1)...(19): siRNA sense strand
cugaagacccauccauugu

SEQ ID NO: 510759 - RNA, 19 nt, Homo sapiens
  misc_RNA (1)...(19): siRNA sense strand
gccugaagacccauccauu

SEQ ID NO: 510760 - RNA, 19 nt, Homo sapiens
  misc_RNA (1)...(19): siRNA sense strand
gcccugagcgguucuucau

SEQ ID NO: 510761 - RNA, 19 nt, Homo sapiens
  misc_RNA (1)...(19): siRNA sense strand
gaggcuauggaagaagaua

SEQ ID NO: 510762 - RNA, 19 nt, Homo sapiens
  misc_RNA (1)...(19): siRNA sense strand
caccuacaccugccacaug

SEQ ID NO: 510763 - RNA, 19 nt, Homo sapiens
  misc_RNA (1)...(19): siRNA sense strand
caaagacucgagcuaugag

SEQ ID NO: 510764 - RNA, 19 nt, Homo sapiens
  misc_RNA (1)...(19): siRNA sense strand
ucaucugcauccuggaaau

SEQ ID NO: 510765 - RNA, 19 nt, Homo sapiens
  misc_RNA (1)...(19): siRNA sense strand
gcaaagacucgagcuauga

SEQ ID NO: 510766 - RNA, 19 nt, Homo sapiens
  misc_RNA (1)...(19): siRNA sense strand
gcggagacuucaagaaaug

SEQ ID NO: 510767 - RNA, 19 nt, Homo sapiens
  misc_RNA (1)...(19): siRNA sense strand
cagcggagacuucaagaaa

SEQ ID NO: 510768 - RNA, 19 nt, Homo sapiens
  misc_RNA (1)...(19): siRNA sense strand
ucaguggacucaagaagug

SEQ ID NO: 510769 - RNA, 19 nt, Homo sapiens
  misc_RNA (1)...(19): siRNA sense strand
agggcaagcuucaguauga

SEQ ID NO: 510770 - RNA, 19 nt, Homo sapiens
  misc_RNA (1)...(19): siRNA sense strand
ccaggaguguggcagcuuu

SEQ ID NO: 510771 - RNA, 19 nt, Homo sapiens
  misc_RNA (1)...(19): siRNA sense strand
ggagagggaucggccauac

SEQ ID NO: 510772 - RNA, 19 nt, Homo sapiens
  misc_RNA (1)...(19): siRNA sense strand
ggcaagaccaguaugaaga

SEQ ID NO: 510773 - RNA, 19 nt, Homo sapiens
  misc_RNA (1)...(19): siRNA sense strand
gcgcucagauuacgaagac

SEQ ID NO: 510774 - RNA, 19 nt, Homo sapiens
  misc_RNA (1)...(19): siRNA sense strand
gcagcccuguggaguguga

SEQ ID NO: 510775 - RNA, 19 nt, Homo sapiens
  misc_RNA (1)...(19): siRNA sense strand
ucucaggacaguauaauau

SEQ ID NO: 510776 - RNA, 19 nt, Homo sapiens
  misc_RNA (1)...(19): siRNA sense strand
cuucauggccgacgacauu

SEQ ID NO: 510777 - RNA, 19 nt, Homo sapiens
  misc_RNA (1)...(19): siRNA sense strand
cagcagcccuguggagugu

SEQ ID NO: 510778 - RNA, 19 nt, Homo sapiens
  misc_RNA (1)...(19): siRNA sense strand
gauauggacacguuugaca

SEQ ID NO: 510779 - RNA, 19 nt, Homo sapiens
  misc_RNA (1)...(19): siRNA sense strand
ggauguauuccacuucaug

SEQ ID NO: 510780 - RNA, 19 nt, Homo sapiens
  misc_RNA (1)...(19): siRNA sense strand
aguaugagcugcaguacag

SEQ ID NO: 510781 - RNA, 19 nt, Homo sapiens
  misc_RNA (1)...(19): siRNA sense strand
gaccuucucaggacaguau

SEQ ID NO: 510782 - RNA, 19 nt, Homo sapiens
  misc_RNA (1)...(19): siRNA sense strand
cgcaaagacucgagcuaug

SEQ ID NO: 510783 - RNA, 19 nt, Homo sapiens
  misc_RNA (1)...(19): siRNA sense strand
ccacaggucggcccacaau

SEQ ID NO: 510784 - RNA, 19 nt, Homo sapiens
  misc_RNA (1)...(19): siRNA sense strand
gaucucaguggacucaaga

SEQ ID NO: 510785 - RNA, 19 nt, Homo sapiens
  misc_RNA (1)...(19): siRNA sense strand
ucuccuggcgcucagauua

SEQ ID NO: 510786 - RNA, 19 nt, Homo sapiens
  misc_RNA (1)...(19): siRNA sense strand
gcaagaccaguaugaagag

SEQ ID NO: 510787 - RNA, 19 nt, Homo sapiens
  misc_RNA (1)...(19): siRNA sense strand
ccugaagacccauccauug

SEQ ID NO: 510788 - RNA, 19 nt, Homo sapiens
  misc_RNA (1)...(19): siRNA sense strand
ucaggacaguauaauaucu

SEQ ID NO: 510789 - RNA, 19 nt, Homo sapiens
  misc_RNA (1)...(19): siRNA sense strand
ggucauuccuccgccacuu

SEQ ID NO: 510790 - RNA, 19 nt, Homo sapiens
  misc_RNA (1)...(19): siRNA sense strand
ccagcacgcucacccuuac

SEQ ID NO: 510791 - RNA, 19 nt, Homo sapiens
  misc_RNA (1)...(19): siRNA sense strand
gccuggauauggacacguu

SEQ ID NO: 510792 - RNA, 19 nt, Homo sapiens
  misc_RNA (1)...(19): siRNA sense strand
uggaggcuauggaagaaga

SEQ ID NO: 510793 - RNA, 19 nt, Homo sapiens
  misc_RNA (1)...(19): siRNA sense strand
gcugugaguccgaggagaa

SEQ ID NO: 510794 - RNA, 19 nt, Homo sapiens
  misc_RNA (1)...(19): siRNA sense strand
gacccagucagaggaguua

SEQ ID NO: 510795 - RNA, 19 nt, Homo sapiens
  misc_RNA (1)...(19): siRNA sense strand
ggucaucugcauccuggaa

SEQ ID NO: 510796 - RNA, 19 nt, Homo sapiens
  misc_RNA (1)...(19): siRNA sense strand
gcagcggagacuucaagaa

SEQ ID NO: 510797 - RNA, 19 nt, Homo sapiens
  misc_RNA (1)...(19): siRNA sense strand
agucagaggaguuaaagga

SEQ ID NO: 510798 - RNA, 19 nt, Homo sapiens
  misc_RNA (1)...(19): siRNA sense strand
ccgcaaagacucgagcuau

SEQ ID NO: 510799 - RNA, 19 nt, Homo sapiens
  misc_RNA (1)...(19): siRNA sense strand
uguggaggcuauggaagaa

SEQ ID NO: 510800 - RNA, 19 nt, Homo sapiens
  misc_RNA (1)...(19): siRNA sense strand
ugaagacccauccauugug

SEQ ID NO: 510801 - RNA, 19 nt, Homo sapiens
  misc_RNA (1)...(19): siRNA sense strand
gaagccuccuggacagacu

SEQ ID NO: 510802 - RNA, 19 nt, Homo sapiens
  misc_RNA (1)...(19): siRNA sense strand
cauacggccugguguccau

SEQ ID NO: 510803 - RNA, 19 nt, Homo sapiens
  misc_RNA (1)...(19): siRNA sense strand
cugaagacccauccauugu

SEQ ID NO: 510804 - RNA, 19 nt, Homo sapiens
  misc_RNA (1)...(19): siRNA sense strand
gccugaagacccauccauu

SEQ ID NO: 510805 - RNA, 19 nt, Homo sapiens
  misc_RNA (1)...(19): siRNA sense strand
gcccugagcgguucuucau

SEQ ID NO: 510806 - RNA, 19 nt, Homo sapiens
  misc_RNA (1)...(19): siRNA sense strand
gaggcuauggaagaagaua

SEQ ID NO: 510807 - RNA, 19 nt, Homo sapiens
  misc_RNA (1)...(19): siRNA sense strand
caccuacaccugccacaug

SEQ ID NO: 510808 - RNA, 19 nt, Homo sapiens
  misc_RNA (1)...(19): siRNA sense strand
caaagacucgagcuaugag

SEQ ID NO: 510809 - RNA, 19 nt, Homo sapiens
  misc_RNA (1)...(19): siRNA sense strand
ucaucugcauccuggaaau

SEQ ID NO: 510810 - RNA, 19 nt, Homo sapiens
  misc_RNA (1)...(19): siRNA sense strand
gcaaagacucgagcuauga

SEQ ID NO: 510811 - RNA, 19 nt, Homo sapiens
  misc_RNA (1)...(19): siRNA sense strand
gcggagacuucaagaaaug

SEQ ID NO: 510812 - RNA, 19 nt, Homo sapiens
  misc_RNA (1)...(19): siRNA sense strand
cagcggagacuucaagaaa

SEQ ID NO: 510813 - RNA, 19 nt, Homo sapiens
  misc_RNA (1)...(19): siRNA sense strand
ucaguggacucaagaagug

SEQ ID NO: 510814 - RNA, 19 nt, Homo sapiens
  misc_RNA (1)...(19): siRNA sense strand
agggcaagcuucaguauga

SEQ ID NO: 510815 - RNA, 19 nt, Homo sapiens
  misc_RNA (1)...(19): siRNA sense strand
ccaggaguguggcagcuuu

SEQ ID NO: 510816 - RNA, 19 nt, Homo sapiens
  misc_RNA (1)...(19): siRNA sense strand
ggagagggaucggccauac

SEQ ID NO: 510817 - RNA, 19 nt, Homo sapiens
  misc_RNA (1)...(19): siRNA sense strand
ggcaagaccaguaugaaga

SEQ ID NO: 510818 - RNA, 19 nt, Homo sapiens
  misc_RNA (1)...(19): siRNA sense strand
gcgcucagauuacgaagac

SEQ ID NO: 510819 - RNA, 19 nt, Homo sapiens
  misc_RNA (1)...(19): siRNA sense strand
gcagcccuguggaguguga

SEQ ID NO: 510820 - RNA, 19 nt, Homo sapiens
  misc_RNA (1)...(19): siRNA sense strand
ucucaggacaguauaauau

SEQ ID NO: 510821 - RNA, 19 nt, Homo sapiens
  misc_RNA (1)...(19): siRNA sense strand
cuucauggccgacgacauu

SEQ ID NO: 510822 - RNA, 19 nt, Homo sapiens
  misc_RNA (1)...(19): siRNA sense strand
cagcagcccuguggagugu

SEQ ID NO: 510823 - RNA, 19 nt, Homo sapiens
  misc_RNA (1)...(19): siRNA sense strand
gauauggacacguuugaca

SEQ ID NO: 510824 - RNA, 19 nt, Homo sapiens
  misc_RNA (1)...(19): siRNA sense strand
ggauguauuccacuucaug

SEQ ID NO: 510825 - RNA, 19 nt, Homo sapiens
  misc_RNA (1)...(19): siRNA sense strand
aguaugagcugcaguacag

SEQ ID NO: 510826 - RNA, 19 nt, Homo sapiens
  misc_RNA (1)...(19): siRNA sense strand
gaccuucucaggacaguau

SEQ ID NO: 510827 - RNA, 19 nt, Homo sapiens
  misc_RNA (1)...(19): siRNA sense strand
cgcaaagacucgagcuaug

SEQ ID NO: 510828 - RNA, 19 nt, Homo sapiens
  misc_RNA (1)...(19): siRNA sense strand
ccacaggucggcccacaau

SEQ ID NO: 510829 - RNA, 19 nt, Homo sapiens
  misc_RNA (1)...(19): siRNA sense strand
gaucucaguggacucaaga

SEQ ID NO: 510830 - RNA, 19 nt, Homo sapiens
  misc_RNA (1)...(19): siRNA sense strand
ucuccuggcgcucagauua

SEQ ID NO: 510831 - RNA, 19 nt, Homo sapiens
  misc_RNA (1)...(19): siRNA sense strand
gcaagaccaguaugaagag

SEQ ID NO: 510832 - RNA, 19 nt, Homo sapiens
  misc_RNA (1)...(19): siRNA sense strand
ccugaagacccauccauug

SEQ ID NO: 510833 - RNA, 19 nt, Homo sapiens
  misc_RNA (1)...(19): siRNA sense strand
ucaggacaguauaauaucu

SEQ ID NO: 510834 - RNA, 19 nt, Homo sapiens
  misc_RNA (1)...(19): siRNA sense strand
ggucauuccuccgccacuu

SEQ ID NO: 510835 - RNA, 19 nt, Homo sapiens
  misc_RNA (1)...(19): siRNA sense strand
ccagcacgcucacccuuac

SEQ ID NO: 510836 - RNA, 19 nt, Homo sapiens
  misc_RNA (1)...(19): siRNA sense strand
gccuggauauggacacguu

SEQ ID NO: 510837 - RNA, 19 nt, Homo sapiens
  misc_RNA (1)...(19): siRNA sense strand
uggaggcuauggaagaaga

SEQ ID NO: 510838 - RNA, 19 nt, Homo sapiens
  misc_RNA (1)...(19): siRNA sense strand
gcugugaguccgaggagaa

SEQ ID NO: 510839 - RNA, 19 nt, Homo sapiens
  misc_RNA (1)...(19): siRNA sense strand
gacccagucagaggaguua

SEQ ID NO: 510840 - RNA, 19 nt, Homo sapiens
  misc_RNA (1)...(19): siRNA sense strand
ggucaucugcauccuggaa

SEQ ID NO: 510841 - RNA, 19 nt, Homo sapiens
  misc_RNA (1)...(19): siRNA sense strand
gcagcggagacuucaagaa

SEQ ID NO: 510842 - RNA, 19 nt, Homo sapiens
  misc_RNA (1)...(19): siRNA sense strand
agucagaggaguuaaagga

SEQ ID NO: 510843 - RNA, 19 nt, Homo sapiens
  misc_RNA (1)...(19): siRNA sense strand
ccgcaaagacucgagcuau

SEQ ID NO: 510844 - RNA, 19 nt, Homo sapiens
  misc_RNA (1)...(19): siRNA sense strand
uguggaggcuauggaagaa

SEQ ID NO: 510845 - RNA, 19 nt, Homo sapiens
  misc_RNA (1)...(19): siRNA sense strand
ugaagacccauccauugug

SEQ ID NO: 510846 - RNA, 19 nt, Homo sapiens
  misc_RNA (1)...(19): siRNA sense strand
gaagccuccuggacagacu

SEQ ID NO: 510847 - RNA, 19 nt, Homo sapiens
  misc_RNA (1)...(19): siRNA sense strand
cauacggccugguguccau

SEQ ID NO: 510848 - RNA, 19 nt, Homo sapiens
  misc_RNA (1)...(19): siRNA sense strand
cugaagacccauccauugu

SEQ ID NO: 510849 - RNA, 19 nt, Homo sapiens
  misc_RNA (1)...(19): siRNA sense strand
gccugaagacccauccauu

SEQ ID NO: 510850 - RNA, 19 nt, Homo sapiens
  misc_RNA (1)...(19): siRNA sense strand
gcccugagcgguucuucau

SEQ ID NO: 510851 - RNA, 19 nt, Homo sapiens
  misc_RNA (1)...(19): siRNA sense strand
gaggcuauggaagaagaua

SEQ ID NO: 510852 - RNA, 19 nt, Homo sapiens
  misc_RNA (1)...(19): siRNA sense strand
caccuacaccugccacaug

SEQ ID NO: 510853 - RNA, 19 nt, Homo sapiens
  misc_RNA (1)...(19): siRNA sense strand
caaagacucgagcuaugag

SEQ ID NO: 510854 - RNA, 19 nt, Homo sapiens
  misc_RNA (1)...(19): siRNA sense strand
ucaucugcauccuggaaau

SEQ ID NO: 510855 - RNA, 19 nt, Homo sapiens
  misc_RNA (1)...(19): siRNA sense strand
ccagaugacuugaauagua

SEQ ID NO: 510856 - RNA, 19 nt, Homo sapiens
  misc_RNA (1)...(19): siRNA sense strand
gagaaaagcuccaaauaaa

SEQ ID NO: 510857 - RNA, 19 nt, Homo sapiens
  misc_RNA (1)...(19): siRNA sense strand
gaacaaaggaucuuaaagu

SEQ ID NO: 510858 - RNA, 19 nt, Homo sapiens
  misc_RNA (1)...(19): siRNA sense strand
ucaaaugccucaaauaaca

SEQ ID NO: 510859 - RNA, 19 nt, Homo sapiens
  misc_RNA (1)...(19): siRNA sense strand
caucaaaugccucaaauaa

SEQ ID NO: 510860 - RNA, 19 nt, Homo sapiens
  misc_RNA (1)...(19): siRNA sense strand
uaaaugcugugcuaauuga

SEQ ID NO: 510861 - RNA, 19 nt, Homo sapiens
  misc_RNA (1)...(19): siRNA sense strand
ucucaaaucugucacauug

SEQ ID NO: 510862 - RNA, 19 nt, Homo sapiens
  misc_RNA (1)...(19): siRNA sense strand
gcaagaaaguggcaaagca

SEQ ID NO: 510863 - RNA, 19 nt, Homo sapiens
  misc_RNA (1)...(19): siRNA sense strand
gaaaccaccuguucauuac

SEQ ID NO: 510864 - RNA, 19 nt, Homo sapiens
  misc_RNA (1)...(19): siRNA sense strand
gaagaaucaucccacuauu

SEQ ID NO: 510865 - RNA, 19 nt, Homo sapiens
  misc_RNA (1)...(19): siRNA sense strand
ccaugaaccucgauuuaaa

SEQ ID NO: 510866 - RNA, 19 nt, Homo sapiens
  misc_RNA (1)...(19): siRNA sense strand
gcgacuaucucuucaaugu

SEQ ID NO: 510867 - RNA, 19 nt, Homo sapiens
  misc_RNA (1)...(19): siRNA sense strand
gcaagaaaguggccaagca

SEQ ID NO: 510868 - RNA, 19 nt, Homo sapiens
  misc_RNA (1)...(19): siRNA sense strand
gcuauuugcugucguguga

SEQ ID NO: 510869 - RNA, 19 nt, Homo sapiens
  misc_RNA (1)...(19): siRNA sense strand
ggacuacgacaucccuuua

SEQ ID NO: 510870 - RNA, 19 nt, Homo sapiens
  misc_RNA (1)...(19): siRNA sense strand
ugagauaccugaacaccaa

SEQ ID NO: 510871 - RNA, 19 nt, Homo sapiens
  misc_RNA (1)...(19): siRNA sense strand
gagagaggaugcaaaucaa

SEQ ID NO: 510872 - RNA, 19 nt, Homo sapiens
  misc_RNA (1)...(19): siRNA sense strand
ggaugcaaaucaagagaaa

SEQ ID NO: 510873 - RNA, 19 nt, Homo sapiens
  misc_RNA (1)...(19): siRNA sense strand
gcagauggccgcagaggaa

SEQ ID NO: 510874 - RNA, 19 nt, Homo sapiens
  misc_RNA (1)...(19): siRNA sense strand
gagaaagaaucagagaaga

SEQ ID NO: 510875 - RNA, 19 nt, Homo sapiens
  misc_RNA (1)...(19): siRNA sense strand
gaaagaaaucaaucgaguu

SEQ ID NO: 510876 - RNA, 19 nt, Homo sapiens
  misc_RNA (1)...(19): siRNA sense strand
gaacggagaaggcacaauc

SEQ ID NO: 510877 - RNA, 19 nt, Homo sapiens
  misc_RNA (1)...(19): siRNA sense strand
cagaguuccucaccuguaa

SEQ ID NO: 510878 - RNA, 19 nt, Homo sapiens
  misc_RNA (1)...(19): siRNA sense strand
ggagaggcuucaucagguu

SEQ ID NO: 510879 - RNA, 19 nt, Homo sapiens
  misc_RNA (1)...(19): siRNA sense strand
cagaugacuugaauaguau

SEQ ID NO: 510880 - RNA, 19 nt, Homo sapiens
  misc_RNA (1)...(19): siRNA sense strand
caggguauguugacuuuga

SEQ ID NO: 510881 - RNA, 19 nt, Homo sapiens
  misc_RNA (1)...(19): siRNA sense strand
gaaccucgauuuaaauucc

SEQ ID NO: 510882 - RNA, 19 nt, Homo sapiens
  misc_RNA (1)...(19): siRNA sense strand
gguauucccucagcggaua

SEQ ID NO: 510883 - RNA, 19 nt, Homo sapiens
  misc_RNA (1)...(19): siRNA sense strand
gcaagaggccagaccagaa

SEQ ID NO: 510884 - RNA, 19 nt, Homo sapiens
  misc_RNA (1)...(19): siRNA sense strand
gaagaaagaaaucaaucga

SEQ ID NO: 510885 - RNA, 19 nt, Homo sapiens
  misc_RNA (1)...(19): siRNA sense strand
cccaguaguuuccugcuua

SEQ ID NO: 510886 - RNA, 19 nt, Homo sapiens
  misc_RNA (1)...(19): siRNA sense strand
guaauauacccacaucaaa

SEQ ID NO: 510887 - RNA, 19 nt, Homo sapiens
  misc_RNA (1)...(19): siRNA sense strand
agauauaaaugcugugcua

SEQ ID NO: 510888 - RNA, 19 nt, Homo sapiens
  misc_RNA (1)...(19): siRNA sense strand
gacuaucucuucaaugugu

SEQ ID NO: 510889 - RNA, 19 nt, Homo sapiens
  misc_RNA (1)...(19): siRNA sense strand
cgaaggauaguauauuuga

SEQ ID NO: 510890 - RNA, 19 nt, Homo sapiens
  misc_RNA (1)...(19): siRNA sense strand
guuagaauaugcccaguuc

SEQ ID NO: 510891 - RNA, 19 nt, Homo sapiens
  misc_RNA (1)...(19): siRNA sense strand
uaccaaggcccgagauaua

SEQ ID NO: 510892 - RNA, 19 nt, Homo sapiens
  misc_RNA (1)...(19): siRNA sense strand
ggaauccagugacauugug

SEQ ID NO: 510893 - RNA, 19 nt, Homo sapiens
  misc_RNA (1)...(19): siRNA sense strand
gagaugcccuccuucuaca

SEQ ID NO: 510894 - RNA, 19 nt, Homo sapiens
  misc_RNA (1)...(19): siRNA sense strand
caccuuccaugaccagaua

SEQ ID NO: 510895 - RNA, 19 nt, Homo sapiens
  misc_RNA (1)...(19): siRNA sense strand
caucugacccgugcuauuu

SEQ ID NO: 510896 - RNA, 19 nt, Homo sapiens
  misc_RNA (1)...(19): siRNA sense strand
gccaagguuuccaguacua

SEQ ID NO: 510897 - RNA, 19 nt, Homo sapiens
  misc_RNA (1)...(19): siRNA sense strand
gcagggaucuacugagacu

SEQ ID NO: 510898 - RNA, 19 nt, Homo sapiens
  misc_RNA (1)...(19): siRNA sense strand
gcagaguuccucaccugua

SEQ ID NO: 510899 - RNA, 19 nt, Homo sapiens
  misc_RNA (1)...(19): siRNA sense strand
cgagagaggaugcaaauca

SEQ ID NO: 510900 - RNA, 19 nt, Homo sapiens
  misc_RNA (1)...(19): siRNA sense strand
gaagggcaagcuacagaaa

SEQ ID NO: 510901 - RNA, 19 nt, Homo sapiens
  misc_RNA (1)...(19): siRNA sense strand
ucagguuucucuacaguga

SEQ ID NO: 510902 - RNA, 19 nt, Homo sapiens
  misc_RNA (1)...(19): siRNA sense strand
caaguucguuuaccaagca

SEQ ID NO: 510903 - RNA, 19 nt, Homo sapiens
  misc_RNA (1)...(19): siRNA sense strand
ccaacuccauggcuucuga

SEQ ID NO: 510904 - RNA, 19 nt, Homo sapiens
  misc_RNA (1)...(19): siRNA sense strand
uauacucccuggcaaagaa

SEQ ID NO: 510905 - RNA, 19 nt, Homo sapiens
  misc_RNA (1)...(19): siRNA sense strand
ccgcagggaucuacugaga

SEQ ID NO: 510906 - RNA, 19 nt, Homo sapiens
  misc_RNA (1)...(19): siRNA sense strand
uuaagaagcucugcuccuu

SEQ ID NO: 510907 - RNA, 19 nt, Homo sapiens
  misc_RNA (1)...(19): siRNA sense strand
gagaugggagugcauuuga

SEQ ID NO: 510908 - RNA, 19 nt, Homo sapiens
  misc_RNA (1)...(19): siRNA sense strand
ugaaagccaugacaauucu

SEQ ID NO: 510909 - RNA, 19 nt, Homo sapiens
  misc_RNA (1)...(19): siRNA sense strand
gcaggaugcagcuaugaaa

SEQ ID NO: 510910 - RNA, 19 nt, Homo sapiens
  misc_RNA (1)...(19): siRNA sense strand
ccacagagaaagaaucaga

SEQ ID NO: 510911 - RNA, 19 nt, Homo sapiens
  misc_RNA (1)...(19): siRNA sense strand
gcagagucagcauauauga

SEQ ID NO: 510912 - RNA, 19 nt, Homo sapiens
  misc_RNA (1)...(19): siRNA sense strand
ccaguaguuuccugcuuaa

SEQ ID NO: 510913 - RNA, 19 nt, Homo sapiens
  misc_RNA (1)...(19): siRNA sense strand
ccacagagagguguugauu

SEQ ID NO: 510914 - RNA, 19 nt, Homo sapiens
  misc_RNA (1)...(19): siRNA sense strand
ugcgaaggauaguauauuu

SEQ ID NO: 510915 - RNA, 19 nt, Homo sapiens
  misc_RNA (1)...(19): siRNA sense strand
agaaggcccugcccaugaa

SEQ ID NO: 510916 - RNA, 19 nt, Homo sapiens
  misc_RNA (1)...(19): siRNA sense strand
gaaccugucauaaaguuag

SEQ ID NO: 510917 - RNA, 19 nt, Homo sapiens
  misc_RNA (1)...(19): siRNA sense strand
ggaacugaguaucuaccaa

SEQ ID NO: 510918 - RNA, 19 nt, Homo sapiens
  misc_RNA (1)...(19): siRNA sense strand
gcacagcggagugguaaga

SEQ ID NO: 510919 - RNA, 19 nt, Homo sapiens
  misc_RNA (1)...(19): siRNA sense strand
uaugggaacuggauuagca

SEQ ID NO: 510920 - RNA, 19 nt, Homo sapiens
  misc_RNA (1)...(19): siRNA sense strand
gagagacuccguaccaugu

SEQ ID NO: 510921 - RNA, 19 nt, Homo sapiens
  misc_RNA (1)...(19): siRNA sense strand
gaaaguggcaaagcagaug

SEQ ID NO: 510922 - RNA, 19 nt, Homo sapiens
  misc_RNA (1)...(19): siRNA sense strand
gcacagcggagugguaaga

SEQ ID NO: 510923 - RNA, 19 nt, Homo sapiens
  misc_RNA (1)...(19): siRNA sense strand
gagaggaugcaaaucaaga

SEQ ID NO: 510924 - RNA, 19 nt, Homo sapiens
  misc_RNA (1)...(19): siRNA sense strand
gagaaucccaaacaaggaa

SEQ ID NO: 510925 - RNA, 19 nt, Homo sapiens
  misc_RNA (1)...(19): siRNA sense strand
uuggcgagcucgugagaua

SEQ ID NO: 510926 - RNA, 19 nt, Homo sapiens
  misc_RNA (1)...(19): siRNA sense strand
ccacaucaaaugccucaaa

SEQ ID NO: 510927 - RNA, 19 nt, Homo sapiens
  misc_RNA (1)...(19): siRNA sense strand
guuccucaccuguaauaua

SEQ ID NO: 510928 - RNA, 19 nt, Homo sapiens
  misc_RNA (1)...(19): siRNA sense strand
caagagaaauacgaacagu

SEQ ID NO: 510929 - RNA, 19 nt, Homo sapiens
  misc_RNA (1)...(19): siRNA sense strand
acagagagguguugauugc

SEQ ID NO: 510930 - RNA, 19 nt, Homo sapiens
  misc_RNA (1)...(19): siRNA sense strand
gccaagaacuacuucaaaa

SEQ ID NO: 510931 - RNA, 19 nt, Homo sapiens
  misc_RNA (1)...(19): siRNA sense strand
gcacagaaucccgccacua

SEQ ID NO: 510932 - RNA, 19 nt, Homo sapiens
  misc_RNA (1)...(19): siRNA sense strand
uggcuuugcugcugaauuc

SEQ ID NO: 510933 - RNA, 19 nt, Homo sapiens
  misc_RNA (1)...(19): siRNA sense strand
gauacuacacccauccauu

SEQ ID NO: 510934 - RNA, 19 nt, Homo sapiens
  misc_RNA (1)...(19): siRNA sense strand
gaaagaaucagagaagacu

SEQ ID NO: 510935 - RNA, 19 nt, Homo sapiens
  misc_RNA (1)...(19): siRNA sense strand
agaagaaucaucccacuau

SEQ ID NO: 510936 - RNA, 19 nt, Homo sapiens
  misc_RNA (1)...(19): siRNA sense strand
caagcaggaugcagcuaug

SEQ ID NO: 510937 - RNA, 19 nt, Homo sapiens
  misc_RNA (1)...(19): siRNA sense strand
caucaauggccgagaguuu

SEQ ID NO: 510938 - RNA, 19 nt, Homo sapiens
  misc_RNA (1)...(19): siRNA sense strand
gacagcaacuccacaucug

SEQ ID NO: 510939 - RNA, 19 nt, Homo sapiens
  misc_RNA (1)...(19): siRNA sense strand
gaagacagcaacuccacau

SEQ ID NO: 510940 - RNA, 19 nt, Homo sapiens
  misc_RNA (1)...(19): siRNA sense strand
gcagcccauuuaucucaaa

SEQ ID NO: 510941 - RNA, 19 nt, Homo sapiens
  misc_RNA (1)...(19): siRNA sense strand
gaaauacaacucccagacu

SEQ ID NO: 510942 - RNA, 19 nt, Homo sapiens
  misc_RNA (1)...(19): siRNA sense strand
aaggagaaacugucaauga

SEQ ID NO: 510943 - RNA, 19 nt, Homo sapiens
  misc_RNA (1)...(19): siRNA sense strand
gcagaacgcauggguuuca

SEQ ID NO: 510944 - RNA, 19 nt, Homo sapiens
  misc_RNA (1)...(19): siRNA sense strand
guaagaccagacagucaua

SEQ ID NO: 510945 - RNA, 19 nt, Homo sapiens
  misc_RNA (1)...(19): siRNA sense strand
cuaccaagaucaggaacaa

SEQ ID NO: 510946 - RNA, 19 nt, Homo sapiens
  misc_RNA (1)...(19): siRNA sense strand
gaaaguggccaagcaggau

SEQ ID NO: 510947 - RNA, 19 nt, Homo sapiens
  misc_RNA (1)...(19): siRNA sense strand
gauuuaaauuccagguugu

SEQ ID NO: 510948 - RNA, 19 nt, Homo sapiens
  misc_RNA (1)...(19): siRNA sense strand
auacuacacccauccauuu

SEQ ID NO: 510949 - RNA, 19 nt, Homo sapiens
  misc_RNA (1)...(19): siRNA sense strand
ugacuccucugcccugaau

SEQ ID NO: 510950 - RNA, 19 nt, Homo sapiens
  misc_RNA (1)...(19): siRNA sense strand
ccacaucugccuuggaaga

SEQ ID NO: 510951 - RNA, 19 nt, Homo sapiens
  misc_RNA (1)...(19): siRNA sense strand
gaguuccucaccuguaaua

SEQ ID NO: 510952 - RNA, 19 nt, Homo sapiens
  misc_RNA (1)...(19): siRNA sense strand
ugaaggauaugggcuaugg

SEQ ID NO: 510953 - RNA, 19 nt, Homo sapiens
  misc_RNA (1)...(19): siRNA sense strand
ggccaagaacuacuucaaa

SEQ ID NO: 510954 - RNA, 19 nt, Homo sapiens
  misc_RNA (1)...(19): siRNA sense strand
gaaagcugcccgugacuac

SEQ ID NO: 510955 - RNA, 19 nt, Homo sapiens
  misc_RNA (1)...(19): siRNA sense strand
ccagaugacuugaauagua

SEQ ID NO: 510956 - RNA, 19 nt, Homo sapiens
  misc_RNA (1)...(19): siRNA sense strand
gagaaaagcuccaaauaaa

SEQ ID NO: 510957 - RNA, 19 nt, Homo sapiens
  misc_RNA (1)...(19): siRNA sense strand
gaacaaaggaucuuaaagu

SEQ ID NO: 510958 - RNA, 19 nt, Homo sapiens
  misc_RNA (1)...(19): siRNA sense strand
ucaaaugccucaaauaaca

SEQ ID NO: 510959 - RNA, 19 nt, Homo sapiens
  misc_RNA (1)...(19): siRNA sense strand
caucaaaugccucaaauaa

SEQ ID NO: 510960 - RNA, 19 nt, Homo sapiens
  misc_RNA (1)...(19): siRNA sense strand
uaaaugcugugcuaauuga

SEQ ID NO: 510961 - RNA, 19 nt, Homo sapiens
  misc_RNA (1)...(19): siRNA sense strand
ucucaaaucugucacauug

SEQ ID NO: 510962 - RNA, 19 nt, Homo sapiens
  misc_RNA (1)...(19): siRNA sense strand
gcaagaaaguggcaaagca

SEQ ID NO: 510963 - RNA, 19 nt, Homo sapiens
  misc_RNA (1)...(19): siRNA sense strand
gaaaccaccuguucauuac

SEQ ID NO: 510964 - RNA, 19 nt, Homo sapiens
  misc_RNA (1)...(19): siRNA sense strand
gaagaaucaucccacuauu

SEQ ID NO: 510965 - RNA, 19 nt, Homo sapiens
  misc_RNA (1)...(19): siRNA sense strand
ccaugaaccucgauuuaaa

SEQ ID NO: 510966 - RNA, 19 nt, Homo sapiens
  misc_RNA (1)...(19): siRNA sense strand
gcgacuaucucuucaaugu

SEQ ID NO: 510967 - RNA, 19 nt, Homo sapiens
  misc_RNA (1)...(19): siRNA sense strand
gcaagaaaguggccaagca

SEQ ID NO: 510968 - RNA, 19 nt, Homo sapiens
  misc_RNA (1)...(19): siRNA sense strand
gcuauuugcugucguguga

SEQ ID NO: 510969 - RNA, 19 nt, Homo sapiens
  misc_RNA (1)...(19): siRNA sense strand
ggacuacgacaucccuuua

SEQ ID NO: 510970 - RNA, 19 nt, Homo sapiens
  misc_RNA (1)...(19): siRNA sense strand
ugagauaccugaacaccaa

SEQ ID NO: 510971 - RNA, 19 nt, Homo sapiens
  misc_RNA (1)...(19): siRNA sense strand
gagagaggaugcaaaucaa

SEQ ID NO: 510972 - RNA, 19 nt, Homo sapiens
  misc_RNA (1)...(19): siRNA sense strand
ggaugcaaaucaagagaaa

SEQ ID NO: 510973 - RNA, 19 nt, Homo sapiens
  misc_RNA (1)...(19): siRNA sense strand
gcagauggccgcagaggaa

SEQ ID NO: 510974 - RNA, 19 nt, Homo sapiens
  misc_RNA (1)...(19): siRNA sense strand
gagaaagaaucagagaaga

SEQ ID NO: 510975 - RNA, 19 nt, Homo sapiens
  misc_RNA (1)...(19): siRNA sense strand
gaaagaaaucaaucgaguu

SEQ ID NO: 510976 - RNA, 19 nt, Homo sapiens
  misc_RNA (1)...(19): siRNA sense strand
gaacggagaaggcacaauc

SEQ ID NO: 510977 - RNA, 19 nt, Homo sapiens
  misc_RNA (1)...(19): siRNA sense strand
cagaguuccucaccuguaa

SEQ ID NO: 510978 - RNA, 19 nt, Homo sapiens
  misc_RNA (1)...(19): siRNA sense strand
ggagaggcuucaucagguu

SEQ ID NO: 510979 - RNA, 19 nt, Homo sapiens
  misc_RNA (1)...(19): siRNA sense strand
cagaugacuugaauaguau

SEQ ID NO: 510980 - RNA, 19 nt, Homo sapiens
  misc_RNA (1)...(19): siRNA sense strand
caggguauguugacuuuga

SEQ ID NO: 510981 - RNA, 19 nt, Homo sapiens
  misc_RNA (1)...(19): siRNA sense strand
gaaccucgauuuaaauucc

SEQ ID NO: 510982 - RNA, 19 nt, Homo sapiens
  misc_RNA (1)...(19): siRNA sense strand
gguauucccucagcggaua

SEQ ID NO: 510983 - RNA, 19 nt, Homo sapiens
  misc_RNA (1)...(19): siRNA sense strand
gcaagaggccagaccagaa

SEQ ID NO: 510984 - RNA, 19 nt, Homo sapiens
  misc_RNA (1)...(19): siRNA sense strand
gaagaaagaaaucaaucga

SEQ ID NO: 510985 - RNA, 19 nt, Homo sapiens
  misc_RNA (1)...(19): siRNA sense strand
cccaguaguuuccugcuua

SEQ ID NO: 510986 - RNA, 19 nt, Homo sapiens
  misc_RNA (1)...(19): siRNA sense strand
guaauauacccacaucaaa

SEQ ID NO: 510987 - RNA, 19 nt, Homo sapiens
  misc_RNA (1)...(19): siRNA sense strand
agauauaaaugcugugcua

SEQ ID NO: 510988 - RNA, 19 nt, Homo sapiens
  misc_RNA (1)...(19): siRNA sense strand
gacuaucucuucaaugugu

SEQ ID NO: 510989 - RNA, 19 nt, Homo sapiens
  misc_RNA (1)...(19): siRNA sense strand
cgaaggauaguauauuuga

SEQ ID NO: 510990 - RNA, 19 nt, Homo sapiens
  misc_RNA (1)...(19): siRNA sense strand
guuagaauaugcccaguuc

SEQ ID NO: 510991 - RNA, 19 nt, Homo sapiens
  misc_RNA (1)...(19): siRNA sense strand
uaccaaggcccgagauaua

SEQ ID NO: 510992 - RNA, 19 nt, Homo sapiens
  misc_RNA (1)...(19): siRNA sense strand
ggaauccagugacauugug

SEQ ID NO: 510993 - RNA, 19 nt, Homo sapiens
  misc_RNA (1)...(19): siRNA sense strand
gagaugcccuccuucuaca

SEQ ID NO: 510994 - RNA, 19 nt, Homo sapiens
  misc_RNA (1)...(19): siRNA sense strand
caccuuccaugaccagaua

SEQ ID NO: 510995 - RNA, 19 nt, Homo sapiens
  misc_RNA (1)...(19): siRNA sense strand
caucugacccgugcuauuu

SEQ ID NO: 510996 - RNA, 19 nt, Homo sapiens
  misc_RNA (1)...(19): siRNA sense strand
gccaagguuuccaguacua

SEQ ID NO: 510997 - RNA, 19 nt, Homo sapiens
  misc_RNA (1)...(19): siRNA sense strand
gcagggaucuacugagacu

SEQ ID NO: 510998 - RNA, 19 nt, Homo sapiens
  misc_RNA (1)...(19): siRNA sense strand
gcagaguuccucaccugua

SEQ ID NO: 510999 - RNA, 19 nt, Homo sapiens
  misc_RNA (1)...(19): siRNA sense strand
cgagagaggaugcaaauca

SEQ ID NO: 511000 - RNA, 19 nt, Homo sapiens
  misc_RNA (1)...(19): siRNA sense strand
gaagggcaagcuacagaaa

SEQ ID NO: 511001 - RNA, 19 nt, Homo sapiens
  misc_RNA (1)...(19): siRNA sense strand
ucagguuucucuacaguga

SEQ ID NO: 511002 - RNA, 19 nt, Homo sapiens
  misc_RNA (1)...(19): siRNA sense strand
caaguucguuuaccaagca

SEQ ID NO: 511003 - RNA, 19 nt, Homo sapiens
  misc_RNA (1)...(19): siRNA sense strand
ccaacuccauggcuucuga

SEQ ID NO: 511004 - RNA, 19 nt, Homo sapiens
  misc_RNA (1)...(19): siRNA sense strand
uauacucccuggcaaagaa

SEQ ID NO: 511005 - RNA, 19 nt, Homo sapiens
  misc_RNA (1)...(19): siRNA sense strand
ccgcagggaucuacugaga

SEQ ID NO: 511006 - RNA, 19 nt, Homo sapiens
  misc_RNA (1)...(19): siRNA sense strand
uuaagaagcucugcuccuu

SEQ ID NO: 511007 - RNA, 19 nt, Homo sapiens
  misc_RNA (1)...(19): siRNA sense strand
gagaugggagugcauuuga

SEQ ID NO: 511008 - RNA, 19 nt, Homo sapiens
  misc_RNA (1)...(19): siRNA sense strand
ugaaagccaugacaauucu

SEQ ID NO: 511009 - RNA, 19 nt, Homo sapiens
  misc_RNA (1)...(19): siRNA sense strand
gcaggaugcagcuaugaaa

SEQ ID NO: 511010 - RNA, 19 nt, Homo sapiens
  misc_RNA (1)...(19): siRNA sense strand
ccacagagaaagaaucaga

SEQ ID NO: 511011 - RNA, 19 nt, Homo sapiens
  misc_RNA (1)...(19): siRNA sense strand
gcagagucagcauauauga

SEQ ID NO: 511012 - RNA, 19 nt, Homo sapiens
  misc_RNA (1)...(19): siRNA sense strand
ccaguaguuuccugcuuaa

SEQ ID NO: 511013 - RNA, 19 nt, Homo sapiens
  misc_RNA (1)...(19): siRNA sense strand
ccacagagagguguugauu

SEQ ID NO: 511014 - RNA, 19 nt, Homo sapiens
  misc_RNA (1)...(19): siRNA sense strand
ugcgaaggauaguauauuu

SEQ ID NO: 511015 - RNA, 19 nt, Homo sapiens
  misc_RNA (1)...(19): siRNA sense strand
agaaggcccugcccaugaa

SEQ ID NO: 511016 - RNA, 19 nt, Homo sapiens
  misc_RNA (1)...(19): siRNA sense strand
gaaccugucauaaaguuag

SEQ ID NO: 511017 - RNA, 19 nt, Homo sapiens
  misc_RNA (1)...(19): siRNA sense strand
ggaacugaguaucuaccaa

SEQ ID NO: 511018 - RNA, 19 nt, Homo sapiens
  misc_RNA (1)...(19): siRNA sense strand
gcacagcggagugguaaga

SEQ ID NO: 511019 - RNA, 19 nt, Homo sapiens
  misc_RNA (1)...(19): siRNA sense strand
uaugggaacuggauuagca

SEQ ID NO: 511020 - RNA, 19 nt, Homo sapiens
  misc_RNA (1)...(19): siRNA sense strand
gagagacuccguaccaugu

SEQ ID NO: 511021 - RNA, 19 nt, Homo sapiens
  misc_RNA (1)...(19): siRNA sense strand
gaaaguggcaaagcagaug

SEQ ID NO: 511022 - RNA, 19 nt, Homo sapiens
  misc_RNA (1)...(19): siRNA sense strand
gcacagcggagugguaaga

SEQ ID NO: 511023 - RNA, 19 nt, Homo sapiens
  misc_RNA (1)...(19): siRNA sense strand
gagaggaugcaaaucaaga

SEQ ID NO: 511024 - RNA, 19 nt, Homo sapiens
  misc_RNA (1)...(19): siRNA sense strand
gagaaucccaaacaaggaa

SEQ ID NO: 511025 - RNA, 19 nt, Homo sapiens
  misc_RNA (1)...(19): siRNA sense strand
uuggcgagcucgugagaua

SEQ ID NO: 511026 - RNA, 19 nt, Homo sapiens
  misc_RNA (1)...(19): siRNA sense strand
ccacaucaaaugccucaaa

SEQ ID NO: 511027 - RNA, 19 nt, Homo sapiens
  misc_RNA (1)...(19): siRNA sense strand
guuccucaccuguaauaua

SEQ ID NO: 511028 - RNA, 19 nt, Homo sapiens
  misc_RNA (1)...(19): siRNA sense strand
caagagaaauacgaacagu

SEQ ID NO: 511029 - RNA, 19 nt, Homo sapiens
  misc_RNA (1)...(19): siRNA sense strand
acagagagguguugauugc

SEQ ID NO: 511030 - RNA, 19 nt, Homo sapiens
  misc_RNA (1)...(19): siRNA sense strand
gccaagaacuacuucaaaa

SEQ ID NO: 511031 - RNA, 19 nt, Homo sapiens
  misc_RNA (1)...(19): siRNA sense strand
gcacagaaucccgccacua

SEQ ID NO: 511032 - RNA, 19 nt, Homo sapiens
  misc_RNA (1)...(19): siRNA sense strand
uggcuuugcugcugaauuc

SEQ ID NO: 511033 - RNA, 19 nt, Homo sapiens
  misc_RNA (1)...(19): siRNA sense strand
gauacuacacccauccauu

SEQ ID NO: 511034 - RNA, 19 nt, Homo sapiens
  misc_RNA (1)...(19): siRNA sense strand
gaaagaaucagagaagacu

SEQ ID NO: 511035 - RNA, 19 nt, Homo sapiens
  misc_RNA (1)...(19): siRNA sense strand
agaagaaucaucccacuau

SEQ ID NO: 511036 - RNA, 19 nt, Homo sapiens
  misc_RNA (1)...(19): siRNA sense strand
caagcaggaugcagcuaug

SEQ ID NO: 511037 - RNA, 19 nt, Homo sapiens
  misc_RNA (1)...(19): siRNA sense strand
caucaauggccgagaguuu

SEQ ID NO: 511038 - RNA, 19 nt, Homo sapiens
  misc_RNA (1)...(19): siRNA sense strand
gacagcaacuccacaucug

SEQ ID NO: 511039 - RNA, 19 nt, Homo sapiens
  misc_RNA (1)...(19): siRNA sense strand
gaagacagcaacuccacau

SEQ ID NO: 511040 - RNA, 19 nt, Homo sapiens
  misc_RNA (1)...(19): siRNA sense strand
gcagcccauuuaucucaaa

SEQ ID NO: 511041 - RNA, 19 nt, Homo sapiens
  misc_RNA (1)...(19): siRNA sense strand
gaaauacaacucccagacu

SEQ ID NO: 511042 - RNA, 19 nt, Homo sapiens
  misc_RNA (1)...(19): siRNA sense strand
aaggagaaacugucaauga

SEQ ID NO: 511043 - RNA, 19 nt, Homo sapiens
  misc_RNA (1)...(19): siRNA sense strand
gcagaacgcauggguuuca

SEQ ID NO: 511044 - RNA, 19 nt, Homo sapiens
  misc_RNA (1)...(19): siRNA sense strand
guaagaccagacagucaua

SEQ ID NO: 511045 - RNA, 19 nt, Homo sapiens
  misc_RNA (1)...(19): siRNA sense strand
cuaccaagaucaggaacaa

SEQ ID NO: 511046 - RNA, 19 nt, Homo sapiens
  misc_RNA (1)...(19): siRNA sense strand
gaaaguggccaagcaggau

SEQ ID NO: 511047 - RNA, 19 nt, Homo sapiens
  misc_RNA (1)...(19): siRNA sense strand
gauuuaaauuccagguugu

SEQ ID NO: 511048 - RNA, 19 nt, Homo sapiens
  misc_RNA (1)...(19): siRNA sense strand
auacuacacccauccauuu

SEQ ID NO: 511049 - RNA, 19 nt, Homo sapiens
  misc_RNA (1)...(19): siRNA sense strand
ugacuccucugcccugaau

SEQ ID NO: 511050 - RNA, 19 nt, Homo sapiens
  misc_RNA (1)...(19): siRNA sense strand
ccacaucugccuuggaaga

SEQ ID NO: 511051 - RNA, 19 nt, Homo sapiens
  misc_RNA (1)...(19): siRNA sense strand
gaguuccucaccuguaaua

SEQ ID NO: 511052 - RNA, 19 nt, Homo sapiens
  misc_RNA (1)...(19): siRNA sense strand
ugaaggauaugggcuaugg

SEQ ID NO: 511053 - RNA, 19 nt, Homo sapiens
  misc_RNA (1)...(19): siRNA sense strand
ggccaagaacuacuucaaa

SEQ ID NO: 511054 - RNA, 19 nt, Homo sapiens
  misc_RNA (1)...(19): siRNA sense strand
gaaagcugcccgugacuac

SEQ ID NO: 511055 - RNA, 19 nt, Homo sapiens
  misc_RNA (1)...(19): siRNA sense strand
ccagaugacuugaauagua

SEQ ID NO: 511056 - RNA, 19 nt, Homo sapiens
  misc_RNA (1)...(19): siRNA sense strand
gagaaaagcuccaaauaaa

SEQ ID NO: 511057 - RNA, 19 nt, Homo sapiens
  misc_RNA (1)...(19): siRNA sense strand
gaacaaaggaucuuaaagu

SEQ ID NO: 511058 - RNA, 19 nt, Homo sapiens
  misc_RNA (1)...(19): siRNA sense strand
ucaaaugccucaaauaaca

SEQ ID NO: 511059 - RNA, 19 nt, Homo sapiens
  misc_RNA (1)...(19): siRNA sense strand
caucaaaugccucaaauaa

SEQ ID NO: 511060 - RNA, 19 nt, Homo sapiens
  misc_RNA (1)...(19): siRNA sense strand
uaaaugcugugcuaauuga

SEQ ID NO: 511061 - RNA, 19 nt, Homo sapiens
  misc_RNA (1)...(19): siRNA sense strand
ucucaaaucugucacauug

SEQ ID NO: 511062 - RNA, 19 nt, Homo sapiens
  misc_RNA (1)...(19): siRNA sense strand
gcaagaaaguggcaaagca

SEQ ID NO: 511063 - RNA, 19 nt, Homo sapiens
  misc_RNA (1)...(19): siRNA sense strand
gaaaccaccuguucauuac

SEQ ID NO: 511064 - RNA, 19 nt, Homo sapiens
  misc_RNA (1)...(19): siRNA sense strand
gaagaaucaucccacuauu

SEQ ID NO: 511065 - RNA, 19 nt, Homo sapiens
  misc_RNA (1)...(19): siRNA sense strand
ccaugaaccucgauuuaaa

SEQ ID NO: 511066 - RNA, 19 nt, Homo sapiens
  misc_RNA (1)...(19): siRNA sense strand
gcgacuaucucuucaaugu

SEQ ID NO: 511067 - RNA, 19 nt, Homo sapiens
  misc_RNA (1)...(19): siRNA sense strand
gcaagaaaguggccaagca

SEQ ID NO: 511068 - RNA, 19 nt, Homo sapiens
  misc_RNA (1)...(19): siRNA sense strand
gcuauuugcugucguguga

SEQ ID NO: 511069 - RNA, 19 nt, Homo sapiens
  misc_RNA (1)...(19): siRNA sense strand
ggacuacgacaucccuuua

SEQ ID NO: 511070 - RNA, 19 nt, Homo sapiens
  misc_RNA (1)...(19): siRNA sense strand
ugagauaccugaacaccaa

SEQ ID NO: 511071 - RNA, 19 nt, Homo sapiens
  misc_RNA (1)...(19): siRNA sense strand
gagagaggaugcaaaucaa

SEQ ID NO: 511072 - RNA, 19 nt, Homo sapiens
  misc_RNA (1)...(19): siRNA sense strand
ggaugcaaaucaagagaaa

SEQ ID NO: 511073 - RNA, 19 nt, Homo sapiens
  misc_RNA (1)...(19): siRNA sense strand
gcagauggccgcagaggaa

SEQ ID NO: 511074 - RNA, 19 nt, Homo sapiens
  misc_RNA (1)...(19): siRNA sense strand
gagaaagaaucagagaaga

SEQ ID NO: 511075 - RNA, 19 nt, Homo sapiens
  misc_RNA (1)...(19): siRNA sense strand
gaaagaaaucaaucgaguu

SEQ ID NO: 511076 - RNA, 19 nt, Homo sapiens
  misc_RNA (1)...(19): siRNA sense strand
gaacggagaaggcacaauc

SEQ ID NO: 511077 - RNA, 19 nt, Homo sapiens
  misc_RNA (1)...(19): siRNA sense strand
cagaguuccucaccuguaa

SEQ ID NO: 511078 - RNA, 19 nt, Homo sapiens
  misc_RNA (1)...(19): siRNA sense strand
ggagaggcuucaucagguu

SEQ ID NO: 511079 - RNA, 19 nt, Homo sapiens
  misc_RNA (1)...(19): siRNA sense strand
cagaugacuugaauaguau

SEQ ID NO: 511080 - RNA, 19 nt, Homo sapiens
  misc_RNA (1)...(19): siRNA sense strand
caggguauguugacuuuga

SEQ ID NO: 511081 - RNA, 19 nt, Homo sapiens
  misc_RNA (1)...(19): siRNA sense strand
gaaccucgauuuaaauucc

SEQ ID NO: 511082 - RNA, 19 nt, Homo sapiens
  misc_RNA (1)...(19): siRNA sense strand
gguauucccucagcggaua

SEQ ID NO: 511083 - RNA, 19 nt, Homo sapiens
  misc_RNA (1)...(19): siRNA sense strand
gcaagaggccagaccagaa

SEQ ID NO: 511084 - RNA, 19 nt, Homo sapiens
  misc_RNA (1)...(19): siRNA sense strand
gaagaaagaaaucaaucga

SEQ ID NO: 511085 - RNA, 19 nt, Homo sapiens
  misc_RNA (1)...(19): siRNA sense strand
cccaguaguuuccugcuua

SEQ ID NO: 511086 - RNA, 19 nt, Homo sapiens
  misc_RNA (1)...(19): siRNA sense strand
guaauauacccacaucaaa

SEQ ID NO: 511087 - RNA, 19 nt, Homo sapiens
  misc_RNA (1)...(19): siRNA sense strand
agauauaaaugcugugcua

SEQ ID NO: 511088 - RNA, 19 nt, Homo sapiens
  misc_RNA (1)...(19): siRNA sense strand
gacuaucucuucaaugugu

SEQ ID NO: 511089 - RNA, 19 nt, Homo sapiens
  misc_RNA (1)...(19): siRNA sense strand
cgaaggauaguauauuuga

SEQ ID NO: 511090 - RNA, 19 nt, Homo sapiens
  misc_RNA (1)...(19): siRNA sense strand
guuagaauaugcccaguuc

SEQ ID NO: 511091 - RNA, 19 nt, Homo sapiens
  misc_RNA (1)...(19): siRNA sense strand
uaccaaggcccgagauaua

SEQ ID NO: 511092 - RNA, 19 nt, Homo sapiens
  misc_RNA (1)...(19): siRNA sense strand
ggaauccagugacauugug

SEQ ID NO: 511093 - RNA, 19 nt, Homo sapiens
  misc_RNA (1)...(19): siRNA sense strand
gagaugcccuccuucuaca

SEQ ID NO: 511094 - RNA, 19 nt, Homo sapiens
  misc_RNA (1)...(19): siRNA sense strand
caccuuccaugaccagaua

SEQ ID NO: 511095 - RNA, 19 nt, Homo sapiens
  misc_RNA (1)...(19): siRNA sense strand
caucugacccgugcuauuu

SEQ ID NO: 511096 - RNA, 19 nt, Homo sapiens
  misc_RNA (1)...(19): siRNA sense strand
gccaagguuuccaguacua

SEQ ID NO: 511097 - RNA, 19 nt, Homo sapiens
  misc_RNA (1)...(19): siRNA sense strand
gcagggaucuacugagacu

SEQ ID NO: 511098 - RNA, 19 nt, Homo sapiens
  misc_RNA (1)...(19): siRNA sense strand
gcagaguuccucaccugua

SEQ ID NO: 511099 - RNA, 19 nt, Homo sapiens
  misc_RNA (1)...(19): siRNA sense strand
cgagagaggaugcaaauca

SEQ ID NO: 511100 - RNA, 19 nt, Homo sapiens
  misc_RNA (1)...(19): siRNA sense strand
gaagggcaagcuacagaaa

SEQ ID NO: 511101 - RNA, 19 nt, Homo sapiens
  misc_RNA (1)...(19): siRNA sense strand
ucagguuucucuacaguga

SEQ ID NO: 511102 - RNA, 19 nt, Homo sapiens
  misc_RNA (1)...(19): siRNA sense strand
caaguucguuuaccaagca

SEQ ID NO: 511103 - RNA, 19 nt, Homo sapiens
  misc_RNA (1)...(19): siRNA sense strand
ccaacuccauggcuucuga

SEQ ID NO: 511104 - RNA, 19 nt, Homo sapiens
  misc_RNA (1)...(19): siRNA sense strand
uauacucccuggcaaagaa

SEQ ID NO: 511105 - RNA, 19 nt, Homo sapiens
  misc_RNA (1)...(19): siRNA sense strand
ccgcagggaucuacugaga

SEQ ID NO: 511106 - RNA, 19 nt, Homo sapiens
  misc_RNA (1)...(19): siRNA sense strand
uuaagaagcucugcuccuu

SEQ ID NO: 511107 - RNA, 19 nt, Homo sapiens
  misc_RNA (1)...(19): siRNA sense strand
gagaugggagugcauuuga

SEQ ID NO: 511108 - RNA, 19 nt, Homo sapiens
  misc_RNA (1)...(19): siRNA sense strand
ugaaagccaugacaauucu

SEQ ID NO: 511109 - RNA, 19 nt, Homo sapiens
  misc_RNA (1)...(19): siRNA sense strand
gcaggaugcagcuaugaaa

SEQ ID NO: 511110 - RNA, 19 nt, Homo sapiens
  misc_RNA (1)...(19): siRNA sense strand
ccacagagaaagaaucaga

SEQ ID NO: 511111 - RNA, 19 nt, Homo sapiens
  misc_RNA (1)...(19): siRNA sense strand
gcagagucagcauauauga

SEQ ID NO: 511112 - RNA, 19 nt, Homo sapiens
  misc_RNA (1)...(19): siRNA sense strand
ccaguaguuuccugcuuaa

SEQ ID NO: 511113 - RNA, 19 nt, Homo sapiens
  misc_RNA (1)...(19): siRNA sense strand
ccacagagagguguugauu

SEQ ID NO: 511114 - RNA, 19 nt, Homo sapiens
  misc_RNA (1)...(19): siRNA sense strand
ugcgaaggauaguauauuu

SEQ ID NO: 511115 - RNA, 19 nt, Homo sapiens
  misc_RNA (1)...(19): siRNA sense strand
agaaggcccugcccaugaa

SEQ ID NO: 511116 - RNA, 19 nt, Homo sapiens
  misc_RNA (1)...(19): siRNA sense strand
gaaccugucauaaaguuag

SEQ ID NO: 511117 - RNA, 19 nt, Homo sapiens
  misc_RNA (1)...(19): siRNA sense strand
ggaacugaguaucuaccaa

SEQ ID NO: 511118 - RNA, 19 nt, Homo sapiens
  misc_RNA (1)...(19): siRNA sense strand
gcacagcggagugguaaga

SEQ ID NO: 511119 - RNA, 19 nt, Homo sapiens
  misc_RNA (1)...(19): siRNA sense strand
uaugggaacuggauuagca

SEQ ID NO: 511120 - RNA, 19 nt, Homo sapiens
  misc_RNA (1)...(19): siRNA sense strand
gagagacuccguaccaugu

SEQ ID NO: 511121 - RNA, 19 nt, Homo sapiens
  misc_RNA (1)...(19): siRNA sense strand
gaaaguggcaaagcagaug

SEQ ID NO: 511122 - RNA, 19 nt, Homo sapiens
  misc_RNA (1)...(19): siRNA sense strand
gcacagcggagugguaaga

SEQ ID NO: 511123 - RNA, 19 nt, Homo sapiens
  misc_RNA (1)...(19): siRNA sense strand
gagaggaugcaaaucaaga

SEQ ID NO: 511124 - RNA, 19 nt, Homo sapiens
  misc_RNA (1)...(19): siRNA sense strand
gagaaucccaaacaaggaa

SEQ ID NO: 511125 - RNA, 19 nt, Homo sapiens
  misc_RNA (1)...(19): siRNA sense strand
uuggcgagcucgugagaua

SEQ ID NO: 511126 - RNA, 19 nt, Homo sapiens
  misc_RNA (1)...(19): siRNA sense strand
ccacaucaaaugccucaaa

SEQ ID NO: 511127 - RNA, 19 nt, Homo sapiens
  misc_RNA (1)...(19): siRNA sense strand
guuccucaccuguaauaua

SEQ ID NO: 511128 - RNA, 19 nt, Homo sapiens
  misc_RNA (1)...(19): siRNA sense strand
caagagaaauacgaacagu

SEQ ID NO: 511129 - RNA, 19 nt, Homo sapiens
  misc_RNA (1)...(19): siRNA sense strand
acagagagguguugauugc

SEQ ID NO: 511130 - RNA, 19 nt, Homo sapiens
  misc_RNA (1)...(19): siRNA sense strand
gccaagaacuacuucaaaa

SEQ ID NO: 511131 - RNA, 19 nt, Homo sapiens
  misc_RNA (1)...(19): siRNA sense strand
gcacagaaucccgccacua

SEQ ID NO: 511132 - RNA, 19 nt, Homo sapiens
  misc_RNA (1)...(19): siRNA sense strand
uggcuuugcugcugaauuc

SEQ ID NO: 511133 - RNA, 19 nt, Homo sapiens
  misc_RNA (1)...(19): siRNA sense strand
gauacuacacccauccauu

SEQ ID NO: 511134 - RNA, 19 nt, Homo sapiens
  misc_RNA (1)...(19): siRNA sense strand
gaaagaaucagagaagacu

SEQ ID NO: 511135 - RNA, 19 nt, Homo sapiens
  misc_RNA (1)...(19): siRNA sense strand
agaagaaucaucccacuau

SEQ ID NO: 511136 - RNA, 19 nt, Homo sapiens
  misc_RNA (1)...(19): siRNA sense strand
caagcaggaugcagcuaug

SEQ ID NO: 511137 - RNA, 19 nt, Homo sapiens
  misc_RNA (1)...(19): siRNA sense strand
caucaauggccgagaguuu

SEQ ID NO: 511138 - RNA, 19 nt, Homo sapiens
  misc_RNA (1)...(19): siRNA sense strand
gacagcaacuccacaucug

SEQ ID NO: 511139 - RNA, 19 nt, Homo sapiens
  misc_RNA (1)...(19): siRNA sense strand
gaagacagcaacuccacau

SEQ ID NO: 511140 - RNA, 19 nt, Homo sapiens
  misc_RNA (1)...(19): siRNA sense strand
gcagcccauuuaucucaaa

SEQ ID NO: 511141 - RNA, 19 nt, Homo sapiens
  misc_RNA (1)...(19): siRNA sense strand
gaaauacaacucccagacu

SEQ ID NO: 511142 - RNA, 19 nt, Homo sapiens
  misc_RNA (1)...(19): siRNA sense strand
aaggagaaacugucaauga

SEQ ID NO: 511143 - RNA, 19 nt, Homo sapiens
  misc_RNA (1)...(19): siRNA sense strand
gcagaacgcauggguuuca

SEQ ID NO: 511144 - RNA, 19 nt, Homo sapiens
  misc_RNA (1)...(19): siRNA sense strand
guaagaccagacagucaua

SEQ ID NO: 511145 - RNA, 19 nt, Homo sapiens
  misc_RNA (1)...(19): siRNA sense strand
cuaccaagaucaggaacaa

SEQ ID NO: 511146 - RNA, 19 nt, Homo sapiens
  misc_RNA (1)...(19): siRNA sense strand
gaaaguggccaagcaggau

SEQ ID NO: 511147 - RNA, 19 nt, Homo sapiens
  misc_RNA (1)...(19): siRNA sense strand
gauuuaaauuccagguugu

SEQ ID NO: 511148 - RNA, 19 nt, Homo sapiens
  misc_RNA (1)...(19): siRNA sense strand
auacuacacccauccauuu

SEQ ID NO: 511149 - RNA, 19 nt, Homo sapiens
  misc_RNA (1)...(19): siRNA sense strand
ugacuccucugcccugaau

SEQ ID NO: 511150 - RNA, 19 nt, Homo sapiens
  misc_RNA (1)...(19): siRNA sense strand
ccacaucugccuuggaaga

SEQ ID NO: 511151 - RNA, 19 nt, Homo sapiens
  misc_RNA (1)...(19): siRNA sense strand
gaguuccucaccuguaaua

SEQ ID NO: 511152 - RNA, 19 nt, Homo sapiens
  misc_RNA (1)...(19): siRNA sense strand
ugaaggauaugggcuaugg

SEQ ID NO: 511153 - RNA, 19 nt, Homo sapiens
  misc_RNA (1)...(19): siRNA sense strand
ggccaagaacuacuucaaa

SEQ ID NO: 511154 - RNA, 19 nt, Homo sapiens
  misc_RNA (1)...(19): siRNA sense strand
gaaagcugcccgugacuac

SEQ ID NO: 511155 - RNA, 19 nt, Homo sapiens
  misc_RNA (1)...(19): siRNA sense strand
ccagaugacuugaauagua

SEQ ID NO: 511156 - RNA, 19 nt, Homo sapiens
  misc_RNA (1)...(19): siRNA sense strand
gagaaaagcuccaaauaaa

SEQ ID NO: 511157 - RNA, 19 nt, Homo sapiens
  misc_RNA (1)...(19): siRNA sense strand
gaacaaaggaucuuaaagu

SEQ ID NO: 511158 - RNA, 19 nt, Homo sapiens
  misc_RNA (1)...(19): siRNA sense strand
ucaaaugccucaaauaaca

SEQ ID NO: 511159 - RNA, 19 nt, Homo sapiens
  misc_RNA (1)...(19): siRNA sense strand
caucaaaugccucaaauaa

SEQ ID NO: 511160 - RNA, 19 nt, Homo sapiens
  misc_RNA (1)...(19): siRNA sense strand
uaaaugcugugcuaauuga

SEQ ID NO: 511161 - RNA, 19 nt, Homo sapiens
  misc_RNA (1)...(19): siRNA sense strand
ucucaaaucugucacauug

SEQ ID NO: 511162 - RNA, 19 nt, Homo sapiens
  misc_RNA (1)...(19): siRNA sense strand
gcaagaaaguggcaaagca

SEQ ID NO: 511163 - RNA, 19 nt, Homo sapiens
  misc_RNA (1)...(19): siRNA sense strand
gaaaccaccuguucauuac

SEQ ID NO: 511164 - RNA, 19 nt, Homo sapiens
  misc_RNA (1)...(19): siRNA sense strand
gaagaaucaucccacuauu

SEQ ID NO: 511165 - RNA, 19 nt, Homo sapiens
  misc_RNA (1)...(19): siRNA sense strand
ccaugaaccucgauuuaaa

SEQ ID NO: 511166 - RNA, 19 nt, Homo sapiens
  misc_RNA (1)...(19): siRNA sense strand
gcgacuaucucuucaaugu

SEQ ID NO: 511167 - RNA, 19 nt, Homo sapiens
  misc_RNA (1)...(19): siRNA sense strand
gcaagaaaguggccaagca

SEQ ID NO: 511168 - RNA, 19 nt, Homo sapiens
  misc_RNA (1)...(19): siRNA sense strand
gcuauuugcugucguguga

SEQ ID NO: 511169 - RNA, 19 nt, Homo sapiens
  misc_RNA (1)...(19): siRNA sense strand
ggacuacgacaucccuuua

SEQ ID NO: 511170 - RNA, 19 nt, Homo sapiens
  misc_RNA (1)...(19): siRNA sense strand
ugagauaccugaacaccaa

SEQ ID NO: 511171 - RNA, 19 nt, Homo sapiens
  misc_RNA (1)...(19): siRNA sense strand
gagagaggaugcaaaucaa

SEQ ID NO: 511172 - RNA, 19 nt, Homo sapiens
  misc_RNA (1)...(19): siRNA sense strand
ggaugcaaaucaagagaaa

SEQ ID NO: 511173 - RNA, 19 nt, Homo sapiens
  misc_RNA (1)...(19): siRNA sense strand
gcagauggccgcagaggaa

SEQ ID NO: 511174 - RNA, 19 nt, Homo sapiens
  misc_RNA (1)...(19): siRNA sense strand
gagaaagaaucagagaaga

SEQ ID NO: 511175 - RNA, 19 nt, Homo sapiens
  misc_RNA (1)...(19): siRNA sense strand
gaaagaaaucaaucgaguu

SEQ ID NO: 511176 - RNA, 19 nt, Homo sapiens
  misc_RNA (1)...(19): siRNA sense strand
gaacggagaaggcacaauc

SEQ ID NO: 511177 - RNA, 19 nt, Homo sapiens
  misc_RNA (1)...(19): siRNA sense strand
cagaguuccucaccuguaa

SEQ ID NO: 511178 - RNA, 19 nt, Homo sapiens
  misc_RNA (1)...(19): siRNA sense strand
ggagaggcuucaucagguu

SEQ ID NO: 511179 - RNA, 19 nt, Homo sapiens
  misc_RNA (1)...(19): siRNA sense strand
cagaugacuugaauaguau

SEQ ID NO: 511180 - RNA, 19 nt, Homo sapiens
  misc_RNA (1)...(19): siRNA sense strand
caggguauguugacuuuga

SEQ ID NO: 511181 - RNA, 19 nt, Homo sapiens
  misc_RNA (1)...(19): siRNA sense strand
gaaccucgauuuaaauucc

SEQ ID NO: 511182 - RNA, 19 nt, Homo sapiens
  misc_RNA (1)...(19): siRNA sense strand
gguauucccucagcggaua

SEQ ID NO: 511183 - RNA, 19 nt, Homo sapiens
  misc_RNA (1)...(19): siRNA sense strand
gcaagaggccagaccagaa

SEQ ID NO: 511184 - RNA, 19 nt, Homo sapiens
  misc_RNA (1)...(19): siRNA sense strand
gaagaaagaaaucaaucga

SEQ ID NO: 511185 - RNA, 19 nt, Homo sapiens
  misc_RNA (1)...(19): siRNA sense strand
cccaguaguuuccugcuua

SEQ ID NO: 511186 - RNA, 19 nt, Homo sapiens
  misc_RNA (1)...(19): siRNA sense strand
guaauauacccacaucaaa

SEQ ID NO: 511187 - RNA, 19 nt, Homo sapiens
  misc_RNA (1)...(19): siRNA sense strand
agauauaaaugcugugcua

SEQ ID NO: 511188 - RNA, 19 nt, Homo sapiens
  misc_RNA (1)...(19): siRNA sense strand
gacuaucucuucaaugugu

SEQ ID NO: 511189 - RNA, 19 nt, Homo sapiens
  misc_RNA (1)...(19): siRNA sense strand
cgaaggauaguauauuuga

SEQ ID NO: 511190 - RNA, 19 nt, Homo sapiens
  misc_RNA (1)...(19): siRNA sense strand
guuagaauaugcccaguuc

SEQ ID NO: 511191 - RNA, 19 nt, Homo sapiens
  misc_RNA (1)...(19): siRNA sense strand
uaccaaggcccgagauaua

SEQ ID NO: 511192 - RNA, 19 nt, Homo sapiens
  misc_RNA (1)...(19): siRNA sense strand
ggaauccagugacauugug

SEQ ID NO: 511193 - RNA, 19 nt, Homo sapiens
  misc_RNA (1)...(19): siRNA sense strand
gagaugcccuccuucuaca

SEQ ID NO: 511194 - RNA, 19 nt, Homo sapiens
  misc_RNA (1)...(19): siRNA sense strand
caccuuccaugaccagaua

SEQ ID NO: 511195 - RNA, 19 nt, Homo sapiens
  misc_RNA (1)...(19): siRNA sense strand
caucugacccgugcuauuu

SEQ ID NO: 511196 - RNA, 19 nt, Homo sapiens
  misc_RNA (1)...(19): siRNA sense strand
gccaagguuuccaguacua

SEQ ID NO: 511197 - RNA, 19 nt, Homo sapiens
  misc_RNA (1)...(19): siRNA sense strand
gcagggaucuacugagacu

SEQ ID NO: 511198 - RNA, 19 nt, Homo sapiens
  misc_RNA (1)...(19): siRNA sense strand
gcagaguuccucaccugua

SEQ ID NO: 511199 - RNA, 19 nt, Homo sapiens
  misc_RNA (1)...(19): siRNA sense strand
cgagagaggaugcaaauca

SEQ ID NO: 511200 - RNA, 19 nt, Homo sapiens
  misc_RNA (1)...(19): siRNA sense strand
gaagggcaagcuacagaaa

SEQ ID NO: 511201 - RNA, 19 nt, Homo sapiens
  misc_RNA (1)...(19): siRNA sense strand
ucagguuucucuacaguga

SEQ ID NO: 511202 - RNA, 19 nt, Homo sapiens
  misc_RNA (1)...(19): siRNA sense strand
caaguucguuuaccaagca

SEQ ID NO: 511203 - RNA, 19 nt, Homo sapiens
  misc_RNA (1)...(19): siRNA sense strand
ccaacuccauggcuucuga

SEQ ID NO: 511204 - RNA, 19 nt, Homo sapiens
  misc_RNA (1)...(19): siRNA sense strand
uauacucccuggcaaagaa

SEQ ID NO: 511205 - RNA, 19 nt, Homo sapiens
  misc_RNA (1)...(19): siRNA sense strand
ccgcagggaucuacugaga

SEQ ID NO: 511206 - RNA, 19 nt, Homo sapiens
  misc_RNA (1)...(19): siRNA sense strand
uuaagaagcucugcuccuu

SEQ ID NO: 511207 - RNA, 19 nt, Homo sapiens
  misc_RNA (1)...(19): siRNA sense strand
gagaugggagugcauuuga

SEQ ID NO: 511208 - RNA, 19 nt, Homo sapiens
  misc_RNA (1)...(19): siRNA sense strand
ugaaagccaugacaauucu

SEQ ID NO: 511209 - RNA, 19 nt, Homo sapiens
  misc_RNA (1)...(19): siRNA sense strand
gcaggaugcagcuaugaaa

SEQ ID NO: 511210 - RNA, 19 nt, Homo sapiens
  misc_RNA (1)...(19): siRNA sense strand
ccacagagaaagaaucaga

SEQ ID NO: 511211 - RNA, 19 nt, Homo sapiens
  misc_RNA (1)...(19): siRNA sense strand
gcagagucagcauauauga

SEQ ID NO: 511212 - RNA, 19 nt, Homo sapiens
  misc_RNA (1)...(19): siRNA sense strand
ccaguaguuuccugcuuaa

SEQ ID NO: 511213 - RNA, 19 nt, Homo sapiens
  misc_RNA (1)...(19): siRNA sense strand
ccacagagagguguugauu

SEQ ID NO: 511214 - RNA, 19 nt, Homo sapiens
  misc_RNA (1)...(19): siRNA sense strand
ugcgaaggauaguauauuu

SEQ ID NO: 511215 - RNA, 19 nt, Homo sapiens
  misc_RNA (1)...(19): siRNA sense strand
agaaggcccugcccaugaa

SEQ ID NO: 511216 - RNA, 19 nt, Homo sapiens
  misc_RNA (1)...(19): siRNA sense strand
gaaccugucauaaaguuag

SEQ ID NO: 511217 - RNA, 19 nt, Homo sapiens
  misc_RNA (1)...(19): siRNA sense strand
ggaacugaguaucuaccaa

SEQ ID NO: 511218 - RNA, 19 nt, Homo sapiens
  misc_RNA (1)...(19): siRNA sense strand
gcacagcggagugguaaga

SEQ ID NO: 511219 - RNA, 19 nt, Homo sapiens
  misc_RNA (1)...(19): siRNA sense strand
uaugggaacuggauuagca

SEQ ID NO: 511220 - RNA, 19 nt, Homo sapiens
  misc_RNA (1)...(19): siRNA sense strand
gagagacuccguaccaugu

SEQ ID NO: 511221 - RNA, 19 nt, Homo sapiens
  misc_RNA (1)...(19): siRNA sense strand
gaaaguggcaaagcagaug

SEQ ID NO: 511222 - RNA, 19 nt, Homo sapiens
  misc_RNA (1)...(19): siRNA sense strand
gcacagcggagugguaaga

SEQ ID NO: 511223 - RNA, 19 nt, Homo sapiens
  misc_RNA (1)...(19): siRNA sense strand
gagaggaugcaaaucaaga

SEQ ID NO: 511224 - RNA, 19 nt, Homo sapiens
  misc_RNA (1)...(19): siRNA sense strand
gagaaucccaaacaaggaa

SEQ ID NO: 511225 - RNA, 19 nt, Homo sapiens
  misc_RNA (1)...(19): siRNA sense strand
uuggcgagcucgugagaua

SEQ ID NO: 511226 - RNA, 19 nt, Homo sapiens
  misc_RNA (1)...(19): siRNA sense strand
ccacaucaaaugccucaaa

SEQ ID NO: 511227 - RNA, 19 nt, Homo sapiens
  misc_RNA (1)...(19): siRNA sense strand
guuccucaccuguaauaua

SEQ ID NO: 511228 - RNA, 19 nt, Homo sapiens
  misc_RNA (1)...(19): siRNA sense strand
caagagaaauacgaacagu

SEQ ID NO: 511229 - RNA, 19 nt, Homo sapiens
  misc_RNA (1)...(19): siRNA sense strand
acagagagguguugauugc

SEQ ID NO: 511230 - RNA, 19 nt, Homo sapiens
  misc_RNA (1)...(19): siRNA sense strand
gccaagaacuacuucaaaa

SEQ ID NO: 511231 - RNA, 19 nt, Homo sapiens
  misc_RNA (1)...(19): siRNA sense strand
gcacagaaucccgccacua

SEQ ID NO: 511232 - RNA, 19 nt, Homo sapiens
  misc_RNA (1)...(19): siRNA sense strand
uggcuuugcugcugaauuc

SEQ ID NO: 511233 - RNA, 19 nt, Homo sapiens
  misc_RNA (1)...(19): siRNA sense strand
gauacuacacccauccauu

SEQ ID NO: 511234 - RNA, 19 nt, Homo sapiens
  misc_RNA (1)...(19): siRNA sense strand
gaaagaaucagagaagacu

SEQ ID NO: 511235 - RNA, 19 nt, Homo sapiens
  misc_RNA (1)...(19): siRNA sense strand
agaagaaucaucccacuau

SEQ ID NO: 511236 - RNA, 19 nt, Homo sapiens
  misc_RNA (1)...(19): siRNA sense strand
caagcaggaugcagcuaug

SEQ ID NO: 511237 - RNA, 19 nt, Homo sapiens
  misc_RNA (1)...(19): siRNA sense strand
caucaauggccgagaguuu

SEQ ID NO: 511238 - RNA, 19 nt, Homo sapiens
  misc_RNA (1)...(19): siRNA sense strand
gacagcaacuccacaucug

SEQ ID NO: 511239 - RNA, 19 nt, Homo sapiens
  misc_RNA (1)...(19): siRNA sense strand
gaagacagcaacuccacau

SEQ ID NO: 511240 - RNA, 19 nt, Homo sapiens
  misc_RNA (1)...(19): siRNA sense strand
gcagcccauuuaucucaaa

SEQ ID NO: 511241 - RNA, 19 nt, Homo sapiens
  misc_RNA (1)...(19): siRNA sense strand
gaaauacaacucccagacu

SEQ ID NO: 511242 - RNA, 19 nt, Homo sapiens
  misc_RNA (1)...(19): siRNA sense strand
aaggagaaacugucaauga

SEQ ID NO: 511243 - RNA, 19 nt, Homo sapiens
  misc_RNA (1)...(19): siRNA sense strand
gcagaacgcauggguuuca

SEQ ID NO: 511244 - RNA, 19 nt, Homo sapiens
  misc_RNA (1)...(19): siRNA sense strand
guaagaccagacagucaua

SEQ ID NO: 511245 - RNA, 19 nt, Homo sapiens
  misc_RNA (1)...(19): siRNA sense strand
cuaccaagaucaggaacaa

SEQ ID NO: 511246 - RNA, 19 nt, Homo sapiens
  misc_RNA (1)...(19): siRNA sense strand
gaaaguggccaagcaggau

SEQ ID NO: 511247 - RNA, 19 nt, Homo sapiens
  misc_RNA (1)...(19): siRNA sense strand
gauuuaaauuccagguugu

SEQ ID NO: 511248 - RNA, 19 nt, Homo sapiens
  misc_RNA (1)...(19): siRNA sense strand
auacuacacccauccauuu

SEQ ID NO: 511249 - RNA, 19 nt, Homo sapiens
  misc_RNA (1)...(19): siRNA sense strand
ugacuccucugcccugaau

SEQ ID NO: 511250 - RNA, 19 nt, Homo sapiens
  misc_RNA (1)...(19): siRNA sense strand
ccacaucugccuuggaaga

SEQ ID NO: 511251 - RNA, 19 nt, Homo sapiens
  misc_RNA (1)...(19): siRNA sense strand
gaguuccucaccuguaaua

SEQ ID NO: 511252 - RNA, 19 nt, Homo sapiens
  misc_RNA (1)...(19): siRNA sense strand
ugaaggauaugggcuaugg

SEQ ID NO: 511253 - RNA, 19 nt, Homo sapiens
  misc_RNA (1)...(19): siRNA sense strand
ggccaagaacuacuucaaa

SEQ ID NO: 511254 - RNA, 19 nt, Homo sapiens
  misc_RNA (1)...(19): siRNA sense strand
gaaagcugcccgugacuac

SEQ ID NO: 511255 - RNA, 19 nt, Homo sapiens
  misc_RNA (1)...(19): siRNA sense strand
ccagaugacuugaauagua

SEQ ID NO: 511256 - RNA, 19 nt, Homo sapiens
  misc_RNA (1)...(19): siRNA sense strand
gagaaaagcuccaaauaaa

SEQ ID NO: 511257 - RNA, 19 nt, Homo sapiens
  misc_RNA (1)...(19): siRNA sense strand
gaacaaaggaucuuaaagu

SEQ ID NO: 511258 - RNA, 19 nt, Homo sapiens
  misc_RNA (1)...(19): siRNA sense strand
ucaaaugccucaaauaaca

SEQ ID NO: 511259 - RNA, 19 nt, Homo sapiens
  misc_RNA (1)...(19): siRNA sense strand
caucaaaugccucaaauaa

SEQ ID NO: 511260 - RNA, 19 nt, Homo sapiens
  misc_RNA (1)...(19): siRNA sense strand
uaaaugcugugcuaauuga

SEQ ID NO: 511261 - RNA, 19 nt, Homo sapiens
  misc_RNA (1)...(19): siRNA sense strand
ucucaaaucugucacauug

SEQ ID NO: 511262 - RNA, 19 nt, Homo sapiens
  misc_RNA (1)...(19): siRNA sense strand
gcaagaaaguggcaaagca

SEQ ID NO: 511263 - RNA, 19 nt, Homo sapiens
  misc_RNA (1)...(19): siRNA sense strand
gaaaccaccuguucauuac

SEQ ID NO: 511264 - RNA, 19 nt, Homo sapiens
  misc_RNA (1)...(19): siRNA sense strand
gaagaaucaucccacuauu

SEQ ID NO: 511265 - RNA, 19 nt, Homo sapiens
  misc_RNA (1)...(19): siRNA sense strand
ccaugaaccucgauuuaaa

SEQ ID NO: 511266 - RNA, 19 nt, Homo sapiens
  misc_RNA (1)...(19): siRNA sense strand
gcgacuaucucuucaaugu

SEQ ID NO: 511267 - RNA, 19 nt, Homo sapiens
  misc_RNA (1)...(19): siRNA sense strand
gcaagaaaguggccaagca

SEQ ID NO: 511268 - RNA, 19 nt, Homo sapiens
  misc_RNA (1)...(19): siRNA sense strand
gcuauuugcugucguguga

SEQ ID NO: 511269 - RNA, 19 nt, Homo sapiens
  misc_RNA (1)...(19): siRNA sense strand
ggacuacgacaucccuuua

SEQ ID NO: 511270 - RNA, 19 nt, Homo sapiens
  misc_RNA (1)...(19): siRNA sense strand
ugagauaccugaacaccaa

SEQ ID NO: 511271 - RNA, 19 nt, Homo sapiens
  misc_RNA (1)...(19): siRNA sense strand
gagagaggaugcaaaucaa

SEQ ID NO: 511272 - RNA, 19 nt, Homo sapiens
  misc_RNA (1)...(19): siRNA sense strand
ggaugcaaaucaagagaaa

SEQ ID NO: 511273 - RNA, 19 nt, Homo sapiens
  misc_RNA (1)...(19): siRNA sense strand
gcagauggccgcagaggaa

SEQ ID NO: 511274 - RNA, 19 nt, Homo sapiens
  misc_RNA (1)...(19): siRNA sense strand
gagaaagaaucagagaaga

SEQ ID NO: 511275 - RNA, 19 nt, Homo sapiens
  misc_RNA (1)...(19): siRNA sense strand
gaaagaaaucaaucgaguu

SEQ ID NO: 511276 - RNA, 19 nt, Homo sapiens
  misc_RNA (1)...(19): siRNA sense strand
gaacggagaaggcacaauc

SEQ ID NO: 511277 - RNA, 19 nt, Homo sapiens
  misc_RNA (1)...(19): siRNA sense strand
cagaguuccucaccuguaa

SEQ ID NO: 511278 - RNA, 19 nt, Homo sapiens
  misc_RNA (1)...(19): siRNA sense strand
ggagaggcuucaucagguu

SEQ ID NO: 511279 - RNA, 19 nt, Homo sapiens
  misc_RNA (1)...(19): siRNA sense strand
cagaugacuugaauaguau

SEQ ID NO: 511280 - RNA, 19 nt, Homo sapiens
  misc_RNA (1)...(19): siRNA sense strand
caggguauguugacuuuga

SEQ ID NO: 511281 - RNA, 19 nt, Homo sapiens
  misc_RNA (1)...(19): siRNA sense strand
gaaccucgauuuaaauucc

SEQ ID NO: 511282 - RNA, 19 nt, Homo sapiens
  misc_RNA (1)...(19): siRNA sense strand
gguauucccucagcggaua

SEQ ID NO: 511283 - RNA, 19 nt, Homo sapiens
  misc_RNA (1)...(19): siRNA sense strand
gcaagaggccagaccagaa

SEQ ID NO: 511284 - RNA, 19 nt, Homo sapiens
  misc_RNA (1)...(19): siRNA sense strand
gaagaaagaaaucaaucga

SEQ ID NO: 511285 - RNA, 19 nt, Homo sapiens
  misc_RNA (1)...(19): siRNA sense strand
cccaguaguuuccugcuua

SEQ ID NO: 511286 - RNA, 19 nt, Homo sapiens
  misc_RNA (1)...(19): siRNA sense strand
guaauauacccacaucaaa

SEQ ID NO: 511287 - RNA, 19 nt, Homo sapiens
  misc_RNA (1)...(19): siRNA sense strand
agauauaaaugcugugcua

SEQ ID NO: 511288 - RNA, 19 nt, Homo sapiens
  misc_RNA (1)...(19): siRNA sense strand
gacuaucucuucaaugugu

SEQ ID NO: 511289 - RNA, 19 nt, Homo sapiens
  misc_RNA (1)...(19): siRNA sense strand
cgaaggauaguauauuuga

SEQ ID NO: 511290 - RNA, 19 nt, Homo sapiens
  misc_RNA (1)...(19): siRNA sense strand
guuagaauaugcccaguuc

SEQ ID NO: 511291 - RNA, 19 nt, Homo sapiens
  misc_RNA (1)...(19): siRNA sense strand
uaccaaggcccgagauaua

SEQ ID NO: 511292 - RNA, 19 nt, Homo sapiens
  misc_RNA (1)...(19): siRNA sense strand
ggaauccagugacauugug

SEQ ID NO: 511293 - RNA, 19 nt, Homo sapiens
  misc_RNA (1)...(19): siRNA sense strand
gagaugcccuccuucuaca

SEQ ID NO: 511294 - RNA, 19 nt, Homo sapiens
  misc_RNA (1)...(19): siRNA sense strand
caccuuccaugaccagaua

SEQ ID NO: 511295 - RNA, 19 nt, Homo sapiens
  misc_RNA (1)...(19): siRNA sense strand
caucugacccgugcuauuu

SEQ ID NO: 511296 - RNA, 19 nt, Homo sapiens
  misc_RNA (1)...(19): siRNA sense strand
gccaagguuuccaguacua

SEQ ID NO: 511297 - RNA, 19 nt, Homo sapiens
  misc_RNA (1)...(19): siRNA sense strand
gcagggaucuacugagacu

SEQ ID NO: 511298 - RNA, 19 nt, Homo sapiens
  misc_RNA (1)...(19): siRNA sense strand
gcagaguuccucaccugua

SEQ ID NO: 511299 - RNA, 19 nt, Homo sapiens
  misc_RNA (1)...(19): siRNA sense strand
cgagagaggaugcaaauca

SEQ ID NO: 511300 - RNA, 19 nt, Homo sapiens
  misc_RNA (1)...(19): siRNA sense strand
gaagggcaagcuacagaaa

SEQ ID NO: 511301 - RNA, 19 nt, Homo sapiens
  misc_RNA (1)...(19): siRNA sense strand
ucagguuucucuacaguga

SEQ ID NO: 511302 - RNA, 19 nt, Homo sapiens
  misc_RNA (1)...(19): siRNA sense strand
caaguucguuuaccaagca

SEQ ID NO: 511303 - RNA, 19 nt, Homo sapiens
  misc_RNA (1)...(19): siRNA sense strand
ccaacuccauggcuucuga

SEQ ID NO: 511304 - RNA, 19 nt, Homo sapiens
  misc_RNA (1)...(19): siRNA sense strand
uauacucccuggcaaagaa

SEQ ID NO: 511305 - RNA, 19 nt, Homo sapiens
  misc_RNA (1)...(19): siRNA sense strand
ccgcagggaucuacugaga

SEQ ID NO: 511306 - RNA, 19 nt, Homo sapiens
  misc_RNA (1)...(19): siRNA sense strand
uuaagaagcucugcuccuu

SEQ ID NO: 511307 - RNA, 19 nt, Homo sapiens
  misc_RNA (1)...(19): siRNA sense strand
gagaugggagugcauuuga

SEQ ID NO: 511308 - RNA, 19 nt, Homo sapiens
  misc_RNA (1)...(19): siRNA sense strand
ugaaagccaugacaauucu

SEQ ID NO: 511309 - RNA, 19 nt, Homo sapiens
  misc_RNA (1)...(19): siRNA sense strand
gcaggaugcagcuaugaaa

SEQ ID NO: 511310 - RNA, 19 nt, Homo sapiens
  misc_RNA (1)...(19): siRNA sense strand
ccacagagaaagaaucaga

SEQ ID NO: 511311 - RNA, 19 nt, Homo sapiens
  misc_RNA (1)...(19): siRNA sense strand
gcagagucagcauauauga

SEQ ID NO: 511312 - RNA, 19 nt, Homo sapiens
  misc_RNA (1)...(19): siRNA sense strand
ccaguaguuuccugcuuaa

SEQ ID NO: 511313 - RNA, 19 nt, Homo sapiens
  misc_RNA (1)...(19): siRNA sense strand
ccacagagagguguugauu

SEQ ID NO: 511314 - RNA, 19 nt, Homo sapiens
  misc_RNA (1)...(19): siRNA sense strand
ugcgaaggauaguauauuu

SEQ ID NO: 511315 - RNA, 19 nt, Homo sapiens
  misc_RNA (1)...(19): siRNA sense strand
agaaggcccugcccaugaa

SEQ ID NO: 511316 - RNA, 19 nt, Homo sapiens
  misc_RNA (1)...(19): siRNA sense strand
gaaccugucauaaaguuag

SEQ ID NO: 511317 - RNA, 19 nt, Homo sapiens
  misc_RNA (1)...(19): siRNA sense strand
ggaacugaguaucuaccaa

SEQ ID NO: 511318 - RNA, 19 nt, Homo sapiens
  misc_RNA (1)...(19): siRNA sense strand
gcacagcggagugguaaga

SEQ ID NO: 511319 - RNA, 19 nt, Homo sapiens
  misc_RNA (1)...(19): siRNA sense strand
uaugggaacuggauuagca

SEQ ID NO: 511320 - RNA, 19 nt, Homo sapiens
  misc_RNA (1)...(19): siRNA sense strand
gagagacuccguaccaugu

SEQ ID NO: 511321 - RNA, 19 nt, Homo sapiens
  misc_RNA (1)...(19): siRNA sense strand
gaaaguggcaaagcagaug

SEQ ID NO: 511322 - RNA, 19 nt, Homo sapiens
  misc_RNA (1)...(19): siRNA sense strand
gcacagcggagugguaaga

SEQ ID NO: 511323 - RNA, 19 nt, Homo sapiens
  misc_RNA (1)...(19): siRNA sense strand
gagaggaugcaaaucaaga

SEQ ID NO: 511324 - RNA, 19 nt, Homo sapiens
  misc_RNA (1)...(19): siRNA sense strand
gagaaucccaaacaaggaa

SEQ ID NO: 511325 - RNA, 19 nt, Homo sapiens
  misc_RNA (1)...(19): siRNA sense strand
uuggcgagcucgugagaua

SEQ ID NO: 511326 - RNA, 19 nt, Homo sapiens
  misc_RNA (1)...(19): siRNA sense strand
ccacaucaaaugccucaaa

SEQ ID NO: 511327 - RNA, 19 nt, Homo sapiens
  misc_RNA (1)...(19): siRNA sense strand
guuccucaccuguaauaua

SEQ ID NO: 511328 - RNA, 19 nt, Homo sapiens
  misc_RNA (1)...(19): siRNA sense strand
caagagaaauacgaacagu

SEQ ID NO: 511329 - RNA, 19 nt, Homo sapiens
  misc_RNA (1)...(19): siRNA sense strand
acagagagguguugauugc

SEQ ID NO: 511330 - RNA, 19 nt, Homo sapiens
  misc_RNA (1)...(19): siRNA sense strand
gccaagaacuacuucaaaa

SEQ ID NO: 511331 - RNA, 19 nt, Homo sapiens
  misc_RNA (1)...(19): siRNA sense strand
gcacagaaucccgccacua

SEQ ID NO: 511332 - RNA, 19 nt, Homo sapiens
  misc_RNA (1)...(19): siRNA sense strand
uggcuuugcugcugaauuc

SEQ ID NO: 511333 - RNA, 19 nt, Homo sapiens
  misc_RNA (1)...(19): siRNA sense strand
gauacuacacccauccauu

SEQ ID NO: 511334 - RNA, 19 nt, Homo sapiens
  misc_RNA (1)...(19): siRNA sense strand
gaaagaaucagagaagacu

SEQ ID NO: 511335 - RNA, 19 nt, Homo sapiens
  misc_RNA (1)...(19): siRNA sense strand
agaagaaucaucccacuau

SEQ ID NO: 511336 - RNA, 19 nt, Homo sapiens
  misc_RNA (1)...(19): siRNA sense strand
caagcaggaugcagcuaug

SEQ ID NO: 511337 - RNA, 19 nt, Homo sapiens
  misc_RNA (1)...(19): siRNA sense strand
caucaauggccgagaguuu

SEQ ID NO: 511338 - RNA, 19 nt, Homo sapiens
  misc_RNA (1)...(19): siRNA sense strand
gacagcaacuccacaucug

SEQ ID NO: 511339 - RNA, 19 nt, Homo sapiens
  misc_RNA (1)...(19): siRNA sense strand
gaagacagcaacuccacau

SEQ ID NO: 511340 - RNA, 19 nt, Homo sapiens
  misc_RNA (1)...(19): siRNA sense strand
gcagcccauuuaucucaaa

SEQ ID NO: 511341 - RNA, 19 nt, Homo sapiens
  misc_RNA (1)...(19): siRNA sense strand
gaaauacaacucccagacu

SEQ ID NO: 511342 - RNA, 19 nt, Homo sapiens
  misc_RNA (1)...(19): siRNA sense strand
aaggagaaacugucaauga

SEQ ID NO: 511343 - RNA, 19 nt, Homo sapiens
  misc_RNA (1)...(19): siRNA sense strand
gcagaacgcauggguuuca

SEQ ID NO: 511344 - RNA, 19 nt, Homo sapiens
  misc_RNA (1)...(19): siRNA sense strand
guaagaccagacagucaua

SEQ ID NO: 511345 - RNA, 19 nt, Homo sapiens
  misc_RNA (1)...(19): siRNA sense strand
cuaccaagaucaggaacaa

SEQ ID NO: 511346 - RNA, 19 nt, Homo sapiens
  misc_RNA (1)...(19): siRNA sense strand
gaaaguggccaagcaggau

SEQ ID NO: 511347 - RNA, 19 nt, Homo sapiens
  misc_RNA (1)...(19): siRNA sense strand
gauuuaaauuccagguugu

SEQ ID NO: 511348 - RNA, 19 nt, Homo sapiens
  misc_RNA (1)...(19): siRNA sense strand
auacuacacccauccauuu

SEQ ID NO: 511349 - RNA, 19 nt, Homo sapiens
  misc_RNA (1)...(19): siRNA sense strand
ugacuccucugcccugaau

SEQ ID NO: 511350 - RNA, 19 nt, Homo sapiens
  misc_RNA (1)...(19): siRNA sense strand
ccacaucugccuuggaaga

SEQ ID NO: 511351 - RNA, 19 nt, Homo sapiens
  misc_RNA (1)...(19): siRNA sense strand
gaguuccucaccuguaaua

SEQ ID NO: 511352 - RNA, 19 nt, Homo sapiens
  misc_RNA (1)...(19): siRNA sense strand
ugaaggauaugggcuaugg

SEQ ID NO: 511353 - RNA, 19 nt, Homo sapiens
  misc_RNA (1)...(19): siRNA sense strand
ggccaagaacuacuucaaa

SEQ ID NO: 511354 - RNA, 19 nt, Homo sapiens
  misc_RNA (1)...(19): siRNA sense strand
gaaagcugcccgugacuac

SEQ ID NO: 511355 - RNA, 19 nt, Homo sapiens
  misc_RNA (1)...(19): siRNA sense strand
ccagaugacuugaauagua

SEQ ID NO: 511356 - RNA, 19 nt, Homo sapiens
  misc_RNA (1)...(19): siRNA sense strand
gagaaaagcuccaaauaaa

SEQ ID NO: 511357 - RNA, 19 nt, Homo sapiens
  misc_RNA (1)...(19): siRNA sense strand
gaacaaaggaucuuaaagu

SEQ ID NO: 511358 - RNA, 19 nt, Homo sapiens
  misc_RNA (1)...(19): siRNA sense strand
ucaaaugccucaaauaaca

SEQ ID NO: 511359 - RNA, 19 nt, Homo sapiens
  misc_RNA (1)...(19): siRNA sense strand
caucaaaugccucaaauaa

SEQ ID NO: 511360 - RNA, 19 nt, Homo sapiens
  misc_RNA (1)...(19): siRNA sense strand
uaaaugcugugcuaauuga

SEQ ID NO: 511361 - RNA, 19 nt, Homo sapiens
  misc_RNA (1)...(19): siRNA sense strand
ucucaaaucugucacauug

SEQ ID NO: 511362 - RNA, 19 nt, Homo sapiens
  misc_RNA (1)...(19): siRNA sense strand
gcaagaaaguggcaaagca

SEQ ID NO: 511363 - RNA, 19 nt, Homo sapiens
  misc_RNA (1)...(19): siRNA sense strand
gaaaccaccuguucauuac

SEQ ID NO: 511364 - RNA, 19 nt, Homo sapiens
  misc_RNA (1)...(19): siRNA sense strand
gaagaaucaucccacuauu

SEQ ID NO: 511365 - RNA, 19 nt, Homo sapiens
  misc_RNA (1)...(19): siRNA sense strand
ccaugaaccucgauuuaaa

SEQ ID NO: 511366 - RNA, 19 nt, Homo sapiens
  misc_RNA (1)...(19): siRNA sense strand
gcgacuaucucuucaaugu

SEQ ID NO: 511367 - RNA, 19 nt, Homo sapiens
  misc_RNA (1)...(19): siRNA sense strand
gcaagaaaguggccaagca

SEQ ID NO: 511368 - RNA, 19 nt, Homo sapiens
  misc_RNA (1)...(19): siRNA sense strand
gcuauuugcugucguguga

SEQ ID NO: 511369 - RNA, 19 nt, Homo sapiens
  misc_RNA (1)...(19): siRNA sense strand
ggacuacgacaucccuuua

SEQ ID NO: 511370 - RNA, 19 nt, Homo sapiens
  misc_RNA (1)...(19): siRNA sense strand
ugagauaccugaacaccaa

SEQ ID NO: 511371 - RNA, 19 nt, Homo sapiens
  misc_RNA (1)...(19): siRNA sense strand
gagagaggaugcaaaucaa

SEQ ID NO: 511372 - RNA, 19 nt, Homo sapiens
  misc_RNA (1)...(19): siRNA sense strand
ggaugcaaaucaagagaaa

SEQ ID NO: 511373 - RNA, 19 nt, Homo sapiens
  misc_RNA (1)...(19): siRNA sense strand
gcagauggccgcagaggaa

SEQ ID NO: 511374 - RNA, 19 nt, Homo sapiens
  misc_RNA (1)...(19): siRNA sense strand
gagaaagaaucagagaaga

SEQ ID NO: 511375 - RNA, 19 nt, Homo sapiens
  misc_RNA (1)...(19): siRNA sense strand
gaaagaaaucaaucgaguu

SEQ ID NO: 511376 - RNA, 19 nt, Homo sapiens
  misc_RNA (1)...(19): siRNA sense strand
gaacggagaaggcacaauc

SEQ ID NO: 511377 - RNA, 19 nt, Homo sapiens
  misc_RNA (1)...(19): siRNA sense strand
cagaguuccucaccuguaa

SEQ ID NO: 511378 - RNA, 19 nt, Homo sapiens
  misc_RNA (1)...(19): siRNA sense strand
ggagaggcuucaucagguu

SEQ ID NO: 511379 - RNA, 19 nt, Homo sapiens
  misc_RNA (1)...(19): siRNA sense strand
cagaugacuugaauaguau

SEQ ID NO: 511380 - RNA, 19 nt, Homo sapiens
  misc_RNA (1)...(19): siRNA sense strand
caggguauguugacuuuga

SEQ ID NO: 511381 - RNA, 19 nt, Homo sapiens
  misc_RNA (1)...(19): siRNA sense strand
gaaccucgauuuaaauucc

SEQ ID NO: 511382 - RNA, 19 nt, Homo sapiens
  misc_RNA (1)...(19): siRNA sense strand
gguauucccucagcggaua

SEQ ID NO: 511383 - RNA, 19 nt, Homo sapiens
  misc_RNA (1)...(19): siRNA sense strand
gcaagaggccagaccagaa

SEQ ID NO: 511384 - RNA, 19 nt, Homo sapiens
  misc_RNA (1)...(19): siRNA sense strand
gaagaaagaaaucaaucga

SEQ ID NO: 511385 - RNA, 19 nt, Homo sapiens
  misc_RNA (1)...(19): siRNA sense strand
cccaguaguuuccugcuua

SEQ ID NO: 511386 - RNA, 19 nt, Homo sapiens
  misc_RNA (1)...(19): siRNA sense strand
guaauauacccacaucaaa

SEQ ID NO: 511387 - RNA, 19 nt, Homo sapiens
  misc_RNA (1)...(19): siRNA sense strand
agauauaaaugcugugcua

SEQ ID NO: 511388 - RNA, 19 nt, Homo sapiens
  misc_RNA (1)...(19): siRNA sense strand
gacuaucucuucaaugugu

SEQ ID NO: 511389 - RNA, 19 nt, Homo sapiens
  misc_RNA (1)...(19): siRNA sense strand
cgaaggauaguauauuuga

SEQ ID NO: 511390 - RNA, 19 nt, Homo sapiens
  misc_RNA (1)...(19): siRNA sense strand
guuagaauaugcccaguuc

SEQ ID NO: 511391 - RNA, 19 nt, Homo sapiens
  misc_RNA (1)...(19): siRNA sense strand
uaccaaggcccgagauaua

SEQ ID NO: 511392 - RNA, 19 nt, Homo sapiens
  misc_RNA (1)...(19): siRNA sense strand
ggaauccagugacauugug

SEQ ID NO: 511393 - RNA, 19 nt, Homo sapiens
  misc_RNA (1)...(19): siRNA sense strand
gagaugcccuccuucuaca

SEQ ID NO: 511394 - RNA, 19 nt, Homo sapiens
  misc_RNA (1)...(19): siRNA sense strand
caccuuccaugaccagaua

SEQ ID NO: 511395 - RNA, 19 nt, Homo sapiens
  misc_RNA (1)...(19): siRNA sense strand
caucugacccgugcuauuu

SEQ ID NO: 511396 - RNA, 19 nt, Homo sapiens
  misc_RNA (1)...(19): siRNA sense strand
gccaagguuuccaguacua

SEQ ID NO: 511397 - RNA, 19 nt, Homo sapiens
  misc_RNA (1)...(19): siRNA sense strand
gcagggaucuacugagacu

SEQ ID NO: 511398 - RNA, 19 nt, Homo sapiens
  misc_RNA (1)...(19): siRNA sense strand
gcagaguuccucaccugua

SEQ ID NO: 511399 - RNA, 19 nt, Homo sapiens
  misc_RNA (1)...(19): siRNA sense strand
cgagagaggaugcaaauca

SEQ ID NO: 511400 - RNA, 19 nt, Homo sapiens
  misc_RNA (1)...(19): siRNA sense strand
gaagggcaagcuacagaaa

SEQ ID NO: 511401 - RNA, 19 nt, Homo sapiens
  misc_RNA (1)...(19): siRNA sense strand
ucagguuucucuacaguga

SEQ ID NO: 511402 - RNA, 19 nt, Homo sapiens
  misc_RNA (1)...(19): siRNA sense strand
caaguucguuuaccaagca

SEQ ID NO: 511403 - RNA, 19 nt, Homo sapiens
  misc_RNA (1)...(19): siRNA sense strand
ccaacuccauggcuucuga

SEQ ID NO: 511404 - RNA, 19 nt, Homo sapiens
  misc_RNA (1)...(19): siRNA sense strand
uauacucccuggcaaagaa

SEQ ID NO: 511405 - RNA, 19 nt, Homo sapiens
  misc_RNA (1)...(19): siRNA sense strand
ccgcagggaucuacugaga

SEQ ID NO: 511406 - RNA, 19 nt, Homo sapiens
  misc_RNA (1)...(19): siRNA sense strand
uuaagaagcucugcuccuu

SEQ ID NO: 511407 - RNA, 19 nt, Homo sapiens
  misc_RNA (1)...(19): siRNA sense strand
gagaugggagugcauuuga

SEQ ID NO: 511408 - RNA, 19 nt, Homo sapiens
  misc_RNA (1)...(19): siRNA sense strand
ugaaagccaugacaauucu

SEQ ID NO: 511409 - RNA, 19 nt, Homo sapiens
  misc_RNA (1)...(19): siRNA sense strand
gcaggaugcagcuaugaaa

SEQ ID NO: 511410 - RNA, 19 nt, Homo sapiens
  misc_RNA (1)...(19): siRNA sense strand
ccacagagaaagaaucaga

SEQ ID NO: 511411 - RNA, 19 nt, Homo sapiens
  misc_RNA (1)...(19): siRNA sense strand
gcagagucagcauauauga

SEQ ID NO: 511412 - RNA, 19 nt, Homo sapiens
  misc_RNA (1)...(19): siRNA sense strand
ccaguaguuuccugcuuaa

SEQ ID NO: 511413 - RNA, 19 nt, Homo sapiens
  misc_RNA (1)...(19): siRNA sense strand
ccacagagagguguugauu

SEQ ID NO: 511414 - RNA, 19 nt, Homo sapiens
  misc_RNA (1)...(19): siRNA sense strand
ugcgaaggauaguauauuu

SEQ ID NO: 511415 - RNA, 19 nt, Homo sapiens
  misc_RNA (1)...(19): siRNA sense strand
agaaggcccugcccaugaa

SEQ ID NO: 511416 - RNA, 19 nt, Homo sapiens
  misc_RNA (1)...(19): siRNA sense strand
gaaccugucauaaaguuag

SEQ ID NO: 511417 - RNA, 19 nt, Homo sapiens
  misc_RNA (1)...(19): siRNA sense strand
ggaacugaguaucuaccaa

SEQ ID NO: 511418 - RNA, 19 nt, Homo sapiens
  misc_RNA (1)...(19): siRNA sense strand
gcacagcggagugguaaga

SEQ ID NO: 511419 - RNA, 19 nt, Homo sapiens
  misc_RNA (1)...(19): siRNA sense strand
uaugggaacuggauuagca

SEQ ID NO: 511420 - RNA, 19 nt, Homo sapiens
  misc_RNA (1)...(19): siRNA sense strand
gagagacuccguaccaugu

SEQ ID NO: 511421 - RNA, 19 nt, Homo sapiens
  misc_RNA (1)...(19): siRNA sense strand
gaaaguggcaaagcagaug

SEQ ID NO: 511422 - RNA, 19 nt, Homo sapiens
  misc_RNA (1)...(19): siRNA sense strand
gcacagcggagugguaaga

SEQ ID NO: 511423 - RNA, 19 nt, Homo sapiens
  misc_RNA (1)...(19): siRNA sense strand
gagaggaugcaaaucaaga

SEQ ID NO: 511424 - RNA, 19 nt, Homo sapiens
  misc_RNA (1)...(19): siRNA sense strand
gagaaucccaaacaaggaa

SEQ ID NO: 511425 - RNA, 19 nt, Homo sapiens
  misc_RNA (1)...(19): siRNA sense strand
uuggcgagcucgugagaua

SEQ ID NO: 511426 - RNA, 19 nt, Homo sapiens
  misc_RNA (1)...(19): siRNA sense strand
ccacaucaaaugccucaaa

SEQ ID NO: 511427 - RNA, 19 nt, Homo sapiens
  misc_RNA (1)...(19): siRNA sense strand
guuccucaccuguaauaua

SEQ ID NO: 511428 - RNA, 19 nt, Homo sapiens
  misc_RNA (1)...(19): siRNA sense strand
caagagaaauacgaacagu

SEQ ID NO: 511429 - RNA, 19 nt, Homo sapiens
  misc_RNA (1)...(19): siRNA sense strand
acagagagguguugauugc

SEQ ID NO: 511430 - RNA, 19 nt, Homo sapiens
  misc_RNA (1)...(19): siRNA sense strand
gccaagaacuacuucaaaa

SEQ ID NO: 511431 - RNA, 19 nt, Homo sapiens
  misc_RNA (1)...(19): siRNA sense strand
gcacagaaucccgccacua

SEQ ID NO: 511432 - RNA, 19 nt, Homo sapiens
  misc_RNA (1)...(19): siRNA sense strand
uggcuuugcugcugaauuc

SEQ ID NO: 511433 - RNA, 19 nt, Homo sapiens
  misc_RNA (1)...(19): siRNA sense strand
gauacuacacccauccauu

SEQ ID NO: 511434 - RNA, 19 nt, Homo sapiens
  misc_RNA (1)...(19): siRNA sense strand
gaaagaaucagagaagacu

SEQ ID NO: 511435 - RNA, 19 nt, Homo sapiens
  misc_RNA (1)...(19): siRNA sense strand
agaagaaucaucccacuau

SEQ ID NO: 511436 - RNA, 19 nt, Homo sapiens
  misc_RNA (1)...(19): siRNA sense strand
caagcaggaugcagcuaug

SEQ ID NO: 511437 - RNA, 19 nt, Homo sapiens
  misc_RNA (1)...(19): siRNA sense strand
caucaauggccgagaguuu

SEQ ID NO: 511438 - RNA, 19 nt, Homo sapiens
  misc_RNA (1)...(19): siRNA sense strand
gacagcaacuccacaucug

SEQ ID NO: 511439 - RNA, 19 nt, Homo sapiens
  misc_RNA (1)...(19): siRNA sense strand
gaagacagcaacuccacau

SEQ ID NO: 511440 - RNA, 19 nt, Homo sapiens
  misc_RNA (1)...(19): siRNA sense strand
gcagcccauuuaucucaaa

SEQ ID NO: 511441 - RNA, 19 nt, Homo sapiens
  misc_RNA (1)...(19): siRNA sense strand
gaaauacaacucccagacu

SEQ ID NO: 511442 - RNA, 19 nt, Homo sapiens
  misc_RNA (1)...(19): siRNA sense strand
aaggagaaacugucaauga

SEQ ID NO: 511443 - RNA, 19 nt, Homo sapiens
  misc_RNA (1)...(19): siRNA sense strand
gcagaacgcauggguuuca

SEQ ID NO: 511444 - RNA, 19 nt, Homo sapiens
  misc_RNA (1)...(19): siRNA sense strand
guaagaccagacagucaua

SEQ ID NO: 511445 - RNA, 19 nt, Homo sapiens
  misc_RNA (1)...(19): siRNA sense strand
cuaccaagaucaggaacaa

SEQ ID NO: 511446 - RNA, 19 nt, Homo sapiens
  misc_RNA (1)...(19): siRNA sense strand
gaaaguggccaagcaggau

SEQ ID NO: 511447 - RNA, 19 nt, Homo sapiens
  misc_RNA (1)...(19): siRNA sense strand
gauuuaaauuccagguugu

SEQ ID NO: 511448 - RNA, 19 nt, Homo sapiens
  misc_RNA (1)...(19): siRNA sense strand
auacuacacccauccauuu

SEQ ID NO: 511449 - RNA, 19 nt, Homo sapiens
  misc_RNA (1)...(19): siRNA sense strand
ugacuccucugcccugaau

SEQ ID NO: 511450 - RNA, 19 nt, Homo sapiens
  misc_RNA (1)...(19): siRNA sense strand
ccacaucugccuuggaaga

SEQ ID NO: 511451 - RNA, 19 nt, Homo sapiens
  misc_RNA (1)...(19): siRNA sense strand
gaguuccucaccuguaaua

SEQ ID NO: 511452 - RNA, 19 nt, Homo sapiens
  misc_RNA (1)...(19): siRNA sense strand
ugaaggauaugggcuaugg

SEQ ID NO: 511453 - RNA, 19 nt, Homo sapiens
  misc_RNA (1)...(19): siRNA sense strand
ggccaagaacuacuucaaa

SEQ ID NO: 511454 - RNA, 19 nt, Homo sapiens
  misc_RNA (1)...(19): siRNA sense strand
gaaagcugcccgugacuac

SEQ ID NO: 511455 - RNA, 19 nt, Homo sapiens
  misc_RNA (1)...(19): siRNA sense strand
ggaagaugcugaaaucaaa

SEQ ID NO: 511456 - RNA, 19 nt, Homo sapiens
  misc_RNA (1)...(19): siRNA sense strand
gcauucaacucaaggagaa

SEQ ID NO: 511457 - RNA, 19 nt, Homo sapiens
  misc_RNA (1)...(19): siRNA sense strand
gcaagaggcagaagaguug

SEQ ID NO: 511458 - RNA, 19 nt, Homo sapiens
  misc_RNA (1)...(19): siRNA sense strand
gcgagaaucuggagagaag

SEQ ID NO: 511459 - RNA, 19 nt, Homo sapiens
  misc_RNA (1)...(19): siRNA sense strand
ggccugaccucuccaugaa

SEQ ID NO: 511460 - RNA, 19 nt, Homo sapiens
  misc_RNA (1)...(19): siRNA sense strand
ucgaagagcugaggagaga

SEQ ID NO: 511461 - RNA, 19 nt, Homo sapiens
  misc_RNA (1)...(19): siRNA sense strand
ucagcaaccugccacuuga

SEQ ID NO: 511462 - RNA, 19 nt, Homo sapiens
  misc_RNA (1)...(19): siRNA sense strand
gucagaggcuacacaagaa

SEQ ID NO: 511463 - RNA, 19 nt, Homo sapiens
  misc_RNA (1)...(19): siRNA sense strand
aaaccaacgucuugaagca

SEQ ID NO: 511464 - RNA, 19 nt, Homo sapiens
  misc_RNA (1)...(19): siRNA sense strand
gagcgagaaucuggagaga

SEQ ID NO: 511465 - RNA, 19 nt, Homo sapiens
  misc_RNA (1)...(19): siRNA sense strand
guacugcauucaacucaag

SEQ ID NO: 511466 - RNA, 19 nt, Homo sapiens
  misc_RNA (1)...(19): siRNA sense strand
uguggaagaugcugaaauc

SEQ ID NO: 511467 - RNA, 19 nt, Homo sapiens
  misc_RNA (1)...(19): siRNA sense strand
ugucagaggcuacacaaga

SEQ ID NO: 511468 - RNA, 19 nt, Homo sapiens
  misc_RNA (1)...(19): siRNA sense strand
acgcagacaucacggaaau

SEQ ID NO: 511469 - RNA, 19 nt, Homo sapiens
  misc_RNA (1)...(19): siRNA sense strand
ggcaagaggcagaagaguu

SEQ ID NO: 511470 - RNA, 19 nt, Homo sapiens
  misc_RNA (1)...(19): siRNA sense strand
ccaaggggaucccgaagaa

SEQ ID NO: 511471 - RNA, 19 nt, Homo sapiens
  misc_RNA (1)...(19): siRNA sense strand
gcgccaggccuuagccaaa

SEQ ID NO: 511472 - RNA, 19 nt, Homo sapiens
  misc_RNA (1)...(19): siRNA sense strand
gaccucagcggccaacuca

SEQ ID NO: 511473 - RNA, 19 nt, Homo sapiens
  misc_RNA (1)...(19): siRNA sense strand
gaccaucuacacuugaaga

SEQ ID NO: 511474 - RNA, 19 nt, Homo sapiens
  misc_RNA (1)...(19): siRNA sense strand
gggccugaccucuccauga

SEQ ID NO: 511475 - RNA, 19 nt, Homo sapiens
  misc_RNA (1)...(19): siRNA sense strand
gguacugcauucaacucaa

SEQ ID NO: 511476 - RNA, 19 nt, Homo sapiens
  misc_RNA (1)...(19): siRNA sense strand
ggaggcagcagugcaggaa

SEQ ID NO: 511477 - RNA, 19 nt, Homo sapiens
  misc_RNA (1)...(19): siRNA sense strand
gcuguucaccggcaucgaa

SEQ ID NO: 511478 - RNA, 19 nt, Homo sapiens
  misc_RNA (1)...(19): siRNA sense strand
cggaugagcugugcaccau

SEQ ID NO: 511479 - RNA, 19 nt, Homo sapiens
  misc_RNA (1)...(19): siRNA sense strand
ucuggaccaucuacacuug

SEQ ID NO: 511480 - RNA, 19 nt, Homo sapiens
  misc_RNA (1)...(19): siRNA sense strand
uggaagaugcugaaaucaa

SEQ ID NO: 511481 - RNA, 19 nt, Homo sapiens
  misc_RNA (1)...(19): siRNA sense strand
gaugugcucccuccacgau

SEQ ID NO: 511482 - RNA, 19 nt, Homo sapiens
  misc_RNA (1)...(19): siRNA sense strand
aggagaagauggccacucu

SEQ ID NO: 511483 - RNA, 19 nt, Homo sapiens
  misc_RNA (1)...(19): siRNA sense strand
gcuggccucuccuggaaca

SEQ ID NO: 511484 - RNA, 19 nt, Homo sapiens
  misc_RNA (1)...(19): siRNA sense strand
ucaaggagaacugcuggaa

SEQ ID NO: 511485 - RNA, 19 nt, Homo sapiens
  misc_RNA (1)...(19): siRNA sense strand
agaugaagccagaggagaa

SEQ ID NO: 511486 - RNA, 19 nt, Homo sapiens
  misc_RNA (1)...(19): siRNA sense strand
ccaacgucuugaagcagaa

SEQ ID NO: 511487 - RNA, 19 nt, Homo sapiens
  misc_RNA (1)...(19): siRNA sense strand
gaagccagaggagaagaug

SEQ ID NO: 511488 - RNA, 19 nt, Homo sapiens
  misc_RNA (1)...(19): siRNA sense strand
guggagcggucagcagugu

SEQ ID NO: 511489 - RNA, 19 nt, Homo sapiens
  misc_RNA (1)...(19): siRNA sense strand
uggaccaucuacacuugaa

SEQ ID NO: 511490 - RNA, 19 nt, Homo sapiens
  misc_RNA (1)...(19): siRNA sense strand
cgaucuggcaguccaaaga

SEQ ID NO: 511491 - RNA, 19 nt, Homo sapiens
  misc_RNA (1)...(19): siRNA sense strand
ugcaggagccggaggagaa

SEQ ID NO: 511492 - RNA, 19 nt, Homo sapiens
  misc_RNA (1)...(19): siRNA sense strand
cagggucgacggcuuccua

SEQ ID NO: 511493 - RNA, 19 nt, Homo sapiens
  misc_RNA (1)...(19): siRNA sense strand
agaaccuacugcugacaga

SEQ ID NO: 511494 - RNA, 19 nt, Homo sapiens
  misc_RNA (1)...(19): siRNA sense strand
gcgagcaggaauugcagaa

SEQ ID NO: 511495 - RNA, 19 nt, Homo sapiens
  misc_RNA (1)...(19): siRNA sense strand
gaucuggcaguccaaagag

SEQ ID NO: 511496 - RNA, 19 nt, Homo sapiens
  misc_RNA (1)...(19): siRNA sense strand
aaaagaaggccgugucguu

SEQ ID NO: 511497 - RNA, 19 nt, Homo sapiens
  misc_RNA (1)...(19): siRNA sense strand
ggagagaaggcggcaagag

SEQ ID NO: 511498 - RNA, 19 nt, Homo sapiens
  misc_RNA (1)...(19): siRNA sense strand
ggaauugcagaagcuguuc

SEQ ID NO: 511499 - RNA, 19 nt, Homo sapiens
  misc_RNA (1)...(19): siRNA sense strand
uaagaaaggucgaagauau

SEQ ID NO: 511500 - RNA, 19 nt, Homo sapiens
  misc_RNA (1)...(19): siRNA sense strand
gaccauggauaauaagaaa

SEQ ID NO: 511501 - RNA, 19 nt, Homo sapiens
  misc_RNA (1)...(19): siRNA sense strand
ggaaagacuaugagaguuu

SEQ ID NO: 511502 - RNA, 19 nt, Homo sapiens
  misc_RNA (1)...(19): siRNA sense strand
gaaagacuaugagaguuug

SEQ ID NO: 511503 - RNA, 19 nt, Homo sapiens
  misc_RNA (1)...(19): siRNA sense strand
gaggucaaaugcuaucuga

SEQ ID NO: 511504 - RNA, 19 nt, Homo sapiens
  misc_RNA (1)...(19): siRNA sense strand
gagcuggccucccucaguu

SEQ ID NO: 511505 - RNA, 19 nt, Homo sapiens
  misc_RNA (1)...(19): siRNA sense strand
uacggaagauccaguuuaa

SEQ ID NO: 511506 - RNA, 19 nt, Homo sapiens
  misc_RNA (1)...(19): siRNA sense strand
caaugacccuuaccuggaa

SEQ ID NO: 511507 - RNA, 19 nt, Homo sapiens
  misc_RNA (1)...(19): siRNA sense strand
gauaugaggcggugaagug

SEQ ID NO: 511508 - RNA, 19 nt, Homo sapiens
  misc_RNA (1)...(19): siRNA sense strand
uggagaccauggauaauaa

SEQ ID NO: 511509 - RNA, 19 nt, Homo sapiens
  misc_RNA (1)...(19): siRNA sense strand
gaagauaugaggcggugaa

SEQ ID NO: 511510 - RNA, 19 nt, Homo sapiens
  misc_RNA (1)...(19): siRNA sense strand
ggcagcagguuccgggaua

SEQ ID NO: 511511 - RNA, 19 nt, Homo sapiens
  misc_RNA (1)...(19): siRNA sense strand
ggucaaaugcuaucugaau

SEQ ID NO: 511512 - RNA, 19 nt, Homo sapiens
  misc_RNA (1)...(19): siRNA sense strand
ugaaguggauggugguguu

SEQ ID NO: 511513 - RNA, 19 nt, Homo sapiens
  misc_RNA (1)...(19): siRNA sense strand
ggaggaggaugagauucuu

SEQ ID NO: 511514 - RNA, 19 nt, Homo sapiens
  misc_RNA (1)...(19): siRNA sense strand
acuaugagaguuuggauua

SEQ ID NO: 511515 - RNA, 19 nt, Homo sapiens
  misc_RNA (1)...(19): siRNA sense strand
gcguaaaggugccaggaau

SEQ ID NO: 511516 - RNA, 19 nt, Homo sapiens
  misc_RNA (1)...(19): siRNA sense strand
ggaggaggaggaugagauu

SEQ ID NO: 511517 - RNA, 19 nt, Homo sapiens
  misc_RNA (1)...(19): siRNA sense strand
gaccauccuuggagaaaca

SEQ ID NO: 511518 - RNA, 19 nt, Homo sapiens
  misc_RNA (1)...(19): siRNA sense strand
gaugagauucuuccaagga

SEQ ID NO: 511519 - RNA, 19 nt, Homo sapiens
  misc_RNA (1)...(19): siRNA sense strand
gucaaaugcuaucugaaug

SEQ ID NO: 511520 - RNA, 19 nt, Homo sapiens
  misc_RNA (1)...(19): siRNA sense strand
uaugagaguuuggauuaug

SEQ ID NO: 511521 - RNA, 19 nt, Homo sapiens
  misc_RNA (1)...(19): siRNA sense strand
uuacggaagauccaguuua

SEQ ID NO: 511522 - RNA, 19 nt, Homo sapiens
  misc_RNA (1)...(19): siRNA sense strand
uaaccucaccuuugucuuc

SEQ ID NO: 511523 - RNA, 19 nt, Homo sapiens
  misc_RNA (1)...(19): siRNA sense strand
uacccgaggucaaaugcua

SEQ ID NO: 511524 - RNA, 19 nt, Homo sapiens
  misc_RNA (1)...(19): siRNA sense strand
guucugggauucaguuugg

SEQ ID NO: 511525 - RNA, 19 nt, Homo sapiens
  misc_RNA (1)...(19): siRNA sense strand
ggauuaugaucgcuguauc

SEQ ID NO: 511526 - RNA, 19 nt, Homo sapiens
  misc_RNA (1)...(19): siRNA sense strand
accaagggcucacguggaa

SEQ ID NO: 511527 - RNA, 19 nt, Homo sapiens
  misc_RNA (1)...(19): siRNA sense strand
gauaauaagaaaggucgaa

SEQ ID NO: 511528 - RNA, 19 nt, Homo sapiens
  misc_RNA (1)...(19): siRNA sense strand
ggaggagugcagccagaaa

SEQ ID NO: 511529 - RNA, 19 nt, Homo sapiens
  misc_RNA (1)...(19): siRNA sense strand
gaaguggauggugguguuu

SEQ ID NO: 511530 - RNA, 19 nt, Homo sapiens
  misc_RNA (1)...(19): siRNA sense strand
ccaaggaaagacuaugaga

SEQ ID NO: 511531 - RNA, 19 nt, Homo sapiens
  misc_RNA (1)...(19): siRNA sense strand
agaaaggucgaagauauga

SEQ ID NO: 511532 - RNA, 19 nt, Homo sapiens
  misc_RNA (1)...(19): siRNA sense strand
uccuugaacuccuggguuu

SEQ ID NO: 511533 - RNA, 19 nt, Homo sapiens
  misc_RNA (1)...(19): siRNA sense strand
gaggaugagauucuuccaa

SEQ ID NO: 511534 - RNA, 19 nt, Homo sapiens
  misc_RNA (1)...(19): siRNA sense strand
cacaggaggaggaggauga

SEQ ID NO: 511535 - RNA, 19 nt, Homo sapiens
  misc_RNA (1)...(19): siRNA sense strand
uggaguugcugcagcuuuc

SEQ ID NO: 511536 - RNA, 19 nt, Homo sapiens
  misc_RNA (1)...(19): siRNA sense strand
aaggaaagacuaugagagu

SEQ ID NO: 511537 - RNA, 19 nt, Homo sapiens
  misc_RNA (1)...(19): siRNA sense strand
aauaagaaaggucgaagau

SEQ ID NO: 511538 - RNA, 19 nt, Homo sapiens
  misc_RNA (1)...(19): siRNA sense strand
uaauaagaaaggucgaaga

SEQ ID NO: 511539 - RNA, 19 nt, Homo sapiens
  misc_RNA (1)...(19): siRNA sense strand
uuggagaccauggauaaua

SEQ ID NO: 511540 - RNA, 19 nt, Homo sapiens
  misc_RNA (1)...(19): siRNA sense strand
gaaggaaggccccaugauc

SEQ ID NO: 511541 - RNA, 19 nt, Homo sapiens
  misc_RNA (1)...(19): siRNA sense strand
augagaguuuggauuauga

SEQ ID NO: 511542 - RNA, 19 nt, Homo sapiens
  misc_RNA (1)...(19): siRNA sense strand
gagaccauggauaauaaga

SEQ ID NO: 511543 - RNA, 19 nt, Homo sapiens
  misc_RNA (1)...(19): siRNA sense strand
cuucuuccguucugggauu

SEQ ID NO: 511544 - RNA, 19 nt, Homo sapiens
  misc_RNA (1)...(19): siRNA sense strand
ggugguguuugccauugga

SEQ ID NO: 511545 - RNA, 19 nt, Homo sapiens
  misc_RNA (1)...(19): siRNA sense strand
aagaaaggucgaagauaug

SEQ ID NO: 511546 - RNA, 19 nt, Homo sapiens
  misc_RNA (1)...(19): siRNA sense strand
auaagaaaggucgaagaua

SEQ ID NO: 511547 - RNA, 19 nt, Homo sapiens
  misc_RNA (1)...(19): siRNA sense strand
ccuggugggucucuuugug

SEQ ID NO: 511548 - RNA, 19 nt, Homo sapiens
  misc_RNA (1)...(19): siRNA sense strand
aggagcggcugcuggaguu

SEQ ID NO: 511549 - RNA, 19 nt, Homo sapiens
  misc_RNA (1)...(19): siRNA sense strand
gcuguaucaaugacccuua

SEQ ID NO: 511550 - RNA, 19 nt, Homo sapiens
  misc_RNA (1)...(19): siRNA sense strand
ggacccugcucugcaaggu

SEQ ID NO: 511551 - RNA, 19 nt, Homo sapiens
  misc_RNA (1)...(19): siRNA sense strand
ggauacccgaggucaaaug

SEQ ID NO: 511552 - RNA, 19 nt, Homo sapiens
  misc_RNA (1)...(19): siRNA sense strand
aggaaagacuaugagaguu

SEQ ID NO: 511553 - RNA, 19 nt, Homo sapiens
  misc_RNA (1)...(19): siRNA sense strand
gaggagugcagccagaaag

SEQ ID NO: 511554 - RNA, 19 nt, Homo sapiens
  misc_RNA (1)...(19): siRNA sense strand
cuggauugcugaacuuugg

SEQ ID NO: 511555 - RNA, 19 nt, Homo sapiens
  misc_RNA (1)...(19): siRNA sense strand
caccuucacccucaacuuc

SEQ ID NO: 511556 - RNA, 19 nt, Homo sapiens
  misc_RNA (1)...(19): siRNA sense strand
uuggagugcuguucagugu

SEQ ID NO: 511557 - RNA, 19 nt, Homo sapiens
  misc_RNA (1)...(19): siRNA sense strand
cuaugagaguuuggauuau

SEQ ID NO: 511558 - RNA, 19 nt, Homo sapiens
  misc_RNA (1)...(19): siRNA sense strand
ggagcugaccauccuugga

SEQ ID NO: 511559 - RNA, 19 nt, Homo sapiens
  misc_RNA (1)...(19): siRNA sense strand
caagggcucacguggaaag

SEQ ID NO: 511560 - RNA, 19 nt, Homo sapiens
  misc_RNA (1)...(19): siRNA sense strand
ucaaaugcuaucugaaugg

SEQ ID NO: 511561 - RNA, 19 nt, Homo sapiens
  misc_RNA (1)...(19): siRNA sense strand
aagccuccuuguucucauu

SEQ ID NO: 511562 - RNA, 19 nt, Homo sapiens
  misc_RNA (1)...(19): siRNA sense strand
guaccuuguucagucuaga

SEQ ID NO: 511563 - RNA, 19 nt, Homo sapiens
  misc_RNA (1)...(19): siRNA sense strand
gacccuuaccuggaaguuu

SEQ ID NO: 511564 - RNA, 19 nt, Homo sapiens
  misc_RNA (1)...(19): siRNA sense strand
gggauucaguuuggaagcu

SEQ ID NO: 511565 - RNA, 19 nt, Homo sapiens
  misc_RNA (1)...(19): siRNA sense strand
guaaaggugccaggaaucg

SEQ ID NO: 511566 - RNA, 19 nt, Homo sapiens
  misc_RNA (1)...(19): siRNA sense strand
gcagcagguuccgggauac

SEQ ID NO: 511567 - RNA, 19 nt, Homo sapiens
  misc_RNA (1)...(19): siRNA sense strand
uaagaaaggucgaagauau

SEQ ID NO: 511568 - RNA, 19 nt, Homo sapiens
  misc_RNA (1)...(19): siRNA sense strand
gaccauggauaauaagaaa

SEQ ID NO: 511569 - RNA, 19 nt, Homo sapiens
  misc_RNA (1)...(19): siRNA sense strand
ggaaagacuaugagaguuu

SEQ ID NO: 511570 - RNA, 19 nt, Homo sapiens
  misc_RNA (1)...(19): siRNA sense strand
gaaagacuaugagaguuug

SEQ ID NO: 511571 - RNA, 19 nt, Homo sapiens
  misc_RNA (1)...(19): siRNA sense strand
gaggucaaaugcuaucuga

SEQ ID NO: 511572 - RNA, 19 nt, Homo sapiens
  misc_RNA (1)...(19): siRNA sense strand
gagcuggccucccucaguu

SEQ ID NO: 511573 - RNA, 19 nt, Homo sapiens
  misc_RNA (1)...(19): siRNA sense strand
uacggaagauccaguuuaa

SEQ ID NO: 511574 - RNA, 19 nt, Homo sapiens
  misc_RNA (1)...(19): siRNA sense strand
caaugacccuuaccuggaa

SEQ ID NO: 511575 - RNA, 19 nt, Homo sapiens
  misc_RNA (1)...(19): siRNA sense strand
gauaugaggcggugaagug

SEQ ID NO: 511576 - RNA, 19 nt, Homo sapiens
  misc_RNA (1)...(19): siRNA sense strand
uggagaccauggauaauaa

SEQ ID NO: 511577 - RNA, 19 nt, Homo sapiens
  misc_RNA (1)...(19): siRNA sense strand
gaagauaugaggcggugaa

SEQ ID NO: 511578 - RNA, 19 nt, Homo sapiens
  misc_RNA (1)...(19): siRNA sense strand
ggcagcagguuccgggaua

SEQ ID NO: 511579 - RNA, 19 nt, Homo sapiens
  misc_RNA (1)...(19): siRNA sense strand
ggucaaaugcuaucugaau

SEQ ID NO: 511580 - RNA, 19 nt, Homo sapiens
  misc_RNA (1)...(19): siRNA sense strand
ugaaguggauggugguguu

SEQ ID NO: 511581 - RNA, 19 nt, Homo sapiens
  misc_RNA (1)...(19): siRNA sense strand
ggaggaggaugagauucuu

SEQ ID NO: 511582 - RNA, 19 nt, Homo sapiens
  misc_RNA (1)...(19): siRNA sense strand
acuaugagaguuuggauua

SEQ ID NO: 511583 - RNA, 19 nt, Homo sapiens
  misc_RNA (1)...(19): siRNA sense strand
gcguaaaggugccaggaau

SEQ ID NO: 511584 - RNA, 19 nt, Homo sapiens
  misc_RNA (1)...(19): siRNA sense strand
ggaggaggaggaugagauu

SEQ ID NO: 511585 - RNA, 19 nt, Homo sapiens
  misc_RNA (1)...(19): siRNA sense strand
gaccauccuuggagaaaca

SEQ ID NO: 511586 - RNA, 19 nt, Homo sapiens
  misc_RNA (1)...(19): siRNA sense strand
gaugagauucuuccaagga

SEQ ID NO: 511587 - RNA, 19 nt, Homo sapiens
  misc_RNA (1)...(19): siRNA sense strand
gucaaaugcuaucugaaug

SEQ ID NO: 511588 - RNA, 19 nt, Homo sapiens
  misc_RNA (1)...(19): siRNA sense strand
uaugagaguuuggauuaug

SEQ ID NO: 511589 - RNA, 19 nt, Homo sapiens
  misc_RNA (1)...(19): siRNA sense strand
uuacggaagauccaguuua

SEQ ID NO: 511590 - RNA, 19 nt, Homo sapiens
  misc_RNA (1)...(19): siRNA sense strand
uaaccucaccuuugucuuc

SEQ ID NO: 511591 - RNA, 19 nt, Homo sapiens
  misc_RNA (1)...(19): siRNA sense strand
uacccgaggucaaaugcua

SEQ ID NO: 511592 - RNA, 19 nt, Homo sapiens
  misc_RNA (1)...(19): siRNA sense strand
guucugggauucaguuugg

SEQ ID NO: 511593 - RNA, 19 nt, Homo sapiens
  misc_RNA (1)...(19): siRNA sense strand
ggauuaugaucgcuguauc

SEQ ID NO: 511594 - RNA, 19 nt, Homo sapiens
  misc_RNA (1)...(19): siRNA sense strand
accaagggcucacguggaa

SEQ ID NO: 511595 - RNA, 19 nt, Homo sapiens
  misc_RNA (1)...(19): siRNA sense strand
gauaauaagaaaggucgaa

SEQ ID NO: 511596 - RNA, 19 nt, Homo sapiens
  misc_RNA (1)...(19): siRNA sense strand
ggaggagugcagccagaaa

SEQ ID NO: 511597 - RNA, 19 nt, Homo sapiens
  misc_RNA (1)...(19): siRNA sense strand
gaaguggauggugguguuu

SEQ ID NO: 511598 - RNA, 19 nt, Homo sapiens
  misc_RNA (1)...(19): siRNA sense strand
ccaaggaaagacuaugaga

SEQ ID NO: 511599 - RNA, 19 nt, Homo sapiens
  misc_RNA (1)...(19): siRNA sense strand
agaaaggucgaagauauga

SEQ ID NO: 511600 - RNA, 19 nt, Homo sapiens
  misc_RNA (1)...(19): siRNA sense strand
uccuugaacuccuggguuu

SEQ ID NO: 511601 - RNA, 19 nt, Homo sapiens
  misc_RNA (1)...(19): siRNA sense strand
gaggaugagauucuuccaa

SEQ ID NO: 511602 - RNA, 19 nt, Homo sapiens
  misc_RNA (1)...(19): siRNA sense strand
cacaggaggaggaggauga

SEQ ID NO: 511603 - RNA, 19 nt, Homo sapiens
  misc_RNA (1)...(19): siRNA sense strand
uggaguugcugcagcuuuc

SEQ ID NO: 511604 - RNA, 19 nt, Homo sapiens
  misc_RNA (1)...(19): siRNA sense strand
aaggaaagacuaugagagu

SEQ ID NO: 511605 - RNA, 19 nt, Homo sapiens
  misc_RNA (1)...(19): siRNA sense strand
aauaagaaaggucgaagau

SEQ ID NO: 511606 - RNA, 19 nt, Homo sapiens
  misc_RNA (1)...(19): siRNA sense strand
uaauaagaaaggucgaaga

SEQ ID NO: 511607 - RNA, 19 nt, Homo sapiens
  misc_RNA (1)...(19): siRNA sense strand
uuggagaccauggauaaua

SEQ ID NO: 511608 - RNA, 19 nt, Homo sapiens
  misc_RNA (1)...(19): siRNA sense strand
gaaggaaggccccaugauc

SEQ ID NO: 511609 - RNA, 19 nt, Homo sapiens
  misc_RNA (1)...(19): siRNA sense strand
augagaguuuggauuauga

SEQ ID NO: 511610 - RNA, 19 nt, Homo sapiens
  misc_RNA (1)...(19): siRNA sense strand
gagaccauggauaauaaga

SEQ ID NO: 511611 - RNA, 19 nt, Homo sapiens
  misc_RNA (1)...(19): siRNA sense strand
cuucuuccguucugggauu

SEQ ID NO: 511612 - RNA, 19 nt, Homo sapiens
  misc_RNA (1)...(19): siRNA sense strand
ggugguguuugccauugga

SEQ ID NO: 511613 - RNA, 19 nt, Homo sapiens
  misc_RNA (1)...(19): siRNA sense strand
aagaaaggucgaagauaug

SEQ ID NO: 511614 - RNA, 19 nt, Homo sapiens
  misc_RNA (1)...(19): siRNA sense strand
auaagaaaggucgaagaua

SEQ ID NO: 511615 - RNA, 19 nt, Homo sapiens
  misc_RNA (1)...(19): siRNA sense strand
ccuggugggucucuuugug

SEQ ID NO: 511616 - RNA, 19 nt, Homo sapiens
  misc_RNA (1)...(19): siRNA sense strand
aggagcggcugcuggaguu

SEQ ID NO: 511617 - RNA, 19 nt, Homo sapiens
  misc_RNA (1)...(19): siRNA sense strand
gcuguaucaaugacccuua

SEQ ID NO: 511618 - RNA, 19 nt, Homo sapiens
  misc_RNA (1)...(19): siRNA sense strand
ggacccugcucugcaaggu

SEQ ID NO: 511619 - RNA, 19 nt, Homo sapiens
  misc_RNA (1)...(19): siRNA sense strand
ggauacccgaggucaaaug

SEQ ID NO: 511620 - RNA, 19 nt, Homo sapiens
  misc_RNA (1)...(19): siRNA sense strand
aggaaagacuaugagaguu

SEQ ID NO: 511621 - RNA, 19 nt, Homo sapiens
  misc_RNA (1)...(19): siRNA sense strand
gaggagugcagccagaaag

SEQ ID NO: 511622 - RNA, 19 nt, Homo sapiens
  misc_RNA (1)...(19): siRNA sense strand
cuggauugcugaacuuugg

SEQ ID NO: 511623 - RNA, 19 nt, Homo sapiens
  misc_RNA (1)...(19): siRNA sense strand
caccuucacccucaacuuc

SEQ ID NO: 511624 - RNA, 19 nt, Homo sapiens
  misc_RNA (1)...(19): siRNA sense strand
uuggagugcuguucagugu

SEQ ID NO: 511625 - RNA, 19 nt, Homo sapiens
  misc_RNA (1)...(19): siRNA sense strand
cuaugagaguuuggauuau

SEQ ID NO: 511626 - RNA, 19 nt, Homo sapiens
  misc_RNA (1)...(19): siRNA sense strand
ggagcugaccauccuugga

SEQ ID NO: 511627 - RNA, 19 nt, Homo sapiens
  misc_RNA (1)...(19): siRNA sense strand
caagggcucacguggaaag

SEQ ID NO: 511628 - RNA, 19 nt, Homo sapiens
  misc_RNA (1)...(19): siRNA sense strand
ucaaaugcuaucugaaugg

SEQ ID NO: 511629 - RNA, 19 nt, Homo sapiens
  misc_RNA (1)...(19): siRNA sense strand
aagccuccuuguucucauu

SEQ ID NO: 511630 - RNA, 19 nt, Homo sapiens
  misc_RNA (1)...(19): siRNA sense strand
guaccuuguucagucuaga

SEQ ID NO: 511631 - RNA, 19 nt, Homo sapiens
  misc_RNA (1)...(19): siRNA sense strand
gacccuuaccuggaaguuu

SEQ ID NO: 511632 - RNA, 19 nt, Homo sapiens
  misc_RNA (1)...(19): siRNA sense strand
gggauucaguuuggaagcu

SEQ ID NO: 511633 - RNA, 19 nt, Homo sapiens
  misc_RNA (1)...(19): siRNA sense strand
guaaaggugccaggaaucg

SEQ ID NO: 511634 - RNA, 19 nt, Homo sapiens
  misc_RNA (1)...(19): siRNA sense strand
gcagcagguuccgggauac

SEQ ID NO: 511635 - RNA, 19 nt, Homo sapiens
  misc_RNA (1)...(19): siRNA sense strand
uaagaaaggucgaagauau

SEQ ID NO: 511636 - RNA, 19 nt, Homo sapiens
  misc_RNA (1)...(19): siRNA sense strand
gaccauggauaauaagaaa

SEQ ID NO: 511637 - RNA, 19 nt, Homo sapiens
  misc_RNA (1)...(19): siRNA sense strand
ggaaagacuaugagaguuu

SEQ ID NO: 511638 - RNA, 19 nt, Homo sapiens
  misc_RNA (1)...(19): siRNA sense strand
gaaagacuaugagaguuug

SEQ ID NO: 511639 - RNA, 19 nt, Homo sapiens
  misc_RNA (1)...(19): siRNA sense strand
gaggucaaaugcuaucuga

SEQ ID NO: 511640 - RNA, 19 nt, Homo sapiens
  misc_RNA (1)...(19): siRNA sense strand
gagcuggccucccucaguu

SEQ ID NO: 511641 - RNA, 19 nt, Homo sapiens
  misc_RNA (1)...(19): siRNA sense strand
uacggaagauccaguuuaa

SEQ ID NO: 511642 - RNA, 19 nt, Homo sapiens
  misc_RNA (1)...(19): siRNA sense strand
caaugacccuuaccuggaa

SEQ ID NO: 511643 - RNA, 19 nt, Homo sapiens
  misc_RNA (1)...(19): siRNA sense strand
gauaugaggcggugaagug

SEQ ID NO: 511644 - RNA, 19 nt, Homo sapiens
  misc_RNA (1)...(19): siRNA sense strand
uggagaccauggauaauaa

SEQ ID NO: 511645 - RNA, 19 nt, Homo sapiens
  misc_RNA (1)...(19): siRNA sense strand
gaagauaugaggcggugaa

SEQ ID NO: 511646 - RNA, 19 nt, Homo sapiens
  misc_RNA (1)...(19): siRNA sense strand
ggcagcagguuccgggaua

SEQ ID NO: 511647 - RNA, 19 nt, Homo sapiens
  misc_RNA (1)...(19): siRNA sense strand
ggucaaaugcuaucugaau

SEQ ID NO: 511648 - RNA, 19 nt, Homo sapiens
  misc_RNA (1)...(19): siRNA sense strand
ugaaguggauggugguguu

SEQ ID NO: 511649 - RNA, 19 nt, Homo sapiens
  misc_RNA (1)...(19): siRNA sense strand
ggaggaggaugagauucuu

SEQ ID NO: 511650 - RNA, 19 nt, Homo sapiens
  misc_RNA (1)...(19): siRNA sense strand
acuaugagaguuuggauua

SEQ ID NO: 511651 - RNA, 19 nt, Homo sapiens
  misc_RNA (1)...(19): siRNA sense strand
gcguaaaggugccaggaau

SEQ ID NO: 511652 - RNA, 19 nt, Homo sapiens
  misc_RNA (1)...(19): siRNA sense strand
ggaggaggaggaugagauu

SEQ ID NO: 511653 - RNA, 19 nt, Homo sapiens
  misc_RNA (1)...(19): siRNA sense strand
gaccauccuuggagaaaca

SEQ ID NO: 511654 - RNA, 19 nt, Homo sapiens
  misc_RNA (1)...(19): siRNA sense strand
gaugagauucuuccaagga

SEQ ID NO: 511655 - RNA, 19 nt, Homo sapiens
  misc_RNA (1)...(19): siRNA sense strand
gucaaaugcuaucugaaug

SEQ ID NO: 511656 - RNA, 19 nt, Homo sapiens
  misc_RNA (1)...(19): siRNA sense strand
uaugagaguuuggauuaug

SEQ ID NO: 511657 - RNA, 19 nt, Homo sapiens
  misc_RNA (1)...(19): siRNA sense strand
uuacggaagauccaguuua

SEQ ID NO: 511658 - RNA, 19 nt, Homo sapiens
  misc_RNA (1)...(19): siRNA sense strand
uaaccucaccuuugucuuc

SEQ ID NO: 511659 - RNA, 19 nt, Homo sapiens
  misc_RNA (1)...(19): siRNA sense strand
uacccgaggucaaaugcua

SEQ ID NO: 511660 - RNA, 19 nt, Homo sapiens
  misc_RNA (1)...(19): siRNA sense strand
guucugggauucaguuugg

SEQ ID NO: 511661 - RNA, 19 nt, Homo sapiens
  misc_RNA (1)...(19): siRNA sense strand
ggauuaugaucgcuguauc

SEQ ID NO: 511662 - RNA, 19 nt, Homo sapiens
  misc_RNA (1)...(19): siRNA sense strand
accaagggcucacguggaa

SEQ ID NO: 511663 - RNA, 19 nt, Homo sapiens
  misc_RNA (1)...(19): siRNA sense strand
gauaauaagaaaggucgaa

SEQ ID NO: 511664 - RNA, 19 nt, Homo sapiens
  misc_RNA (1)...(19): siRNA sense strand
ggaggagugcagccagaaa

SEQ ID NO: 511665 - RNA, 19 nt, Homo sapiens
  misc_RNA (1)...(19): siRNA sense strand
gaaguggauggugguguuu

SEQ ID NO: 511666 - RNA, 19 nt, Homo sapiens
  misc_RNA (1)...(19): siRNA sense strand
ccaaggaaagacuaugaga

SEQ ID NO: 511667 - RNA, 19 nt, Homo sapiens
  misc_RNA (1)...(19): siRNA sense strand
agaaaggucgaagauauga

SEQ ID NO: 511668 - RNA, 19 nt, Homo sapiens
  misc_RNA (1)...(19): siRNA sense strand
uccuugaacuccuggguuu

SEQ ID NO: 511669 - RNA, 19 nt, Homo sapiens
  misc_RNA (1)...(19): siRNA sense strand
gaggaugagauucuuccaa

SEQ ID NO: 511670 - RNA, 19 nt, Homo sapiens
  misc_RNA (1)...(19): siRNA sense strand
cacaggaggaggaggauga

SEQ ID NO: 511671 - RNA, 19 nt, Homo sapiens
  misc_RNA (1)...(19): siRNA sense strand
uggaguugcugcagcuuuc

SEQ ID NO: 511672 - RNA, 19 nt, Homo sapiens
  misc_RNA (1)...(19): siRNA sense strand
aaggaaagacuaugagagu

SEQ ID NO: 511673 - RNA, 19 nt, Homo sapiens
  misc_RNA (1)...(19): siRNA sense strand
aauaagaaaggucgaagau

SEQ ID NO: 511674 - RNA, 19 nt, Homo sapiens
  misc_RNA (1)...(19): siRNA sense strand
uaauaagaaaggucgaaga

SEQ ID NO: 511675 - RNA, 19 nt, Homo sapiens
  misc_RNA (1)...(19): siRNA sense strand
uuggagaccauggauaaua

SEQ ID NO: 511676 - RNA, 19 nt, Homo sapiens
  misc_RNA (1)...(19): siRNA sense strand
gaaggaaggccccaugauc

SEQ ID NO: 511677 - RNA, 19 nt, Homo sapiens
  misc_RNA (1)...(19): siRNA sense strand
augagaguuuggauuauga

SEQ ID NO: 511678 - RNA, 19 nt, Homo sapiens
  misc_RNA (1)...(19): siRNA sense strand
gagaccauggauaauaaga

SEQ ID NO: 511679 - RNA, 19 nt, Homo sapiens
  misc_RNA (1)...(19): siRNA sense strand
cuucuuccguucugggauu

SEQ ID NO: 511680 - RNA, 19 nt, Homo sapiens
  misc_RNA (1)...(19): siRNA sense strand
ggugguguuugccauugga

SEQ ID NO: 511681 - RNA, 19 nt, Homo sapiens
  misc_RNA (1)...(19): siRNA sense strand
aagaaaggucgaagauaug

SEQ ID NO: 511682 - RNA, 19 nt, Homo sapiens
  misc_RNA (1)...(19): siRNA sense strand
auaagaaaggucgaagaua

SEQ ID NO: 511683 - RNA, 19 nt, Homo sapiens
  misc_RNA (1)...(19): siRNA sense strand
ccuggugggucucuuugug

SEQ ID NO: 511684 - RNA, 19 nt, Homo sapiens
  misc_RNA (1)...(19): siRNA sense strand
aggagcggcugcuggaguu

SEQ ID NO: 511685 - RNA, 19 nt, Homo sapiens
  misc_RNA (1)...(19): siRNA sense strand
gcuguaucaaugacccuua

SEQ ID NO: 511686 - RNA, 19 nt, Homo sapiens
  misc_RNA (1)...(19): siRNA sense strand
ggacccugcucugcaaggu

SEQ ID NO: 511687 - RNA, 19 nt, Homo sapiens
  misc_RNA (1)...(19): siRNA sense strand
ggauacccgaggucaaaug

SEQ ID NO: 511688 - RNA, 19 nt, Homo sapiens
  misc_RNA (1)...(19): siRNA sense strand
aggaaagacuaugagaguu

SEQ ID NO: 511689 - RNA, 19 nt, Homo sapiens
  misc_RNA (1)...(19): siRNA sense strand
gaggagugcagccagaaag

SEQ ID NO: 511690 - RNA, 19 nt, Homo sapiens
  misc_RNA (1)...(19): siRNA sense strand
cuggauugcugaacuuugg

SEQ ID NO: 511691 - RNA, 19 nt, Homo sapiens
  misc_RNA (1)...(19): siRNA sense strand
caccuucacccucaacuuc

SEQ ID NO: 511692 - RNA, 19 nt, Homo sapiens
  misc_RNA (1)...(19): siRNA sense strand
uuggagugcuguucagugu

SEQ ID NO: 511693 - RNA, 19 nt, Homo sapiens
  misc_RNA (1)...(19): siRNA sense strand
cuaugagaguuuggauuau

SEQ ID NO: 511694 - RNA, 19 nt, Homo sapiens
  misc_RNA (1)...(19): siRNA sense strand
ggagcugaccauccuugga

SEQ ID NO: 511695 - RNA, 19 nt, Homo sapiens
  misc_RNA (1)...(19): siRNA sense strand
caagggcucacguggaaag

SEQ ID NO: 511696 - RNA, 19 nt, Homo sapiens
  misc_RNA (1)...(19): siRNA sense strand
ucaaaugcuaucugaaugg

SEQ ID NO: 511697 - RNA, 19 nt, Homo sapiens
  misc_RNA (1)...(19): siRNA sense strand
aagccuccuuguucucauu

SEQ ID NO: 511698 - RNA, 19 nt, Homo sapiens
  misc_RNA (1)...(19): siRNA sense strand
guaccuuguucagucuaga

SEQ ID NO: 511699 - RNA, 19 nt, Homo sapiens
  misc_RNA (1)...(19): siRNA sense strand
gacccuuaccuggaaguuu

SEQ ID NO: 511700 - RNA, 19 nt, Homo sapiens
  misc_RNA (1)...(19): siRNA sense strand
gggauucaguuuggaagcu

SEQ ID NO: 511701 - RNA, 19 nt, Homo sapiens
  misc_RNA (1)...(19): siRNA sense strand
guaaaggugccaggaaucg

SEQ ID NO: 511702 - RNA, 19 nt, Homo sapiens
  misc_RNA (1)...(19): siRNA sense strand
gcagcagguuccgggauac

SEQ ID NO: 511703 - RNA, 19 nt, Homo sapiens
  misc_RNA (1)...(19): siRNA sense strand
uaagaaaggucgaagauau

SEQ ID NO: 511704 - RNA, 19 nt, Homo sapiens
  misc_RNA (1)...(19): siRNA sense strand
gaccauggauaauaagaaa

SEQ ID NO: 511705 - RNA, 19 nt, Homo sapiens
  misc_RNA (1)...(19): siRNA sense strand
ggaaagacuaugagaguuu

SEQ ID NO: 511706 - RNA, 19 nt, Homo sapiens
  misc_RNA (1)...(19): siRNA sense strand
gaaagacuaugagaguuug

SEQ ID NO: 511707 - RNA, 19 nt, Homo sapiens
  misc_RNA (1)...(19): siRNA sense strand
gaggucaaaugcuaucuga

SEQ ID NO: 511708 - RNA, 19 nt, Homo sapiens
  misc_RNA (1)...(19): siRNA sense strand
gagcuggccucccucaguu

SEQ ID NO: 511709 - RNA, 19 nt, Homo sapiens
  misc_RNA (1)...(19): siRNA sense strand
uacggaagauccaguuuaa

SEQ ID NO: 511710 - RNA, 19 nt, Homo sapiens
  misc_RNA (1)...(19): siRNA sense strand
caaugacccuuaccuggaa

SEQ ID NO: 511711 - RNA, 19 nt, Homo sapiens
  misc_RNA (1)...(19): siRNA sense strand
gauaugaggcggugaagug

SEQ ID NO: 511712 - RNA, 19 nt, Homo sapiens
  misc_RNA (1)...(19): siRNA sense strand
uggagaccauggauaauaa

SEQ ID NO: 511713 - RNA, 19 nt, Homo sapiens
  misc_RNA (1)...(19): siRNA sense strand
gaagauaugaggcggugaa

SEQ ID NO: 511714 - RNA, 19 nt, Homo sapiens
  misc_RNA (1)...(19): siRNA sense strand
ggcagcagguuccgggaua

SEQ ID NO: 511715 - RNA, 19 nt, Homo sapiens
  misc_RNA (1)...(19): siRNA sense strand
ggucaaaugcuaucugaau

SEQ ID NO: 511716 - RNA, 19 nt, Homo sapiens
  misc_RNA (1)...(19): siRNA sense strand
ugaaguggauggugguguu

SEQ ID NO: 511717 - RNA, 19 nt, Homo sapiens
  misc_RNA (1)...(19): siRNA sense strand
ggaggaggaugagauucuu

SEQ ID NO: 511718 - RNA, 19 nt, Homo sapiens
  misc_RNA (1)...(19): siRNA sense strand
acuaugagaguuuggauua

SEQ ID NO: 511719 - RNA, 19 nt, Homo sapiens
  misc_RNA (1)...(19): siRNA sense strand
gcguaaaggugccaggaau

SEQ ID NO: 511720 - RNA, 19 nt, Homo sapiens
  misc_RNA (1)...(19): siRNA sense strand
ggaggaggaggaugagauu

SEQ ID NO: 511721 - RNA, 19 nt, Homo sapiens
  misc_RNA (1)...(19): siRNA sense strand
gaccauccuuggagaaaca

SEQ ID NO: 511722 - RNA, 19 nt, Homo sapiens
  misc_RNA (1)...(19): siRNA sense strand
gaugagauucuuccaagga

SEQ ID NO: 511723 - RNA, 19 nt, Homo sapiens
  misc_RNA (1)...(19): siRNA sense strand
gucaaaugcuaucugaaug

SEQ ID NO: 511724 - RNA, 19 nt, Homo sapiens
  misc_RNA (1)...(19): siRNA sense strand
uaugagaguuuggauuaug

SEQ ID NO: 511725 - RNA, 19 nt, Homo sapiens
  misc_RNA (1)...(19): siRNA sense strand
uuacggaagauccaguuua

SEQ ID NO: 511726 - RNA, 19 nt, Homo sapiens
  misc_RNA (1)...(19): siRNA sense strand
uaaccucaccuuugucuuc

SEQ ID NO: 511727 - RNA, 19 nt, Homo sapiens
  misc_RNA (1)...(19): siRNA sense strand
uacccgaggucaaaugcua

SEQ ID NO: 511728 - RNA, 19 nt, Homo sapiens
  misc_RNA (1)...(19): siRNA sense strand
guucugggauucaguuugg

SEQ ID NO: 511729 - RNA, 19 nt, Homo sapiens
  misc_RNA (1)...(19): siRNA sense strand
ggauuaugaucgcuguauc

SEQ ID NO: 511730 - RNA, 19 nt, Homo sapiens
  misc_RNA (1)...(19): siRNA sense strand
accaagggcucacguggaa

SEQ ID NO: 511731 - RNA, 19 nt, Homo sapiens
  misc_RNA (1)...(19): siRNA sense strand
gauaauaagaaaggucgaa

SEQ ID NO: 511732 - RNA, 19 nt, Homo sapiens
  misc_RNA (1)...(19): siRNA sense strand
ggaggagugcagccagaaa

SEQ ID NO: 511733 - RNA, 19 nt, Homo sapiens
  misc_RNA (1)...(19): siRNA sense strand
gaaguggauggugguguuu

SEQ ID NO: 511734 - RNA, 19 nt, Homo sapiens
  misc_RNA (1)...(19): siRNA sense strand
ccaaggaaagacuaugaga

SEQ ID NO: 511735 - RNA, 19 nt, Homo sapiens
  misc_RNA (1)...(19): siRNA sense strand
agaaaggucgaagauauga

SEQ ID NO: 511736 - RNA, 19 nt, Homo sapiens
  misc_RNA (1)...(19): siRNA sense strand
uccuugaacuccuggguuu

SEQ ID NO: 511737 - RNA, 19 nt, Homo sapiens
  misc_RNA (1)...(19): siRNA sense strand
gaggaugagauucuuccaa

SEQ ID NO: 511738 - RNA, 19 nt, Homo sapiens
  misc_RNA (1)...(19): siRNA sense strand
cacaggaggaggaggauga

SEQ ID NO: 511739 - RNA, 19 nt, Homo sapiens
  misc_RNA (1)...(19): siRNA sense strand
uggaguugcugcagcuuuc

SEQ ID NO: 511740 - RNA, 19 nt, Homo sapiens
  misc_RNA (1)...(19): siRNA sense strand
aaggaaagacuaugagagu

SEQ ID NO: 511741 - RNA, 19 nt, Homo sapiens
  misc_RNA (1)...(19): siRNA sense strand
aauaagaaaggucgaagau

SEQ ID NO: 511742 - RNA, 19 nt, Homo sapiens
  misc_RNA (1)...(19): siRNA sense strand
uaauaagaaaggucgaaga

SEQ ID NO: 511743 - RNA, 19 nt, Homo sapiens
  misc_RNA (1)...(19): siRNA sense strand
uuggagaccauggauaaua

SEQ ID NO: 511744 - RNA, 19 nt, Homo sapiens
  misc_RNA (1)...(19): siRNA sense strand
gaaggaaggccccaugauc

SEQ ID NO: 511745 - RNA, 19 nt, Homo sapiens
  misc_RNA (1)...(19): siRNA sense strand
augagaguuuggauuauga

SEQ ID NO: 511746 - RNA, 19 nt, Homo sapiens
  misc_RNA (1)...(19): siRNA sense strand
gagaccauggauaauaaga

SEQ ID NO: 511747 - RNA, 19 nt, Homo sapiens
  misc_RNA (1)...(19): siRNA sense strand
cuucuuccguucugggauu

SEQ ID NO: 511748 - RNA, 19 nt, Homo sapiens
  misc_RNA (1)...(19): siRNA sense strand
ggugguguuugccauugga

SEQ ID NO: 511749 - RNA, 19 nt, Homo sapiens
  misc_RNA (1)...(19): siRNA sense strand
aagaaaggucgaagauaug

SEQ ID NO: 511750 - RNA, 19 nt, Homo sapiens
  misc_RNA (1)...(19): siRNA sense strand
auaagaaaggucgaagaua

SEQ ID NO: 511751 - RNA, 19 nt, Homo sapiens
  misc_RNA (1)...(19): siRNA sense strand
ccuggugggucucuuugug

SEQ ID NO: 511752 - RNA, 19 nt, Homo sapiens
  misc_RNA (1)...(19): siRNA sense strand
aggagcggcugcuggaguu

SEQ ID NO: 511753 - RNA, 19 nt, Homo sapiens
  misc_RNA (1)...(19): siRNA sense strand
gcuguaucaaugacccuua

SEQ ID NO: 511754 - RNA, 19 nt, Homo sapiens
  misc_RNA (1)...(19): siRNA sense strand
ggacccugcucugcaaggu

SEQ ID NO: 511755 - RNA, 19 nt, Homo sapiens
  misc_RNA (1)...(19): siRNA sense strand
ggauacccgaggucaaaug

SEQ ID NO: 511756 - RNA, 19 nt, Homo sapiens
  misc_RNA (1)...(19): siRNA sense strand
aggaaagacuaugagaguu

SEQ ID NO: 511757 - RNA, 19 nt, Homo sapiens
  misc_RNA (1)...(19): siRNA sense strand
gaggagugcagccagaaag

SEQ ID NO: 511758 - RNA, 19 nt, Homo sapiens
  misc_RNA (1)...(19): siRNA sense strand
cuggauugcugaacuuugg

SEQ ID NO: 511759 - RNA, 19 nt, Homo sapiens
  misc_RNA (1)...(19): siRNA sense strand
caccuucacccucaacuuc

SEQ ID NO: 511760 - RNA, 19 nt, Homo sapiens
  misc_RNA (1)...(19): siRNA sense strand
uuggagugcuguucagugu

SEQ ID NO: 511761 - RNA, 19 nt, Homo sapiens
  misc_RNA (1)...(19): siRNA sense strand
cuaugagaguuuggauuau

SEQ ID NO: 511762 - RNA, 19 nt, Homo sapiens
  misc_RNA (1)...(19): siRNA sense strand
ggagcugaccauccuugga

SEQ ID NO: 511763 - RNA, 19 nt, Homo sapiens
  misc_RNA (1)...(19): siRNA sense strand
caagggcucacguggaaag

SEQ ID NO: 511764 - RNA, 19 nt, Homo sapiens
  misc_RNA (1)...(19): siRNA sense strand
ucaaaugcuaucugaaugg

SEQ ID NO: 511765 - RNA, 19 nt, Homo sapiens
  misc_RNA (1)...(19): siRNA sense strand
aagccuccuuguucucauu

SEQ ID NO: 511766 - RNA, 19 nt, Homo sapiens
  misc_RNA (1)...(19): siRNA sense strand
guaccuuguucagucuaga

SEQ ID NO: 511767 - RNA, 19 nt, Homo sapiens
  misc_RNA (1)...(19): siRNA sense strand
gacccuuaccuggaaguuu

SEQ ID NO: 511768 - RNA, 19 nt, Homo sapiens
  misc_RNA (1)...(19): siRNA sense strand
gggauucaguuuggaagcu

SEQ ID NO: 511769 - RNA, 19 nt, Homo sapiens
  misc_RNA (1)...(19): siRNA sense strand
guaaaggugccaggaaucg

SEQ ID NO: 511770 - RNA, 19 nt, Homo sapiens
  misc_RNA (1)...(19): siRNA sense strand
gcagcagguuccgggauac

SEQ ID NO: 511771 - RNA, 19 nt, Homo sapiens
  misc_RNA (1)...(19): siRNA sense strand
uaagaaaggucgaagauau

SEQ ID NO: 511772 - RNA, 19 nt, Homo sapiens
  misc_RNA (1)...(19): siRNA sense strand
gaccauggauaauaagaaa

SEQ ID NO: 511773 - RNA, 19 nt, Homo sapiens
  misc_RNA (1)...(19): siRNA sense strand
ggaaagacuaugagaguuu

SEQ ID NO: 511774 - RNA, 19 nt, Homo sapiens
  misc_RNA (1)...(19): siRNA sense strand
gaaagacuaugagaguuug

SEQ ID NO: 511775 - RNA, 19 nt, Homo sapiens
  misc_RNA (1)...(19): siRNA sense strand
gaggucaaaugcuaucuga

SEQ ID NO: 511776 - RNA, 19 nt, Homo sapiens
  misc_RNA (1)...(19): siRNA sense strand
gagcuggccucccucaguu

SEQ ID NO: 511777 - RNA, 19 nt, Homo sapiens
  misc_RNA (1)...(19): siRNA sense strand
uacggaagauccaguuuaa

SEQ ID NO: 511778 - RNA, 19 nt, Homo sapiens
  misc_RNA (1)...(19): siRNA sense strand
caaugacccuuaccuggaa

SEQ ID NO: 511779 - RNA, 19 nt, Homo sapiens
  misc_RNA (1)...(19): siRNA sense strand
gauaugaggcggugaagug

SEQ ID NO: 511780 - RNA, 19 nt, Homo sapiens
  misc_RNA (1)...(19): siRNA sense strand
uggagaccauggauaauaa

SEQ ID NO: 511781 - RNA, 19 nt, Homo sapiens
  misc_RNA (1)...(19): siRNA sense strand
gaagauaugaggcggugaa

SEQ ID NO: 511782 - RNA, 19 nt, Homo sapiens
  misc_RNA (1)...(19): siRNA sense strand
ggcagcagguuccgggaua

SEQ ID NO: 511783 - RNA, 19 nt, Homo sapiens
  misc_RNA (1)...(19): siRNA sense strand
ggucaaaugcuaucugaau

SEQ ID NO: 511784 - RNA, 19 nt, Homo sapiens
  misc_RNA (1)...(19): siRNA sense strand
ugaaguggauggugguguu

SEQ ID NO: 511785 - RNA, 19 nt, Homo sapiens
  misc_RNA (1)...(19): siRNA sense strand
ggaggaggaugagauucuu

SEQ ID NO: 511786 - RNA, 19 nt, Homo sapiens
  misc_RNA (1)...(19): siRNA sense strand
acuaugagaguuuggauua

SEQ ID NO: 511787 - RNA, 19 nt, Homo sapiens
  misc_RNA (1)...(19): siRNA sense strand
gcguaaaggugccaggaau

SEQ ID NO: 511788 - RNA, 19 nt, Homo sapiens
  misc_RNA (1)...(19): siRNA sense strand
ggaggaggaggaugagauu

SEQ ID NO: 511789 - RNA, 19 nt, Homo sapiens
  misc_RNA (1)...(19): siRNA sense strand
gaccauccuuggagaaaca

SEQ ID NO: 511790 - RNA, 19 nt, Homo sapiens
  misc_RNA (1)...(19): siRNA sense strand
gaugagauucuuccaagga

SEQ ID NO: 511791 - RNA, 19 nt, Homo sapiens
  misc_RNA (1)...(19): siRNA sense strand
gucaaaugcuaucugaaug

SEQ ID NO: 511792 - RNA, 19 nt, Homo sapiens
  misc_RNA (1)...(19): siRNA sense strand
uaugagaguuuggauuaug

SEQ ID NO: 511793 - RNA, 19 nt, Homo sapiens
  misc_RNA (1)...(19): siRNA sense strand
uuacggaagauccaguuua

SEQ ID NO: 511794 - RNA, 19 nt, Homo sapiens
  misc_RNA (1)...(19): siRNA sense strand
uaaccucaccuuugucuuc

SEQ ID NO: 511795 - RNA, 19 nt, Homo sapiens
  misc_RNA (1)...(19): siRNA sense strand
uacccgaggucaaaugcua

SEQ ID NO: 511796 - RNA, 19 nt, Homo sapiens
  misc_RNA (1)...(19): siRNA sense strand
guucugggauucaguuugg

SEQ ID NO: 511797 - RNA, 19 nt, Homo sapiens
  misc_RNA (1)...(19): siRNA sense strand
ggauuaugaucgcuguauc

SEQ ID NO: 511798 - RNA, 19 nt, Homo sapiens
  misc_RNA (1)...(19): siRNA sense strand
accaagggcucacguggaa

SEQ ID NO: 511799 - RNA, 19 nt, Homo sapiens
  misc_RNA (1)...(19): siRNA sense strand
gauaauaagaaaggucgaa

SEQ ID NO: 511800 - RNA, 19 nt, Homo sapiens
  misc_RNA (1)...(19): siRNA sense strand
ggaggagugcagccagaaa

SEQ ID NO: 511801 - RNA, 19 nt, Homo sapiens
  misc_RNA (1)...(19): siRNA sense strand
gaaguggauggugguguuu

SEQ ID NO: 511802 - RNA, 19 nt, Homo sapiens
  misc_RNA (1)...(19): siRNA sense strand
ccaaggaaagacuaugaga

SEQ ID NO: 511803 - RNA, 19 nt, Homo sapiens
  misc_RNA (1)...(19): siRNA sense strand
agaaaggucgaagauauga

SEQ ID NO: 511804 - RNA, 19 nt, Homo sapiens
  misc_RNA (1)...(19): siRNA sense strand
uccuugaacuccuggguuu

SEQ ID NO: 511805 - RNA, 19 nt, Homo sapiens
  misc_RNA (1)...(19): siRNA sense strand
gaggaugagauucuuccaa

SEQ ID NO: 511806 - RNA, 19 nt, Homo sapiens
  misc_RNA (1)...(19): siRNA sense strand
cacaggaggaggaggauga

SEQ ID NO: 511807 - RNA, 19 nt, Homo sapiens
  misc_RNA (1)...(19): siRNA sense strand
uggaguugcugcagcuuuc

SEQ ID NO: 511808 - RNA, 19 nt, Homo sapiens
  misc_RNA (1)...(19): siRNA sense strand
aaggaaagacuaugagagu

SEQ ID NO: 511809 - RNA, 19 nt, Homo sapiens
  misc_RNA (1)...(19): siRNA sense strand
aauaagaaaggucgaagau

SEQ ID NO: 511810 - RNA, 19 nt, Homo sapiens
  misc_RNA (1)...(19): siRNA sense strand
uaauaagaaaggucgaaga

SEQ ID NO: 511811 - RNA, 19 nt, Homo sapiens
  misc_RNA (1)...(19): siRNA sense strand
uuggagaccauggauaaua

SEQ ID NO: 511812 - RNA, 19 nt, Homo sapiens
  misc_RNA (1)...(19): siRNA sense strand
gaaggaaggccccaugauc

SEQ ID NO: 511813 - RNA, 19 nt, Homo sapiens
  misc_RNA (1)...(19): siRNA sense strand
augagaguuuggauuauga

SEQ ID NO: 511814 - RNA, 19 nt, Homo sapiens
  misc_RNA (1)...(19): siRNA sense strand
gagaccauggauaauaaga

SEQ ID NO: 511815 - RNA, 19 nt, Homo sapiens
  misc_RNA (1)...(19): siRNA sense strand
cuucuuccguucugggauu

SEQ ID NO: 511816 - RNA, 19 nt, Homo sapiens
  misc_RNA (1)...(19): siRNA sense strand
ggugguguuugccauugga

SEQ ID NO: 511817 - RNA, 19 nt, Homo sapiens
  misc_RNA (1)...(19): siRNA sense strand
aagaaaggucgaagauaug

SEQ ID NO: 511818 - RNA, 19 nt, Homo sapiens
  misc_RNA (1)...(19): siRNA sense strand
auaagaaaggucgaagaua

SEQ ID NO: 511819 - RNA, 19 nt, Homo sapiens
  misc_RNA (1)...(19): siRNA sense strand
ccuggugggucucuuugug

SEQ ID NO: 511820 - RNA, 19 nt, Homo sapiens
  misc_RNA (1)...(19): siRNA sense strand
aggagcggcugcuggaguu

SEQ ID NO: 511821 - RNA, 19 nt, Homo sapiens
  misc_RNA (1)...(19): siRNA sense strand
gcuguaucaaugacccuua

SEQ ID NO: 511822 - RNA, 19 nt, Homo sapiens
  misc_RNA (1)...(19): siRNA sense strand
ggacccugcucugcaaggu

SEQ ID NO: 511823 - RNA, 19 nt, Homo sapiens
  misc_RNA (1)...(19): siRNA sense strand
ggauacccgaggucaaaug

SEQ ID NO: 511824 - RNA, 19 nt, Homo sapiens
  misc_RNA (1)...(19): siRNA sense strand
aggaaagacuaugagaguu

SEQ ID NO: 511825 - RNA, 19 nt, Homo sapiens
  misc_RNA (1)...(19): siRNA sense strand
gaggagugcagccagaaag

SEQ ID NO: 511826 - RNA, 19 nt, Homo sapiens
  misc_RNA (1)...(19): siRNA sense strand
cuggauugcugaacuuugg

SEQ ID NO: 511827 - RNA, 19 nt, Homo sapiens
  misc_RNA (1)...(19): siRNA sense strand
caccuucacccucaacuuc

SEQ ID NO: 511828 - RNA, 19 nt, Homo sapiens
  misc_RNA (1)...(19): siRNA sense strand
uuggagugcuguucagugu

SEQ ID NO: 511829 - RNA, 19 nt, Homo sapiens
  misc_RNA (1)...(19): siRNA sense strand
cuaugagaguuuggauuau

SEQ ID NO: 511830 - RNA, 19 nt, Homo sapiens
  misc_RNA (1)...(19): siRNA sense strand
ggagcugaccauccuugga

SEQ ID NO: 511831 - RNA, 19 nt, Homo sapiens
  misc_RNA (1)...(19): siRNA sense strand
caagggcucacguggaaag

SEQ ID NO: 511832 - RNA, 19 nt, Homo sapiens
  misc_RNA (1)...(19): siRNA sense strand
ucaaaugcuaucugaaugg

SEQ ID NO: 511833 - RNA, 19 nt, Homo sapiens
  misc_RNA (1)...(19): siRNA sense strand
aagccuccuuguucucauu

SEQ ID NO: 511834 - RNA, 19 nt, Homo sapiens
  misc_RNA (1)...(19): siRNA sense strand
guaccuuguucagucuaga

SEQ ID NO: 511835 - RNA, 19 nt, Homo sapiens
  misc_RNA (1)...(19): siRNA sense strand
gacccuuaccuggaaguuu

SEQ ID NO: 511836 - RNA, 19 nt, Homo sapiens
  misc_RNA (1)...(19): siRNA sense strand
gggauucaguuuggaagcu

SEQ ID NO: 511837 - RNA, 19 nt, Homo sapiens
  misc_RNA (1)...(19): siRNA sense strand
guaaaggugccaggaaucg

SEQ ID NO: 511838 - RNA, 19 nt, Homo sapiens
  misc_RNA (1)...(19): siRNA sense strand
gcagcagguuccgggauac

SEQ ID NO: 511839 - RNA, 19 nt, Homo sapiens
  misc_RNA (1)...(19): siRNA sense strand
uaagaaaggucgaagauau

SEQ ID NO: 511840 - RNA, 19 nt, Homo sapiens
  misc_RNA (1)...(19): siRNA sense strand
gaccauggauaauaagaaa

SEQ ID NO: 511841 - RNA, 19 nt, Homo sapiens
  misc_RNA (1)...(19): siRNA sense strand
ggaaagacuaugagaguuu

SEQ ID NO: 511842 - RNA, 19 nt, Homo sapiens
  misc_RNA (1)...(19): siRNA sense strand
gaaagacuaugagaguuug

SEQ ID NO: 511843 - RNA, 19 nt, Homo sapiens
  misc_RNA (1)...(19): siRNA sense strand
gaggucaaaugcuaucuga

SEQ ID NO: 511844 - RNA, 19 nt, Homo sapiens
  misc_RNA (1)...(19): siRNA sense strand
gagcuggccucccucaguu

SEQ ID NO: 511845 - RNA, 19 nt, Homo sapiens
  misc_RNA (1)...(19): siRNA sense strand
uacggaagauccaguuuaa

SEQ ID NO: 511846 - RNA, 19 nt, Homo sapiens
  misc_RNA (1)...(19): siRNA sense strand
caaugacccuuaccuggaa

SEQ ID NO: 511847 - RNA, 19 nt, Homo sapiens
  misc_RNA (1)...(19): siRNA sense strand
gauaugaggcggugaagug

SEQ ID NO: 511848 - RNA, 19 nt, Homo sapiens
  misc_RNA (1)...(19): siRNA sense strand
uggagaccauggauaauaa

SEQ ID NO: 511849 - RNA, 19 nt, Homo sapiens
  misc_RNA (1)...(19): siRNA sense strand
gaagauaugaggcggugaa

SEQ ID NO: 511850 - RNA, 19 nt, Homo sapiens
  misc_RNA (1)...(19): siRNA sense strand
ggcagcagguuccgggaua

SEQ ID NO: 511851 - RNA, 19 nt, Homo sapiens
  misc_RNA (1)...(19): siRNA sense strand
ggucaaaugcuaucugaau

SEQ ID NO: 511852 - RNA, 19 nt, Homo sapiens
  misc_RNA (1)...(19): siRNA sense strand
ugaaguggauggugguguu

SEQ ID NO: 511853 - RNA, 19 nt, Homo sapiens
  misc_RNA (1)...(19): siRNA sense strand
ggaggaggaugagauucuu

SEQ ID NO: 511854 - RNA, 19 nt, Homo sapiens
  misc_RNA (1)...(19): siRNA sense strand
acuaugagaguuuggauua

SEQ ID NO: 511855 - RNA, 19 nt, Homo sapiens
  misc_RNA (1)...(19): siRNA sense strand
gcguaaaggugccaggaau

SEQ ID NO: 511856 - RNA, 19 nt, Homo sapiens
  misc_RNA (1)...(19): siRNA sense strand
ggaggaggaggaugagauu

SEQ ID NO: 511857 - RNA, 19 nt, Homo sapiens
  misc_RNA (1)...(19): siRNA sense strand
gaccauccuuggagaaaca

SEQ ID NO: 511858 - RNA, 19 nt, Homo sapiens
  misc_RNA (1)...(19): siRNA sense strand
gaugagauucuuccaagga

SEQ ID NO: 511859 - RNA, 19 nt, Homo sapiens
  misc_RNA (1)...(19): siRNA sense strand
gucaaaugcuaucugaaug

SEQ ID NO: 511860 - RNA, 19 nt, Homo sapiens
  misc_RNA (1)...(19): siRNA sense strand
uaugagaguuuggauuaug

SEQ ID NO: 511861 - RNA, 19 nt, Homo sapiens
  misc_RNA (1)...(19): siRNA sense strand
uuacggaagauccaguuua

SEQ ID NO: 511862 - RNA, 19 nt, Homo sapiens
  misc_RNA (1)...(19): siRNA sense strand
uaaccucaccuuugucuuc

SEQ ID NO: 511863 - RNA, 19 nt, Homo sapiens
  misc_RNA (1)...(19): siRNA sense strand
uacccgaggucaaaugcua

SEQ ID NO: 511864 - RNA, 19 nt, Homo sapiens
  misc_RNA (1)...(19): siRNA sense strand
guucugggauucaguuugg

SEQ ID NO: 511865 - RNA, 19 nt, Homo sapiens
  misc_RNA (1)...(19): siRNA sense strand
ggauuaugaucgcuguauc

SEQ ID NO: 511866 - RNA, 19 nt, Homo sapiens
  misc_RNA (1)...(19): siRNA sense strand
accaagggcucacguggaa

SEQ ID NO: 511867 - RNA, 19 nt, Homo sapiens
  misc_RNA (1)...(19): siRNA sense strand
gauaauaagaaaggucgaa

SEQ ID NO: 511868 - RNA, 19 nt, Homo sapiens
  misc_RNA (1)...(19): siRNA sense strand
ggaggagugcagccagaaa

SEQ ID NO: 511869 - RNA, 19 nt, Homo sapiens
  misc_RNA (1)...(19): siRNA sense strand
gaaguggauggugguguuu

SEQ ID NO: 511870 - RNA, 19 nt, Homo sapiens
  misc_RNA (1)...(19): siRNA sense strand
ccaaggaaagacuaugaga

SEQ ID NO: 511871 - RNA, 19 nt, Homo sapiens
  misc_RNA (1)...(19): siRNA sense strand
agaaaggucgaagauauga

SEQ ID NO: 511872 - RNA, 19 nt, Homo sapiens
  misc_RNA (1)...(19): siRNA sense strand
uccuugaacuccuggguuu

SEQ ID NO: 511873 - RNA, 19 nt, Homo sapiens
  misc_RNA (1)...(19): siRNA sense strand
gaggaugagauucuuccaa

SEQ ID NO: 511874 - RNA, 19 nt, Homo sapiens
  misc_RNA (1)...(19): siRNA sense strand
cacaggaggaggaggauga

SEQ ID NO: 511875 - RNA, 19 nt, Homo sapiens
  misc_RNA (1)...(19): siRNA sense strand
uggaguugcugcagcuuuc

SEQ ID NO: 511876 - RNA, 19 nt, Homo sapiens
  misc_RNA (1)...(19): siRNA sense strand
aaggaaagacuaugagagu

SEQ ID NO: 511877 - RNA, 19 nt, Homo sapiens
  misc_RNA (1)...(19): siRNA sense strand
aauaagaaaggucgaagau

SEQ ID NO: 511878 - RNA, 19 nt, Homo sapiens
  misc_RNA (1)...(19): siRNA sense strand
uaauaagaaaggucgaaga

SEQ ID NO: 511879 - RNA, 19 nt, Homo sapiens
  misc_RNA (1)...(19): siRNA sense strand
uuggagaccauggauaaua

SEQ ID NO: 511880 - RNA, 19 nt, Homo sapiens
  misc_RNA (1)...(19): siRNA sense strand
gaaggaaggccccaugauc

SEQ ID NO: 511881 - RNA, 19 nt, Homo sapiens
  misc_RNA (1)...(19): siRNA sense strand
augagaguuuggauuauga

SEQ ID NO: 511882 - RNA, 19 nt, Homo sapiens
  misc_RNA (1)...(19): siRNA sense strand
gagaccauggauaauaaga

SEQ ID NO: 511883 - RNA, 19 nt, Homo sapiens
  misc_RNA (1)...(19): siRNA sense strand
cuucuuccguucugggauu

SEQ ID NO: 511884 - RNA, 19 nt, Homo sapiens
  misc_RNA (1)...(19): siRNA sense strand
ggugguguuugccauugga

SEQ ID NO: 511885 - RNA, 19 nt, Homo sapiens
  misc_RNA (1)...(19): siRNA sense strand
aagaaaggucgaagauaug

SEQ ID NO: 511886 - RNA, 19 nt, Homo sapiens
  misc_RNA (1)...(19): siRNA sense strand
auaagaaaggucgaagaua

SEQ ID NO: 511887 - RNA, 19 nt, Homo sapiens
  misc_RNA (1)...(19): siRNA sense strand
ccuggugggucucuuugug

SEQ ID NO: 511888 - RNA, 19 nt, Homo sapiens
  misc_RNA (1)...(19): siRNA sense strand
aggagcggcugcuggaguu

SEQ ID NO: 511889 - RNA, 19 nt, Homo sapiens
  misc_RNA (1)...(19): siRNA sense strand
gcuguaucaaugacccuua

SEQ ID NO: 511890 - RNA, 19 nt, Homo sapiens
  misc_RNA (1)...(19): siRNA sense strand
ggacccugcucugcaaggu

SEQ ID NO: 511891 - RNA, 19 nt, Homo sapiens
  misc_RNA (1)...(19): siRNA sense strand
ggauacccgaggucaaaug

SEQ ID NO: 511892 - RNA, 19 nt, Homo sapiens
  misc_RNA (1)...(19): siRNA sense strand
aggaaagacuaugagaguu

SEQ ID NO: 511893 - RNA, 19 nt, Homo sapiens
  misc_RNA (1)...(19): siRNA sense strand
gaggagugcagccagaaag

SEQ ID NO: 511894 - RNA, 19 nt, Homo sapiens
  misc_RNA (1)...(19): siRNA sense strand
cuggauugcugaacuuugg

SEQ ID NO: 511895 - RNA, 19 nt, Homo sapiens
  misc_RNA (1)...(19): siRNA sense strand
caccuucacccucaacuuc

SEQ ID NO: 511896 - RNA, 19 nt, Homo sapiens
  misc_RNA (1)...(19): siRNA sense strand
uuggagugcuguucagugu

SEQ ID NO: 511897 - RNA, 19 nt, Homo sapiens
  misc_RNA (1)...(19): siRNA sense strand
cuaugagaguuuggauuau

SEQ ID NO: 511898 - RNA, 19 nt, Homo sapiens
  misc_RNA (1)...(19): siRNA sense strand
ggagcugaccauccuugga

SEQ ID NO: 511899 - RNA, 19 nt, Homo sapiens
  misc_RNA (1)...(19): siRNA sense strand
caagggcucacguggaaag

SEQ ID NO: 511900 - RNA, 19 nt, Homo sapiens
  misc_RNA (1)...(19): siRNA sense strand
ucaaaugcuaucugaaugg

SEQ ID NO: 511901 - RNA, 19 nt, Homo sapiens
  misc_RNA (1)...(19): siRNA sense strand
aagccuccuuguucucauu

SEQ ID NO: 511902 - RNA, 19 nt, Homo sapiens
  misc_RNA (1)...(19): siRNA sense strand
guaccuuguucagucuaga

SEQ ID NO: 511903 - RNA, 19 nt, Homo sapiens
  misc_RNA (1)...(19): siRNA sense strand
gacccuuaccuggaaguuu

SEQ ID NO: 511904 - RNA, 19 nt, Homo sapiens
  misc_RNA (1)...(19): siRNA sense strand
gggauucaguuuggaagcu

SEQ ID NO: 511905 - RNA, 19 nt, Homo sapiens
  misc_RNA (1)...(19): siRNA sense strand
guaaaggugccaggaaucg

SEQ ID NO: 511906 - RNA, 19 nt, Homo sapiens
  misc_RNA (1)...(19): siRNA sense strand
gcagcagguuccgggauac

SEQ ID NO: 511907 - RNA, 19 nt, Homo sapiens
  misc_RNA (1)...(19): siRNA sense strand
uaagaaaggucgaagauau

SEQ ID NO: 511908 - RNA, 19 nt, Homo sapiens
  misc_RNA (1)...(19): siRNA sense strand
gaccauggauaauaagaaa

SEQ ID NO: 511909 - RNA, 19 nt, Homo sapiens
  misc_RNA (1)...(19): siRNA sense strand
ggaaagacuaugagaguuu

SEQ ID NO: 511910 - RNA, 19 nt, Homo sapiens
  misc_RNA (1)...(19): siRNA sense strand
gaaagacuaugagaguuug

SEQ ID NO: 511911 - RNA, 19 nt, Homo sapiens
  misc_RNA (1)...(19): siRNA sense strand
gaggucaaaugcuaucuga

SEQ ID NO: 511912 - RNA, 19 nt, Homo sapiens
  misc_RNA (1)...(19): siRNA sense strand
gagcuggccucccucaguu

SEQ ID NO: 511913 - RNA, 19 nt, Homo sapiens
  misc_RNA (1)...(19): siRNA sense strand
uacggaagauccaguuuaa

SEQ ID NO: 511914 - RNA, 19 nt, Homo sapiens
  misc_RNA (1)...(19): siRNA sense strand
caaugacccuuaccuggaa

SEQ ID NO: 511915 - RNA, 19 nt, Homo sapiens
  misc_RNA (1)...(19): siRNA sense strand
gauaugaggcggugaagug

SEQ ID NO: 511916 - RNA, 19 nt, Homo sapiens
  misc_RNA (1)...(19): siRNA sense strand
uggagaccauggauaauaa

SEQ ID NO: 511917 - RNA, 19 nt, Homo sapiens
  misc_RNA (1)...(19): siRNA sense strand
gaagauaugaggcggugaa

SEQ ID NO: 511918 - RNA, 19 nt, Homo sapiens
  misc_RNA (1)...(19): siRNA sense strand
ggcagcagguuccgggaua

SEQ ID NO: 511919 - RNA, 19 nt, Homo sapiens
  misc_RNA (1)...(19): siRNA sense strand
ggucaaaugcuaucugaau

SEQ ID NO: 511920 - RNA, 19 nt, Homo sapiens
  misc_RNA (1)...(19): siRNA sense strand
ugaaguggauggugguguu

SEQ ID NO: 511921 - RNA, 19 nt, Homo sapiens
  misc_RNA (1)...(19): siRNA sense strand
ggaggaggaugagauucuu

SEQ ID NO: 511922 - RNA, 19 nt, Homo sapiens
  misc_RNA (1)...(19): siRNA sense strand
acuaugagaguuuggauua

SEQ ID NO: 511923 - RNA, 19 nt, Homo sapiens
  misc_RNA (1)...(19): siRNA sense strand
gcguaaaggugccaggaau

SEQ ID NO: 511924 - RNA, 19 nt, Homo sapiens
  misc_RNA (1)...(19): siRNA sense strand
ggaggaggaggaugagauu

SEQ ID NO: 511925 - RNA, 19 nt, Homo sapiens
  misc_RNA (1)...(19): siRNA sense strand
gaccauccuuggagaaaca

SEQ ID NO: 511926 - RNA, 19 nt, Homo sapiens
  misc_RNA (1)...(19): siRNA sense strand
gaugagauucuuccaagga

SEQ ID NO: 511927 - RNA, 19 nt, Homo sapiens
  misc_RNA (1)...(19): siRNA sense strand
gucaaaugcuaucugaaug

SEQ ID NO: 511928 - RNA, 19 nt, Homo sapiens
  misc_RNA (1)...(19): siRNA sense strand
uaugagaguuuggauuaug

SEQ ID NO: 511929 - RNA, 19 nt, Homo sapiens
  misc_RNA (1)...(19): siRNA sense strand
uuacggaagauccaguuua

SEQ ID NO: 511930 - RNA, 19 nt, Homo sapiens
  misc_RNA (1)...(19): siRNA sense strand
uaaccucaccuuugucuuc

SEQ ID NO: 511931 - RNA, 19 nt, Homo sapiens
  misc_RNA (1)...(19): siRNA sense strand
uacccgaggucaaaugcua

SEQ ID NO: 511932 - RNA, 19 nt, Homo sapiens
  misc_RNA (1)...(19): siRNA sense strand
guucugggauucaguuugg

SEQ ID NO: 511933 - RNA, 19 nt, Homo sapiens
  misc_RNA (1)...(19): siRNA sense strand
ggauuaugaucgcuguauc

SEQ ID NO: 511934 - RNA, 19 nt, Homo sapiens
  misc_RNA (1)...(19): siRNA sense strand
accaagggcucacguggaa

SEQ ID NO: 511935 - RNA, 19 nt, Homo sapiens
  misc_RNA (1)...(19): siRNA sense strand
gauaauaagaaaggucgaa

SEQ ID NO: 511936 - RNA, 19 nt, Homo sapiens
  misc_RNA (1)...(19): siRNA sense strand
ggaggagugcagccagaaa

SEQ ID NO: 511937 - RNA, 19 nt, Homo sapiens
  misc_RNA (1)...(19): siRNA sense strand
gaaguggauggugguguuu

SEQ ID NO: 511938 - RNA, 19 nt, Homo sapiens
  misc_RNA (1)...(19): siRNA sense strand
ccaaggaaagacuaugaga

SEQ ID NO: 511939 - RNA, 19 nt, Homo sapiens
  misc_RNA (1)...(19): siRNA sense strand
agaaaggucgaagauauga

SEQ ID NO: 511940 - RNA, 19 nt, Homo sapiens
  misc_RNA (1)...(19): siRNA sense strand
uccuugaacuccuggguuu

SEQ ID NO: 511941 - RNA, 19 nt, Homo sapiens
  misc_RNA (1)...(19): siRNA sense strand
gaggaugagauucuuccaa

SEQ ID NO: 511942 - RNA, 19 nt, Homo sapiens
  misc_RNA (1)...(19): siRNA sense strand
cacaggaggaggaggauga

SEQ ID NO: 511943 - RNA, 19 nt, Homo sapiens
  misc_RNA (1)...(19): siRNA sense strand
uggaguugcugcagcuuuc

SEQ ID NO: 511944 - RNA, 19 nt, Homo sapiens
  misc_RNA (1)...(19): siRNA sense strand
aaggaaagacuaugagagu

SEQ ID NO: 511945 - RNA, 19 nt, Homo sapiens
  misc_RNA (1)...(19): siRNA sense strand
aauaagaaaggucgaagau

SEQ ID NO: 511946 - RNA, 19 nt, Homo sapiens
  misc_RNA (1)...(19): siRNA sense strand
uaauaagaaaggucgaaga

SEQ ID NO: 511947 - RNA, 19 nt, Homo sapiens
  misc_RNA (1)...(19): siRNA sense strand
uuggagaccauggauaaua

SEQ ID NO: 511948 - RNA, 19 nt, Homo sapiens
  misc_RNA (1)...(19): siRNA sense strand
gaaggaaggccccaugauc

SEQ ID NO: 511949 - RNA, 19 nt, Homo sapiens
  misc_RNA (1)...(19): siRNA sense strand
augagaguuuggauuauga

SEQ ID NO: 511950 - RNA, 19 nt, Homo sapiens
  misc_RNA (1)...(19): siRNA sense strand
gagaccauggauaauaaga

SEQ ID NO: 511951 - RNA, 19 nt, Homo sapiens
  misc_RNA (1)...(19): siRNA sense strand
cuucuuccguucugggauu

SEQ ID NO: 511952 - RNA, 19 nt, Homo sapiens
  misc_RNA (1)...(19): siRNA sense strand
ggugguguuugccauugga

SEQ ID NO: 511953 - RNA, 19 nt, Homo sapiens
  misc_RNA (1)...(19): siRNA sense strand
aagaaaggucgaagauaug

SEQ ID NO: 511954 - RNA, 19 nt, Homo sapiens
  misc_RNA (1)...(19): siRNA sense strand
auaagaaaggucgaagaua

SEQ ID NO: 511955 - RNA, 19 nt, Homo sapiens
  misc_RNA (1)...(19): siRNA sense strand
ccuggugggucucuuugug

SEQ ID NO: 511956 - RNA, 19 nt, Homo sapiens
  misc_RNA (1)...(19): siRNA sense strand
aggagcggcugcuggaguu

SEQ ID NO: 511957 - RNA, 19 nt, Homo sapiens
  misc_RNA (1)...(19): siRNA sense strand
gcuguaucaaugacccuua

SEQ ID NO: 511958 - RNA, 19 nt, Homo sapiens
  misc_RNA (1)...(19): siRNA sense strand
ggacccugcucugcaaggu

SEQ ID NO: 511959 - RNA, 19 nt, Homo sapiens
  misc_RNA (1)...(19): siRNA sense strand
ggauacccgaggucaaaug

SEQ ID NO: 511960 - RNA, 19 nt, Homo sapiens
  misc_RNA (1)...(19): siRNA sense strand
aggaaagacuaugagaguu

SEQ ID NO: 511961 - RNA, 19 nt, Homo sapiens
  misc_RNA (1)...(19): siRNA sense strand
gaggagugcagccagaaag

SEQ ID NO: 511962 - RNA, 19 nt, Homo sapiens
  misc_RNA (1)...(19): siRNA sense strand
cuggauugcugaacuuugg

SEQ ID NO: 511963 - RNA, 19 nt, Homo sapiens
  misc_RNA (1)...(19): siRNA sense strand
caccuucacccucaacuuc

SEQ ID NO: 511964 - RNA, 19 nt, Homo sapiens
  misc_RNA (1)...(19): siRNA sense strand
uuggagugcuguucagugu

SEQ ID NO: 511965 - RNA, 19 nt, Homo sapiens
  misc_RNA (1)...(19): siRNA sense strand
cuaugagaguuuggauuau

SEQ ID NO: 511966 - RNA, 19 nt, Homo sapiens
  misc_RNA (1)...(19): siRNA sense strand
ggagcugaccauccuugga

SEQ ID NO: 511967 - RNA, 19 nt, Homo sapiens
  misc_RNA (1)...(19): siRNA sense strand
caagggcucacguggaaag

SEQ ID NO: 511968 - RNA, 19 nt, Homo sapiens
  misc_RNA (1)...(19): siRNA sense strand
ucaaaugcuaucugaaugg

SEQ ID NO: 511969 - RNA, 19 nt, Homo sapiens
  misc_RNA (1)...(19): siRNA sense strand
aagccuccuuguucucauu

SEQ ID NO: 511970 - RNA, 19 nt, Homo sapiens
  misc_RNA (1)...(19): siRNA sense strand
guaccuuguucagucuaga

SEQ ID NO: 511971 - RNA, 19 nt, Homo sapiens
  misc_RNA (1)...(19): siRNA sense strand
gacccuuaccuggaaguuu

SEQ ID NO: 511972 - RNA, 19 nt, Homo sapiens
  misc_RNA (1)...(19): siRNA sense strand
gggauucaguuuggaagcu

SEQ ID NO: 511973 - RNA, 19 nt, Homo sapiens
  misc_RNA (1)...(19): siRNA sense strand
guaaaggugccaggaaucg

SEQ ID NO: 511974 - RNA, 19 nt, Homo sapiens
  misc_RNA (1)...(19): siRNA sense strand
gcagcagguuccgggauac

SEQ ID NO: 511975 - RNA, 19 nt, Homo sapiens
  misc_RNA (1)...(19): siRNA sense strand
uaagaaaggucgaagauau

SEQ ID NO: 511976 - RNA, 19 nt, Homo sapiens
  misc_RNA (1)...(19): siRNA sense strand
gaccauggauaauaagaaa

SEQ ID NO: 511977 - RNA, 19 nt, Homo sapiens
  misc_RNA (1)...(19): siRNA sense strand
ggaaagacuaugagaguuu

SEQ ID NO: 511978 - RNA, 19 nt, Homo sapiens
  misc_RNA (1)...(19): siRNA sense strand
gaaagacuaugagaguuug

SEQ ID NO: 511979 - RNA, 19 nt, Homo sapiens
  misc_RNA (1)...(19): siRNA sense strand
gaggucaaaugcuaucuga

SEQ ID NO: 511980 - RNA, 19 nt, Homo sapiens
  misc_RNA (1)...(19): siRNA sense strand
gagcuggccucccucaguu

SEQ ID NO: 511981 - RNA, 19 nt, Homo sapiens
  misc_RNA (1)...(19): siRNA sense strand
uacggaagauccaguuuaa

SEQ ID NO: 511982 - RNA, 19 nt, Homo sapiens
  misc_RNA (1)...(19): siRNA sense strand
caaugacccuuaccuggaa

SEQ ID NO: 511983 - RNA, 19 nt, Homo sapiens
  misc_RNA (1)...(19): siRNA sense strand
gauaugaggcggugaagug

SEQ ID NO: 511984 - RNA, 19 nt, Homo sapiens
  misc_RNA (1)...(19): siRNA sense strand
uggagaccauggauaauaa

SEQ ID NO: 511985 - RNA, 19 nt, Homo sapiens
  misc_RNA (1)...(19): siRNA sense strand
gaagauaugaggcggugaa

SEQ ID NO: 511986 - RNA, 19 nt, Homo sapiens
  misc_RNA (1)...(19): siRNA sense strand
ggcagcagguuccgggaua

SEQ ID NO: 511987 - RNA, 19 nt, Homo sapiens
  misc_RNA (1)...(19): siRNA sense strand
ggucaaaugcuaucugaau

SEQ ID NO: 511988 - RNA, 19 nt, Homo sapiens
  misc_RNA (1)...(19): siRNA sense strand
ugaaguggauggugguguu

SEQ ID NO: 511989 - RNA, 19 nt, Homo sapiens
  misc_RNA (1)...(19): siRNA sense strand
ggaggaggaugagauucuu

SEQ ID NO: 511990 - RNA, 19 nt, Homo sapiens
  misc_RNA (1)...(19): siRNA sense strand
acuaugagaguuuggauua

SEQ ID NO: 511991 - RNA, 19 nt, Homo sapiens
  misc_RNA (1)...(19): siRNA sense strand
gcguaaaggugccaggaau

SEQ ID NO: 511992 - RNA, 19 nt, Homo sapiens
  misc_RNA (1)...(19): siRNA sense strand
ggaggaggaggaugagauu

SEQ ID NO: 511993 - RNA, 19 nt, Homo sapiens
  misc_RNA (1)...(19): siRNA sense strand
gaccauccuuggagaaaca

SEQ ID NO: 511994 - RNA, 19 nt, Homo sapiens
  misc_RNA (1)...(19): siRNA sense strand
gaugagauucuuccaagga

SEQ ID NO: 511995 - RNA, 19 nt, Homo sapiens
  misc_RNA (1)...(19): siRNA sense strand
gucaaaugcuaucugaaug

SEQ ID NO: 511996 - RNA, 19 nt, Homo sapiens
  misc_RNA (1)...(19): siRNA sense strand
uaugagaguuuggauuaug

SEQ ID NO: 511997 - RNA, 19 nt, Homo sapiens
  misc_RNA (1)...(19): siRNA sense strand
uuacggaagauccaguuua

SEQ ID NO: 511998 - RNA, 19 nt, Homo sapiens
  misc_RNA (1)...(19): siRNA sense strand
uaaccucaccuuugucuuc

SEQ ID NO: 511999 - RNA, 19 nt, Homo sapiens
  misc_RNA (1)...(19): siRNA sense strand
uacccgaggucaaaugcua

SEQ ID NO: 512000 - RNA, 19 nt, Homo sapiens
  misc_RNA (1)...(19): siRNA sense strand
guucugggauucaguuugg

SEQ ID NO: 512001 - RNA, 19 nt, Homo sapiens
  misc_RNA (1)...(19): siRNA sense strand
ggauuaugaucgcuguauc

SEQ ID NO: 512002 - RNA, 19 nt, Homo sapiens
  misc_RNA (1)...(19): siRNA sense strand
accaagggcucacguggaa

SEQ ID NO: 512003 - RNA, 19 nt, Homo sapiens
  misc_RNA (1)...(19): siRNA sense strand
gauaauaagaaaggucgaa

SEQ ID NO: 512004 - RNA, 19 nt, Homo sapiens
  misc_RNA (1)...(19): siRNA sense strand
ggaggagugcagccagaaa

SEQ ID NO: 512005 - RNA, 19 nt, Homo sapiens
  misc_RNA (1)...(19): siRNA sense strand
gaaguggauggugguguuu

SEQ ID NO: 512006 - RNA, 19 nt, Homo sapiens
  misc_RNA (1)...(19): siRNA sense strand
ccaaggaaagacuaugaga

SEQ ID NO: 512007 - RNA, 19 nt, Homo sapiens
  misc_RNA (1)...(19): siRNA sense strand
agaaaggucgaagauauga

SEQ ID NO: 512008 - RNA, 19 nt, Homo sapiens
  misc_RNA (1)...(19): siRNA sense strand
uccuugaacuccuggguuu

SEQ ID NO: 512009 - RNA, 19 nt, Homo sapiens
  misc_RNA (1)...(19): siRNA sense strand
gaggaugagauucuuccaa

SEQ ID NO: 512010 - RNA, 19 nt, Homo sapiens
  misc_RNA (1)...(19): siRNA sense strand
cacaggaggaggaggauga

SEQ ID NO: 512011 - RNA, 19 nt, Homo sapiens
  misc_RNA (1)...(19): siRNA sense strand
uggaguugcugcagcuuuc

SEQ ID NO: 512012 - RNA, 19 nt, Homo sapiens
  misc_RNA (1)...(19): siRNA sense strand
aaggaaagacuaugagagu

SEQ ID NO: 512013 - RNA, 19 nt, Homo sapiens
  misc_RNA (1)...(19): siRNA sense strand
aauaagaaaggucgaagau

SEQ ID NO: 512014 - RNA, 19 nt, Homo sapiens
  misc_RNA (1)...(19): siRNA sense strand
uaauaagaaaggucgaaga

SEQ ID NO: 512015 - RNA, 19 nt, Homo sapiens
  misc_RNA (1)...(19): siRNA sense strand
uuggagaccauggauaaua

SEQ ID NO: 512016 - RNA, 19 nt, Homo sapiens
  misc_RNA (1)...(19): siRNA sense strand
gaaggaaggccccaugauc

SEQ ID NO: 512017 - RNA, 19 nt, Homo sapiens
  misc_RNA (1)...(19): siRNA sense strand
augagaguuuggauuauga

SEQ ID NO: 512018 - RNA, 19 nt, Homo sapiens
  misc_RNA (1)...(19): siRNA sense strand
gagaccauggauaauaaga

SEQ ID NO: 512019 - RNA, 19 nt, Homo sapiens
  misc_RNA (1)...(19): siRNA sense strand
cuucuuccguucugggauu

SEQ ID NO: 512020 - RNA, 19 nt, Homo sapiens
  misc_RNA (1)...(19): siRNA sense strand
ggugguguuugccauugga

SEQ ID NO: 512021 - RNA, 19 nt, Homo sapiens
  misc_RNA (1)...(19): siRNA sense strand
aagaaaggucgaagauaug

SEQ ID NO: 512022 - RNA, 19 nt, Homo sapiens
  misc_RNA (1)...(19): siRNA sense strand
auaagaaaggucgaagaua

SEQ ID NO: 512023 - RNA, 19 nt, Homo sapiens
  misc_RNA (1)...(19): siRNA sense strand
ccuggugggucucuuugug

SEQ ID NO: 512024 - RNA, 19 nt, Homo sapiens
  misc_RNA (1)...(19): siRNA sense strand
aggagcggcugcuggaguu

SEQ ID NO: 512025 - RNA, 19 nt, Homo sapiens
  misc_RNA (1)...(19): siRNA sense strand
gcuguaucaaugacccuua

SEQ ID NO: 512026 - RNA, 19 nt, Homo sapiens
  misc_RNA (1)...(19): siRNA sense strand
ggacccugcucugcaaggu

SEQ ID NO: 512027 - RNA, 19 nt, Homo sapiens
  misc_RNA (1)...(19): siRNA sense strand
ggauacccgaggucaaaug

SEQ ID NO: 512028 - RNA, 19 nt, Homo sapiens
  misc_RNA (1)...(19): siRNA sense strand
aggaaagacuaugagaguu

SEQ ID NO: 512029 - RNA, 19 nt, Homo sapiens
  misc_RNA (1)...(19): siRNA sense strand
gaggagugcagccagaaag

SEQ ID NO: 512030 - RNA, 19 nt, Homo sapiens
  misc_RNA (1)...(19): siRNA sense strand
cuggauugcugaacuuugg

SEQ ID NO: 512031 - RNA, 19 nt, Homo sapiens
  misc_RNA (1)...(19): siRNA sense strand
caccuucacccucaacuuc

SEQ ID NO: 512032 - RNA, 19 nt, Homo sapiens
  misc_RNA (1)...(19): siRNA sense strand
uuggagugcuguucagugu

SEQ ID NO: 512033 - RNA, 19 nt, Homo sapiens
  misc_RNA (1)...(19): siRNA sense strand
cuaugagaguuuggauuau

SEQ ID NO: 512034 - RNA, 19 nt, Homo sapiens
  misc_RNA (1)...(19): siRNA sense strand
ggagcugaccauccuugga

SEQ ID NO: 512035 - RNA, 19 nt, Homo sapiens
  misc_RNA (1)...(19): siRNA sense strand
caagggcucacguggaaag

SEQ ID NO: 512036 - RNA, 19 nt, Homo sapiens
  misc_RNA (1)...(19): siRNA sense strand
ucaaaugcuaucugaaugg

SEQ ID NO: 512037 - RNA, 19 nt, Homo sapiens
  misc_RNA (1)...(19): siRNA sense strand
aagccuccuuguucucauu

SEQ ID NO: 512038 - RNA, 19 nt, Homo sapiens
  misc_RNA (1)...(19): siRNA sense strand
guaccuuguucagucuaga

SEQ ID NO: 512039 - RNA, 19 nt, Homo sapiens
  misc_RNA (1)...(19): siRNA sense strand
gacccuuaccuggaaguuu

SEQ ID NO: 512040 - RNA, 19 nt, Homo sapiens
  misc_RNA (1)...(19): siRNA sense strand
gggauucaguuuggaagcu

SEQ ID NO: 512041 - RNA, 19 nt, Homo sapiens
  misc_RNA (1)...(19): siRNA sense strand
guaaaggugccaggaaucg

SEQ ID NO: 512042 - RNA, 19 nt, Homo sapiens
  misc_RNA (1)...(19): siRNA sense strand
gcagcagguuccgggauac

SEQ ID NO: 512043 - RNA, 19 nt, Homo sapiens
  misc_RNA (1)...(19): siRNA sense strand
uaagaaaggucgaagauau

SEQ ID NO: 512044 - RNA, 19 nt, Homo sapiens
  misc_RNA (1)...(19): siRNA sense strand
gaccauggauaauaagaaa

SEQ ID NO: 512045 - RNA, 19 nt, Homo sapiens
  misc_RNA (1)...(19): siRNA sense strand
ggaaagacuaugagaguuu

SEQ ID NO: 512046 - RNA, 19 nt, Homo sapiens
  misc_RNA (1)...(19): siRNA sense strand
gaaagacuaugagaguuug

SEQ ID NO: 512047 - RNA, 19 nt, Homo sapiens
  misc_RNA (1)...(19): siRNA sense strand
gaggucaaaugcuaucuga

SEQ ID NO: 512048 - RNA, 19 nt, Homo sapiens
  misc_RNA (1)...(19): siRNA sense strand
gagcuggccucccucaguu

SEQ ID NO: 512049 - RNA, 19 nt, Homo sapiens
  misc_RNA (1)...(19): siRNA sense strand
uacggaagauccaguuuaa

SEQ ID NO: 512050 - RNA, 19 nt, Homo sapiens
  misc_RNA (1)...(19): siRNA sense strand
caaugacccuuaccuggaa

SEQ ID NO: 512051 - RNA, 19 nt, Homo sapiens
  misc_RNA (1)...(19): siRNA sense strand
gauaugaggcggugaagug

SEQ ID NO: 512052 - RNA, 19 nt, Homo sapiens
  misc_RNA (1)...(19): siRNA sense strand
uggagaccauggauaauaa

SEQ ID NO: 512053 - RNA, 19 nt, Homo sapiens
  misc_RNA (1)...(19): siRNA sense strand
gaagauaugaggcggugaa

SEQ ID NO: 512054 - RNA, 19 nt, Homo sapiens
  misc_RNA (1)...(19): siRNA sense strand
ggcagcagguuccgggaua

SEQ ID NO: 512055 - RNA, 19 nt, Homo sapiens
  misc_RNA (1)...(19): siRNA sense strand
ggucaaaugcuaucugaau

SEQ ID NO: 512056 - RNA, 19 nt, Homo sapiens
  misc_RNA (1)...(19): siRNA sense strand
ugaaguggauggugguguu

SEQ ID NO: 512057 - RNA, 19 nt, Homo sapiens
  misc_RNA (1)...(19): siRNA sense strand
ggaggaggaugagauucuu

SEQ ID NO: 512058 - RNA, 19 nt, Homo sapiens
  misc_RNA (1)...(19): siRNA sense strand
acuaugagaguuuggauua

SEQ ID NO: 512059 - RNA, 19 nt, Homo sapiens
  misc_RNA (1)...(19): siRNA sense strand
gcguaaaggugccaggaau

SEQ ID NO: 512060 - RNA, 19 nt, Homo sapiens
  misc_RNA (1)...(19): siRNA sense strand
ggaggaggaggaugagauu

SEQ ID NO: 512061 - RNA, 19 nt, Homo sapiens
  misc_RNA (1)...(19): siRNA sense strand
gaccauccuuggagaaaca

SEQ ID NO: 512062 - RNA, 19 nt, Homo sapiens
  misc_RNA (1)...(19): siRNA sense strand
gaugagauucuuccaagga

SEQ ID NO: 512063 - RNA, 19 nt, Homo sapiens
  misc_RNA (1)...(19): siRNA sense strand
gucaaaugcuaucugaaug

SEQ ID NO: 512064 - RNA, 19 nt, Homo sapiens
  misc_RNA (1)...(19): siRNA sense strand
uaugagaguuuggauuaug

SEQ ID NO: 512065 - RNA, 19 nt, Homo sapiens
  misc_RNA (1)...(19): siRNA sense strand
uuacggaagauccaguuua

SEQ ID NO: 512066 - RNA, 19 nt, Homo sapiens
  misc_RNA (1)...(19): siRNA sense strand
uaaccucaccuuugucuuc

SEQ ID NO: 512067 - RNA, 19 nt, Homo sapiens
  misc_RNA (1)...(19): siRNA sense strand
uacccgaggucaaaugcua

SEQ ID NO: 512068 - RNA, 19 nt, Homo sapiens
  misc_RNA (1)...(19): siRNA sense strand
guucugggauucaguuugg

SEQ ID NO: 512069 - RNA, 19 nt, Homo sapiens
  misc_RNA (1)...(19): siRNA sense strand
ggauuaugaucgcuguauc

SEQ ID NO: 512070 - RNA, 19 nt, Homo sapiens
  misc_RNA (1)...(19): siRNA sense strand
accaagggcucacguggaa

SEQ ID NO: 512071 - RNA, 19 nt, Homo sapiens
  misc_RNA (1)...(19): siRNA sense strand
gauaauaagaaaggucgaa

SEQ ID NO: 512072 - RNA, 19 nt, Homo sapiens
  misc_RNA (1)...(19): siRNA sense strand
ggaggagugcagccagaaa

SEQ ID NO: 512073 - RNA, 19 nt, Homo sapiens
  misc_RNA (1)...(19): siRNA sense strand
gaaguggauggugguguuu

SEQ ID NO: 512074 - RNA, 19 nt, Homo sapiens
  misc_RNA (1)...(19): siRNA sense strand
ccaaggaaagacuaugaga

SEQ ID NO: 512075 - RNA, 19 nt, Homo sapiens
  misc_RNA (1)...(19): siRNA sense strand
agaaaggucgaagauauga

SEQ ID NO: 512076 - RNA, 19 nt, Homo sapiens
  misc_RNA (1)...(19): siRNA sense strand
uccuugaacuccuggguuu

SEQ ID NO: 512077 - RNA, 19 nt, Homo sapiens
  misc_RNA (1)...(19): siRNA sense strand
gaggaugagauucuuccaa

SEQ ID NO: 512078 - RNA, 19 nt, Homo sapiens
  misc_RNA (1)...(19): siRNA sense strand
cacaggaggaggaggauga

SEQ ID NO: 512079 - RNA, 19 nt, Homo sapiens
  misc_RNA (1)...(19): siRNA sense strand
uggaguugcugcagcuuuc

SEQ ID NO: 512080 - RNA, 19 nt, Homo sapiens
  misc_RNA (1)...(19): siRNA sense strand
aaggaaagacuaugagagu

SEQ ID NO: 512081 - RNA, 19 nt, Homo sapiens
  misc_RNA (1)...(19): siRNA sense strand
aauaagaaaggucgaagau

SEQ ID NO: 512082 - RNA, 19 nt, Homo sapiens
  misc_RNA (1)...(19): siRNA sense strand
uaauaagaaaggucgaaga

SEQ ID NO: 512083 - RNA, 19 nt, Homo sapiens
  misc_RNA (1)...(19): siRNA sense strand
uuggagaccauggauaaua

SEQ ID NO: 512084 - RNA, 19 nt, Homo sapiens
  misc_RNA (1)...(19): siRNA sense strand
gaaggaaggccccaugauc

SEQ ID NO: 512085 - RNA, 19 nt, Homo sapiens
  misc_RNA (1)...(19): siRNA sense strand
augagaguuuggauuauga

SEQ ID NO: 512086 - RNA, 19 nt, Homo sapiens
  misc_RNA (1)...(19): siRNA sense strand
gagaccauggauaauaaga

SEQ ID NO: 512087 - RNA, 19 nt, Homo sapiens
  misc_RNA (1)...(19): siRNA sense strand
cuucuuccguucugggauu

SEQ ID NO: 512088 - RNA, 19 nt, Homo sapiens
  misc_RNA (1)...(19): siRNA sense strand
ggugguguuugccauugga

SEQ ID NO: 512089 - RNA, 19 nt, Homo sapiens
  misc_RNA (1)...(19): siRNA sense strand
aagaaaggucgaagauaug

SEQ ID NO: 512090 - RNA, 19 nt, Homo sapiens
  misc_RNA (1)...(19): siRNA sense strand
auaagaaaggucgaagaua

SEQ ID NO: 512091 - RNA, 19 nt, Homo sapiens
  misc_RNA (1)...(19): siRNA sense strand
ccuggugggucucuuugug

SEQ ID NO: 512092 - RNA, 19 nt, Homo sapiens
  misc_RNA (1)...(19): siRNA sense strand
aggagcggcugcuggaguu

SEQ ID NO: 512093 - RNA, 19 nt, Homo sapiens
  misc_RNA (1)...(19): siRNA sense strand
gcuguaucaaugacccuua

SEQ ID NO: 512094 - RNA, 19 nt, Homo sapiens
  misc_RNA (1)...(19): siRNA sense strand
ggacccugcucugcaaggu

SEQ ID NO: 512095 - RNA, 19 nt, Homo sapiens
  misc_RNA (1)...(19): siRNA sense strand
ggauacccgaggucaaaug

SEQ ID NO: 512096 - RNA, 19 nt, Homo sapiens
  misc_RNA (1)...(19): siRNA sense strand
aggaaagacuaugagaguu

SEQ ID NO: 512097 - RNA, 19 nt, Homo sapiens
  misc_RNA (1)...(19): siRNA sense strand
gaggagugcagccagaaag

SEQ ID NO: 512098 - RNA, 19 nt, Homo sapiens
  misc_RNA (1)...(19): siRNA sense strand
cuggauugcugaacuuugg

SEQ ID NO: 512099 - RNA, 19 nt, Homo sapiens
  misc_RNA (1)...(19): siRNA sense strand
caccuucacccucaacuuc

SEQ ID NO: 512100 - RNA, 19 nt, Homo sapiens
  misc_RNA (1)...(19): siRNA sense strand
uuggagugcuguucagugu

SEQ ID NO: 512101 - RNA, 19 nt, Homo sapiens
  misc_RNA (1)...(19): siRNA sense strand
cuaugagaguuuggauuau

SEQ ID NO: 512102 - RNA, 19 nt, Homo sapiens
  misc_RNA (1)...(19): siRNA sense strand
ggagcugaccauccuugga

SEQ ID NO: 512103 - RNA, 19 nt, Homo sapiens
  misc_RNA (1)...(19): siRNA sense strand
caagggcucacguggaaag

SEQ ID NO: 512104 - RNA, 19 nt, Homo sapiens
  misc_RNA (1)...(19): siRNA sense strand
ucaaaugcuaucugaaugg

SEQ ID NO: 512105 - RNA, 19 nt, Homo sapiens
  misc_RNA (1)...(19): siRNA sense strand
aagccuccuuguucucauu

SEQ ID NO: 512106 - RNA, 19 nt, Homo sapiens
  misc_RNA (1)...(19): siRNA sense strand
guaccuuguucagucuaga

SEQ ID NO: 512107 - RNA, 19 nt, Homo sapiens
  misc_RNA (1)...(19): siRNA sense strand
gacccuuaccuggaaguuu

SEQ ID NO: 512108 - RNA, 19 nt, Homo sapiens
  misc_RNA (1)...(19): siRNA sense strand
gggauucaguuuggaagcu

SEQ ID NO: 512109 - RNA, 19 nt, Homo sapiens
  misc_RNA (1)...(19): siRNA sense strand
guaaaggugccaggaaucg

SEQ ID NO: 512110 - RNA, 19 nt, Homo sapiens
  misc_RNA (1)...(19): siRNA sense strand
gcagcagguuccgggauac

SEQ ID NO: 512111 - RNA, 19 nt, Homo sapiens
  misc_RNA (1)...(19): siRNA sense strand
uaagaaaggucgaagauau

SEQ ID NO: 512112 - RNA, 19 nt, Homo sapiens
  misc_RNA (1)...(19): siRNA sense strand
gaccauggauaauaagaaa

SEQ ID NO: 512113 - RNA, 19 nt, Homo sapiens
  misc_RNA (1)...(19): siRNA sense strand
ggaaagacuaugagaguuu

SEQ ID NO: 512114 - RNA, 19 nt, Homo sapiens
  misc_RNA (1)...(19): siRNA sense strand
gaaagacuaugagaguuug

SEQ ID NO: 512115 - RNA, 19 nt, Homo sapiens
  misc_RNA (1)...(19): siRNA sense strand
gaggucaaaugcuaucuga

SEQ ID NO: 512116 - RNA, 19 nt, Homo sapiens
  misc_RNA (1)...(19): siRNA sense strand
gagcuggccucccucaguu

SEQ ID NO: 512117 - RNA, 19 nt, Homo sapiens
  misc_RNA (1)...(19): siRNA sense strand
uacggaagauccaguuuaa

SEQ ID NO: 512118 - RNA, 19 nt, Homo sapiens
  misc_RNA (1)...(19): siRNA sense strand
caaugacccuuaccuggaa

SEQ ID NO: 512119 - RNA, 19 nt, Homo sapiens
  misc_RNA (1)...(19): siRNA sense strand
gauaugaggcggugaagug

SEQ ID NO: 512120 - RNA, 19 nt, Homo sapiens
  misc_RNA (1)...(19): siRNA sense strand
uggagaccauggauaauaa

SEQ ID NO: 512121 - RNA, 19 nt, Homo sapiens
  misc_RNA (1)...(19): siRNA sense strand
gaagauaugaggcggugaa

SEQ ID NO: 512122 - RNA, 19 nt, Homo sapiens
  misc_RNA (1)...(19): siRNA sense strand
ggcagcagguuccgggaua

SEQ ID NO: 512123 - RNA, 19 nt, Homo sapiens
  misc_RNA (1)...(19): siRNA sense strand
ggucaaaugcuaucugaau

SEQ ID NO: 512124 - RNA, 19 nt, Homo sapiens
  misc_RNA (1)...(19): siRNA sense strand
ugaaguggauggugguguu

SEQ ID NO: 512125 - RNA, 19 nt, Homo sapiens
  misc_RNA (1)...(19): siRNA sense strand
ggaggaggaugagauucuu

SEQ ID NO: 512126 - RNA, 19 nt, Homo sapiens
  misc_RNA (1)...(19): siRNA sense strand
acuaugagaguuuggauua

SEQ ID NO: 512127 - RNA, 19 nt, Homo sapiens
  misc_RNA (1)...(19): siRNA sense strand
gcguaaaggugccaggaau

SEQ ID NO: 512128 - RNA, 19 nt, Homo sapiens
  misc_RNA (1)...(19): siRNA sense strand
ggaggaggaggaugagauu

SEQ ID NO: 512129 - RNA, 19 nt, Homo sapiens
  misc_RNA (1)...(19): siRNA sense strand
gaccauccuuggagaaaca

SEQ ID NO: 512130 - RNA, 19 nt, Homo sapiens
  misc_RNA (1)...(19): siRNA sense strand
gaugagauucuuccaagga

SEQ ID NO: 512131 - RNA, 19 nt, Homo sapiens
  misc_RNA (1)...(19): siRNA sense strand
gucaaaugcuaucugaaug

SEQ ID NO: 512132 - RNA, 19 nt, Homo sapiens
  misc_RNA (1)...(19): siRNA sense strand
uaugagaguuuggauuaug

SEQ ID NO: 512133 - RNA, 19 nt, Homo sapiens
  misc_RNA (1)...(19): siRNA sense strand
uuacggaagauccaguuua

SEQ ID NO: 512134 - RNA, 19 nt, Homo sapiens
  misc_RNA (1)...(19): siRNA sense strand
uaaccucaccuuugucuuc

SEQ ID NO: 512135 - RNA, 19 nt, Homo sapiens
  misc_RNA (1)...(19): siRNA sense strand
uacccgaggucaaaugcua

SEQ ID NO: 512136 - RNA, 19 nt, Homo sapiens
  misc_RNA (1)...(19): siRNA sense strand
guucugggauucaguuugg

SEQ ID NO: 512137 - RNA, 19 nt, Homo sapiens
  misc_RNA (1)...(19): siRNA sense strand
ggauuaugaucgcuguauc

SEQ ID NO: 512138 - RNA, 19 nt, Homo sapiens
  misc_RNA (1)...(19): siRNA sense strand
accaagggcucacguggaa

SEQ ID NO: 512139 - RNA, 19 nt, Homo sapiens
  misc_RNA (1)...(19): siRNA sense strand
gauaauaagaaaggucgaa

SEQ ID NO: 512140 - RNA, 19 nt, Homo sapiens
  misc_RNA (1)...(19): siRNA sense strand
ggaggagugcagccagaaa

SEQ ID NO: 512141 - RNA, 19 nt, Homo sapiens
  misc_RNA (1)...(19): siRNA sense strand
gaaguggauggugguguuu

SEQ ID NO: 512142 - RNA, 19 nt, Homo sapiens
  misc_RNA (1)...(19): siRNA sense strand
ccaaggaaagacuaugaga

SEQ ID NO: 512143 - RNA, 19 nt, Homo sapiens
  misc_RNA (1)...(19): siRNA sense strand
agaaaggucgaagauauga

SEQ ID NO: 512144 - RNA, 19 nt, Homo sapiens
  misc_RNA (1)...(19): siRNA sense strand
uccuugaacuccuggguuu

SEQ ID NO: 512145 - RNA, 19 nt, Homo sapiens
  misc_RNA (1)...(19): siRNA sense strand
gaggaugagauucuuccaa

SEQ ID NO: 512146 - RNA, 19 nt, Homo sapiens
  misc_RNA (1)...(19): siRNA sense strand
cacaggaggaggaggauga

SEQ ID NO: 512147 - RNA, 19 nt, Homo sapiens
  misc_RNA (1)...(19): siRNA sense strand
uggaguugcugcagcuuuc

SEQ ID NO: 512148 - RNA, 19 nt, Homo sapiens
  misc_RNA (1)...(19): siRNA sense strand
aaggaaagacuaugagagu

SEQ ID NO: 512149 - RNA, 19 nt, Homo sapiens
  misc_RNA (1)...(19): siRNA sense strand
aauaagaaaggucgaagau

SEQ ID NO: 512150 - RNA, 19 nt, Homo sapiens
  misc_RNA (1)...(19): siRNA sense strand
uaauaagaaaggucgaaga

SEQ ID NO: 512151 - RNA, 19 nt, Homo sapiens
  misc_RNA (1)...(19): siRNA sense strand
uuggagaccauggauaaua

SEQ ID NO: 512152 - RNA, 19 nt, Homo sapiens
  misc_RNA (1)...(19): siRNA sense strand
gaaggaaggccccaugauc

SEQ ID NO: 512153 - RNA, 19 nt, Homo sapiens
  misc_RNA (1)...(19): siRNA sense strand
augagaguuuggauuauga

SEQ ID NO: 512154 - RNA, 19 nt, Homo sapiens
  misc_RNA (1)...(19): siRNA sense strand
gagaccauggauaauaaga

SEQ ID NO: 512155 - RNA, 19 nt, Homo sapiens
  misc_RNA (1)...(19): siRNA sense strand
cuucuuccguucugggauu

SEQ ID NO: 512156 - RNA, 19 nt, Homo sapiens
  misc_RNA (1)...(19): siRNA sense strand
ggugguguuugccauugga

SEQ ID NO: 512157 - RNA, 19 nt, Homo sapiens
  misc_RNA (1)...(19): siRNA sense strand
aagaaaggucgaagauaug

SEQ ID NO: 512158 - RNA, 19 nt, Homo sapiens
  misc_RNA (1)...(19): siRNA sense strand
auaagaaaggucgaagaua

SEQ ID NO: 512159 - RNA, 19 nt, Homo sapiens
  misc_RNA (1)...(19): siRNA sense strand
ccuggugggucucuuugug

SEQ ID NO: 512160 - RNA, 19 nt, Homo sapiens
  misc_RNA (1)...(19): siRNA sense strand
aggagcggcugcuggaguu

SEQ ID NO: 512161 - RNA, 19 nt, Homo sapiens
  misc_RNA (1)...(19): siRNA sense strand
gcuguaucaaugacccuua

SEQ ID NO: 512162 - RNA, 19 nt, Homo sapiens
  misc_RNA (1)...(19): siRNA sense strand
ggacccugcucugcaaggu

SEQ ID NO: 512163 - RNA, 19 nt, Homo sapiens
  misc_RNA (1)...(19): siRNA sense strand
ggauacccgaggucaaaug

SEQ ID NO: 512164 - RNA, 19 nt, Homo sapiens
  misc_RNA (1)...(19): siRNA sense strand
aggaaagacuaugagaguu

SEQ ID NO: 512165 - RNA, 19 nt, Homo sapiens
  misc_RNA (1)...(19): siRNA sense strand
gaggagugcagccagaaag

SEQ ID NO: 512166 - RNA, 19 nt, Homo sapiens
  misc_RNA (1)...(19): siRNA sense strand
cuggauugcugaacuuugg

SEQ ID NO: 512167 - RNA, 19 nt, Homo sapiens
  misc_RNA (1)...(19): siRNA sense strand
caccuucacccucaacuuc

SEQ ID NO: 512168 - RNA, 19 nt, Homo sapiens
  misc_RNA (1)...(19): siRNA sense strand
uuggagugcuguucagugu

SEQ ID NO: 512169 - RNA, 19 nt, Homo sapiens
  misc_RNA (1)...(19): siRNA sense strand
cuaugagaguuuggauuau

SEQ ID NO: 512170 - RNA, 19 nt, Homo sapiens
  misc_RNA (1)...(19): siRNA sense strand
ggagcugaccauccuugga

SEQ ID NO: 512171 - RNA, 19 nt, Homo sapiens
  misc_RNA (1)...(19): siRNA sense strand
caagggcucacguggaaag

SEQ ID NO: 512172 - RNA, 19 nt, Homo sapiens
  misc_RNA (1)...(19): siRNA sense strand
ucaaaugcuaucugaaugg

SEQ ID NO: 512173 - RNA, 19 nt, Homo sapiens
  misc_RNA (1)...(19): siRNA sense strand
aagccuccuuguucucauu

SEQ ID NO: 512174 - RNA, 19 nt, Homo sapiens
  misc_RNA (1)...(19): siRNA sense strand
guaccuuguucagucuaga

SEQ ID NO: 512175 - RNA, 19 nt, Homo sapiens
  misc_RNA (1)...(19): siRNA sense strand
gacccuuaccuggaaguuu

SEQ ID NO: 512176 - RNA, 19 nt, Homo sapiens
  misc_RNA (1)...(19): siRNA sense strand
gggauucaguuuggaagcu

SEQ ID NO: 512177 - RNA, 19 nt, Homo sapiens
  misc_RNA (1)...(19): siRNA sense strand
guaaaggugccaggaaucg

SEQ ID NO: 512178 - RNA, 19 nt, Homo sapiens
  misc_RNA (1)...(19): siRNA sense strand
gcagcagguuccgggauac

SEQ ID NO: 512179 - RNA, 19 nt, Homo sapiens
  misc_RNA (1)...(19): siRNA sense strand
uaagaaaggucgaagauau

SEQ ID NO: 512180 - RNA, 19 nt, Homo sapiens
  misc_RNA (1)...(19): siRNA sense strand
gaccauggauaauaagaaa

SEQ ID NO: 512181 - RNA, 19 nt, Homo sapiens
  misc_RNA (1)...(19): siRNA sense strand
ggaaagacuaugagaguuu

SEQ ID NO: 512182 - RNA, 19 nt, Homo sapiens
  misc_RNA (1)...(19): siRNA sense strand
gaaagacuaugagaguuug

SEQ ID NO: 512183 - RNA, 19 nt, Homo sapiens
  misc_RNA (1)...(19): siRNA sense strand
gaggucaaaugcuaucuga

SEQ ID NO: 512184 - RNA, 19 nt, Homo sapiens
  misc_RNA (1)...(19): siRNA sense strand
gagcuggccucccucaguu

SEQ ID NO: 512185 - RNA, 19 nt, Homo sapiens
  misc_RNA (1)...(19): siRNA sense strand
uacggaagauccaguuuaa

SEQ ID NO: 512186 - RNA, 19 nt, Homo sapiens
  misc_RNA (1)...(19): siRNA sense strand
caaugacccuuaccuggaa

SEQ ID NO: 512187 - RNA, 19 nt, Homo sapiens
  misc_RNA (1)...(19): siRNA sense strand
gauaugaggcggugaagug

SEQ ID NO: 512188 - RNA, 19 nt, Homo sapiens
  misc_RNA (1)...(19): siRNA sense strand
uggagaccauggauaauaa

SEQ ID NO: 512189 - RNA, 19 nt, Homo sapiens
  misc_RNA (1)...(19): siRNA sense strand
gaagauaugaggcggugaa

SEQ ID NO: 512190 - RNA, 19 nt, Homo sapiens
  misc_RNA (1)...(19): siRNA sense strand
ggcagcagguuccgggaua

SEQ ID NO: 512191 - RNA, 19 nt, Homo sapiens
  misc_RNA (1)...(19): siRNA sense strand
ggucaaaugcuaucugaau

SEQ ID NO: 512192 - RNA, 19 nt, Homo sapiens
  misc_RNA (1)...(19): siRNA sense strand
ugaaguggauggugguguu

SEQ ID NO: 512193 - RNA, 19 nt, Homo sapiens
  misc_RNA (1)...(19): siRNA sense strand
ggaggaggaugagauucuu

SEQ ID NO: 512194 - RNA, 19 nt, Homo sapiens
  misc_RNA (1)...(19): siRNA sense strand
acuaugagaguuuggauua

SEQ ID NO: 512195 - RNA, 19 nt, Homo sapiens
  misc_RNA (1)...(19): siRNA sense strand
gcguaaaggugccaggaau

SEQ ID NO: 512196 - RNA, 19 nt, Homo sapiens
  misc_RNA (1)...(19): siRNA sense strand
ggaggaggaggaugagauu

SEQ ID NO: 512197 - RNA, 19 nt, Homo sapiens
  misc_RNA (1)...(19): siRNA sense strand
gaccauccuuggagaaaca

SEQ ID NO: 512198 - RNA, 19 nt, Homo sapiens
  misc_RNA (1)...(19): siRNA sense strand
gaugagauucuuccaagga

SEQ ID NO: 512199 - RNA, 19 nt, Homo sapiens
  misc_RNA (1)...(19): siRNA sense strand
gucaaaugcuaucugaaug

SEQ ID NO: 512200 - RNA, 19 nt, Homo sapiens
  misc_RNA (1)...(19): siRNA sense strand
uaugagaguuuggauuaug

SEQ ID NO: 512201 - RNA, 19 nt, Homo sapiens
  misc_RNA (1)...(19): siRNA sense strand
uuacggaagauccaguuua

SEQ ID NO: 512202 - RNA, 19 nt, Homo sapiens
  misc_RNA (1)...(19): siRNA sense strand
uaaccucaccuuugucuuc

SEQ ID NO: 512203 - RNA, 19 nt, Homo sapiens
  misc_RNA (1)...(19): siRNA sense strand
uacccgaggucaaaugcua

SEQ ID NO: 512204 - RNA, 19 nt, Homo sapiens
  misc_RNA (1)...(19): siRNA sense strand
guucugggauucaguuugg

SEQ ID NO: 512205 - RNA, 19 nt, Homo sapiens
  misc_RNA (1)...(19): siRNA sense strand
ggauuaugaucgcuguauc

SEQ ID NO: 512206 - RNA, 19 nt, Homo sapiens
  misc_RNA (1)...(19): siRNA sense strand
accaagggcucacguggaa

SEQ ID NO: 512207 - RNA, 19 nt, Homo sapiens
  misc_RNA (1)...(19): siRNA sense strand
gauaauaagaaaggucgaa

SEQ ID NO: 512208 - RNA, 19 nt, Homo sapiens
  misc_RNA (1)...(19): siRNA sense strand
ggaggagugcagccagaaa

SEQ ID NO: 512209 - RNA, 19 nt, Homo sapiens
  misc_RNA (1)...(19): siRNA sense strand
gaaguggauggugguguuu

SEQ ID NO: 512210 - RNA, 19 nt, Homo sapiens
  misc_RNA (1)...(19): siRNA sense strand
ccaaggaaagacuaugaga

SEQ ID NO: 512211 - RNA, 19 nt, Homo sapiens
  misc_RNA (1)...(19): siRNA sense strand
agaaaggucgaagauauga

SEQ ID NO: 512212 - RNA, 19 nt, Homo sapiens
  misc_RNA (1)...(19): siRNA sense strand
uccuugaacuccuggguuu

SEQ ID NO: 512213 - RNA, 19 nt, Homo sapiens
  misc_RNA (1)...(19): siRNA sense strand
gaggaugagauucuuccaa

SEQ ID NO: 512214 - RNA, 19 nt, Homo sapiens
  misc_RNA (1)...(19): siRNA sense strand
cacaggaggaggaggauga

SEQ ID NO: 512215 - RNA, 19 nt, Homo sapiens
  misc_RNA (1)...(19): siRNA sense strand
uggaguugcugcagcuuuc

SEQ ID NO: 512216 - RNA, 19 nt, Homo sapiens
  misc_RNA (1)...(19): siRNA sense strand
aaggaaagacuaugagagu

SEQ ID NO: 512217 - RNA, 19 nt, Homo sapiens
  misc_RNA (1)...(19): siRNA sense strand
aauaagaaaggucgaagau

SEQ ID NO: 512218 - RNA, 19 nt, Homo sapiens
  misc_RNA (1)...(19): siRNA sense strand
uaauaagaaaggucgaaga

SEQ ID NO: 512219 - RNA, 19 nt, Homo sapiens
  misc_RNA (1)...(19): siRNA sense strand
uuggagaccauggauaaua

SEQ ID NO: 512220 - RNA, 19 nt, Homo sapiens
  misc_RNA (1)...(19): siRNA sense strand
gaaggaaggccccaugauc

SEQ ID NO: 512221 - RNA, 19 nt, Homo sapiens
  misc_RNA (1)...(19): siRNA sense strand
augagaguuuggauuauga

SEQ ID NO: 512222 - RNA, 19 nt, Homo sapiens
  misc_RNA (1)...(19): siRNA sense strand
gagaccauggauaauaaga

SEQ ID NO: 512223 - RNA, 19 nt, Homo sapiens
  misc_RNA (1)...(19): siRNA sense strand
cuucuuccguucugggauu

SEQ ID NO: 512224 - RNA, 19 nt, Homo sapiens
  misc_RNA (1)...(19): siRNA sense strand
ggugguguuugccauugga

SEQ ID NO: 512225 - RNA, 19 nt, Homo sapiens
  misc_RNA (1)...(19): siRNA sense strand
aagaaaggucgaagauaug

SEQ ID NO: 512226 - RNA, 19 nt, Homo sapiens
  misc_RNA (1)...(19): siRNA sense strand
auaagaaaggucgaagaua

SEQ ID NO: 512227 - RNA, 19 nt, Homo sapiens
  misc_RNA (1)...(19): siRNA sense strand
ccuggugggucucuuugug

SEQ ID NO: 512228 - RNA, 19 nt, Homo sapiens
  misc_RNA (1)...(19): siRNA sense strand
aggagcggcugcuggaguu

SEQ ID NO: 512229 - RNA, 19 nt, Homo sapiens
  misc_RNA (1)...(19): siRNA sense strand
gcuguaucaaugacccuua

SEQ ID NO: 512230 - RNA, 19 nt, Homo sapiens
  misc_RNA (1)...(19): siRNA sense strand
ggacccugcucugcaaggu

SEQ ID NO: 512231 - RNA, 19 nt, Homo sapiens
  misc_RNA (1)...(19): siRNA sense strand
ggauacccgaggucaaaug

SEQ ID NO: 512232 - RNA, 19 nt, Homo sapiens
  misc_RNA (1)...(19): siRNA sense strand
aggaaagacuaugagaguu

SEQ ID NO: 512233 - RNA, 19 nt, Homo sapiens
  misc_RNA (1)...(19): siRNA sense strand
gaggagugcagccagaaag

SEQ ID NO: 512234 - RNA, 19 nt, Homo sapiens
  misc_RNA (1)...(19): siRNA sense strand
cuggauugcugaacuuugg

SEQ ID NO: 512235 - RNA, 19 nt, Homo sapiens
  misc_RNA (1)...(19): siRNA sense strand
caccuucacccucaacuuc

SEQ ID NO: 512236 - RNA, 19 nt, Homo sapiens
  misc_RNA (1)...(19): siRNA sense strand
uuggagugcuguucagugu

SEQ ID NO: 512237 - RNA, 19 nt, Homo sapiens
  misc_RNA (1)...(19): siRNA sense strand
cuaugagaguuuggauuau

SEQ ID NO: 512238 - RNA, 19 nt, Homo sapiens
  misc_RNA (1)...(19): siRNA sense strand
ggagcugaccauccuugga

SEQ ID NO: 512239 - RNA, 19 nt, Homo sapiens
  misc_RNA (1)...(19): siRNA sense strand
caagggcucacguggaaag

SEQ ID NO: 512240 - RNA, 19 nt, Homo sapiens
  misc_RNA (1)...(19): siRNA sense strand
ucaaaugcuaucugaaugg

SEQ ID NO: 512241 - RNA, 19 nt, Homo sapiens
  misc_RNA (1)...(19): siRNA sense strand
aagccuccuuguucucauu

SEQ ID NO: 512242 - RNA, 19 nt, Homo sapiens
  misc_RNA (1)...(19): siRNA sense strand
guaccuuguucagucuaga

SEQ ID NO: 512243 - RNA, 19 nt, Homo sapiens
  misc_RNA (1)...(19): siRNA sense strand
gacccuuaccuggaaguuu

SEQ ID NO: 512244 - RNA, 19 nt, Homo sapiens
  misc_RNA (1)...(19): siRNA sense strand
gggauucaguuuggaagcu

SEQ ID NO: 512245 - RNA, 19 nt, Homo sapiens
  misc_RNA (1)...(19): siRNA sense strand
guaaaggugccaggaaucg

SEQ ID NO: 512246 - RNA, 19 nt, Homo sapiens
  misc_RNA (1)...(19): siRNA sense strand
gcagcagguuccgggauac

SEQ ID NO: 512247 - RNA, 19 nt, Homo sapiens
  misc_RNA (1)...(19): siRNA sense strand
uaagaaaggucgaagauau

SEQ ID NO: 512248 - RNA, 19 nt, Homo sapiens
  misc_RNA (1)...(19): siRNA sense strand
gaccauggauaauaagaaa

SEQ ID NO: 512249 - RNA, 19 nt, Homo sapiens
  misc_RNA (1)...(19): siRNA sense strand
ggaaagacuaugagaguuu

SEQ ID NO: 512250 - RNA, 19 nt, Homo sapiens
  misc_RNA (1)...(19): siRNA sense strand
gaaagacuaugagaguuug

SEQ ID NO: 512251 - RNA, 19 nt, Homo sapiens
  misc_RNA (1)...(19): siRNA sense strand
gaggucaaaugcuaucuga

SEQ ID NO: 512252 - RNA, 19 nt, Homo sapiens
  misc_RNA (1)...(19): siRNA sense strand
gagcuggccucccucaguu

SEQ ID NO: 512253 - RNA, 19 nt, Homo sapiens
  misc_RNA (1)...(19): siRNA sense strand
uacggaagauccaguuuaa

SEQ ID NO: 512254 - RNA, 19 nt, Homo sapiens
  misc_RNA (1)...(19): siRNA sense strand
caaugacccuuaccuggaa

SEQ ID NO: 512255 - RNA, 19 nt, Homo sapiens
  misc_RNA (1)...(19): siRNA sense strand
gauaugaggcggugaagug

SEQ ID NO: 512256 - RNA, 19 nt, Homo sapiens
  misc_RNA (1)...(19): siRNA sense strand
uggagaccauggauaauaa

SEQ ID NO: 512257 - RNA, 19 nt, Homo sapiens
  misc_RNA (1)...(19): siRNA sense strand
gaagauaugaggcggugaa

SEQ ID NO: 512258 - RNA, 19 nt, Homo sapiens
  misc_RNA (1)...(19): siRNA sense strand
ggcagcagguuccgggaua

SEQ ID NO: 512259 - RNA, 19 nt, Homo sapiens
  misc_RNA (1)...(19): siRNA sense strand
ggucaaaugcuaucugaau

SEQ ID NO: 512260 - RNA, 19 nt, Homo sapiens
  misc_RNA (1)...(19): siRNA sense strand
ugaaguggauggugguguu

SEQ ID NO: 512261 - RNA, 19 nt, Homo sapiens
  misc_RNA (1)...(19): siRNA sense strand
ggaggaggaugagauucuu

SEQ ID NO: 512262 - RNA, 19 nt, Homo sapiens
  misc_RNA (1)...(19): siRNA sense strand
acuaugagaguuuggauua

SEQ ID NO: 512263 - RNA, 19 nt, Homo sapiens
  misc_RNA (1)...(19): siRNA sense strand
gcguaaaggugccaggaau

SEQ ID NO: 512264 - RNA, 19 nt, Homo sapiens
  misc_RNA (1)...(19): siRNA sense strand
ggaggaggaggaugagauu

SEQ ID NO: 512265 - RNA, 19 nt, Homo sapiens
  misc_RNA (1)...(19): siRNA sense strand
gaccauccuuggagaaaca

SEQ ID NO: 512266 - RNA, 19 nt, Homo sapiens
  misc_RNA (1)...(19): siRNA sense strand
gaugagauucuuccaagga

SEQ ID NO: 512267 - RNA, 19 nt, Homo sapiens
  misc_RNA (1)...(19): siRNA sense strand
gucaaaugcuaucugaaug

SEQ ID NO: 512268 - RNA, 19 nt, Homo sapiens
  misc_RNA (1)...(19): siRNA sense strand
uaugagaguuuggauuaug

SEQ ID NO: 512269 - RNA, 19 nt, Homo sapiens
  misc_RNA (1)...(19): siRNA sense strand
uuacggaagauccaguuua

SEQ ID NO: 512270 - RNA, 19 nt, Homo sapiens
  misc_RNA (1)...(19): siRNA sense strand
uaaccucaccuuugucuuc

SEQ ID NO: 512271 - RNA, 19 nt, Homo sapiens
  misc_RNA (1)...(19): siRNA sense strand
uacccgaggucaaaugcua

SEQ ID NO: 512272 - RNA, 19 nt, Homo sapiens
  misc_RNA (1)...(19): siRNA sense strand
guucugggauucaguuugg

SEQ ID NO: 512273 - RNA, 19 nt, Homo sapiens
  misc_RNA (1)...(19): siRNA sense strand
ggauuaugaucgcuguauc

SEQ ID NO: 512274 - RNA, 19 nt, Homo sapiens
  misc_RNA (1)...(19): siRNA sense strand
accaagggcucacguggaa

SEQ ID NO: 512275 - RNA, 19 nt, Homo sapiens
  misc_RNA (1)...(19): siRNA sense strand
gauaauaagaaaggucgaa

SEQ ID NO: 512276 - RNA, 19 nt, Homo sapiens
  misc_RNA (1)...(19): siRNA sense strand
ggaggagugcagccagaaa

SEQ ID NO: 512277 - RNA, 19 nt, Homo sapiens
  misc_RNA (1)...(19): siRNA sense strand
gaaguggauggugguguuu

SEQ ID NO: 512278 - RNA, 19 nt, Homo sapiens
  misc_RNA (1)...(19): siRNA sense strand
ccaaggaaagacuaugaga

SEQ ID NO: 512279 - RNA, 19 nt, Homo sapiens
  misc_RNA (1)...(19): siRNA sense strand
agaaaggucgaagauauga

SEQ ID NO: 512280 - RNA, 19 nt, Homo sapiens
  misc_RNA (1)...(19): siRNA sense strand
uccuugaacuccuggguuu

SEQ ID NO: 512281 - RNA, 19 nt, Homo sapiens
  misc_RNA (1)...(19): siRNA sense strand
gaggaugagauucuuccaa

SEQ ID NO: 512282 - RNA, 19 nt, Homo sapiens
  misc_RNA (1)...(19): siRNA sense strand
cacaggaggaggaggauga

SEQ ID NO: 512283 - RNA, 19 nt, Homo sapiens
  misc_RNA (1)...(19): siRNA sense strand
uggaguugcugcagcuuuc

SEQ ID NO: 512284 - RNA, 19 nt, Homo sapiens
  misc_RNA (1)...(19): siRNA sense strand
aaggaaagacuaugagagu

SEQ ID NO: 512285 - RNA, 19 nt, Homo sapiens
  misc_RNA (1)...(19): siRNA sense strand
aauaagaaaggucgaagau

SEQ ID NO: 512286 - RNA, 19 nt, Homo sapiens
  misc_RNA (1)...(19): siRNA sense strand
uaauaagaaaggucgaaga

SEQ ID NO: 512287 - RNA, 19 nt, Homo sapiens
  misc_RNA (1)...(19): siRNA sense strand
uuggagaccauggauaaua

SEQ ID NO: 512288 - RNA, 19 nt, Homo sapiens
  misc_RNA (1)...(19): siRNA sense strand
gaaggaaggccccaugauc

SEQ ID NO: 512289 - RNA, 19 nt, Homo sapiens
  misc_RNA (1)...(19): siRNA sense strand
augagaguuuggauuauga

SEQ ID NO: 512290 - RNA, 19 nt, Homo sapiens
  misc_RNA (1)...(19): siRNA sense strand
gagaccauggauaauaaga

SEQ ID NO: 512291 - RNA, 19 nt, Homo sapiens
  misc_RNA (1)...(19): siRNA sense strand
cuucuuccguucugggauu

SEQ ID NO: 512292 - RNA, 19 nt, Homo sapiens
  misc_RNA (1)...(19): siRNA sense strand
ggugguguuugccauugga

SEQ ID NO: 512293 - RNA, 19 nt, Homo sapiens
  misc_RNA (1)...(19): siRNA sense strand
aagaaaggucgaagauaug

SEQ ID NO: 512294 - RNA, 19 nt, Homo sapiens
  misc_RNA (1)...(19): siRNA sense strand
auaagaaaggucgaagaua

SEQ ID NO: 512295 - RNA, 19 nt, Homo sapiens
  misc_RNA (1)...(19): siRNA sense strand
ccuggugggucucuuugug

SEQ ID NO: 512296 - RNA, 19 nt, Homo sapiens
  misc_RNA (1)...(19): siRNA sense strand
aggagcggcugcuggaguu

SEQ ID NO: 512297 - RNA, 19 nt, Homo sapiens
  misc_RNA (1)...(19): siRNA sense strand
gcuguaucaaugacccuua

SEQ ID NO: 512298 - RNA, 19 nt, Homo sapiens
  misc_RNA (1)...(19): siRNA sense strand
ggacccugcucugcaaggu

SEQ ID NO: 512299 - RNA, 19 nt, Homo sapiens
  misc_RNA (1)...(19): siRNA sense strand
ggauacccgaggucaaaug

SEQ ID NO: 512300 - RNA, 19 nt, Homo sapiens
  misc_RNA (1)...(19): siRNA sense strand
aggaaagacuaugagaguu

SEQ ID NO: 512301 - RNA, 19 nt, Homo sapiens
  misc_RNA (1)...(19): siRNA sense strand
gaggagugcagccagaaag

SEQ ID NO: 512302 - RNA, 19 nt, Homo sapiens
  misc_RNA (1)...(19): siRNA sense strand
cuggauugcugaacuuugg

SEQ ID NO: 512303 - RNA, 19 nt, Homo sapiens
  misc_RNA (1)...(19): siRNA sense strand
caccuucacccucaacuuc

SEQ ID NO: 512304 - RNA, 19 nt, Homo sapiens
  misc_RNA (1)...(19): siRNA sense strand
uuggagugcuguucagugu

SEQ ID NO: 512305 - RNA, 19 nt, Homo sapiens
  misc_RNA (1)...(19): siRNA sense strand
cuaugagaguuuggauuau

SEQ ID NO: 512306 - RNA, 19 nt, Homo sapiens
  misc_RNA (1)...(19): siRNA sense strand
ggagcugaccauccuugga

SEQ ID NO: 512307 - RNA, 19 nt, Homo sapiens
  misc_RNA (1)...(19): siRNA sense strand
caagggcucacguggaaag

SEQ ID NO: 512308 - RNA, 19 nt, Homo sapiens
  misc_RNA (1)...(19): siRNA sense strand
ucaaaugcuaucugaaugg

SEQ ID NO: 512309 - RNA, 19 nt, Homo sapiens
  misc_RNA (1)...(19): siRNA sense strand
aagccuccuuguucucauu

SEQ ID NO: 512310 - RNA, 19 nt, Homo sapiens
  misc_RNA (1)...(19): siRNA sense strand
guaccuuguucagucuaga

SEQ ID NO: 512311 - RNA, 19 nt, Homo sapiens
  misc_RNA (1)...(19): siRNA sense strand
gacccuuaccuggaaguuu

SEQ ID NO: 512312 - RNA, 19 nt, Homo sapiens
  misc_RNA (1)...(19): siRNA sense strand
gggauucaguuuggaagcu

SEQ ID NO: 512313 - RNA, 19 nt, Homo sapiens
  misc_RNA (1)...(19): siRNA sense strand
guaaaggugccaggaaucg

SEQ ID NO: 512314 - RNA, 19 nt, Homo sapiens
  misc_RNA (1)...(19): siRNA sense strand
gcagcagguuccgggauac

SEQ ID NO: 512315 - RNA, 19 nt, Homo sapiens
  misc_RNA (1)...(19): siRNA sense strand
gaagagagauugaaaccaa

SEQ ID NO: 512316 - RNA, 19 nt, Homo sapiens
  misc_RNA (1)...(19): siRNA sense strand
ggaaagaaguaguugucua

SEQ ID NO: 512317 - RNA, 19 nt, Homo sapiens
  misc_RNA (1)...(19): siRNA sense strand
ggacaggcaucuuuguuug

SEQ ID NO: 512318 - RNA, 19 nt, Homo sapiens
  misc_RNA (1)...(19): siRNA sense strand
acagggagcucaauucaaa

SEQ ID NO: 512319 - RNA, 19 nt, Homo sapiens
  misc_RNA (1)...(19): siRNA sense strand
agaaagugcuggaaauaaa

SEQ ID NO: 512320 - RNA, 19 nt, Homo sapiens
  misc_RNA (1)...(19): siRNA sense strand
gcacaucaauagucuaaca

SEQ ID NO: 512321 - RNA, 19 nt, Homo sapiens
  misc_RNA (1)...(19): siRNA sense strand
gcaaaccuguugaugagaa

SEQ ID NO: 512322 - RNA, 19 nt, Homo sapiens
  misc_RNA (1)...(19): siRNA sense strand
ccacaaauaccaccucuaa

SEQ ID NO: 512323 - RNA, 19 nt, Homo sapiens
  misc_RNA (1)...(19): siRNA sense strand
gaacuucguuuagaggauu

SEQ ID NO: 512324 - RNA, 19 nt, Homo sapiens
  misc_RNA (1)...(19): siRNA sense strand
gaugaagauucccuuguuu

SEQ ID NO: 512325 - RNA, 19 nt, Homo sapiens
  misc_RNA (1)...(19): siRNA sense strand
gaacaaccaaccuaagauu

SEQ ID NO: 512326 - RNA, 19 nt, Homo sapiens
  misc_RNA (1)...(19): siRNA sense strand
ucacuaagguugguuacua

SEQ ID NO: 512327 - RNA, 19 nt, Homo sapiens
  misc_RNA (1)...(19): siRNA sense strand
uggcacaacuucaacauuu

SEQ ID NO: 512328 - RNA, 19 nt, Homo sapiens
  misc_RNA (1)...(19): siRNA sense strand
gaaggaagcagugaagaaa

SEQ ID NO: 512329 - RNA, 19 nt, Homo sapiens
  misc_RNA (1)...(19): siRNA sense strand
gcagaccaauacuggauuu

SEQ ID NO: 512330 - RNA, 19 nt, Homo sapiens
  misc_RNA (1)...(19): siRNA sense strand
cuacuuagaugauaaccaa

SEQ ID NO: 512331 - RNA, 19 nt, Homo sapiens
  misc_RNA (1)...(19): siRNA sense strand
ggagagagauuuaguuucc

SEQ ID NO: 512332 - RNA, 19 nt, Homo sapiens
  misc_RNA (1)...(19): siRNA sense strand
gaaggaagagagauugaaa

SEQ ID NO: 512333 - RNA, 19 nt, Homo sapiens
  misc_RNA (1)...(19): siRNA sense strand
ugaaggagaugugaauuug

SEQ ID NO: 512334 - RNA, 19 nt, Homo sapiens
  misc_RNA (1)...(19): siRNA sense strand
gaaagguuaugguucaauc

SEQ ID NO: 512335 - RNA, 19 nt, Homo sapiens
  misc_RNA (1)...(19): siRNA sense strand
ggucaaagcuggaguuagc

SEQ ID NO: 512336 - RNA, 19 nt, Homo sapiens
  misc_RNA (1)...(19): siRNA sense strand
gugaagggcuaaauaggaa

SEQ ID NO: 512337 - RNA, 19 nt, Homo sapiens
  misc_RNA (1)...(19): siRNA sense strand
caacuggcuuuggcaauuu

SEQ ID NO: 512338 - RNA, 19 nt, Homo sapiens
  misc_RNA (1)...(19): siRNA sense strand
uuacuacaccuacucauua

SEQ ID NO: 512339 - RNA, 19 nt, Homo sapiens
  misc_RNA (1)...(19): siRNA sense strand
ggaggccucuuuggaaauu

SEQ ID NO: 512340 - RNA, 19 nt, Homo sapiens
  misc_RNA (1)...(19): siRNA sense strand
ggaccagucucuucucauc

SEQ ID NO: 512341 - RNA, 19 nt, Homo sapiens
  misc_RNA (1)...(19): siRNA sense strand
ccagaaggcucuuacuaca

SEQ ID NO: 512342 - RNA, 19 nt, Homo sapiens
  misc_RNA (1)...(19): siRNA sense strand
ccaagaagagcauuaagaa

SEQ ID NO: 512343 - RNA, 19 nt, Homo sapiens
  misc_RNA (1)...(19): siRNA sense strand
gaagagcauuaagaaguug

SEQ ID NO: 512344 - RNA, 19 nt, Homo sapiens
  misc_RNA (1)...(19): siRNA sense strand
ggaaggaagcagugaagaa

SEQ ID NO: 512345 - RNA, 19 nt, Homo sapiens
  misc_RNA (1)...(19): siRNA sense strand
aaacaugcgugcugcuuug

SEQ ID NO: 512346 - RNA, 19 nt, Homo sapiens
  misc_RNA (1)...(19): siRNA sense strand
ccaggaggauuguuuggaa

SEQ ID NO: 512347 - RNA, 19 nt, Homo sapiens
  misc_RNA (1)...(19): siRNA sense strand
gauaucaacuaugaaggaa

SEQ ID NO: 512348 - RNA, 19 nt, Homo sapiens
  misc_RNA (1)...(19): siRNA sense strand
ggaguuuggccaacagaua

SEQ ID NO: 512349 - RNA, 19 nt, Homo sapiens
  misc_RNA (1)...(19): siRNA sense strand
gcacccagcagguauuauu

SEQ ID NO: 512350 - RNA, 19 nt, Homo sapiens
  misc_RNA (1)...(19): siRNA sense strand
ggaaauaaacacagcaaca

SEQ ID NO: 512351 - RNA, 19 nt, Homo sapiens
  misc_RNA (1)...(19): siRNA sense strand
agaagagcauuaagaaguu

SEQ ID NO: 512352 - RNA, 19 nt, Homo sapiens
  misc_RNA (1)...(19): siRNA sense strand
gcacuaacauaaguaccaa

SEQ ID NO: 512353 - RNA, 19 nt, Homo sapiens
  misc_RNA (1)...(19): siRNA sense strand
ggaaacagggagcucaauu

SEQ ID NO: 512354 - RNA, 19 nt, Homo sapiens
  misc_RNA (1)...(19): siRNA sense strand
uaucaacuaugaaggaaga

SEQ ID NO: 512355 - RNA, 19 nt, Homo sapiens
  misc_RNA (1)...(19): siRNA sense strand
ccagaucgccuugcugaua

SEQ ID NO: 512356 - RNA, 19 nt, Homo sapiens
  misc_RNA (1)...(19): siRNA sense strand
gaacuaguacaacuggauu

SEQ ID NO: 512357 - RNA, 19 nt, Homo sapiens
  misc_RNA (1)...(19): siRNA sense strand
gaaacagggagcucaauuc

SEQ ID NO: 512358 - RNA, 19 nt, Homo sapiens
  misc_RNA (1)...(19): siRNA sense strand
gaagaaggaagagagauug

SEQ ID NO: 512359 - RNA, 19 nt, Homo sapiens
  misc_RNA (1)...(19): siRNA sense strand
guaccaagcaccaguguau

SEQ ID NO: 512360 - RNA, 19 nt, Homo sapiens
  misc_RNA (1)...(19): siRNA sense strand
uaagcaaaccuguugauga

SEQ ID NO: 512361 - RNA, 19 nt, Homo sapiens
  misc_RNA (1)...(19): siRNA sense strand
cuacugggacuacuauuaa

SEQ ID NO: 512362 - RNA, 19 nt, Homo sapiens
  misc_RNA (1)...(19): siRNA sense strand
gcaagucacuagaggaacu

SEQ ID NO: 512363 - RNA, 19 nt, Homo sapiens
  misc_RNA (1)...(19): siRNA sense strand
guugaagacugcuccuuug

SEQ ID NO: 512364 - RNA, 19 nt, Homo sapiens
  misc_RNA (1)...(19): siRNA sense strand
uugcugauaucaacuauga

SEQ ID NO: 512365 - RNA, 19 nt, Homo sapiens
  misc_RNA (1)...(19): siRNA sense strand
uaggaaggcugaaguuaca

SEQ ID NO: 512366 - RNA, 19 nt, Homo sapiens
  misc_RNA (1)...(19): siRNA sense strand
ugauaccauuguugcauua

SEQ ID NO: 512367 - RNA, 19 nt, Homo sapiens
  misc_RNA (1)...(19): siRNA sense strand
cuacaccuacucauuauaa

SEQ ID NO: 512368 - RNA, 19 nt, Homo sapiens
  misc_RNA (1)...(19): siRNA sense strand
acaaauaccagugggaaua

SEQ ID NO: 512369 - RNA, 19 nt, Homo sapiens
  misc_RNA (1)...(19): siRNA sense strand
guacagauacuauggucaa

SEQ ID NO: 512370 - RNA, 19 nt, Homo sapiens
  misc_RNA (1)...(19): siRNA sense strand
gagcauccgucuaaaacua

SEQ ID NO: 512371 - RNA, 19 nt, Homo sapiens
  misc_RNA (1)...(19): siRNA sense strand
uagaggaacuucguuuaga

SEQ ID NO: 512372 - RNA, 19 nt, Homo sapiens
  misc_RNA (1)...(19): siRNA sense strand
caacagaaucagcagacua

SEQ ID NO: 512373 - RNA, 19 nt, Homo sapiens
  misc_RNA (1)...(19): siRNA sense strand
uguuuaaggucucccauuu

SEQ ID NO: 512374 - RNA, 19 nt, Homo sapiens
  misc_RNA (1)...(19): siRNA sense strand
gaguuuggccaacagauaa

SEQ ID NO: 512375 - RNA, 19 nt, Homo sapiens
  misc_RNA (1)...(19): siRNA sense strand
gguuaugguucaaucuauu

SEQ ID NO: 512376 - RNA, 19 nt, Homo sapiens
  misc_RNA (1)...(19): siRNA sense strand
ggaugaccgagaagaaaua

SEQ ID NO: 512377 - RNA, 19 nt, Homo sapiens
  misc_RNA (1)...(19): siRNA sense strand
gcaacaguguggaugauac

SEQ ID NO: 512378 - RNA, 19 nt, Homo sapiens
  misc_RNA (1)...(19): siRNA sense strand
caagucacaucucuuugau

SEQ ID NO: 512379 - RNA, 19 nt, Homo sapiens
  misc_RNA (1)...(19): siRNA sense strand
ugucagacccuaagaagaa

SEQ ID NO: 512380 - RNA, 19 nt, Homo sapiens
  misc_RNA (1)...(19): siRNA sense strand
caacaccaugggauuauuu

SEQ ID NO: 512381 - RNA, 19 nt, Homo sapiens
  misc_RNA (1)...(19): siRNA sense strand
ggcaauaacaagcuuacua

SEQ ID NO: 512382 - RNA, 19 nt, Homo sapiens
  misc_RNA (1)...(19): siRNA sense strand
cagaucgccuugcugauau

SEQ ID NO: 512383 - RNA, 19 nt, Homo sapiens
  misc_RNA (1)...(19): siRNA sense strand
gggaacaaccaaccuaaga

SEQ ID NO: 512384 - RNA, 19 nt, Homo sapiens
  misc_RNA (1)...(19): siRNA sense strand
acaaauaccaccucuaauc

SEQ ID NO: 512385 - RNA, 19 nt, Homo sapiens
  misc_RNA (1)...(19): siRNA sense strand
cagguauuauucucacuaa

SEQ ID NO: 512386 - RNA, 19 nt, Homo sapiens
  misc_RNA (1)...(19): siRNA sense strand
agaugaagauucccuuguu

SEQ ID NO: 512387 - RNA, 19 nt, Homo sapiens
  misc_RNA (1)...(19): siRNA sense strand
ccaagucacaucucuuuga

SEQ ID NO: 512388 - RNA, 19 nt, Homo sapiens
  misc_RNA (1)...(19): siRNA sense strand
gcaauaacaagcuuacuac

SEQ ID NO: 512389 - RNA, 19 nt, Homo sapiens
  misc_RNA (1)...(19): siRNA sense strand
gcaccaacaccaugggauu

SEQ ID NO: 512390 - RNA, 19 nt, Homo sapiens
  misc_RNA (1)...(19): siRNA sense strand
aaacaaugccuuugcacaa

SEQ ID NO: 512391 - RNA, 19 nt, Homo sapiens
  misc_RNA (1)...(19): siRNA sense strand
guacaaagaaguugaagac

SEQ ID NO: 512392 - RNA, 19 nt, Homo sapiens
  misc_RNA (1)...(19): siRNA sense strand
gaaggagaugugaauuuga

SEQ ID NO: 512393 - RNA, 19 nt, Homo sapiens
  misc_RNA (1)...(19): siRNA sense strand
gcauuugguucuagcaaca

SEQ ID NO: 512394 - RNA, 19 nt, Homo sapiens
  misc_RNA (1)...(19): siRNA sense strand
aagcaaaccuguugaugag

SEQ ID NO: 512395 - RNA, 19 nt, Homo sapiens
  misc_RNA (1)...(19): siRNA sense strand
aaauccagguggucucuuu

SEQ ID NO: 512396 - RNA, 19 nt, Homo sapiens
  misc_RNA (1)...(19): siRNA sense strand
guguauuacugcuaugaaa

SEQ ID NO: 512397 - RNA, 19 nt, Homo sapiens
  misc_RNA (1)...(19): siRNA sense strand
gaaauaaacacagcaacag

SEQ ID NO: 512398 - RNA, 19 nt, Homo sapiens
  misc_RNA (1)...(19): siRNA sense strand
cagaaagugcuggaaauaa

SEQ ID NO: 512399 - RNA, 19 nt, Homo sapiens
  misc_RNA (1)...(19): siRNA sense strand
agagagauuuaguuuccua

SEQ ID NO: 512400 - RNA, 19 nt, Homo sapiens
  misc_RNA (1)...(19): siRNA sense strand
aaaucuagcuucaccaucu

SEQ ID NO: 512401 - RNA, 19 nt, Homo sapiens
  misc_RNA (1)...(19): siRNA sense strand
cagcacaucaauagucuaa

SEQ ID NO: 512402 - RNA, 19 nt, Homo sapiens
  misc_RNA (1)...(19): siRNA sense strand
ggauggagaugaagauucc

SEQ ID NO: 512403 - RNA, 19 nt, Homo sapiens
  misc_RNA (1)...(19): siRNA sense strand
ggaggagcauccgucuaaa

SEQ ID NO: 512404 - RNA, 19 nt, Homo sapiens
  misc_RNA (1)...(19): siRNA sense strand
caacuaugaaggaagauug

SEQ ID NO: 512405 - RNA, 19 nt, Homo sapiens
  misc_RNA (1)...(19): siRNA sense strand
gcagguauuauucucacua

SEQ ID NO: 512406 - RNA, 19 nt, Homo sapiens
  misc_RNA (1)...(19): siRNA sense strand
ccagcuaccuccacaagca

SEQ ID NO: 512407 - RNA, 19 nt, Homo sapiens
  misc_RNA (1)...(19): siRNA sense strand
ucggaaagguuaugguuca

SEQ ID NO: 512408 - RNA, 19 nt, Homo sapiens
  misc_RNA (1)...(19): siRNA sense strand
gaagaaccuuaauaauagc

SEQ ID NO: 512409 - RNA, 19 nt, Homo sapiens
  misc_RNA (1)...(19): siRNA sense strand
ucaauagucuaacauacuc

SEQ ID NO: 512410 - RNA, 19 nt, Homo sapiens
  misc_RNA (1)...(19): siRNA sense strand
caacugguacagauacuau

SEQ ID NO: 512411 - RNA, 19 nt, Homo sapiens
  misc_RNA (1)...(19): siRNA sense strand
guucuuggguguuuaaggu

SEQ ID NO: 512412 - RNA, 19 nt, Homo sapiens
  misc_RNA (1)...(19): siRNA sense strand
ggugaagggcuaaauagga

SEQ ID NO: 512413 - RNA, 19 nt, Homo sapiens
  misc_RNA (1)...(19): siRNA sense strand
ccagcaggauggagaugaa

SEQ ID NO: 512414 - RNA, 19 nt, Homo sapiens
  misc_RNA (1)...(19): siRNA sense strand
uggaagcaguuucaaggaa

SEQ ID NO: 512415 - RNA, 19 nt, Homo sapiens
  misc_RNA (1)...(19): siRNA sense strand
gaagagagauugaaaccaa

SEQ ID NO: 512416 - RNA, 19 nt, Homo sapiens
  misc_RNA (1)...(19): siRNA sense strand
ggaaagaaguaguugucua

SEQ ID NO: 512417 - RNA, 19 nt, Homo sapiens
  misc_RNA (1)...(19): siRNA sense strand
ggacaggcaucuuuguuug

SEQ ID NO: 512418 - RNA, 19 nt, Homo sapiens
  misc_RNA (1)...(19): siRNA sense strand
acagggagcucaauucaaa

SEQ ID NO: 512419 - RNA, 19 nt, Homo sapiens
  misc_RNA (1)...(19): siRNA sense strand
agaaagugcuggaaauaaa

SEQ ID NO: 512420 - RNA, 19 nt, Homo sapiens
  misc_RNA (1)...(19): siRNA sense strand
gcacaucaauagucuaaca

SEQ ID NO: 512421 - RNA, 19 nt, Homo sapiens
  misc_RNA (1)...(19): siRNA sense strand
gcaaaccuguugaugagaa

SEQ ID NO: 512422 - RNA, 19 nt, Homo sapiens
  misc_RNA (1)...(19): siRNA sense strand
ccacaaauaccaccucuaa

SEQ ID NO: 512423 - RNA, 19 nt, Homo sapiens
  misc_RNA (1)...(19): siRNA sense strand
gaacuucguuuagaggauu

SEQ ID NO: 512424 - RNA, 19 nt, Homo sapiens
  misc_RNA (1)...(19): siRNA sense strand
gaugaagauucccuuguuu

SEQ ID NO: 512425 - RNA, 19 nt, Homo sapiens
  misc_RNA (1)...(19): siRNA sense strand
gaacaaccaaccuaagauu

SEQ ID NO: 512426 - RNA, 19 nt, Homo sapiens
  misc_RNA (1)...(19): siRNA sense strand
ucacuaagguugguuacua

SEQ ID NO: 512427 - RNA, 19 nt, Homo sapiens
  misc_RNA (1)...(19): siRNA sense strand
uggcacaacuucaacauuu

SEQ ID NO: 512428 - RNA, 19 nt, Homo sapiens
  misc_RNA (1)...(19): siRNA sense strand
gaaggaagcagugaagaaa

SEQ ID NO: 512429 - RNA, 19 nt, Homo sapiens
  misc_RNA (1)...(19): siRNA sense strand
gcagaccaauacuggauuu

SEQ ID NO: 512430 - RNA, 19 nt, Homo sapiens
  misc_RNA (1)...(19): siRNA sense strand
cuacuuagaugauaaccaa

SEQ ID NO: 512431 - RNA, 19 nt, Homo sapiens
  misc_RNA (1)...(19): siRNA sense strand
ggagagagauuuaguuucc

SEQ ID NO: 512432 - RNA, 19 nt, Homo sapiens
  misc_RNA (1)...(19): siRNA sense strand
gaaggaagagagauugaaa

SEQ ID NO: 512433 - RNA, 19 nt, Homo sapiens
  misc_RNA (1)...(19): siRNA sense strand
ugaaggagaugugaauuug

SEQ ID NO: 512434 - RNA, 19 nt, Homo sapiens
  misc_RNA (1)...(19): siRNA sense strand
gaaagguuaugguucaauc

SEQ ID NO: 512435 - RNA, 19 nt, Homo sapiens
  misc_RNA (1)...(19): siRNA sense strand
ggucaaagcuggaguuagc

SEQ ID NO: 512436 - RNA, 19 nt, Homo sapiens
  misc_RNA (1)...(19): siRNA sense strand
gugaagggcuaaauaggaa

SEQ ID NO: 512437 - RNA, 19 nt, Homo sapiens
  misc_RNA (1)...(19): siRNA sense strand
caacuggcuuuggcaauuu

SEQ ID NO: 512438 - RNA, 19 nt, Homo sapiens
  misc_RNA (1)...(19): siRNA sense strand
uuacuacaccuacucauua

SEQ ID NO: 512439 - RNA, 19 nt, Homo sapiens
  misc_RNA (1)...(19): siRNA sense strand
ggaggccucuuuggaaauu

SEQ ID NO: 512440 - RNA, 19 nt, Homo sapiens
  misc_RNA (1)...(19): siRNA sense strand
ggaccagucucuucucauc

SEQ ID NO: 512441 - RNA, 19 nt, Homo sapiens
  misc_RNA (1)...(19): siRNA sense strand
ccagaaggcucuuacuaca

SEQ ID NO: 512442 - RNA, 19 nt, Homo sapiens
  misc_RNA (1)...(19): siRNA sense strand
ccaagaagagcauuaagaa

SEQ ID NO: 512443 - RNA, 19 nt, Homo sapiens
  misc_RNA (1)...(19): siRNA sense strand
gaagagcauuaagaaguug

SEQ ID NO: 512444 - RNA, 19 nt, Homo sapiens
  misc_RNA (1)...(19): siRNA sense strand
ggaaggaagcagugaagaa

SEQ ID NO: 512445 - RNA, 19 nt, Homo sapiens
  misc_RNA (1)...(19): siRNA sense strand
aaacaugcgugcugcuuug

SEQ ID NO: 512446 - RNA, 19 nt, Homo sapiens
  misc_RNA (1)...(19): siRNA sense strand
ccaggaggauuguuuggaa

SEQ ID NO: 512447 - RNA, 19 nt, Homo sapiens
  misc_RNA (1)...(19): siRNA sense strand
gauaucaacuaugaaggaa

SEQ ID NO: 512448 - RNA, 19 nt, Homo sapiens
  misc_RNA (1)...(19): siRNA sense strand
ggaguuuggccaacagaua

SEQ ID NO: 512449 - RNA, 19 nt, Homo sapiens
  misc_RNA (1)...(19): siRNA sense strand
gcacccagcagguauuauu

SEQ ID NO: 512450 - RNA, 19 nt, Homo sapiens
  misc_RNA (1)...(19): siRNA sense strand
ggaaauaaacacagcaaca

SEQ ID NO: 512451 - RNA, 19 nt, Homo sapiens
  misc_RNA (1)...(19): siRNA sense strand
agaagagcauuaagaaguu

SEQ ID NO: 512452 - RNA, 19 nt, Homo sapiens
  misc_RNA (1)...(19): siRNA sense strand
gcacuaacauaaguaccaa

SEQ ID NO: 512453 - RNA, 19 nt, Homo sapiens
  misc_RNA (1)...(19): siRNA sense strand
ggaaacagggagcucaauu

SEQ ID NO: 512454 - RNA, 19 nt, Homo sapiens
  misc_RNA (1)...(19): siRNA sense strand
uaucaacuaugaaggaaga

SEQ ID NO: 512455 - RNA, 19 nt, Homo sapiens
  misc_RNA (1)...(19): siRNA sense strand
ccagaucgccuugcugaua

SEQ ID NO: 512456 - RNA, 19 nt, Homo sapiens
  misc_RNA (1)...(19): siRNA sense strand
gaacuaguacaacuggauu

SEQ ID NO: 512457 - RNA, 19 nt, Homo sapiens
  misc_RNA (1)...(19): siRNA sense strand
gaaacagggagcucaauuc

SEQ ID NO: 512458 - RNA, 19 nt, Homo sapiens
  misc_RNA (1)...(19): siRNA sense strand
gaagaaggaagagagauug

SEQ ID NO: 512459 - RNA, 19 nt, Homo sapiens
  misc_RNA (1)...(19): siRNA sense strand
guaccaagcaccaguguau

SEQ ID NO: 512460 - RNA, 19 nt, Homo sapiens
  misc_RNA (1)...(19): siRNA sense strand
uaagcaaaccuguugauga

SEQ ID NO: 512461 - RNA, 19 nt, Homo sapiens
  misc_RNA (1)...(19): siRNA sense strand
cuacugggacuacuauuaa

SEQ ID NO: 512462 - RNA, 19 nt, Homo sapiens
  misc_RNA (1)...(19): siRNA sense strand
gcaagucacuagaggaacu

SEQ ID NO: 512463 - RNA, 19 nt, Homo sapiens
  misc_RNA (1)...(19): siRNA sense strand
guugaagacugcuccuuug

SEQ ID NO: 512464 - RNA, 19 nt, Homo sapiens
  misc_RNA (1)...(19): siRNA sense strand
uugcugauaucaacuauga

SEQ ID NO: 512465 - RNA, 19 nt, Homo sapiens
  misc_RNA (1)...(19): siRNA sense strand
uaggaaggcugaaguuaca

SEQ ID NO: 512466 - RNA, 19 nt, Homo sapiens
  misc_RNA (1)...(19): siRNA sense strand
ugauaccauuguugcauua

SEQ ID NO: 512467 - RNA, 19 nt, Homo sapiens
  misc_RNA (1)...(19): siRNA sense strand
cuacaccuacucauuauaa

SEQ ID NO: 512468 - RNA, 19 nt, Homo sapiens
  misc_RNA (1)...(19): siRNA sense strand
acaaauaccagugggaaua

SEQ ID NO: 512469 - RNA, 19 nt, Homo sapiens
  misc_RNA (1)...(19): siRNA sense strand
guacagauacuauggucaa

SEQ ID NO: 512470 - RNA, 19 nt, Homo sapiens
  misc_RNA (1)...(19): siRNA sense strand
gagcauccgucuaaaacua

SEQ ID NO: 512471 - RNA, 19 nt, Homo sapiens
  misc_RNA (1)...(19): siRNA sense strand
uagaggaacuucguuuaga

SEQ ID NO: 512472 - RNA, 19 nt, Homo sapiens
  misc_RNA (1)...(19): siRNA sense strand
caacagaaucagcagacua

SEQ ID NO: 512473 - RNA, 19 nt, Homo sapiens
  misc_RNA (1)...(19): siRNA sense strand
uguuuaaggucucccauuu

SEQ ID NO: 512474 - RNA, 19 nt, Homo sapiens
  misc_RNA (1)...(19): siRNA sense strand
gaguuuggccaacagauaa

SEQ ID NO: 512475 - RNA, 19 nt, Homo sapiens
  misc_RNA (1)...(19): siRNA sense strand
gguuaugguucaaucuauu

SEQ ID NO: 512476 - RNA, 19 nt, Homo sapiens
  misc_RNA (1)...(19): siRNA sense strand
ggaugaccgagaagaaaua

SEQ ID NO: 512477 - RNA, 19 nt, Homo sapiens
  misc_RNA (1)...(19): siRNA sense strand
gcaacaguguggaugauac

SEQ ID NO: 512478 - RNA, 19 nt, Homo sapiens
  misc_RNA (1)...(19): siRNA sense strand
caagucacaucucuuugau

SEQ ID NO: 512479 - RNA, 19 nt, Homo sapiens
  misc_RNA (1)...(19): siRNA sense strand
ugucagacccuaagaagaa

SEQ ID NO: 512480 - RNA, 19 nt, Homo sapiens
  misc_RNA (1)...(19): siRNA sense strand
caacaccaugggauuauuu

SEQ ID NO: 512481 - RNA, 19 nt, Homo sapiens
  misc_RNA (1)...(19): siRNA sense strand
ggcaauaacaagcuuacua

SEQ ID NO: 512482 - RNA, 19 nt, Homo sapiens
  misc_RNA (1)...(19): siRNA sense strand
cagaucgccuugcugauau

SEQ ID NO: 512483 - RNA, 19 nt, Homo sapiens
  misc_RNA (1)...(19): siRNA sense strand
gggaacaaccaaccuaaga

SEQ ID NO: 512484 - RNA, 19 nt, Homo sapiens
  misc_RNA (1)...(19): siRNA sense strand
acaaauaccaccucuaauc

SEQ ID NO: 512485 - RNA, 19 nt, Homo sapiens
  misc_RNA (1)...(19): siRNA sense strand
cagguauuauucucacuaa

SEQ ID NO: 512486 - RNA, 19 nt, Homo sapiens
  misc_RNA (1)...(19): siRNA sense strand
agaugaagauucccuuguu

SEQ ID NO: 512487 - RNA, 19 nt, Homo sapiens
  misc_RNA (1)...(19): siRNA sense strand
ccaagucacaucucuuuga

SEQ ID NO: 512488 - RNA, 19 nt, Homo sapiens
  misc_RNA (1)...(19): siRNA sense strand
gcaauaacaagcuuacuac

SEQ ID NO: 512489 - RNA, 19 nt, Homo sapiens
  misc_RNA (1)...(19): siRNA sense strand
gcaccaacaccaugggauu

SEQ ID NO: 512490 - RNA, 19 nt, Homo sapiens
  misc_RNA (1)...(19): siRNA sense strand
aaacaaugccuuugcacaa

SEQ ID NO: 512491 - RNA, 19 nt, Homo sapiens
  misc_RNA (1)...(19): siRNA sense strand
guacaaagaaguugaagac

SEQ ID NO: 512492 - RNA, 19 nt, Homo sapiens
  misc_RNA (1)...(19): siRNA sense strand
gaaggagaugugaauuuga

SEQ ID NO: 512493 - RNA, 19 nt, Homo sapiens
  misc_RNA (1)...(19): siRNA sense strand
gcauuugguucuagcaaca

SEQ ID NO: 512494 - RNA, 19 nt, Homo sapiens
  misc_RNA (1)...(19): siRNA sense strand
aagcaaaccuguugaugag

SEQ ID NO: 512495 - RNA, 19 nt, Homo sapiens
  misc_RNA (1)...(19): siRNA sense strand
aaauccagguggucucuuu

SEQ ID NO: 512496 - RNA, 19 nt, Homo sapiens
  misc_RNA (1)...(19): siRNA sense strand
guguauuacugcuaugaaa

SEQ ID NO: 512497 - RNA, 19 nt, Homo sapiens
  misc_RNA (1)...(19): siRNA sense strand
gaaauaaacacagcaacag

SEQ ID NO: 512498 - RNA, 19 nt, Homo sapiens
  misc_RNA (1)...(19): siRNA sense strand
cagaaagugcuggaaauaa

SEQ ID NO: 512499 - RNA, 19 nt, Homo sapiens
  misc_RNA (1)...(19): siRNA sense strand
agagagauuuaguuuccua

SEQ ID NO: 512500 - RNA, 19 nt, Homo sapiens
  misc_RNA (1)...(19): siRNA sense strand
aaaucuagcuucaccaucu

SEQ ID NO: 512501 - RNA, 19 nt, Homo sapiens
  misc_RNA (1)...(19): siRNA sense strand
cagcacaucaauagucuaa

SEQ ID NO: 512502 - RNA, 19 nt, Homo sapiens
  misc_RNA (1)...(19): siRNA sense strand
ggauggagaugaagauucc

SEQ ID NO: 512503 - RNA, 19 nt, Homo sapiens
  misc_RNA (1)...(19): siRNA sense strand
ggaggagcauccgucuaaa

SEQ ID NO: 512504 - RNA, 19 nt, Homo sapiens
  misc_RNA (1)...(19): siRNA sense strand
caacuaugaaggaagauug

SEQ ID NO: 512505 - RNA, 19 nt, Homo sapiens
  misc_RNA (1)...(19): siRNA sense strand
gcagguauuauucucacua

SEQ ID NO: 512506 - RNA, 19 nt, Homo sapiens
  misc_RNA (1)...(19): siRNA sense strand
ccagcuaccuccacaagca

SEQ ID NO: 512507 - RNA, 19 nt, Homo sapiens
  misc_RNA (1)...(19): siRNA sense strand
ucggaaagguuaugguuca

SEQ ID NO: 512508 - RNA, 19 nt, Homo sapiens
  misc_RNA (1)...(19): siRNA sense strand
gaagaaccuuaauaauagc

SEQ ID NO: 512509 - RNA, 19 nt, Homo sapiens
  misc_RNA (1)...(19): siRNA sense strand
ucaauagucuaacauacuc

SEQ ID NO: 512510 - RNA, 19 nt, Homo sapiens
  misc_RNA (1)...(19): siRNA sense strand
caacugguacagauacuau

SEQ ID NO: 512511 - RNA, 19 nt, Homo sapiens
  misc_RNA (1)...(19): siRNA sense strand
guucuuggguguuuaaggu

SEQ ID NO: 512512 - RNA, 19 nt, Homo sapiens
  misc_RNA (1)...(19): siRNA sense strand
ggugaagggcuaaauagga

SEQ ID NO: 512513 - RNA, 19 nt, Homo sapiens
  misc_RNA (1)...(19): siRNA sense strand
ccagcaggauggagaugaa

SEQ ID NO: 512514 - RNA, 19 nt, Homo sapiens
  misc_RNA (1)...(19): siRNA sense strand
uggaagcaguuucaaggaa

SEQ ID NO: 512515 - RNA, 19 nt, Homo sapiens
  misc_RNA (1)...(19): siRNA sense strand
gaagagagauugaaaccaa

SEQ ID NO: 512516 - RNA, 19 nt, Homo sapiens
  misc_RNA (1)...(19): siRNA sense strand
ggaaagaaguaguugucua

SEQ ID NO: 512517 - RNA, 19 nt, Homo sapiens
  misc_RNA (1)...(19): siRNA sense strand
ggacaggcaucuuuguuug

SEQ ID NO: 512518 - RNA, 19 nt, Homo sapiens
  misc_RNA (1)...(19): siRNA sense strand
acagggagcucaauucaaa

SEQ ID NO: 512519 - RNA, 19 nt, Homo sapiens
  misc_RNA (1)...(19): siRNA sense strand
agaaagugcuggaaauaaa

SEQ ID NO: 512520 - RNA, 19 nt, Homo sapiens
  misc_RNA (1)...(19): siRNA sense strand
gcacaucaauagucuaaca

SEQ ID NO: 512521 - RNA, 19 nt, Homo sapiens
  misc_RNA (1)...(19): siRNA sense strand
gcaaaccuguugaugagaa

SEQ ID NO: 512522 - RNA, 19 nt, Homo sapiens
  misc_RNA (1)...(19): siRNA sense strand
ccacaaauaccaccucuaa

SEQ ID NO: 512523 - RNA, 19 nt, Homo sapiens
  misc_RNA (1)...(19): siRNA sense strand
gaacuucguuuagaggauu

SEQ ID NO: 512524 - RNA, 19 nt, Homo sapiens
  misc_RNA (1)...(19): siRNA sense strand
gaugaagauucccuuguuu

SEQ ID NO: 512525 - RNA, 19 nt, Homo sapiens
  misc_RNA (1)...(19): siRNA sense strand
gaacaaccaaccuaagauu

SEQ ID NO: 512526 - RNA, 19 nt, Homo sapiens
  misc_RNA (1)...(19): siRNA sense strand
ucacuaagguugguuacua

SEQ ID NO: 512527 - RNA, 19 nt, Homo sapiens
  misc_RNA (1)...(19): siRNA sense strand
uggcacaacuucaacauuu

SEQ ID NO: 512528 - RNA, 19 nt, Homo sapiens
  misc_RNA (1)...(19): siRNA sense strand
gaaggaagcagugaagaaa

SEQ ID NO: 512529 - RNA, 19 nt, Homo sapiens
  misc_RNA (1)...(19): siRNA sense strand
gcagaccaauacuggauuu

SEQ ID NO: 512530 - RNA, 19 nt, Homo sapiens
  misc_RNA (1)...(19): siRNA sense strand
cuacuuagaugauaaccaa

SEQ ID NO: 512531 - RNA, 19 nt, Homo sapiens
  misc_RNA (1)...(19): siRNA sense strand
ggagagagauuuaguuucc

SEQ ID NO: 512532 - RNA, 19 nt, Homo sapiens
  misc_RNA (1)...(19): siRNA sense strand
gaaggaagagagauugaaa

SEQ ID NO: 512533 - RNA, 19 nt, Homo sapiens
  misc_RNA (1)...(19): siRNA sense strand
ugaaggagaugugaauuug

SEQ ID NO: 512534 - RNA, 19 nt, Homo sapiens
  misc_RNA (1)...(19): siRNA sense strand
gaaagguuaugguucaauc

SEQ ID NO: 512535 - RNA, 19 nt, Homo sapiens
  misc_RNA (1)...(19): siRNA sense strand
ggucaaagcuggaguuagc

SEQ ID NO: 512536 - RNA, 19 nt, Homo sapiens
  misc_RNA (1)...(19): siRNA sense strand
gugaagggcuaaauaggaa

SEQ ID NO: 512537 - RNA, 19 nt, Homo sapiens
  misc_RNA (1)...(19): siRNA sense strand
caacuggcuuuggcaauuu

SEQ ID NO: 512538 - RNA, 19 nt, Homo sapiens
  misc_RNA (1)...(19): siRNA sense strand
uuacuacaccuacucauua

SEQ ID NO: 512539 - RNA, 19 nt, Homo sapiens
  misc_RNA (1)...(19): siRNA sense strand
ggaggccucuuuggaaauu

SEQ ID NO: 512540 - RNA, 19 nt, Homo sapiens
  misc_RNA (1)...(19): siRNA sense strand
ggaccagucucuucucauc

SEQ ID NO: 512541 - RNA, 19 nt, Homo sapiens
  misc_RNA (1)...(19): siRNA sense strand
ccagaaggcucuuacuaca

SEQ ID NO: 512542 - RNA, 19 nt, Homo sapiens
  misc_RNA (1)...(19): siRNA sense strand
ccaagaagagcauuaagaa

SEQ ID NO: 512543 - RNA, 19 nt, Homo sapiens
  misc_RNA (1)...(19): siRNA sense strand
gaagagcauuaagaaguug

SEQ ID NO: 512544 - RNA, 19 nt, Homo sapiens
  misc_RNA (1)...(19): siRNA sense strand
ggaaggaagcagugaagaa

SEQ ID NO: 512545 - RNA, 19 nt, Homo sapiens
  misc_RNA (1)...(19): siRNA sense strand
aaacaugcgugcugcuuug

SEQ ID NO: 512546 - RNA, 19 nt, Homo sapiens
  misc_RNA (1)...(19): siRNA sense strand
ccaggaggauuguuuggaa

SEQ ID NO: 512547 - RNA, 19 nt, Homo sapiens
  misc_RNA (1)...(19): siRNA sense strand
gauaucaacuaugaaggaa

SEQ ID NO: 512548 - RNA, 19 nt, Homo sapiens
  misc_RNA (1)...(19): siRNA sense strand
ggaguuuggccaacagaua

SEQ ID NO: 512549 - RNA, 19 nt, Homo sapiens
  misc_RNA (1)...(19): siRNA sense strand
gcacccagcagguauuauu

SEQ ID NO: 512550 - RNA, 19 nt, Homo sapiens
  misc_RNA (1)...(19): siRNA sense strand
ggaaauaaacacagcaaca

SEQ ID NO: 512551 - RNA, 19 nt, Homo sapiens
  misc_RNA (1)...(19): siRNA sense strand
agaagagcauuaagaaguu

SEQ ID NO: 512552 - RNA, 19 nt, Homo sapiens
  misc_RNA (1)...(19): siRNA sense strand
gcacuaacauaaguaccaa

SEQ ID NO: 512553 - RNA, 19 nt, Homo sapiens
  misc_RNA (1)...(19): siRNA sense strand
ggaaacagggagcucaauu

SEQ ID NO: 512554 - RNA, 19 nt, Homo sapiens
  misc_RNA (1)...(19): siRNA sense strand
uaucaacuaugaaggaaga

SEQ ID NO: 512555 - RNA, 19 nt, Homo sapiens
  misc_RNA (1)...(19): siRNA sense strand
ccagaucgccuugcugaua

SEQ ID NO: 512556 - RNA, 19 nt, Homo sapiens
  misc_RNA (1)...(19): siRNA sense strand
gaacuaguacaacuggauu

SEQ ID NO: 512557 - RNA, 19 nt, Homo sapiens
  misc_RNA (1)...(19): siRNA sense strand
gaaacagggagcucaauuc

SEQ ID NO: 512558 - RNA, 19 nt, Homo sapiens
  misc_RNA (1)...(19): siRNA sense strand
gaagaaggaagagagauug

SEQ ID NO: 512559 - RNA, 19 nt, Homo sapiens
  misc_RNA (1)...(19): siRNA sense strand
guaccaagcaccaguguau

SEQ ID NO: 512560 - RNA, 19 nt, Homo sapiens
  misc_RNA (1)...(19): siRNA sense strand
uaagcaaaccuguugauga

SEQ ID NO: 512561 - RNA, 19 nt, Homo sapiens
  misc_RNA (1)...(19): siRNA sense strand
cuacugggacuacuauuaa

SEQ ID NO: 512562 - RNA, 19 nt, Homo sapiens
  misc_RNA (1)...(19): siRNA sense strand
gcaagucacuagaggaacu

SEQ ID NO: 512563 - RNA, 19 nt, Homo sapiens
  misc_RNA (1)...(19): siRNA sense strand
guugaagacugcuccuuug

SEQ ID NO: 512564 - RNA, 19 nt, Homo sapiens
  misc_RNA (1)...(19): siRNA sense strand
uugcugauaucaacuauga

SEQ ID NO: 512565 - RNA, 19 nt, Homo sapiens
  misc_RNA (1)...(19): siRNA sense strand
uaggaaggcugaaguuaca

SEQ ID NO: 512566 - RNA, 19 nt, Homo sapiens
  misc_RNA (1)...(19): siRNA sense strand
ugauaccauuguugcauua

SEQ ID NO: 512567 - RNA, 19 nt, Homo sapiens
  misc_RNA (1)...(19): siRNA sense strand
cuacaccuacucauuauaa

SEQ ID NO: 512568 - RNA, 19 nt, Homo sapiens
  misc_RNA (1)...(19): siRNA sense strand
acaaauaccagugggaaua

SEQ ID NO: 512569 - RNA, 19 nt, Homo sapiens
  misc_RNA (1)...(19): siRNA sense strand
guacagauacuauggucaa

SEQ ID NO: 512570 - RNA, 19 nt, Homo sapiens
  misc_RNA (1)...(19): siRNA sense strand
gagcauccgucuaaaacua

SEQ ID NO: 512571 - RNA, 19 nt, Homo sapiens
  misc_RNA (1)...(19): siRNA sense strand
uagaggaacuucguuuaga

SEQ ID NO: 512572 - RNA, 19 nt, Homo sapiens
  misc_RNA (1)...(19): siRNA sense strand
caacagaaucagcagacua

SEQ ID NO: 512573 - RNA, 19 nt, Homo sapiens
  misc_RNA (1)...(19): siRNA sense strand
uguuuaaggucucccauuu

SEQ ID NO: 512574 - RNA, 19 nt, Homo sapiens
  misc_RNA (1)...(19): siRNA sense strand
gaguuuggccaacagauaa

SEQ ID NO: 512575 - RNA, 19 nt, Homo sapiens
  misc_RNA (1)...(19): siRNA sense strand
gguuaugguucaaucuauu

SEQ ID NO: 512576 - RNA, 19 nt, Homo sapiens
  misc_RNA (1)...(19): siRNA sense strand
ggaugaccgagaagaaaua

SEQ ID NO: 512577 - RNA, 19 nt, Homo sapiens
  misc_RNA (1)...(19): siRNA sense strand
gcaacaguguggaugauac

SEQ ID NO: 512578 - RNA, 19 nt, Homo sapiens
  misc_RNA (1)...(19): siRNA sense strand
caagucacaucucuuugau

SEQ ID NO: 512579 - RNA, 19 nt, Homo sapiens
  misc_RNA (1)...(19): siRNA sense strand
ugucagacccuaagaagaa

SEQ ID NO: 512580 - RNA, 19 nt, Homo sapiens
  misc_RNA (1)...(19): siRNA sense strand
caacaccaugggauuauuu

SEQ ID NO: 512581 - RNA, 19 nt, Homo sapiens
  misc_RNA (1)...(19): siRNA sense strand
ggcaauaacaagcuuacua

SEQ ID NO: 512582 - RNA, 19 nt, Homo sapiens
  misc_RNA (1)...(19): siRNA sense strand
cagaucgccuugcugauau

SEQ ID NO: 512583 - RNA, 19 nt, Homo sapiens
  misc_RNA (1)...(19): siRNA sense strand
gggaacaaccaaccuaaga

SEQ ID NO: 512584 - RNA, 19 nt, Homo sapiens
  misc_RNA (1)...(19): siRNA sense strand
acaaauaccaccucuaauc

SEQ ID NO: 512585 - RNA, 19 nt, Homo sapiens
  misc_RNA (1)...(19): siRNA sense strand
cagguauuauucucacuaa

SEQ ID NO: 512586 - RNA, 19 nt, Homo sapiens
  misc_RNA (1)...(19): siRNA sense strand
agaugaagauucccuuguu

SEQ ID NO: 512587 - RNA, 19 nt, Homo sapiens
  misc_RNA (1)...(19): siRNA sense strand
ccaagucacaucucuuuga

SEQ ID NO: 512588 - RNA, 19 nt, Homo sapiens
  misc_RNA (1)...(19): siRNA sense strand
gcaauaacaagcuuacuac

SEQ ID NO: 512589 - RNA, 19 nt, Homo sapiens
  misc_RNA (1)...(19): siRNA sense strand
gcaccaacaccaugggauu

SEQ ID NO: 512590 - RNA, 19 nt, Homo sapiens
  misc_RNA (1)...(19): siRNA sense strand
aaacaaugccuuugcacaa

SEQ ID NO: 512591 - RNA, 19 nt, Homo sapiens
  misc_RNA (1)...(19): siRNA sense strand
guacaaagaaguugaagac

SEQ ID NO: 512592 - RNA, 19 nt, Homo sapiens
  misc_RNA (1)...(19): siRNA sense strand
gaaggagaugugaauuuga

SEQ ID NO: 512593 - RNA, 19 nt, Homo sapiens
  misc_RNA (1)...(19): siRNA sense strand
gcauuugguucuagcaaca

SEQ ID NO: 512594 - RNA, 19 nt, Homo sapiens
  misc_RNA (1)...(19): siRNA sense strand
aagcaaaccuguugaugag

SEQ ID NO: 512595 - RNA, 19 nt, Homo sapiens
  misc_RNA (1)...(19): siRNA sense strand
aaauccagguggucucuuu

SEQ ID NO: 512596 - RNA, 19 nt, Homo sapiens
  misc_RNA (1)...(19): siRNA sense strand
guguauuacugcuaugaaa

SEQ ID NO: 512597 - RNA, 19 nt, Homo sapiens
  misc_RNA (1)...(19): siRNA sense strand
gaaauaaacacagcaacag

SEQ ID NO: 512598 - RNA, 19 nt, Homo sapiens
  misc_RNA (1)...(19): siRNA sense strand
cagaaagugcuggaaauaa

SEQ ID NO: 512599 - RNA, 19 nt, Homo sapiens
  misc_RNA (1)...(19): siRNA sense strand
agagagauuuaguuuccua

SEQ ID NO: 512600 - RNA, 19 nt, Homo sapiens
  misc_RNA (1)...(19): siRNA sense strand
aaaucuagcuucaccaucu

SEQ ID NO: 512601 - RNA, 19 nt, Homo sapiens
  misc_RNA (1)...(19): siRNA sense strand
cagcacaucaauagucuaa

SEQ ID NO: 512602 - RNA, 19 nt, Homo sapiens
  misc_RNA (1)...(19): siRNA sense strand
ggauggagaugaagauucc

SEQ ID NO: 512603 - RNA, 19 nt, Homo sapiens
  misc_RNA (1)...(19): siRNA sense strand
ggaggagcauccgucuaaa

SEQ ID NO: 512604 - RNA, 19 nt, Homo sapiens
  misc_RNA (1)...(19): siRNA sense strand
caacuaugaaggaagauug

SEQ ID NO: 512605 - RNA, 19 nt, Homo sapiens
  misc_RNA (1)...(19): siRNA sense strand
gcagguauuauucucacua

SEQ ID NO: 512606 - RNA, 19 nt, Homo sapiens
  misc_RNA (1)...(19): siRNA sense strand
ccagcuaccuccacaagca

SEQ ID NO: 512607 - RNA, 19 nt, Homo sapiens
  misc_RNA (1)...(19): siRNA sense strand
ucggaaagguuaugguuca

SEQ ID NO: 512608 - RNA, 19 nt, Homo sapiens
  misc_RNA (1)...(19): siRNA sense strand
gaagaaccuuaauaauagc

SEQ ID NO: 512609 - RNA, 19 nt, Homo sapiens
  misc_RNA (1)...(19): siRNA sense strand
ucaauagucuaacauacuc

SEQ ID NO: 512610 - RNA, 19 nt, Homo sapiens
  misc_RNA (1)...(19): siRNA sense strand
caacugguacagauacuau

SEQ ID NO: 512611 - RNA, 19 nt, Homo sapiens
  misc_RNA (1)...(19): siRNA sense strand
guucuuggguguuuaaggu

SEQ ID NO: 512612 - RNA, 19 nt, Homo sapiens
  misc_RNA (1)...(19): siRNA sense strand
ggugaagggcuaaauagga

SEQ ID NO: 512613 - RNA, 19 nt, Homo sapiens
  misc_RNA (1)...(19): siRNA sense strand
ccagcaggauggagaugaa

SEQ ID NO: 512614 - RNA, 19 nt, Homo sapiens
  misc_RNA (1)...(19): siRNA sense strand
uggaagcaguuucaaggaa

SEQ ID NO: 512615 - RNA, 19 nt, Homo sapiens
  misc_RNA (1)...(19): siRNA sense strand
gaagagagauugaaaccaa

SEQ ID NO: 512616 - RNA, 19 nt, Homo sapiens
  misc_RNA (1)...(19): siRNA sense strand
ggaaagaaguaguugucua

SEQ ID NO: 512617 - RNA, 19 nt, Homo sapiens
  misc_RNA (1)...(19): siRNA sense strand
ggacaggcaucuuuguuug

SEQ ID NO: 512618 - RNA, 19 nt, Homo sapiens
  misc_RNA (1)...(19): siRNA sense strand
acagggagcucaauucaaa

SEQ ID NO: 512619 - RNA, 19 nt, Homo sapiens
  misc_RNA (1)...(19): siRNA sense strand
agaaagugcuggaaauaaa

SEQ ID NO: 512620 - RNA, 19 nt, Homo sapiens
  misc_RNA (1)...(19): siRNA sense strand
gcacaucaauagucuaaca

SEQ ID NO: 512621 - RNA, 19 nt, Homo sapiens
  misc_RNA (1)...(19): siRNA sense strand
gcaaaccuguugaugagaa

SEQ ID NO: 512622 - RNA, 19 nt, Homo sapiens
  misc_RNA (1)...(19): siRNA sense strand
ccacaaauaccaccucuaa

SEQ ID NO: 512623 - RNA, 19 nt, Homo sapiens
  misc_RNA (1)...(19): siRNA sense strand
gaacuucguuuagaggauu

SEQ ID NO: 512624 - RNA, 19 nt, Homo sapiens
  misc_RNA (1)...(19): siRNA sense strand
gaugaagauucccuuguuu

SEQ ID NO: 512625 - RNA, 19 nt, Homo sapiens
  misc_RNA (1)...(19): siRNA sense strand
gaacaaccaaccuaagauu

SEQ ID NO: 512626 - RNA, 19 nt, Homo sapiens
  misc_RNA (1)...(19): siRNA sense strand
ucacuaagguugguuacua

SEQ ID NO: 512627 - RNA, 19 nt, Homo sapiens
  misc_RNA (1)...(19): siRNA sense strand
uggcacaacuucaacauuu

SEQ ID NO: 512628 - RNA, 19 nt, Homo sapiens
  misc_RNA (1)...(19): siRNA sense strand
gaaggaagcagugaagaaa

SEQ ID NO: 512629 - RNA, 19 nt, Homo sapiens
  misc_RNA (1)...(19): siRNA sense strand
gcagaccaauacuggauuu

SEQ ID NO: 512630 - RNA, 19 nt, Homo sapiens
  misc_RNA (1)...(19): siRNA sense strand
cuacuuagaugauaaccaa

SEQ ID NO: 512631 - RNA, 19 nt, Homo sapiens
  misc_RNA (1)...(19): siRNA sense strand
ggagagagauuuaguuucc

SEQ ID NO: 512632 - RNA, 19 nt, Homo sapiens
  misc_RNA (1)...(19): siRNA sense strand
gaaggaagagagauugaaa

SEQ ID NO: 512633 - RNA, 19 nt, Homo sapiens
  misc_RNA (1)...(19): siRNA sense strand
ugaaggagaugugaauuug

SEQ ID NO: 512634 - RNA, 19 nt, Homo sapiens
  misc_RNA (1)...(19): siRNA sense strand
gaaagguuaugguucaauc

SEQ ID NO: 512635 - RNA, 19 nt, Homo sapiens
  misc_RNA (1)...(19): siRNA sense strand
ggucaaagcuggaguuagc

SEQ ID NO: 512636 - RNA, 19 nt, Homo sapiens
  misc_RNA (1)...(19): siRNA sense strand
gugaagggcuaaauaggaa

SEQ ID NO: 512637 - RNA, 19 nt, Homo sapiens
  misc_RNA (1)...(19): siRNA sense strand
caacuggcuuuggcaauuu

SEQ ID NO: 512638 - RNA, 19 nt, Homo sapiens
  misc_RNA (1)...(19): siRNA sense strand
uuacuacaccuacucauua

SEQ ID NO: 512639 - RNA, 19 nt, Homo sapiens
  misc_RNA (1)...(19): siRNA sense strand
ggaggccucuuuggaaauu

SEQ ID NO: 512640 - RNA, 19 nt, Homo sapiens
  misc_RNA (1)...(19): siRNA sense strand
ggaccagucucuucucauc

SEQ ID NO: 512641 - RNA, 19 nt, Homo sapiens
  misc_RNA (1)...(19): siRNA sense strand
ccagaaggcucuuacuaca

SEQ ID NO: 512642 - RNA, 19 nt, Homo sapiens
  misc_RNA (1)...(19): siRNA sense strand
ccaagaagagcauuaagaa

SEQ ID NO: 512643 - RNA, 19 nt, Homo sapiens
  misc_RNA (1)...(19): siRNA sense strand
gaagagcauuaagaaguug

SEQ ID NO: 512644 - RNA, 19 nt, Homo sapiens
  misc_RNA (1)...(19): siRNA sense strand
ggaaggaagcagugaagaa

SEQ ID NO: 512645 - RNA, 19 nt, Homo sapiens
  misc_RNA (1)...(19): siRNA sense strand
aaacaugcgugcugcuuug

SEQ ID NO: 512646 - RNA, 19 nt, Homo sapiens
  misc_RNA (1)...(19): siRNA sense strand
ccaggaggauuguuuggaa

SEQ ID NO: 512647 - RNA, 19 nt, Homo sapiens
  misc_RNA (1)...(19): siRNA sense strand
gauaucaacuaugaaggaa

SEQ ID NO: 512648 - RNA, 19 nt, Homo sapiens
  misc_RNA (1)...(19): siRNA sense strand
ggaguuuggccaacagaua

SEQ ID NO: 512649 - RNA, 19 nt, Homo sapiens
  misc_RNA (1)...(19): siRNA sense strand
gcacccagcagguauuauu

SEQ ID NO: 512650 - RNA, 19 nt, Homo sapiens
  misc_RNA (1)...(19): siRNA sense strand
ggaaauaaacacagcaaca

SEQ ID NO: 512651 - RNA, 19 nt, Homo sapiens
  misc_RNA (1)...(19): siRNA sense strand
agaagagcauuaagaaguu

SEQ ID NO: 512652 - RNA, 19 nt, Homo sapiens
  misc_RNA (1)...(19): siRNA sense strand
gcacuaacauaaguaccaa

SEQ ID NO: 512653 - RNA, 19 nt, Homo sapiens
  misc_RNA (1)...(19): siRNA sense strand
ggaaacagggagcucaauu

SEQ ID NO: 512654 - RNA, 19 nt, Homo sapiens
  misc_RNA (1)...(19): siRNA sense strand
uaucaacuaugaaggaaga

SEQ ID NO: 512655 - RNA, 19 nt, Homo sapiens
  misc_RNA (1)...(19): siRNA sense strand
ccagaucgccuugcugaua

SEQ ID NO: 512656 - RNA, 19 nt, Homo sapiens
  misc_RNA (1)...(19): siRNA sense strand
gaacuaguacaacuggauu

SEQ ID NO: 512657 - RNA, 19 nt, Homo sapiens
  misc_RNA (1)...(19): siRNA sense strand
gaaacagggagcucaauuc

SEQ ID NO: 512658 - RNA, 19 nt, Homo sapiens
  misc_RNA (1)...(19): siRNA sense strand
gaagaaggaagagagauug

SEQ ID NO: 512659 - RNA, 19 nt, Homo sapiens
  misc_RNA (1)...(19): siRNA sense strand
guaccaagcaccaguguau

SEQ ID NO: 512660 - RNA, 19 nt, Homo sapiens
  misc_RNA (1)...(19): siRNA sense strand
uaagcaaaccuguugauga

SEQ ID NO: 512661 - RNA, 19 nt, Homo sapiens
  misc_RNA (1)...(19): siRNA sense strand
cuacugggacuacuauuaa

SEQ ID NO: 512662 - RNA, 19 nt, Homo sapiens
  misc_RNA (1)...(19): siRNA sense strand
gcaagucacuagaggaacu

SEQ ID NO: 512663 - RNA, 19 nt, Homo sapiens
  misc_RNA (1)...(19): siRNA sense strand
guugaagacugcuccuuug

SEQ ID NO: 512664 - RNA, 19 nt, Homo sapiens
  misc_RNA (1)...(19): siRNA sense strand
uugcugauaucaacuauga

SEQ ID NO: 512665 - RNA, 19 nt, Homo sapiens
  misc_RNA (1)...(19): siRNA sense strand
uaggaaggcugaaguuaca

SEQ ID NO: 512666 - RNA, 19 nt, Homo sapiens
  misc_RNA (1)...(19): siRNA sense strand
ugauaccauuguugcauua

SEQ ID NO: 512667 - RNA, 19 nt, Homo sapiens
  misc_RNA (1)...(19): siRNA sense strand
cuacaccuacucauuauaa

SEQ ID NO: 512668 - RNA, 19 nt, Homo sapiens
  misc_RNA (1)...(19): siRNA sense strand
acaaauaccagugggaaua

SEQ ID NO: 512669 - RNA, 19 nt, Homo sapiens
  misc_RNA (1)...(19): siRNA sense strand
guacagauacuauggucaa

SEQ ID NO: 512670 - RNA, 19 nt, Homo sapiens
  misc_RNA (1)...(19): siRNA sense strand
gagcauccgucuaaaacua

SEQ ID NO: 512671 - RNA, 19 nt, Homo sapiens
  misc_RNA (1)...(19): siRNA sense strand
uagaggaacuucguuuaga

SEQ ID NO: 512672 - RNA, 19 nt, Homo sapiens
  misc_RNA (1)...(19): siRNA sense strand
caacagaaucagcagacua

SEQ ID NO: 512673 - RNA, 19 nt, Homo sapiens
  misc_RNA (1)...(19): siRNA sense strand
uguuuaaggucucccauuu

SEQ ID NO: 512674 - RNA, 19 nt, Homo sapiens
  misc_RNA (1)...(19): siRNA sense strand
gaguuuggccaacagauaa

SEQ ID NO: 512675 - RNA, 19 nt, Homo sapiens
  misc_RNA (1)...(19): siRNA sense strand
gguuaugguucaaucuauu

SEQ ID NO: 512676 - RNA, 19 nt, Homo sapiens
  misc_RNA (1)...(19): siRNA sense strand
ggaugaccgagaagaaaua

SEQ ID NO: 512677 - RNA, 19 nt, Homo sapiens
  misc_RNA (1)...(19): siRNA sense strand
gcaacaguguggaugauac

SEQ ID NO: 512678 - RNA, 19 nt, Homo sapiens
  misc_RNA (1)...(19): siRNA sense strand
caagucacaucucuuugau

SEQ ID NO: 512679 - RNA, 19 nt, Homo sapiens
  misc_RNA (1)...(19): siRNA sense strand
ugucagacccuaagaagaa

SEQ ID NO: 512680 - RNA, 19 nt, Homo sapiens
  misc_RNA (1)...(19): siRNA sense strand
caacaccaugggauuauuu

SEQ ID NO: 512681 - RNA, 19 nt, Homo sapiens
  misc_RNA (1)...(19): siRNA sense strand
ggcaauaacaagcuuacua

SEQ ID NO: 512682 - RNA, 19 nt, Homo sapiens
  misc_RNA (1)...(19): siRNA sense strand
cagaucgccuugcugauau

SEQ ID NO: 512683 - RNA, 19 nt, Homo sapiens
  misc_RNA (1)...(19): siRNA sense strand
gggaacaaccaaccuaaga

SEQ ID NO: 512684 - RNA, 19 nt, Homo sapiens
  misc_RNA (1)...(19): siRNA sense strand
acaaauaccaccucuaauc

SEQ ID NO: 512685 - RNA, 19 nt, Homo sapiens
  misc_RNA (1)...(19): siRNA sense strand
cagguauuauucucacuaa

SEQ ID NO: 512686 - RNA, 19 nt, Homo sapiens
  misc_RNA (1)...(19): siRNA sense strand
agaugaagauucccuuguu

SEQ ID NO: 512687 - RNA, 19 nt, Homo sapiens
  misc_RNA (1)...(19): siRNA sense strand
ccaagucacaucucuuuga

SEQ ID NO: 512688 - RNA, 19 nt, Homo sapiens
  misc_RNA (1)...(19): siRNA sense strand
gcaauaacaagcuuacuac

SEQ ID NO: 512689 - RNA, 19 nt, Homo sapiens
  misc_RNA (1)...(19): siRNA sense strand
gcaccaacaccaugggauu

SEQ ID NO: 512690 - RNA, 19 nt, Homo sapiens
  misc_RNA (1)...(19): siRNA sense strand
aaacaaugccuuugcacaa

SEQ ID NO: 512691 - RNA, 19 nt, Homo sapiens
  misc_RNA (1)...(19): siRNA sense strand
guacaaagaaguugaagac

SEQ ID NO: 512692 - RNA, 19 nt, Homo sapiens
  misc_RNA (1)...(19): siRNA sense strand
gaaggagaugugaauuuga

SEQ ID NO: 512693 - RNA, 19 nt, Homo sapiens
  misc_RNA (1)...(19): siRNA sense strand
gcauuugguucuagcaaca

SEQ ID NO: 512694 - RNA, 19 nt, Homo sapiens
  misc_RNA (1)...(19): siRNA sense strand
aagcaaaccuguugaugag

SEQ ID NO: 512695 - RNA, 19 nt, Homo sapiens
  misc_RNA (1)...(19): siRNA sense strand
aaauccagguggucucuuu

SEQ ID NO: 512696 - RNA, 19 nt, Homo sapiens
  misc_RNA (1)...(19): siRNA sense strand
guguauuacugcuaugaaa

SEQ ID NO: 512697 - RNA, 19 nt, Homo sapiens
  misc_RNA (1)...(19): siRNA sense strand
gaaauaaacacagcaacag

SEQ ID NO: 512698 - RNA, 19 nt, Homo sapiens
  misc_RNA (1)...(19): siRNA sense strand
cagaaagugcuggaaauaa

SEQ ID NO: 512699 - RNA, 19 nt, Homo sapiens
  misc_RNA (1)...(19): siRNA sense strand
agagagauuuaguuuccua

SEQ ID NO: 512700 - RNA, 19 nt, Homo sapiens
  misc_RNA (1)...(19): siRNA sense strand
aaaucuagcuucaccaucu

SEQ ID NO: 512701 - RNA, 19 nt, Homo sapiens
  misc_RNA (1)...(19): siRNA sense strand
cagcacaucaauagucuaa

SEQ ID NO: 512702 - RNA, 19 nt, Homo sapiens
  misc_RNA (1)...(19): siRNA sense strand
ggauggagaugaagauucc

SEQ ID NO: 512703 - RNA, 19 nt, Homo sapiens
  misc_RNA (1)...(19): siRNA sense strand
ggaggagcauccgucuaaa

SEQ ID NO: 512704 - RNA, 19 nt, Homo sapiens
  misc_RNA (1)...(19): siRNA sense strand
caacuaugaaggaagauug

SEQ ID NO: 512705 - RNA, 19 nt, Homo sapiens
  misc_RNA (1)...(19): siRNA sense strand
gcagguauuauucucacua

SEQ ID NO: 512706 - RNA, 19 nt, Homo sapiens
  misc_RNA (1)...(19): siRNA sense strand
ccagcuaccuccacaagca

SEQ ID NO: 512707 - RNA, 19 nt, Homo sapiens
  misc_RNA (1)...(19): siRNA sense strand
ucggaaagguuaugguuca

SEQ ID NO: 512708 - RNA, 19 nt, Homo sapiens
  misc_RNA (1)...(19): siRNA sense strand
gaagaaccuuaauaauagc

SEQ ID NO: 512709 - RNA, 19 nt, Homo sapiens
  misc_RNA (1)...(19): siRNA sense strand
ucaauagucuaacauacuc

SEQ ID NO: 512710 - RNA, 19 nt, Homo sapiens
  misc_RNA (1)...(19): siRNA sense strand
caacugguacagauacuau

SEQ ID NO: 512711 - RNA, 19 nt, Homo sapiens
  misc_RNA (1)...(19): siRNA sense strand
guucuuggguguuuaaggu

SEQ ID NO: 512712 - RNA, 19 nt, Homo sapiens
  misc_RNA (1)...(19): siRNA sense strand
ggugaagggcuaaauagga

SEQ ID NO: 512713 - RNA, 19 nt, Homo sapiens
  misc_RNA (1)...(19): siRNA sense strand
ccagcaggauggagaugaa

SEQ ID NO: 512714 - RNA, 19 nt, Homo sapiens
  misc_RNA (1)...(19): siRNA sense strand
uggaagcaguuucaaggaa

SEQ ID NO: 512715 - RNA, 19 nt, Homo sapiens
  misc_RNA (1)...(19): siRNA sense strand
gaacagaacucuaacaaca

SEQ ID NO: 512716 - RNA, 19 nt, Homo sapiens
  misc_RNA (1)...(19): siRNA sense strand
gcaaagcacuuauggaaug

SEQ ID NO: 512717 - RNA, 19 nt, Homo sapiens
  misc_RNA (1)...(19): siRNA sense strand
ggacugaugucaaggcaua

SEQ ID NO: 512718 - RNA, 19 nt, Homo sapiens
  misc_RNA (1)...(19): siRNA sense strand
uaagaaggcugaauaacaa

SEQ ID NO: 512719 - RNA, 19 nt, Homo sapiens
  misc_RNA (1)...(19): siRNA sense strand
gaacuugguuguagagcua

SEQ ID NO: 512720 - RNA, 19 nt, Homo sapiens
  misc_RNA (1)...(19): siRNA sense strand
ggaagcagcucaucacugu

SEQ ID NO: 512721 - RNA, 19 nt, Homo sapiens
  misc_RNA (1)...(19): siRNA sense strand
ccucagaacuugcaacuuu

SEQ ID NO: 512722 - RNA, 19 nt, Homo sapiens
  misc_RNA (1)...(19): siRNA sense strand
ggacggaacugaagagauc

SEQ ID NO: 512723 - RNA, 19 nt, Homo sapiens
  misc_RNA (1)...(19): siRNA sense strand
gcacaaagccaccucuuga

SEQ ID NO: 512724 - RNA, 19 nt, Homo sapiens
  misc_RNA (1)...(19): siRNA sense strand
ggacaucgcugagaucaca

SEQ ID NO: 512725 - RNA, 19 nt, Homo sapiens
  misc_RNA (1)...(19): siRNA sense strand
gagaagcucugcaagaauc

SEQ ID NO: 512726 - RNA, 19 nt, Homo sapiens
  misc_RNA (1)...(19): siRNA sense strand
gaagccagaugaugaugaa

SEQ ID NO: 512727 - RNA, 19 nt, Homo sapiens
  misc_RNA (1)...(19): siRNA sense strand
gaccagauaugcaguuaga

SEQ ID NO: 512728 - RNA, 19 nt, Homo sapiens
  misc_RNA (1)...(19): siRNA sense strand
gaauggaaccuuugacuau

SEQ ID NO: 512729 - RNA, 19 nt, Homo sapiens
  misc_RNA (1)...(19): siRNA sense strand
gcaaaaccaugucuauuaa

SEQ ID NO: 512730 - RNA, 19 nt, Homo sapiens
  misc_RNA (1)...(19): siRNA sense strand
ggaauacacugagcagaga

SEQ ID NO: 512731 - RNA, 19 nt, Homo sapiens
  misc_RNA (1)...(19): siRNA sense strand
ggaaagaagucacauuagc

SEQ ID NO: 512732 - RNA, 19 nt, Homo sapiens
  misc_RNA (1)...(19): siRNA sense strand
gagagaauauggagagaca

SEQ ID NO: 512733 - RNA, 19 nt, Homo sapiens
  misc_RNA (1)...(19): siRNA sense strand
gcacaggauuggugacuca

SEQ ID NO: 512734 - RNA, 19 nt, Homo sapiens
  misc_RNA (1)...(19): siRNA sense strand
ccaaagagguacugguguu

SEQ ID NO: 512735 - RNA, 19 nt, Homo sapiens
  misc_RNA (1)...(19): siRNA sense strand
gaacuugcaacuuuaauuc

SEQ ID NO: 512736 - RNA, 19 nt, Homo sapiens
  misc_RNA (1)...(19): siRNA sense strand
ggagaaguauggguccuuu

SEQ ID NO: 512737 - RNA, 19 nt, Homo sapiens
  misc_RNA (1)...(19): siRNA sense strand
gaacugaagagaucgaaug

SEQ ID NO: 512738 - RNA, 19 nt, Homo sapiens
  misc_RNA (1)...(19): siRNA sense strand
gauuggcacuguugaagaa

SEQ ID NO: 512739 - RNA, 19 nt, Homo sapiens
  misc_RNA (1)...(19): siRNA sense strand
ccaaggaccagacaaauga

SEQ ID NO: 512740 - RNA, 19 nt, Homo sapiens
  misc_RNA (1)...(19): siRNA sense strand
gaaacuaacugcauuuacc

SEQ ID NO: 512741 - RNA, 19 nt, Homo sapiens
  misc_RNA (1)...(19): siRNA sense strand
ggagauggaugaggacuuc

SEQ ID NO: 512742 - RNA, 19 nt, Homo sapiens
  misc_RNA (1)...(19): siRNA sense strand
aaagcaaacucgauccaaa

SEQ ID NO: 512743 - RNA, 19 nt, Homo sapiens
  misc_RNA (1)...(19): siRNA sense strand
guagugaaguuuacguaug

SEQ ID NO: 512744 - RNA, 19 nt, Homo sapiens
  misc_RNA (1)...(19): siRNA sense strand
gggacaggcugcccuuuga

SEQ ID NO: 512745 - RNA, 19 nt, Homo sapiens
  misc_RNA (1)...(19): siRNA sense strand
gggaugaaccgaaggaauu

SEQ ID NO: 512746 - RNA, 19 nt, Homo sapiens
  misc_RNA (1)...(19): siRNA sense strand
acagugggauggagaagua

SEQ ID NO: 512747 - RNA, 19 nt, Homo sapiens
  misc_RNA (1)...(19): siRNA sense strand
cagcguggauuauaauaug

SEQ ID NO: 512748 - RNA, 19 nt, Homo sapiens
  misc_RNA (1)...(19): siRNA sense strand
cgaacaagaucaaggaaca

SEQ ID NO: 512749 - RNA, 19 nt, Homo sapiens
  misc_RNA (1)...(19): siRNA sense strand
caacaaggcccucaucuac

SEQ ID NO: 512750 - RNA, 19 nt, Homo sapiens
  misc_RNA (1)...(19): siRNA sense strand
gaacacaaugagacgauuu

SEQ ID NO: 512751 - RNA, 19 nt, Homo sapiens
  misc_RNA (1)...(19): siRNA sense strand
caaagcggaugaaaguaga

SEQ ID NO: 512752 - RNA, 19 nt, Homo sapiens
  misc_RNA (1)...(19): siRNA sense strand
aaagaaagauuggcacugu

SEQ ID NO: 512753 - RNA, 19 nt, Homo sapiens
  misc_RNA (1)...(19): siRNA sense strand
ggagaaugcaauccgcuua

SEQ ID NO: 512754 - RNA, 19 nt, Homo sapiens
  misc_RNA (1)...(19): siRNA sense strand
ggaauggaaccuuugacua

SEQ ID NO: 512755 - RNA, 19 nt, Homo sapiens
  misc_RNA (1)...(19): siRNA sense strand
gcgaaggccucagaacuug

SEQ ID NO: 512756 - RNA, 19 nt, Homo sapiens
  misc_RNA (1)...(19): siRNA sense strand
ugacggaacagaacucuaa

SEQ ID NO: 512757 - RNA, 19 nt, Homo sapiens
  misc_RNA (1)...(19): siRNA sense strand
gguggagaauguuaugaaa

SEQ ID NO: 512758 - RNA, 19 nt, Homo sapiens
  misc_RNA (1)...(19): siRNA sense strand
gagaggacaucgcugagau

SEQ ID NO: 512759 - RNA, 19 nt, Homo sapiens
  misc_RNA (1)...(19): siRNA sense strand
ggaagggaauuugcuggaa

SEQ ID NO: 512760 - RNA, 19 nt, Homo sapiens
  misc_RNA (1)...(19): siRNA sense strand
cugaagagaucgaaugaga

SEQ ID NO: 512761 - RNA, 19 nt, Homo sapiens
  misc_RNA (1)...(19): siRNA sense strand
gaaagaagucacauuagca

SEQ ID NO: 512762 - RNA, 19 nt, Homo sapiens
  misc_RNA (1)...(19): siRNA sense strand
gaugaggacuucgauguca

SEQ ID NO: 512763 - RNA, 19 nt, Homo sapiens
  misc_RNA (1)...(19): siRNA sense strand
gcagcaaagucacaauaca

SEQ ID NO: 512764 - RNA, 19 nt, Homo sapiens
  misc_RNA (1)...(19): siRNA sense strand
gaacgucggccguggcuau

SEQ ID NO: 512765 - RNA, 19 nt, Homo sapiens
  misc_RNA (1)...(19): siRNA sense strand
gaagcagccauaauagaaa

SEQ ID NO: 512766 - RNA, 19 nt, Homo sapiens
  misc_RNA (1)...(19): siRNA sense strand
gccauaaggaaucuaaaua

SEQ ID NO: 512767 - RNA, 19 nt, Homo sapiens
  misc_RNA (1)...(19): siRNA sense strand
gaagagaucgaaugagaag

SEQ ID NO: 512768 - RNA, 19 nt, Homo sapiens
  misc_RNA (1)...(19): siRNA sense strand
gaagaugaacucuaugaag

SEQ ID NO: 512769 - RNA, 19 nt, Homo sapiens
  misc_RNA (1)...(19): siRNA sense strand
acaagaggcugaugcuguu

SEQ ID NO: 512770 - RNA, 19 nt, Homo sapiens
  misc_RNA (1)...(19): siRNA sense strand
gaguauuuaucccgcuaua

SEQ ID NO: 512771 - RNA, 19 nt, Homo sapiens
  misc_RNA (1)...(19): siRNA sense strand
ccaguagccucagccauuu

SEQ ID NO: 512772 - RNA, 19 nt, Homo sapiens
  misc_RNA (1)...(19): siRNA sense strand
ggcgacagcuggcagagaa

SEQ ID NO: 512773 - RNA, 19 nt, Homo sapiens
  misc_RNA (1)...(19): siRNA sense strand
gaacauagaaaaccaaaga

SEQ ID NO: 512774 - RNA, 19 nt, Homo sapiens
  misc_RNA (1)...(19): siRNA sense strand
cugaugcuguugcagauua

SEQ ID NO: 512775 - RNA, 19 nt, Homo sapiens
  misc_RNA (1)...(19): siRNA sense strand
gagcacaagcgggcaguua

SEQ ID NO: 512776 - RNA, 19 nt, Homo sapiens
  misc_RNA (1)...(19): siRNA sense strand
gaauauggagagacagaaa

SEQ ID NO: 512777 - RNA, 19 nt, Homo sapiens
  misc_RNA (1)...(19): siRNA sense strand
gaauccaugugcgauguuu

SEQ ID NO: 512778 - RNA, 19 nt, Homo sapiens
  misc_RNA (1)...(19): siRNA sense strand
gcaaagagaagugcgucua

SEQ ID NO: 512779 - RNA, 19 nt, Homo sapiens
  misc_RNA (1)...(19): siRNA sense strand
ugaagcagccauaauagaa

SEQ ID NO: 512780 - RNA, 19 nt, Homo sapiens
  misc_RNA (1)...(19): siRNA sense strand
gaggaagauuggagaaaca

SEQ ID NO: 512781 - RNA, 19 nt, Homo sapiens
  misc_RNA (1)...(19): siRNA sense strand
ggagacagccauaaggaau

SEQ ID NO: 512782 - RNA, 19 nt, Homo sapiens
  misc_RNA (1)...(19): siRNA sense strand
gagacuuacugaacacaau

SEQ ID NO: 512783 - RNA, 19 nt, Homo sapiens
  misc_RNA (1)...(19): siRNA sense strand
ugggaaagaagucacauua

SEQ ID NO: 512784 - RNA, 19 nt, Homo sapiens
  misc_RNA (1)...(19): siRNA sense strand
ggacuucgaugucauuuuc

SEQ ID NO: 512785 - RNA, 19 nt, Homo sapiens
  misc_RNA (1)...(19): siRNA sense strand
gaaguccuguggagaugga

SEQ ID NO: 512786 - RNA, 19 nt, Homo sapiens
  misc_RNA (1)...(19): siRNA sense strand
gaaagucgagagagccaaa

SEQ ID NO: 512787 - RNA, 19 nt, Homo sapiens
  misc_RNA (1)...(19): siRNA sense strand
ccugauuccuccacucuaa

SEQ ID NO: 512788 - RNA, 19 nt, Homo sapiens
  misc_RNA (1)...(19): siRNA sense strand
ugagaacugugacaucaau

SEQ ID NO: 512789 - RNA, 19 nt, Homo sapiens
  misc_RNA (1)...(19): siRNA sense strand
uaugagaacugugacauca

SEQ ID NO: 512790 - RNA, 19 nt, Homo sapiens
  misc_RNA (1)...(19): siRNA sense strand
ccaaaccaguuaccaaucu

SEQ ID NO: 512791 - RNA, 19 nt, Homo sapiens
  misc_RNA (1)...(19): siRNA sense strand
ggaggaagauuggagaaac

SEQ ID NO: 512792 - RNA, 19 nt, Homo sapiens
  misc_RNA (1)...(19): siRNA sense strand
ucaagaagcgggucacaga

SEQ ID NO: 512793 - RNA, 19 nt, Homo sapiens
  misc_RNA (1)...(19): siRNA sense strand
cauaguagcagcaaaguca

SEQ ID NO: 512794 - RNA, 19 nt, Homo sapiens
  misc_RNA (1)...(19): siRNA sense strand
gaauuaauacacacacuca

SEQ ID NO: 512795 - RNA, 19 nt, Homo sapiens
  misc_RNA (1)...(19): siRNA sense strand
aaugaacgcucgcuaucaa

SEQ ID NO: 512796 - RNA, 19 nt, Homo sapiens
  misc_RNA (1)...(19): siRNA sense strand
caaacucgauccaaauacu

SEQ ID NO: 512797 - RNA, 19 nt, Homo sapiens
  misc_RNA (1)...(19): siRNA sense strand
ccaaaccauugaagaagga

SEQ ID NO: 512798 - RNA, 19 nt, Homo sapiens
  misc_RNA (1)...(19): siRNA sense strand
gauuaaacguugccuucau

SEQ ID NO: 512799 - RNA, 19 nt, Homo sapiens
  misc_RNA (1)...(19): siRNA sense strand
cuaagaaggcugaauaaca

SEQ ID NO: 512800 - RNA, 19 nt, Homo sapiens
  misc_RNA (1)...(19): siRNA sense strand
ccggagaucuucgcacaaa

SEQ ID NO: 512801 - RNA, 19 nt, Homo sapiens
  misc_RNA (1)...(19): siRNA sense strand
gaaccgagccagggaagga

SEQ ID NO: 512802 - RNA, 19 nt, Homo sapiens
  misc_RNA (1)...(19): siRNA sense strand
gagggaacuugguuguaga

SEQ ID NO: 512803 - RNA, 19 nt, Homo sapiens
  misc_RNA (1)...(19): siRNA sense strand
aaucggaccugaaguugga

SEQ ID NO: 512804 - RNA, 19 nt, Homo sapiens
  misc_RNA (1)...(19): siRNA sense strand
cagaccagauaugcaguua

SEQ ID NO: 512805 - RNA, 19 nt, Homo sapiens
  misc_RNA (1)...(19): siRNA sense strand
aggagaagcucugcaagaa

SEQ ID NO: 512806 - RNA, 19 nt, Homo sapiens
  misc_RNA (1)...(19): siRNA sense strand
gagaaugaacgcucgcuau

SEQ ID NO: 512807 - RNA, 19 nt, Homo sapiens
  misc_RNA (1)...(19): siRNA sense strand
cuacuuauauccaaaccau

SEQ ID NO: 512808 - RNA, 19 nt, Homo sapiens
  misc_RNA (1)...(19): siRNA sense strand
gcacccaaauugacgucuu

SEQ ID NO: 512809 - RNA, 19 nt, Homo sapiens
  misc_RNA (1)...(19): siRNA sense strand
ggacaggcuggaaaccuuu

SEQ ID NO: 512810 - RNA, 19 nt, Homo sapiens
  misc_RNA (1)...(19): siRNA sense strand
gcaggauggugaagaaagg

SEQ ID NO: 512811 - RNA, 19 nt, Homo sapiens
  misc_RNA (1)...(19): siRNA sense strand
ggcggucccucaucaagaa

SEQ ID NO: 512812 - RNA, 19 nt, Homo sapiens
  misc_RNA (1)...(19): siRNA sense strand
ggagggccuucuugacuca

SEQ ID NO: 512813 - RNA, 19 nt, Homo sapiens
  misc_RNA (1)...(19): siRNA sense strand
ggaaggagacagccauaag

SEQ ID NO: 512814 - RNA, 19 nt, Homo sapiens
  misc_RNA (1)...(19): siRNA sense strand
acaagggaauguugagaga

SEQ ID NO: 512815 - RNA, 19 nt, Homo sapiens
  misc_RNA (1)...(19): siRNA sense strand
gaacagaacucuaacaaca

SEQ ID NO: 512816 - RNA, 19 nt, Homo sapiens
  misc_RNA (1)...(19): siRNA sense strand
gcaaagcacuuauggaaug

SEQ ID NO: 512817 - RNA, 19 nt, Homo sapiens
  misc_RNA (1)...(19): siRNA sense strand
ggacugaugucaaggcaua

SEQ ID NO: 512818 - RNA, 19 nt, Homo sapiens
  misc_RNA (1)...(19): siRNA sense strand
uaagaaggcugaauaacaa

SEQ ID NO: 512819 - RNA, 19 nt, Homo sapiens
  misc_RNA (1)...(19): siRNA sense strand
gaacuugguuguagagcua

SEQ ID NO: 512820 - RNA, 19 nt, Homo sapiens
  misc_RNA (1)...(19): siRNA sense strand
ggaagcagcucaucacugu

SEQ ID NO: 512821 - RNA, 19 nt, Homo sapiens
  misc_RNA (1)...(19): siRNA sense strand
ccucagaacuugcaacuuu

SEQ ID NO: 512822 - RNA, 19 nt, Homo sapiens
  misc_RNA (1)...(19): siRNA sense strand
ggacggaacugaagagauc

SEQ ID NO: 512823 - RNA, 19 nt, Homo sapiens
  misc_RNA (1)...(19): siRNA sense strand
gcacaaagccaccucuuga

SEQ ID NO: 512824 - RNA, 19 nt, Homo sapiens
  misc_RNA (1)...(19): siRNA sense strand
ggacaucgcugagaucaca

SEQ ID NO: 512825 - RNA, 19 nt, Homo sapiens
  misc_RNA (1)...(19): siRNA sense strand
gagaagcucugcaagaauc

SEQ ID NO: 512826 - RNA, 19 nt, Homo sapiens
  misc_RNA (1)...(19): siRNA sense strand
gaagccagaugaugaugaa

SEQ ID NO: 512827 - RNA, 19 nt, Homo sapiens
  misc_RNA (1)...(19): siRNA sense strand
gaccagauaugcaguuaga

SEQ ID NO: 512828 - RNA, 19 nt, Homo sapiens
  misc_RNA (1)...(19): siRNA sense strand
gaauggaaccuuugacuau

SEQ ID NO: 512829 - RNA, 19 nt, Homo sapiens
  misc_RNA (1)...(19): siRNA sense strand
gcaaaaccaugucuauuaa

SEQ ID NO: 512830 - RNA, 19 nt, Homo sapiens
  misc_RNA (1)...(19): siRNA sense strand
ggaauacacugagcagaga

SEQ ID NO: 512831 - RNA, 19 nt, Homo sapiens
  misc_RNA (1)...(19): siRNA sense strand
ggaaagaagucacauuagc

SEQ ID NO: 512832 - RNA, 19 nt, Homo sapiens
  misc_RNA (1)...(19): siRNA sense strand
gagagaauauggagagaca

SEQ ID NO: 512833 - RNA, 19 nt, Homo sapiens
  misc_RNA (1)...(19): siRNA sense strand
gcacaggauuggugacuca

SEQ ID NO: 512834 - RNA, 19 nt, Homo sapiens
  misc_RNA (1)...(19): siRNA sense strand
ccaaagagguacugguguu

SEQ ID NO: 512835 - RNA, 19 nt, Homo sapiens
  misc_RNA (1)...(19): siRNA sense strand
gaacuugcaacuuuaauuc

SEQ ID NO: 512836 - RNA, 19 nt, Homo sapiens
  misc_RNA (1)...(19): siRNA sense strand
ggagaaguauggguccuuu

SEQ ID NO: 512837 - RNA, 19 nt, Homo sapiens
  misc_RNA (1)...(19): siRNA sense strand
gaacugaagagaucgaaug

SEQ ID NO: 512838 - RNA, 19 nt, Homo sapiens
  misc_RNA (1)...(19): siRNA sense strand
gauuggcacuguugaagaa

SEQ ID NO: 512839 - RNA, 19 nt, Homo sapiens
  misc_RNA (1)...(19): siRNA sense strand
ccaaggaccagacaaauga

SEQ ID NO: 512840 - RNA, 19 nt, Homo sapiens
  misc_RNA (1)...(19): siRNA sense strand
gaaacuaacugcauuuacc

SEQ ID NO: 512841 - RNA, 19 nt, Homo sapiens
  misc_RNA (1)...(19): siRNA sense strand
ggagauggaugaggacuuc

SEQ ID NO: 512842 - RNA, 19 nt, Homo sapiens
  misc_RNA (1)...(19): siRNA sense strand
aaagcaaacucgauccaaa

SEQ ID NO: 512843 - RNA, 19 nt, Homo sapiens
  misc_RNA (1)...(19): siRNA sense strand
guagugaaguuuacguaug

SEQ ID NO: 512844 - RNA, 19 nt, Homo sapiens
  misc_RNA (1)...(19): siRNA sense strand
gggacaggcugcccuuuga

SEQ ID NO: 512845 - RNA, 19 nt, Homo sapiens
  misc_RNA (1)...(19): siRNA sense strand
gggaugaaccgaaggaauu

SEQ ID NO: 512846 - RNA, 19 nt, Homo sapiens
  misc_RNA (1)...(19): siRNA sense strand
acagugggauggagaagua

SEQ ID NO: 512847 - RNA, 19 nt, Homo sapiens
  misc_RNA (1)...(19): siRNA sense strand
cagcguggauuauaauaug

SEQ ID NO: 512848 - RNA, 19 nt, Homo sapiens
  misc_RNA (1)...(19): siRNA sense strand
cgaacaagaucaaggaaca

SEQ ID NO: 512849 - RNA, 19 nt, Homo sapiens
  misc_RNA (1)...(19): siRNA sense strand
caacaaggcccucaucuac

SEQ ID NO: 512850 - RNA, 19 nt, Homo sapiens
  misc_RNA (1)...(19): siRNA sense strand
gaacacaaugagacgauuu

SEQ ID NO: 512851 - RNA, 19 nt, Homo sapiens
  misc_RNA (1)...(19): siRNA sense strand
caaagcggaugaaaguaga

SEQ ID NO: 512852 - RNA, 19 nt, Homo sapiens
  misc_RNA (1)...(19): siRNA sense strand
aaagaaagauuggcacugu

SEQ ID NO: 512853 - RNA, 19 nt, Homo sapiens
  misc_RNA (1)...(19): siRNA sense strand
ggagaaugcaauccgcuua

SEQ ID NO: 512854 - RNA, 19 nt, Homo sapiens
  misc_RNA (1)...(19): siRNA sense strand
ggaauggaaccuuugacua

SEQ ID NO: 512855 - RNA, 19 nt, Homo sapiens
  misc_RNA (1)...(19): siRNA sense strand
gcgaaggccucagaacuug

SEQ ID NO: 512856 - RNA, 19 nt, Homo sapiens
  misc_RNA (1)...(19): siRNA sense strand
ugacggaacagaacucuaa

SEQ ID NO: 512857 - RNA, 19 nt, Homo sapiens
  misc_RNA (1)...(19): siRNA sense strand
gguggagaauguuaugaaa

SEQ ID NO: 512858 - RNA, 19 nt, Homo sapiens
  misc_RNA (1)...(19): siRNA sense strand
gagaggacaucgcugagau

SEQ ID NO: 512859 - RNA, 19 nt, Homo sapiens
  misc_RNA (1)...(19): siRNA sense strand
ggaagggaauuugcuggaa

SEQ ID NO: 512860 - RNA, 19 nt, Homo sapiens
  misc_RNA (1)...(19): siRNA sense strand
cugaagagaucgaaugaga

SEQ ID NO: 512861 - RNA, 19 nt, Homo sapiens
  misc_RNA (1)...(19): siRNA sense strand
gaaagaagucacauuagca

SEQ ID NO: 512862 - RNA, 19 nt, Homo sapiens
  misc_RNA (1)...(19): siRNA sense strand
gaugaggacuucgauguca

SEQ ID NO: 512863 - RNA, 19 nt, Homo sapiens
  misc_RNA (1)...(19): siRNA sense strand
gcagcaaagucacaauaca

SEQ ID NO: 512864 - RNA, 19 nt, Homo sapiens
  misc_RNA (1)...(19): siRNA sense strand
gaacgucggccguggcuau

SEQ ID NO: 512865 - RNA, 19 nt, Homo sapiens
  misc_RNA (1)...(19): siRNA sense strand
gaagcagccauaauagaaa

SEQ ID NO: 512866 - RNA, 19 nt, Homo sapiens
  misc_RNA (1)...(19): siRNA sense strand
gccauaaggaaucuaaaua

SEQ ID NO: 512867 - RNA, 19 nt, Homo sapiens
  misc_RNA (1)...(19): siRNA sense strand
gaagagaucgaaugagaag

SEQ ID NO: 512868 - RNA, 19 nt, Homo sapiens
  misc_RNA (1)...(19): siRNA sense strand
gaagaugaacucuaugaag

SEQ ID NO: 512869 - RNA, 19 nt, Homo sapiens
  misc_RNA (1)...(19): siRNA sense strand
acaagaggcugaugcuguu

SEQ ID NO: 512870 - RNA, 19 nt, Homo sapiens
  misc_RNA (1)...(19): siRNA sense strand
gaguauuuaucccgcuaua

SEQ ID NO: 512871 - RNA, 19 nt, Homo sapiens
  misc_RNA (1)...(19): siRNA sense strand
ccaguagccucagccauuu

SEQ ID NO: 512872 - RNA, 19 nt, Homo sapiens
  misc_RNA (1)...(19): siRNA sense strand
ggcgacagcuggcagagaa

SEQ ID NO: 512873 - RNA, 19 nt, Homo sapiens
  misc_RNA (1)...(19): siRNA sense strand
gaacauagaaaaccaaaga

SEQ ID NO: 512874 - RNA, 19 nt, Homo sapiens
  misc_RNA (1)...(19): siRNA sense strand
cugaugcuguugcagauua

SEQ ID NO: 512875 - RNA, 19 nt, Homo sapiens
  misc_RNA (1)...(19): siRNA sense strand
gagcacaagcgggcaguua

SEQ ID NO: 512876 - RNA, 19 nt, Homo sapiens
  misc_RNA (1)...(19): siRNA sense strand
gaauauggagagacagaaa

SEQ ID NO: 512877 - RNA, 19 nt, Homo sapiens
  misc_RNA (1)...(19): siRNA sense strand
gaauccaugugcgauguuu

SEQ ID NO: 512878 - RNA, 19 nt, Homo sapiens
  misc_RNA (1)...(19): siRNA sense strand
gcaaagagaagugcgucua

SEQ ID NO: 512879 - RNA, 19 nt, Homo sapiens
  misc_RNA (1)...(19): siRNA sense strand
ugaagcagccauaauagaa

SEQ ID NO: 512880 - RNA, 19 nt, Homo sapiens
  misc_RNA (1)...(19): siRNA sense strand
gaggaagauuggagaaaca

SEQ ID NO: 512881 - RNA, 19 nt, Homo sapiens
  misc_RNA (1)...(19): siRNA sense strand
ggagacagccauaaggaau

SEQ ID NO: 512882 - RNA, 19 nt, Homo sapiens
  misc_RNA (1)...(19): siRNA sense strand
gagacuuacugaacacaau

SEQ ID NO: 512883 - RNA, 19 nt, Homo sapiens
  misc_RNA (1)...(19): siRNA sense strand
ugggaaagaagucacauua

SEQ ID NO: 512884 - RNA, 19 nt, Homo sapiens
  misc_RNA (1)...(19): siRNA sense strand
ggacuucgaugucauuuuc

SEQ ID NO: 512885 - RNA, 19 nt, Homo sapiens
  misc_RNA (1)...(19): siRNA sense strand
gaaguccuguggagaugga

SEQ ID NO: 512886 - RNA, 19 nt, Homo sapiens
  misc_RNA (1)...(19): siRNA sense strand
gaaagucgagagagccaaa

SEQ ID NO: 512887 - RNA, 19 nt, Homo sapiens
  misc_RNA (1)...(19): siRNA sense strand
ccugauuccuccacucuaa

SEQ ID NO: 512888 - RNA, 19 nt, Homo sapiens
  misc_RNA (1)...(19): siRNA sense strand
ugagaacugugacaucaau

SEQ ID NO: 512889 - RNA, 19 nt, Homo sapiens
  misc_RNA (1)...(19): siRNA sense strand
uaugagaacugugacauca

SEQ ID NO: 512890 - RNA, 19 nt, Homo sapiens
  misc_RNA (1)...(19): siRNA sense strand
ccaaaccaguuaccaaucu

SEQ ID NO: 512891 - RNA, 19 nt, Homo sapiens
  misc_RNA (1)...(19): siRNA sense strand
ggaggaagauuggagaaac

SEQ ID NO: 512892 - RNA, 19 nt, Homo sapiens
  misc_RNA (1)...(19): siRNA sense strand
ucaagaagcgggucacaga

SEQ ID NO: 512893 - RNA, 19 nt, Homo sapiens
  misc_RNA (1)...(19): siRNA sense strand
cauaguagcagcaaaguca

SEQ ID NO: 512894 - RNA, 19 nt, Homo sapiens
  misc_RNA (1)...(19): siRNA sense strand
gaauuaauacacacacuca

SEQ ID NO: 512895 - RNA, 19 nt, Homo sapiens
  misc_RNA (1)...(19): siRNA sense strand
aaugaacgcucgcuaucaa

SEQ ID NO: 512896 - RNA, 19 nt, Homo sapiens
  misc_RNA (1)...(19): siRNA sense strand
caaacucgauccaaauacu

SEQ ID NO: 512897 - RNA, 19 nt, Homo sapiens
  misc_RNA (1)...(19): siRNA sense strand
ccaaaccauugaagaagga

SEQ ID NO: 512898 - RNA, 19 nt, Homo sapiens
  misc_RNA (1)...(19): siRNA sense strand
gauuaaacguugccuucau

SEQ ID NO: 512899 - RNA, 19 nt, Homo sapiens
  misc_RNA (1)...(19): siRNA sense strand
cuaagaaggcugaauaaca

SEQ ID NO: 512900 - RNA, 19 nt, Homo sapiens
  misc_RNA (1)...(19): siRNA sense strand
ccggagaucuucgcacaaa

SEQ ID NO: 512901 - RNA, 19 nt, Homo sapiens
  misc_RNA (1)...(19): siRNA sense strand
gaaccgagccagggaagga

SEQ ID NO: 512902 - RNA, 19 nt, Homo sapiens
  misc_RNA (1)...(19): siRNA sense strand
gagggaacuugguuguaga

SEQ ID NO: 512903 - RNA, 19 nt, Homo sapiens
  misc_RNA (1)...(19): siRNA sense strand
aaucggaccugaaguugga

SEQ ID NO: 512904 - RNA, 19 nt, Homo sapiens
  misc_RNA (1)...(19): siRNA sense strand
cagaccagauaugcaguua

SEQ ID NO: 512905 - RNA, 19 nt, Homo sapiens
  misc_RNA (1)...(19): siRNA sense strand
aggagaagcucugcaagaa

SEQ ID NO: 512906 - RNA, 19 nt, Homo sapiens
  misc_RNA (1)...(19): siRNA sense strand
gagaaugaacgcucgcuau

SEQ ID NO: 512907 - RNA, 19 nt, Homo sapiens
  misc_RNA (1)...(19): siRNA sense strand
cuacuuauauccaaaccau

SEQ ID NO: 512908 - RNA, 19 nt, Homo sapiens
  misc_RNA (1)...(19): siRNA sense strand
gcacccaaauugacgucuu

SEQ ID NO: 512909 - RNA, 19 nt, Homo sapiens
  misc_RNA (1)...(19): siRNA sense strand
ggacaggcuggaaaccuuu

SEQ ID NO: 512910 - RNA, 19 nt, Homo sapiens
  misc_RNA (1)...(19): siRNA sense strand
gcaggauggugaagaaagg

SEQ ID NO: 512911 - RNA, 19 nt, Homo sapiens
  misc_RNA (1)...(19): siRNA sense strand
ggcggucccucaucaagaa

SEQ ID NO: 512912 - RNA, 19 nt, Homo sapiens
  misc_RNA (1)...(19): siRNA sense strand
ggagggccuucuugacuca

SEQ ID NO: 512913 - RNA, 19 nt, Homo sapiens
  misc_RNA (1)...(19): siRNA sense strand
ggaaggagacagccauaag

SEQ ID NO: 512914 - RNA, 19 nt, Homo sapiens
  misc_RNA (1)...(19): siRNA sense strand
acaagggaauguugagaga

SEQ ID NO: 512915 - RNA, 19 nt, Homo sapiens
  misc_RNA (1)...(19): siRNA sense strand
gcacugagcuucuauauac

SEQ ID NO: 512916 - RNA, 19 nt, Homo sapiens
  misc_RNA (1)...(19): siRNA sense strand
gaagaaagcgucaugauau

SEQ ID NO: 512917 - RNA, 19 nt, Homo sapiens
  misc_RNA (1)...(19): siRNA sense strand
gaaaggagaucaccacaag

SEQ ID NO: 512918 - RNA, 19 nt, Homo sapiens
  misc_RNA (1)...(19): siRNA sense strand
gaagaaguaugaagugguu

SEQ ID NO: 512919 - RNA, 19 nt, Homo sapiens
  misc_RNA (1)...(19): siRNA sense strand
gaugauagauuccaaguca

SEQ ID NO: 512920 - RNA, 19 nt, Homo sapiens
  misc_RNA (1)...(19): siRNA sense strand
caaguguccuucuacaaua

SEQ ID NO: 512921 - RNA, 19 nt, Homo sapiens
  misc_RNA (1)...(19): siRNA sense strand
gaaagaggguauuugagau

SEQ ID NO: 512922 - RNA, 19 nt, Homo sapiens
  misc_RNA (1)...(19): siRNA sense strand
ccacaacuuuggaauguuu

SEQ ID NO: 512923 - RNA, 19 nt, Homo sapiens
  misc_RNA (1)...(19): siRNA sense strand
caaauugccucuuuaaugc

SEQ ID NO: 512924 - RNA, 19 nt, Homo sapiens
  misc_RNA (1)...(19): siRNA sense strand
gcgauaaucuucuuagagu

SEQ ID NO: 512925 - RNA, 19 nt, Homo sapiens
  misc_RNA (1)...(19): siRNA sense strand
gaaaugggccacaacuuug

SEQ ID NO: 512926 - RNA, 19 nt, Homo sapiens
  misc_RNA (1)...(19): siRNA sense strand
ugaagugguuuauccuaua

SEQ ID NO: 512927 - RNA, 19 nt, Homo sapiens
  misc_RNA (1)...(19): siRNA sense strand
gcaccaggcuacacggaaa

SEQ ID NO: 512928 - RNA, 19 nt, Homo sapiens
  misc_RNA (1)...(19): siRNA sense strand
ggaacaauuugaaacugaa

SEQ ID NO: 512929 - RNA, 19 nt, Homo sapiens
  misc_RNA (1)...(19): siRNA sense strand
ccugaaauguguaauggua

SEQ ID NO: 512930 - RNA, 19 nt, Homo sapiens
  misc_RNA (1)...(19): siRNA sense strand
gaaucaagaugagaucaga

SEQ ID NO: 512931 - RNA, 19 nt, Homo sapiens
  misc_RNA (1)...(19): siRNA sense strand
ugaaaugggccacaacuuu

SEQ ID NO: 512932 - RNA, 19 nt, Homo sapiens
  misc_RNA (1)...(19): siRNA sense strand
gcccacaaauuauggauga

SEQ ID NO: 512933 - RNA, 19 nt, Homo sapiens
  misc_RNA (1)...(19): siRNA sense strand
gcaaguguccuucuacaau

SEQ ID NO: 512934 - RNA, 19 nt, Homo sapiens
  misc_RNA (1)...(19): siRNA sense strand
ucaaauugccucuuuaaug

SEQ ID NO: 512935 - RNA, 19 nt, Homo sapiens
  misc_RNA (1)...(19): siRNA sense strand
gacaauggcacaugaaaug

SEQ ID NO: 512936 - RNA, 19 nt, Homo sapiens
  misc_RNA (1)...(19): siRNA sense strand
guaccaauauuugcuguga

SEQ ID NO: 512937 - RNA, 19 nt, Homo sapiens
  misc_RNA (1)...(19): siRNA sense strand
caacaggaacaauuugaaa

SEQ ID NO: 512938 - RNA, 19 nt, Homo sapiens
  misc_RNA (1)...(19): siRNA sense strand
ggauaauggugaguuuaaa

SEQ ID NO: 512939 - RNA, 19 nt, Homo sapiens
  misc_RNA (1)...(19): siRNA sense strand
ccacagcgauaaucuucuu

SEQ ID NO: 512940 - RNA, 19 nt, Homo sapiens
  misc_RNA (1)...(19): siRNA sense strand
ggagaggacugugauugug

SEQ ID NO: 512941 - RNA, 19 nt, Homo sapiens
  misc_RNA (1)...(19): siRNA sense strand
ucucagcuaugacaaguuu

SEQ ID NO: 512942 - RNA, 19 nt, Homo sapiens
  misc_RNA (1)...(19): siRNA sense strand
agaagaaagcgucaugaua

SEQ ID NO: 512943 - RNA, 19 nt, Homo sapiens
  misc_RNA (1)...(19): siRNA sense strand
gauaaucuucuuagaguug

SEQ ID NO: 512944 - RNA, 19 nt, Homo sapiens
  misc_RNA (1)...(19): siRNA sense strand
ggucuugcauuuaugucua

SEQ ID NO: 512945 - RNA, 19 nt, Homo sapiens
  misc_RNA (1)...(19): siRNA sense strand
caugcacucuucaaguaua

SEQ ID NO: 512946 - RNA, 19 nt, Homo sapiens
  misc_RNA (1)...(19): siRNA sense strand
guaauuguccugaugauag

SEQ ID NO: 512947 - RNA, 19 nt, Homo sapiens
  misc_RNA (1)...(19): siRNA sense strand
gcuaagacauguaaaauca

SEQ ID NO: 512948 - RNA, 19 nt, Homo sapiens
  misc_RNA (1)...(19): siRNA sense strand
ugaggaauguaccaauauu

SEQ ID NO: 512949 - RNA, 19 nt, Homo sapiens
  misc_RNA (1)...(19): siRNA sense strand
cgacuauucuugcaagugu

SEQ ID NO: 512950 - RNA, 19 nt, Homo sapiens
  misc_RNA (1)...(19): siRNA sense strand
gacugugggucuugcauuu

SEQ ID NO: 512951 - RNA, 19 nt, Homo sapiens
  misc_RNA (1)...(19): siRNA sense strand
aagaaagcgucaugauauu

SEQ ID NO: 512952 - RNA, 19 nt, Homo sapiens
  misc_RNA (1)...(19): siRNA sense strand
gaacaugagaaauacauag

SEQ ID NO: 512953 - RNA, 19 nt, Homo sapiens
  misc_RNA (1)...(19): siRNA sense strand
ccaaagagccagagcaaca

SEQ ID NO: 512954 - RNA, 19 nt, Homo sapiens
  misc_RNA (1)...(19): siRNA sense strand
ucugaggaauguaccaaua

SEQ ID NO: 512955 - RNA, 19 nt, Homo sapiens
  misc_RNA (1)...(19): siRNA sense strand
uaucauauccacuccaauu

SEQ ID NO: 512956 - RNA, 19 nt, Homo sapiens
  misc_RNA (1)...(19): siRNA sense strand
caauaugugugauggacaa

SEQ ID NO: 512957 - RNA, 19 nt, Homo sapiens
  misc_RNA (1)...(19): siRNA sense strand
ggccuuaguugguauggaa

SEQ ID NO: 512958 - RNA, 19 nt, Homo sapiens
  misc_RNA (1)...(19): siRNA sense strand
ucagaaagaggguauuuga

SEQ ID NO: 512959 - RNA, 19 nt, Homo sapiens
  misc_RNA (1)...(19): siRNA sense strand
gaucagaaagaggguauuu

SEQ ID NO: 512960 - RNA, 19 nt, Homo sapiens
  misc_RNA (1)...(19): siRNA sense strand
ggacugacaaggauaagau

SEQ ID NO: 512961 - RNA, 19 nt, Homo sapiens
  misc_RNA (1)...(19): siRNA sense strand
ccacaagcccacaaauuau

SEQ ID NO: 512962 - RNA, 19 nt, Homo sapiens
  misc_RNA (1)...(19): siRNA sense strand
cgaccugccugaaaugugu

SEQ ID NO: 512963 - RNA, 19 nt, Homo sapiens
  misc_RNA (1)...(19): siRNA sense strand
ggccacaacuuuggaaugu

SEQ ID NO: 512964 - RNA, 19 nt, Homo sapiens
  misc_RNA (1)...(19): siRNA sense strand
ugagauggcuaauuauguc

SEQ ID NO: 512965 - RNA, 19 nt, Homo sapiens
  misc_RNA (1)...(19): siRNA sense strand
acaaugagaaucaagauga

SEQ ID NO: 512966 - RNA, 19 nt, Homo sapiens
  misc_RNA (1)...(19): siRNA sense strand
gcuacacggaaacauauua

SEQ ID NO: 512967 - RNA, 19 nt, Homo sapiens
  misc_RNA (1)...(19): siRNA sense strand
agaaagaggguauuugaga

SEQ ID NO: 512968 - RNA, 19 nt, Homo sapiens
  misc_RNA (1)...(19): siRNA sense strand
accacaagcccacaaauua

SEQ ID NO: 512969 - RNA, 19 nt, Homo sapiens
  misc_RNA (1)...(19): siRNA sense strand
gaggaauguaccaauauuu

SEQ ID NO: 512970 - RNA, 19 nt, Homo sapiens
  misc_RNA (1)...(19): siRNA sense strand
cauauccacuccaauuugu

SEQ ID NO: 512971 - RNA, 19 nt, Homo sapiens
  misc_RNA (1)...(19): siRNA sense strand
guauggaaaucuggacuga

SEQ ID NO: 512972 - RNA, 19 nt, Homo sapiens
  misc_RNA (1)...(19): siRNA sense strand
caagaugagaucagaaaga

SEQ ID NO: 512973 - RNA, 19 nt, Homo sapiens
  misc_RNA (1)...(19): siRNA sense strand
gcaacaggaacaauuugaa

SEQ ID NO: 512974 - RNA, 19 nt, Homo sapiens
  misc_RNA (1)...(19): siRNA sense strand
gcagccgucucagcuauga

SEQ ID NO: 512975 - RNA, 19 nt, Homo sapiens
  misc_RNA (1)...(19): siRNA sense strand
gucaugauauugcucaguu

SEQ ID NO: 512976 - RNA, 19 nt, Homo sapiens
  misc_RNA (1)...(19): siRNA sense strand
ccaccaaacuaguaaaauu

SEQ ID NO: 512977 - RNA, 19 nt, Homo sapiens
  misc_RNA (1)...(19): siRNA sense strand
cacaaauuauggaugauug

SEQ ID NO: 512978 - RNA, 19 nt, Homo sapiens
  misc_RNA (1)...(19): siRNA sense strand
ggaacaugagaaauacaua

SEQ ID NO: 512979 - RNA, 19 nt, Homo sapiens
  misc_RNA (1)...(19): siRNA sense strand
uaauuguccugaugauaga

SEQ ID NO: 512980 - RNA, 19 nt, Homo sapiens
  misc_RNA (1)...(19): siRNA sense strand
ugguaaaucugguaauugu

SEQ ID NO: 512981 - RNA, 19 nt, Homo sapiens
  misc_RNA (1)...(19): siRNA sense strand
ccuccucucuguugcagua

SEQ ID NO: 512982 - RNA, 19 nt, Homo sapiens
  misc_RNA (1)...(19): siRNA sense strand
ugacaaggauaagauaaag

SEQ ID NO: 512983 - RNA, 19 nt, Homo sapiens
  misc_RNA (1)...(19): siRNA sense strand
gcuagcaucagcacaugua

SEQ ID NO: 512984 - RNA, 19 nt, Homo sapiens
  misc_RNA (1)...(19): siRNA sense strand
gaagggccacugcuugaug

SEQ ID NO: 512985 - RNA, 19 nt, Homo sapiens
  misc_RNA (1)...(19): siRNA sense strand
uuaggagaauguugugaaa

SEQ ID NO: 512986 - RNA, 19 nt, Homo sapiens
  misc_RNA (1)...(19): siRNA sense strand
ggacaauggcacaugaaau

SEQ ID NO: 512987 - RNA, 19 nt, Homo sapiens
  misc_RNA (1)...(19): siRNA sense strand
cauguggccuuaguuggua

SEQ ID NO: 512988 - RNA, 19 nt, Homo sapiens
  misc_RNA (1)...(19): siRNA sense strand
agcaugcacucuucaagua

SEQ ID NO: 512989 - RNA, 19 nt, Homo sapiens
  misc_RNA (1)...(19): siRNA sense strand
uugcagugcuuuauuugaa

SEQ ID NO: 512990 - RNA, 19 nt, Homo sapiens
  misc_RNA (1)...(19): siRNA sense strand
acaauguguucuccuuauu

SEQ ID NO: 512991 - RNA, 19 nt, Homo sapiens
  misc_RNA (1)...(19): siRNA sense strand
ucaaguauaacccugauga

SEQ ID NO: 512992 - RNA, 19 nt, Homo sapiens
  misc_RNA (1)...(19): siRNA sense strand
ggaaaggagaucaccacaa

SEQ ID NO: 512993 - RNA, 19 nt, Homo sapiens
  misc_RNA (1)...(19): siRNA sense strand
ugggauggaugguguguug

SEQ ID NO: 512994 - RNA, 19 nt, Homo sapiens
  misc_RNA (1)...(19): siRNA sense strand
gggaagggccacugcuuga

SEQ ID NO: 512995 - RNA, 19 nt, Homo sapiens
  misc_RNA (1)...(19): siRNA sense strand
ucaugauauugcucaguua

SEQ ID NO: 512996 - RNA, 19 nt, Homo sapiens
  misc_RNA (1)...(19): siRNA sense strand
cagggacaauggcacauga

SEQ ID NO: 512997 - RNA, 19 nt, Homo sapiens
  misc_RNA (1)...(19): siRNA sense strand
uacaauguguucuccuuau

SEQ ID NO: 512998 - RNA, 19 nt, Homo sapiens
  misc_RNA (1)...(19): siRNA sense strand
gaauguuucaugacgacua

SEQ ID NO: 512999 - RNA, 19 nt, Homo sapiens
  misc_RNA (1)...(19): siRNA sense strand
gaccacagcgauaaucuuc

SEQ ID NO: 513000 - RNA, 19 nt, Homo sapiens
  misc_RNA (1)...(19): siRNA sense strand
gagcaacaggaacaauuug

SEQ ID NO: 513001 - RNA, 19 nt, Homo sapiens
  misc_RNA (1)...(19): siRNA sense strand
aggaacaauuugaaacuga

SEQ ID NO: 513002 - RNA, 19 nt, Homo sapiens
  misc_RNA (1)...(19): siRNA sense strand
agaaguaugaagugguuua

SEQ ID NO: 513003 - RNA, 19 nt, Homo sapiens
  misc_RNA (1)...(19): siRNA sense strand
caaggucuccugccaguca

SEQ ID NO: 513004 - RNA, 19 nt, Homo sapiens
  misc_RNA (1)...(19): siRNA sense strand
ugauauugcucaguuaauc

SEQ ID NO: 513005 - RNA, 19 nt, Homo sapiens
  misc_RNA (1)...(19): siRNA sense strand
gagcaugcacucuucaagu

SEQ ID NO: 513006 - RNA, 19 nt, Homo sapiens
  misc_RNA (1)...(19): siRNA sense strand
aauauuugcugugaugcua

SEQ ID NO: 513007 - RNA, 19 nt, Homo sapiens
  misc_RNA (1)...(19): siRNA sense strand
ggaaaugggagaggacugu

SEQ ID NO: 513008 - RNA, 19 nt, Homo sapiens
  misc_RNA (1)...(19): siRNA sense strand
cagcgauaaucuucuuaga

SEQ ID NO: 513009 - RNA, 19 nt, Homo sapiens
  misc_RNA (1)...(19): siRNA sense strand
guucaggaccacagcgaua

SEQ ID NO: 513010 - RNA, 19 nt, Homo sapiens
  misc_RNA (1)...(19): siRNA sense strand
guuaaucacagcaacagaa

SEQ ID NO: 513011 - RNA, 19 nt, Homo sapiens
  misc_RNA (1)...(19): siRNA sense strand
aaagguacaaugagaauca

SEQ ID NO: 513012 - RNA, 19 nt, Homo sapiens
  misc_RNA (1)...(19): siRNA sense strand
gguaauuguccugaugaua

SEQ ID NO: 513013 - RNA, 19 nt, Homo sapiens
  misc_RNA (1)...(19): siRNA sense strand
guaaugguaaaucugguaa

SEQ ID NO: 513014 - RNA, 19 nt, Homo sapiens
  misc_RNA (1)...(19): siRNA sense strand
caauacucauguggccuua

SEQ ID NO: 513015 - RNA, 19 nt, Homo sapiens
  misc_RNA (1)...(19): siRNA sense strand
gcacugagcuucuauauac

SEQ ID NO: 513016 - RNA, 19 nt, Homo sapiens
  misc_RNA (1)...(19): siRNA sense strand
gaagaaagcgucaugauau

SEQ ID NO: 513017 - RNA, 19 nt, Homo sapiens
  misc_RNA (1)...(19): siRNA sense strand
gaaaggagaucaccacaag

SEQ ID NO: 513018 - RNA, 19 nt, Homo sapiens
  misc_RNA (1)...(19): siRNA sense strand
gaagaaguaugaagugguu

SEQ ID NO: 513019 - RNA, 19 nt, Homo sapiens
  misc_RNA (1)...(19): siRNA sense strand
gaugauagauuccaaguca

SEQ ID NO: 513020 - RNA, 19 nt, Homo sapiens
  misc_RNA (1)...(19): siRNA sense strand
caaguguccuucuacaaua

SEQ ID NO: 513021 - RNA, 19 nt, Homo sapiens
  misc_RNA (1)...(19): siRNA sense strand
gaaagaggguauuugagau

SEQ ID NO: 513022 - RNA, 19 nt, Homo sapiens
  misc_RNA (1)...(19): siRNA sense strand
ccacaacuuuggaauguuu

SEQ ID NO: 513023 - RNA, 19 nt, Homo sapiens
  misc_RNA (1)...(19): siRNA sense strand
caaauugccucuuuaaugc

SEQ ID NO: 513024 - RNA, 19 nt, Homo sapiens
  misc_RNA (1)...(19): siRNA sense strand
gcgauaaucuucuuagagu

SEQ ID NO: 513025 - RNA, 19 nt, Homo sapiens
  misc_RNA (1)...(19): siRNA sense strand
gaaaugggccacaacuuug

SEQ ID NO: 513026 - RNA, 19 nt, Homo sapiens
  misc_RNA (1)...(19): siRNA sense strand
ugaagugguuuauccuaua

SEQ ID NO: 513027 - RNA, 19 nt, Homo sapiens
  misc_RNA (1)...(19): siRNA sense strand
gcaccaggcuacacggaaa

SEQ ID NO: 513028 - RNA, 19 nt, Homo sapiens
  misc_RNA (1)...(19): siRNA sense strand
ggaacaauuugaaacugaa

SEQ ID NO: 513029 - RNA, 19 nt, Homo sapiens
  misc_RNA (1)...(19): siRNA sense strand
ccugaaauguguaauggua

SEQ ID NO: 513030 - RNA, 19 nt, Homo sapiens
  misc_RNA (1)...(19): siRNA sense strand
gaaucaagaugagaucaga

SEQ ID NO: 513031 - RNA, 19 nt, Homo sapiens
  misc_RNA (1)...(19): siRNA sense strand
ugaaaugggccacaacuuu

SEQ ID NO: 513032 - RNA, 19 nt, Homo sapiens
  misc_RNA (1)...(19): siRNA sense strand
gcccacaaauuauggauga

SEQ ID NO: 513033 - RNA, 19 nt, Homo sapiens
  misc_RNA (1)...(19): siRNA sense strand
gcaaguguccuucuacaau

SEQ ID NO: 513034 - RNA, 19 nt, Homo sapiens
  misc_RNA (1)...(19): siRNA sense strand
ucaaauugccucuuuaaug

SEQ ID NO: 513035 - RNA, 19 nt, Homo sapiens
  misc_RNA (1)...(19): siRNA sense strand
gacaauggcacaugaaaug

SEQ ID NO: 513036 - RNA, 19 nt, Homo sapiens
  misc_RNA (1)...(19): siRNA sense strand
guaccaauauuugcuguga

SEQ ID NO: 513037 - RNA, 19 nt, Homo sapiens
  misc_RNA (1)...(19): siRNA sense strand
caacaggaacaauuugaaa

SEQ ID NO: 513038 - RNA, 19 nt, Homo sapiens
  misc_RNA (1)...(19): siRNA sense strand
ggauaauggugaguuuaaa

SEQ ID NO: 513039 - RNA, 19 nt, Homo sapiens
  misc_RNA (1)...(19): siRNA sense strand
ccacagcgauaaucuucuu

SEQ ID NO: 513040 - RNA, 19 nt, Homo sapiens
  misc_RNA (1)...(19): siRNA sense strand
ggagaggacugugauugug

SEQ ID NO: 513041 - RNA, 19 nt, Homo sapiens
  misc_RNA (1)...(19): siRNA sense strand
ucucagcuaugacaaguuu

SEQ ID NO: 513042 - RNA, 19 nt, Homo sapiens
  misc_RNA (1)...(19): siRNA sense strand
agaagaaagcgucaugaua

SEQ ID NO: 513043 - RNA, 19 nt, Homo sapiens
  misc_RNA (1)...(19): siRNA sense strand
gauaaucuucuuagaguug

SEQ ID NO: 513044 - RNA, 19 nt, Homo sapiens
  misc_RNA (1)...(19): siRNA sense strand
ggucuugcauuuaugucua

SEQ ID NO: 513045 - RNA, 19 nt, Homo sapiens
  misc_RNA (1)...(19): siRNA sense strand
caugcacucuucaaguaua

SEQ ID NO: 513046 - RNA, 19 nt, Homo sapiens
  misc_RNA (1)...(19): siRNA sense strand
guaauuguccugaugauag

SEQ ID NO: 513047 - RNA, 19 nt, Homo sapiens
  misc_RNA (1)...(19): siRNA sense strand
gcuaagacauguaaaauca

SEQ ID NO: 513048 - RNA, 19 nt, Homo sapiens
  misc_RNA (1)...(19): siRNA sense strand
ugaggaauguaccaauauu

SEQ ID NO: 513049 - RNA, 19 nt, Homo sapiens
  misc_RNA (1)...(19): siRNA sense strand
cgacuauucuugcaagugu

SEQ ID NO: 513050 - RNA, 19 nt, Homo sapiens
  misc_RNA (1)...(19): siRNA sense strand
gacugugggucuugcauuu

SEQ ID NO: 513051 - RNA, 19 nt, Homo sapiens
  misc_RNA (1)...(19): siRNA sense strand
aagaaagcgucaugauauu

SEQ ID NO: 513052 - RNA, 19 nt, Homo sapiens
  misc_RNA (1)...(19): siRNA sense strand
gaacaugagaaauacauag

SEQ ID NO: 513053 - RNA, 19 nt, Homo sapiens
  misc_RNA (1)...(19): siRNA sense strand
ccaaagagccagagcaaca

SEQ ID NO: 513054 - RNA, 19 nt, Homo sapiens
  misc_RNA (1)...(19): siRNA sense strand
ucugaggaauguaccaaua

SEQ ID NO: 513055 - RNA, 19 nt, Homo sapiens
  misc_RNA (1)...(19): siRNA sense strand
uaucauauccacuccaauu

SEQ ID NO: 513056 - RNA, 19 nt, Homo sapiens
  misc_RNA (1)...(19): siRNA sense strand
caauaugugugauggacaa

SEQ ID NO: 513057 - RNA, 19 nt, Homo sapiens
  misc_RNA (1)...(19): siRNA sense strand
ggccuuaguugguauggaa

SEQ ID NO: 513058 - RNA, 19 nt, Homo sapiens
  misc_RNA (1)...(19): siRNA sense strand
ucagaaagaggguauuuga

SEQ ID NO: 513059 - RNA, 19 nt, Homo sapiens
  misc_RNA (1)...(19): siRNA sense strand
gaucagaaagaggguauuu

SEQ ID NO: 513060 - RNA, 19 nt, Homo sapiens
  misc_RNA (1)...(19): siRNA sense strand
ggacugacaaggauaagau

SEQ ID NO: 513061 - RNA, 19 nt, Homo sapiens
  misc_RNA (1)...(19): siRNA sense strand
ccacaagcccacaaauuau

SEQ ID NO: 513062 - RNA, 19 nt, Homo sapiens
  misc_RNA (1)...(19): siRNA sense strand
cgaccugccugaaaugugu

SEQ ID NO: 513063 - RNA, 19 nt, Homo sapiens
  misc_RNA (1)...(19): siRNA sense strand
ggccacaacuuuggaaugu

SEQ ID NO: 513064 - RNA, 19 nt, Homo sapiens
  misc_RNA (1)...(19): siRNA sense strand
ugagauggcuaauuauguc

SEQ ID NO: 513065 - RNA, 19 nt, Homo sapiens
  misc_RNA (1)...(19): siRNA sense strand
acaaugagaaucaagauga

SEQ ID NO: 513066 - RNA, 19 nt, Homo sapiens
  misc_RNA (1)...(19): siRNA sense strand
gcuacacggaaacauauua

SEQ ID NO: 513067 - RNA, 19 nt, Homo sapiens
  misc_RNA (1)...(19): siRNA sense strand
agaaagaggguauuugaga

SEQ ID NO: 513068 - RNA, 19 nt, Homo sapiens
  misc_RNA (1)...(19): siRNA sense strand
accacaagcccacaaauua

SEQ ID NO: 513069 - RNA, 19 nt, Homo sapiens
  misc_RNA (1)...(19): siRNA sense strand
gaggaauguaccaauauuu

SEQ ID NO: 513070 - RNA, 19 nt, Homo sapiens
  misc_RNA (1)...(19): siRNA sense strand
cauauccacuccaauuugu

SEQ ID NO: 513071 - RNA, 19 nt, Homo sapiens
  misc_RNA (1)...(19): siRNA sense strand
guauggaaaucuggacuga

SEQ ID NO: 513072 - RNA, 19 nt, Homo sapiens
  misc_RNA (1)...(19): siRNA sense strand
caagaugagaucagaaaga

SEQ ID NO: 513073 - RNA, 19 nt, Homo sapiens
  misc_RNA (1)...(19): siRNA sense strand
gcaacaggaacaauuugaa

SEQ ID NO: 513074 - RNA, 19 nt, Homo sapiens
  misc_RNA (1)...(19): siRNA sense strand
gcagccgucucagcuauga

SEQ ID NO: 513075 - RNA, 19 nt, Homo sapiens
  misc_RNA (1)...(19): siRNA sense strand
gucaugauauugcucaguu

SEQ ID NO: 513076 - RNA, 19 nt, Homo sapiens
  misc_RNA (1)...(19): siRNA sense strand
ccaccaaacuaguaaaauu

SEQ ID NO: 513077 - RNA, 19 nt, Homo sapiens
  misc_RNA (1)...(19): siRNA sense strand
cacaaauuauggaugauug

SEQ ID NO: 513078 - RNA, 19 nt, Homo sapiens
  misc_RNA (1)...(19): siRNA sense strand
ggaacaugagaaauacaua

SEQ ID NO: 513079 - RNA, 19 nt, Homo sapiens
  misc_RNA (1)...(19): siRNA sense strand
uaauuguccugaugauaga

SEQ ID NO: 513080 - RNA, 19 nt, Homo sapiens
  misc_RNA (1)...(19): siRNA sense strand
ugguaaaucugguaauugu

SEQ ID NO: 513081 - RNA, 19 nt, Homo sapiens
  misc_RNA (1)...(19): siRNA sense strand
ccuccucucuguugcagua

SEQ ID NO: 513082 - RNA, 19 nt, Homo sapiens
  misc_RNA (1)...(19): siRNA sense strand
ugacaaggauaagauaaag

SEQ ID NO: 513083 - RNA, 19 nt, Homo sapiens
  misc_RNA (1)...(19): siRNA sense strand
gcuagcaucagcacaugua

SEQ ID NO: 513084 - RNA, 19 nt, Homo sapiens
  misc_RNA (1)...(19): siRNA sense strand
gaagggccacugcuugaug

SEQ ID NO: 513085 - RNA, 19 nt, Homo sapiens
  misc_RNA (1)...(19): siRNA sense strand
uuaggagaauguugugaaa

SEQ ID NO: 513086 - RNA, 19 nt, Homo sapiens
  misc_RNA (1)...(19): siRNA sense strand
ggacaauggcacaugaaau

SEQ ID NO: 513087 - RNA, 19 nt, Homo sapiens
  misc_RNA (1)...(19): siRNA sense strand
cauguggccuuaguuggua

SEQ ID NO: 513088 - RNA, 19 nt, Homo sapiens
  misc_RNA (1)...(19): siRNA sense strand
agcaugcacucuucaagua

SEQ ID NO: 513089 - RNA, 19 nt, Homo sapiens
  misc_RNA (1)...(19): siRNA sense strand
uugcagugcuuuauuugaa

SEQ ID NO: 513090 - RNA, 19 nt, Homo sapiens
  misc_RNA (1)...(19): siRNA sense strand
acaauguguucuccuuauu

SEQ ID NO: 513091 - RNA, 19 nt, Homo sapiens
  misc_RNA (1)...(19): siRNA sense strand
ucaaguauaacccugauga

SEQ ID NO: 513092 - RNA, 19 nt, Homo sapiens
  misc_RNA (1)...(19): siRNA sense strand
ggaaaggagaucaccacaa

SEQ ID NO: 513093 - RNA, 19 nt, Homo sapiens
  misc_RNA (1)...(19): siRNA sense strand
ugggauggaugguguguug

SEQ ID NO: 513094 - RNA, 19 nt, Homo sapiens
  misc_RNA (1)...(19): siRNA sense strand
gggaagggccacugcuuga

SEQ ID NO: 513095 - RNA, 19 nt, Homo sapiens
  misc_RNA (1)...(19): siRNA sense strand
ucaugauauugcucaguua

SEQ ID NO: 513096 - RNA, 19 nt, Homo sapiens
  misc_RNA (1)...(19): siRNA sense strand
cagggacaauggcacauga

SEQ ID NO: 513097 - RNA, 19 nt, Homo sapiens
  misc_RNA (1)...(19): siRNA sense strand
uacaauguguucuccuuau

SEQ ID NO: 513098 - RNA, 19 nt, Homo sapiens
  misc_RNA (1)...(19): siRNA sense strand
gaauguuucaugacgacua

SEQ ID NO: 513099 - RNA, 19 nt, Homo sapiens
  misc_RNA (1)...(19): siRNA sense strand
gaccacagcgauaaucuuc

SEQ ID NO: 513100 - RNA, 19 nt, Homo sapiens
  misc_RNA (1)...(19): siRNA sense strand
gagcaacaggaacaauuug

SEQ ID NO: 513101 - RNA, 19 nt, Homo sapiens
  misc_RNA (1)...(19): siRNA sense strand
aggaacaauuugaaacuga

SEQ ID NO: 513102 - RNA, 19 nt, Homo sapiens
  misc_RNA (1)...(19): siRNA sense strand
agaaguaugaagugguuua

SEQ ID NO: 513103 - RNA, 19 nt, Homo sapiens
  misc_RNA (1)...(19): siRNA sense strand
caaggucuccugccaguca

SEQ ID NO: 513104 - RNA, 19 nt, Homo sapiens
  misc_RNA (1)...(19): siRNA sense strand
ugauauugcucaguuaauc

SEQ ID NO: 513105 - RNA, 19 nt, Homo sapiens
  misc_RNA (1)...(19): siRNA sense strand
gagcaugcacucuucaagu

SEQ ID NO: 513106 - RNA, 19 nt, Homo sapiens
  misc_RNA (1)...(19): siRNA sense strand
aauauuugcugugaugcua

SEQ ID NO: 513107 - RNA, 19 nt, Homo sapiens
  misc_RNA (1)...(19): siRNA sense strand
ggaaaugggagaggacugu

SEQ ID NO: 513108 - RNA, 19 nt, Homo sapiens
  misc_RNA (1)...(19): siRNA sense strand
cagcgauaaucuucuuaga

SEQ ID NO: 513109 - RNA, 19 nt, Homo sapiens
  misc_RNA (1)...(19): siRNA sense strand
guucaggaccacagcgaua

SEQ ID NO: 513110 - RNA, 19 nt, Homo sapiens
  misc_RNA (1)...(19): siRNA sense strand
guuaaucacagcaacagaa

SEQ ID NO: 513111 - RNA, 19 nt, Homo sapiens
  misc_RNA (1)...(19): siRNA sense strand
aaagguacaaugagaauca

SEQ ID NO: 513112 - RNA, 19 nt, Homo sapiens
  misc_RNA (1)...(19): siRNA sense strand
gguaauuguccugaugaua

SEQ ID NO: 513113 - RNA, 19 nt, Homo sapiens
  misc_RNA (1)...(19): siRNA sense strand
guaaugguaaaucugguaa

SEQ ID NO: 513114 - RNA, 19 nt, Homo sapiens
  misc_RNA (1)...(19): siRNA sense strand
caauacucauguggccuua

SEQ ID NO: 513115 - RNA, 19 nt, Homo sapiens
  misc_RNA (1)...(19): siRNA sense strand
gcacugagcuucuauauac

SEQ ID NO: 513116 - RNA, 19 nt, Homo sapiens
  misc_RNA (1)...(19): siRNA sense strand
gaagaaagcgucaugauau

SEQ ID NO: 513117 - RNA, 19 nt, Homo sapiens
  misc_RNA (1)...(19): siRNA sense strand
gaaaggagaucaccacaag

SEQ ID NO: 513118 - RNA, 19 nt, Homo sapiens
  misc_RNA (1)...(19): siRNA sense strand
gaagaaguaugaagugguu

SEQ ID NO: 513119 - RNA, 19 nt, Homo sapiens
  misc_RNA (1)...(19): siRNA sense strand
gaugauagauuccaaguca

SEQ ID NO: 513120 - RNA, 19 nt, Homo sapiens
  misc_RNA (1)...(19): siRNA sense strand
caaguguccuucuacaaua

SEQ ID NO: 513121 - RNA, 19 nt, Homo sapiens
  misc_RNA (1)...(19): siRNA sense strand
gaaagaggguauuugagau

SEQ ID NO: 513122 - RNA, 19 nt, Homo sapiens
  misc_RNA (1)...(19): siRNA sense strand
ccacaacuuuggaauguuu

SEQ ID NO: 513123 - RNA, 19 nt, Homo sapiens
  misc_RNA (1)...(19): siRNA sense strand
caaauugccucuuuaaugc

SEQ ID NO: 513124 - RNA, 19 nt, Homo sapiens
  misc_RNA (1)...(19): siRNA sense strand
gcgauaaucuucuuagagu

SEQ ID NO: 513125 - RNA, 19 nt, Homo sapiens
  misc_RNA (1)...(19): siRNA sense strand
gaaaugggccacaacuuug

SEQ ID NO: 513126 - RNA, 19 nt, Homo sapiens
  misc_RNA (1)...(19): siRNA sense strand
ugaagugguuuauccuaua

SEQ ID NO: 513127 - RNA, 19 nt, Homo sapiens
  misc_RNA (1)...(19): siRNA sense strand
gcaccaggcuacacggaaa

SEQ ID NO: 513128 - RNA, 19 nt, Homo sapiens
  misc_RNA (1)...(19): siRNA sense strand
ggaacaauuugaaacugaa

SEQ ID NO: 513129 - RNA, 19 nt, Homo sapiens
  misc_RNA (1)...(19): siRNA sense strand
ccugaaauguguaauggua

SEQ ID NO: 513130 - RNA, 19 nt, Homo sapiens
  misc_RNA (1)...(19): siRNA sense strand
gaaucaagaugagaucaga

SEQ ID NO: 513131 - RNA, 19 nt, Homo sapiens
  misc_RNA (1)...(19): siRNA sense strand
ugaaaugggccacaacuuu

SEQ ID NO: 513132 - RNA, 19 nt, Homo sapiens
  misc_RNA (1)...(19): siRNA sense strand
gcccacaaauuauggauga

SEQ ID NO: 513133 - RNA, 19 nt, Homo sapiens
  misc_RNA (1)...(19): siRNA sense strand
gcaaguguccuucuacaau

SEQ ID NO: 513134 - RNA, 19 nt, Homo sapiens
  misc_RNA (1)...(19): siRNA sense strand
ucaaauugccucuuuaaug

SEQ ID NO: 513135 - RNA, 19 nt, Homo sapiens
  misc_RNA (1)...(19): siRNA sense strand
gacaauggcacaugaaaug

SEQ ID NO: 513136 - RNA, 19 nt, Homo sapiens
  misc_RNA (1)...(19): siRNA sense strand
guaccaauauuugcuguga

SEQ ID NO: 513137 - RNA, 19 nt, Homo sapiens
  misc_RNA (1)...(19): siRNA sense strand
caacaggaacaauuugaaa

SEQ ID NO: 513138 - RNA, 19 nt, Homo sapiens
  misc_RNA (1)...(19): siRNA sense strand
ggauaauggugaguuuaaa

SEQ ID NO: 513139 - RNA, 19 nt, Homo sapiens
  misc_RNA (1)...(19): siRNA sense strand
ccacagcgauaaucuucuu

SEQ ID NO: 513140 - RNA, 19 nt, Homo sapiens
  misc_RNA (1)...(19): siRNA sense strand
ggagaggacugugauugug

SEQ ID NO: 513141 - RNA, 19 nt, Homo sapiens
  misc_RNA (1)...(19): siRNA sense strand
ucucagcuaugacaaguuu

SEQ ID NO: 513142 - RNA, 19 nt, Homo sapiens
  misc_RNA (1)...(19): siRNA sense strand
agaagaaagcgucaugaua

SEQ ID NO: 513143 - RNA, 19 nt, Homo sapiens
  misc_RNA (1)...(19): siRNA sense strand
gauaaucuucuuagaguug

SEQ ID NO: 513144 - RNA, 19 nt, Homo sapiens
  misc_RNA (1)...(19): siRNA sense strand
ggucuugcauuuaugucua

SEQ ID NO: 513145 - RNA, 19 nt, Homo sapiens
  misc_RNA (1)...(19): siRNA sense strand
caugcacucuucaaguaua

SEQ ID NO: 513146 - RNA, 19 nt, Homo sapiens
  misc_RNA (1)...(19): siRNA sense strand
guaauuguccugaugauag

SEQ ID NO: 513147 - RNA, 19 nt, Homo sapiens
  misc_RNA (1)...(19): siRNA sense strand
gcuaagacauguaaaauca

SEQ ID NO: 513148 - RNA, 19 nt, Homo sapiens
  misc_RNA (1)...(19): siRNA sense strand
ugaggaauguaccaauauu

SEQ ID NO: 513149 - RNA, 19 nt, Homo sapiens
  misc_RNA (1)...(19): siRNA sense strand
cgacuauucuugcaagugu

SEQ ID NO: 513150 - RNA, 19 nt, Homo sapiens
  misc_RNA (1)...(19): siRNA sense strand
gacugugggucuugcauuu

SEQ ID NO: 513151 - RNA, 19 nt, Homo sapiens
  misc_RNA (1)...(19): siRNA sense strand
aagaaagcgucaugauauu

SEQ ID NO: 513152 - RNA, 19 nt, Homo sapiens
  misc_RNA (1)...(19): siRNA sense strand
gaacaugagaaauacauag

SEQ ID NO: 513153 - RNA, 19 nt, Homo sapiens
  misc_RNA (1)...(19): siRNA sense strand
ccaaagagccagagcaaca

SEQ ID NO: 513154 - RNA, 19 nt, Homo sapiens
  misc_RNA (1)...(19): siRNA sense strand
ucugaggaauguaccaaua

SEQ ID NO: 513155 - RNA, 19 nt, Homo sapiens
  misc_RNA (1)...(19): siRNA sense strand
uaucauauccacuccaauu

SEQ ID NO: 513156 - RNA, 19 nt, Homo sapiens
  misc_RNA (1)...(19): siRNA sense strand
caauaugugugauggacaa

SEQ ID NO: 513157 - RNA, 19 nt, Homo sapiens
  misc_RNA (1)...(19): siRNA sense strand
ggccuuaguugguauggaa

SEQ ID NO: 513158 - RNA, 19 nt, Homo sapiens
  misc_RNA (1)...(19): siRNA sense strand
ucagaaagaggguauuuga

SEQ ID NO: 513159 - RNA, 19 nt, Homo sapiens
  misc_RNA (1)...(19): siRNA sense strand
gaucagaaagaggguauuu

SEQ ID NO: 513160 - RNA, 19 nt, Homo sapiens
  misc_RNA (1)...(19): siRNA sense strand
ggacugacaaggauaagau

SEQ ID NO: 513161 - RNA, 19 nt, Homo sapiens
  misc_RNA (1)...(19): siRNA sense strand
ccacaagcccacaaauuau

SEQ ID NO: 513162 - RNA, 19 nt, Homo sapiens
  misc_RNA (1)...(19): siRNA sense strand
cgaccugccugaaaugugu

SEQ ID NO: 513163 - RNA, 19 nt, Homo sapiens
  misc_RNA (1)...(19): siRNA sense strand
ggccacaacuuuggaaugu

SEQ ID NO: 513164 - RNA, 19 nt, Homo sapiens
  misc_RNA (1)...(19): siRNA sense strand
ugagauggcuaauuauguc

SEQ ID NO: 513165 - RNA, 19 nt, Homo sapiens
  misc_RNA (1)...(19): siRNA sense strand
acaaugagaaucaagauga

SEQ ID NO: 513166 - RNA, 19 nt, Homo sapiens
  misc_RNA (1)...(19): siRNA sense strand
gcuacacggaaacauauua

SEQ ID NO: 513167 - RNA, 19 nt, Homo sapiens
  misc_RNA (1)...(19): siRNA sense strand
agaaagaggguauuugaga

SEQ ID NO: 513168 - RNA, 19 nt, Homo sapiens
  misc_RNA (1)...(19): siRNA sense strand
accacaagcccacaaauua

SEQ ID NO: 513169 - RNA, 19 nt, Homo sapiens
  misc_RNA (1)...(19): siRNA sense strand
gaggaauguaccaauauuu

SEQ ID NO: 513170 - RNA, 19 nt, Homo sapiens
  misc_RNA (1)...(19): siRNA sense strand
cauauccacuccaauuugu

SEQ ID NO: 513171 - RNA, 19 nt, Homo sapiens
  misc_RNA (1)...(19): siRNA sense strand
guauggaaaucuggacuga

SEQ ID NO: 513172 - RNA, 19 nt, Homo sapiens
  misc_RNA (1)...(19): siRNA sense strand
caagaugagaucagaaaga

SEQ ID NO: 513173 - RNA, 19 nt, Homo sapiens
  misc_RNA (1)...(19): siRNA sense strand
gcaacaggaacaauuugaa

SEQ ID NO: 513174 - RNA, 19 nt, Homo sapiens
  misc_RNA (1)...(19): siRNA sense strand
gcagccgucucagcuauga

SEQ ID NO: 513175 - RNA, 19 nt, Homo sapiens
  misc_RNA (1)...(19): siRNA sense strand
gucaugauauugcucaguu

SEQ ID NO: 513176 - RNA, 19 nt, Homo sapiens
  misc_RNA (1)...(19): siRNA sense strand
ccaccaaacuaguaaaauu

SEQ ID NO: 513177 - RNA, 19 nt, Homo sapiens
  misc_RNA (1)...(19): siRNA sense strand
cacaaauuauggaugauug

SEQ ID NO: 513178 - RNA, 19 nt, Homo sapiens
  misc_RNA (1)...(19): siRNA sense strand
ggaacaugagaaauacaua

SEQ ID NO: 513179 - RNA, 19 nt, Homo sapiens
  misc_RNA (1)...(19): siRNA sense strand
uaauuguccugaugauaga

SEQ ID NO: 513180 - RNA, 19 nt, Homo sapiens
  misc_RNA (1)...(19): siRNA sense strand
ugguaaaucugguaauugu

SEQ ID NO: 513181 - RNA, 19 nt, Homo sapiens
  misc_RNA (1)...(19): siRNA sense strand
ccuccucucuguugcagua

SEQ ID NO: 513182 - RNA, 19 nt, Homo sapiens
  misc_RNA (1)...(19): siRNA sense strand
ugacaaggauaagauaaag

SEQ ID NO: 513183 - RNA, 19 nt, Homo sapiens
  misc_RNA (1)...(19): siRNA sense strand
gcuagcaucagcacaugua

SEQ ID NO: 513184 - RNA, 19 nt, Homo sapiens
  misc_RNA (1)...(19): siRNA sense strand
gaagggccacugcuugaug

SEQ ID NO: 513185 - RNA, 19 nt, Homo sapiens
  misc_RNA (1)...(19): siRNA sense strand
uuaggagaauguugugaaa

SEQ ID NO: 513186 - RNA, 19 nt, Homo sapiens
  misc_RNA (1)...(19): siRNA sense strand
ggacaauggcacaugaaau

SEQ ID NO: 513187 - RNA, 19 nt, Homo sapiens
  misc_RNA (1)...(19): siRNA sense strand
cauguggccuuaguuggua

SEQ ID NO: 513188 - RNA, 19 nt, Homo sapiens
  misc_RNA (1)...(19): siRNA sense strand
agcaugcacucuucaagua

SEQ ID NO: 513189 - RNA, 19 nt, Homo sapiens
  misc_RNA (1)...(19): siRNA sense strand
uugcagugcuuuauuugaa

SEQ ID NO: 513190 - RNA, 19 nt, Homo sapiens
  misc_RNA (1)...(19): siRNA sense strand
acaauguguucuccuuauu

SEQ ID NO: 513191 - RNA, 19 nt, Homo sapiens
  misc_RNA (1)...(19): siRNA sense strand
ucaaguauaacccugauga

SEQ ID NO: 513192 - RNA, 19 nt, Homo sapiens
  misc_RNA (1)...(19): siRNA sense strand
ggaaaggagaucaccacaa

SEQ ID NO: 513193 - RNA, 19 nt, Homo sapiens
  misc_RNA (1)...(19): siRNA sense strand
ugggauggaugguguguug

SEQ ID NO: 513194 - RNA, 19 nt, Homo sapiens
  misc_RNA (1)...(19): siRNA sense strand
gggaagggccacugcuuga

SEQ ID NO: 513195 - RNA, 19 nt, Homo sapiens
  misc_RNA (1)...(19): siRNA sense strand
ucaugauauugcucaguua

SEQ ID NO: 513196 - RNA, 19 nt, Homo sapiens
  misc_RNA (1)...(19): siRNA sense strand
cagggacaauggcacauga

SEQ ID NO: 513197 - RNA, 19 nt, Homo sapiens
  misc_RNA (1)...(19): siRNA sense strand
uacaauguguucuccuuau

SEQ ID NO: 513198 - RNA, 19 nt, Homo sapiens
  misc_RNA (1)...(19): siRNA sense strand
gaauguuucaugacgacua

SEQ ID NO: 513199 - RNA, 19 nt, Homo sapiens
  misc_RNA (1)...(19): siRNA sense strand
gaccacagcgauaaucuuc

SEQ ID NO: 513200 - RNA, 19 nt, Homo sapiens
  misc_RNA (1)...(19): siRNA sense strand
gagcaacaggaacaauuug

SEQ ID NO: 513201 - RNA, 19 nt, Homo sapiens
  misc_RNA (1)...(19): siRNA sense strand
aggaacaauuugaaacuga

SEQ ID NO: 513202 - RNA, 19 nt, Homo sapiens
  misc_RNA (1)...(19): siRNA sense strand
agaaguaugaagugguuua

SEQ ID NO: 513203 - RNA, 19 nt, Homo sapiens
  misc_RNA (1)...(19): siRNA sense strand
caaggucuccugccaguca

SEQ ID NO: 513204 - RNA, 19 nt, Homo sapiens
  misc_RNA (1)...(19): siRNA sense strand
ugauauugcucaguuaauc

SEQ ID NO: 513205 - RNA, 19 nt, Homo sapiens
  misc_RNA (1)...(19): siRNA sense strand
gagcaugcacucuucaagu

SEQ ID NO: 513206 - RNA, 19 nt, Homo sapiens
  misc_RNA (1)...(19): siRNA sense strand
aauauuugcugugaugcua

SEQ ID NO: 513207 - RNA, 19 nt, Homo sapiens
  misc_RNA (1)...(19): siRNA sense strand
ggaaaugggagaggacugu

SEQ ID NO: 513208 - RNA, 19 nt, Homo sapiens
  misc_RNA (1)...(19): siRNA sense strand
cagcgauaaucuucuuaga

SEQ ID NO: 513209 - RNA, 19 nt, Homo sapiens
  misc_RNA (1)...(19): siRNA sense strand
guucaggaccacagcgaua

SEQ ID NO: 513210 - RNA, 19 nt, Homo sapiens
  misc_RNA (1)...(19): siRNA sense strand
guuaaucacagcaacagaa

SEQ ID NO: 513211 - RNA, 19 nt, Homo sapiens
  misc_RNA (1)...(19): siRNA sense strand
aaagguacaaugagaauca

SEQ ID NO: 513212 - RNA, 19 nt, Homo sapiens
  misc_RNA (1)...(19): siRNA sense strand
gguaauuguccugaugaua

SEQ ID NO: 513213 - RNA, 19 nt, Homo sapiens
  misc_RNA (1)...(19): siRNA sense strand
guaaugguaaaucugguaa

SEQ ID NO: 513214 - RNA, 19 nt, Homo sapiens
  misc_RNA (1)...(19): siRNA sense strand
caauacucauguggccuua

SEQ ID NO: 513215 - RNA, 19 nt, Homo sapiens
  misc_RNA (1)...(19): siRNA sense strand
gcacugagcuucuauauac

SEQ ID NO: 513216 - RNA, 19 nt, Homo sapiens
  misc_RNA (1)...(19): siRNA sense strand
gaagaaagcgucaugauau

SEQ ID NO: 513217 - RNA, 19 nt, Homo sapiens
  misc_RNA (1)...(19): siRNA sense strand
gaaaggagaucaccacaag

SEQ ID NO: 513218 - RNA, 19 nt, Homo sapiens
  misc_RNA (1)...(19): siRNA sense strand
gaagaaguaugaagugguu

SEQ ID NO: 513219 - RNA, 19 nt, Homo sapiens
  misc_RNA (1)...(19): siRNA sense strand
gaugauagauuccaaguca

SEQ ID NO: 513220 - RNA, 19 nt, Homo sapiens
  misc_RNA (1)...(19): siRNA sense strand
caaguguccuucuacaaua

SEQ ID NO: 513221 - RNA, 19 nt, Homo sapiens
  misc_RNA (1)...(19): siRNA sense strand
gaaagaggguauuugagau

SEQ ID NO: 513222 - RNA, 19 nt, Homo sapiens
  misc_RNA (1)...(19): siRNA sense strand
ccacaacuuuggaauguuu

SEQ ID NO: 513223 - RNA, 19 nt, Homo sapiens
  misc_RNA (1)...(19): siRNA sense strand
caaauugccucuuuaaugc

SEQ ID NO: 513224 - RNA, 19 nt, Homo sapiens
  misc_RNA (1)...(19): siRNA sense strand
gcgauaaucuucuuagagu

SEQ ID NO: 513225 - RNA, 19 nt, Homo sapiens
  misc_RNA (1)...(19): siRNA sense strand
gaaaugggccacaacuuug

SEQ ID NO: 513226 - RNA, 19 nt, Homo sapiens
  misc_RNA (1)...(19): siRNA sense strand
ugaagugguuuauccuaua

SEQ ID NO: 513227 - RNA, 19 nt, Homo sapiens
  misc_RNA (1)...(19): siRNA sense strand
gcaccaggcuacacggaaa

SEQ ID NO: 513228 - RNA, 19 nt, Homo sapiens
  misc_RNA (1)...(19): siRNA sense strand
ggaacaauuugaaacugaa

SEQ ID NO: 513229 - RNA, 19 nt, Homo sapiens
  misc_RNA (1)...(19): siRNA sense strand
ccugaaauguguaauggua

SEQ ID NO: 513230 - RNA, 19 nt, Homo sapiens
  misc_RNA (1)...(19): siRNA sense strand
gaaucaagaugagaucaga

SEQ ID NO: 513231 - RNA, 19 nt, Homo sapiens
  misc_RNA (1)...(19): siRNA sense strand
ugaaaugggccacaacuuu

SEQ ID NO: 513232 - RNA, 19 nt, Homo sapiens
  misc_RNA (1)...(19): siRNA sense strand
gcccacaaauuauggauga

SEQ ID NO: 513233 - RNA, 19 nt, Homo sapiens
  misc_RNA (1)...(19): siRNA sense strand
gcaaguguccuucuacaau

SEQ ID NO: 513234 - RNA, 19 nt, Homo sapiens
  misc_RNA (1)...(19): siRNA sense strand
ucaaauugccucuuuaaug

SEQ ID NO: 513235 - RNA, 19 nt, Homo sapiens
  misc_RNA (1)...(19): siRNA sense strand
gacaauggcacaugaaaug

SEQ ID NO: 513236 - RNA, 19 nt, Homo sapiens
  misc_RNA (1)...(19): siRNA sense strand
guaccaauauuugcuguga

SEQ ID NO: 513237 - RNA, 19 nt, Homo sapiens
  misc_RNA (1)...(19): siRNA sense strand
caacaggaacaauuugaaa

SEQ ID NO: 513238 - RNA, 19 nt, Homo sapiens
  misc_RNA (1)...(19): siRNA sense strand
ggauaauggugaguuuaaa

SEQ ID NO: 513239 - RNA, 19 nt, Homo sapiens
  misc_RNA (1)...(19): siRNA sense strand
ccacagcgauaaucuucuu

SEQ ID NO: 513240 - RNA, 19 nt, Homo sapiens
  misc_RNA (1)...(19): siRNA sense strand
ggagaggacugugauugug

SEQ ID NO: 513241 - RNA, 19 nt, Homo sapiens
  misc_RNA (1)...(19): siRNA sense strand
ucucagcuaugacaaguuu

SEQ ID NO: 513242 - RNA, 19 nt, Homo sapiens
  misc_RNA (1)...(19): siRNA sense strand
agaagaaagcgucaugaua

SEQ ID NO: 513243 - RNA, 19 nt, Homo sapiens
  misc_RNA (1)...(19): siRNA sense strand
gauaaucuucuuagaguug

SEQ ID NO: 513244 - RNA, 19 nt, Homo sapiens
  misc_RNA (1)...(19): siRNA sense strand
ggucuugcauuuaugucua

SEQ ID NO: 513245 - RNA, 19 nt, Homo sapiens
  misc_RNA (1)...(19): siRNA sense strand
caugcacucuucaaguaua

SEQ ID NO: 513246 - RNA, 19 nt, Homo sapiens
  misc_RNA (1)...(19): siRNA sense strand
guaauuguccugaugauag

SEQ ID NO: 513247 - RNA, 19 nt, Homo sapiens
  misc_RNA (1)...(19): siRNA sense strand
gcuaagacauguaaaauca

SEQ ID NO: 513248 - RNA, 19 nt, Homo sapiens
  misc_RNA (1)...(19): siRNA sense strand
ugaggaauguaccaauauu

SEQ ID NO: 513249 - RNA, 19 nt, Homo sapiens
  misc_RNA (1)...(19): siRNA sense strand
cgacuauucuugcaagugu

SEQ ID NO: 513250 - RNA, 19 nt, Homo sapiens
  misc_RNA (1)...(19): siRNA sense strand
gacugugggucuugcauuu

SEQ ID NO: 513251 - RNA, 19 nt, Homo sapiens
  misc_RNA (1)...(19): siRNA sense strand
aagaaagcgucaugauauu

SEQ ID NO: 513252 - RNA, 19 nt, Homo sapiens
  misc_RNA (1)...(19): siRNA sense strand
gaacaugagaaauacauag

SEQ ID NO: 513253 - RNA, 19 nt, Homo sapiens
  misc_RNA (1)...(19): siRNA sense strand
ccaaagagccagagcaaca

SEQ ID NO: 513254 - RNA, 19 nt, Homo sapiens
  misc_RNA (1)...(19): siRNA sense strand
ucugaggaauguaccaaua

SEQ ID NO: 513255 - RNA, 19 nt, Homo sapiens
  misc_RNA (1)...(19): siRNA sense strand
uaucauauccacuccaauu

SEQ ID NO: 513256 - RNA, 19 nt, Homo sapiens
  misc_RNA (1)...(19): siRNA sense strand
caauaugugugauggacaa

SEQ ID NO: 513257 - RNA, 19 nt, Homo sapiens
  misc_RNA (1)...(19): siRNA sense strand
ggccuuaguugguauggaa

SEQ ID NO: 513258 - RNA, 19 nt, Homo sapiens
  misc_RNA (1)...(19): siRNA sense strand
ucagaaagaggguauuuga

SEQ ID NO: 513259 - RNA, 19 nt, Homo sapiens
  misc_RNA (1)...(19): siRNA sense strand
gaucagaaagaggguauuu

SEQ ID NO: 513260 - RNA, 19 nt, Homo sapiens
  misc_RNA (1)...(19): siRNA sense strand
ggacugacaaggauaagau

SEQ ID NO: 513261 - RNA, 19 nt, Homo sapiens
  misc_RNA (1)...(19): siRNA sense strand
ccacaagcccacaaauuau

SEQ ID NO: 513262 - RNA, 19 nt, Homo sapiens
  misc_RNA (1)...(19): siRNA sense strand
cgaccugccugaaaugugu

SEQ ID NO: 513263 - RNA, 19 nt, Homo sapiens
  misc_RNA (1)...(19): siRNA sense strand
ggccacaacuuuggaaugu

SEQ ID NO: 513264 - RNA, 19 nt, Homo sapiens
  misc_RNA (1)...(19): siRNA sense strand
ugagauggcuaauuauguc

SEQ ID NO: 513265 - RNA, 19 nt, Homo sapiens
  misc_RNA (1)...(19): siRNA sense strand
acaaugagaaucaagauga

SEQ ID NO: 513266 - RNA, 19 nt, Homo sapiens
  misc_RNA (1)...(19): siRNA sense strand
gcuacacggaaacauauua

SEQ ID NO: 513267 - RNA, 19 nt, Homo sapiens
  misc_RNA (1)...(19): siRNA sense strand
agaaagaggguauuugaga

SEQ ID NO: 513268 - RNA, 19 nt, Homo sapiens
  misc_RNA (1)...(19): siRNA sense strand
accacaagcccacaaauua

SEQ ID NO: 513269 - RNA, 19 nt, Homo sapiens
  misc_RNA (1)...(19): siRNA sense strand
gaggaauguaccaauauuu

SEQ ID NO: 513270 - RNA, 19 nt, Homo sapiens
  misc_RNA (1)...(19): siRNA sense strand
cauauccacuccaauuugu

SEQ ID NO: 513271 - RNA, 19 nt, Homo sapiens
  misc_RNA (1)...(19): siRNA sense strand
guauggaaaucuggacuga

SEQ ID NO: 513272 - RNA, 19 nt, Homo sapiens
  misc_RNA (1)...(19): siRNA sense strand
caagaugagaucagaaaga

SEQ ID NO: 513273 - RNA, 19 nt, Homo sapiens
  misc_RNA (1)...(19): siRNA sense strand
gcaacaggaacaauuugaa

SEQ ID NO: 513274 - RNA, 19 nt, Homo sapiens
  misc_RNA (1)...(19): siRNA sense strand
gcagccgucucagcuauga

SEQ ID NO: 513275 - RNA, 19 nt, Homo sapiens
  misc_RNA (1)...(19): siRNA sense strand
gucaugauauugcucaguu

SEQ ID NO: 513276 - RNA, 19 nt, Homo sapiens
  misc_RNA (1)...(19): siRNA sense strand
ccaccaaacuaguaaaauu

SEQ ID NO: 513277 - RNA, 19 nt, Homo sapiens
  misc_RNA (1)...(19): siRNA sense strand
cacaaauuauggaugauug

SEQ ID NO: 513278 - RNA, 19 nt, Homo sapiens
  misc_RNA (1)...(19): siRNA sense strand
ggaacaugagaaauacaua

SEQ ID NO: 513279 - RNA, 19 nt, Homo sapiens
  misc_RNA (1)...(19): siRNA sense strand
uaauuguccugaugauaga

SEQ ID NO: 513280 - RNA, 19 nt, Homo sapiens
  misc_RNA (1)...(19): siRNA sense strand
ugguaaaucugguaauugu

SEQ ID NO: 513281 - RNA, 19 nt, Homo sapiens
  misc_RNA (1)...(19): siRNA sense strand
ccuccucucuguugcagua

SEQ ID NO: 513282 - RNA, 19 nt, Homo sapiens
  misc_RNA (1)...(19): siRNA sense strand
ugacaaggauaagauaaag

SEQ ID NO: 513283 - RNA, 19 nt, Homo sapiens
  misc_RNA (1)...(19): siRNA sense strand
gcuagcaucagcacaugua

SEQ ID NO: 513284 - RNA, 19 nt, Homo sapiens
  misc_RNA (1)...(19): siRNA sense strand
gaagggccacugcuugaug

SEQ ID NO: 513285 - RNA, 19 nt, Homo sapiens
  misc_RNA (1)...(19): siRNA sense strand
uuaggagaauguugugaaa

SEQ ID NO: 513286 - RNA, 19 nt, Homo sapiens
  misc_RNA (1)...(19): siRNA sense strand
ggacaauggcacaugaaau

SEQ ID NO: 513287 - RNA, 19 nt, Homo sapiens
  misc_RNA (1)...(19): siRNA sense strand
cauguggccuuaguuggua

SEQ ID NO: 513288 - RNA, 19 nt, Homo sapiens
  misc_RNA (1)...(19): siRNA sense strand
agcaugcacucuucaagua

SEQ ID NO: 513289 - RNA, 19 nt, Homo sapiens
  misc_RNA (1)...(19): siRNA sense strand
uugcagugcuuuauuugaa

SEQ ID NO: 513290 - RNA, 19 nt, Homo sapiens
  misc_RNA (1)...(19): siRNA sense strand
acaauguguucuccuuauu

SEQ ID NO: 513291 - RNA, 19 nt, Homo sapiens
  misc_RNA (1)...(19): siRNA sense strand
ucaaguauaacccugauga

SEQ ID NO: 513292 - RNA, 19 nt, Homo sapiens
  misc_RNA (1)...(19): siRNA sense strand
ggaaaggagaucaccacaa

SEQ ID NO: 513293 - RNA, 19 nt, Homo sapiens
  misc_RNA (1)...(19): siRNA sense strand
ugggauggaugguguguug

SEQ ID NO: 513294 - RNA, 19 nt, Homo sapiens
  misc_RNA (1)...(19): siRNA sense strand
gggaagggccacugcuuga

SEQ ID NO: 513295 - RNA, 19 nt, Homo sapiens
  misc_RNA (1)...(19): siRNA sense strand
ucaugauauugcucaguua

SEQ ID NO: 513296 - RNA, 19 nt, Homo sapiens
  misc_RNA (1)...(19): siRNA sense strand
cagggacaauggcacauga

SEQ ID NO: 513297 - RNA, 19 nt, Homo sapiens
  misc_RNA (1)...(19): siRNA sense strand
uacaauguguucuccuuau

SEQ ID NO: 513298 - RNA, 19 nt, Homo sapiens
  misc_RNA (1)...(19): siRNA sense strand
gaauguuucaugacgacua

SEQ ID NO: 513299 - RNA, 19 nt, Homo sapiens
  misc_RNA (1)...(19): siRNA sense strand
gaccacagcgauaaucuuc

SEQ ID NO: 513300 - RNA, 19 nt, Homo sapiens
  misc_RNA (1)...(19): siRNA sense strand
gagcaacaggaacaauuug

SEQ ID NO: 513301 - RNA, 19 nt, Homo sapiens
  misc_RNA (1)...(19): siRNA sense strand
aggaacaauuugaaacuga

SEQ ID NO: 513302 - RNA, 19 nt, Homo sapiens
  misc_RNA (1)...(19): siRNA sense strand
agaaguaugaagugguuua

SEQ ID NO: 513303 - RNA, 19 nt, Homo sapiens
  misc_RNA (1)...(19): siRNA sense strand
caaggucuccugccaguca

SEQ ID NO: 513304 - RNA, 19 nt, Homo sapiens
  misc_RNA (1)...(19): siRNA sense strand
ugauauugcucaguuaauc

SEQ ID NO: 513305 - RNA, 19 nt, Homo sapiens
  misc_RNA (1)...(19): siRNA sense strand
gagcaugcacucuucaagu

SEQ ID NO: 513306 - RNA, 19 nt, Homo sapiens
  misc_RNA (1)...(19): siRNA sense strand
aauauuugcugugaugcua

SEQ ID NO: 513307 - RNA, 19 nt, Homo sapiens
  misc_RNA (1)...(19): siRNA sense strand
ggaaaugggagaggacugu

SEQ ID NO: 513308 - RNA, 19 nt, Homo sapiens
  misc_RNA (1)...(19): siRNA sense strand
cagcgauaaucuucuuaga

SEQ ID NO: 513309 - RNA, 19 nt, Homo sapiens
  misc_RNA (1)...(19): siRNA sense strand
guucaggaccacagcgaua

SEQ ID NO: 513310 - RNA, 19 nt, Homo sapiens
  misc_RNA (1)...(19): siRNA sense strand
guuaaucacagcaacagaa

SEQ ID NO: 513311 - RNA, 19 nt, Homo sapiens
  misc_RNA (1)...(19): siRNA sense strand
aaagguacaaugagaauca

SEQ ID NO: 513312 - RNA, 19 nt, Homo sapiens
  misc_RNA (1)...(19): siRNA sense strand
gguaauuguccugaugaua

SEQ ID NO: 513313 - RNA, 19 nt, Homo sapiens
  misc_RNA (1)...(19): siRNA sense strand
guaaugguaaaucugguaa

SEQ ID NO: 513314 - RNA, 19 nt, Homo sapiens
  misc_RNA (1)...(19): siRNA sense strand
caauacucauguggccuua

SEQ ID NO: 513315 - RNA, 19 nt, Homo sapiens
  misc_RNA (1)...(19): siRNA sense strand
gcacugagcuucuauauac

SEQ ID NO: 513316 - RNA, 19 nt, Homo sapiens
  misc_RNA (1)...(19): siRNA sense strand
gaagaaagcgucaugauau

SEQ ID NO: 513317 - RNA, 19 nt, Homo sapiens
  misc_RNA (1)...(19): siRNA sense strand
gaaaggagaucaccacaag

SEQ ID NO: 513318 - RNA, 19 nt, Homo sapiens
  misc_RNA (1)...(19): siRNA sense strand
gaagaaguaugaagugguu

SEQ ID NO: 513319 - RNA, 19 nt, Homo sapiens
  misc_RNA (1)...(19): siRNA sense strand
gaugauagauuccaaguca

SEQ ID NO: 513320 - RNA, 19 nt, Homo sapiens
  misc_RNA (1)...(19): siRNA sense strand
caaguguccuucuacaaua

SEQ ID NO: 513321 - RNA, 19 nt, Homo sapiens
  misc_RNA (1)...(19): siRNA sense strand
gaaagaggguauuugagau

SEQ ID NO: 513322 - RNA, 19 nt, Homo sapiens
  misc_RNA (1)...(19): siRNA sense strand
ccacaacuuuggaauguuu

SEQ ID NO: 513323 - RNA, 19 nt, Homo sapiens
  misc_RNA (1)...(19): siRNA sense strand
caaauugccucuuuaaugc

SEQ ID NO: 513324 - RNA, 19 nt, Homo sapiens
  misc_RNA (1)...(19): siRNA sense strand
gcgauaaucuucuuagagu

SEQ ID NO: 513325 - RNA, 19 nt, Homo sapiens
  misc_RNA (1)...(19): siRNA sense strand
gaaaugggccacaacuuug

SEQ ID NO: 513326 - RNA, 19 nt, Homo sapiens
  misc_RNA (1)...(19): siRNA sense strand
ugaagugguuuauccuaua

SEQ ID NO: 513327 - RNA, 19 nt, Homo sapiens
  misc_RNA (1)...(19): siRNA sense strand
gcaccaggcuacacggaaa

SEQ ID NO: 513328 - RNA, 19 nt, Homo sapiens
  misc_RNA (1)...(19): siRNA sense strand
ggaacaauuugaaacugaa

SEQ ID NO: 513329 - RNA, 19 nt, Homo sapiens
  misc_RNA (1)...(19): siRNA sense strand
ccugaaauguguaauggua

SEQ ID NO: 513330 - RNA, 19 nt, Homo sapiens
  misc_RNA (1)...(19): siRNA sense strand
gaaucaagaugagaucaga

SEQ ID NO: 513331 - RNA, 19 nt, Homo sapiens
  misc_RNA (1)...(19): siRNA sense strand
ugaaaugggccacaacuuu

SEQ ID NO: 513332 - RNA, 19 nt, Homo sapiens
  misc_RNA (1)...(19): siRNA sense strand
gcccacaaauuauggauga

SEQ ID NO: 513333 - RNA, 19 nt, Homo sapiens
  misc_RNA (1)...(19): siRNA sense strand
gcaaguguccuucuacaau

SEQ ID NO: 513334 - RNA, 19 nt, Homo sapiens
  misc_RNA (1)...(19): siRNA sense strand
ucaaauugccucuuuaaug

SEQ ID NO: 513335 - RNA, 19 nt, Homo sapiens
  misc_RNA (1)...(19): siRNA sense strand
gacaauggcacaugaaaug

SEQ ID NO: 513336 - RNA, 19 nt, Homo sapiens
  misc_RNA (1)...(19): siRNA sense strand
guaccaauauuugcuguga

SEQ ID NO: 513337 - RNA, 19 nt, Homo sapiens
  misc_RNA (1)...(19): siRNA sense strand
caacaggaacaauuugaaa

SEQ ID NO: 513338 - RNA, 19 nt, Homo sapiens
  misc_RNA (1)...(19): siRNA sense strand
ggauaauggugaguuuaaa

SEQ ID NO: 513339 - RNA, 19 nt, Homo sapiens
  misc_RNA (1)...(19): siRNA sense strand
ccacagcgauaaucuucuu

SEQ ID NO: 513340 - RNA, 19 nt, Homo sapiens
  misc_RNA (1)...(19): siRNA sense strand
ggagaggacugugauugug

SEQ ID NO: 513341 - RNA, 19 nt, Homo sapiens
  misc_RNA (1)...(19): siRNA sense strand
ucucagcuaugacaaguuu

SEQ ID NO: 513342 - RNA, 19 nt, Homo sapiens
  misc_RNA (1)...(19): siRNA sense strand
agaagaaagcgucaugaua

SEQ ID NO: 513343 - RNA, 19 nt, Homo sapiens
  misc_RNA (1)...(19): siRNA sense strand
gauaaucuucuuagaguug

SEQ ID NO: 513344 - RNA, 19 nt, Homo sapiens
  misc_RNA (1)...(19): siRNA sense strand
ggucuugcauuuaugucua

SEQ ID NO: 513345 - RNA, 19 nt, Homo sapiens
  misc_RNA (1)...(19): siRNA sense strand
caugcacucuucaaguaua

SEQ ID NO: 513346 - RNA, 19 nt, Homo sapiens
  misc_RNA (1)...(19): siRNA sense strand
guaauuguccugaugauag

SEQ ID NO: 513347 - RNA, 19 nt, Homo sapiens
  misc_RNA (1)...(19): siRNA sense strand
gcuaagacauguaaaauca

SEQ ID NO: 513348 - RNA, 19 nt, Homo sapiens
  misc_RNA (1)...(19): siRNA sense strand
ugaggaauguaccaauauu

SEQ ID NO: 513349 - RNA, 19 nt, Homo sapiens
  misc_RNA (1)...(19): siRNA sense strand
cgacuauucuugcaagugu

SEQ ID NO: 513350 - RNA, 19 nt, Homo sapiens
  misc_RNA (1)...(19): siRNA sense strand
gacugugggucuugcauuu

SEQ ID NO: 513351 - RNA, 19 nt, Homo sapiens
  misc_RNA (1)...(19): siRNA sense strand
aagaaagcgucaugauauu

SEQ ID NO: 513352 - RNA, 19 nt, Homo sapiens
  misc_RNA (1)...(19): siRNA sense strand
gaacaugagaaauacauag

SEQ ID NO: 513353 - RNA, 19 nt, Homo sapiens
  misc_RNA (1)...(19): siRNA sense strand
ccaaagagccagagcaaca

SEQ ID NO: 513354 - RNA, 19 nt, Homo sapiens
  misc_RNA (1)...(19): siRNA sense strand
ucugaggaauguaccaaua

SEQ ID NO: 513355 - RNA, 19 nt, Homo sapiens
  misc_RNA (1)...(19): siRNA sense strand
uaucauauccacuccaauu

SEQ ID NO: 513356 - RNA, 19 nt, Homo sapiens
  misc_RNA (1)...(19): siRNA sense strand
caauaugugugauggacaa

SEQ ID NO: 513357 - RNA, 19 nt, Homo sapiens
  misc_RNA (1)...(19): siRNA sense strand
ggccuuaguugguauggaa

SEQ ID NO: 513358 - RNA, 19 nt, Homo sapiens
  misc_RNA (1)...(19): siRNA sense strand
ucagaaagaggguauuuga

SEQ ID NO: 513359 - RNA, 19 nt, Homo sapiens
  misc_RNA (1)...(19): siRNA sense strand
gaucagaaagaggguauuu

SEQ ID NO: 513360 - RNA, 19 nt, Homo sapiens
  misc_RNA (1)...(19): siRNA sense strand
ggacugacaaggauaagau

SEQ ID NO: 513361 - RNA, 19 nt, Homo sapiens
  misc_RNA (1)...(19): siRNA sense strand
ccacaagcccacaaauuau

SEQ ID NO: 513362 - RNA, 19 nt, Homo sapiens
  misc_RNA (1)...(19): siRNA sense strand
cgaccugccugaaaugugu

SEQ ID NO: 513363 - RNA, 19 nt, Homo sapiens
  misc_RNA (1)...(19): siRNA sense strand
ggccacaacuuuggaaugu

SEQ ID NO: 513364 - RNA, 19 nt, Homo sapiens
  misc_RNA (1)...(19): siRNA sense strand
ugagauggcuaauuauguc

SEQ ID NO: 513365 - RNA, 19 nt, Homo sapiens
  misc_RNA (1)...(19): siRNA sense strand
acaaugagaaucaagauga

SEQ ID NO: 513366 - RNA, 19 nt, Homo sapiens
  misc_RNA (1)...(19): siRNA sense strand
gcuacacggaaacauauua

SEQ ID NO: 513367 - RNA, 19 nt, Homo sapiens
  misc_RNA (1)...(19): siRNA sense strand
agaaagaggguauuugaga

SEQ ID NO: 513368 - RNA, 19 nt, Homo sapiens
  misc_RNA (1)...(19): siRNA sense strand
accacaagcccacaaauua

SEQ ID NO: 513369 - RNA, 19 nt, Homo sapiens
  misc_RNA (1)...(19): siRNA sense strand
gaggaauguaccaauauuu

SEQ ID NO: 513370 - RNA, 19 nt, Homo sapiens
  misc_RNA (1)...(19): siRNA sense strand
cauauccacuccaauuugu

SEQ ID NO: 513371 - RNA, 19 nt, Homo sapiens
  misc_RNA (1)...(19): siRNA sense strand
guauggaaaucuggacuga

SEQ ID NO: 513372 - RNA, 19 nt, Homo sapiens
  misc_RNA (1)...(19): siRNA sense strand
caagaugagaucagaaaga

SEQ ID NO: 513373 - RNA, 19 nt, Homo sapiens
  misc_RNA (1)...(19): siRNA sense strand
gcaacaggaacaauuugaa

SEQ ID NO: 513374 - RNA, 19 nt, Homo sapiens
  misc_RNA (1)...(19): siRNA sense strand
gcagccgucucagcuauga

SEQ ID NO: 513375 - RNA, 19 nt, Homo sapiens
  misc_RNA (1)...(19): siRNA sense strand
gucaugauauugcucaguu

SEQ ID NO: 513376 - RNA, 19 nt, Homo sapiens
  misc_RNA (1)...(19): siRNA sense strand
ccaccaaacuaguaaaauu

SEQ ID NO: 513377 - RNA, 19 nt, Homo sapiens
  misc_RNA (1)...(19): siRNA sense strand
cacaaauuauggaugauug

SEQ ID NO: 513378 - RNA, 19 nt, Homo sapiens
  misc_RNA (1)...(19): siRNA sense strand
ggaacaugagaaauacaua

SEQ ID NO: 513379 - RNA, 19 nt, Homo sapiens
  misc_RNA (1)...(19): siRNA sense strand
uaauuguccugaugauaga

SEQ ID NO: 513380 - RNA, 19 nt, Homo sapiens
  misc_RNA (1)...(19): siRNA sense strand
ugguaaaucugguaauugu

SEQ ID NO: 513381 - RNA, 19 nt, Homo sapiens
  misc_RNA (1)...(19): siRNA sense strand
ccuccucucuguugcagua

SEQ ID NO: 513382 - RNA, 19 nt, Homo sapiens
  misc_RNA (1)...(19): siRNA sense strand
ugacaaggauaagauaaag

SEQ ID NO: 513383 - RNA, 19 nt, Homo sapiens
  misc_RNA (1)...(19): siRNA sense strand
gcuagcaucagcacaugua

SEQ ID NO: 513384 - RNA, 19 nt, Homo sapiens
  misc_RNA (1)...(19): siRNA sense strand
gaagggccacugcuugaug

SEQ ID NO: 513385 - RNA, 19 nt, Homo sapiens
  misc_RNA (1)...(19): siRNA sense strand
uuaggagaauguugugaaa

SEQ ID NO: 513386 - RNA, 19 nt, Homo sapiens
  misc_RNA (1)...(19): siRNA sense strand
ggacaauggcacaugaaau

SEQ ID NO: 513387 - RNA, 19 nt, Homo sapiens
  misc_RNA (1)...(19): siRNA sense strand
cauguggccuuaguuggua

SEQ ID NO: 513388 - RNA, 19 nt, Homo sapiens
  misc_RNA (1)...(19): siRNA sense strand
agcaugcacucuucaagua

SEQ ID NO: 513389 - RNA, 19 nt, Homo sapiens
  misc_RNA (1)...(19): siRNA sense strand
uugcagugcuuuauuugaa

SEQ ID NO: 513390 - RNA, 19 nt, Homo sapiens
  misc_RNA (1)...(19): siRNA sense strand
acaauguguucuccuuauu

SEQ ID NO: 513391 - RNA, 19 nt, Homo sapiens
  misc_RNA (1)...(19): siRNA sense strand
ucaaguauaacccugauga

SEQ ID NO: 513392 - RNA, 19 nt, Homo sapiens
  misc_RNA (1)...(19): siRNA sense strand
ggaaaggagaucaccacaa

SEQ ID NO: 513393 - RNA, 19 nt, Homo sapiens
  misc_RNA (1)...(19): siRNA sense strand
ugggauggaugguguguug

SEQ ID NO: 513394 - RNA, 19 nt, Homo sapiens
  misc_RNA (1)...(19): siRNA sense strand
gggaagggccacugcuuga

SEQ ID NO: 513395 - RNA, 19 nt, Homo sapiens
  misc_RNA (1)...(19): siRNA sense strand
ucaugauauugcucaguua

SEQ ID NO: 513396 - RNA, 19 nt, Homo sapiens
  misc_RNA (1)...(19): siRNA sense strand
cagggacaauggcacauga

SEQ ID NO: 513397 - RNA, 19 nt, Homo sapiens
  misc_RNA (1)...(19): siRNA sense strand
uacaauguguucuccuuau

SEQ ID NO: 513398 - RNA, 19 nt, Homo sapiens
  misc_RNA (1)...(19): siRNA sense strand
gaauguuucaugacgacua

SEQ ID NO: 513399 - RNA, 19 nt, Homo sapiens
  misc_RNA (1)...(19): siRNA sense strand
gaccacagcgauaaucuuc

SEQ ID NO: 513400 - RNA, 19 nt, Homo sapiens
  misc_RNA (1)...(19): siRNA sense strand
gagcaacaggaacaauuug

SEQ ID NO: 513401 - RNA, 19 nt, Homo sapiens
  misc_RNA (1)...(19): siRNA sense strand
aggaacaauuugaaacuga

SEQ ID NO: 513402 - RNA, 19 nt, Homo sapiens
  misc_RNA (1)...(19): siRNA sense strand
agaaguaugaagugguuua

SEQ ID NO: 513403 - RNA, 19 nt, Homo sapiens
  misc_RNA (1)...(19): siRNA sense strand
caaggucuccugccaguca

SEQ ID NO: 513404 - RNA, 19 nt, Homo sapiens
  misc_RNA (1)...(19): siRNA sense strand
ugauauugcucaguuaauc

SEQ ID NO: 513405 - RNA, 19 nt, Homo sapiens
  misc_RNA (1)...(19): siRNA sense strand
gagcaugcacucuucaagu

SEQ ID NO: 513406 - RNA, 19 nt, Homo sapiens
  misc_RNA (1)...(19): siRNA sense strand
aauauuugcugugaugcua

SEQ ID NO: 513407 - RNA, 19 nt, Homo sapiens
  misc_RNA (1)...(19): siRNA sense strand
ggaaaugggagaggacugu

SEQ ID NO: 513408 - RNA, 19 nt, Homo sapiens
  misc_RNA (1)...(19): siRNA sense strand
cagcgauaaucuucuuaga

SEQ ID NO: 513409 - RNA, 19 nt, Homo sapiens
  misc_RNA (1)...(19): siRNA sense strand
guucaggaccacagcgaua

SEQ ID NO: 513410 - RNA, 19 nt, Homo sapiens
  misc_RNA (1)...(19): siRNA sense strand
guuaaucacagcaacagaa

SEQ ID NO: 513411 - RNA, 19 nt, Homo sapiens
  misc_RNA (1)...(19): siRNA sense strand
aaagguacaaugagaauca

SEQ ID NO: 513412 - RNA, 19 nt, Homo sapiens
  misc_RNA (1)...(19): siRNA sense strand
gguaauuguccugaugaua

SEQ ID NO: 513413 - RNA, 19 nt, Homo sapiens
  misc_RNA (1)...(19): siRNA sense strand
guaaugguaaaucugguaa

SEQ ID NO: 513414 - RNA, 19 nt, Homo sapiens
  misc_RNA (1)...(19): siRNA sense strand
caauacucauguggccuua

SEQ ID NO: 513415 - RNA, 19 nt, Homo sapiens
  misc_RNA (1)...(19): siRNA sense strand
gcacugagcuucuauauac

SEQ ID NO: 513416 - RNA, 19 nt, Homo sapiens
  misc_RNA (1)...(19): siRNA sense strand
gaagaaagcgucaugauau

SEQ ID NO: 513417 - RNA, 19 nt, Homo sapiens
  misc_RNA (1)...(19): siRNA sense strand
gaaaggagaucaccacaag

SEQ ID NO: 513418 - RNA, 19 nt, Homo sapiens
  misc_RNA (1)...(19): siRNA sense strand
gaagaaguaugaagugguu

SEQ ID NO: 513419 - RNA, 19 nt, Homo sapiens
  misc_RNA (1)...(19): siRNA sense strand
gaugauagauuccaaguca

SEQ ID NO: 513420 - RNA, 19 nt, Homo sapiens
  misc_RNA (1)...(19): siRNA sense strand
caaguguccuucuacaaua

SEQ ID NO: 513421 - RNA, 19 nt, Homo sapiens
  misc_RNA (1)...(19): siRNA sense strand
gaaagaggguauuugagau

SEQ ID NO: 513422 - RNA, 19 nt, Homo sapiens
  misc_RNA (1)...(19): siRNA sense strand
ccacaacuuuggaauguuu

SEQ ID NO: 513423 - RNA, 19 nt, Homo sapiens
  misc_RNA (1)...(19): siRNA sense strand
caaauugccucuuuaaugc

SEQ ID NO: 513424 - RNA, 19 nt, Homo sapiens
  misc_RNA (1)...(19): siRNA sense strand
gcgauaaucuucuuagagu

SEQ ID NO: 513425 - RNA, 19 nt, Homo sapiens
  misc_RNA (1)...(19): siRNA sense strand
gaaaugggccacaacuuug

SEQ ID NO: 513426 - RNA, 19 nt, Homo sapiens
  misc_RNA (1)...(19): siRNA sense strand
ugaagugguuuauccuaua

SEQ ID NO: 513427 - RNA, 19 nt, Homo sapiens
  misc_RNA (1)...(19): siRNA sense strand
gcaccaggcuacacggaaa

SEQ ID NO: 513428 - RNA, 19 nt, Homo sapiens
  misc_RNA (1)...(19): siRNA sense strand
ggaacaauuugaaacugaa

SEQ ID NO: 513429 - RNA, 19 nt, Homo sapiens
  misc_RNA (1)...(19): siRNA sense strand
ccugaaauguguaauggua

SEQ ID NO: 513430 - RNA, 19 nt, Homo sapiens
  misc_RNA (1)...(19): siRNA sense strand
gaaucaagaugagaucaga

SEQ ID NO: 513431 - RNA, 19 nt, Homo sapiens
  misc_RNA (1)...(19): siRNA sense strand
ugaaaugggccacaacuuu

SEQ ID NO: 513432 - RNA, 19 nt, Homo sapiens
  misc_RNA (1)...(19): siRNA sense strand
gcccacaaauuauggauga

SEQ ID NO: 513433 - RNA, 19 nt, Homo sapiens
  misc_RNA (1)...(19): siRNA sense strand
gcaaguguccuucuacaau

SEQ ID NO: 513434 - RNA, 19 nt, Homo sapiens
  misc_RNA (1)...(19): siRNA sense strand
ucaaauugccucuuuaaug

SEQ ID NO: 513435 - RNA, 19 nt, Homo sapiens
  misc_RNA (1)...(19): siRNA sense strand
gacaauggcacaugaaaug

SEQ ID NO: 513436 - RNA, 19 nt, Homo sapiens
  misc_RNA (1)...(19): siRNA sense strand
guaccaauauuugcuguga

SEQ ID NO: 513437 - RNA, 19 nt, Homo sapiens
  misc_RNA (1)...(19): siRNA sense strand
caacaggaacaauuugaaa

SEQ ID NO: 513438 - RNA, 19 nt, Homo sapiens
  misc_RNA (1)...(19): siRNA sense strand
ggauaauggugaguuuaaa

SEQ ID NO: 513439 - RNA, 19 nt, Homo sapiens
  misc_RNA (1)...(19): siRNA sense strand
ccacagcgauaaucuucuu

SEQ ID NO: 513440 - RNA, 19 nt, Homo sapiens
  misc_RNA (1)...(19): siRNA sense strand
ggagaggacugugauugug

SEQ ID NO: 513441 - RNA, 19 nt, Homo sapiens
  misc_RNA (1)...(19): siRNA sense strand
ucucagcuaugacaaguuu

SEQ ID NO: 513442 - RNA, 19 nt, Homo sapiens
  misc_RNA (1)...(19): siRNA sense strand
agaagaaagcgucaugaua

SEQ ID NO: 513443 - RNA, 19 nt, Homo sapiens
  misc_RNA (1)...(19): siRNA sense strand
gauaaucuucuuagaguug

SEQ ID NO: 513444 - RNA, 19 nt, Homo sapiens
  misc_RNA (1)...(19): siRNA sense strand
ggucuugcauuuaugucua

SEQ ID NO: 513445 - RNA, 19 nt, Homo sapiens
  misc_RNA (1)...(19): siRNA sense strand
caugcacucuucaaguaua

SEQ ID NO: 513446 - RNA, 19 nt, Homo sapiens
  misc_RNA (1)...(19): siRNA sense strand
guaauuguccugaugauag

SEQ ID NO: 513447 - RNA, 19 nt, Homo sapiens
  misc_RNA (1)...(19): siRNA sense strand
gcuaagacauguaaaauca

SEQ ID NO: 513448 - RNA, 19 nt, Homo sapiens
  misc_RNA (1)...(19): siRNA sense strand
ugaggaauguaccaauauu

SEQ ID NO: 513449 - RNA, 19 nt, Homo sapiens
  misc_RNA (1)...(19): siRNA sense strand
cgacuauucuugcaagugu

SEQ ID NO: 513450 - RNA, 19 nt, Homo sapiens
  misc_RNA (1)...(19): siRNA sense strand
gacugugggucuugcauuu

SEQ ID NO: 513451 - RNA, 19 nt, Homo sapiens
  misc_RNA (1)...(19): siRNA sense strand
aagaaagcgucaugauauu

SEQ ID NO: 513452 - RNA, 19 nt, Homo sapiens
  misc_RNA (1)...(19): siRNA sense strand
gaacaugagaaauacauag

SEQ ID NO: 513453 - RNA, 19 nt, Homo sapiens
  misc_RNA (1)...(19): siRNA sense strand
ccaaagagccagagcaaca

SEQ ID NO: 513454 - RNA, 19 nt, Homo sapiens
  misc_RNA (1)...(19): siRNA sense strand
ucugaggaauguaccaaua

SEQ ID NO: 513455 - RNA, 19 nt, Homo sapiens
  misc_RNA (1)...(19): siRNA sense strand
uaucauauccacuccaauu

SEQ ID NO: 513456 - RNA, 19 nt, Homo sapiens
  misc_RNA (1)...(19): siRNA sense strand
caauaugugugauggacaa

SEQ ID NO: 513457 - RNA, 19 nt, Homo sapiens
  misc_RNA (1)...(19): siRNA sense strand
ggccuuaguugguauggaa

SEQ ID NO: 513458 - RNA, 19 nt, Homo sapiens
  misc_RNA (1)...(19): siRNA sense strand
ucagaaagaggguauuuga

SEQ ID NO: 513459 - RNA, 19 nt, Homo sapiens
  misc_RNA (1)...(19): siRNA sense strand
gaucagaaagaggguauuu

SEQ ID NO: 513460 - RNA, 19 nt, Homo sapiens
  misc_RNA (1)...(19): siRNA sense strand
ggacugacaaggauaagau

SEQ ID NO: 513461 - RNA, 19 nt, Homo sapiens
  misc_RNA (1)...(19): siRNA sense strand
ccacaagcccacaaauuau

SEQ ID NO: 513462 - RNA, 19 nt, Homo sapiens
  misc_RNA (1)...(19): siRNA sense strand
cgaccugccugaaaugugu

SEQ ID NO: 513463 - RNA, 19 nt, Homo sapiens
  misc_RNA (1)...(19): siRNA sense strand
ggccacaacuuuggaaugu

SEQ ID NO: 513464 - RNA, 19 nt, Homo sapiens
  misc_RNA (1)...(19): siRNA sense strand
ugagauggcuaauuauguc

SEQ ID NO: 513465 - RNA, 19 nt, Homo sapiens
  misc_RNA (1)...(19): siRNA sense strand
acaaugagaaucaagauga

SEQ ID NO: 513466 - RNA, 19 nt, Homo sapiens
  misc_RNA (1)...(19): siRNA sense strand
gcuacacggaaacauauua

SEQ ID NO: 513467 - RNA, 19 nt, Homo sapiens
  misc_RNA (1)...(19): siRNA sense strand
agaaagaggguauuugaga

SEQ ID NO: 513468 - RNA, 19 nt, Homo sapiens
  misc_RNA (1)...(19): siRNA sense strand
accacaagcccacaaauua

SEQ ID NO: 513469 - RNA, 19 nt, Homo sapiens
  misc_RNA (1)...(19): siRNA sense strand
gaggaauguaccaauauuu

SEQ ID NO: 513470 - RNA, 19 nt, Homo sapiens
  misc_RNA (1)...(19): siRNA sense strand
cauauccacuccaauuugu

SEQ ID NO: 513471 - RNA, 19 nt, Homo sapiens
  misc_RNA (1)...(19): siRNA sense strand
guauggaaaucuggacuga

SEQ ID NO: 513472 - RNA, 19 nt, Homo sapiens
  misc_RNA (1)...(19): siRNA sense strand
caagaugagaucagaaaga

SEQ ID NO: 513473 - RNA, 19 nt, Homo sapiens
  misc_RNA (1)...(19): siRNA sense strand
gcaacaggaacaauuugaa

SEQ ID NO: 513474 - RNA, 19 nt, Homo sapiens
  misc_RNA (1)...(19): siRNA sense strand
gcagccgucucagcuauga

SEQ ID NO: 513475 - RNA, 19 nt, Homo sapiens
  misc_RNA (1)...(19): siRNA sense strand
gucaugauauugcucaguu

SEQ ID NO: 513476 - RNA, 19 nt, Homo sapiens
  misc_RNA (1)...(19): siRNA sense strand
ccaccaaacuaguaaaauu

SEQ ID NO: 513477 - RNA, 19 nt, Homo sapiens
  misc_RNA (1)...(19): siRNA sense strand
cacaaauuauggaugauug

SEQ ID NO: 513478 - RNA, 19 nt, Homo sapiens
  misc_RNA (1)...(19): siRNA sense strand
ggaacaugagaaauacaua

SEQ ID NO: 513479 - RNA, 19 nt, Homo sapiens
  misc_RNA (1)...(19): siRNA sense strand
uaauuguccugaugauaga

SEQ ID NO: 513480 - RNA, 19 nt, Homo sapiens
  misc_RNA (1)...(19): siRNA sense strand
ugguaaaucugguaauugu

SEQ ID NO: 513481 - RNA, 19 nt, Homo sapiens
  misc_RNA (1)...(19): siRNA sense strand
ccuccucucuguugcagua

SEQ ID NO: 513482 - RNA, 19 nt, Homo sapiens
  misc_RNA (1)...(19): siRNA sense strand
ugacaaggauaagauaaag

SEQ ID NO: 513483 - RNA, 19 nt, Homo sapiens
  misc_RNA (1)...(19): siRNA sense strand
gcuagcaucagcacaugua

SEQ ID NO: 513484 - RNA, 19 nt, Homo sapiens
  misc_RNA (1)...(19): siRNA sense strand
gaagggccacugcuugaug

SEQ ID NO: 513485 - RNA, 19 nt, Homo sapiens
  misc_RNA (1)...(19): siRNA sense strand
uuaggagaauguugugaaa

SEQ ID NO: 513486 - RNA, 19 nt, Homo sapiens
  misc_RNA (1)...(19): siRNA sense strand
ggacaauggcacaugaaau

SEQ ID NO: 513487 - RNA, 19 nt, Homo sapiens
  misc_RNA (1)...(19): siRNA sense strand
cauguggccuuaguuggua

SEQ ID NO: 513488 - RNA, 19 nt, Homo sapiens
  misc_RNA (1)...(19): siRNA sense strand
agcaugcacucuucaagua

SEQ ID NO: 513489 - RNA, 19 nt, Homo sapiens
  misc_RNA (1)...(19): siRNA sense strand
uugcagugcuuuauuugaa

SEQ ID NO: 513490 - RNA, 19 nt, Homo sapiens
  misc_RNA (1)...(19): siRNA sense strand
acaauguguucuccuuauu

SEQ ID NO: 513491 - RNA, 19 nt, Homo sapiens
  misc_RNA (1)...(19): siRNA sense strand
ucaaguauaacccugauga

SEQ ID NO: 513492 - RNA, 19 nt, Homo sapiens
  misc_RNA (1)...(19): siRNA sense strand
ggaaaggagaucaccacaa

SEQ ID NO: 513493 - RNA, 19 nt, Homo sapiens
  misc_RNA (1)...(19): siRNA sense strand
ugggauggaugguguguug

SEQ ID NO: 513494 - RNA, 19 nt, Homo sapiens
  misc_RNA (1)...(19): siRNA sense strand
gggaagggccacugcuuga

SEQ ID NO: 513495 - RNA, 19 nt, Homo sapiens
  misc_RNA (1)...(19): siRNA sense strand
ucaugauauugcucaguua

SEQ ID NO: 513496 - RNA, 19 nt, Homo sapiens
  misc_RNA (1)...(19): siRNA sense strand
cagggacaauggcacauga

SEQ ID NO: 513497 - RNA, 19 nt, Homo sapiens
  misc_RNA (1)...(19): siRNA sense strand
uacaauguguucuccuuau

SEQ ID NO: 513498 - RNA, 19 nt, Homo sapiens
  misc_RNA (1)...(19): siRNA sense strand
gaauguuucaugacgacua

SEQ ID NO: 513499 - RNA, 19 nt, Homo sapiens
  misc_RNA (1)...(19): siRNA sense strand
gaccacagcgauaaucuuc

SEQ ID NO: 513500 - RNA, 19 nt, Homo sapiens
  misc_RNA (1)...(19): siRNA sense strand
gagcaacaggaacaauuug

SEQ ID NO: 513501 - RNA, 19 nt, Homo sapiens
  misc_RNA (1)...(19): siRNA sense strand
aggaacaauuugaaacuga

SEQ ID NO: 513502 - RNA, 19 nt, Homo sapiens
  misc_RNA (1)...(19): siRNA sense strand
agaaguaugaagugguuua

SEQ ID NO: 513503 - RNA, 19 nt, Homo sapiens
  misc_RNA (1)...(19): siRNA sense strand
caaggucuccugccaguca

SEQ ID NO: 513504 - RNA, 19 nt, Homo sapiens
  misc_RNA (1)...(19): siRNA sense strand
ugauauugcucaguuaauc

SEQ ID NO: 513505 - RNA, 19 nt, Homo sapiens
  misc_RNA (1)...(19): siRNA sense strand
gagcaugcacucuucaagu

SEQ ID NO: 513506 - RNA, 19 nt, Homo sapiens
  misc_RNA (1)...(19): siRNA sense strand
aauauuugcugugaugcua

SEQ ID NO: 513507 - RNA, 19 nt, Homo sapiens
  misc_RNA (1)...(19): siRNA sense strand
ggaaaugggagaggacugu

SEQ ID NO: 513508 - RNA, 19 nt, Homo sapiens
  misc_RNA (1)...(19): siRNA sense strand
cagcgauaaucuucuuaga

SEQ ID NO: 513509 - RNA, 19 nt, Homo sapiens
  misc_RNA (1)...(19): siRNA sense strand
guucaggaccacagcgaua

SEQ ID NO: 513510 - RNA, 19 nt, Homo sapiens
  misc_RNA (1)...(19): siRNA sense strand
guuaaucacagcaacagaa

SEQ ID NO: 513511 - RNA, 19 nt, Homo sapiens
  misc_RNA (1)...(19): siRNA sense strand
aaagguacaaugagaauca

SEQ ID NO: 513512 - RNA, 19 nt, Homo sapiens
  misc_RNA (1)...(19): siRNA sense strand
gguaauuguccugaugaua

SEQ ID NO: 513513 - RNA, 19 nt, Homo sapiens
  misc_RNA (1)...(19): siRNA sense strand
guaaugguaaaucugguaa

SEQ ID NO: 513514 - RNA, 19 nt, Homo sapiens
  misc_RNA (1)...(19): siRNA sense strand
caauacucauguggccuua

SEQ ID NO: 513515 - RNA, 19 nt, Homo sapiens
  misc_RNA (1)...(19): siRNA sense strand
gaaaggaggucaaugaaug

SEQ ID NO: 513516 - RNA, 19 nt, Homo sapiens
  misc_RNA (1)...(19): siRNA sense strand
gaaauaacaugccgaaugg

SEQ ID NO: 513517 - RNA, 19 nt, Homo sapiens
  misc_RNA (1)...(19): siRNA sense strand
ugacagaaauucccaauau

SEQ ID NO: 513518 - RNA, 19 nt, Homo sapiens
  misc_RNA (1)...(19): siRNA sense strand
ggaaaucugugcaccugua

SEQ ID NO: 513519 - RNA, 19 nt, Homo sapiens
  misc_RNA (1)...(19): siRNA sense strand
gaaggcaacccaccaauaa

SEQ ID NO: 513520 - RNA, 19 nt, Homo sapiens
  misc_RNA (1)...(19): siRNA sense strand
gaaacacauuauccacaua

SEQ ID NO: 513521 - RNA, 19 nt, Homo sapiens
  misc_RNA (1)...(19): siRNA sense strand
ggaaugguguuguugaaga

SEQ ID NO: 513522 - RNA, 19 nt, Homo sapiens
  misc_RNA (1)...(19): siRNA sense strand
gaagggaccugauauuggu

SEQ ID NO: 513523 - RNA, 19 nt, Homo sapiens
  misc_RNA (1)...(19): siRNA sense strand
gaaguucuguuaucugugu

SEQ ID NO: 513524 - RNA, 19 nt, Homo sapiens
  misc_RNA (1)...(19): siRNA sense strand
caugacaccucacaucuuu

SEQ ID NO: 513525 - RNA, 19 nt, Homo sapiens
  misc_RNA (1)...(19): siRNA sense strand
gaggauacaugucguuguu

SEQ ID NO: 513526 - RNA, 19 nt, Homo sapiens
  misc_RNA (1)...(19): siRNA sense strand
uuucacaacucuaggauua

SEQ ID NO: 513527 - RNA, 19 nt, Homo sapiens
  misc_RNA (1)...(19): siRNA sense strand
gaagcaaaguucuuaugug

SEQ ID NO: 513528 - RNA, 19 nt, Homo sapiens
  misc_RNA (1)...(19): siRNA sense strand
guagaaaggaggucaauga

SEQ ID NO: 513529 - RNA, 19 nt, Homo sapiens
  misc_RNA (1)...(19): siRNA sense strand
cagaauaacugcuacuauc

SEQ ID NO: 513530 - RNA, 19 nt, Homo sapiens
  misc_RNA (1)...(19): siRNA sense strand
gcgucgaccucaugaguua

SEQ ID NO: 513531 - RNA, 19 nt, Homo sapiens
  misc_RNA (1)...(19): siRNA sense strand
gaagauggaauucccugua

SEQ ID NO: 513532 - RNA, 19 nt, Homo sapiens
  misc_RNA (1)...(19): siRNA sense strand
gaacaucugguauacaaga

SEQ ID NO: 513533 - RNA, 19 nt, Homo sapiens
  misc_RNA (1)...(19): siRNA sense strand
ugacuuugcuuaugaaauc

SEQ ID NO: 513534 - RNA, 19 nt, Homo sapiens
  misc_RNA (1)...(19): siRNA sense strand
gaacaguguaggaggauuu

SEQ ID NO: 513535 - RNA, 19 nt, Homo sapiens
  misc_RNA (1)...(19): siRNA sense strand
uauacaagauggacaguga

SEQ ID NO: 513536 - RNA, 19 nt, Homo sapiens
  misc_RNA (1)...(19): siRNA sense strand
gcagcaagauguucaaacu

SEQ ID NO: 513537 - RNA, 19 nt, Homo sapiens
  misc_RNA (1)...(19): siRNA sense strand
gaaugguguuguugaagaa

SEQ ID NO: 513538 - RNA, 19 nt, Homo sapiens
  misc_RNA (1)...(19): siRNA sense strand
gaaaggaacgacucaaagu

SEQ ID NO: 513539 - RNA, 19 nt, Homo sapiens
  misc_RNA (1)...(19): siRNA sense strand
ccagaguggugcaauggua

SEQ ID NO: 513540 - RNA, 19 nt, Homo sapiens
  misc_RNA (1)...(19): siRNA sense strand
caaaguugcuggaggaucu

SEQ ID NO: 513541 - RNA, 19 nt, Homo sapiens
  misc_RNA (1)...(19): siRNA sense strand
gcgcaaauacugcaaguga

SEQ ID NO: 513542 - RNA, 19 nt, Homo sapiens
  misc_RNA (1)...(19): siRNA sense strand
gaggaucuauauguuauug

SEQ ID NO: 513543 - RNA, 19 nt, Homo sapiens
  misc_RNA (1)...(19): siRNA sense strand
aaagaucccugcugucugu

SEQ ID NO: 513544 - RNA, 19 nt, Homo sapiens
  misc_RNA (1)...(19): siRNA sense strand
cgaauggaauuugaagaaa

SEQ ID NO: 513545 - RNA, 19 nt, Homo sapiens
  misc_RNA (1)...(19): siRNA sense strand
aaacaucacugccauugca

SEQ ID NO: 513546 - RNA, 19 nt, Homo sapiens
  misc_RNA (1)...(19): siRNA sense strand
ucaagaagcuuuuguuuuc

SEQ ID NO: 513547 - RNA, 19 nt, Homo sapiens
  misc_RNA (1)...(19): siRNA sense strand
ucacugccauugcaauuau

SEQ ID NO: 513548 - RNA, 19 nt, Homo sapiens
  misc_RNA (1)...(19): siRNA sense strand
gacagaaauucccaauaug

SEQ ID NO: 513549 - RNA, 19 nt, Homo sapiens
  misc_RNA (1)...(19): siRNA sense strand
gcaaauacugcaagugaga

SEQ ID NO: 513550 - RNA, 19 nt, Homo sapiens
  misc_RNA (1)...(19): siRNA sense strand
ugaaauaacaugccgaaug

SEQ ID NO: 513551 - RNA, 19 nt, Homo sapiens
  misc_RNA (1)...(19): siRNA sense strand
gaacagagugugggauaga

SEQ ID NO: 513552 - RNA, 19 nt, Homo sapiens
  misc_RNA (1)...(19): siRNA sense strand
caaauugcacucugacuga

SEQ ID NO: 513553 - RNA, 19 nt, Homo sapiens
  misc_RNA (1)...(19): siRNA sense strand
ggauacaugucguuguuca

SEQ ID NO: 513554 - RNA, 19 nt, Homo sapiens
  misc_RNA (1)...(19): siRNA sense strand
guugugcaauuguuacuuu

SEQ ID NO: 513555 - RNA, 19 nt, Homo sapiens
  misc_RNA (1)...(19): siRNA sense strand
gcuggaggaucuauauguu

SEQ ID NO: 513556 - RNA, 19 nt, Homo sapiens
  misc_RNA (1)...(19): siRNA sense strand
ucaucuaggucauaauuug

SEQ ID NO: 513557 - RNA, 19 nt, Homo sapiens
  misc_RNA (1)...(19): siRNA sense strand
caaagaauugaacaccuua

SEQ ID NO: 513558 - RNA, 19 nt, Homo sapiens
  misc_RNA (1)...(19): siRNA sense strand
caggcuggcucuccuauau

SEQ ID NO: 513559 - RNA, 19 nt, Homo sapiens
  misc_RNA (1)...(19): siRNA sense strand
ggaguacugauuaccauuu

SEQ ID NO: 513560 - RNA, 19 nt, Homo sapiens
  misc_RNA (1)...(19): siRNA sense strand
gugagaaugugacagaaau

SEQ ID NO: 513561 - RNA, 19 nt, Homo sapiens
  misc_RNA (1)...(19): siRNA sense strand
acaaagaauugaacaccuu

SEQ ID NO: 513562 - RNA, 19 nt, Homo sapiens
  misc_RNA (1)...(19): siRNA sense strand
aagauggaauucccuguaa

SEQ ID NO: 513563 - RNA, 19 nt, Homo sapiens
  misc_RNA (1)...(19): siRNA sense strand
guggaagaauucaguguga

SEQ ID NO: 513564 - RNA, 19 nt, Homo sapiens
  misc_RNA (1)...(19): siRNA sense strand
guacauucguuaugaaagg

SEQ ID NO: 513565 - RNA, 19 nt, Homo sapiens
  misc_RNA (1)...(19): siRNA sense strand
ugauauuggugaagugaaa

SEQ ID NO: 513566 - RNA, 19 nt, Homo sapiens
  misc_RNA (1)...(19): siRNA sense strand
uaacaugccgaauggaauu

SEQ ID NO: 513567 - RNA, 19 nt, Homo sapiens
  misc_RNA (1)...(19): siRNA sense strand
gagacuugcuacaaagaau

SEQ ID NO: 513568 - RNA, 19 nt, Homo sapiens
  misc_RNA (1)...(19): siRNA sense strand
gggaaaguguguagaaagg

SEQ ID NO: 513569 - RNA, 19 nt, Homo sapiens
  misc_RNA (1)...(19): siRNA sense strand
gcaauuguuacuuucauga

SEQ ID NO: 513570 - RNA, 19 nt, Homo sapiens
  misc_RNA (1)...(19): siRNA sense strand
gaaauuguagucgucauug

SEQ ID NO: 513571 - RNA, 19 nt, Homo sapiens
  misc_RNA (1)...(19): siRNA sense strand
caugagauccggauuuaug

SEQ ID NO: 513572 - RNA, 19 nt, Homo sapiens
  misc_RNA (1)...(19): siRNA sense strand
ccucccaacugccugauaa

SEQ ID NO: 513573 - RNA, 19 nt, Homo sapiens
  misc_RNA (1)...(19): siRNA sense strand
gaugaagggaccugauauu

SEQ ID NO: 513574 - RNA, 19 nt, Homo sapiens
  misc_RNA (1)...(19): siRNA sense strand
gggaugaagggaccugaua

SEQ ID NO: 513575 - RNA, 19 nt, Homo sapiens
  misc_RNA (1)...(19): siRNA sense strand
gaguacugauuaccauuug

SEQ ID NO: 513576 - RNA, 19 nt, Homo sapiens
  misc_RNA (1)...(19): siRNA sense strand
gugaagcgcugugggaaug

SEQ ID NO: 513577 - RNA, 19 nt, Homo sapiens
  misc_RNA (1)...(19): siRNA sense strand
gcaacccaccaauaacuaa

SEQ ID NO: 513578 - RNA, 19 nt, Homo sapiens
  misc_RNA (1)...(19): siRNA sense strand
gcaaguggaagucggagaa

SEQ ID NO: 513579 - RNA, 19 nt, Homo sapiens
  misc_RNA (1)...(19): siRNA sense strand
ggaggucaaugaaugugau

SEQ ID NO: 513580 - RNA, 19 nt, Homo sapiens
  misc_RNA (1)...(19): siRNA sense strand
uugaacaucugguauacaa

SEQ ID NO: 513581 - RNA, 19 nt, Homo sapiens
  misc_RNA (1)...(19): siRNA sense strand
ggugaugccuucccagagu

SEQ ID NO: 513582 - RNA, 19 nt, Homo sapiens
  misc_RNA (1)...(19): siRNA sense strand
acagaaauucccaauauga

SEQ ID NO: 513583 - RNA, 19 nt, Homo sapiens
  misc_RNA (1)...(19): siRNA sense strand
caucaucuaggucauaauu

SEQ ID NO: 513584 - RNA, 19 nt, Homo sapiens
  misc_RNA (1)...(19): siRNA sense strand
caacaugacaccucacauc

SEQ ID NO: 513585 - RNA, 19 nt, Homo sapiens
  misc_RNA (1)...(19): siRNA sense strand
uggaggaucuauauguuau

SEQ ID NO: 513586 - RNA, 19 nt, Homo sapiens
  misc_RNA (1)...(19): siRNA sense strand
ggaagaauucagugugaga

SEQ ID NO: 513587 - RNA, 19 nt, Homo sapiens
  misc_RNA (1)...(19): siRNA sense strand
guagagaggacaaaguguu

SEQ ID NO: 513588 - RNA, 19 nt, Homo sapiens
  misc_RNA (1)...(19): siRNA sense strand
ugaaggcaacccaccaaua

SEQ ID NO: 513589 - RNA, 19 nt, Homo sapiens
  misc_RNA (1)...(19): siRNA sense strand
gauggacagugaggagaaa

SEQ ID NO: 513590 - RNA, 19 nt, Homo sapiens
  misc_RNA (1)...(19): siRNA sense strand
cuguguauauuguugcuua

SEQ ID NO: 513591 - RNA, 19 nt, Homo sapiens
  misc_RNA (1)...(19): siRNA sense strand
ggauagaucauauaugcau

SEQ ID NO: 513592 - RNA, 19 nt, Homo sapiens
  misc_RNA (1)...(19): siRNA sense strand
ugggauagaucauauaugc

SEQ ID NO: 513593 - RNA, 19 nt, Homo sapiens
  misc_RNA (1)...(19): siRNA sense strand
gaaccaugaugaggauaca

SEQ ID NO: 513594 - RNA, 19 nt, Homo sapiens
  misc_RNA (1)...(19): siRNA sense strand
uguaguagaugauguaagg

SEQ ID NO: 513595 - RNA, 19 nt, Homo sapiens
  misc_RNA (1)...(19): siRNA sense strand
accaugagauccggauuua

SEQ ID NO: 513596 - RNA, 19 nt, Homo sapiens
  misc_RNA (1)...(19): siRNA sense strand
caccguaguugugcaauug

SEQ ID NO: 513597 - RNA, 19 nt, Homo sapiens
  misc_RNA (1)...(19): siRNA sense strand
caauugcaguggcucauca

SEQ ID NO: 513598 - RNA, 19 nt, Homo sapiens
  misc_RNA (1)...(19): siRNA sense strand
ugcaguggcucaucaucua

SEQ ID NO: 513599 - RNA, 19 nt, Homo sapiens
  misc_RNA (1)...(19): siRNA sense strand
caggcacuguguccauaua

SEQ ID NO: 513600 - RNA, 19 nt, Homo sapiens
  misc_RNA (1)...(19): siRNA sense strand
cagggaaaguguguagaaa

SEQ ID NO: 513601 - RNA, 19 nt, Homo sapiens
  misc_RNA (1)...(19): siRNA sense strand
ccugcugucugucaaauug

SEQ ID NO: 513602 - RNA, 19 nt, Homo sapiens
  misc_RNA (1)...(19): siRNA sense strand
ggagaucuggaccaauaaa

SEQ ID NO: 513603 - RNA, 19 nt, Homo sapiens
  misc_RNA (1)...(19): siRNA sense strand
ccauauaaccaucuugaau

SEQ ID NO: 513604 - RNA, 19 nt, Homo sapiens
  misc_RNA (1)...(19): siRNA sense strand
ucgcuucaaugacauaaug

SEQ ID NO: 513605 - RNA, 19 nt, Homo sapiens
  misc_RNA (1)...(19): siRNA sense strand
gaagaauucagugugagaa

SEQ ID NO: 513606 - RNA, 19 nt, Homo sapiens
  misc_RNA (1)...(19): siRNA sense strand
agaaacacauuauccacau

SEQ ID NO: 513607 - RNA, 19 nt, Homo sapiens
  misc_RNA (1)...(19): siRNA sense strand
ugacugaugguucuacuug

SEQ ID NO: 513608 - RNA, 19 nt, Homo sapiens
  misc_RNA (1)...(19): siRNA sense strand
ggaagucggagaacauuac

SEQ ID NO: 513609 - RNA, 19 nt, Homo sapiens
  misc_RNA (1)...(19): siRNA sense strand
gggcaucugcaacaauaaa

SEQ ID NO: 513610 - RNA, 19 nt, Homo sapiens
  misc_RNA (1)...(19): siRNA sense strand
uaauugcucaccugcauuu

SEQ ID NO: 513611 - RNA, 19 nt, Homo sapiens
  misc_RNA (1)...(19): siRNA sense strand
ggaacagagugugggauag

SEQ ID NO: 513612 - RNA, 19 nt, Homo sapiens
  misc_RNA (1)...(19): siRNA sense strand
gaauaacugcuacuaucau

SEQ ID NO: 513613 - RNA, 19 nt, Homo sapiens
  misc_RNA (1)...(19): siRNA sense strand
gugugacuguggaccuuua

SEQ ID NO: 513614 - RNA, 19 nt, Homo sapiens
  misc_RNA (1)...(19): siRNA sense strand
gaccugauauuggugaagu

SEQ ID NO: 513615 - RNA, 19 nt, Homo sapiens
  misc_RNA (1)...(19): siRNA sense strand
gaaaggaggucaaugaaug

SEQ ID NO: 513616 - RNA, 19 nt, Homo sapiens
  misc_RNA (1)...(19): siRNA sense strand
gaaauaacaugccgaaugg

SEQ ID NO: 513617 - RNA, 19 nt, Homo sapiens
  misc_RNA (1)...(19): siRNA sense strand
ugacagaaauucccaauau

SEQ ID NO: 513618 - RNA, 19 nt, Homo sapiens
  misc_RNA (1)...(19): siRNA sense strand
ggaaaucugugcaccugua

SEQ ID NO: 513619 - RNA, 19 nt, Homo sapiens
  misc_RNA (1)...(19): siRNA sense strand
gaaggcaacccaccaauaa

SEQ ID NO: 513620 - RNA, 19 nt, Homo sapiens
  misc_RNA (1)...(19): siRNA sense strand
gaaacacauuauccacaua

SEQ ID NO: 513621 - RNA, 19 nt, Homo sapiens
  misc_RNA (1)...(19): siRNA sense strand
ggaaugguguuguugaaga

SEQ ID NO: 513622 - RNA, 19 nt, Homo sapiens
  misc_RNA (1)...(19): siRNA sense strand
gaagggaccugauauuggu

SEQ ID NO: 513623 - RNA, 19 nt, Homo sapiens
  misc_RNA (1)...(19): siRNA sense strand
gaaguucuguuaucugugu

SEQ ID NO: 513624 - RNA, 19 nt, Homo sapiens
  misc_RNA (1)...(19): siRNA sense strand
caugacaccucacaucuuu

SEQ ID NO: 513625 - RNA, 19 nt, Homo sapiens
  misc_RNA (1)...(19): siRNA sense strand
gaggauacaugucguuguu

SEQ ID NO: 513626 - RNA, 19 nt, Homo sapiens
  misc_RNA (1)...(19): siRNA sense strand
uuucacaacucuaggauua

SEQ ID NO: 513627 - RNA, 19 nt, Homo sapiens
  misc_RNA (1)...(19): siRNA sense strand
gaagcaaaguucuuaugug

SEQ ID NO: 513628 - RNA, 19 nt, Homo sapiens
  misc_RNA (1)...(19): siRNA sense strand
guagaaaggaggucaauga

SEQ ID NO: 513629 - RNA, 19 nt, Homo sapiens
  misc_RNA (1)...(19): siRNA sense strand
cagaauaacugcuacuauc

SEQ ID NO: 513630 - RNA, 19 nt, Homo sapiens
  misc_RNA (1)...(19): siRNA sense strand
gcgucgaccucaugaguua

SEQ ID NO: 513631 - RNA, 19 nt, Homo sapiens
  misc_RNA (1)...(19): siRNA sense strand
gaagauggaauucccugua

SEQ ID NO: 513632 - RNA, 19 nt, Homo sapiens
  misc_RNA (1)...(19): siRNA sense strand
gaacaucugguauacaaga

SEQ ID NO: 513633 - RNA, 19 nt, Homo sapiens
  misc_RNA (1)...(19): siRNA sense strand
ugacuuugcuuaugaaauc

SEQ ID NO: 513634 - RNA, 19 nt, Homo sapiens
  misc_RNA (1)...(19): siRNA sense strand
gaacaguguaggaggauuu

SEQ ID NO: 513635 - RNA, 19 nt, Homo sapiens
  misc_RNA (1)...(19): siRNA sense strand
uauacaagauggacaguga

SEQ ID NO: 513636 - RNA, 19 nt, Homo sapiens
  misc_RNA (1)...(19): siRNA sense strand
gcagcaagauguucaaacu

SEQ ID NO: 513637 - RNA, 19 nt, Homo sapiens
  misc_RNA (1)...(19): siRNA sense strand
gaaugguguuguugaagaa

SEQ ID NO: 513638 - RNA, 19 nt, Homo sapiens
  misc_RNA (1)...(19): siRNA sense strand
gaaaggaacgacucaaagu

SEQ ID NO: 513639 - RNA, 19 nt, Homo sapiens
  misc_RNA (1)...(19): siRNA sense strand
ccagaguggugcaauggua

SEQ ID NO: 513640 - RNA, 19 nt, Homo sapiens
  misc_RNA (1)...(19): siRNA sense strand
caaaguugcuggaggaucu

SEQ ID NO: 513641 - RNA, 19 nt, Homo sapiens
  misc_RNA (1)...(19): siRNA sense strand
gcgcaaauacugcaaguga

SEQ ID NO: 513642 - RNA, 19 nt, Homo sapiens
  misc_RNA (1)...(19): siRNA sense strand
gaggaucuauauguuauug

SEQ ID NO: 513643 - RNA, 19 nt, Homo sapiens
  misc_RNA (1)...(19): siRNA sense strand
aaagaucccugcugucugu

SEQ ID NO: 513644 - RNA, 19 nt, Homo sapiens
  misc_RNA (1)...(19): siRNA sense strand
cgaauggaauuugaagaaa

SEQ ID NO: 513645 - RNA, 19 nt, Homo sapiens
  misc_RNA (1)...(19): siRNA sense strand
aaacaucacugccauugca

SEQ ID NO: 513646 - RNA, 19 nt, Homo sapiens
  misc_RNA (1)...(19): siRNA sense strand
ucaagaagcuuuuguuuuc

SEQ ID NO: 513647 - RNA, 19 nt, Homo sapiens
  misc_RNA (1)...(19): siRNA sense strand
ucacugccauugcaauuau

SEQ ID NO: 513648 - RNA, 19 nt, Homo sapiens
  misc_RNA (1)...(19): siRNA sense strand
gacagaaauucccaauaug

SEQ ID NO: 513649 - RNA, 19 nt, Homo sapiens
  misc_RNA (1)...(19): siRNA sense strand
gcaaauacugcaagugaga

SEQ ID NO: 513650 - RNA, 19 nt, Homo sapiens
  misc_RNA (1)...(19): siRNA sense strand
ugaaauaacaugccgaaug

SEQ ID NO: 513651 - RNA, 19 nt, Homo sapiens
  misc_RNA (1)...(19): siRNA sense strand
gaacagagugugggauaga

SEQ ID NO: 513652 - RNA, 19 nt, Homo sapiens
  misc_RNA (1)...(19): siRNA sense strand
caaauugcacucugacuga

SEQ ID NO: 513653 - RNA, 19 nt, Homo sapiens
  misc_RNA (1)...(19): siRNA sense strand
ggauacaugucguuguuca

SEQ ID NO: 513654 - RNA, 19 nt, Homo sapiens
  misc_RNA (1)...(19): siRNA sense strand
guugugcaauuguuacuuu

SEQ ID NO: 513655 - RNA, 19 nt, Homo sapiens
  misc_RNA (1)...(19): siRNA sense strand
gcuggaggaucuauauguu

SEQ ID NO: 513656 - RNA, 19 nt, Homo sapiens
  misc_RNA (1)...(19): siRNA sense strand
ucaucuaggucauaauuug

SEQ ID NO: 513657 - RNA, 19 nt, Homo sapiens
  misc_RNA (1)...(19): siRNA sense strand
caaagaauugaacaccuua

SEQ ID NO: 513658 - RNA, 19 nt, Homo sapiens
  misc_RNA (1)...(19): siRNA sense strand
caggcuggcucuccuauau

SEQ ID NO: 513659 - RNA, 19 nt, Homo sapiens
  misc_RNA (1)...(19): siRNA sense strand
ggaguacugauuaccauuu

SEQ ID NO: 513660 - RNA, 19 nt, Homo sapiens
  misc_RNA (1)...(19): siRNA sense strand
gugagaaugugacagaaau

SEQ ID NO: 513661 - RNA, 19 nt, Homo sapiens
  misc_RNA (1)...(19): siRNA sense strand
acaaagaauugaacaccuu

SEQ ID NO: 513662 - RNA, 19 nt, Homo sapiens
  misc_RNA (1)...(19): siRNA sense strand
aagauggaauucccuguaa

SEQ ID NO: 513663 - RNA, 19 nt, Homo sapiens
  misc_RNA (1)...(19): siRNA sense strand
guggaagaauucaguguga

SEQ ID NO: 513664 - RNA, 19 nt, Homo sapiens
  misc_RNA (1)...(19): siRNA sense strand
guacauucguuaugaaagg

SEQ ID NO: 513665 - RNA, 19 nt, Homo sapiens
  misc_RNA (1)...(19): siRNA sense strand
ugauauuggugaagugaaa

SEQ ID NO: 513666 - RNA, 19 nt, Homo sapiens
  misc_RNA (1)...(19): siRNA sense strand
uaacaugccgaauggaauu

SEQ ID NO: 513667 - RNA, 19 nt, Homo sapiens
  misc_RNA (1)...(19): siRNA sense strand
gagacuugcuacaaagaau

SEQ ID NO: 513668 - RNA, 19 nt, Homo sapiens
  misc_RNA (1)...(19): siRNA sense strand
gggaaaguguguagaaagg

SEQ ID NO: 513669 - RNA, 19 nt, Homo sapiens
  misc_RNA (1)...(19): siRNA sense strand
gcaauuguuacuuucauga

SEQ ID NO: 513670 - RNA, 19 nt, Homo sapiens
  misc_RNA (1)...(19): siRNA sense strand
gaaauuguagucgucauug

SEQ ID NO: 513671 - RNA, 19 nt, Homo sapiens
  misc_RNA (1)...(19): siRNA sense strand
caugagauccggauuuaug

SEQ ID NO: 513672 - RNA, 19 nt, Homo sapiens
  misc_RNA (1)...(19): siRNA sense strand
ccucccaacugccugauaa

SEQ ID NO: 513673 - RNA, 19 nt, Homo sapiens
  misc_RNA (1)...(19): siRNA sense strand
gaugaagggaccugauauu

SEQ ID NO: 513674 - RNA, 19 nt, Homo sapiens
  misc_RNA (1)...(19): siRNA sense strand
gggaugaagggaccugaua

SEQ ID NO: 513675 - RNA, 19 nt, Homo sapiens
  misc_RNA (1)...(19): siRNA sense strand
gaguacugauuaccauuug

SEQ ID NO: 513676 - RNA, 19 nt, Homo sapiens
  misc_RNA (1)...(19): siRNA sense strand
gugaagcgcugugggaaug

SEQ ID NO: 513677 - RNA, 19 nt, Homo sapiens
  misc_RNA (1)...(19): siRNA sense strand
gcaacccaccaauaacuaa

SEQ ID NO: 513678 - RNA, 19 nt, Homo sapiens
  misc_RNA (1)...(19): siRNA sense strand
gcaaguggaagucggagaa

SEQ ID NO: 513679 - RNA, 19 nt, Homo sapiens
  misc_RNA (1)...(19): siRNA sense strand
ggaggucaaugaaugugau

SEQ ID NO: 513680 - RNA, 19 nt, Homo sapiens
  misc_RNA (1)...(19): siRNA sense strand
uugaacaucugguauacaa

SEQ ID NO: 513681 - RNA, 19 nt, Homo sapiens
  misc_RNA (1)...(19): siRNA sense strand
ggugaugccuucccagagu

SEQ ID NO: 513682 - RNA, 19 nt, Homo sapiens
  misc_RNA (1)...(19): siRNA sense strand
acagaaauucccaauauga

SEQ ID NO: 513683 - RNA, 19 nt, Homo sapiens
  misc_RNA (1)...(19): siRNA sense strand
caucaucuaggucauaauu

SEQ ID NO: 513684 - RNA, 19 nt, Homo sapiens
  misc_RNA (1)...(19): siRNA sense strand
caacaugacaccucacauc

SEQ ID NO: 513685 - RNA, 19 nt, Homo sapiens
  misc_RNA (1)...(19): siRNA sense strand
uggaggaucuauauguuau

SEQ ID NO: 513686 - RNA, 19 nt, Homo sapiens
  misc_RNA (1)...(19): siRNA sense strand
ggaagaauucagugugaga

SEQ ID NO: 513687 - RNA, 19 nt, Homo sapiens
  misc_RNA (1)...(19): siRNA sense strand
guagagaggacaaaguguu

SEQ ID NO: 513688 - RNA, 19 nt, Homo sapiens
  misc_RNA (1)...(19): siRNA sense strand
ugaaggcaacccaccaaua

SEQ ID NO: 513689 - RNA, 19 nt, Homo sapiens
  misc_RNA (1)...(19): siRNA sense strand
gauggacagugaggagaaa

SEQ ID NO: 513690 - RNA, 19 nt, Homo sapiens
  misc_RNA (1)...(19): siRNA sense strand
cuguguauauuguugcuua

SEQ ID NO: 513691 - RNA, 19 nt, Homo sapiens
  misc_RNA (1)...(19): siRNA sense strand
ggauagaucauauaugcau

SEQ ID NO: 513692 - RNA, 19 nt, Homo sapiens
  misc_RNA (1)...(19): siRNA sense strand
ugggauagaucauauaugc

SEQ ID NO: 513693 - RNA, 19 nt, Homo sapiens
  misc_RNA (1)...(19): siRNA sense strand
gaaccaugaugaggauaca

SEQ ID NO: 513694 - RNA, 19 nt, Homo sapiens
  misc_RNA (1)...(19): siRNA sense strand
uguaguagaugauguaagg

SEQ ID NO: 513695 - RNA, 19 nt, Homo sapiens
  misc_RNA (1)...(19): siRNA sense strand
accaugagauccggauuua

SEQ ID NO: 513696 - RNA, 19 nt, Homo sapiens
  misc_RNA (1)...(19): siRNA sense strand
caccguaguugugcaauug

SEQ ID NO: 513697 - RNA, 19 nt, Homo sapiens
  misc_RNA (1)...(19): siRNA sense strand
caauugcaguggcucauca

SEQ ID NO: 513698 - RNA, 19 nt, Homo sapiens
  misc_RNA (1)...(19): siRNA sense strand
ugcaguggcucaucaucua

SEQ ID NO: 513699 - RNA, 19 nt, Homo sapiens
  misc_RNA (1)...(19): siRNA sense strand
caggcacuguguccauaua

SEQ ID NO: 513700 - RNA, 19 nt, Homo sapiens
  misc_RNA (1)...(19): siRNA sense strand
cagggaaaguguguagaaa

SEQ ID NO: 513701 - RNA, 19 nt, Homo sapiens
  misc_RNA (1)...(19): siRNA sense strand
ccugcugucugucaaauug

SEQ ID NO: 513702 - RNA, 19 nt, Homo sapiens
  misc_RNA (1)...(19): siRNA sense strand
ggagaucuggaccaauaaa

SEQ ID NO: 513703 - RNA, 19 nt, Homo sapiens
  misc_RNA (1)...(19): siRNA sense strand
ccauauaaccaucuugaau

SEQ ID NO: 513704 - RNA, 19 nt, Homo sapiens
  misc_RNA (1)...(19): siRNA sense strand
ucgcuucaaugacauaaug

SEQ ID NO: 513705 - RNA, 19 nt, Homo sapiens
  misc_RNA (1)...(19): siRNA sense strand
gaagaauucagugugagaa

SEQ ID NO: 513706 - RNA, 19 nt, Homo sapiens
  misc_RNA (1)...(19): siRNA sense strand
agaaacacauuauccacau

SEQ ID NO: 513707 - RNA, 19 nt, Homo sapiens
  misc_RNA (1)...(19): siRNA sense strand
ugacugaugguucuacuug

SEQ ID NO: 513708 - RNA, 19 nt, Homo sapiens
  misc_RNA (1)...(19): siRNA sense strand
ggaagucggagaacauuac

SEQ ID NO: 513709 - RNA, 19 nt, Homo sapiens
  misc_RNA (1)...(19): siRNA sense strand
gggcaucugcaacaauaaa

SEQ ID NO: 513710 - RNA, 19 nt, Homo sapiens
  misc_RNA (1)...(19): siRNA sense strand
uaauugcucaccugcauuu

SEQ ID NO: 513711 - RNA, 19 nt, Homo sapiens
  misc_RNA (1)...(19): siRNA sense strand
ggaacagagugugggauag

SEQ ID NO: 513712 - RNA, 19 nt, Homo sapiens
  misc_RNA (1)...(19): siRNA sense strand
gaauaacugcuacuaucau

SEQ ID NO: 513713 - RNA, 19 nt, Homo sapiens
  misc_RNA (1)...(19): siRNA sense strand
gugugacuguggaccuuua

SEQ ID NO: 513714 - RNA, 19 nt, Homo sapiens
  misc_RNA (1)...(19): siRNA sense strand
gaccugauauuggugaagu

SEQ ID NO: 513715 - RNA, 19 nt, Homo sapiens
  misc_RNA (1)...(19): siRNA sense strand
gaaaggaggucaaugaaug

SEQ ID NO: 513716 - RNA, 19 nt, Homo sapiens
  misc_RNA (1)...(19): siRNA sense strand
gaaauaacaugccgaaugg

SEQ ID NO: 513717 - RNA, 19 nt, Homo sapiens
  misc_RNA (1)...(19): siRNA sense strand
ugacagaaauucccaauau

SEQ ID NO: 513718 - RNA, 19 nt, Homo sapiens
  misc_RNA (1)...(19): siRNA sense strand
ggaaaucugugcaccugua

SEQ ID NO: 513719 - RNA, 19 nt, Homo sapiens
  misc_RNA (1)...(19): siRNA sense strand
gaaggcaacccaccaauaa

SEQ ID NO: 513720 - RNA, 19 nt, Homo sapiens
  misc_RNA (1)...(19): siRNA sense strand
gaaacacauuauccacaua

SEQ ID NO: 513721 - RNA, 19 nt, Homo sapiens
  misc_RNA (1)...(19): siRNA sense strand
ggaaugguguuguugaaga

SEQ ID NO: 513722 - RNA, 19 nt, Homo sapiens
  misc_RNA (1)...(19): siRNA sense strand
gaagggaccugauauuggu

SEQ ID NO: 513723 - RNA, 19 nt, Homo sapiens
  misc_RNA (1)...(19): siRNA sense strand
gaaguucuguuaucugugu

SEQ ID NO: 513724 - RNA, 19 nt, Homo sapiens
  misc_RNA (1)...(19): siRNA sense strand
caugacaccucacaucuuu

SEQ ID NO: 513725 - RNA, 19 nt, Homo sapiens
  misc_RNA (1)...(19): siRNA sense strand
gaggauacaugucguuguu

SEQ ID NO: 513726 - RNA, 19 nt, Homo sapiens
  misc_RNA (1)...(19): siRNA sense strand
uuucacaacucuaggauua

SEQ ID NO: 513727 - RNA, 19 nt, Homo sapiens
  misc_RNA (1)...(19): siRNA sense strand
gaagcaaaguucuuaugug

SEQ ID NO: 513728 - RNA, 19 nt, Homo sapiens
  misc_RNA (1)...(19): siRNA sense strand
guagaaaggaggucaauga

SEQ ID NO: 513729 - RNA, 19 nt, Homo sapiens
  misc_RNA (1)...(19): siRNA sense strand
cagaauaacugcuacuauc

SEQ ID NO: 513730 - RNA, 19 nt, Homo sapiens
  misc_RNA (1)...(19): siRNA sense strand
gcgucgaccucaugaguua

SEQ ID NO: 513731 - RNA, 19 nt, Homo sapiens
  misc_RNA (1)...(19): siRNA sense strand
gaagauggaauucccugua

SEQ ID NO: 513732 - RNA, 19 nt, Homo sapiens
  misc_RNA (1)...(19): siRNA sense strand
gaacaucugguauacaaga

SEQ ID NO: 513733 - RNA, 19 nt, Homo sapiens
  misc_RNA (1)...(19): siRNA sense strand
ugacuuugcuuaugaaauc

SEQ ID NO: 513734 - RNA, 19 nt, Homo sapiens
  misc_RNA (1)...(19): siRNA sense strand
gaacaguguaggaggauuu

SEQ ID NO: 513735 - RNA, 19 nt, Homo sapiens
  misc_RNA (1)...(19): siRNA sense strand
uauacaagauggacaguga

SEQ ID NO: 513736 - RNA, 19 nt, Homo sapiens
  misc_RNA (1)...(19): siRNA sense strand
gcagcaagauguucaaacu

SEQ ID NO: 513737 - RNA, 19 nt, Homo sapiens
  misc_RNA (1)...(19): siRNA sense strand
gaaugguguuguugaagaa

SEQ ID NO: 513738 - RNA, 19 nt, Homo sapiens
  misc_RNA (1)...(19): siRNA sense strand
gaaaggaacgacucaaagu

SEQ ID NO: 513739 - RNA, 19 nt, Homo sapiens
  misc_RNA (1)...(19): siRNA sense strand
ccagaguggugcaauggua

SEQ ID NO: 513740 - RNA, 19 nt, Homo sapiens
  misc_RNA (1)...(19): siRNA sense strand
caaaguugcuggaggaucu

SEQ ID NO: 513741 - RNA, 19 nt, Homo sapiens
  misc_RNA (1)...(19): siRNA sense strand
gcgcaaauacugcaaguga

SEQ ID NO: 513742 - RNA, 19 nt, Homo sapiens
  misc_RNA (1)...(19): siRNA sense strand
gaggaucuauauguuauug

SEQ ID NO: 513743 - RNA, 19 nt, Homo sapiens
  misc_RNA (1)...(19): siRNA sense strand
aaagaucccugcugucugu

SEQ ID NO: 513744 - RNA, 19 nt, Homo sapiens
  misc_RNA (1)...(19): siRNA sense strand
cgaauggaauuugaagaaa

SEQ ID NO: 513745 - RNA, 19 nt, Homo sapiens
  misc_RNA (1)...(19): siRNA sense strand
aaacaucacugccauugca

SEQ ID NO: 513746 - RNA, 19 nt, Homo sapiens
  misc_RNA (1)...(19): siRNA sense strand
ucaagaagcuuuuguuuuc

SEQ ID NO: 513747 - RNA, 19 nt, Homo sapiens
  misc_RNA (1)...(19): siRNA sense strand
ucacugccauugcaauuau

SEQ ID NO: 513748 - RNA, 19 nt, Homo sapiens
  misc_RNA (1)...(19): siRNA sense strand
gacagaaauucccaauaug

SEQ ID NO: 513749 - RNA, 19 nt, Homo sapiens
  misc_RNA (1)...(19): siRNA sense strand
gcaaauacugcaagugaga

SEQ ID NO: 513750 - RNA, 19 nt, Homo sapiens
  misc_RNA (1)...(19): siRNA sense strand
ugaaauaacaugccgaaug

SEQ ID NO: 513751 - RNA, 19 nt, Homo sapiens
  misc_RNA (1)...(19): siRNA sense strand
gaacagagugugggauaga

SEQ ID NO: 513752 - RNA, 19 nt, Homo sapiens
  misc_RNA (1)...(19): siRNA sense strand
caaauugcacucugacuga

SEQ ID NO: 513753 - RNA, 19 nt, Homo sapiens
  misc_RNA (1)...(19): siRNA sense strand
ggauacaugucguuguuca

SEQ ID NO: 513754 - RNA, 19 nt, Homo sapiens
  misc_RNA (1)...(19): siRNA sense strand
guugugcaauuguuacuuu

SEQ ID NO: 513755 - RNA, 19 nt, Homo sapiens
  misc_RNA (1)...(19): siRNA sense strand
gcuggaggaucuauauguu

SEQ ID NO: 513756 - RNA, 19 nt, Homo sapiens
  misc_RNA (1)...(19): siRNA sense strand
ucaucuaggucauaauuug

SEQ ID NO: 513757 - RNA, 19 nt, Homo sapiens
  misc_RNA (1)...(19): siRNA sense strand
caaagaauugaacaccuua

SEQ ID NO: 513758 - RNA, 19 nt, Homo sapiens
  misc_RNA (1)...(19): siRNA sense strand
caggcuggcucuccuauau

SEQ ID NO: 513759 - RNA, 19 nt, Homo sapiens
  misc_RNA (1)...(19): siRNA sense strand
ggaguacugauuaccauuu

SEQ ID NO: 513760 - RNA, 19 nt, Homo sapiens
  misc_RNA (1)...(19): siRNA sense strand
gugagaaugugacagaaau

SEQ ID NO: 513761 - RNA, 19 nt, Homo sapiens
  misc_RNA (1)...(19): siRNA sense strand
acaaagaauugaacaccuu

SEQ ID NO: 513762 - RNA, 19 nt, Homo sapiens
  misc_RNA (1)...(19): siRNA sense strand
aagauggaauucccuguaa

SEQ ID NO: 513763 - RNA, 19 nt, Homo sapiens
  misc_RNA (1)...(19): siRNA sense strand
guggaagaauucaguguga

SEQ ID NO: 513764 - RNA, 19 nt, Homo sapiens
  misc_RNA (1)...(19): siRNA sense strand
guacauucguuaugaaagg

SEQ ID NO: 513765 - RNA, 19 nt, Homo sapiens
  misc_RNA (1)...(19): siRNA sense strand
ugauauuggugaagugaaa

SEQ ID NO: 513766 - RNA, 19 nt, Homo sapiens
  misc_RNA (1)...(19): siRNA sense strand
uaacaugccgaauggaauu

SEQ ID NO: 513767 - RNA, 19 nt, Homo sapiens
  misc_RNA (1)...(19): siRNA sense strand
gagacuugcuacaaagaau

SEQ ID NO: 513768 - RNA, 19 nt, Homo sapiens
  misc_RNA (1)...(19): siRNA sense strand
gggaaaguguguagaaagg

SEQ ID NO: 513769 - RNA, 19 nt, Homo sapiens
  misc_RNA (1)...(19): siRNA sense strand
gcaauuguuacuuucauga

SEQ ID NO: 513770 - RNA, 19 nt, Homo sapiens
  misc_RNA (1)...(19): siRNA sense strand
gaaauuguagucgucauug

SEQ ID NO: 513771 - RNA, 19 nt, Homo sapiens
  misc_RNA (1)...(19): siRNA sense strand
caugagauccggauuuaug

SEQ ID NO: 513772 - RNA, 19 nt, Homo sapiens
  misc_RNA (1)...(19): siRNA sense strand
ccucccaacugccugauaa

SEQ ID NO: 513773 - RNA, 19 nt, Homo sapiens
  misc_RNA (1)...(19): siRNA sense strand
gaugaagggaccugauauu

SEQ ID NO: 513774 - RNA, 19 nt, Homo sapiens
  misc_RNA (1)...(19): siRNA sense strand
gggaugaagggaccugaua

SEQ ID NO: 513775 - RNA, 19 nt, Homo sapiens
  misc_RNA (1)...(19): siRNA sense strand
gaguacugauuaccauuug

SEQ ID NO: 513776 - RNA, 19 nt, Homo sapiens
  misc_RNA (1)...(19): siRNA sense strand
gugaagcgcugugggaaug

SEQ ID NO: 513777 - RNA, 19 nt, Homo sapiens
  misc_RNA (1)...(19): siRNA sense strand
gcaacccaccaauaacuaa

SEQ ID NO: 513778 - RNA, 19 nt, Homo sapiens
  misc_RNA (1)...(19): siRNA sense strand
gcaaguggaagucggagaa

SEQ ID NO: 513779 - RNA, 19 nt, Homo sapiens
  misc_RNA (1)...(19): siRNA sense strand
ggaggucaaugaaugugau

SEQ ID NO: 513780 - RNA, 19 nt, Homo sapiens
  misc_RNA (1)...(19): siRNA sense strand
uugaacaucugguauacaa

SEQ ID NO: 513781 - RNA, 19 nt, Homo sapiens
  misc_RNA (1)...(19): siRNA sense strand
ggugaugccuucccagagu

SEQ ID NO: 513782 - RNA, 19 nt, Homo sapiens
  misc_RNA (1)...(19): siRNA sense strand
ggugaugccuucccagagu

SEQ ID NO: 513783 - RNA, 19 nt, Homo sapiens
  misc_RNA (1)...(19): siRNA sense strand
acagaaauucccaauauga

SEQ ID NO: 513784 - RNA, 19 nt, Homo sapiens
  misc_RNA (1)...(19): siRNA sense strand
caucaucuaggucauaauu

SEQ ID NO: 513785 - RNA, 19 nt, Homo sapiens
  misc_RNA (1)...(19): siRNA sense strand
caacaugacaccucacauc

SEQ ID NO: 513786 - RNA, 19 nt, Homo sapiens
  misc_RNA (1)...(19): siRNA sense strand
uggaggaucuauauguuau

SEQ ID NO: 513787 - RNA, 19 nt, Homo sapiens
  misc_RNA (1)...(19): siRNA sense strand
ggaagaauucagugugaga

SEQ ID NO: 513788 - RNA, 19 nt, Homo sapiens
  misc_RNA (1)...(19): siRNA sense strand
guagagaggacaaaguguu

SEQ ID NO: 513789 - RNA, 19 nt, Homo sapiens
  misc_RNA (1)...(19): siRNA sense strand
ugaaggcaacccaccaaua

SEQ ID NO: 513790 - RNA, 19 nt, Homo sapiens
  misc_RNA (1)...(19): siRNA sense strand
gauggacagugaggagaaa

SEQ ID NO: 513791 - RNA, 19 nt, Homo sapiens
  misc_RNA (1)...(19): siRNA sense strand
cuguguauauuguugcuua

SEQ ID NO: 513792 - RNA, 19 nt, Homo sapiens
  misc_RNA (1)...(19): siRNA sense strand
ggauagaucauauaugcau

SEQ ID NO: 513793 - RNA, 19 nt, Homo sapiens
  misc_RNA (1)...(19): siRNA sense strand
ugggauagaucauauaugc

SEQ ID NO: 513794 - RNA, 19 nt, Homo sapiens
  misc_RNA (1)...(19): siRNA sense strand
gaaccaugaugaggauaca

SEQ ID NO: 513795 - RNA, 19 nt, Homo sapiens
  misc_RNA (1)...(19): siRNA sense strand
uguaguagaugauguaagg

SEQ ID NO: 513796 - RNA, 19 nt, Homo sapiens
  misc_RNA (1)...(19): siRNA sense strand
accaugagauccggauuua

SEQ ID NO: 513797 - RNA, 19 nt, Homo sapiens
  misc_RNA (1)...(19): siRNA sense strand
caccguaguugugcaauug

SEQ ID NO: 513798 - RNA, 19 nt, Homo sapiens
  misc_RNA (1)...(19): siRNA sense strand
caauugcaguggcucauca

SEQ ID NO: 513799 - RNA, 19 nt, Homo sapiens
  misc_RNA (1)...(19): siRNA sense strand
ugcaguggcucaucaucua

SEQ ID NO: 513800 - RNA, 19 nt, Homo sapiens
  misc_RNA (1)...(19): siRNA sense strand
caggcacuguguccauaua

SEQ ID NO: 513801 - RNA, 19 nt, Homo sapiens
  misc_RNA (1)...(19): siRNA sense strand
cagggaaaguguguagaaa

SEQ ID NO: 513802 - RNA, 19 nt, Homo sapiens
  misc_RNA (1)...(19): siRNA sense strand
ccugcugucugucaaauug

SEQ ID NO: 513803 - RNA, 19 nt, Homo sapiens
  misc_RNA (1)...(19): siRNA sense strand
ggagaucuggaccaauaaa

SEQ ID NO: 513804 - RNA, 19 nt, Homo sapiens
  misc_RNA (1)...(19): siRNA sense strand
ccauauaaccaucuugaau

SEQ ID NO: 513805 - RNA, 19 nt, Homo sapiens
  misc_RNA (1)...(19): siRNA sense strand
ucgcuucaaugacauaaug

SEQ ID NO: 513806 - RNA, 19 nt, Homo sapiens
  misc_RNA (1)...(19): siRNA sense strand
gaagaauucagugugagaa

SEQ ID NO: 513807 - RNA, 19 nt, Homo sapiens
  misc_RNA (1)...(19): siRNA sense strand
agaaacacauuauccacau

SEQ ID NO: 513808 - RNA, 19 nt, Homo sapiens
  misc_RNA (1)...(19): siRNA sense strand
ugacugaugguucuacuug

SEQ ID NO: 513809 - RNA, 19 nt, Homo sapiens
  misc_RNA (1)...(19): siRNA sense strand
ggaagucggagaacauuac

SEQ ID NO: 513810 - RNA, 19 nt, Homo sapiens
  misc_RNA (1)...(19): siRNA sense strand
gggcaucugcaacaauaaa

SEQ ID NO: 513811 - RNA, 19 nt, Homo sapiens
  misc_RNA (1)...(19): siRNA sense strand
uaauugcucaccugcauuu

SEQ ID NO: 513812 - RNA, 19 nt, Homo sapiens
  misc_RNA (1)...(19): siRNA sense strand
gaauaacugcuacuaucau

SEQ ID NO: 513813 - RNA, 19 nt, Homo sapiens
  misc_RNA (1)...(19): siRNA sense strand
ggaacagagugugggauag

SEQ ID NO: 513814 - RNA, 19 nt, Homo sapiens
  misc_RNA (1)...(19): siRNA sense strand
gugugacuguggaccuuua

SEQ ID NO: 513815 - RNA, 19 nt, Homo sapiens
  misc_RNA (1)...(19): siRNA sense strand
gaaaggaggucaaugaaug

SEQ ID NO: 513816 - RNA, 19 nt, Homo sapiens
  misc_RNA (1)...(19): siRNA sense strand
gaaauaacaugccgaaugg

SEQ ID NO: 513817 - RNA, 19 nt, Homo sapiens
  misc_RNA (1)...(19): siRNA sense strand
ugacagaaauucccaauau

SEQ ID NO: 513818 - RNA, 19 nt, Homo sapiens
  misc_RNA (1)...(19): siRNA sense strand
ggaaaucugugcaccugua

SEQ ID NO: 513819 - RNA, 19 nt, Homo sapiens
  misc_RNA (1)...(19): siRNA sense strand
gaaggcaacccaccaauaa

SEQ ID NO: 513820 - RNA, 19 nt, Homo sapiens
  misc_RNA (1)...(19): siRNA sense strand
gaaacacauuauccacaua

SEQ ID NO: 513821 - RNA, 19 nt, Homo sapiens
  misc_RNA (1)...(19): siRNA sense strand
ggaaugguguuguugaaga

SEQ ID NO: 513822 - RNA, 19 nt, Homo sapiens
  misc_RNA (1)...(19): siRNA sense strand
gaagggaccugauauuggu

SEQ ID NO: 513823 - RNA, 19 nt, Homo sapiens
  misc_RNA (1)...(19): siRNA sense strand
gaaguucuguuaucugugu

SEQ ID NO: 513824 - RNA, 19 nt, Homo sapiens
  misc_RNA (1)...(19): siRNA sense strand
caugacaccucacaucuuu

SEQ ID NO: 513825 - RNA, 19 nt, Homo sapiens
  misc_RNA (1)...(19): siRNA sense strand
gaggauacaugucguuguu

SEQ ID NO: 513826 - RNA, 19 nt, Homo sapiens
  misc_RNA (1)...(19): siRNA sense strand
uuucacaacucuaggauua

SEQ ID NO: 513827 - RNA, 19 nt, Homo sapiens
  misc_RNA (1)...(19): siRNA sense strand
gaagcaaaguucuuaugug

SEQ ID NO: 513828 - RNA, 19 nt, Homo sapiens
  misc_RNA (1)...(19): siRNA sense strand
guagaaaggaggucaauga

SEQ ID NO: 513829 - RNA, 19 nt, Homo sapiens
  misc_RNA (1)...(19): siRNA sense strand
cagaauaacugcuacuauc

SEQ ID NO: 513830 - RNA, 19 nt, Homo sapiens
  misc_RNA (1)...(19): siRNA sense strand
gcgucgaccucaugaguua

SEQ ID NO: 513831 - RNA, 19 nt, Homo sapiens
  misc_RNA (1)...(19): siRNA sense strand
gaagauggaauucccugua

SEQ ID NO: 513832 - RNA, 19 nt, Homo sapiens
  misc_RNA (1)...(19): siRNA sense strand
gaacaucugguauacaaga

SEQ ID NO: 513833 - RNA, 19 nt, Homo sapiens
  misc_RNA (1)...(19): siRNA sense strand
ugacuuugcuuaugaaauc

SEQ ID NO: 513834 - RNA, 19 nt, Homo sapiens
  misc_RNA (1)...(19): siRNA sense strand
gaacaguguaggaggauuu

SEQ ID NO: 513835 - RNA, 19 nt, Homo sapiens
  misc_RNA (1)...(19): siRNA sense strand
uauacaagauggacaguga

SEQ ID NO: 513836 - RNA, 19 nt, Homo sapiens
  misc_RNA (1)...(19): siRNA sense strand
gcagcaagauguucaaacu

SEQ ID NO: 513837 - RNA, 19 nt, Homo sapiens
  misc_RNA (1)...(19): siRNA sense strand
gaaugguguuguugaagaa

SEQ ID NO: 513838 - RNA, 19 nt, Homo sapiens
  misc_RNA (1)...(19): siRNA sense strand
gaaaggaacgacucaaagu

SEQ ID NO: 513839 - RNA, 19 nt, Homo sapiens
  misc_RNA (1)...(19): siRNA sense strand
ccagaguggugcaauggua

SEQ ID NO: 513840 - RNA, 19 nt, Homo sapiens
  misc_RNA (1)...(19): siRNA sense strand
caaaguugcuggaggaucu

SEQ ID NO: 513841 - RNA, 19 nt, Homo sapiens
  misc_RNA (1)...(19): siRNA sense strand
gcgcaaauacugcaaguga

SEQ ID NO: 513842 - RNA, 19 nt, Homo sapiens
  misc_RNA (1)...(19): siRNA sense strand
gaggaucuauauguuauug

SEQ ID NO: 513843 - RNA, 19 nt, Homo sapiens
  misc_RNA (1)...(19): siRNA sense strand
aaagaucccugcugucugu

SEQ ID NO: 513844 - RNA, 19 nt, Homo sapiens
  misc_RNA (1)...(19): siRNA sense strand
cgaauggaauuugaagaaa

SEQ ID NO: 513845 - RNA, 19 nt, Homo sapiens
  misc_RNA (1)...(19): siRNA sense strand
aaacaucacugccauugca

SEQ ID NO: 513846 - RNA, 19 nt, Homo sapiens
  misc_RNA (1)...(19): siRNA sense strand
ucaagaagcuuuuguuuuc

SEQ ID NO: 513847 - RNA, 19 nt, Homo sapiens
  misc_RNA (1)...(19): siRNA sense strand
ucacugccauugcaauuau

SEQ ID NO: 513848 - RNA, 19 nt, Homo sapiens
  misc_RNA (1)...(19): siRNA sense strand
gacagaaauucccaauaug

SEQ ID NO: 513849 - RNA, 19 nt, Homo sapiens
  misc_RNA (1)...(19): siRNA sense strand
gcaaauacugcaagugaga

SEQ ID NO: 513850 - RNA, 19 nt, Homo sapiens
  misc_RNA (1)...(19): siRNA sense strand
ugaaauaacaugccgaaug

SEQ ID NO: 513851 - RNA, 19 nt, Homo sapiens
  misc_RNA (1)...(19): siRNA sense strand
gaacagagugugggauaga

SEQ ID NO: 513852 - RNA, 19 nt, Homo sapiens
  misc_RNA (1)...(19): siRNA sense strand
caaauugcacucugacuga

SEQ ID NO: 513853 - RNA, 19 nt, Homo sapiens
  misc_RNA (1)...(19): siRNA sense strand
ggauacaugucguuguuca

SEQ ID NO: 513854 - RNA, 19 nt, Homo sapiens
  misc_RNA (1)...(19): siRNA sense strand
guugugcaauuguuacuuu

SEQ ID NO: 513855 - RNA, 19 nt, Homo sapiens
  misc_RNA (1)...(19): siRNA sense strand
gcuggaggaucuauauguu

SEQ ID NO: 513856 - RNA, 19 nt, Homo sapiens
  misc_RNA (1)...(19): siRNA sense strand
ucaucuaggucauaauuug

SEQ ID NO: 513857 - RNA, 19 nt, Homo sapiens
  misc_RNA (1)...(19): siRNA sense strand
caaagaauugaacaccuua

SEQ ID NO: 513858 - RNA, 19 nt, Homo sapiens
  misc_RNA (1)...(19): siRNA sense strand
caggcuggcucuccuauau

SEQ ID NO: 513859 - RNA, 19 nt, Homo sapiens
  misc_RNA (1)...(19): siRNA sense strand
ggaguacugauuaccauuu

SEQ ID NO: 513860 - RNA, 19 nt, Homo sapiens
  misc_RNA (1)...(19): siRNA sense strand
gugagaaugugacagaaau

SEQ ID NO: 513861 - RNA, 19 nt, Homo sapiens
  misc_RNA (1)...(19): siRNA sense strand
acaaagaauugaacaccuu

SEQ ID NO: 513862 - RNA, 19 nt, Homo sapiens
  misc_RNA (1)...(19): siRNA sense strand
aagauggaauucccuguaa

SEQ ID NO: 513863 - RNA, 19 nt, Homo sapiens
  misc_RNA (1)...(19): siRNA sense strand
guggaagaauucaguguga

SEQ ID NO: 513864 - RNA, 19 nt, Homo sapiens
  misc_RNA (1)...(19): siRNA sense strand
guacauucguuaugaaagg

SEQ ID NO: 513865 - RNA, 19 nt, Homo sapiens
  misc_RNA (1)...(19): siRNA sense strand
ugauauuggugaagugaaa

SEQ ID NO: 513866 - RNA, 19 nt, Homo sapiens
  misc_RNA (1)...(19): siRNA sense strand
uaacaugccgaauggaauu

SEQ ID NO: 513867 - RNA, 19 nt, Homo sapiens
  misc_RNA (1)...(19): siRNA sense strand
gagacuugcuacaaagaau

SEQ ID NO: 513868 - RNA, 19 nt, Homo sapiens
  misc_RNA (1)...(19): siRNA sense strand
gggaaaguguguagaaagg

SEQ ID NO: 513869 - RNA, 19 nt, Homo sapiens
  misc_RNA (1)...(19): siRNA sense strand
gcaauuguuacuuucauga

SEQ ID NO: 513870 - RNA, 19 nt, Homo sapiens
  misc_RNA (1)...(19): siRNA sense strand
gaaauuguagucgucauug

SEQ ID NO: 513871 - RNA, 19 nt, Homo sapiens
  misc_RNA (1)...(19): siRNA sense strand
caugagauccggauuuaug

SEQ ID NO: 513872 - RNA, 19 nt, Homo sapiens
  misc_RNA (1)...(19): siRNA sense strand
ccucccaacugccugauaa

SEQ ID NO: 513873 - RNA, 19 nt, Homo sapiens
  misc_RNA (1)...(19): siRNA sense strand
gaugaagggaccugauauu

SEQ ID NO: 513874 - RNA, 19 nt, Homo sapiens
  misc_RNA (1)...(19): siRNA sense strand
gggaugaagggaccugaua

SEQ ID NO: 513875 - RNA, 19 nt, Homo sapiens
  misc_RNA (1)...(19): siRNA sense strand
gaguacugauuaccauuug

SEQ ID NO: 513876 - RNA, 19 nt, Homo sapiens
  misc_RNA (1)...(19): siRNA sense strand
gugaagcgcugugggaaug

SEQ ID NO: 513877 - RNA, 19 nt, Homo sapiens
  misc_RNA (1)...(19): siRNA sense strand
gcaacccaccaauaacuaa

SEQ ID NO: 513878 - RNA, 19 nt, Homo sapiens
  misc_RNA (1)...(19): siRNA sense strand
gcaaguggaagucggagaa

SEQ ID NO: 513879 - RNA, 19 nt, Homo sapiens
  misc_RNA (1)...(19): siRNA sense strand
ggaggucaaugaaugugau

SEQ ID NO: 513880 - RNA, 19 nt, Homo sapiens
  misc_RNA (1)...(19): siRNA sense strand
uugaacaucugguauacaa

SEQ ID NO: 513881 - RNA, 19 nt, Homo sapiens
  misc_RNA (1)...(19): siRNA sense strand
ggugaugccuucccagagu

SEQ ID NO: 513882 - RNA, 19 nt, Homo sapiens
  misc_RNA (1)...(19): siRNA sense strand
acagaaauucccaauauga

SEQ ID NO: 513883 - RNA, 19 nt, Homo sapiens
  misc_RNA (1)...(19): siRNA sense strand
caucaucuaggucauaauu

SEQ ID NO: 513884 - RNA, 19 nt, Homo sapiens
  misc_RNA (1)...(19): siRNA sense strand
caacaugacaccucacauc

SEQ ID NO: 513885 - RNA, 19 nt, Homo sapiens
  misc_RNA (1)...(19): siRNA sense strand
uggaggaucuauauguuau

SEQ ID NO: 513886 - RNA, 19 nt, Homo sapiens
  misc_RNA (1)...(19): siRNA sense strand
ggaagaauucagugugaga

SEQ ID NO: 513887 - RNA, 19 nt, Homo sapiens
  misc_RNA (1)...(19): siRNA sense strand
guagagaggacaaaguguu

SEQ ID NO: 513888 - RNA, 19 nt, Homo sapiens
  misc_RNA (1)...(19): siRNA sense strand
ugaaggcaacccaccaaua

SEQ ID NO: 513889 - RNA, 19 nt, Homo sapiens
  misc_RNA (1)...(19): siRNA sense strand
gauggacagugaggagaaa

SEQ ID NO: 513890 - RNA, 19 nt, Homo sapiens
  misc_RNA (1)...(19): siRNA sense strand
cuguguauauuguugcuua

SEQ ID NO: 513891 - RNA, 19 nt, Homo sapiens
  misc_RNA (1)...(19): siRNA sense strand
ggauagaucauauaugcau

SEQ ID NO: 513892 - RNA, 19 nt, Homo sapiens
  misc_RNA (1)...(19): siRNA sense strand
ugggauagaucauauaugc

SEQ ID NO: 513893 - RNA, 19 nt, Homo sapiens
  misc_RNA (1)...(19): siRNA sense strand
gaaccaugaugaggauaca

SEQ ID NO: 513894 - RNA, 19 nt, Homo sapiens
  misc_RNA (1)...(19): siRNA sense strand
uguaguagaugauguaagg

SEQ ID NO: 513895 - RNA, 19 nt, Homo sapiens
  misc_RNA (1)...(19): siRNA sense strand
accaugagauccggauuua

SEQ ID NO: 513896 - RNA, 19 nt, Homo sapiens
  misc_RNA (1)...(19): siRNA sense strand
caccguaguugugcaauug

SEQ ID NO: 513897 - RNA, 19 nt, Homo sapiens
  misc_RNA (1)...(19): siRNA sense strand
caauugcaguggcucauca

SEQ ID NO: 513898 - RNA, 19 nt, Homo sapiens
  misc_RNA (1)...(19): siRNA sense strand
ugcaguggcucaucaucua

SEQ ID NO: 513899 - RNA, 19 nt, Homo sapiens
  misc_RNA (1)...(19): siRNA sense strand
caggcacuguguccauaua

SEQ ID NO: 513900 - RNA, 19 nt, Homo sapiens
  misc_RNA (1)...(19): siRNA sense strand
cagggaaaguguguagaaa

SEQ ID NO: 513901 - RNA, 19 nt, Homo sapiens
  misc_RNA (1)...(19): siRNA sense strand
ccugcugucugucaaauug

SEQ ID NO: 513902 - RNA, 19 nt, Homo sapiens
  misc_RNA (1)...(19): siRNA sense strand
ggagaucuggaccaauaaa

SEQ ID NO: 513903 - RNA, 19 nt, Homo sapiens
  misc_RNA (1)...(19): siRNA sense strand
ccauauaaccaucuugaau

SEQ ID NO: 513904 - RNA, 19 nt, Homo sapiens
  misc_RNA (1)...(19): siRNA sense strand
ucgcuucaaugacauaaug

SEQ ID NO: 513905 - RNA, 19 nt, Homo sapiens
  misc_RNA (1)...(19): siRNA sense strand
gaagaauucagugugagaa

SEQ ID NO: 513906 - RNA, 19 nt, Homo sapiens
  misc_RNA (1)...(19): siRNA sense strand
agaaacacauuauccacau

SEQ ID NO: 513907 - RNA, 19 nt, Homo sapiens
  misc_RNA (1)...(19): siRNA sense strand
ugacugaugguucuacuug

SEQ ID NO: 513908 - RNA, 19 nt, Homo sapiens
  misc_RNA (1)...(19): siRNA sense strand
ggaagucggagaacauuac

SEQ ID NO: 513909 - RNA, 19 nt, Homo sapiens
  misc_RNA (1)...(19): siRNA sense strand
gggcaucugcaacaauaaa

SEQ ID NO: 513910 - RNA, 19 nt, Homo sapiens
  misc_RNA (1)...(19): siRNA sense strand
uaauugcucaccugcauuu

SEQ ID NO: 513911 - RNA, 19 nt, Homo sapiens
  misc_RNA (1)...(19): siRNA sense strand
ggaacagagugugggauag

SEQ ID NO: 513912 - RNA, 19 nt, Homo sapiens
  misc_RNA (1)...(19): siRNA sense strand
gaauaacugcuacuaucau

SEQ ID NO: 513913 - RNA, 19 nt, Homo sapiens
  misc_RNA (1)...(19): siRNA sense strand
gugugacuguggaccuuua

SEQ ID NO: 513914 - RNA, 19 nt, Homo sapiens
  misc_RNA (1)...(19): siRNA sense strand
gaccugauauuggugaagu

SEQ ID NO: 513915 - RNA, 19 nt, Homo sapiens
  misc_RNA (1)...(19): siRNA sense strand
gaaaggaggucaaugaaug

SEQ ID NO: 513916 - RNA, 19 nt, Homo sapiens
  misc_RNA (1)...(19): siRNA sense strand
gaaauaacaugccgaaugg

SEQ ID NO: 513917 - RNA, 19 nt, Homo sapiens
  misc_RNA (1)...(19): siRNA sense strand
ugacagaaauucccaauau

SEQ ID NO: 513918 - RNA, 19 nt, Homo sapiens
  misc_RNA (1)...(19): siRNA sense strand
ggaaaucugugcaccugua

SEQ ID NO: 513919 - RNA, 19 nt, Homo sapiens
  misc_RNA (1)...(19): siRNA sense strand
gaaggcaacccaccaauaa

SEQ ID NO: 513920 - RNA, 19 nt, Homo sapiens
  misc_RNA (1)...(19): siRNA sense strand
gaaacacauuauccacaua

SEQ ID NO: 513921 - RNA, 19 nt, Homo sapiens
  misc_RNA (1)...(19): siRNA sense strand
ggaaugguguuguugaaga

SEQ ID NO: 513922 - RNA, 19 nt, Homo sapiens
  misc_RNA (1)...(19): siRNA sense strand
gaagggaccugauauuggu

SEQ ID NO: 513923 - RNA, 19 nt, Homo sapiens
  misc_RNA (1)...(19): siRNA sense strand
gaaguucuguuaucugugu

SEQ ID NO: 513924 - RNA, 19 nt, Homo sapiens
  misc_RNA (1)...(19): siRNA sense strand
caugacaccucacaucuuu

SEQ ID NO: 513925 - RNA, 19 nt, Homo sapiens
  misc_RNA (1)...(19): siRNA sense strand
gaggauacaugucguuguu

SEQ ID NO: 513926 - RNA, 19 nt, Homo sapiens
  misc_RNA (1)...(19): siRNA sense strand
uuucacaacucuaggauua

SEQ ID NO: 513927 - RNA, 19 nt, Homo sapiens
  misc_RNA (1)...(19): siRNA sense strand
gaagcaaaguucuuaugug

SEQ ID NO: 513928 - RNA, 19 nt, Homo sapiens
  misc_RNA (1)...(19): siRNA sense strand
guagaaaggaggucaauga

SEQ ID NO: 513929 - RNA, 19 nt, Homo sapiens
  misc_RNA (1)...(19): siRNA sense strand
cagaauaacugcuacuauc

SEQ ID NO: 513930 - RNA, 19 nt, Homo sapiens
  misc_RNA (1)...(19): siRNA sense strand
gcgucgaccucaugaguua

SEQ ID NO: 513931 - RNA, 19 nt, Homo sapiens
  misc_RNA (1)...(19): siRNA sense strand
gaagauggaauucccugua

SEQ ID NO: 513932 - RNA, 19 nt, Homo sapiens
  misc_RNA (1)...(19): siRNA sense strand
gaacaucugguauacaaga

SEQ ID NO: 513933 - RNA, 19 nt, Homo sapiens
  misc_RNA (1)...(19): siRNA sense strand
ugacuuugcuuaugaaauc

SEQ ID NO: 513934 - RNA, 19 nt, Homo sapiens
  misc_RNA (1)...(19): siRNA sense strand
gaacaguguaggaggauuu

SEQ ID NO: 513935 - RNA, 19 nt, Homo sapiens
  misc_RNA (1)...(19): siRNA sense strand
uauacaagauggacaguga

SEQ ID NO: 513936 - RNA, 19 nt, Homo sapiens
  misc_RNA (1)...(19): siRNA sense strand
gcagcaagauguucaaacu

SEQ ID NO: 513937 - RNA, 19 nt, Homo sapiens
  misc_RNA (1)...(19): siRNA sense strand
gaaugguguuguugaagaa

SEQ ID NO: 513938 - RNA, 19 nt, Homo sapiens
  misc_RNA (1)...(19): siRNA sense strand
gaaaggaacgacucaaagu

SEQ ID NO: 513939 - RNA, 19 nt, Homo sapiens
  misc_RNA (1)...(19): siRNA sense strand
ccagaguggugcaauggua

SEQ ID NO: 513940 - RNA, 19 nt, Homo sapiens
  misc_RNA (1)...(19): siRNA sense strand
caaaguugcuggaggaucu

SEQ ID NO: 513941 - RNA, 19 nt, Homo sapiens
  misc_RNA (1)...(19): siRNA sense strand
gcgcaaauacugcaaguga

SEQ ID NO: 513942 - RNA, 19 nt, Homo sapiens
  misc_RNA (1)...(19): siRNA sense strand
gaggaucuauauguuauug

SEQ ID NO: 513943 - RNA, 19 nt, Homo sapiens
  misc_RNA (1)...(19): siRNA sense strand
aaagaucccugcugucugu

SEQ ID NO: 513944 - RNA, 19 nt, Homo sapiens
  misc_RNA (1)...(19): siRNA sense strand
cgaauggaauuugaagaaa

SEQ ID NO: 513945 - RNA, 19 nt, Homo sapiens
  misc_RNA (1)...(19): siRNA sense strand
aaacaucacugccauugca

SEQ ID NO: 513946 - RNA, 19 nt, Homo sapiens
  misc_RNA (1)...(19): siRNA sense strand
ucaagaagcuuuuguuuuc

SEQ ID NO: 513947 - RNA, 19 nt, Homo sapiens
  misc_RNA (1)...(19): siRNA sense strand
ucacugccauugcaauuau

SEQ ID NO: 513948 - RNA, 19 nt, Homo sapiens
  misc_RNA (1)...(19): siRNA sense strand
gacagaaauucccaauaug

SEQ ID NO: 513949 - RNA, 19 nt, Homo sapiens
  misc_RNA (1)...(19): siRNA sense strand
gcaaauacugcaagugaga

SEQ ID NO: 513950 - RNA, 19 nt, Homo sapiens
  misc_RNA (1)...(19): siRNA sense strand
ugaaauaacaugccgaaug

SEQ ID NO: 513951 - RNA, 19 nt, Homo sapiens
  misc_RNA (1)...(19): siRNA sense strand
gaacagagugugggauaga

SEQ ID NO: 513952 - RNA, 19 nt, Homo sapiens
  misc_RNA (1)...(19): siRNA sense strand
caaauugcacucugacuga

SEQ ID NO: 513953 - RNA, 19 nt, Homo sapiens
  misc_RNA (1)...(19): siRNA sense strand
ggauacaugucguuguuca

SEQ ID NO: 513954 - RNA, 19 nt, Homo sapiens
  misc_RNA (1)...(19): siRNA sense strand
guugugcaauuguuacuuu

SEQ ID NO: 513955 - RNA, 19 nt, Homo sapiens
  misc_RNA (1)...(19): siRNA sense strand
gcuggaggaucuauauguu

SEQ ID NO: 513956 - RNA, 19 nt, Homo sapiens
  misc_RNA (1)...(19): siRNA sense strand
ucaucuaggucauaauuug

SEQ ID NO: 513957 - RNA, 19 nt, Homo sapiens
  misc_RNA (1)...(19): siRNA sense strand
caaagaauugaacaccuua

SEQ ID NO: 513958 - RNA, 19 nt, Homo sapiens
  misc_RNA (1)...(19): siRNA sense strand
caggcuggcucuccuauau

SEQ ID NO: 513959 - RNA, 19 nt, Homo sapiens
  misc_RNA (1)...(19): siRNA sense strand
ggaguacugauuaccauuu

SEQ ID NO: 513960 - RNA, 19 nt, Homo sapiens
  misc_RNA (1)...(19): siRNA sense strand
gugagaaugugacagaaau

SEQ ID NO: 513961 - RNA, 19 nt, Homo sapiens
  misc_RNA (1)...(19): siRNA sense strand
acaaagaauugaacaccuu

SEQ ID NO: 513962 - RNA, 19 nt, Homo sapiens
  misc_RNA (1)...(19): siRNA sense strand
aagauggaauucccuguaa

SEQ ID NO: 513963 - RNA, 19 nt, Homo sapiens
  misc_RNA (1)...(19): siRNA sense strand
guggaagaauucaguguga

SEQ ID NO: 513964 - RNA, 19 nt, Homo sapiens
  misc_RNA (1)...(19): siRNA sense strand
guacauucguuaugaaagg

SEQ ID NO: 513965 - RNA, 19 nt, Homo sapiens
  misc_RNA (1)...(19): siRNA sense strand
ugauauuggugaagugaaa

SEQ ID NO: 513966 - RNA, 19 nt, Homo sapiens
  misc_RNA (1)...(19): siRNA sense strand
uaacaugccgaauggaauu

SEQ ID NO: 513967 - RNA, 19 nt, Homo sapiens
  misc_RNA (1)...(19): siRNA sense strand
gagacuugcuacaaagaau

SEQ ID NO: 513968 - RNA, 19 nt, Homo sapiens
  misc_RNA (1)...(19): siRNA sense strand
gggaaaguguguagaaagg

SEQ ID NO: 513969 - RNA, 19 nt, Homo sapiens
  misc_RNA (1)...(19): siRNA sense strand
gcaauuguuacuuucauga

SEQ ID NO: 513970 - RNA, 19 nt, Homo sapiens
  misc_RNA (1)...(19): siRNA sense strand
gaaauuguagucgucauug

SEQ ID NO: 513971 - RNA, 19 nt, Homo sapiens
  misc_RNA (1)...(19): siRNA sense strand
caugagauccggauuuaug

SEQ ID NO: 513972 - RNA, 19 nt, Homo sapiens
  misc_RNA (1)...(19): siRNA sense strand
ccucccaacugccugauaa

SEQ ID NO: 513973 - RNA, 19 nt, Homo sapiens
  misc_RNA (1)...(19): siRNA sense strand
gaugaagggaccugauauu

SEQ ID NO: 513974 - RNA, 19 nt, Homo sapiens
  misc_RNA (1)...(19): siRNA sense strand
gggaugaagggaccugaua

SEQ ID NO: 513975 - RNA, 19 nt, Homo sapiens
  misc_RNA (1)...(19): siRNA sense strand
gaguacugauuaccauuug

SEQ ID NO: 513976 - RNA, 19 nt, Homo sapiens
  misc_RNA (1)...(19): siRNA sense strand
gugaagcgcugugggaaug

SEQ ID NO: 513977 - RNA, 19 nt, Homo sapiens
  misc_RNA (1)...(19): siRNA sense strand
gcaacccaccaauaacuaa

SEQ ID NO: 513978 - RNA, 19 nt, Homo sapiens
  misc_RNA (1)...(19): siRNA sense strand
gcaaguggaagucggagaa

SEQ ID NO: 513979 - RNA, 19 nt, Homo sapiens
  misc_RNA (1)...(19): siRNA sense strand
ggaggucaaugaaugugau

SEQ ID NO: 513980 - RNA, 19 nt, Homo sapiens
  misc_RNA (1)...(19): siRNA sense strand
uugaacaucugguauacaa

SEQ ID NO: 513981 - RNA, 19 nt, Homo sapiens
  misc_RNA (1)...(19): siRNA sense strand
ggugaugccuucccagagu

SEQ ID NO: 513982 - RNA, 19 nt, Homo sapiens
  misc_RNA (1)...(19): siRNA sense strand
acagaaauucccaauauga

SEQ ID NO: 513983 - RNA, 19 nt, Homo sapiens
  misc_RNA (1)...(19): siRNA sense strand
caucaucuaggucauaauu

SEQ ID NO: 513984 - RNA, 19 nt, Homo sapiens
  misc_RNA (1)...(19): siRNA sense strand
caacaugacaccucacauc

SEQ ID NO: 513985 - RNA, 19 nt, Homo sapiens
  misc_RNA (1)...(19): siRNA sense strand
uggaggaucuauauguuau

SEQ ID NO: 513986 - RNA, 19 nt, Homo sapiens
  misc_RNA (1)...(19): siRNA sense strand
ggaagaauucagugugaga

SEQ ID NO: 513987 - RNA, 19 nt, Homo sapiens
  misc_RNA (1)...(19): siRNA sense strand
guagagaggacaaaguguu

SEQ ID NO: 513988 - RNA, 19 nt, Homo sapiens
  misc_RNA (1)...(19): siRNA sense strand
ugaaggcaacccaccaaua

SEQ ID NO: 513989 - RNA, 19 nt, Homo sapiens
  misc_RNA (1)...(19): siRNA sense strand
gauggacagugaggagaaa

SEQ ID NO: 513990 - RNA, 19 nt, Homo sapiens
  misc_RNA (1)...(19): siRNA sense strand
cuguguauauuguugcuua

SEQ ID NO: 513991 - RNA, 19 nt, Homo sapiens
  misc_RNA (1)...(19): siRNA sense strand
ggauagaucauauaugcau

SEQ ID NO: 513992 - RNA, 19 nt, Homo sapiens
  misc_RNA (1)...(19): siRNA sense strand
ugggauagaucauauaugc

SEQ ID NO: 513993 - RNA, 19 nt, Homo sapiens
  misc_RNA (1)...(19): siRNA sense strand
gaaccaugaugaggauaca

SEQ ID NO: 513994 - RNA, 19 nt, Homo sapiens
  misc_RNA (1)...(19): siRNA sense strand
uguaguagaugauguaagg

SEQ ID NO: 513995 - RNA, 19 nt, Homo sapiens
  misc_RNA (1)...(19): siRNA sense strand
accaugagauccggauuua

SEQ ID NO: 513996 - RNA, 19 nt, Homo sapiens
  misc_RNA (1)...(19): siRNA sense strand
caccguaguugugcaauug

SEQ ID NO: 513997 - RNA, 19 nt, Homo sapiens
  misc_RNA (1)...(19): siRNA sense strand
caauugcaguggcucauca

SEQ ID NO: 513998 - RNA, 19 nt, Homo sapiens
  misc_RNA (1)...(19): siRNA sense strand
ugcaguggcucaucaucua

SEQ ID NO: 513999 - RNA, 19 nt, Homo sapiens
  misc_RNA (1)...(19): siRNA sense strand
caggcacuguguccauaua

SEQ ID NO: 514000 - RNA, 19 nt, Homo sapiens
  misc_RNA (1)...(19): siRNA sense strand
cagggaaaguguguagaaa

SEQ ID NO: 514001 - RNA, 19 nt, Homo sapiens
  misc_RNA (1)...(19): siRNA sense strand
ccugcugucugucaaauug

SEQ ID NO: 514002 - RNA, 19 nt, Homo sapiens
  misc_RNA (1)...(19): siRNA sense strand
ggagaucuggaccaauaaa

SEQ ID NO: 514003 - RNA, 19 nt, Homo sapiens
  misc_RNA (1)...(19): siRNA sense strand
ccauauaaccaucuugaau

SEQ ID NO: 514004 - RNA, 19 nt, Homo sapiens
  misc_RNA (1)...(19): siRNA sense strand
ucgcuucaaugacauaaug

SEQ ID NO: 514005 - RNA, 19 nt, Homo sapiens
  misc_RNA (1)...(19): siRNA sense strand
gaagaauucagugugagaa

SEQ ID NO: 514006 - RNA, 19 nt, Homo sapiens
  misc_RNA (1)...(19): siRNA sense strand
agaaacacauuauccacau

SEQ ID NO: 514007 - RNA, 19 nt, Homo sapiens
  misc_RNA (1)...(19): siRNA sense strand
ugacugaugguucuacuug

SEQ ID NO: 514008 - RNA, 19 nt, Homo sapiens
  misc_RNA (1)...(19): siRNA sense strand
ggaagucggagaacauuac

SEQ ID NO: 514009 - RNA, 19 nt, Homo sapiens
  misc_RNA (1)...(19): siRNA sense strand
gggcaucugcaacaauaaa

SEQ ID NO: 514010 - RNA, 19 nt, Homo sapiens
  misc_RNA (1)...(19): siRNA sense strand
uaauugcucaccugcauuu

SEQ ID NO: 514011 - RNA, 19 nt, Homo sapiens
  misc_RNA (1)...(19): siRNA sense strand
ggaacagagugugggauag

SEQ ID NO: 514012 - RNA, 19 nt, Homo sapiens
  misc_RNA (1)...(19): siRNA sense strand
gaauaacugcuacuaucau

SEQ ID NO: 514013 - RNA, 19 nt, Homo sapiens
  misc_RNA (1)...(19): siRNA sense strand
gugugacuguggaccuuua

SEQ ID NO: 514014 - RNA, 19 nt, Homo sapiens
  misc_RNA (1)...(19): siRNA sense strand
gaccugauauuggugaagu

SEQ ID NO: 514015 - RNA, 19 nt, Homo sapiens
  misc_RNA (1)...(19): siRNA sense strand
gaaaggaggucaaugaaug

SEQ ID NO: 514016 - RNA, 19 nt, Homo sapiens
  misc_RNA (1)...(19): siRNA sense strand
gaaauaacaugccgaaugg

SEQ ID NO: 514017 - RNA, 19 nt, Homo sapiens
  misc_RNA (1)...(19): siRNA sense strand
ugacagaaauucccaauau

SEQ ID NO: 514018 - RNA, 19 nt, Homo sapiens
  misc_RNA (1)...(19): siRNA sense strand
ggaaaucugugcaccugua

SEQ ID NO: 514019 - RNA, 19 nt, Homo sapiens
  misc_RNA (1)...(19): siRNA sense strand
gaaggcaacccaccaauaa

SEQ ID NO: 514020 - RNA, 19 nt, Homo sapiens
  misc_RNA (1)...(19): siRNA sense strand
gaaacacauuauccacaua

SEQ ID NO: 514021 - RNA, 19 nt, Homo sapiens
  misc_RNA (1)...(19): siRNA sense strand
ggaaugguguuguugaaga

SEQ ID NO: 514022 - RNA, 19 nt, Homo sapiens
  misc_RNA (1)...(19): siRNA sense strand
gaagggaccugauauuggu

SEQ ID NO: 514023 - RNA, 19 nt, Homo sapiens
  misc_RNA (1)...(19): siRNA sense strand
gaaguucuguuaucugugu

SEQ ID NO: 514024 - RNA, 19 nt, Homo sapiens
  misc_RNA (1)...(19): siRNA sense strand
caugacaccucacaucuuu

SEQ ID NO: 514025 - RNA, 19 nt, Homo sapiens
  misc_RNA (1)...(19): siRNA sense strand
gaggauacaugucguuguu

SEQ ID NO: 514026 - RNA, 19 nt, Homo sapiens
  misc_RNA (1)...(19): siRNA sense strand
uuucacaacucuaggauua

SEQ ID NO: 514027 - RNA, 19 nt, Homo sapiens
  misc_RNA (1)...(19): siRNA sense strand
gaagcaaaguucuuaugug

SEQ ID NO: 514028 - RNA, 19 nt, Homo sapiens
  misc_RNA (1)...(19): siRNA sense strand
guagaaaggaggucaauga

SEQ ID NO: 514029 - RNA, 19 nt, Homo sapiens
  misc_RNA (1)...(19): siRNA sense strand
cagaauaacugcuacuauc

SEQ ID NO: 514030 - RNA, 19 nt, Homo sapiens
  misc_RNA (1)...(19): siRNA sense strand
gcgucgaccucaugaguua

SEQ ID NO: 514031 - RNA, 19 nt, Homo sapiens
  misc_RNA (1)...(19): siRNA sense strand
gaagauggaauucccugua

SEQ ID NO: 514032 - RNA, 19 nt, Homo sapiens
  misc_RNA (1)...(19): siRNA sense strand
gaacaucugguauacaaga

SEQ ID NO: 514033 - RNA, 19 nt, Homo sapiens
  misc_RNA (1)...(19): siRNA sense strand
ugacuuugcuuaugaaauc

SEQ ID NO: 514034 - RNA, 19 nt, Homo sapiens
  misc_RNA (1)...(19): siRNA sense strand
gaacaguguaggaggauuu

SEQ ID NO: 514035 - RNA, 19 nt, Homo sapiens
  misc_RNA (1)...(19): siRNA sense strand
uauacaagauggacaguga

SEQ ID NO: 514036 - RNA, 19 nt, Homo sapiens
  misc_RNA (1)...(19): siRNA sense strand
gcagcaagauguucaaacu

SEQ ID NO: 514037 - RNA, 19 nt, Homo sapiens
  misc_RNA (1)...(19): siRNA sense strand
gaaugguguuguugaagaa

SEQ ID NO: 514038 - RNA, 19 nt, Homo sapiens
  misc_RNA (1)...(19): siRNA sense strand
gaaaggaacgacucaaagu

SEQ ID NO: 514039 - RNA, 19 nt, Homo sapiens
  misc_RNA (1)...(19): siRNA sense strand
ccagaguggugcaauggua

SEQ ID NO: 514040 - RNA, 19 nt, Homo sapiens
  misc_RNA (1)...(19): siRNA sense strand
caaaguugcuggaggaucu

SEQ ID NO: 514041 - RNA, 19 nt, Homo sapiens
  misc_RNA (1)...(19): siRNA sense strand
gcgcaaauacugcaaguga

SEQ ID NO: 514042 - RNA, 19 nt, Homo sapiens
  misc_RNA (1)...(19): siRNA sense strand
gaggaucuauauguuauug

SEQ ID NO: 514043 - RNA, 19 nt, Homo sapiens
  misc_RNA (1)...(19): siRNA sense strand
aaagaucccugcugucugu

SEQ ID NO: 514044 - RNA, 19 nt, Homo sapiens
  misc_RNA (1)...(19): siRNA sense strand
cgaauggaauuugaagaaa

SEQ ID NO: 514045 - RNA, 19 nt, Homo sapiens
  misc_RNA (1)...(19): siRNA sense strand
aaacaucacugccauugca

SEQ ID NO: 514046 - RNA, 19 nt, Homo sapiens
  misc_RNA (1)...(19): siRNA sense strand
ucaagaagcuuuuguuuuc

SEQ ID NO: 514047 - RNA, 19 nt, Homo sapiens
  misc_RNA (1)...(19): siRNA sense strand
ucacugccauugcaauuau

SEQ ID NO: 514048 - RNA, 19 nt, Homo sapiens
  misc_RNA (1)...(19): siRNA sense strand
gacagaaauucccaauaug

SEQ ID NO: 514049 - RNA, 19 nt, Homo sapiens
  misc_RNA (1)...(19): siRNA sense strand
gcaaauacugcaagugaga

SEQ ID NO: 514050 - RNA, 19 nt, Homo sapiens
  misc_RNA (1)...(19): siRNA sense strand
ugaaauaacaugccgaaug

SEQ ID NO: 514051 - RNA, 19 nt, Homo sapiens
  misc_RNA (1)...(19): siRNA sense strand
gaacagagugugggauaga

SEQ ID NO: 514052 - RNA, 19 nt, Homo sapiens
  misc_RNA (1)...(19): siRNA sense strand
caaauugcacucugacuga

SEQ ID NO: 514053 - RNA, 19 nt, Homo sapiens
  misc_RNA (1)...(19): siRNA sense strand
ggauacaugucguuguuca

SEQ ID NO: 514054 - RNA, 19 nt, Homo sapiens
  misc_RNA (1)...(19): siRNA sense strand
guugugcaauuguuacuuu

SEQ ID NO: 514055 - RNA, 19 nt, Homo sapiens
  misc_RNA (1)...(19): siRNA sense strand
gcuggaggaucuauauguu

SEQ ID NO: 514056 - RNA, 19 nt, Homo sapiens
  misc_RNA (1)...(19): siRNA sense strand
ucaucuaggucauaauuug

SEQ ID NO: 514057 - RNA, 19 nt, Homo sapiens
  misc_RNA (1)...(19): siRNA sense strand
caaagaauugaacaccuua

SEQ ID NO: 514058 - RNA, 19 nt, Homo sapiens
  misc_RNA (1)...(19): siRNA sense strand
caggcuggcucuccuauau

SEQ ID NO: 514059 - RNA, 19 nt, Homo sapiens
  misc_RNA (1)...(19): siRNA sense strand
ggaguacugauuaccauuu

SEQ ID NO: 514060 - RNA, 19 nt, Homo sapiens
  misc_RNA (1)...(19): siRNA sense strand
gugagaaugugacagaaau

SEQ ID NO: 514061 - RNA, 19 nt, Homo sapiens
  misc_RNA (1)...(19): siRNA sense strand
acaaagaauugaacaccuu

SEQ ID NO: 514062 - RNA, 19 nt, Homo sapiens
  misc_RNA (1)...(19): siRNA sense strand
aagauggaauucccuguaa

SEQ ID NO: 514063 - RNA, 19 nt, Homo sapiens
  misc_RNA (1)...(19): siRNA sense strand
guggaagaauucaguguga

SEQ ID NO: 514064 - RNA, 19 nt, Homo sapiens
  misc_RNA (1)...(19): siRNA sense strand
guacauucguuaugaaagg

SEQ ID NO: 514065 - RNA, 19 nt, Homo sapiens
  misc_RNA (1)...(19): siRNA sense strand
ugauauuggugaagugaaa

SEQ ID NO: 514066 - RNA, 19 nt, Homo sapiens
  misc_RNA (1)...(19): siRNA sense strand
uaacaugccgaauggaauu

SEQ ID NO: 514067 - RNA, 19 nt, Homo sapiens
  misc_RNA (1)...(19): siRNA sense strand
gagacuugcuacaaagaau

SEQ ID NO: 514068 - RNA, 19 nt, Homo sapiens
  misc_RNA (1)...(19): siRNA sense strand
gggaaaguguguagaaagg

SEQ ID NO: 514069 - RNA, 19 nt, Homo sapiens
  misc_RNA (1)...(19): siRNA sense strand
gcaauuguuacuuucauga

SEQ ID NO: 514070 - RNA, 19 nt, Homo sapiens
  misc_RNA (1)...(19): siRNA sense strand
gaaauuguagucgucauug

SEQ ID NO: 514071 - RNA, 19 nt, Homo sapiens
  misc_RNA (1)...(19): siRNA sense strand
caugagauccggauuuaug

SEQ ID NO: 514072 - RNA, 19 nt, Homo sapiens
  misc_RNA (1)...(19): siRNA sense strand
ccucccaacugccugauaa

SEQ ID NO: 514073 - RNA, 19 nt, Homo sapiens
  misc_RNA (1)...(19): siRNA sense strand
gaugaagggaccugauauu

SEQ ID NO: 514074 - RNA, 19 nt, Homo sapiens
  misc_RNA (1)...(19): siRNA sense strand
gggaugaagggaccugaua

SEQ ID NO: 514075 - RNA, 19 nt, Homo sapiens
  misc_RNA (1)...(19): siRNA sense strand
gaguacugauuaccauuug

SEQ ID NO: 514076 - RNA, 19 nt, Homo sapiens
  misc_RNA (1)...(19): siRNA sense strand
gugaagcgcugugggaaug

SEQ ID NO: 514077 - RNA, 19 nt, Homo sapiens
  misc_RNA (1)...(19): siRNA sense strand
gcaacccaccaauaacuaa

SEQ ID NO: 514078 - RNA, 19 nt, Homo sapiens
  misc_RNA (1)...(19): siRNA sense strand
gcaaguggaagucggagaa

SEQ ID NO: 514079 - RNA, 19 nt, Homo sapiens
  misc_RNA (1)...(19): siRNA sense strand
ggaggucaaugaaugugau

SEQ ID NO: 514080 - RNA, 19 nt, Homo sapiens
  misc_RNA (1)...(19): siRNA sense strand
uugaacaucugguauacaa

SEQ ID NO: 514081 - RNA, 19 nt, Homo sapiens
  misc_RNA (1)...(19): siRNA sense strand
ggugaugccuucccagagu

SEQ ID NO: 514082 - RNA, 19 nt, Homo sapiens
  misc_RNA (1)...(19): siRNA sense strand
ggugaugccuucccagagu

SEQ ID NO: 514083 - RNA, 19 nt, Homo sapiens
  misc_RNA (1)...(19): siRNA sense strand
acagaaauucccaauauga

SEQ ID NO: 514084 - RNA, 19 nt, Homo sapiens
  misc_RNA (1)...(19): siRNA sense strand
caucaucuaggucauaauu

SEQ ID NO: 514085 - RNA, 19 nt, Homo sapiens
  misc_RNA (1)...(19): siRNA sense strand
caacaugacaccucacauc

SEQ ID NO: 514086 - RNA, 19 nt, Homo sapiens
  misc_RNA (1)...(19): siRNA sense strand
uggaggaucuauauguuau

SEQ ID NO: 514087 - RNA, 19 nt, Homo sapiens
  misc_RNA (1)...(19): siRNA sense strand
ggaagaauucagugugaga

SEQ ID NO: 514088 - RNA, 19 nt, Homo sapiens
  misc_RNA (1)...(19): siRNA sense strand
guagagaggacaaaguguu

SEQ ID NO: 514089 - RNA, 19 nt, Homo sapiens
  misc_RNA (1)...(19): siRNA sense strand
ugaaggcaacccaccaaua

SEQ ID NO: 514090 - RNA, 19 nt, Homo sapiens
  misc_RNA (1)...(19): siRNA sense strand
gauggacagugaggagaaa

SEQ ID NO: 514091 - RNA, 19 nt, Homo sapiens
  misc_RNA (1)...(19): siRNA sense strand
cuguguauauuguugcuua

SEQ ID NO: 514092 - RNA, 19 nt, Homo sapiens
  misc_RNA (1)...(19): siRNA sense strand
ggauagaucauauaugcau

SEQ ID NO: 514093 - RNA, 19 nt, Homo sapiens
  misc_RNA (1)...(19): siRNA sense strand
ugggauagaucauauaugc

SEQ ID NO: 514094 - RNA, 19 nt, Homo sapiens
  misc_RNA (1)...(19): siRNA sense strand
gaaccaugaugaggauaca

SEQ ID NO: 514095 - RNA, 19 nt, Homo sapiens
  misc_RNA (1)...(19): siRNA sense strand
uguaguagaugauguaagg

SEQ ID NO: 514096 - RNA, 19 nt, Homo sapiens
  misc_RNA (1)...(19): siRNA sense strand
accaugagauccggauuua

SEQ ID NO: 514097 - RNA, 19 nt, Homo sapiens
  misc_RNA (1)...(19): siRNA sense strand
caccguaguugugcaauug

SEQ ID NO: 514098 - RNA, 19 nt, Homo sapiens
  misc_RNA (1)...(19): siRNA sense strand
caauugcaguggcucauca

SEQ ID NO: 514099 - RNA, 19 nt, Homo sapiens
  misc_RNA (1)...(19): siRNA sense strand
ugcaguggcucaucaucua

SEQ ID NO: 514100 - RNA, 19 nt, Homo sapiens
  misc_RNA (1)...(19): siRNA sense strand
caggcacuguguccauaua

SEQ ID NO: 514101 - RNA, 19 nt, Homo sapiens
  misc_RNA (1)...(19): siRNA sense strand
cagggaaaguguguagaaa

SEQ ID NO: 514102 - RNA, 19 nt, Homo sapiens
  misc_RNA (1)...(19): siRNA sense strand
ccugcugucugucaaauug

SEQ ID NO: 514103 - RNA, 19 nt, Homo sapiens
  misc_RNA (1)...(19): siRNA sense strand
ggagaucuggaccaauaaa

SEQ ID NO: 514104 - RNA, 19 nt, Homo sapiens
  misc_RNA (1)...(19): siRNA sense strand
ccauauaaccaucuugaau

SEQ ID NO: 514105 - RNA, 19 nt, Homo sapiens
  misc_RNA (1)...(19): siRNA sense strand
ucgcuucaaugacauaaug

SEQ ID NO: 514106 - RNA, 19 nt, Homo sapiens
  misc_RNA (1)...(19): siRNA sense strand
gaagaauucagugugagaa

SEQ ID NO: 514107 - RNA, 19 nt, Homo sapiens
  misc_RNA (1)...(19): siRNA sense strand
agaaacacauuauccacau

SEQ ID NO: 514108 - RNA, 19 nt, Homo sapiens
  misc_RNA (1)...(19): siRNA sense strand
ugacugaugguucuacuug

SEQ ID NO: 514109 - RNA, 19 nt, Homo sapiens
  misc_RNA (1)...(19): siRNA sense strand
ggaagucggagaacauuac

SEQ ID NO: 514110 - RNA, 19 nt, Homo sapiens
  misc_RNA (1)...(19): siRNA sense strand
gggcaucugcaacaauaaa

SEQ ID NO: 514111 - RNA, 19 nt, Homo sapiens
  misc_RNA (1)...(19): siRNA sense strand
uaauugcucaccugcauuu

SEQ ID NO: 514112 - RNA, 19 nt, Homo sapiens
  misc_RNA (1)...(19): siRNA sense strand
gaauaacugcuacuaucau

SEQ ID NO: 514113 - RNA, 19 nt, Homo sapiens
  misc_RNA (1)...(19): siRNA sense strand
ggaacagagugugggauag

SEQ ID NO: 514114 - RNA, 19 nt, Homo sapiens
  misc_RNA (1)...(19): siRNA sense strand
gugugacuguggaccuuua

SEQ ID NO: 514115 - RNA, 19 nt, Homo sapiens
  misc_RNA (1)...(19): siRNA sense strand
gacaggagcuauccaagga

SEQ ID NO: 514116 - RNA, 19 nt, Homo sapiens
  misc_RNA (1)...(19): siRNA sense strand
gagguuugcugcaguuuga

SEQ ID NO: 514117 - RNA, 19 nt, Homo sapiens
  misc_RNA (1)...(19): siRNA sense strand
caaugugccuuccaguuga

SEQ ID NO: 514118 - RNA, 19 nt, Homo sapiens
  misc_RNA (1)...(19): siRNA sense strand
gcaagcaguucuucaacag

SEQ ID NO: 514119 - RNA, 19 nt, Homo sapiens
  misc_RNA (1)...(19): siRNA sense strand
caccacagaugucagaguu

SEQ ID NO: 514120 - RNA, 19 nt, Homo sapiens
  misc_RNA (1)...(19): siRNA sense strand
gagacaggcuggagcucaa

SEQ ID NO: 514121 - RNA, 19 nt, Homo sapiens
  misc_RNA (1)...(19): siRNA sense strand
gcacagcuaccucuaaugc

SEQ ID NO: 514122 - RNA, 19 nt, Homo sapiens
  misc_RNA (1)...(19): siRNA sense strand
caaugugcccuuugaaguu

SEQ ID NO: 514123 - RNA, 19 nt, Homo sapiens
  misc_RNA (1)...(19): siRNA sense strand
gacugcagcucgacuagug

SEQ ID NO: 514124 - RNA, 19 nt, Homo sapiens
  misc_RNA (1)...(19): siRNA sense strand
ucaaugugccuuccaguug

SEQ ID NO: 514125 - RNA, 19 nt, Homo sapiens
  misc_RNA (1)...(19): siRNA sense strand
uuucagacccagccacuua

SEQ ID NO: 514126 - RNA, 19 nt, Homo sapiens
  misc_RNA (1)...(19): siRNA sense strand
ggagcucaaugugcccuuu

SEQ ID NO: 514127 - RNA, 19 nt, Homo sapiens
  misc_RNA (1)...(19): siRNA sense strand
gcaguuugaggcugauaaa

SEQ ID NO: 514128 - RNA, 19 nt, Homo sapiens
  misc_RNA (1)...(19): siRNA sense strand
caaggauugugguuaugga

SEQ ID NO: 514129 - RNA, 19 nt, Homo sapiens
  misc_RNA (1)...(19): siRNA sense strand
caccugugcugucaucaau

SEQ ID NO: 514130 - RNA, 19 nt, Homo sapiens
  misc_RNA (1)...(19): siRNA sense strand
aaggucaacugcacagcua

SEQ ID NO: 514131 - RNA, 19 nt, Homo sapiens
  misc_RNA (1)...(19): siRNA sense strand
ugagugagaacaucuuuca

SEQ ID NO: 514132 - RNA, 19 nt, Homo sapiens
  misc_RNA (1)...(19): siRNA sense strand
caucaaucguguucagaag

SEQ ID NO: 514133 - RNA, 19 nt, Homo sapiens
  misc_RNA (1)...(19): siRNA sense strand
ccaagugagugagaacauc

SEQ ID NO: 514134 - RNA, 19 nt, Homo sapiens
  misc_RNA (1)...(19): siRNA sense strand
caucaccugugcugucauc

SEQ ID NO: 514135 - RNA, 19 nt, Homo sapiens
  misc_RNA (1)...(19): siRNA sense strand
cugcacagcuaccucuaau

SEQ ID NO: 514136 - RNA, 19 nt, Homo sapiens
  misc_RNA (1)...(19): siRNA sense strand
cagcaaaggaggaaucucu

SEQ ID NO: 514137 - RNA, 19 nt, Homo sapiens
  misc_RNA (1)...(19): siRNA sense strand
ucaaucguguucagaaggu

SEQ ID NO: 514138 - RNA, 19 nt, Homo sapiens
  misc_RNA (1)...(19): siRNA sense strand
caggaggccacacuuguug

SEQ ID NO: 514139 - RNA, 19 nt, Homo sapiens
  misc_RNA (1)...(19): siRNA sense strand
ggaaacacagucgaaagca

SEQ ID NO: 514140 - RNA, 19 nt, Homo sapiens
  misc_RNA (1)...(19): siRNA sense strand
guggagguuugcugcaguu

SEQ ID NO: 514141 - RNA, 19 nt, Homo sapiens
  misc_RNA (1)...(19): siRNA sense strand
ggagguuugcugcaguuug

SEQ ID NO: 514142 - RNA, 19 nt, Homo sapiens
  misc_RNA (1)...(19): siRNA sense strand
gggacuguuugcccagguu

SEQ ID NO: 514143 - RNA, 19 nt, Homo sapiens
  misc_RNA (1)...(19): siRNA sense strand
ucaggaggccacacuuguu

SEQ ID NO: 514144 - RNA, 19 nt, Homo sapiens
  misc_RNA (1)...(19): siRNA sense strand
aaacagcaaaggaggaauc

SEQ ID NO: 514145 - RNA, 19 nt, Homo sapiens
  misc_RNA (1)...(19): siRNA sense strand
ugaaguucccagcccuuaa

SEQ ID NO: 514146 - RNA, 19 nt, Homo sapiens
  misc_RNA (1)...(19): siRNA sense strand
agugagaacaucuuucaga

SEQ ID NO: 514147 - RNA, 19 nt, Homo sapiens
  misc_RNA (1)...(19): siRNA sense strand
aaugugcccuuugaaguuc

SEQ ID NO: 514148 - RNA, 19 nt, Homo sapiens
  misc_RNA (1)...(19): siRNA sense strand
ugcaagcaguucuucaaca

SEQ ID NO: 514149 - RNA, 19 nt, Homo sapiens
  misc_RNA (1)...(19): siRNA sense strand
gggaaacacagucgaaagc

SEQ ID NO: 514150 - RNA, 19 nt, Homo sapiens
  misc_RNA (1)...(19): siRNA sense strand
cccagccacuuaacccuau

SEQ ID NO: 514151 - RNA, 19 nt, Homo sapiens
  misc_RNA (1)...(19): siRNA sense strand
uuccagcucugccuccuau

SEQ ID NO: 514152 - RNA, 19 nt, Homo sapiens
  misc_RNA (1)...(19): siRNA sense strand
ucaucaaucguguucagaa

SEQ ID NO: 514153 - RNA, 19 nt, Homo sapiens
  misc_RNA (1)...(19): siRNA sense strand
gagcucaaugugcccuuug

SEQ ID NO: 514154 - RNA, 19 nt, Homo sapiens
  misc_RNA (1)...(19): siRNA sense strand
caagcaguucuucaacaga

SEQ ID NO: 514155 - RNA, 19 nt, Homo sapiens
  misc_RNA (1)...(19): siRNA sense strand
cccagguucuaccgaaaga

SEQ ID NO: 514156 - RNA, 19 nt, Homo sapiens
  misc_RNA (1)...(19): siRNA sense strand
ccgaaagacacgcauugga

SEQ ID NO: 514157 - RNA, 19 nt, Homo sapiens
  misc_RNA (1)...(19): siRNA sense strand
caagugagugagaacaucu

SEQ ID NO: 514158 - RNA, 19 nt, Homo sapiens
  misc_RNA (1)...(19): siRNA sense strand
gaacaauacugccaaugua

SEQ ID NO: 514159 - RNA, 19 nt, Homo sapiens
  misc_RNA (1)...(19): siRNA sense strand
ggagcaacaugucuaaaua

SEQ ID NO: 514160 - RNA, 19 nt, Homo sapiens
  misc_RNA (1)...(19): siRNA sense strand
ggacuuugcugucaugauu

SEQ ID NO: 514161 - RNA, 19 nt, Homo sapiens
  misc_RNA (1)...(19): siRNA sense strand
gaacaacaaucuuucucaa

SEQ ID NO: 514162 - RNA, 19 nt, Homo sapiens
  misc_RNA (1)...(19): siRNA sense strand
gcgauucccucgucaauuu

SEQ ID NO: 514163 - RNA, 19 nt, Homo sapiens
  misc_RNA (1)...(19): siRNA sense strand
uaagagauguggaaacaaa

SEQ ID NO: 514164 - RNA, 19 nt, Homo sapiens
  misc_RNA (1)...(19): siRNA sense strand
gagcauacgacuauaauuu

SEQ ID NO: 514165 - RNA, 19 nt, Homo sapiens
  misc_RNA (1)...(19): siRNA sense strand
cuuaaaggcucuugaagua

SEQ ID NO: 514166 - RNA, 19 nt, Homo sapiens
  misc_RNA (1)...(19): siRNA sense strand
caaaugacguuuauaagca

SEQ ID NO: 514167 - RNA, 19 nt, Homo sapiens
  misc_RNA (1)...(19): siRNA sense strand
ggaagaaucugaagcaaaa

SEQ ID NO: 514168 - RNA, 19 nt, Homo sapiens
  misc_RNA (1)...(19): siRNA sense strand
gaaucagguuuguggcuua

SEQ ID NO: 514169 - RNA, 19 nt, Homo sapiens
  misc_RNA (1)...(19): siRNA sense strand
ggaagaaucuaaagcaaac

SEQ ID NO: 514170 - RNA, 19 nt, Homo sapiens
  misc_RNA (1)...(19): siRNA sense strand
gcacuggguuuagcaauug

SEQ ID NO: 514171 - RNA, 19 nt, Homo sapiens
  misc_RNA (1)...(19): siRNA sense strand
gaauugauccuacucuuug

SEQ ID NO: 514172 - RNA, 19 nt, Homo sapiens
  misc_RNA (1)...(19): siRNA sense strand
ggacuagguuaugugcuua

SEQ ID NO: 514173 - RNA, 19 nt, Homo sapiens
  misc_RNA (1)...(19): siRNA sense strand
caaagagugucaagaaaca

SEQ ID NO: 514174 - RNA, 19 nt, Homo sapiens
  misc_RNA (1)...(19): siRNA sense strand
ggaagaaucuaaagcaaaa

SEQ ID NO: 514175 - RNA, 19 nt, Homo sapiens
  misc_RNA (1)...(19): siRNA sense strand
ggacuuuccuggauccuau

SEQ ID NO: 514176 - RNA, 19 nt, Homo sapiens
  misc_RNA (1)...(19): siRNA sense strand
agaguuagcugaaguuuua

SEQ ID NO: 514177 - RNA, 19 nt, Homo sapiens
  misc_RNA (1)...(19): siRNA sense strand
uaaaggcucuugaaguaug

SEQ ID NO: 514178 - RNA, 19 nt, Homo sapiens
  misc_RNA (1)...(19): siRNA sense strand
cgacaaugcuccuuaaguc

SEQ ID NO: 514179 - RNA, 19 nt, Homo sapiens
  misc_RNA (1)...(19): siRNA sense strand
gcucaguccugcaguuuga

SEQ ID NO: 514180 - RNA, 19 nt, Homo sapiens
  misc_RNA (1)...(19): siRNA sense strand
caaaguacuuggaauugau

SEQ ID NO: 514181 - RNA, 19 nt, Homo sapiens
  misc_RNA (1)...(19): siRNA sense strand
gaaaguaaacgacccaaag

SEQ ID NO: 514182 - RNA, 19 nt, Homo sapiens
  misc_RNA (1)...(19): siRNA sense strand
ggaauugauccuacucuuu

SEQ ID NO: 514183 - RNA, 19 nt, Homo sapiens
  misc_RNA (1)...(19): siRNA sense strand
gagcaacaugucuaaauaa

SEQ ID NO: 514184 - RNA, 19 nt, Homo sapiens
  misc_RNA (1)...(19): siRNA sense strand
cgagguguauuuaacauug

SEQ ID NO: 514185 - RNA, 19 nt, Homo sapiens
  misc_RNA (1)...(19): siRNA sense strand
gcaaccaggugccaacugu

SEQ ID NO: 514186 - RNA, 19 nt, Homo sapiens
  misc_RNA (1)...(19): siRNA sense strand
caaucuuucucaagucaua

SEQ ID NO: 514187 - RNA, 19 nt, Homo sapiens
  misc_RNA (1)...(19): siRNA sense strand
ccaaaggacugcaacuaca

SEQ ID NO: 514188 - RNA, 19 nt, Homo sapiens
  misc_RNA (1)...(19): siRNA sense strand
gggugcagauccagauaua

SEQ ID NO: 514189 - RNA, 19 nt, Homo sapiens
  misc_RNA (1)...(19): siRNA sense strand
aaugugaccuugcagagua

SEQ ID NO: 514190 - RNA, 19 nt, Homo sapiens
  misc_RNA (1)...(19): siRNA sense strand
gagaauaaggcgaggcuaa

SEQ ID NO: 514191 - RNA, 19 nt, Homo sapiens
  misc_RNA (1)...(19): siRNA sense strand
ugccaaacauuaccaaauu

SEQ ID NO: 514192 - RNA, 19 nt, Homo sapiens
  misc_RNA (1)...(19): siRNA sense strand
uaacauugaugccaaacau

SEQ ID NO: 514193 - RNA, 19 nt, Homo sapiens
  misc_RNA (1)...(19): siRNA sense strand
gcccaaaugacguuuauaa

SEQ ID NO: 514194 - RNA, 19 nt, Homo sapiens
  misc_RNA (1)...(19): siRNA sense strand
agaagcacguccuccauuu

SEQ ID NO: 514195 - RNA, 19 nt, Homo sapiens
  misc_RNA (1)...(19): siRNA sense strand
guuaugugcuuaagagaug

SEQ ID NO: 514196 - RNA, 19 nt, Homo sapiens
  misc_RNA (1)...(19): siRNA sense strand
gaagucaccauuccugaga

SEQ ID NO: 514197 - RNA, 19 nt, Homo sapiens
  misc_RNA (1)...(19): siRNA sense strand
ccuauaaacacccaaagua

SEQ ID NO: 514198 - RNA, 19 nt, Homo sapiens
  misc_RNA (1)...(19): siRNA sense strand
guaaacgacccaaagcaaa

SEQ ID NO: 514199 - RNA, 19 nt, Homo sapiens
  misc_RNA (1)...(19): siRNA sense strand
ucaaguuccugcccaaaug

SEQ ID NO: 514200 - RNA, 19 nt, Homo sapiens
  misc_RNA (1)...(19): siRNA sense strand
acaacaaucuuucucaagu

SEQ ID NO: 514201 - RNA, 19 nt, Homo sapiens
  misc_RNA (1)...(19): siRNA sense strand
aaagaucgguguugccaau

SEQ ID NO: 514202 - RNA, 19 nt, Homo sapiens
  misc_RNA (1)...(19): siRNA sense strand
gggaacugcuggaggauca

SEQ ID NO: 514203 - RNA, 19 nt, Homo sapiens
  misc_RNA (1)...(19): siRNA sense strand
cgacuauaauuucuacuca

SEQ ID NO: 514204 - RNA, 19 nt, Homo sapiens
  misc_RNA (1)...(19): siRNA sense strand
uuugguaacugugagauua

SEQ ID NO: 514205 - RNA, 19 nt, Homo sapiens
  misc_RNA (1)...(19): siRNA sense strand
ggaggacaaugaggaaugu

SEQ ID NO: 514206 - RNA, 19 nt, Homo sapiens
  misc_RNA (1)...(19): siRNA sense strand
gccaaacauuaccaaauug

SEQ ID NO: 514207 - RNA, 19 nt, Homo sapiens
  misc_RNA (1)...(19): siRNA sense strand
gggcacaggcuaucaucua

SEQ ID NO: 514208 - RNA, 19 nt, Homo sapiens
  misc_RNA (1)...(19): siRNA sense strand
gagauuacaggaauucgaa

SEQ ID NO: 514209 - RNA, 19 nt, Homo sapiens
  misc_RNA (1)...(19): siRNA sense strand
gaucauccuuacauaccaa

SEQ ID NO: 514210 - RNA, 19 nt, Homo sapiens
  misc_RNA (1)...(19): siRNA sense strand
gaaucuaaagcaaacauug

SEQ ID NO: 514211 - RNA, 19 nt, Homo sapiens
  misc_RNA (1)...(19): siRNA sense strand
gcaggaaggaaaugaaugu

SEQ ID NO: 514212 - RNA, 19 nt, Homo sapiens
  misc_RNA (1)...(19): siRNA sense strand
ggugccaacuguagcauug

SEQ ID NO: 514213 - RNA, 19 nt, Homo sapiens
  misc_RNA (1)...(19): siRNA sense strand
gcucuugcauggucguuug

SEQ ID NO: 514214 - RNA, 19 nt, Homo sapiens
  misc_RNA (1)...(19): siRNA sense strand
gauuauggacaccuacuuu

SEQ ID NO: 514215 - RNA, 19 nt, Homo sapiens
  misc_RNA (1)...(19): siRNA sense strand
caacaaucuuucucaaguc

SEQ ID NO: 514216 - RNA, 19 nt, Homo sapiens
  misc_RNA (1)...(19): siRNA sense strand
ucucuggacucuaaagcua

SEQ ID NO: 514217 - RNA, 19 nt, Homo sapiens
  misc_RNA (1)...(19): siRNA sense strand
gcauuggacuuugcuguca

SEQ ID NO: 514218 - RNA, 19 nt, Homo sapiens
  misc_RNA (1)...(19): siRNA sense strand
ggaaaaguguguucucuag

SEQ ID NO: 514219 - RNA, 19 nt, Homo sapiens
  misc_RNA (1)...(19): siRNA sense strand
ggacaccuacuuucaagau

SEQ ID NO: 514220 - RNA, 19 nt, Homo sapiens
  misc_RNA (1)...(19): siRNA sense strand
acauugaugccaaacauua

SEQ ID NO: 514221 - RNA, 19 nt, Homo sapiens
  misc_RNA (1)...(19): siRNA sense strand
gagguguauuuaacauuga

SEQ ID NO: 514222 - RNA, 19 nt, Homo sapiens
  misc_RNA (1)...(19): siRNA sense strand
gcaaagagugucaagaaac

SEQ ID NO: 514223 - RNA, 19 nt, Homo sapiens
  misc_RNA (1)...(19): siRNA sense strand
gcauacgacuauaauuucu

SEQ ID NO: 514224 - RNA, 19 nt, Homo sapiens
  misc_RNA (1)...(19): siRNA sense strand
cagauugggcacauuuaua

SEQ ID NO: 514225 - RNA, 19 nt, Homo sapiens
  misc_RNA (1)...(19): siRNA sense strand
cuacaugggcuccgugaaa

SEQ ID NO: 514226 - RNA, 19 nt, Homo sapiens
  misc_RNA (1)...(19): siRNA sense strand
uugaaaccaucccugauuu

SEQ ID NO: 514227 - RNA, 19 nt, Homo sapiens
  misc_RNA (1)...(19): siRNA sense strand
gaugaacaauacugccaau

SEQ ID NO: 514228 - RNA, 19 nt, Homo sapiens
  misc_RNA (1)...(19): siRNA sense strand
gaucaaaguagguauaggu

SEQ ID NO: 514229 - RNA, 19 nt, Homo sapiens
  misc_RNA (1)...(19): siRNA sense strand
uggcuuaagugaugaugaa

SEQ ID NO: 514230 - RNA, 19 nt, Homo sapiens
  misc_RNA (1)...(19): siRNA sense strand
guuuguggcuuaagugaug

SEQ ID NO: 514231 - RNA, 19 nt, Homo sapiens
  misc_RNA (1)...(19): siRNA sense strand
cuaagggacuuuccuggau

SEQ ID NO: 514232 - RNA, 19 nt, Homo sapiens
  misc_RNA (1)...(19): siRNA sense strand
aagcaaagagugucaagaa

SEQ ID NO: 514233 - RNA, 19 nt, Homo sapiens
  misc_RNA (1)...(19): siRNA sense strand
caggaagaaucuaaagcaa

SEQ ID NO: 514234 - RNA, 19 nt, Homo sapiens
  misc_RNA (1)...(19): siRNA sense strand
caggaagaaucuaaagcaa

SEQ ID NO: 514235 - RNA, 19 nt, Homo sapiens
  misc_RNA (1)...(19): siRNA sense strand
ggcacaggcuaucaucuau

SEQ ID NO: 514236 - RNA, 19 nt, Homo sapiens
  misc_RNA (1)...(19): siRNA sense strand
ucuagaauaugcuggauca

SEQ ID NO: 514237 - RNA, 19 nt, Homo sapiens
  misc_RNA (1)...(19): siRNA sense strand
gcucgccugucaucagauu

SEQ ID NO: 514238 - RNA, 19 nt, Homo sapiens
  misc_RNA (1)...(19): siRNA sense strand
gaaagagcaguuugggaau

SEQ ID NO: 514239 - RNA, 19 nt, Homo sapiens
  misc_RNA (1)...(19): siRNA sense strand
ugaccuagguaugauaaau

SEQ ID NO: 514240 - RNA, 19 nt, Homo sapiens
  misc_RNA (1)...(19): siRNA sense strand
gaagcacguccuccauuug

SEQ ID NO: 514241 - RNA, 19 nt, Homo sapiens
  misc_RNA (1)...(19): siRNA sense strand
caucagauugggcacauuu

SEQ ID NO: 514242 - RNA, 19 nt, Homo sapiens
  misc_RNA (1)...(19): siRNA sense strand
gauaggaaaccacuuaaaa

SEQ ID NO: 514243 - RNA, 19 nt, Homo sapiens
  misc_RNA (1)...(19): siRNA sense strand
guugaaaccaucccugauu

SEQ ID NO: 514244 - RNA, 19 nt, Homo sapiens
  misc_RNA (1)...(19): siRNA sense strand
ugagugcuaugaugcaguu

SEQ ID NO: 514245 - RNA, 19 nt, Homo sapiens
  misc_RNA (1)...(19): siRNA sense strand
gugcagauccagauauaug

SEQ ID NO: 514246 - RNA, 19 nt, Homo sapiens
  misc_RNA (1)...(19): siRNA sense strand
cuuaagagauguggaaaca

SEQ ID NO: 514247 - RNA, 19 nt, Homo sapiens
  misc_RNA (1)...(19): siRNA sense strand
gaauaugcuggaucaguga

SEQ ID NO: 514248 - RNA, 19 nt, Homo sapiens
  misc_RNA (1)...(19): siRNA sense strand
ccaaacauuaccaaauuga

SEQ ID NO: 514249 - RNA, 19 nt, Homo sapiens
  misc_RNA (1)...(19): siRNA sense strand
aaacugaacaggaagaauc

SEQ ID NO: 514250 - RNA, 19 nt, Homo sapiens
  misc_RNA (1)...(19): siRNA sense strand
caauugcaguuauaucucu

SEQ ID NO: 514251 - RNA, 19 nt, Homo sapiens
  misc_RNA (1)...(19): siRNA sense strand
caaaauacgcguuggauau

SEQ ID NO: 514252 - RNA, 19 nt, Homo sapiens
  misc_RNA (1)...(19): siRNA sense strand
gaacaggaagaaucuaaaa

SEQ ID NO: 514253 - RNA, 19 nt, Homo sapiens
  misc_RNA (1)...(19): siRNA sense strand
ccagagcauacgacuauaa

SEQ ID NO: 514254 - RNA, 19 nt, Homo sapiens
  misc_RNA (1)...(19): siRNA sense strand
gaucgguguugccaaucaa

SEQ ID NO: 514255 - RNA, 19 nt, Homo sapiens
  misc_RNA (1)...(19): siRNA sense strand
aucauaauguuucgccuua

SEQ ID NO: 514256 - RNA, 19 nt, Homo sapiens
  misc_RNA (1)...(19): siRNA sense strand
ggacaggaagaaucuaaag

SEQ ID NO: 514257 - RNA, 19 nt, Homo sapiens
  misc_RNA (1)...(19): siRNA sense strand
ggacaggaagaaucuaaag

SEQ ID NO: 514258 - RNA, 19 nt, Homo sapiens
  misc_RNA (1)...(19): siRNA sense strand
gaacaagaccaacaugaau

SEQ ID NO: 514259 - RNA, 19 nt, Homo sapiens
  misc_RNA (1)...(19): siRNA sense strand
gaaguucgucuacaaguuu

SEQ ID NO: 514260 - RNA, 19 nt, Homo sapiens
  misc_RNA (1)...(19): siRNA sense strand
caacaugaauuacgacaag

SEQ ID NO: 514261 - RNA, 19 nt, Homo sapiens
  misc_RNA (1)...(19): siRNA sense strand
gcaaggcaauggccacauc

SEQ ID NO: 514262 - RNA, 19 nt, Homo sapiens
  misc_RNA (1)...(19): siRNA sense strand
ggacuacgcaagaacaaga

SEQ ID NO: 514263 - RNA, 19 nt, Homo sapiens
  misc_RNA (1)...(19): siRNA sense strand
acaagaccaacaugaauua

SEQ ID NO: 514264 - RNA, 19 nt, Homo sapiens
  misc_RNA (1)...(19): siRNA sense strand
gccagaaguucgucuacaa

SEQ ID NO: 514265 - RNA, 19 nt, Homo sapiens
  misc_RNA (1)...(19): siRNA sense strand
caagcucuccuuccaguuu

SEQ ID NO: 514266 - RNA, 19 nt, Homo sapiens
  misc_RNA (1)...(19): siRNA sense strand
guacuacuaugacaagaac

SEQ ID NO: 514267 - RNA, 19 nt, Homo sapiens
  misc_RNA (1)...(19): siRNA sense strand
gugcacaucccuucuauca

SEQ ID NO: 514268 - RNA, 19 nt, Homo sapiens
  misc_RNA (1)...(19): siRNA sense strand
uagaagggcccaaggaaga

SEQ ID NO: 514269 - RNA, 19 nt, Homo sapiens
  misc_RNA (1)...(19): siRNA sense strand
gcaagaacaagaccaacau

SEQ ID NO: 514270 - RNA, 19 nt, Homo sapiens
  misc_RNA (1)...(19): siRNA sense strand
agaccaacaugaauuacga

SEQ ID NO: 514271 - RNA, 19 nt, Homo sapiens
  misc_RNA (1)...(19): siRNA sense strand
caaggaagaguuggaaguu

SEQ ID NO: 514272 - RNA, 19 nt, Homo sapiens
  misc_RNA (1)...(19): siRNA sense strand
agaaguucgucuacaaguu

SEQ ID NO: 514273 - RNA, 19 nt, Homo sapiens
  misc_RNA (1)...(19): siRNA sense strand
ugaaaucggaagagcuuaa

SEQ ID NO: 514274 - RNA, 19 nt, Homo sapiens
  misc_RNA (1)...(19): siRNA sense strand
ggaugguggugaauucaag

SEQ ID NO: 514275 - RNA, 19 nt, Homo sapiens
  misc_RNA (1)...(19): siRNA sense strand
cacaucaucuccuggacuu

SEQ ID NO: 514276 - RNA, 19 nt, Homo sapiens
  misc_RNA (1)...(19): siRNA sense strand
agaacaagaccaacaugaa

SEQ ID NO: 514277 - RNA, 19 nt, Homo sapiens
  misc_RNA (1)...(19): siRNA sense strand
gcagcagccggaacgagua

SEQ ID NO: 514278 - RNA, 19 nt, Homo sapiens
  misc_RNA (1)...(19): siRNA sense strand
gaaaucggaagagcuuaau

SEQ ID NO: 514279 - RNA, 19 nt, Homo sapiens
  misc_RNA (1)...(19): siRNA sense strand
gagaggguuugugccagaa

SEQ ID NO: 514280 - RNA, 19 nt, Homo sapiens
  misc_RNA (1)...(19): siRNA sense strand
gcugagagagcaaggcaau

SEQ ID NO: 514281 - RNA, 19 nt, Homo sapiens
  misc_RNA (1)...(19): siRNA sense strand
caagaacaagaccaacaug

SEQ ID NO: 514282 - RNA, 19 nt, Homo sapiens
  misc_RNA (1)...(19): siRNA sense strand
gcaauggccacaucaucuc

SEQ ID NO: 514283 - RNA, 19 nt, Homo sapiens
  misc_RNA (1)...(19): siRNA sense strand
aacaagaccaacaugaauu

SEQ ID NO: 514284 - RNA, 19 nt, Homo sapiens
  misc_RNA (1)...(19): siRNA sense strand
aaggaagaguuggaaguug

SEQ ID NO: 514285 - RNA, 19 nt, Homo sapiens
  misc_RNA (1)...(19): siRNA sense strand
ggccagaaguucgucuaca

SEQ ID NO: 514286 - RNA, 19 nt, Homo sapiens
  misc_RNA (1)...(19): siRNA sense strand
gguacuacuaugacaagaa

SEQ ID NO: 514287 - RNA, 19 nt, Homo sapiens
  misc_RNA (1)...(19): siRNA sense strand
gggccuugcgguacuacua

SEQ ID NO: 514288 - RNA, 19 nt, Homo sapiens
  misc_RNA (1)...(19): siRNA sense strand
gaccuagagcuuccacuca

SEQ ID NO: 514289 - RNA, 19 nt, Homo sapiens
  misc_RNA (1)...(19): siRNA sense strand
ccuccaccaugccaaaugu

SEQ ID NO: 514290 - RNA, 19 nt, Homo sapiens
  misc_RNA (1)...(19): siRNA sense strand
aagaacaagaccaacauga

SEQ ID NO: 514291 - RNA, 19 nt, Homo sapiens
  misc_RNA (1)...(19): siRNA sense strand
cggccaagcucuccuucca

SEQ ID NO: 514292 - RNA, 19 nt, Homo sapiens
  misc_RNA (1)...(19): siRNA sense strand
ggcaauggccacaucaucu

SEQ ID NO: 514293 - RNA, 19 nt, Homo sapiens
  misc_RNA (1)...(19): siRNA sense strand
ccugaaaucggaagagcuu

SEQ ID NO: 514294 - RNA, 19 nt, Homo sapiens
  misc_RNA (1)...(19): siRNA sense strand
caucaucuccuggacuuca

SEQ ID NO: 514295 - RNA, 19 nt, Homo sapiens
  misc_RNA (1)...(19): siRNA sense strand
aaucggaagagcuuaaugu

SEQ ID NO: 514296 - RNA, 19 nt, Homo sapiens
  misc_RNA (1)...(19): siRNA sense strand
caccaaggccgagccagaa

SEQ ID NO: 514297 - RNA, 19 nt, Homo sapiens
  misc_RNA (1)...(19): siRNA sense strand
ugagagagcaaggcaaugg

SEQ ID NO: 514298 - RNA, 19 nt, Homo sapiens
  misc_RNA (1)...(19): siRNA sense strand
caggugcacaucccuucua

SEQ ID NO: 514299 - RNA, 19 nt, Homo sapiens
  misc_RNA (1)...(19): siRNA sense strand
ggugagcggccagaaguuc

SEQ ID NO: 514300 - RNA, 19 nt, Homo sapiens
  misc_RNA (1)...(19): siRNA sense strand
ccagaugacuugaauagua

SEQ ID NO: 514301 - RNA, 19 nt, Homo sapiens
  misc_RNA (1)...(19): siRNA sense strand
gagaaaagcuccaaauaaa

SEQ ID NO: 514302 - RNA, 19 nt, Homo sapiens
  misc_RNA (1)...(19): siRNA sense strand
gaacaaaggaucuuaaagu

SEQ ID NO: 514303 - RNA, 19 nt, Homo sapiens
  misc_RNA (1)...(19): siRNA sense strand
ucaaaugccucaaauaaca

SEQ ID NO: 514304 - RNA, 19 nt, Homo sapiens
  misc_RNA (1)...(19): siRNA sense strand
caucaaaugccucaaauaa

SEQ ID NO: 514305 - RNA, 19 nt, Homo sapiens
  misc_RNA (1)...(19): siRNA sense strand
uaaaugcugugcuaauuga

SEQ ID NO: 514306 - RNA, 19 nt, Homo sapiens
  misc_RNA (1)...(19): siRNA sense strand
ucucaaaucugucacauug

SEQ ID NO: 514307 - RNA, 19 nt, Homo sapiens
  misc_RNA (1)...(19): siRNA sense strand
gcaagaaaguggcaaagca

SEQ ID NO: 514308 - RNA, 19 nt, Homo sapiens
  misc_RNA (1)...(19): siRNA sense strand
gaaaccaccuguucauuac

SEQ ID NO: 514309 - RNA, 19 nt, Homo sapiens
  misc_RNA (1)...(19): siRNA sense strand
gaagaaucaucccacuauu

SEQ ID NO: 514310 - RNA, 19 nt, Homo sapiens
  misc_RNA (1)...(19): siRNA sense strand
ccaugaaccucgauuuaaa

SEQ ID NO: 514311 - RNA, 19 nt, Homo sapiens
  misc_RNA (1)...(19): siRNA sense strand
gcgacuaucucuucaaugu

SEQ ID NO: 514312 - RNA, 19 nt, Homo sapiens
  misc_RNA (1)...(19): siRNA sense strand
gcaagaaaguggccaagca

SEQ ID NO: 514313 - RNA, 19 nt, Homo sapiens
  misc_RNA (1)...(19): siRNA sense strand
gcuauuugcugucguguga

SEQ ID NO: 514314 - RNA, 19 nt, Homo sapiens
  misc_RNA (1)...(19): siRNA sense strand
ggacuacgacaucccuuua

SEQ ID NO: 514315 - RNA, 19 nt, Homo sapiens
  misc_RNA (1)...(19): siRNA sense strand
ugagauaccugaacaccaa

SEQ ID NO: 514316 - RNA, 19 nt, Homo sapiens
  misc_RNA (1)...(19): siRNA sense strand
gagagaggaugcaaaucaa

SEQ ID NO: 514317 - RNA, 19 nt, Homo sapiens
  misc_RNA (1)...(19): siRNA sense strand
ggaugcaaaucaagagaaa

SEQ ID NO: 514318 - RNA, 19 nt, Homo sapiens
  misc_RNA (1)...(19): siRNA sense strand
gcagauggccgcagaggaa

SEQ ID NO: 514319 - RNA, 19 nt, Homo sapiens
  misc_RNA (1)...(19): siRNA sense strand
gagaaagaaucagagaaga

SEQ ID NO: 514320 - RNA, 19 nt, Homo sapiens
  misc_RNA (1)...(19): siRNA sense strand
gaaagaaaucaaucgaguu

SEQ ID NO: 514321 - RNA, 19 nt, Homo sapiens
  misc_RNA (1)...(19): siRNA sense strand
gaacggagaaggcacaauc

SEQ ID NO: 514322 - RNA, 19 nt, Homo sapiens
  misc_RNA (1)...(19): siRNA sense strand
cagaguuccucaccuguaa

SEQ ID NO: 514323 - RNA, 19 nt, Homo sapiens
  misc_RNA (1)...(19): siRNA sense strand
ggagaggcuucaucagguu

SEQ ID NO: 514324 - RNA, 19 nt, Homo sapiens
  misc_RNA (1)...(19): siRNA sense strand
cagaugacuugaauaguau

SEQ ID NO: 514325 - RNA, 19 nt, Homo sapiens
  misc_RNA (1)...(19): siRNA sense strand
caggguauguugacuuuga

SEQ ID NO: 514326 - RNA, 19 nt, Homo sapiens
  misc_RNA (1)...(19): siRNA sense strand
gaaccucgauuuaaauucc

SEQ ID NO: 514327 - RNA, 19 nt, Homo sapiens
  misc_RNA (1)...(19): siRNA sense strand
gguauucccucagcggaua

SEQ ID NO: 514328 - RNA, 19 nt, Homo sapiens
  misc_RNA (1)...(19): siRNA sense strand
gcaagaggccagaccagaa

SEQ ID NO: 514329 - RNA, 19 nt, Homo sapiens
  misc_RNA (1)...(19): siRNA sense strand
gaagaaagaaaucaaucga

SEQ ID NO: 514330 - RNA, 19 nt, Homo sapiens
  misc_RNA (1)...(19): siRNA sense strand
cccaguaguuuccugcuua

SEQ ID NO: 514331 - RNA, 19 nt, Homo sapiens
  misc_RNA (1)...(19): siRNA sense strand
guaauauacccacaucaaa

SEQ ID NO: 514332 - RNA, 19 nt, Homo sapiens
  misc_RNA (1)...(19): siRNA sense strand
agauauaaaugcugugcua

SEQ ID NO: 514333 - RNA, 19 nt, Homo sapiens
  misc_RNA (1)...(19): siRNA sense strand
gacuaucucuucaaugugu

SEQ ID NO: 514334 - RNA, 19 nt, Homo sapiens
  misc_RNA (1)...(19): siRNA sense strand
cgaaggauaguauauuuga

SEQ ID NO: 514335 - RNA, 19 nt, Homo sapiens
  misc_RNA (1)...(19): siRNA sense strand
guuagaauaugcccaguuc

SEQ ID NO: 514336 - RNA, 19 nt, Homo sapiens
  misc_RNA (1)...(19): siRNA sense strand
uaccaaggcccgagauaua

SEQ ID NO: 514337 - RNA, 19 nt, Homo sapiens
  misc_RNA (1)...(19): siRNA sense strand
ggaauccagugacauugug

SEQ ID NO: 514338 - RNA, 19 nt, Homo sapiens
  misc_RNA (1)...(19): siRNA sense strand
gagaugcccuccuucuaca

SEQ ID NO: 514339 - RNA, 19 nt, Homo sapiens
  misc_RNA (1)...(19): siRNA sense strand
caccuuccaugaccagaua

SEQ ID NO: 514340 - RNA, 19 nt, Homo sapiens
  misc_RNA (1)...(19): siRNA sense strand
caucugacccgugcuauuu

SEQ ID NO: 514341 - RNA, 19 nt, Homo sapiens
  misc_RNA (1)...(19): siRNA sense strand
gccaagguuuccaguacua

SEQ ID NO: 514342 - RNA, 19 nt, Homo sapiens
  misc_RNA (1)...(19): siRNA sense strand
gcagggaucuacugagacu

SEQ ID NO: 514343 - RNA, 19 nt, Homo sapiens
  misc_RNA (1)...(19): siRNA sense strand
gcagaguuccucaccugua

SEQ ID NO: 514344 - RNA, 19 nt, Homo sapiens
  misc_RNA (1)...(19): siRNA sense strand
cgagagaggaugcaaauca

SEQ ID NO: 514345 - RNA, 19 nt, Homo sapiens
  misc_RNA (1)...(19): siRNA sense strand
gaagggcaagcuacagaaa

SEQ ID NO: 514346 - RNA, 19 nt, Homo sapiens
  misc_RNA (1)...(19): siRNA sense strand
ucagguuucucuacaguga

SEQ ID NO: 514347 - RNA, 19 nt, Homo sapiens
  misc_RNA (1)...(19): siRNA sense strand
caaguucguuuaccaagca

SEQ ID NO: 514348 - RNA, 19 nt, Homo sapiens
  misc_RNA (1)...(19): siRNA sense strand
ccaacuccauggcuucuga

SEQ ID NO: 514349 - RNA, 19 nt, Homo sapiens
  misc_RNA (1)...(19): siRNA sense strand
uauacucccuggcaaagaa

SEQ ID NO: 514350 - RNA, 19 nt, Homo sapiens
  misc_RNA (1)...(19): siRNA sense strand
ccgcagggaucuacugaga

SEQ ID NO: 514351 - RNA, 19 nt, Homo sapiens
  misc_RNA (1)...(19): siRNA sense strand
uuaagaagcucugcuccuu

SEQ ID NO: 514352 - RNA, 19 nt, Homo sapiens
  misc_RNA (1)...(19): siRNA sense strand
gagaugggagugcauuuga

SEQ ID NO: 514353 - RNA, 19 nt, Homo sapiens
  misc_RNA (1)...(19): siRNA sense strand
ugaaagccaugacaauucu

SEQ ID NO: 514354 - RNA, 19 nt, Homo sapiens
  misc_RNA (1)...(19): siRNA sense strand
gcaggaugcagcuaugaaa

SEQ ID NO: 514355 - RNA, 19 nt, Homo sapiens
  misc_RNA (1)...(19): siRNA sense strand
ccacagagaaagaaucaga

SEQ ID NO: 514356 - RNA, 19 nt, Homo sapiens
  misc_RNA (1)...(19): siRNA sense strand
gcagagucagcauauauga

SEQ ID NO: 514357 - RNA, 19 nt, Homo sapiens
  misc_RNA (1)...(19): siRNA sense strand
ccaguaguuuccugcuuaa

SEQ ID NO: 514358 - RNA, 19 nt, Homo sapiens
  misc_RNA (1)...(19): siRNA sense strand
ccacagagagguguugauu

SEQ ID NO: 514359 - RNA, 19 nt, Homo sapiens
  misc_RNA (1)...(19): siRNA sense strand
ugcgaaggauaguauauuu

SEQ ID NO: 514360 - RNA, 19 nt, Homo sapiens
  misc_RNA (1)...(19): siRNA sense strand
agaaggcccugcccaugaa

SEQ ID NO: 514361 - RNA, 19 nt, Homo sapiens
  misc_RNA (1)...(19): siRNA sense strand
gaaccugucauaaaguuag

SEQ ID NO: 514362 - RNA, 19 nt, Homo sapiens
  misc_RNA (1)...(19): siRNA sense strand
ggaacugaguaucuaccaa

SEQ ID NO: 514363 - RNA, 19 nt, Homo sapiens
  misc_RNA (1)...(19): siRNA sense strand
gcacagcggagugguaaga

SEQ ID NO: 514364 - RNA, 19 nt, Homo sapiens
  misc_RNA (1)...(19): siRNA sense strand
uaugggaacuggauuagca

SEQ ID NO: 514365 - RNA, 19 nt, Homo sapiens
  misc_RNA (1)...(19): siRNA sense strand
gagagacuccguaccaugu

SEQ ID NO: 514366 - RNA, 19 nt, Homo sapiens
  misc_RNA (1)...(19): siRNA sense strand
gaaaguggcaaagcagaug

SEQ ID NO: 514367 - RNA, 19 nt, Homo sapiens
  misc_RNA (1)...(19): siRNA sense strand
gcacagcggagugguaaga

SEQ ID NO: 514368 - RNA, 19 nt, Homo sapiens
  misc_RNA (1)...(19): siRNA sense strand
gagaggaugcaaaucaaga

SEQ ID NO: 514369 - RNA, 19 nt, Homo sapiens
  misc_RNA (1)...(19): siRNA sense strand
gagaaucccaaacaaggaa

SEQ ID NO: 514370 - RNA, 19 nt, Homo sapiens
  misc_RNA (1)...(19): siRNA sense strand
uuggcgagcucgugagaua

SEQ ID NO: 514371 - RNA, 19 nt, Homo sapiens
  misc_RNA (1)...(19): siRNA sense strand
ccacaucaaaugccucaaa

SEQ ID NO: 514372 - RNA, 19 nt, Homo sapiens
  misc_RNA (1)...(19): siRNA sense strand
guuccucaccuguaauaua

SEQ ID NO: 514373 - RNA, 19 nt, Homo sapiens
  misc_RNA (1)...(19): siRNA sense strand
caagagaaauacgaacagu

SEQ ID NO: 514374 - RNA, 19 nt, Homo sapiens
  misc_RNA (1)...(19): siRNA sense strand
acagagagguguugauugc

SEQ ID NO: 514375 - RNA, 19 nt, Homo sapiens
  misc_RNA (1)...(19): siRNA sense strand
gccaagaacuacuucaaaa

SEQ ID NO: 514376 - RNA, 19 nt, Homo sapiens
  misc_RNA (1)...(19): siRNA sense strand
gcacagaaucccgccacua

SEQ ID NO: 514377 - RNA, 19 nt, Homo sapiens
  misc_RNA (1)...(19): siRNA sense strand
uggcuuugcugcugaauuc

SEQ ID NO: 514378 - RNA, 19 nt, Homo sapiens
  misc_RNA (1)...(19): siRNA sense strand
gauacuacacccauccauu

SEQ ID NO: 514379 - RNA, 19 nt, Homo sapiens
  misc_RNA (1)...(19): siRNA sense strand
gaaagaaucagagaagacu

SEQ ID NO: 514380 - RNA, 19 nt, Homo sapiens
  misc_RNA (1)...(19): siRNA sense strand
agaagaaucaucccacuau

SEQ ID NO: 514381 - RNA, 19 nt, Homo sapiens
  misc_RNA (1)...(19): siRNA sense strand
caagcaggaugcagcuaug

SEQ ID NO: 514382 - RNA, 19 nt, Homo sapiens
  misc_RNA (1)...(19): siRNA sense strand
caucaauggccgagaguuu

SEQ ID NO: 514383 - RNA, 19 nt, Homo sapiens
  misc_RNA (1)...(19): siRNA sense strand
gacagcaacuccacaucug

SEQ ID NO: 514384 - RNA, 19 nt, Homo sapiens
  misc_RNA (1)...(19): siRNA sense strand
gaagacagcaacuccacau

SEQ ID NO: 514385 - RNA, 19 nt, Homo sapiens
  misc_RNA (1)...(19): siRNA sense strand
gcagcccauuuaucucaaa

SEQ ID NO: 514386 - RNA, 19 nt, Homo sapiens
  misc_RNA (1)...(19): siRNA sense strand
gaaauacaacucccagacu

SEQ ID NO: 514387 - RNA, 19 nt, Homo sapiens
  misc_RNA (1)...(19): siRNA sense strand
aaggagaaacugucaauga

SEQ ID NO: 514388 - RNA, 19 nt, Homo sapiens
  misc_RNA (1)...(19): siRNA sense strand
gcagaacgcauggguuuca

SEQ ID NO: 514389 - RNA, 19 nt, Homo sapiens
  misc_RNA (1)...(19): siRNA sense strand
guaagaccagacagucaua

SEQ ID NO: 514390 - RNA, 19 nt, Homo sapiens
  misc_RNA (1)...(19): siRNA sense strand
cuaccaagaucaggaacaa

SEQ ID NO: 514391 - RNA, 19 nt, Homo sapiens
  misc_RNA (1)...(19): siRNA sense strand
gaaaguggccaagcaggau

SEQ ID NO: 514392 - RNA, 19 nt, Homo sapiens
  misc_RNA (1)...(19): siRNA sense strand
gauuuaaauuccagguugu

SEQ ID NO: 514393 - RNA, 19 nt, Homo sapiens
  misc_RNA (1)...(19): siRNA sense strand
auacuacacccauccauuu

SEQ ID NO: 514394 - RNA, 19 nt, Homo sapiens
  misc_RNA (1)...(19): siRNA sense strand
ugacuccucugcccugaau

SEQ ID NO: 514395 - RNA, 19 nt, Homo sapiens
  misc_RNA (1)...(19): siRNA sense strand
ccacaucugccuuggaaga

SEQ ID NO: 514396 - RNA, 19 nt, Homo sapiens
  misc_RNA (1)...(19): siRNA sense strand
gaguuccucaccuguaaua

SEQ ID NO: 514397 - RNA, 19 nt, Homo sapiens
  misc_RNA (1)...(19): siRNA sense strand
ugaaggauaugggcuaugg

SEQ ID NO: 514398 - RNA, 19 nt, Homo sapiens
  misc_RNA (1)...(19): siRNA sense strand
ggccaagaacuacuucaaa

SEQ ID NO: 514399 - RNA, 19 nt, Homo sapiens
  misc_RNA (1)...(19): siRNA sense strand
gaaagcugcccgugacuac

SEQ ID NO: 514400 - RNA, 19 nt, Homo sapiens
  misc_RNA (1)...(19): siRNA sense strand
ccagaugacuugaauagua

SEQ ID NO: 514401 - RNA, 19 nt, Homo sapiens
  misc_RNA (1)...(19): siRNA sense strand
gagaaaagcuccaaauaaa

SEQ ID NO: 514402 - RNA, 19 nt, Homo sapiens
  misc_RNA (1)...(19): siRNA sense strand
gaacaaaggaucuuaaagu

SEQ ID NO: 514403 - RNA, 19 nt, Homo sapiens
  misc_RNA (1)...(19): siRNA sense strand
ucaaaugccucaaauaaca

SEQ ID NO: 514404 - RNA, 19 nt, Homo sapiens
  misc_RNA (1)...(19): siRNA sense strand
caucaaaugccucaaauaa

SEQ ID NO: 514405 - RNA, 19 nt, Homo sapiens
  misc_RNA (1)...(19): siRNA sense strand
uaaaugcugugcuaauuga

SEQ ID NO: 514406 - RNA, 19 nt, Homo sapiens
  misc_RNA (1)...(19): siRNA sense strand
ucucaaaucugucacauug

SEQ ID NO: 514407 - RNA, 19 nt, Homo sapiens
  misc_RNA (1)...(19): siRNA sense strand
gcaagaaaguggcaaagca

SEQ ID NO: 514408 - RNA, 19 nt, Homo sapiens
  misc_RNA (1)...(19): siRNA sense strand
gaaaccaccuguucauuac

SEQ ID NO: 514409 - RNA, 19 nt, Homo sapiens
  misc_RNA (1)...(19): siRNA sense strand
gaagaaucaucccacuauu

SEQ ID NO: 514410 - RNA, 19 nt, Homo sapiens
  misc_RNA (1)...(19): siRNA sense strand
ccaugaaccucgauuuaaa

SEQ ID NO: 514411 - RNA, 19 nt, Homo sapiens
  misc_RNA (1)...(19): siRNA sense strand
gcgacuaucucuucaaugu

SEQ ID NO: 514412 - RNA, 19 nt, Homo sapiens
  misc_RNA (1)...(19): siRNA sense strand
gcaagaaaguggccaagca

SEQ ID NO: 514413 - RNA, 19 nt, Homo sapiens
  misc_RNA (1)...(19): siRNA sense strand
gcuauuugcugucguguga

SEQ ID NO: 514414 - RNA, 19 nt, Homo sapiens
  misc_RNA (1)...(19): siRNA sense strand
ggacuacgacaucccuuua

SEQ ID NO: 514415 - RNA, 19 nt, Homo sapiens
  misc_RNA (1)...(19): siRNA sense strand
ugagauaccugaacaccaa

SEQ ID NO: 514416 - RNA, 19 nt, Homo sapiens
  misc_RNA (1)...(19): siRNA sense strand
gagagaggaugcaaaucaa

SEQ ID NO: 514417 - RNA, 19 nt, Homo sapiens
  misc_RNA (1)...(19): siRNA sense strand
ggaugcaaaucaagagaaa

SEQ ID NO: 514418 - RNA, 19 nt, Homo sapiens
  misc_RNA (1)...(19): siRNA sense strand
gcagauggccgcagaggaa

SEQ ID NO: 514419 - RNA, 19 nt, Homo sapiens
  misc_RNA (1)...(19): siRNA sense strand
gagaaagaaucagagaaga

SEQ ID NO: 514420 - RNA, 19 nt, Homo sapiens
  misc_RNA (1)...(19): siRNA sense strand
gaaagaaaucaaucgaguu

SEQ ID NO: 514421 - RNA, 19 nt, Homo sapiens
  misc_RNA (1)...(19): siRNA sense strand
gaacggagaaggcacaauc

SEQ ID NO: 514422 - RNA, 19 nt, Homo sapiens
  misc_RNA (1)...(19): siRNA sense strand
cagaguuccucaccuguaa

SEQ ID NO: 514423 - RNA, 19 nt, Homo sapiens
  misc_RNA (1)...(19): siRNA sense strand
ggagaggcuucaucagguu

SEQ ID NO: 514424 - RNA, 19 nt, Homo sapiens
  misc_RNA (1)...(19): siRNA sense strand
cagaugacuugaauaguau

SEQ ID NO: 514425 - RNA, 19 nt, Homo sapiens
  misc_RNA (1)...(19): siRNA sense strand
caggguauguugacuuuga

SEQ ID NO: 514426 - RNA, 19 nt, Homo sapiens
  misc_RNA (1)...(19): siRNA sense strand
gaaccucgauuuaaauucc

SEQ ID NO: 514427 - RNA, 19 nt, Homo sapiens
  misc_RNA (1)...(19): siRNA sense strand
gguauucccucagcggaua

SEQ ID NO: 514428 - RNA, 19 nt, Homo sapiens
  misc_RNA (1)...(19): siRNA sense strand
gcaagaggccagaccagaa

SEQ ID NO: 514429 - RNA, 19 nt, Homo sapiens
  misc_RNA (1)...(19): siRNA sense strand
gaagaaagaaaucaaucga

SEQ ID NO: 514430 - RNA, 19 nt, Homo sapiens
  misc_RNA (1)...(19): siRNA sense strand
cccaguaguuuccugcuua

SEQ ID NO: 514431 - RNA, 19 nt, Homo sapiens
  misc_RNA (1)...(19): siRNA sense strand
guaauauacccacaucaaa

SEQ ID NO: 514432 - RNA, 19 nt, Homo sapiens
  misc_RNA (1)...(19): siRNA sense strand
agauauaaaugcugugcua

SEQ ID NO: 514433 - RNA, 19 nt, Homo sapiens
  misc_RNA (1)...(19): siRNA sense strand
gacuaucucuucaaugugu

SEQ ID NO: 514434 - RNA, 19 nt, Homo sapiens
  misc_RNA (1)...(19): siRNA sense strand
cgaaggauaguauauuuga

SEQ ID NO: 514435 - RNA, 19 nt, Homo sapiens
  misc_RNA (1)...(19): siRNA sense strand
guuagaauaugcccaguuc

SEQ ID NO: 514436 - RNA, 19 nt, Homo sapiens
  misc_RNA (1)...(19): siRNA sense strand
uaccaaggcccgagauaua

SEQ ID NO: 514437 - RNA, 19 nt, Homo sapiens
  misc_RNA (1)...(19): siRNA sense strand
ggaauccagugacauugug

SEQ ID NO: 514438 - RNA, 19 nt, Homo sapiens
  misc_RNA (1)...(19): siRNA sense strand
gagaugcccuccuucuaca

SEQ ID NO: 514439 - RNA, 19 nt, Homo sapiens
  misc_RNA (1)...(19): siRNA sense strand
caccuuccaugaccagaua

SEQ ID NO: 514440 - RNA, 19 nt, Homo sapiens
  misc_RNA (1)...(19): siRNA sense strand
caucugacccgugcuauuu

SEQ ID NO: 514441 - RNA, 19 nt, Homo sapiens
  misc_RNA (1)...(19): siRNA sense strand
gccaagguuuccaguacua

SEQ ID NO: 514442 - RNA, 19 nt, Homo sapiens
  misc_RNA (1)...(19): siRNA sense strand
gcagggaucuacugagacu

SEQ ID NO: 514443 - RNA, 19 nt, Homo sapiens
  misc_RNA (1)...(19): siRNA sense strand
gcagaguuccucaccugua

SEQ ID NO: 514444 - RNA, 19 nt, Homo sapiens
  misc_RNA (1)...(19): siRNA sense strand
cgagagaggaugcaaauca

SEQ ID NO: 514445 - RNA, 19 nt, Homo sapiens
  misc_RNA (1)...(19): siRNA sense strand
gaagggcaagcuacagaaa

SEQ ID NO: 514446 - RNA, 19 nt, Homo sapiens
  misc_RNA (1)...(19): siRNA sense strand
ucagguuucucuacaguga

SEQ ID NO: 514447 - RNA, 19 nt, Homo sapiens
  misc_RNA (1)...(19): siRNA sense strand
caaguucguuuaccaagca

SEQ ID NO: 514448 - RNA, 19 nt, Homo sapiens
  misc_RNA (1)...(19): siRNA sense strand
ccaacuccauggcuucuga

SEQ ID NO: 514449 - RNA, 19 nt, Homo sapiens
  misc_RNA (1)...(19): siRNA sense strand
uauacucccuggcaaagaa

SEQ ID NO: 514450 - RNA, 19 nt, Homo sapiens
  misc_RNA (1)...(19): siRNA sense strand
ccgcagggaucuacugaga

SEQ ID NO: 514451 - RNA, 19 nt, Homo sapiens
  misc_RNA (1)...(19): siRNA sense strand
uuaagaagcucugcuccuu

SEQ ID NO: 514452 - RNA, 19 nt, Homo sapiens
  misc_RNA (1)...(19): siRNA sense strand
gagaugggagugcauuuga

SEQ ID NO: 514453 - RNA, 19 nt, Homo sapiens
  misc_RNA (1)...(19): siRNA sense strand
ugaaagccaugacaauucu

SEQ ID NO: 514454 - RNA, 19 nt, Homo sapiens
  misc_RNA (1)...(19): siRNA sense strand
gcaggaugcagcuaugaaa

SEQ ID NO: 514455 - RNA, 19 nt, Homo sapiens
  misc_RNA (1)...(19): siRNA sense strand
ccacagagaaagaaucaga

SEQ ID NO: 514456 - RNA, 19 nt, Homo sapiens
  misc_RNA (1)...(19): siRNA sense strand
gcagagucagcauauauga

SEQ ID NO: 514457 - RNA, 19 nt, Homo sapiens
  misc_RNA (1)...(19): siRNA sense strand
ccaguaguuuccugcuuaa

SEQ ID NO: 514458 - RNA, 19 nt, Homo sapiens
  misc_RNA (1)...(19): siRNA sense strand
ccacagagagguguugauu

SEQ ID NO: 514459 - RNA, 19 nt, Homo sapiens
  misc_RNA (1)...(19): siRNA sense strand
ugcgaaggauaguauauuu

SEQ ID NO: 514460 - RNA, 19 nt, Homo sapiens
  misc_RNA (1)...(19): siRNA sense strand
agaaggcccugcccaugaa

SEQ ID NO: 514461 - RNA, 19 nt, Homo sapiens
  misc_RNA (1)...(19): siRNA sense strand
gaaccugucauaaaguuag

SEQ ID NO: 514462 - RNA, 19 nt, Homo sapiens
  misc_RNA (1)...(19): siRNA sense strand
ggaacugaguaucuaccaa

SEQ ID NO: 514463 - RNA, 19 nt, Homo sapiens
  misc_RNA (1)...(19): siRNA sense strand
gcacagcggagugguaaga

SEQ ID NO: 514464 - RNA, 19 nt, Homo sapiens
  misc_RNA (1)...(19): siRNA sense strand
uaugggaacuggauuagca

SEQ ID NO: 514465 - RNA, 19 nt, Homo sapiens
  misc_RNA (1)...(19): siRNA sense strand
gagagacuccguaccaugu

SEQ ID NO: 514466 - RNA, 19 nt, Homo sapiens
  misc_RNA (1)...(19): siRNA sense strand
gaaaguggcaaagcagaug

SEQ ID NO: 514467 - RNA, 19 nt, Homo sapiens
  misc_RNA (1)...(19): siRNA sense strand
gcacagcggagugguaaga

SEQ ID NO: 514468 - RNA, 19 nt, Homo sapiens
  misc_RNA (1)...(19): siRNA sense strand
gagaggaugcaaaucaaga

SEQ ID NO: 514469 - RNA, 19 nt, Homo sapiens
  misc_RNA (1)...(19): siRNA sense strand
gagaaucccaaacaaggaa

SEQ ID NO: 514470 - RNA, 19 nt, Homo sapiens
  misc_RNA (1)...(19): siRNA sense strand
uuggcgagcucgugagaua

SEQ ID NO: 514471 - RNA, 19 nt, Homo sapiens
  misc_RNA (1)...(19): siRNA sense strand
ccacaucaaaugccucaaa

SEQ ID NO: 514472 - RNA, 19 nt, Homo sapiens
  misc_RNA (1)...(19): siRNA sense strand
guuccucaccuguaauaua

SEQ ID NO: 514473 - RNA, 19 nt, Homo sapiens
  misc_RNA (1)...(19): siRNA sense strand
caagagaaauacgaacagu

SEQ ID NO: 514474 - RNA, 19 nt, Homo sapiens
  misc_RNA (1)...(19): siRNA sense strand
acagagagguguugauugc

SEQ ID NO: 514475 - RNA, 19 nt, Homo sapiens
  misc_RNA (1)...(19): siRNA sense strand
gccaagaacuacuucaaaa

SEQ ID NO: 514476 - RNA, 19 nt, Homo sapiens
  misc_RNA (1)...(19): siRNA sense strand
gcacagaaucccgccacua

SEQ ID NO: 514477 - RNA, 19 nt, Homo sapiens
  misc_RNA (1)...(19): siRNA sense strand
uggcuuugcugcugaauuc

SEQ ID NO: 514478 - RNA, 19 nt, Homo sapiens
  misc_RNA (1)...(19): siRNA sense strand
gauacuacacccauccauu

SEQ ID NO: 514479 - RNA, 19 nt, Homo sapiens
  misc_RNA (1)...(19): siRNA sense strand
gaaagaaucagagaagacu

SEQ ID NO: 514480 - RNA, 19 nt, Homo sapiens
  misc_RNA (1)...(19): siRNA sense strand
agaagaaucaucccacuau

SEQ ID NO: 514481 - RNA, 19 nt, Homo sapiens
  misc_RNA (1)...(19): siRNA sense strand
caagcaggaugcagcuaug

SEQ ID NO: 514482 - RNA, 19 nt, Homo sapiens
  misc_RNA (1)...(19): siRNA sense strand
caucaauggccgagaguuu

SEQ ID NO: 514483 - RNA, 19 nt, Homo sapiens
  misc_RNA (1)...(19): siRNA sense strand
gacagcaacuccacaucug

SEQ ID NO: 514484 - RNA, 19 nt, Homo sapiens
  misc_RNA (1)...(19): siRNA sense strand
gaagacagcaacuccacau

SEQ ID NO: 514485 - RNA, 19 nt, Homo sapiens
  misc_RNA (1)...(19): siRNA sense strand
gcagcccauuuaucucaaa

SEQ ID NO: 514486 - RNA, 19 nt, Homo sapiens
  misc_RNA (1)...(19): siRNA sense strand
gaaauacaacucccagacu

SEQ ID NO: 514487 - RNA, 19 nt, Homo sapiens
  misc_RNA (1)...(19): siRNA sense strand
aaggagaaacugucaauga

SEQ ID NO: 514488 - RNA, 19 nt, Homo sapiens
  misc_RNA (1)...(19): siRNA sense strand
gcagaacgcauggguuuca

SEQ ID NO: 514489 - RNA, 19 nt, Homo sapiens
  misc_RNA (1)...(19): siRNA sense strand
guaagaccagacagucaua

SEQ ID NO: 514490 - RNA, 19 nt, Homo sapiens
  misc_RNA (1)...(19): siRNA sense strand
cuaccaagaucaggaacaa

SEQ ID NO: 514491 - RNA, 19 nt, Homo sapiens
  misc_RNA (1)...(19): siRNA sense strand
gaaaguggccaagcaggau

SEQ ID NO: 514492 - RNA, 19 nt, Homo sapiens
  misc_RNA (1)...(19): siRNA sense strand
gauuuaaauuccagguugu

SEQ ID NO: 514493 - RNA, 19 nt, Homo sapiens
  misc_RNA (1)...(19): siRNA sense strand
auacuacacccauccauuu

SEQ ID NO: 514494 - RNA, 19 nt, Homo sapiens
  misc_RNA (1)...(19): siRNA sense strand
ugacuccucugcccugaau

SEQ ID NO: 514495 - RNA, 19 nt, Homo sapiens
  misc_RNA (1)...(19): siRNA sense strand
ccacaucugccuuggaaga

SEQ ID NO: 514496 - RNA, 19 nt, Homo sapiens
  misc_RNA (1)...(19): siRNA sense strand
gaguuccucaccuguaaua

SEQ ID NO: 514497 - RNA, 19 nt, Homo sapiens
  misc_RNA (1)...(19): siRNA sense strand
ugaaggauaugggcuaugg

SEQ ID NO: 514498 - RNA, 19 nt, Homo sapiens
  misc_RNA (1)...(19): siRNA sense strand
ggccaagaacuacuucaaa

SEQ ID NO: 514499 - RNA, 19 nt, Homo sapiens
  misc_RNA (1)...(19): siRNA sense strand
gaaagcugcccgugacuac

SEQ ID NO: 514500 - RNA, 19 nt, Homo sapiens
  misc_RNA (1)...(19): siRNA sense strand
ccagaugacuugaauagua

SEQ ID NO: 514501 - RNA, 19 nt, Homo sapiens
  misc_RNA (1)...(19): siRNA sense strand
gagaaaagcuccaaauaaa

SEQ ID NO: 514502 - RNA, 19 nt, Homo sapiens
  misc_RNA (1)...(19): siRNA sense strand
gaacaaaggaucuuaaagu

SEQ ID NO: 514503 - RNA, 19 nt, Homo sapiens
  misc_RNA (1)...(19): siRNA sense strand
ucaaaugccucaaauaaca

SEQ ID NO: 514504 - RNA, 19 nt, Homo sapiens
  misc_RNA (1)...(19): siRNA sense strand
caucaaaugccucaaauaa

SEQ ID NO: 514505 - RNA, 19 nt, Homo sapiens
  misc_RNA (1)...(19): siRNA sense strand
uaaaugcugugcuaauuga

SEQ ID NO: 514506 - RNA, 19 nt, Homo sapiens
  misc_RNA (1)...(19): siRNA sense strand
ucucaaaucugucacauug

SEQ ID NO: 514507 - RNA, 19 nt, Homo sapiens
  misc_RNA (1)...(19): siRNA sense strand
gcaagaaaguggcaaagca

SEQ ID NO: 514508 - RNA, 19 nt, Homo sapiens
  misc_RNA (1)...(19): siRNA sense strand
gaaaccaccuguucauuac

SEQ ID NO: 514509 - RNA, 19 nt, Homo sapiens
  misc_RNA (1)...(19): siRNA sense strand
gaagaaucaucccacuauu

SEQ ID NO: 514510 - RNA, 19 nt, Homo sapiens
  misc_RNA (1)...(19): siRNA sense strand
ccaugaaccucgauuuaaa

SEQ ID NO: 514511 - RNA, 19 nt, Homo sapiens
  misc_RNA (1)...(19): siRNA sense strand
gcgacuaucucuucaaugu

SEQ ID NO: 514512 - RNA, 19 nt, Homo sapiens
  misc_RNA (1)...(19): siRNA sense strand
gcaagaaaguggccaagca

SEQ ID NO: 514513 - RNA, 19 nt, Homo sapiens
  misc_RNA (1)...(19): siRNA sense strand
gcuauuugcugucguguga

SEQ ID NO: 514514 - RNA, 19 nt, Homo sapiens
  misc_RNA (1)...(19): siRNA sense strand
ggacuacgacaucccuuua

SEQ ID NO: 514515 - RNA, 19 nt, Homo sapiens
  misc_RNA (1)...(19): siRNA sense strand
ugagauaccugaacaccaa

SEQ ID NO: 514516 - RNA, 19 nt, Homo sapiens
  misc_RNA (1)...(19): siRNA sense strand
gagagaggaugcaaaucaa

SEQ ID NO: 514517 - RNA, 19 nt, Homo sapiens
  misc_RNA (1)...(19): siRNA sense strand
ggaugcaaaucaagagaaa

SEQ ID NO: 514518 - RNA, 19 nt, Homo sapiens
  misc_RNA (1)...(19): siRNA sense strand
gcagauggccgcagaggaa

SEQ ID NO: 514519 - RNA, 19 nt, Homo sapiens
  misc_RNA (1)...(19): siRNA sense strand
gagaaagaaucagagaaga

SEQ ID NO: 514520 - RNA, 19 nt, Homo sapiens
  misc_RNA (1)...(19): siRNA sense strand
gaaagaaaucaaucgaguu

SEQ ID NO: 514521 - RNA, 19 nt, Homo sapiens
  misc_RNA (1)...(19): siRNA sense strand
gaacggagaaggcacaauc

SEQ ID NO: 514522 - RNA, 19 nt, Homo sapiens
  misc_RNA (1)...(19): siRNA sense strand
cagaguuccucaccuguaa

SEQ ID NO: 514523 - RNA, 19 nt, Homo sapiens
  misc_RNA (1)...(19): siRNA sense strand
ggagaggcuucaucagguu

SEQ ID NO: 514524 - RNA, 19 nt, Homo sapiens
  misc_RNA (1)...(19): siRNA sense strand
cagaugacuugaauaguau

SEQ ID NO: 514525 - RNA, 19 nt, Homo sapiens
  misc_RNA (1)...(19): siRNA sense strand
caggguauguugacuuuga

SEQ ID NO: 514526 - RNA, 19 nt, Homo sapiens
  misc_RNA (1)...(19): siRNA sense strand
gaaccucgauuuaaauucc

SEQ ID NO: 514527 - RNA, 19 nt, Homo sapiens
  misc_RNA (1)...(19): siRNA sense strand
gguauucccucagcggaua

SEQ ID NO: 514528 - RNA, 19 nt, Homo sapiens
  misc_RNA (1)...(19): siRNA sense strand
gcaagaggccagaccagaa

SEQ ID NO: 514529 - RNA, 19 nt, Homo sapiens
  misc_RNA (1)...(19): siRNA sense strand
gaagaaagaaaucaaucga

SEQ ID NO: 514530 - RNA, 19 nt, Homo sapiens
  misc_RNA (1)...(19): siRNA sense strand
cccaguaguuuccugcuua

SEQ ID NO: 514531 - RNA, 19 nt, Homo sapiens
  misc_RNA (1)...(19): siRNA sense strand
guaauauacccacaucaaa

SEQ ID NO: 514532 - RNA, 19 nt, Homo sapiens
  misc_RNA (1)...(19): siRNA sense strand
agauauaaaugcugugcua

SEQ ID NO: 514533 - RNA, 19 nt, Homo sapiens
  misc_RNA (1)...(19): siRNA sense strand
gacuaucucuucaaugugu

SEQ ID NO: 514534 - RNA, 19 nt, Homo sapiens
  misc_RNA (1)...(19): siRNA sense strand
cgaaggauaguauauuuga

SEQ ID NO: 514535 - RNA, 19 nt, Homo sapiens
  misc_RNA (1)...(19): siRNA sense strand
guuagaauaugcccaguuc

SEQ ID NO: 514536 - RNA, 19 nt, Homo sapiens
  misc_RNA (1)...(19): siRNA sense strand
uaccaaggcccgagauaua

SEQ ID NO: 514537 - RNA, 19 nt, Homo sapiens
  misc_RNA (1)...(19): siRNA sense strand
ggaauccagugacauugug

SEQ ID NO: 514538 - RNA, 19 nt, Homo sapiens
  misc_RNA (1)...(19): siRNA sense strand
gagaugcccuccuucuaca

SEQ ID NO: 514539 - RNA, 19 nt, Homo sapiens
  misc_RNA (1)...(19): siRNA sense strand
caccuuccaugaccagaua

SEQ ID NO: 514540 - RNA, 19 nt, Homo sapiens
  misc_RNA (1)...(19): siRNA sense strand
caucugacccgugcuauuu

SEQ ID NO: 514541 - RNA, 19 nt, Homo sapiens
  misc_RNA (1)...(19): siRNA sense strand
gccaagguuuccaguacua

SEQ ID NO: 514542 - RNA, 19 nt, Homo sapiens
  misc_RNA (1)...(19): siRNA sense strand
gcagggaucuacugagacu

SEQ ID NO: 514543 - RNA, 19 nt, Homo sapiens
  misc_RNA (1)...(19): siRNA sense strand
gcagaguuccucaccugua

SEQ ID NO: 514544 - RNA, 19 nt, Homo sapiens
  misc_RNA (1)...(19): siRNA sense strand
cgagagaggaugcaaauca

SEQ ID NO: 514545 - RNA, 19 nt, Homo sapiens
  misc_RNA (1)...(19): siRNA sense strand
gaagggcaagcuacagaaa

SEQ ID NO: 514546 - RNA, 19 nt, Homo sapiens
  misc_RNA (1)...(19): siRNA sense strand
ucagguuucucuacaguga

SEQ ID NO: 514547 - RNA, 19 nt, Homo sapiens
  misc_RNA (1)...(19): siRNA sense strand
caaguucguuuaccaagca

SEQ ID NO: 514548 - RNA, 19 nt, Homo sapiens
  misc_RNA (1)...(19): siRNA sense strand
ccaacuccauggcuucuga

SEQ ID NO: 514549 - RNA, 19 nt, Homo sapiens
  misc_RNA (1)...(19): siRNA sense strand
uauacucccuggcaaagaa

SEQ ID NO: 514550 - RNA, 19 nt, Homo sapiens
  misc_RNA (1)...(19): siRNA sense strand
ccgcagggaucuacugaga

SEQ ID NO: 514551 - RNA, 19 nt, Homo sapiens
  misc_RNA (1)...(19): siRNA sense strand
uuaagaagcucugcuccuu

SEQ ID NO: 514552 - RNA, 19 nt, Homo sapiens
  misc_RNA (1)...(19): siRNA sense strand
gagaugggagugcauuuga

SEQ ID NO: 514553 - RNA, 19 nt, Homo sapiens
  misc_RNA (1)...(19): siRNA sense strand
ugaaagccaugacaauucu

SEQ ID NO: 514554 - RNA, 19 nt, Homo sapiens
  misc_RNA (1)...(19): siRNA sense strand
gcaggaugcagcuaugaaa

SEQ ID NO: 514555 - RNA, 19 nt, Homo sapiens
  misc_RNA (1)...(19): siRNA sense strand
ccacagagaaagaaucaga

SEQ ID NO: 514556 - RNA, 19 nt, Homo sapiens
  misc_RNA (1)...(19): siRNA sense strand
gcagagucagcauauauga

SEQ ID NO: 514557 - RNA, 19 nt, Homo sapiens
  misc_RNA (1)...(19): siRNA sense strand
ccaguaguuuccugcuuaa

SEQ ID NO: 514558 - RNA, 19 nt, Homo sapiens
  misc_RNA (1)...(19): siRNA sense strand
ccacagagagguguugauu

SEQ ID NO: 514559 - RNA, 19 nt, Homo sapiens
  misc_RNA (1)...(19): siRNA sense strand
ugcgaaggauaguauauuu

SEQ ID NO: 514560 - RNA, 19 nt, Homo sapiens
  misc_RNA (1)...(19): siRNA sense strand
agaaggcccugcccaugaa

SEQ ID NO: 514561 - RNA, 19 nt, Homo sapiens
  misc_RNA (1)...(19): siRNA sense strand
gaaccugucauaaaguuag

SEQ ID NO: 514562 - RNA, 19 nt, Homo sapiens
  misc_RNA (1)...(19): siRNA sense strand
ggaacugaguaucuaccaa

SEQ ID NO: 514563 - RNA, 19 nt, Homo sapiens
  misc_RNA (1)...(19): siRNA sense strand
gcacagcggagugguaaga

SEQ ID NO: 514564 - RNA, 19 nt, Homo sapiens
  misc_RNA (1)...(19): siRNA sense strand
uaugggaacuggauuagca

SEQ ID NO: 514565 - RNA, 19 nt, Homo sapiens
  misc_RNA (1)...(19): siRNA sense strand
gagagacuccguaccaugu

SEQ ID NO: 514566 - RNA, 19 nt, Homo sapiens
  misc_RNA (1)...(19): siRNA sense strand
gaaaguggcaaagcagaug

SEQ ID NO: 514567 - RNA, 19 nt, Homo sapiens
  misc_RNA (1)...(19): siRNA sense strand
gcacagcggagugguaaga

SEQ ID NO: 514568 - RNA, 19 nt, Homo sapiens
  misc_RNA (1)...(19): siRNA sense strand
gagaggaugcaaaucaaga

SEQ ID NO: 514569 - RNA, 19 nt, Homo sapiens
  misc_RNA (1)...(19): siRNA sense strand
gagaaucccaaacaaggaa

SEQ ID NO: 514570 - RNA, 19 nt, Homo sapiens
  misc_RNA (1)...(19): siRNA sense strand
uuggcgagcucgugagaua

SEQ ID NO: 514571 - RNA, 19 nt, Homo sapiens
  misc_RNA (1)...(19): siRNA sense strand
ccacaucaaaugccucaaa

SEQ ID NO: 514572 - RNA, 19 nt, Homo sapiens
  misc_RNA (1)...(19): siRNA sense strand
guuccucaccuguaauaua

SEQ ID NO: 514573 - RNA, 19 nt, Homo sapiens
  misc_RNA (1)...(19): siRNA sense strand
caagagaaauacgaacagu

SEQ ID NO: 514574 - RNA, 19 nt, Homo sapiens
  misc_RNA (1)...(19): siRNA sense strand
acagagagguguugauugc

SEQ ID NO: 514575 - RNA, 19 nt, Homo sapiens
  misc_RNA (1)...(19): siRNA sense strand
gccaagaacuacuucaaaa

SEQ ID NO: 514576 - RNA, 19 nt, Homo sapiens
  misc_RNA (1)...(19): siRNA sense strand
gcacagaaucccgccacua

SEQ ID NO: 514577 - RNA, 19 nt, Homo sapiens
  misc_RNA (1)...(19): siRNA sense strand
uggcuuugcugcugaauuc

SEQ ID NO: 514578 - RNA, 19 nt, Homo sapiens
  misc_RNA (1)...(19): siRNA sense strand
gauacuacacccauccauu

SEQ ID NO: 514579 - RNA, 19 nt, Homo sapiens
  misc_RNA (1)...(19): siRNA sense strand
gaaagaaucagagaagacu

SEQ ID NO: 514580 - RNA, 19 nt, Homo sapiens
  misc_RNA (1)...(19): siRNA sense strand
agaagaaucaucccacuau

SEQ ID NO: 514581 - RNA, 19 nt, Homo sapiens
  misc_RNA (1)...(19): siRNA sense strand
caagcaggaugcagcuaug

SEQ ID NO: 514582 - RNA, 19 nt, Homo sapiens
  misc_RNA (1)...(19): siRNA sense strand
caucaauggccgagaguuu

SEQ ID NO: 514583 - RNA, 19 nt, Homo sapiens
  misc_RNA (1)...(19): siRNA sense strand
gacagcaacuccacaucug

SEQ ID NO: 514584 - RNA, 19 nt, Homo sapiens
  misc_RNA (1)...(19): siRNA sense strand
gaagacagcaacuccacau

SEQ ID NO: 514585 - RNA, 19 nt, Homo sapiens
  misc_RNA (1)...(19): siRNA sense strand
gcagcccauuuaucucaaa

SEQ ID NO: 514586 - RNA, 19 nt, Homo sapiens
  misc_RNA (1)...(19): siRNA sense strand
gaaauacaacucccagacu

SEQ ID NO: 514587 - RNA, 19 nt, Homo sapiens
  misc_RNA (1)...(19): siRNA sense strand
aaggagaaacugucaauga

SEQ ID NO: 514588 - RNA, 19 nt, Homo sapiens
  misc_RNA (1)...(19): siRNA sense strand
gcagaacgcauggguuuca

SEQ ID NO: 514589 - RNA, 19 nt, Homo sapiens
  misc_RNA (1)...(19): siRNA sense strand
guaagaccagacagucaua

SEQ ID NO: 514590 - RNA, 19 nt, Homo sapiens
  misc_RNA (1)...(19): siRNA sense strand
cuaccaagaucaggaacaa

SEQ ID NO: 514591 - RNA, 19 nt, Homo sapiens
  misc_RNA (1)...(19): siRNA sense strand
gaaaguggccaagcaggau

SEQ ID NO: 514592 - RNA, 19 nt, Homo sapiens
  misc_RNA (1)...(19): siRNA sense strand
gauuuaaauuccagguugu

SEQ ID NO: 514593 - RNA, 19 nt, Homo sapiens
  misc_RNA (1)...(19): siRNA sense strand
auacuacacccauccauuu

SEQ ID NO: 514594 - RNA, 19 nt, Homo sapiens
  misc_RNA (1)...(19): siRNA sense strand
ugacuccucugcccugaau

SEQ ID NO: 514595 - RNA, 19 nt, Homo sapiens
  misc_RNA (1)...(19): siRNA sense strand
ccacaucugccuuggaaga

SEQ ID NO: 514596 - RNA, 19 nt, Homo sapiens
  misc_RNA (1)...(19): siRNA sense strand
gaguuccucaccuguaaua

SEQ ID NO: 514597 - RNA, 19 nt, Homo sapiens
  misc_RNA (1)...(19): siRNA sense strand
ugaaggauaugggcuaugg

SEQ ID NO: 514598 - RNA, 19 nt, Homo sapiens
  misc_RNA (1)...(19): siRNA sense strand
ggccaagaacuacuucaaa

SEQ ID NO: 514599 - RNA, 19 nt, Homo sapiens
  misc_RNA (1)...(19): siRNA sense strand
gaaagcugcccgugacuac

SEQ ID NO: 514600 - RNA, 19 nt, Homo sapiens
  misc_RNA (1)...(19): siRNA sense strand
agaaagaucugccagcauu

SEQ ID NO: 514601 - RNA, 19 nt, Homo sapiens
  misc_RNA (1)...(19): siRNA sense strand
gaucacuucugcugcuuug

SEQ ID NO: 514602 - RNA, 19 nt, Homo sapiens
  misc_RNA (1)...(19): siRNA sense strand
aagcagacgucgccacuau

SEQ ID NO: 514603 - RNA, 19 nt, Homo sapiens
  misc_RNA (1)...(19): siRNA sense strand
ggagcagguauaucaauuu

SEQ ID NO: 514604 - RNA, 19 nt, Homo sapiens
  misc_RNA (1)...(19): siRNA sense strand
gagcagguauaucaauuuu

SEQ ID NO: 514605 - RNA, 19 nt, Homo sapiens
  misc_RNA (1)...(19): siRNA sense strand
gaccgcugcuucugcugua

SEQ ID NO: 514606 - RNA, 19 nt, Homo sapiens
  misc_RNA (1)...(19): siRNA sense strand
ggucagacucggaaucuug

SEQ ID NO: 514607 - RNA, 19 nt, Homo sapiens
  misc_RNA (1)...(19): siRNA sense strand
cggagcagguauaucaauu

SEQ ID NO: 514608 - RNA, 19 nt, Homo sapiens
  misc_RNA (1)...(19): siRNA sense strand
caucagagaccaccaccaa

SEQ ID NO: 514609 - RNA, 19 nt, Homo sapiens
  misc_RNA (1)...(19): siRNA sense strand
gcagacgucgccacuauca

SEQ ID NO: 514610 - RNA, 19 nt, Homo sapiens
  misc_RNA (1)...(19): siRNA sense strand
gcgacccucuggugucuga

SEQ ID NO: 514611 - RNA, 19 nt, Homo sapiens
  misc_RNA (1)...(19): siRNA sense strand
guacugcacagcacuggaa

SEQ ID NO: 514612 - RNA, 19 nt, Homo sapiens
  misc_RNA (1)...(19): siRNA sense strand
gcacaucggccuggaccaa

SEQ ID NO: 514613 - RNA, 19 nt, Homo sapiens
  misc_RNA (1)...(19): siRNA sense strand
caucaugugucggcuaauc

SEQ ID NO: 514614 - RNA, 19 nt, Homo sapiens
  misc_RNA (1)...(19): siRNA sense strand
gaaagaucugccagcauug

SEQ ID NO: 514615 - RNA, 19 nt, Homo sapiens
  misc_RNA (1)...(19): siRNA sense strand
ggaccuggaacgcaucaug

SEQ ID NO: 514616 - RNA, 19 nt, Homo sapiens
  misc_RNA (1)...(19): siRNA sense strand
acacugcaauggagaccuu

SEQ ID NO: 514617 - RNA, 19 nt, Homo sapiens
  misc_RNA (1)...(19): siRNA sense strand
ugguugaccucaucuacuu

SEQ ID NO: 514618 - RNA, 19 nt, Homo sapiens
  misc_RNA (1)...(19): siRNA sense strand
gaucugccagcauugcaaa

SEQ ID NO: 514619 - RNA, 19 nt, Homo sapiens
  misc_RNA (1)...(19): siRNA sense strand
gaacugcaucguggcuuga

SEQ ID NO: 514620 - RNA, 19 nt, Homo sapiens
  misc_RNA (1)...(19): siRNA sense strand
ggaugauggcuucuuccua

SEQ ID NO: 514621 - RNA, 19 nt, Homo sapiens
  misc_RNA (1)...(19): siRNA sense strand
ggagggcagcgcuauguca

SEQ ID NO: 514622 - RNA, 19 nt, Homo sapiens
  misc_RNA (1)...(19): siRNA sense strand
ggaagaggaggaaaagaaa

SEQ ID NO: 514623 - RNA, 19 nt, Homo sapiens
  misc_RNA (1)...(19): siRNA sense strand
cgcaucaugugucggcuaa

SEQ ID NO: 514624 - RNA, 19 nt, Homo sapiens
  misc_RNA (1)...(19): siRNA sense strand
ccaagccugugacgagauc

SEQ ID NO: 514625 - RNA, 19 nt, Homo sapiens
  misc_RNA (1)...(19): siRNA sense strand
agaaauacaggaucaagca

SEQ ID NO: 514626 - RNA, 19 nt, Homo sapiens
  misc_RNA (1)...(19): siRNA sense strand
caauggagaccuucaacuc

SEQ ID NO: 514627 - RNA, 19 nt, Homo sapiens
  misc_RNA (1)...(19): siRNA sense strand
agaggaugauggcuucuuc

SEQ ID NO: 514628 - RNA, 19 nt, Homo sapiens
  misc_RNA (1)...(19): siRNA sense strand
caacaguccuggggagaaa

SEQ ID NO: 514629 - RNA, 19 nt, Homo sapiens
  misc_RNA (1)...(19): siRNA sense strand
ggagaaauacaggaucaag

SEQ ID NO: 514630 - RNA, 19 nt, Homo sapiens
  misc_RNA (1)...(19): siRNA sense strand
agacgucgccacuaucaau

SEQ ID NO: 514631 - RNA, 19 nt, Homo sapiens
  misc_RNA (1)...(19): siRNA sense strand
ucagagaccaccaccaaag

SEQ ID NO: 514632 - RNA, 19 nt, Homo sapiens
  misc_RNA (1)...(19): siRNA sense strand
ccaaaggcaccagcacaga

SEQ ID NO: 514633 - RNA, 19 nt, Homo sapiens
  misc_RNA (1)...(19): siRNA sense strand
gaccuggaacgcaucaugu

SEQ ID NO: 514634 - RNA, 19 nt, Homo sapiens
  misc_RNA (1)...(19): siRNA sense strand
ucaucuacuucuaccaugu

SEQ ID NO: 514635 - RNA, 19 nt, Homo sapiens
  misc_RNA (1)...(19): siRNA sense strand
gagaaagaucugccagcau

SEQ ID NO: 514636 - RNA, 19 nt, Homo sapiens
  misc_RNA (1)...(19): siRNA sense strand
gcaauggagaccuucaacu

SEQ ID NO: 514637 - RNA, 19 nt, Homo sapiens
  misc_RNA (1)...(19): siRNA sense strand
gccaccaucaucauaauca

SEQ ID NO: 514638 - RNA, 19 nt, Homo sapiens
  misc_RNA (1)...(19): siRNA sense strand
aaccugcgcccagaugaua

SEQ ID NO: 514639 - RNA, 19 nt, Homo sapiens
  misc_RNA (1)...(19): siRNA sense strand
gccgaggccuaaucuucug

SEQ ID NO: 514640 - RNA, 19 nt, Homo sapiens
  misc_RNA (1)...(19): siRNA sense strand
ggagugcggaaagcagauu

SEQ ID NO: 514641 - RNA, 19 nt, Homo sapiens
  misc_RNA (1)...(19): siRNA sense strand
caguuccaguuccgaauca

SEQ ID NO: 514642 - RNA, 19 nt, Homo sapiens
  misc_RNA (1)...(19): siRNA sense strand
ccgccaccaucaucauaau

SEQ ID NO: 514643 - RNA, 19 nt, Homo sapiens
  misc_RNA (1)...(19): siRNA sense strand
caucuacuucuaccauguu

SEQ ID NO: 514644 - RNA, 19 nt, Homo sapiens
  misc_RNA (1)...(19): siRNA sense strand
ggggagaaauacaggauca

SEQ ID NO: 514645 - RNA, 19 nt, Homo sapiens
  misc_RNA (1)...(19): siRNA sense strand
ggaucacuucugcugcuuu

SEQ ID NO: 514646 - RNA, 19 nt, Homo sapiens
  misc_RNA (1)...(19): siRNA sense strand
gcugugcaucggaggagua

SEQ ID NO: 514647 - RNA, 19 nt, Homo sapiens
  misc_RNA (1)...(19): siRNA sense strand
gcucaggacacugcaaugg

SEQ ID NO: 514648 - RNA, 19 nt, Homo sapiens
  misc_RNA (1)...(19): siRNA sense strand
gagcccucccgcuuucuga

SEQ ID NO: 514649 - RNA, 19 nt, Homo sapiens
  misc_RNA (1)...(19): siRNA sense strand
auaaucaccaucaccauca

SEQ ID NO: 514650 - RNA, 19 nt, Homo sapiens
  misc_RNA (1)...(19): siRNA sense strand
caagagaucuguccuuuaa

SEQ ID NO: 514651 - RNA, 19 nt, Homo sapiens
  misc_RNA (1)...(19): siRNA sense strand
ggagaaacaugcugugaua

SEQ ID NO: 514652 - RNA, 19 nt, Homo sapiens
  misc_RNA (1)...(19): siRNA sense strand
gaaaggcgcuacauugaga

SEQ ID NO: 514653 - RNA, 19 nt, Homo sapiens
  misc_RNA (1)...(19): siRNA sense strand
gcagauguuuccuuauaua

SEQ ID NO: 514654 - RNA, 19 nt, Homo sapiens
  misc_RNA (1)...(19): siRNA sense strand
gaacaggauugugcccuua

SEQ ID NO: 514655 - RNA, 19 nt, Homo sapiens
  misc_RNA (1)...(19): siRNA sense strand
gaaacaugcugugauauug

SEQ ID NO: 514656 - RNA, 19 nt, Homo sapiens
  misc_RNA (1)...(19): siRNA sense strand
uggagaagcuaaugaguua

SEQ ID NO: 514657 - RNA, 19 nt, Homo sapiens
  misc_RNA (1)...(19): siRNA sense strand
ggagcugucugcauuauga

SEQ ID NO: 514658 - RNA, 19 nt, Homo sapiens
  misc_RNA (1)...(19): siRNA sense strand
caagagccacuauuauuua

SEQ ID NO: 514659 - RNA, 19 nt, Homo sapiens
  misc_RNA (1)...(19): siRNA sense strand
aagcagauguuuccuuaua

SEQ ID NO: 514660 - RNA, 19 nt, Homo sapiens
  misc_RNA (1)...(19): siRNA sense strand
ggaaucacuugcaguuauu

SEQ ID NO: 514661 - RNA, 19 nt, Homo sapiens
  misc_RNA (1)...(19): siRNA sense strand
gauaaacaauguacagaca

SEQ ID NO: 514662 - RNA, 19 nt, Homo sapiens
  misc_RNA (1)...(19): siRNA sense strand
gaaggaccaugcugcgaaa

SEQ ID NO: 514663 - RNA, 19 nt, Homo sapiens
  misc_RNA (1)...(19): siRNA sense strand
gcuauaauggugaaaguua

SEQ ID NO: 514664 - RNA, 19 nt, Homo sapiens
  misc_RNA (1)...(19): siRNA sense strand
gugaagaucuuuaguaacu

SEQ ID NO: 514665 - RNA, 19 nt, Homo sapiens
  misc_RNA (1)...(19): siRNA sense strand
gugugaagaucuuuaguaa

SEQ ID NO: 514666 - RNA, 19 nt, Homo sapiens
  misc_RNA (1)...(19): siRNA sense strand
gaacauuuaccauuccaaa

SEQ ID NO: 514667 - RNA, 19 nt, Homo sapiens
  misc_RNA (1)...(19): siRNA sense strand
gaaaccauauacugugaau

SEQ ID NO: 514668 - RNA, 19 nt, Homo sapiens
  misc_RNA (1)...(19): siRNA sense strand
caacauaaguggacaucuc

SEQ ID NO: 514669 - RNA, 19 nt, Homo sapiens
  misc_RNA (1)...(19): siRNA sense strand
ccaagagccacuauuauuu

SEQ ID NO: 514670 - RNA, 19 nt, Homo sapiens
  misc_RNA (1)...(19): siRNA sense strand
gaacugaggacuauucaag

SEQ ID NO: 514671 - RNA, 19 nt, Homo sapiens
  misc_RNA (1)...(19): siRNA sense strand
gggaaaccauauacuguga

SEQ ID NO: 514672 - RNA, 19 nt, Homo sapiens
  misc_RNA (1)...(19): siRNA sense strand
ugagaaggauauugaauca

SEQ ID NO: 514673 - RNA, 19 nt, Homo sapiens
  misc_RNA (1)...(19): siRNA sense strand
aaggguauauugaagguua

SEQ ID NO: 514674 - RNA, 19 nt, Homo sapiens
  misc_RNA (1)...(19): siRNA sense strand
gagaaaauacggucaauaa

SEQ ID NO: 514675 - RNA, 19 nt, Homo sapiens
  misc_RNA (1)...(19): siRNA sense strand
ucgaagacuuugcacauuu

SEQ ID NO: 514676 - RNA, 19 nt, Homo sapiens
  misc_RNA (1)...(19): siRNA sense strand
gaaaugcauguuauaguug

SEQ ID NO: 514677 - RNA, 19 nt, Homo sapiens
  misc_RNA (1)...(19): siRNA sense strand
gaagggaaaccauauacug

SEQ ID NO: 514678 - RNA, 19 nt, Homo sapiens
  misc_RNA (1)...(19): siRNA sense strand
gaucuguccuuuaaauuac

SEQ ID NO: 514679 - RNA, 19 nt, Homo sapiens
  misc_RNA (1)...(19): siRNA sense strand
caaaagauguggauaaaag

SEQ ID NO: 514680 - RNA, 19 nt, Homo sapiens
  misc_RNA (1)...(19): siRNA sense strand
cuguagugcuucauauuua

SEQ ID NO: 514681 - RNA, 19 nt, Homo sapiens
  misc_RNA (1)...(19): siRNA sense strand
gauagagguguaugcaaua

SEQ ID NO: 514682 - RNA, 19 nt, Homo sapiens
  misc_RNA (1)...(19): siRNA sense strand
gauggaacuucuugugguu

SEQ ID NO: 514683 - RNA, 19 nt, Homo sapiens
  misc_RNA (1)...(19): siRNA sense strand
gcacaggaauuaugaaacc

SEQ ID NO: 514684 - RNA, 19 nt, Homo sapiens
  misc_RNA (1)...(19): siRNA sense strand
gaaacugugguauaaguga

SEQ ID NO: 514685 - RNA, 19 nt, Homo sapiens
  misc_RNA (1)...(19): siRNA sense strand
ucuggaaacugugguauaa

SEQ ID NO: 514686 - RNA, 19 nt, Homo sapiens
  misc_RNA (1)...(19): siRNA sense strand
uaaagccgguucaaacugu

SEQ ID NO: 514687 - RNA, 19 nt, Homo sapiens
  misc_RNA (1)...(19): siRNA sense strand
ggaauuaugaaaccacuug

SEQ ID NO: 514688 - RNA, 19 nt, Homo sapiens
  misc_RNA (1)...(19): siRNA sense strand
gagaagcuaaugaguuauu

SEQ ID NO: 514689 - RNA, 19 nt, Homo sapiens
  misc_RNA (1)...(19): siRNA sense strand
aaucaaagaugugugaguu

SEQ ID NO: 514690 - RNA, 19 nt, Homo sapiens
  misc_RNA (1)...(19): siRNA sense strand
ugauguaucuggaaacugu

SEQ ID NO: 514691 - RNA, 19 nt, Homo sapiens
  misc_RNA (1)...(19): siRNA sense strand
agagaucuguccuuuaaau

SEQ ID NO: 514692 - RNA, 19 nt, Homo sapiens
  misc_RNA (1)...(19): siRNA sense strand
ugauagagguguaugcaau

SEQ ID NO: 514693 - RNA, 19 nt, Homo sapiens
  misc_RNA (1)...(19): siRNA sense strand
gcgcagagccacagcaaga

SEQ ID NO: 514694 - RNA, 19 nt, Homo sapiens
  misc_RNA (1)...(19): siRNA sense strand
uauaguggcacaggaauua

SEQ ID NO: 514695 - RNA, 19 nt, Homo sapiens
  misc_RNA (1)...(19): siRNA sense strand
aaugcgaccucccugaaua

SEQ ID NO: 514696 - RNA, 19 nt, Homo sapiens
  misc_RNA (1)...(19): siRNA sense strand
uggaaucacuugcaguuau

SEQ ID NO: 514697 - RNA, 19 nt, Homo sapiens
  misc_RNA (1)...(19): siRNA sense strand
cugcauugcuguggaauuu

SEQ ID NO: 514698 - RNA, 19 nt, Homo sapiens
  misc_RNA (1)...(19): siRNA sense strand
acugacaaaugcaaugaua

SEQ ID NO: 514699 - RNA, 19 nt, Homo sapiens
  misc_RNA (1)...(19): siRNA sense strand
ucaguuggcuuugaacaug

SEQ ID NO: 514700 - RNA, 19 nt, Homo sapiens
  misc_RNA (1)...(19): siRNA sense strand
agacugauguaucuggaaa

SEQ ID NO: 514701 - RNA, 19 nt, Homo sapiens
  misc_RNA (1)...(19): siRNA sense strand
ggugugaagaucuuuagua

SEQ ID NO: 514702 - RNA, 19 nt, Homo sapiens
  misc_RNA (1)...(19): siRNA sense strand
uaguuuaccugugcaaauu

SEQ ID NO: 514703 - RNA, 19 nt, Homo sapiens
  misc_RNA (1)...(19): siRNA sense strand
aaagugagagugaaccuaa

SEQ ID NO: 514704 - RNA, 19 nt, Homo sapiens
  misc_RNA (1)...(19): siRNA sense strand
ggagaacugaggacuauuc

SEQ ID NO: 514705 - RNA, 19 nt, Homo sapiens
  misc_RNA (1)...(19): siRNA sense strand
uggcaaagaaguagaguuu

SEQ ID NO: 514706 - RNA, 19 nt, Homo sapiens
  misc_RNA (1)...(19): siRNA sense strand
uaaacaauguacagacaca

SEQ ID NO: 514707 - RNA, 19 nt, Homo sapiens
  misc_RNA (1)...(19): siRNA sense strand
gauaaaagauggaacuucu

SEQ ID NO: 514708 - RNA, 19 nt, Homo sapiens
  misc_RNA (1)...(19): siRNA sense strand
cauuggagcuuuggauaga

SEQ ID NO: 514709 - RNA, 19 nt, Homo sapiens
  misc_RNA (1)...(19): siRNA sense strand
ugacaaaugcaaugauaga

SEQ ID NO: 514710 - RNA, 19 nt, Homo sapiens
  misc_RNA (1)...(19): siRNA sense strand
gagccacuauuauuuaugc

SEQ ID NO: 514711 - RNA, 19 nt, Homo sapiens
  misc_RNA (1)...(19): siRNA sense strand
agaaacaugcugugauauu

SEQ ID NO: 514712 - RNA, 19 nt, Homo sapiens
  misc_RNA (1)...(19): siRNA sense strand
auacuuggguuaugauugu

SEQ ID NO: 514713 - RNA, 19 nt, Homo sapiens
  misc_RNA (1)...(19): siRNA sense strand
gaugugugaguucuucaua

SEQ ID NO: 514714 - RNA, 19 nt, Homo sapiens
  misc_RNA (1)...(19): siRNA sense strand
gggcauccguguggacuga

SEQ ID NO: 514715 - RNA, 19 nt, Homo sapiens
  misc_RNA (1)...(19): siRNA sense strand
gauauugccacauguagau

SEQ ID NO: 514716 - RNA, 19 nt, Homo sapiens
  misc_RNA (1)...(19): siRNA sense strand
cauaagaaagcagauguuu

SEQ ID NO: 514717 - RNA, 19 nt, Homo sapiens
  misc_RNA (1)...(19): siRNA sense strand
cugaaucaauggaucugua

SEQ ID NO: 514718 - RNA, 19 nt, Homo sapiens
  misc_RNA (1)...(19): siRNA sense strand
gcagagccacagcaagauu

SEQ ID NO: 514719 - RNA, 19 nt, Homo sapiens
  misc_RNA (1)...(19): siRNA sense strand
ucaagagaucuguccuuua

SEQ ID NO: 514720 - RNA, 19 nt, Homo sapiens
  misc_RNA (1)...(19): siRNA sense strand
gaaagugagagugaaccua

SEQ ID NO: 514721 - RNA, 19 nt, Homo sapiens
  misc_RNA (1)...(19): siRNA sense strand
ugcgaaaacugucuauuua

SEQ ID NO: 514722 - RNA, 19 nt, Homo sapiens
  misc_RNA (1)...(19): siRNA sense strand
cccagugucuucacaauca

SEQ ID NO: 514723 - RNA, 19 nt, Homo sapiens
  misc_RNA (1)...(19): siRNA sense strand
cucaggagcugucugcauu

SEQ ID NO: 514724 - RNA, 19 nt, Homo sapiens
  misc_RNA (1)...(19): siRNA sense strand
caaucagccucgcuuagau

SEQ ID NO: 514725 - RNA, 19 nt, Homo sapiens
  misc_RNA (1)...(19): siRNA sense strand
ugugaguucuucauacuug

SEQ ID NO: 514726 - RNA, 19 nt, Homo sapiens
  misc_RNA (1)...(19): siRNA sense strand
uauaagugauucaggauac

SEQ ID NO: 514727 - RNA, 19 nt, Homo sapiens
  misc_RNA (1)...(19): siRNA sense strand
gaaucaauggaucuguaua

SEQ ID NO: 514728 - RNA, 19 nt, Homo sapiens
  misc_RNA (1)...(19): siRNA sense strand
guguaggccuuccuuugaa

SEQ ID NO: 514729 - RNA, 19 nt, Homo sapiens
  misc_RNA (1)...(19): siRNA sense strand
cgaaaacugucuauuuaug

SEQ ID NO: 514730 - RNA, 19 nt, Homo sapiens
  misc_RNA (1)...(19): siRNA sense strand
ccugaaaggcgcuacauug

SEQ ID NO: 514731 - RNA, 19 nt, Homo sapiens
  misc_RNA (1)...(19): siRNA sense strand
guauaagugauucaggaua

SEQ ID NO: 514732 - RNA, 19 nt, Homo sapiens
  misc_RNA (1)...(19): siRNA sense strand
uaauugaagggaaaccaua

SEQ ID NO: 514733 - RNA, 19 nt, Homo sapiens
  misc_RNA (1)...(19): siRNA sense strand
gagaucuguccuuuaaauu

SEQ ID NO: 514734 - RNA, 19 nt, Homo sapiens
  misc_RNA (1)...(19): siRNA sense strand
uccaagagccacuauuauu

SEQ ID NO: 514735 - RNA, 19 nt, Homo sapiens
  misc_RNA (1)...(19): siRNA sense strand
uggaaacugugguauaagu

SEQ ID NO: 514736 - RNA, 19 nt, Homo sapiens
  misc_RNA (1)...(19): siRNA sense strand
cguguggacugaaucaaug

SEQ ID NO: 514737 - RNA, 19 nt, Homo sapiens
  misc_RNA (1)...(19): siRNA sense strand
gaaaaccacuauguucaga

SEQ ID NO: 514738 - RNA, 19 nt, Homo sapiens
  misc_RNA (1)...(19): siRNA sense strand
caauggaucaucugcauca

SEQ ID NO: 514739 - RNA, 19 nt, Homo sapiens
  misc_RNA (1)...(19): siRNA sense strand
ccauaagucuggaaucacu

SEQ ID NO: 514740 - RNA, 19 nt, Homo sapiens
  misc_RNA (1)...(19): siRNA sense strand
ggugaugguuagcacaugu

SEQ ID NO: 514741 - RNA, 19 nt, Homo sapiens
  misc_RNA (1)...(19): siRNA sense strand
ucaaagaugugugaguucu

SEQ ID NO: 514742 - RNA, 19 nt, Homo sapiens
  misc_RNA (1)...(19): siRNA sense strand
aaauaagguuugcaggaau

SEQ ID NO: 514743 - RNA, 19 nt, Homo sapiens
  misc_RNA (1)...(19): siRNA sense strand
gugugaagcugacaaucug

SEQ ID NO: 514744 - RNA, 19 nt, Homo sapiens
  misc_RNA (1)...(19): siRNA sense strand
gcaggcauccuacaaaauu

SEQ ID NO: 514745 - RNA, 19 nt, Homo sapiens
  misc_RNA (1)...(19): siRNA sense strand
guuauucucaccuuaauuc

SEQ ID NO: 514746 - RNA, 19 nt, Homo sapiens
  misc_RNA (1)...(19): siRNA sense strand
gaguuuggcccuucagaau

SEQ ID NO: 514747 - RNA, 19 nt, Homo sapiens
  misc_RNA (1)...(19): siRNA sense strand
aaauuacaguuccggagaa

SEQ ID NO: 514748 - RNA, 19 nt, Homo sapiens
  misc_RNA (1)...(19): siRNA sense strand
gcgcuacauugagaacauu

SEQ ID NO: 514749 - RNA, 19 nt, Homo sapiens
  misc_RNA (1)...(19): siRNA sense strand
uugagaacauuuaccauuc

SEQ ID NO: 514750 - RNA, 19 nt, Homo sapiens
  misc_RNA (1)...(19): siRNA sense strand
gagcacagauuguucaaac

SEQ ID NO: 514751 - RNA, 19 nt, Homo sapiens
  misc_RNA (1)...(19): siRNA sense strand
aaaccaagccgaugaagaa

SEQ ID NO: 514752 - RNA, 19 nt, Homo sapiens
  misc_RNA (1)...(19): siRNA sense strand
caaaggagagaaggaaaua

SEQ ID NO: 514753 - RNA, 19 nt, Homo sapiens
  misc_RNA (1)...(19): siRNA sense strand
cagagaugcuugaagaaga

SEQ ID NO: 514754 - RNA, 19 nt, Homo sapiens
  misc_RNA (1)...(19): siRNA sense strand
cgacagagcagauuguugu

SEQ ID NO: 514755 - RNA, 19 nt, Homo sapiens
  misc_RNA (1)...(19): siRNA sense strand
gaaggaaauaccugcauga

SEQ ID NO: 514756 - RNA, 19 nt, Homo sapiens
  misc_RNA (1)...(19): siRNA sense strand
gaagaagcaaugacacaga

SEQ ID NO: 514757 - RNA, 19 nt, Homo sapiens
  misc_RNA (1)...(19): siRNA sense strand
gcaaacagcaauaguucga

SEQ ID NO: 514758 - RNA, 19 nt, Homo sapiens
  misc_RNA (1)...(19): siRNA sense strand
ggacaaggucaaaccauca

SEQ ID NO: 514759 - RNA, 19 nt, Homo sapiens
  misc_RNA (1)...(19): siRNA sense strand
caucgucuaucaaccaguu

SEQ ID NO: 514760 - RNA, 19 nt, Homo sapiens
  misc_RNA (1)...(19): siRNA sense strand
cuacgugaaugccaaacaa

SEQ ID NO: 514761 - RNA, 19 nt, Homo sapiens
  misc_RNA (1)...(19): siRNA sense strand
gaggcaagcccgagcuaaa

SEQ ID NO: 514762 - RNA, 19 nt, Homo sapiens
  misc_RNA (1)...(19): siRNA sense strand
gcaccauucuccagcaagu

SEQ ID NO: 514763 - RNA, 19 nt, Homo sapiens
  misc_RNA (1)...(19): siRNA sense strand
uggugaagguggacgauuu

SEQ ID NO: 514764 - RNA, 19 nt, Homo sapiens
  misc_RNA (1)...(19): siRNA sense strand
gaagcaaugacacagauca

SEQ ID NO: 514765 - RNA, 19 nt, Homo sapiens
  misc_RNA (1)...(19): siRNA sense strand
caggcaauguggucaauuc

SEQ ID NO: 514766 - RNA, 19 nt, Homo sapiens
  misc_RNA (1)...(19): siRNA sense strand
ccaagccgaugaagaagca

SEQ ID NO: 514767 - RNA, 19 nt, Homo sapiens
  misc_RNA (1)...(19): siRNA sense strand
gaggccagcuaaucacauc

SEQ ID NO: 514768 - RNA, 19 nt, Homo sapiens
  misc_RNA (1)...(19): siRNA sense strand
caggagggauggucaugau

SEQ ID NO: 514769 - RNA, 19 nt, Homo sapiens
  misc_RNA (1)...(19): siRNA sense strand
cagcaaacagcaauaguuc

SEQ ID NO: 514770 - RNA, 19 nt, Homo sapiens
  misc_RNA (1)...(19): siRNA sense strand
gcaagcccgagcuaaacua

SEQ ID NO: 514771 - RNA, 19 nt, Homo sapiens
  misc_RNA (1)...(19): siRNA sense strand
guucaaacaggagccaaua

SEQ ID NO: 514772 - RNA, 19 nt, Homo sapiens
  misc_RNA (1)...(19): siRNA sense strand
gcagagaugcuugaagaag

SEQ ID NO: 514773 - RNA, 19 nt, Homo sapiens
  misc_RNA (1)...(19): siRNA sense strand
uuucaggcaugaucacuau

SEQ ID NO: 514774 - RNA, 19 nt, Homo sapiens
  misc_RNA (1)...(19): siRNA sense strand
aagaagcaaugacacagau

SEQ ID NO: 514775 - RNA, 19 nt, Homo sapiens
  misc_RNA (1)...(19): siRNA sense strand
aaacaggagccaauaccaa

SEQ ID NO: 514776 - RNA, 19 nt, Homo sapiens
  misc_RNA (1)...(19): siRNA sense strand
caaaccaagccgaugaaga

SEQ ID NO: 514777 - RNA, 19 nt, Homo sapiens
  misc_RNA (1)...(19): siRNA sense strand
cagcuaaucacaucaacug

SEQ ID NO: 514778 - RNA, 19 nt, Homo sapiens
  misc_RNA (1)...(19): siRNA sense strand
gaucauccgaguguccuaa

SEQ ID NO: 514779 - RNA, 19 nt, Homo sapiens
  misc_RNA (1)...(19): siRNA sense strand
ccaaaggagagaaggaaau

SEQ ID NO: 514780 - RNA, 19 nt, Homo sapiens
  misc_RNA (1)...(19): siRNA sense strand
gagccucucuacgugaaug

SEQ ID NO: 514781 - RNA, 19 nt, Homo sapiens
  misc_RNA (1)...(19): siRNA sense strand
gaaauaccugcaugagucu

SEQ ID NO: 514782 - RNA, 19 nt, Homo sapiens
  misc_RNA (1)...(19): siRNA sense strand
gaaaaggauaguccccaua

SEQ ID NO: 514783 - RNA, 19 nt, Homo sapiens
  misc_RNA (1)...(19): siRNA sense strand
gucaaaccaucaugcaagu

SEQ ID NO: 514784 - RNA, 19 nt, Homo sapiens
  misc_RNA (1)...(19): siRNA sense strand
ggacagcaaguggcacaga

SEQ ID NO: 514785 - RNA, 19 nt, Homo sapiens
  misc_RNA (1)...(19): siRNA sense strand
ggccagacccagcagauca

SEQ ID NO: 514786 - RNA, 19 nt, Homo sapiens
  misc_RNA (1)...(19): siRNA sense strand
ggcaagggacugucacugu

SEQ ID NO: 514787 - RNA, 19 nt, Homo sapiens
  misc_RNA (1)...(19): siRNA sense strand
ccaagggcagccauuaaug

SEQ ID NO: 514788 - RNA, 19 nt, Homo sapiens
  misc_RNA (1)...(19): siRNA sense strand
gcaggagcacagauuguuc

SEQ ID NO: 514789 - RNA, 19 nt, Homo sapiens
  misc_RNA (1)...(19): siRNA sense strand
caaaccaucaugcaaguac

SEQ ID NO: 514790 - RNA, 19 nt, Homo sapiens
  misc_RNA (1)...(19): siRNA sense strand
gagggauggucaugauggu

SEQ ID NO: 514791 - RNA, 19 nt, Homo sapiens
  misc_RNA (1)...(19): siRNA sense strand
guccaagggcagccauuaa

SEQ ID NO: 514792 - RNA, 19 nt, Homo sapiens
  misc_RNA (1)...(19): siRNA sense strand
acagcaaacagcaauaguu

SEQ ID NO: 514793 - RNA, 19 nt, Homo sapiens
  misc_RNA (1)...(19): siRNA sense strand
ggaggcaagcccgagcuaa

SEQ ID NO: 514794 - RNA, 19 nt, Homo sapiens
  misc_RNA (1)...(19): siRNA sense strand
guauacagcaaacagcaau

SEQ ID NO: 514795 - RNA, 19 nt, Homo sapiens
  misc_RNA (1)...(19): siRNA sense strand
ggcaggagcacagauuguu

SEQ ID NO: 514796 - RNA, 19 nt, Homo sapiens
  misc_RNA (1)...(19): siRNA sense strand
uaugcaggauccaaaccaa

SEQ ID NO: 514797 - RNA, 19 nt, Homo sapiens
  misc_RNA (1)...(19): siRNA sense strand
gagaaggaaauaccugcau

SEQ ID NO: 514798 - RNA, 19 nt, Homo sapiens
  misc_RNA (1)...(19): siRNA sense strand
agagaugcuugaagaagag

SEQ ID NO: 514799 - RNA, 19 nt, Homo sapiens
  misc_RNA (1)...(19): siRNA sense strand
ggagcaguauacagcaaac

SEQ ID NO: 514800 - RNA, 19 nt, Homo sapiens
  misc_RNA (1)...(19): siRNA sense strand
ucaacuggccaacccauca

SEQ ID NO: 514801 - RNA, 19 nt, Homo sapiens
  misc_RNA (1)...(19): siRNA sense strand
gaccaucgucuaucaacca

SEQ ID NO: 514802 - RNA, 19 nt, Homo sapiens
  misc_RNA (1)...(19): siRNA sense strand
gagccaauaccaacacaac

SEQ ID NO: 514803 - RNA, 19 nt, Homo sapiens
  misc_RNA (1)...(19): siRNA sense strand
ggucaguggaggccagcua

SEQ ID NO: 514804 - RNA, 19 nt, Homo sapiens
  misc_RNA (1)...(19): siRNA sense strand
ucaaccaguuaaugcagau

SEQ ID NO: 514805 - RNA, 19 nt, Homo sapiens
  misc_RNA (1)...(19): siRNA sense strand
caaguaccuguuucuggaa

SEQ ID NO: 514806 - RNA, 19 nt, Homo sapiens
  misc_RNA (1)...(19): siRNA sense strand
cgaugaagaagcaaugaca

SEQ ID NO: 514807 - RNA, 19 nt, Homo sapiens
  misc_RNA (1)...(19): siRNA sense strand
accauucuccagcaaguua

SEQ ID NO: 514808 - RNA, 19 nt, Homo sapiens
  misc_RNA (1)...(19): siRNA sense strand
agacacagcagcagauugc

SEQ ID NO: 514809 - RNA, 19 nt, Homo sapiens
  misc_RNA (1)...(19): siRNA sense strand
caucaugcaaguaccuguu

SEQ ID NO: 514810 - RNA, 19 nt, Homo sapiens
  misc_RNA (1)...(19): siRNA sense strand
ggcaggcaauguggucaau

SEQ ID NO: 514811 - RNA, 19 nt, Homo sapiens
  misc_RNA (1)...(19): siRNA sense strand
caggagcacagauuguuca

SEQ ID NO: 514812 - RNA, 19 nt, Homo sapiens
  misc_RNA (1)...(19): siRNA sense strand
acgugaaugccaaacaaua

SEQ ID NO: 514813 - RNA, 19 nt, Homo sapiens
  misc_RNA (1)...(19): siRNA sense strand
caaacaggagccaauacca

SEQ ID NO: 514814 - RNA, 19 nt, Homo sapiens
  misc_RNA (1)...(19): siRNA sense strand
ggagcacagauuguucaaa

SEQ ID NO: 514815 - RNA, 19 nt, Homo sapiens
  misc_RNA (1)...(19): siRNA sense strand
ugccugcuauccaaagaau

SEQ ID NO: 514816 - RNA, 19 nt, Homo sapiens
  misc_RNA (1)...(19): siRNA sense strand
ccaaagaaucccucuaccu

SEQ ID NO: 514817 - RNA, 19 nt, Homo sapiens
  misc_RNA (1)...(19): siRNA sense strand
gagcacagauuguucaaac

SEQ ID NO: 514818 - RNA, 19 nt, Homo sapiens
  misc_RNA (1)...(19): siRNA sense strand
aaaccaagccgaugaagaa

SEQ ID NO: 514819 - RNA, 19 nt, Homo sapiens
  misc_RNA (1)...(19): siRNA sense strand
caaaggagagaaggaaaua

SEQ ID NO: 514820 - RNA, 19 nt, Homo sapiens
  misc_RNA (1)...(19): siRNA sense strand
cagagaugcuugaagaaga

SEQ ID NO: 514821 - RNA, 19 nt, Homo sapiens
  misc_RNA (1)...(19): siRNA sense strand
cgacagagcagauuguugu

SEQ ID NO: 514822 - RNA, 19 nt, Homo sapiens
  misc_RNA (1)...(19): siRNA sense strand
gaaggaaauaccugcauga

SEQ ID NO: 514823 - RNA, 19 nt, Homo sapiens
  misc_RNA (1)...(19): siRNA sense strand
gaagaagcaaugacacaga

SEQ ID NO: 514824 - RNA, 19 nt, Homo sapiens
  misc_RNA (1)...(19): siRNA sense strand
gcaaacagcaauaguucga

SEQ ID NO: 514825 - RNA, 19 nt, Homo sapiens
  misc_RNA (1)...(19): siRNA sense strand
ggacaaggucaaaccauca

SEQ ID NO: 514826 - RNA, 19 nt, Homo sapiens
  misc_RNA (1)...(19): siRNA sense strand
caucgucuaucaaccaguu

SEQ ID NO: 514827 - RNA, 19 nt, Homo sapiens
  misc_RNA (1)...(19): siRNA sense strand
cuacgugaaugccaaacaa

SEQ ID NO: 514828 - RNA, 19 nt, Homo sapiens
  misc_RNA (1)...(19): siRNA sense strand
gaggcaagcccgagcuaaa

SEQ ID NO: 514829 - RNA, 19 nt, Homo sapiens
  misc_RNA (1)...(19): siRNA sense strand
gcaccauucuccagcaagu

SEQ ID NO: 514830 - RNA, 19 nt, Homo sapiens
  misc_RNA (1)...(19): siRNA sense strand
uggugaagguggacgauuu

SEQ ID NO: 514831 - RNA, 19 nt, Homo sapiens
  misc_RNA (1)...(19): siRNA sense strand
gaagcaaugacacagauca

SEQ ID NO: 514832 - RNA, 19 nt, Homo sapiens
  misc_RNA (1)...(19): siRNA sense strand
caggcaauguggucaauuc

SEQ ID NO: 514833 - RNA, 19 nt, Homo sapiens
  misc_RNA (1)...(19): siRNA sense strand
ccaagccgaugaagaagca

SEQ ID NO: 514834 - RNA, 19 nt, Homo sapiens
  misc_RNA (1)...(19): siRNA sense strand
gaggccagcuaaucacauc

SEQ ID NO: 514835 - RNA, 19 nt, Homo sapiens
  misc_RNA (1)...(19): siRNA sense strand
caggagggauggucaugau

SEQ ID NO: 514836 - RNA, 19 nt, Homo sapiens
  misc_RNA (1)...(19): siRNA sense strand
cagcaaacagcaauaguuc

SEQ ID NO: 514837 - RNA, 19 nt, Homo sapiens
  misc_RNA (1)...(19): siRNA sense strand
gcaagcccgagcuaaacua

SEQ ID NO: 514838 - RNA, 19 nt, Homo sapiens
  misc_RNA (1)...(19): siRNA sense strand
guucaaacaggagccaaua

SEQ ID NO: 514839 - RNA, 19 nt, Homo sapiens
  misc_RNA (1)...(19): siRNA sense strand
gcagagaugcuugaagaag

SEQ ID NO: 514840 - RNA, 19 nt, Homo sapiens
  misc_RNA (1)...(19): siRNA sense strand
uuucaggcaugaucacuau

SEQ ID NO: 514841 - RNA, 19 nt, Homo sapiens
  misc_RNA (1)...(19): siRNA sense strand
aagaagcaaugacacagau

SEQ ID NO: 514842 - RNA, 19 nt, Homo sapiens
  misc_RNA (1)...(19): siRNA sense strand
aaacaggagccaauaccaa

SEQ ID NO: 514843 - RNA, 19 nt, Homo sapiens
  misc_RNA (1)...(19): siRNA sense strand
caaaccaagccgaugaaga

SEQ ID NO: 514844 - RNA, 19 nt, Homo sapiens
  misc_RNA (1)...(19): siRNA sense strand
cagcuaaucacaucaacug

SEQ ID NO: 514845 - RNA, 19 nt, Homo sapiens
  misc_RNA (1)...(19): siRNA sense strand
gaucauccgaguguccuaa

SEQ ID NO: 514846 - RNA, 19 nt, Homo sapiens
  misc_RNA (1)...(19): siRNA sense strand
ccaaaggagagaaggaaau

SEQ ID NO: 514847 - RNA, 19 nt, Homo sapiens
  misc_RNA (1)...(19): siRNA sense strand
gagccucucuacgugaaug

SEQ ID NO: 514848 - RNA, 19 nt, Homo sapiens
  misc_RNA (1)...(19): siRNA sense strand
gaaauaccugcaugagucu

SEQ ID NO: 514849 - RNA, 19 nt, Homo sapiens
  misc_RNA (1)...(19): siRNA sense strand
gaaaaggauaguccccaua

SEQ ID NO: 514850 - RNA, 19 nt, Homo sapiens
  misc_RNA (1)...(19): siRNA sense strand
gucaaaccaucaugcaagu

SEQ ID NO: 514851 - RNA, 19 nt, Homo sapiens
  misc_RNA (1)...(19): siRNA sense strand
ggacagcaaguggcacaga

SEQ ID NO: 514852 - RNA, 19 nt, Homo sapiens
  misc_RNA (1)...(19): siRNA sense strand
ggccagacccagcagauca

SEQ ID NO: 514853 - RNA, 19 nt, Homo sapiens
  misc_RNA (1)...(19): siRNA sense strand
ggcaagggacugucacugu

SEQ ID NO: 514854 - RNA, 19 nt, Homo sapiens
  misc_RNA (1)...(19): siRNA sense strand
ccaagggcagccauuaaug

SEQ ID NO: 514855 - RNA, 19 nt, Homo sapiens
  misc_RNA (1)...(19): siRNA sense strand
gcaggagcacagauuguuc

SEQ ID NO: 514856 - RNA, 19 nt, Homo sapiens
  misc_RNA (1)...(19): siRNA sense strand
caaaccaucaugcaaguac

SEQ ID NO: 514857 - RNA, 19 nt, Homo sapiens
  misc_RNA (1)...(19): siRNA sense strand
gagggauggucaugauggu

SEQ ID NO: 514858 - RNA, 19 nt, Homo sapiens
  misc_RNA (1)...(19): siRNA sense strand
guccaagggcagccauuaa

SEQ ID NO: 514859 - RNA, 19 nt, Homo sapiens
  misc_RNA (1)...(19): siRNA sense strand
acagcaaacagcaauaguu

SEQ ID NO: 514860 - RNA, 19 nt, Homo sapiens
  misc_RNA (1)...(19): siRNA sense strand
ggaggcaagcccgagcuaa

SEQ ID NO: 514861 - RNA, 19 nt, Homo sapiens
  misc_RNA (1)...(19): siRNA sense strand
guauacagcaaacagcaau

SEQ ID NO: 514862 - RNA, 19 nt, Homo sapiens
  misc_RNA (1)...(19): siRNA sense strand
ggcaggagcacagauuguu

SEQ ID NO: 514863 - RNA, 19 nt, Homo sapiens
  misc_RNA (1)...(19): siRNA sense strand
uaugcaggauccaaaccaa

SEQ ID NO: 514864 - RNA, 19 nt, Homo sapiens
  misc_RNA (1)...(19): siRNA sense strand
gagaaggaaauaccugcau

SEQ ID NO: 514865 - RNA, 19 nt, Homo sapiens
  misc_RNA (1)...(19): siRNA sense strand
agagaugcuugaagaagag

SEQ ID NO: 514866 - RNA, 19 nt, Homo sapiens
  misc_RNA (1)...(19): siRNA sense strand
ggagcaguauacagcaaac

SEQ ID NO: 514867 - RNA, 19 nt, Homo sapiens
  misc_RNA (1)...(19): siRNA sense strand
ucaacuggccaacccauca

SEQ ID NO: 514868 - RNA, 19 nt, Homo sapiens
  misc_RNA (1)...(19): siRNA sense strand
gaccaucgucuaucaacca

SEQ ID NO: 514869 - RNA, 19 nt, Homo sapiens
  misc_RNA (1)...(19): siRNA sense strand
gagccaauaccaacacaac

SEQ ID NO: 514870 - RNA, 19 nt, Homo sapiens
  misc_RNA (1)...(19): siRNA sense strand
ggucaguggaggccagcua

SEQ ID NO: 514871 - RNA, 19 nt, Homo sapiens
  misc_RNA (1)...(19): siRNA sense strand
ucaaccaguuaaugcagau

SEQ ID NO: 514872 - RNA, 19 nt, Homo sapiens
  misc_RNA (1)...(19): siRNA sense strand
caaguaccuguuucuggaa

SEQ ID NO: 514873 - RNA, 19 nt, Homo sapiens
  misc_RNA (1)...(19): siRNA sense strand
cgaugaagaagcaaugaca

SEQ ID NO: 514874 - RNA, 19 nt, Homo sapiens
  misc_RNA (1)...(19): siRNA sense strand
accauucuccagcaaguua

SEQ ID NO: 514875 - RNA, 19 nt, Homo sapiens
  misc_RNA (1)...(19): siRNA sense strand
agacacagcagcagauugc

SEQ ID NO: 514876 - RNA, 19 nt, Homo sapiens
  misc_RNA (1)...(19): siRNA sense strand
caucaugcaaguaccuguu

SEQ ID NO: 514877 - RNA, 19 nt, Homo sapiens
  misc_RNA (1)...(19): siRNA sense strand
ggcaggcaauguggucaau

SEQ ID NO: 514878 - RNA, 19 nt, Homo sapiens
  misc_RNA (1)...(19): siRNA sense strand
caggagcacagauuguuca

SEQ ID NO: 514879 - RNA, 19 nt, Homo sapiens
  misc_RNA (1)...(19): siRNA sense strand
acgugaaugccaaacaaua

SEQ ID NO: 514880 - RNA, 19 nt, Homo sapiens
  misc_RNA (1)...(19): siRNA sense strand
caaacaggagccaauacca

SEQ ID NO: 514881 - RNA, 19 nt, Homo sapiens
  misc_RNA (1)...(19): siRNA sense strand
ggagcacagauuguucaaa

SEQ ID NO: 514882 - RNA, 19 nt, Homo sapiens
  misc_RNA (1)...(19): siRNA sense strand
ugccugcuauccaaagaau

SEQ ID NO: 514883 - RNA, 19 nt, Homo sapiens
  misc_RNA (1)...(19): siRNA sense strand
ccaaagaaucccucuaccu

SEQ ID NO: 514884 - RNA, 19 nt, Homo sapiens
  misc_RNA (1)...(19): siRNA sense strand
gggaauauauuuagacuga

SEQ ID NO: 514885 - RNA, 19 nt, Homo sapiens
  misc_RNA (1)...(19): siRNA sense strand
uaaagaagaugaagaagga

SEQ ID NO: 514886 - RNA, 19 nt, Homo sapiens
  misc_RNA (1)...(19): siRNA sense strand
ggugaaagauggcacagua

SEQ ID NO: 514887 - RNA, 19 nt, Homo sapiens
  misc_RNA (1)...(19): siRNA sense strand
gaacaacauggaaggauua

SEQ ID NO: 514888 - RNA, 19 nt, Homo sapiens
  misc_RNA (1)...(19): siRNA sense strand
caacaacagugcagcauga

SEQ ID NO: 514889 - RNA, 19 nt, Homo sapiens
  misc_RNA (1)...(19): siRNA sense strand
uaaauaagcuguuguuugc

SEQ ID NO: 514890 - RNA, 19 nt, Homo sapiens
  misc_RNA (1)...(19): siRNA sense strand
gagcuacaguggugcauaa

SEQ ID NO: 514891 - RNA, 19 nt, Homo sapiens
  misc_RNA (1)...(19): siRNA sense strand
ccuaagaccugcaacauga

SEQ ID NO: 514892 - RNA, 19 nt, Homo sapiens
  misc_RNA (1)...(19): siRNA sense strand
auagaaaggugacaacuaa

SEQ ID NO: 514893 - RNA, 19 nt, Homo sapiens
  misc_RNA (1)...(19): siRNA sense strand
gauuaaaugugaugggaaa

SEQ ID NO: 514894 - RNA, 19 nt, Homo sapiens
  misc_RNA (1)...(19): siRNA sense strand
gcaguuaugcccaauauug

SEQ ID NO: 514895 - RNA, 19 nt, Homo sapiens
  misc_RNA (1)...(19): siRNA sense strand
guaaauaagcuguuguuug

SEQ ID NO: 514896 - RNA, 19 nt, Homo sapiens
  misc_RNA (1)...(19): siRNA sense strand
gaaaggugacaacuaaauu

SEQ ID NO: 514897 - RNA, 19 nt, Homo sapiens
  misc_RNA (1)...(19): siRNA sense strand
gaguugcaauugucauaua

SEQ ID NO: 514898 - RNA, 19 nt, Homo sapiens
  misc_RNA (1)...(19): siRNA sense strand
gacgggaucuccuguaaug

SEQ ID NO: 514899 - RNA, 19 nt, Homo sapiens
  misc_RNA (1)...(19): siRNA sense strand
gaaaucaagccaauuagug

SEQ ID NO: 514900 - RNA, 19 nt, Homo sapiens
  misc_RNA (1)...(19): siRNA sense strand
gacaaaggcuauggaggua

SEQ ID NO: 514901 - RNA, 19 nt, Homo sapiens
  misc_RNA (1)...(19): siRNA sense strand
gaaaucaacacccaaggaa

SEQ ID NO: 514902 - RNA, 19 nt, Homo sapiens
  misc_RNA (1)...(19): siRNA sense strand
gaacaccuaguauauaaga

SEQ ID NO: 514903 - RNA, 19 nt, Homo sapiens
  misc_RNA (1)...(19): siRNA sense strand
gaauaugccagaauccuuu

SEQ ID NO: 514904 - RNA, 19 nt, Homo sapiens
  misc_RNA (1)...(19): siRNA sense strand
caacauggaaggauuaaau

SEQ ID NO: 514905 - RNA, 19 nt, Homo sapiens
  misc_RNA (1)...(19): siRNA sense strand
gaaguacugugggaaucua

SEQ ID NO: 514906 - RNA, 19 nt, Homo sapiens
  misc_RNA (1)...(19): siRNA sense strand
gaaaauagcacaccagaug

SEQ ID NO: 514907 - RNA, 19 nt, Homo sapiens
  misc_RNA (1)...(19): siRNA sense strand
aaagaucccuguugucugu

SEQ ID NO: 514908 - RNA, 19 nt, Homo sapiens
  misc_RNA (1)...(19): siRNA sense strand
acagauaaaugaccuuguu

SEQ ID NO: 514909 - RNA, 19 nt, Homo sapiens
  misc_RNA (1)...(19): siRNA sense strand
gccacgagcuuggucauaa

SEQ ID NO: 514910 - RNA, 19 nt, Homo sapiens
  misc_RNA (1)...(19): siRNA sense strand
cauaaugcaugccuauaga

SEQ ID NO: 514911 - RNA, 19 nt, Homo sapiens
  misc_RNA (1)...(19): siRNA sense strand
guggagaccuagauaaugu

SEQ ID NO: 514912 - RNA, 19 nt, Homo sapiens
  misc_RNA (1)...(19): siRNA sense strand
gauagacagugaugauaca

SEQ ID NO: 514913 - RNA, 19 nt, Homo sapiens
  misc_RNA (1)...(19): siRNA sense strand
ggucguggauaauauuaga

SEQ ID NO: 514914 - RNA, 19 nt, Homo sapiens
  misc_RNA (1)...(19): siRNA sense strand
cagaaguggugaucccuuu

SEQ ID NO: 514915 - RNA, 19 nt, Homo sapiens
  misc_RNA (1)...(19): siRNA sense strand
gauacacaguuuccaccua

SEQ ID NO: 514916 - RNA, 19 nt, Homo sapiens
  misc_RNA (1)...(19): siRNA sense strand
ugacuggaauugauauaug

SEQ ID NO: 514917 - RNA, 19 nt, Homo sapiens
  misc_RNA (1)...(19): siRNA sense strand
ggaguaauucccaaucuga

SEQ ID NO: 514918 - RNA, 19 nt, Homo sapiens
  misc_RNA (1)...(19): siRNA sense strand
gagauacauuguccacaug

SEQ ID NO: 514919 - RNA, 19 nt, Homo sapiens
  misc_RNA (1)...(19): siRNA sense strand
uaaaugugaugggaaaguu

SEQ ID NO: 514920 - RNA, 19 nt, Homo sapiens
  misc_RNA (1)...(19): siRNA sense strand
gaagcuugguguugccuau

SEQ ID NO: 514921 - RNA, 19 nt, Homo sapiens
  misc_RNA (1)...(19): siRNA sense strand
uauauggacugcaucaaau

SEQ ID NO: 514922 - RNA, 19 nt, Homo sapiens
  misc_RNA (1)...(19): siRNA sense strand
ggaaugcuacagauaaaug

SEQ ID NO: 514923 - RNA, 19 nt, Homo sapiens
  misc_RNA (1)...(19): siRNA sense strand
cagaguugcuaccaagaaa

SEQ ID NO: 514924 - RNA, 19 nt, Homo sapiens
  misc_RNA (1)...(19): siRNA sense strand
gugaaugccuucugcuaug

SEQ ID NO: 514925 - RNA, 19 nt, Homo sapiens
  misc_RNA (1)...(19): siRNA sense strand
ccuaugagauguggguuaa

SEQ ID NO: 514926 - RNA, 19 nt, Homo sapiens
  misc_RNA (1)...(19): siRNA sense strand
uaagaagugugccaguaug

SEQ ID NO: 514927 - RNA, 19 nt, Homo sapiens
  misc_RNA (1)...(19): siRNA sense strand
cguaagaagugugccagua

SEQ ID NO: 514928 - RNA, 19 nt, Homo sapiens
  misc_RNA (1)...(19): siRNA sense strand
gaaagauggcacaguaugu

SEQ ID NO: 514929 - RNA, 19 nt, Homo sapiens
  misc_RNA (1)...(19): siRNA sense strand
ggaaucuagugguugaaga

SEQ ID NO: 514930 - RNA, 19 nt, Homo sapiens
  misc_RNA (1)...(19): siRNA sense strand
aaaggaauaugccagaauc

SEQ ID NO: 514931 - RNA, 19 nt, Homo sapiens
  misc_RNA (1)...(19): siRNA sense strand
gcaaggagugcaucucaga

SEQ ID NO: 514932 - RNA, 19 nt, Homo sapiens
  misc_RNA (1)...(19): siRNA sense strand
gaaguggugaucccuuuga

SEQ ID NO: 514933 - RNA, 19 nt, Homo sapiens
  misc_RNA (1)...(19): siRNA sense strand
gaagugugccaguaugguu

SEQ ID NO: 514934 - RNA, 19 nt, Homo sapiens
  misc_RNA (1)...(19): siRNA sense strand
gggaucuccuguaauguga

SEQ ID NO: 514935 - RNA, 19 nt, Homo sapiens
  misc_RNA (1)...(19): siRNA sense strand
gaggguaaauaagcuguug

SEQ ID NO: 514936 - RNA, 19 nt, Homo sapiens
  misc_RNA (1)...(19): siRNA sense strand
agaacaacauggaaggauu

SEQ ID NO: 514937 - RNA, 19 nt, Homo sapiens
  misc_RNA (1)...(19): siRNA sense strand
guaagaagugugccaguau

SEQ ID NO: 514938 - RNA, 19 nt, Homo sapiens
  misc_RNA (1)...(19): siRNA sense strand
ggauggcuauaccugauau

SEQ ID NO: 514939 - RNA, 19 nt, Homo sapiens
  misc_RNA (1)...(19): siRNA sense strand
aguaguggauuauguauuc

SEQ ID NO: 514940 - RNA, 19 nt, Homo sapiens
  misc_RNA (1)...(19): siRNA sense strand
guaguggucguggauaaua

SEQ ID NO: 514941 - RNA, 19 nt, Homo sapiens
  misc_RNA (1)...(19): siRNA sense strand
gauguggguuaacagaaga

SEQ ID NO: 514942 - RNA, 19 nt, Homo sapiens
  misc_RNA (1)...(19): siRNA sense strand
caaaggcuauggagguagu

SEQ ID NO: 514943 - RNA, 19 nt, Homo sapiens
  misc_RNA (1)...(19): siRNA sense strand
caacaacaaacaacacugu

SEQ ID NO: 514944 - RNA, 19 nt, Homo sapiens
  misc_RNA (1)...(19): siRNA sense strand
gaaaagacguguaauaacc

SEQ ID NO: 514945 - RNA, 19 nt, Homo sapiens
  misc_RNA (1)...(19): siRNA sense strand
gaaucuagugguugaagaa

SEQ ID NO: 514946 - RNA, 19 nt, Homo sapiens
  misc_RNA (1)...(19): siRNA sense strand
uaucaguaguggauuaugu

SEQ ID NO: 514947 - RNA, 19 nt, Homo sapiens
  misc_RNA (1)...(19): siRNA sense strand
cuggauggcucuccuauag

SEQ ID NO: 514948 - RNA, 19 nt, Homo sapiens
  misc_RNA (1)...(19): siRNA sense strand
ucaaaguaaugcaacaaca

SEQ ID NO: 514949 - RNA, 19 nt, Homo sapiens
  misc_RNA (1)...(19): siRNA sense strand
gcaaagacugcaaauuucu

SEQ ID NO: 514950 - RNA, 19 nt, Homo sapiens
  misc_RNA (1)...(19): siRNA sense strand
ggaauauguugcaaagacu

SEQ ID NO: 514951 - RNA, 19 nt, Homo sapiens
  misc_RNA (1)...(19): siRNA sense strand
gugggaaucuagugguuga

SEQ ID NO: 514952 - RNA, 19 nt, Homo sapiens
  misc_RNA (1)...(19): siRNA sense strand
ggaauaugccagaauccuu

SEQ ID NO: 514953 - RNA, 19 nt, Homo sapiens
  misc_RNA (1)...(19): siRNA sense strand
gaaugcuacagauaaauga

SEQ ID NO: 514954 - RNA, 19 nt, Homo sapiens
  misc_RNA (1)...(19): siRNA sense strand
uauugugccuucuuccuuu

SEQ ID NO: 514955 - RNA, 19 nt, Homo sapiens
  misc_RNA (1)...(19): siRNA sense strand
aaaguugcguuaccuguca

SEQ ID NO: 514956 - RNA, 19 nt, Homo sapiens
  misc_RNA (1)...(19): siRNA sense strand
gugggaggguucaguguga

SEQ ID NO: 514957 - RNA, 19 nt, Homo sapiens
  misc_RNA (1)...(19): siRNA sense strand
guauucaaccgccuccaua

SEQ ID NO: 514958 - RNA, 19 nt, Homo sapiens
  misc_RNA (1)...(19): siRNA sense strand
cagauggaguugcaauugu

SEQ ID NO: 514959 - RNA, 19 nt, Homo sapiens
  misc_RNA (1)...(19): siRNA sense strand
uaagauagacagugaugau

SEQ ID NO: 514960 - RNA, 19 nt, Homo sapiens
  misc_RNA (1)...(19): siRNA sense strand
gcaugaaguauuuaacguu

SEQ ID NO: 514961 - RNA, 19 nt, Homo sapiens
  misc_RNA (1)...(19): siRNA sense strand
guaggcacaacauauguaa

SEQ ID NO: 514962 - RNA, 19 nt, Homo sapiens
  misc_RNA (1)...(19): siRNA sense strand
gccaggcccucccaguauu

SEQ ID NO: 514963 - RNA, 19 nt, Homo sapiens
  misc_RNA (1)...(19): siRNA sense strand
cgagcuuggucauaauuug

SEQ ID NO: 514964 - RNA, 19 nt, Homo sapiens
  misc_RNA (1)...(19): siRNA sense strand
auacacaguuuccaccuau

SEQ ID NO: 514965 - RNA, 19 nt, Homo sapiens
  misc_RNA (1)...(19): siRNA sense strand
ugaaugccuucugcuauga

SEQ ID NO: 514966 - RNA, 19 nt, Homo sapiens
  misc_RNA (1)...(19): siRNA sense strand
gaucuccuguaaugugaau

SEQ ID NO: 514967 - RNA, 19 nt, Homo sapiens
  misc_RNA (1)...(19): siRNA sense strand
gaaugugaccuuccagagu

SEQ ID NO: 514968 - RNA, 19 nt, Homo sapiens
  misc_RNA (1)...(19): siRNA sense strand
gaaugugacuguggaacca

SEQ ID NO: 514969 - RNA, 19 nt, Homo sapiens
  misc_RNA (1)...(19): siRNA sense strand
ggagaccuagauaauguuu

SEQ ID NO: 514970 - RNA, 19 nt, Homo sapiens
  misc_RNA (1)...(19): siRNA sense strand
caacagugcagcaugaagu

SEQ ID NO: 514971 - RNA, 19 nt, Homo sapiens
  misc_RNA (1)...(19): siRNA sense strand
gggaaucugcaacaacaaa

SEQ ID NO: 514972 - RNA, 19 nt, Homo sapiens
  misc_RNA (1)...(19): siRNA sense strand
agagauacauuguccacau

SEQ ID NO: 514973 - RNA, 19 nt, Homo sapiens
  misc_RNA (1)...(19): siRNA sense strand
ccacgagcuuggucauaau

SEQ ID NO: 514974 - RNA, 19 nt, Homo sapiens
  misc_RNA (1)...(19): siRNA sense strand
ggagguugauguaauuuug

SEQ ID NO: 514975 - RNA, 19 nt, Homo sapiens
  misc_RNA (1)...(19): siRNA sense strand
uauagaaaggugacaacua

SEQ ID NO: 514976 - RNA, 19 nt, Homo sapiens
  misc_RNA (1)...(19): siRNA sense strand
cuacuaccaugguuaugug

SEQ ID NO: 514977 - RNA, 19 nt, Homo sapiens
  misc_RNA (1)...(19): siRNA sense strand
aauaaucgacuacaacaug

SEQ ID NO: 514978 - RNA, 19 nt, Homo sapiens
  misc_RNA (1)...(19): siRNA sense strand
ucacuauugugccuucuuc

SEQ ID NO: 514979 - RNA, 19 nt, Homo sapiens
  misc_RNA (1)...(19): siRNA sense strand
ggaaggauuaaaugugaug

SEQ ID NO: 514980 - RNA, 19 nt, Homo sapiens
  misc_RNA (1)...(19): siRNA sense strand
auggaaggauuaaauguga

SEQ ID NO: 514981 - RNA, 19 nt, Homo sapiens
  misc_RNA (1)...(19): siRNA sense strand
ggcuauaccugauauuggu

SEQ ID NO: 514982 - RNA, 19 nt, Homo sapiens
  misc_RNA (1)...(19): siRNA sense strand
gcagcaguuucaccucaau

SEQ ID NO: 514983 - RNA, 19 nt, Homo sapiens
  misc_RNA (1)...(19): siRNA sense strand
auaaucgacuacaacauga

SEQ ID NO: 514984 - RNA, 19 nt, Homo sapiens
  misc_RNA (1)...(19): siRNA sense strand
gaagaugugucucaagcua

SEQ ID NO: 514985 - RNA, 19 nt, Homo sapiens
  misc_RNA (1)...(19): siRNA sense strand
gagcaucuguauauucuca

SEQ ID NO: 514986 - RNA, 19 nt, Homo sapiens
  misc_RNA (1)...(19): siRNA sense strand
ucaauggacuuccugagaa

SEQ ID NO: 514987 - RNA, 19 nt, Homo sapiens
  misc_RNA (1)...(19): siRNA sense strand
ggacaacagucacaaugag

SEQ ID NO: 514988 - RNA, 19 nt, Homo sapiens
  misc_RNA (1)...(19): siRNA sense strand
ccacauacaaugauacuga

SEQ ID NO: 514989 - RNA, 19 nt, Homo sapiens
  misc_RNA (1)...(19): siRNA sense strand
ugaccuggcuguugauguu

SEQ ID NO: 514990 - RNA, 19 nt, Homo sapiens
  misc_RNA (1)...(19): siRNA sense strand
ggccugaccuggcuguuga

SEQ ID NO: 514991 - RNA, 19 nt, Homo sapiens
  misc_RNA (1)...(19): siRNA sense strand
gaggccagauuccgcauug

SEQ ID NO: 514992 - RNA, 19 nt, Homo sapiens
  misc_RNA (1)...(19): siRNA sense strand
guagauccacauacaauga

SEQ ID NO: 514993 - RNA, 19 nt, Homo sapiens
  misc_RNA (1)...(19): siRNA sense strand
ccuuaucgcugcaucuauu

SEQ ID NO: 514994 - RNA, 19 nt, Homo sapiens
  misc_RNA (1)...(19): siRNA sense strand
aagcugagcaucuguauau

SEQ ID NO: 514995 - RNA, 19 nt, Homo sapiens
  misc_RNA (1)...(19): siRNA sense strand
gcaaggacgaggagcagaa

SEQ ID NO: 514996 - RNA, 19 nt, Homo sapiens
  misc_RNA (1)...(19): siRNA sense strand
gaaagcugagcaucuguau

SEQ ID NO: 514997 - RNA, 19 nt, Homo sapiens
  misc_RNA (1)...(19): siRNA sense strand
caaugauacugaagaugug

SEQ ID NO: 514998 - RNA, 19 nt, Homo sapiens
  misc_RNA (1)...(19): siRNA sense strand
acaaugauacugaagaugu

SEQ ID NO: 514999 - RNA, 19 nt, Homo sapiens
  misc_RNA (1)...(19): siRNA sense strand
cacauacaaugauacugaa

SEQ ID NO: 515000 - RNA, 19 nt, Homo sapiens
  misc_RNA (1)...(19): siRNA sense strand
agacaaggccacagucaau

SEQ ID NO: 515001 - RNA, 19 nt, Homo sapiens
  misc_RNA (1)...(19): siRNA sense strand
ccugaaagcugagcaucug

SEQ ID NO: 515002 - RNA, 19 nt, Homo sapiens
  misc_RNA (1)...(19): siRNA sense strand
gcagacaaggccacaguca

SEQ ID NO: 515003 - RNA, 19 nt, Homo sapiens
  misc_RNA (1)...(19): siRNA sense strand
gcauugacucaguaaguga

SEQ ID NO: 515004 - RNA, 19 nt, Homo sapiens
  misc_RNA (1)...(19): siRNA sense strand
ugaaagcugagcaucugua

SEQ ID NO: 515005 - RNA, 19 nt, Homo sapiens
  misc_RNA (1)...(19): siRNA sense strand
uaucgcugcaucuauuaua

SEQ ID NO: 515006 - RNA, 19 nt, Homo sapiens
  misc_RNA (1)...(19): siRNA sense strand
gcugagcaucuguauauuc

SEQ ID NO: 515007 - RNA, 19 nt, Homo sapiens
  misc_RNA (1)...(19): siRNA sense strand
ucaguggucuuccucuucu

SEQ ID NO: 515008 - RNA, 19 nt, Homo sapiens
  misc_RNA (1)...(19): siRNA sense strand
gcaucuguauauucucauc

SEQ ID NO: 515009 - RNA, 19 nt, Homo sapiens
  misc_RNA (1)...(19): siRNA sense strand
cugagcaucuguauauucu

SEQ ID NO: 515010 - RNA, 19 nt, Homo sapiens
  misc_RNA (1)...(19): siRNA sense strand
gucaauggacuuccugaga

SEQ ID NO: 515011 - RNA, 19 nt, Homo sapiens
  misc_RNA (1)...(19): siRNA sense strand
agauccacauacaaugaua

SEQ ID NO: 515012 - RNA, 19 nt, Homo sapiens
  misc_RNA (1)...(19): siRNA sense strand
gccagaaucagauaaagca

SEQ ID NO: 515013 - RNA, 19 nt, Homo sapiens
  misc_RNA (1)...(19): siRNA sense strand
cucaguaagugaaggaaau

SEQ ID NO: 515014 - RNA, 19 nt, Homo sapiens
  misc_RNA (1)...(19): siRNA sense strand
cauacaaugauacugaaga

SEQ ID NO: 515015 - RNA, 19 nt, Homo sapiens
  misc_RNA (1)...(19): siRNA sense strand
cccaggaggugacguaugc

SEQ ID NO: 515016 - RNA, 19 nt, Homo sapiens
  misc_RNA (1)...(19): siRNA sense strand
caagcuaguccaucugagu

SEQ ID NO: 515017 - RNA, 19 nt, Homo sapiens
  misc_RNA (1)...(19): siRNA sense strand
ggagccaugugacuuucgu

SEQ ID NO: 515018 - RNA, 19 nt, Homo sapiens
  misc_RNA (1)...(19): siRNA sense strand
cgcauugacucaguaagug

SEQ ID NO: 515019 - RNA, 19 nt, Homo sapiens
  misc_RNA (1)...(19): siRNA sense strand
gacaaggccacagucaaug

SEQ ID NO: 515020 - RNA, 19 nt, Homo sapiens
  misc_RNA (1)...(19): siRNA sense strand
cggacaacagucacaauga

SEQ ID NO: 515021 - RNA, 19 nt, Homo sapiens
  misc_RNA (1)...(19): siRNA sense strand
ggccuuaucgcugcaucua

SEQ ID NO: 515022 - RNA, 19 nt, Homo sapiens
  misc_RNA (1)...(19): siRNA sense strand
agaugugucucaagcuagu

SEQ ID NO: 515023 - RNA, 19 nt, Homo sapiens
  misc_RNA (1)...(19): siRNA sense strand
ccgaguccaucacguaugc

SEQ ID NO: 515024 - RNA, 19 nt, Homo sapiens
  misc_RNA (1)...(19): siRNA sense strand
ucucaguggucuuccucuu

SEQ ID NO: 515025 - RNA, 19 nt, Homo sapiens
  misc_RNA (1)...(19): siRNA sense strand
ugagucagaggccagauuc

SEQ ID NO: 515026 - RNA, 19 nt, Homo sapiens
  misc_RNA (1)...(19): siRNA sense strand
caaggccacagucaaugga

SEQ ID NO: 515027 - RNA, 19 nt, Homo sapiens
  misc_RNA (1)...(19): siRNA sense strand
cagacaaggccacagucaa

SEQ ID NO: 515028 - RNA, 19 nt, Homo sapiens
  misc_RNA (1)...(19): siRNA sense strand
cagcagacaaggccacagu

SEQ ID NO: 515029 - RNA, 19 nt, Homo sapiens
  misc_RNA (1)...(19): siRNA sense strand
aaagcugagcaucuguaua

SEQ ID NO: 515030 - RNA, 19 nt, Homo sapiens
  misc_RNA (1)...(19): siRNA sense strand
ccgcauugacucaguaagu

SEQ ID NO: 515031 - RNA, 19 nt, Homo sapiens
  misc_RNA (1)...(19): siRNA sense strand
gaagaugugucucaagcua

SEQ ID NO: 515032 - RNA, 19 nt, Homo sapiens
  misc_RNA (1)...(19): siRNA sense strand
gagcaucuguauauucuca

SEQ ID NO: 515033 - RNA, 19 nt, Homo sapiens
  misc_RNA (1)...(19): siRNA sense strand
ucaauggacuuccugagaa

SEQ ID NO: 515034 - RNA, 19 nt, Homo sapiens
  misc_RNA (1)...(19): siRNA sense strand
ggacaacagucacaaugag

SEQ ID NO: 515035 - RNA, 19 nt, Homo sapiens
  misc_RNA (1)...(19): siRNA sense strand
ccacauacaaugauacuga

SEQ ID NO: 515036 - RNA, 19 nt, Homo sapiens
  misc_RNA (1)...(19): siRNA sense strand
ugaccuggcuguugauguu

SEQ ID NO: 515037 - RNA, 19 nt, Homo sapiens
  misc_RNA (1)...(19): siRNA sense strand
ggccugaccuggcuguuga

SEQ ID NO: 515038 - RNA, 19 nt, Homo sapiens
  misc_RNA (1)...(19): siRNA sense strand
gaggccagauuccgcauug

SEQ ID NO: 515039 - RNA, 19 nt, Homo sapiens
  misc_RNA (1)...(19): siRNA sense strand
guagauccacauacaauga

SEQ ID NO: 515040 - RNA, 19 nt, Homo sapiens
  misc_RNA (1)...(19): siRNA sense strand
ccuuaucgcugcaucuauu

SEQ ID NO: 515041 - RNA, 19 nt, Homo sapiens
  misc_RNA (1)...(19): siRNA sense strand
aagcugagcaucuguauau

SEQ ID NO: 515042 - RNA, 19 nt, Homo sapiens
  misc_RNA (1)...(19): siRNA sense strand
gcaaggacgaggagcagaa

SEQ ID NO: 515043 - RNA, 19 nt, Homo sapiens
  misc_RNA (1)...(19): siRNA sense strand
gaaagcugagcaucuguau

SEQ ID NO: 515044 - RNA, 19 nt, Homo sapiens
  misc_RNA (1)...(19): siRNA sense strand
caaugauacugaagaugug

SEQ ID NO: 515045 - RNA, 19 nt, Homo sapiens
  misc_RNA (1)...(19): siRNA sense strand
acaaugauacugaagaugu

SEQ ID NO: 515046 - RNA, 19 nt, Homo sapiens
  misc_RNA (1)...(19): siRNA sense strand
cacauacaaugauacugaa

SEQ ID NO: 515047 - RNA, 19 nt, Homo sapiens
  misc_RNA (1)...(19): siRNA sense strand
agacaaggccacagucaau

SEQ ID NO: 515048 - RNA, 19 nt, Homo sapiens
  misc_RNA (1)...(19): siRNA sense strand
ccugaaagcugagcaucug

SEQ ID NO: 515049 - RNA, 19 nt, Homo sapiens
  misc_RNA (1)...(19): siRNA sense strand
gcagacaaggccacaguca

SEQ ID NO: 515050 - RNA, 19 nt, Homo sapiens
  misc_RNA (1)...(19): siRNA sense strand
gcauugacucaguaaguga

SEQ ID NO: 515051 - RNA, 19 nt, Homo sapiens
  misc_RNA (1)...(19): siRNA sense strand
ugaaagcugagcaucugua

SEQ ID NO: 515052 - RNA, 19 nt, Homo sapiens
  misc_RNA (1)...(19): siRNA sense strand
uaucgcugcaucuauuaua

SEQ ID NO: 515053 - RNA, 19 nt, Homo sapiens
  misc_RNA (1)...(19): siRNA sense strand
gcugagcaucuguauauuc

SEQ ID NO: 515054 - RNA, 19 nt, Homo sapiens
  misc_RNA (1)...(19): siRNA sense strand
ucaguggucuuccucuucu

SEQ ID NO: 515055 - RNA, 19 nt, Homo sapiens
  misc_RNA (1)...(19): siRNA sense strand
gcaucuguauauucucauc

SEQ ID NO: 515056 - RNA, 19 nt, Homo sapiens
  misc_RNA (1)...(19): siRNA sense strand
cugagcaucuguauauucu

SEQ ID NO: 515057 - RNA, 19 nt, Homo sapiens
  misc_RNA (1)...(19): siRNA sense strand
gucaauggacuuccugaga

SEQ ID NO: 515058 - RNA, 19 nt, Homo sapiens
  misc_RNA (1)...(19): siRNA sense strand
agauccacauacaaugaua

SEQ ID NO: 515059 - RNA, 19 nt, Homo sapiens
  misc_RNA (1)...(19): siRNA sense strand
gccagaaucagauaaagca

SEQ ID NO: 515060 - RNA, 19 nt, Homo sapiens
  misc_RNA (1)...(19): siRNA sense strand
cucaguaagugaaggaaau

SEQ ID NO: 515061 - RNA, 19 nt, Homo sapiens
  misc_RNA (1)...(19): siRNA sense strand
cauacaaugauacugaaga

SEQ ID NO: 515062 - RNA, 19 nt, Homo sapiens
  misc_RNA (1)...(19): siRNA sense strand
cccaggaggugacguaugc

SEQ ID NO: 515063 - RNA, 19 nt, Homo sapiens
  misc_RNA (1)...(19): siRNA sense strand
caagcuaguccaucugagu

SEQ ID NO: 515064 - RNA, 19 nt, Homo sapiens
  misc_RNA (1)...(19): siRNA sense strand
ggagccaugugacuuucgu

SEQ ID NO: 515065 - RNA, 19 nt, Homo sapiens
  misc_RNA (1)...(19): siRNA sense strand
cgcauugacucaguaagug

SEQ ID NO: 515066 - RNA, 19 nt, Homo sapiens
  misc_RNA (1)...(19): siRNA sense strand
gacaaggccacagucaaug

SEQ ID NO: 515067 - RNA, 19 nt, Homo sapiens
  misc_RNA (1)...(19): siRNA sense strand
cggacaacagucacaauga

SEQ ID NO: 515068 - RNA, 19 nt, Homo sapiens
  misc_RNA (1)...(19): siRNA sense strand
ggccuuaucgcugcaucua

SEQ ID NO: 515069 - RNA, 19 nt, Homo sapiens
  misc_RNA (1)...(19): siRNA sense strand
agaugugucucaagcuagu

SEQ ID NO: 515070 - RNA, 19 nt, Homo sapiens
  misc_RNA (1)...(19): siRNA sense strand
ccgaguccaucacguaugc

SEQ ID NO: 515071 - RNA, 19 nt, Homo sapiens
  misc_RNA (1)...(19): siRNA sense strand
ucucaguggucuuccucuu

SEQ ID NO: 515072 - RNA, 19 nt, Homo sapiens
  misc_RNA (1)...(19): siRNA sense strand
ugagucagaggccagauuc

SEQ ID NO: 515073 - RNA, 19 nt, Homo sapiens
  misc_RNA (1)...(19): siRNA sense strand
caaggccacagucaaugga

SEQ ID NO: 515074 - RNA, 19 nt, Homo sapiens
  misc_RNA (1)...(19): siRNA sense strand
cagacaaggccacagucaa

SEQ ID NO: 515075 - RNA, 19 nt, Homo sapiens
  misc_RNA (1)...(19): siRNA sense strand
cagcagacaaggccacagu

SEQ ID NO: 515076 - RNA, 19 nt, Homo sapiens
  misc_RNA (1)...(19): siRNA sense strand
aaagcugagcaucuguaua

SEQ ID NO: 515077 - RNA, 19 nt, Homo sapiens
  misc_RNA (1)...(19): siRNA sense strand
ccgcauugacucaguaagu

SEQ ID NO: 515078 - RNA, 19 nt, Homo sapiens
  misc_RNA (1)...(19): siRNA sense strand
gaagaugugucucaagcua

SEQ ID NO: 515079 - RNA, 19 nt, Homo sapiens
  misc_RNA (1)...(19): siRNA sense strand
gagcaucuguauauucuca

SEQ ID NO: 515080 - RNA, 19 nt, Homo sapiens
  misc_RNA (1)...(19): siRNA sense strand
ggacaacagucacaaugag

SEQ ID NO: 515081 - RNA, 19 nt, Homo sapiens
  misc_RNA (1)...(19): siRNA sense strand
ccacauacaaugauacuga

SEQ ID NO: 515082 - RNA, 19 nt, Homo sapiens
  misc_RNA (1)...(19): siRNA sense strand
gaggccagauuccgcauug

SEQ ID NO: 515083 - RNA, 19 nt, Homo sapiens
  misc_RNA (1)...(19): siRNA sense strand
guagauccacauacaauga

SEQ ID NO: 515084 - RNA, 19 nt, Homo sapiens
  misc_RNA (1)...(19): siRNA sense strand
ccuuaucgcugcaucuauu

SEQ ID NO: 515085 - RNA, 19 nt, Homo sapiens
  misc_RNA (1)...(19): siRNA sense strand
aagcugagcaucuguauau

SEQ ID NO: 515086 - RNA, 19 nt, Homo sapiens
  misc_RNA (1)...(19): siRNA sense strand
gcaaggacgaggagcagaa

SEQ ID NO: 515087 - RNA, 19 nt, Homo sapiens
  misc_RNA (1)...(19): siRNA sense strand
gaaagcugagcaucuguau

SEQ ID NO: 515088 - RNA, 19 nt, Homo sapiens
  misc_RNA (1)...(19): siRNA sense strand
caaugauacugaagaugug

SEQ ID NO: 515089 - RNA, 19 nt, Homo sapiens
  misc_RNA (1)...(19): siRNA sense strand
acaaugauacugaagaugu

SEQ ID NO: 515090 - RNA, 19 nt, Homo sapiens
  misc_RNA (1)...(19): siRNA sense strand
cacauacaaugauacugaa

SEQ ID NO: 515091 - RNA, 19 nt, Homo sapiens
  misc_RNA (1)...(19): siRNA sense strand
ccugaaagcugagcaucug

SEQ ID NO: 515092 - RNA, 19 nt, Homo sapiens
  misc_RNA (1)...(19): siRNA sense strand
gcauugacucaguaaguga

SEQ ID NO: 515093 - RNA, 19 nt, Homo sapiens
  misc_RNA (1)...(19): siRNA sense strand
ugaaagcugagcaucugua

SEQ ID NO: 515094 - RNA, 19 nt, Homo sapiens
  misc_RNA (1)...(19): siRNA sense strand
uaucgcugcaucuauuaua

SEQ ID NO: 515095 - RNA, 19 nt, Homo sapiens
  misc_RNA (1)...(19): siRNA sense strand
gcugagcaucuguauauuc

SEQ ID NO: 515096 - RNA, 19 nt, Homo sapiens
  misc_RNA (1)...(19): siRNA sense strand
ucaguggucuuccucuucu

SEQ ID NO: 515097 - RNA, 19 nt, Homo sapiens
  misc_RNA (1)...(19): siRNA sense strand
gcaucuguauauucucauc

SEQ ID NO: 515098 - RNA, 19 nt, Homo sapiens
  misc_RNA (1)...(19): siRNA sense strand
agauccacauacaaugaua

SEQ ID NO: 515099 - RNA, 19 nt, Homo sapiens
  misc_RNA (1)...(19): siRNA sense strand
gccagaaucagauaaagca

SEQ ID NO: 515100 - RNA, 19 nt, Homo sapiens
  misc_RNA (1)...(19): siRNA sense strand
cugagcaucuguauauucu

SEQ ID NO: 515101 - RNA, 19 nt, Homo sapiens
  misc_RNA (1)...(19): siRNA sense strand
cucaguaagugaaggaaau

SEQ ID NO: 515102 - RNA, 19 nt, Homo sapiens
  misc_RNA (1)...(19): siRNA sense strand
cauacaaugauacugaaga

SEQ ID NO: 515103 - RNA, 19 nt, Homo sapiens
  misc_RNA (1)...(19): siRNA sense strand
caagcuaguccaucugagu

SEQ ID NO: 515104 - RNA, 19 nt, Homo sapiens
  misc_RNA (1)...(19): siRNA sense strand
ggagccaugugacuuucgu

SEQ ID NO: 515105 - RNA, 19 nt, Homo sapiens
  misc_RNA (1)...(19): siRNA sense strand
cgcauugacucaguaagug

SEQ ID NO: 515106 - RNA, 19 nt, Homo sapiens
  misc_RNA (1)...(19): siRNA sense strand
cggacaacagucacaauga

SEQ ID NO: 515107 - RNA, 19 nt, Homo sapiens
  misc_RNA (1)...(19): siRNA sense strand
ggccuuaucgcugcaucua

SEQ ID NO: 515108 - RNA, 19 nt, Homo sapiens
  misc_RNA (1)...(19): siRNA sense strand
agaugugucucaagcuagu

SEQ ID NO: 515109 - RNA, 19 nt, Homo sapiens
  misc_RNA (1)...(19): siRNA sense strand
ucucaguggucuuccucuu

SEQ ID NO: 515110 - RNA, 19 nt, Homo sapiens
  misc_RNA (1)...(19): siRNA sense strand
ugagucagaggccagauuc

SEQ ID NO: 515111 - RNA, 19 nt, Homo sapiens
  misc_RNA (1)...(19): siRNA sense strand
aaagcugagcaucuguaua

SEQ ID NO: 515112 - RNA, 19 nt, Homo sapiens
  misc_RNA (1)...(19): siRNA sense strand
ccgcauugacucaguaagu

SEQ ID NO: 515113 - RNA, 19 nt, Homo sapiens
  misc_RNA (1)...(19): siRNA sense strand
gaagaugugucucaagcua

SEQ ID NO: 515114 - RNA, 19 nt, Homo sapiens
  misc_RNA (1)...(19): siRNA sense strand
gagcaucuguauauucuca

SEQ ID NO: 515115 - RNA, 19 nt, Homo sapiens
  misc_RNA (1)...(19): siRNA sense strand
ucaauggacuuccugagaa

SEQ ID NO: 515116 - RNA, 19 nt, Homo sapiens
  misc_RNA (1)...(19): siRNA sense strand
ggacaacagucacaaugag

SEQ ID NO: 515117 - RNA, 19 nt, Homo sapiens
  misc_RNA (1)...(19): siRNA sense strand
ccacauacaaugauacuga

SEQ ID NO: 515118 - RNA, 19 nt, Homo sapiens
  misc_RNA (1)...(19): siRNA sense strand
ugaccuggcuguugauguu

SEQ ID NO: 515119 - RNA, 19 nt, Homo sapiens
  misc_RNA (1)...(19): siRNA sense strand
ggccugaccuggcuguuga

SEQ ID NO: 515120 - RNA, 19 nt, Homo sapiens
  misc_RNA (1)...(19): siRNA sense strand
gaggccagauuccgcauug

SEQ ID NO: 515121 - RNA, 19 nt, Homo sapiens
  misc_RNA (1)...(19): siRNA sense strand
guagauccacauacaauga

SEQ ID NO: 515122 - RNA, 19 nt, Homo sapiens
  misc_RNA (1)...(19): siRNA sense strand
ccuuaucgcugcaucuauu

SEQ ID NO: 515123 - RNA, 19 nt, Homo sapiens
  misc_RNA (1)...(19): siRNA sense strand
aagcugagcaucuguauau

SEQ ID NO: 515124 - RNA, 19 nt, Homo sapiens
  misc_RNA (1)...(19): siRNA sense strand
gcaaggacgaggagcagaa

SEQ ID NO: 515125 - RNA, 19 nt, Homo sapiens
  misc_RNA (1)...(19): siRNA sense strand
gaaagcugagcaucuguau

SEQ ID NO: 515126 - RNA, 19 nt, Homo sapiens
  misc_RNA (1)...(19): siRNA sense strand
caaugauacugaagaugug

SEQ ID NO: 515127 - RNA, 19 nt, Homo sapiens
  misc_RNA (1)...(19): siRNA sense strand
acaaugauacugaagaugu

SEQ ID NO: 515128 - RNA, 19 nt, Homo sapiens
  misc_RNA (1)...(19): siRNA sense strand
cacauacaaugauacugaa

SEQ ID NO: 515129 - RNA, 19 nt, Homo sapiens
  misc_RNA (1)...(19): siRNA sense strand
agacaaggccacagucaau

SEQ ID NO: 515130 - RNA, 19 nt, Homo sapiens
  misc_RNA (1)...(19): siRNA sense strand
ccugaaagcugagcaucug

SEQ ID NO: 515131 - RNA, 19 nt, Homo sapiens
  misc_RNA (1)...(19): siRNA sense strand
gcagacaaggccacaguca

SEQ ID NO: 515132 - RNA, 19 nt, Homo sapiens
  misc_RNA (1)...(19): siRNA sense strand
gcauugacucaguaaguga

SEQ ID NO: 515133 - RNA, 19 nt, Homo sapiens
  misc_RNA (1)...(19): siRNA sense strand
ugaaagcugagcaucugua

SEQ ID NO: 515134 - RNA, 19 nt, Homo sapiens
  misc_RNA (1)...(19): siRNA sense strand
uaucgcugcaucuauuaua

SEQ ID NO: 515135 - RNA, 19 nt, Homo sapiens
  misc_RNA (1)...(19): siRNA sense strand
gcugagcaucuguauauuc

SEQ ID NO: 515136 - RNA, 19 nt, Homo sapiens
  misc_RNA (1)...(19): siRNA sense strand
ucaguggucuuccucuucu

SEQ ID NO: 515137 - RNA, 19 nt, Homo sapiens
  misc_RNA (1)...(19): siRNA sense strand
gcaucuguauauucucauc

SEQ ID NO: 515138 - RNA, 19 nt, Homo sapiens
  misc_RNA (1)...(19): siRNA sense strand
cugagcaucuguauauucu

SEQ ID NO: 515139 - RNA, 19 nt, Homo sapiens
  misc_RNA (1)...(19): siRNA sense strand
gucaauggacuuccugaga

SEQ ID NO: 515140 - RNA, 19 nt, Homo sapiens
  misc_RNA (1)...(19): siRNA sense strand
agauccacauacaaugaua

SEQ ID NO: 515141 - RNA, 19 nt, Homo sapiens
  misc_RNA (1)...(19): siRNA sense strand
gccagaaucagauaaagca

SEQ ID NO: 515142 - RNA, 19 nt, Homo sapiens
  misc_RNA (1)...(19): siRNA sense strand
cucaguaagugaaggaaau

SEQ ID NO: 515143 - RNA, 19 nt, Homo sapiens
  misc_RNA (1)...(19): siRNA sense strand
cauacaaugauacugaaga

SEQ ID NO: 515144 - RNA, 19 nt, Homo sapiens
  misc_RNA (1)...(19): siRNA sense strand
cccaggaggugacguaugc

SEQ ID NO: 515145 - RNA, 19 nt, Homo sapiens
  misc_RNA (1)...(19): siRNA sense strand
caagcuaguccaucugagu

SEQ ID NO: 515146 - RNA, 19 nt, Homo sapiens
  misc_RNA (1)...(19): siRNA sense strand
ggagccaugugacuuucgu

SEQ ID NO: 515147 - RNA, 19 nt, Homo sapiens
  misc_RNA (1)...(19): siRNA sense strand
cgcauugacucaguaagug

SEQ ID NO: 515148 - RNA, 19 nt, Homo sapiens
  misc_RNA (1)...(19): siRNA sense strand
gacaaggccacagucaaug

SEQ ID NO: 515149 - RNA, 19 nt, Homo sapiens
  misc_RNA (1)...(19): siRNA sense strand
cggacaacagucacaauga

SEQ ID NO: 515150 - RNA, 19 nt, Homo sapiens
  misc_RNA (1)...(19): siRNA sense strand
ggccuuaucgcugcaucua

SEQ ID NO: 515151 - RNA, 19 nt, Homo sapiens
  misc_RNA (1)...(19): siRNA sense strand
agaugugucucaagcuagu

SEQ ID NO: 515152 - RNA, 19 nt, Homo sapiens
  misc_RNA (1)...(19): siRNA sense strand
ccgaguccaucacguaugc

SEQ ID NO: 515153 - RNA, 19 nt, Homo sapiens
  misc_RNA (1)...(19): siRNA sense strand
ucucaguggucuuccucuu

SEQ ID NO: 515154 - RNA, 19 nt, Homo sapiens
  misc_RNA (1)...(19): siRNA sense strand
ugagucagaggccagauuc

SEQ ID NO: 515155 - RNA, 19 nt, Homo sapiens
  misc_RNA (1)...(19): siRNA sense strand
caaggccacagucaaugga

SEQ ID NO: 515156 - RNA, 19 nt, Homo sapiens
  misc_RNA (1)...(19): siRNA sense strand
cagacaaggccacagucaa

SEQ ID NO: 515157 - RNA, 19 nt, Homo sapiens
  misc_RNA (1)...(19): siRNA sense strand
cagcagacaaggccacagu

SEQ ID NO: 515158 - RNA, 19 nt, Homo sapiens
  misc_RNA (1)...(19): siRNA sense strand
aaagcugagcaucuguaua

SEQ ID NO: 515159 - RNA, 19 nt, Homo sapiens
  misc_RNA (1)...(19): siRNA sense strand
ccgcauugacucaguaagu

SEQ ID NO: 515160 - RNA, 19 nt, Homo sapiens
  misc_RNA (1)...(19): siRNA sense strand
gaagaugugucucaagcua

SEQ ID NO: 515161 - RNA, 19 nt, Homo sapiens
  misc_RNA (1)...(19): siRNA sense strand
gagcaucuguauauucuca

SEQ ID NO: 515162 - RNA, 19 nt, Homo sapiens
  misc_RNA (1)...(19): siRNA sense strand
ucaauggacuuccugagaa

SEQ ID NO: 515163 - RNA, 19 nt, Homo sapiens
  misc_RNA (1)...(19): siRNA sense strand
ggacaacagucacaaugag

SEQ ID NO: 515164 - RNA, 19 nt, Homo sapiens
  misc_RNA (1)...(19): siRNA sense strand
ccacauacaaugauacuga

SEQ ID NO: 515165 - RNA, 19 nt, Homo sapiens
  misc_RNA (1)...(19): siRNA sense strand
ugaccuggcuguugauguu

SEQ ID NO: 515166 - RNA, 19 nt, Homo sapiens
  misc_RNA (1)...(19): siRNA sense strand
ggccugaccuggcuguuga

SEQ ID NO: 515167 - RNA, 19 nt, Homo sapiens
  misc_RNA (1)...(19): siRNA sense strand
gaggccagauuccgcauug

SEQ ID NO: 515168 - RNA, 19 nt, Homo sapiens
  misc_RNA (1)...(19): siRNA sense strand
guagauccacauacaauga

SEQ ID NO: 515169 - RNA, 19 nt, Homo sapiens
  misc_RNA (1)...(19): siRNA sense strand
ccuuaucgcugcaucuauu

SEQ ID NO: 515170 - RNA, 19 nt, Homo sapiens
  misc_RNA (1)...(19): siRNA sense strand
aagcugagcaucuguauau

SEQ ID NO: 515171 - RNA, 19 nt, Homo sapiens
  misc_RNA (1)...(19): siRNA sense strand
gcaaggacgaggagcagaa

SEQ ID NO: 515172 - RNA, 19 nt, Homo sapiens
  misc_RNA (1)...(19): siRNA sense strand
gaaagcugagcaucuguau

SEQ ID NO: 515173 - RNA, 19 nt, Homo sapiens
  misc_RNA (1)...(19): siRNA sense strand
caaugauacugaagaugug

SEQ ID NO: 515174 - RNA, 19 nt, Homo sapiens
  misc_RNA (1)...(19): siRNA sense strand
acaaugauacugaagaugu

SEQ ID NO: 515175 - RNA, 19 nt, Homo sapiens
  misc_RNA (1)...(19): siRNA sense strand
cacauacaaugauacugaa

SEQ ID NO: 515176 - RNA, 19 nt, Homo sapiens
  misc_RNA (1)...(19): siRNA sense strand
agacaaggccacagucaau

SEQ ID NO: 515177 - RNA, 19 nt, Homo sapiens
  misc_RNA (1)...(19): siRNA sense strand
ccugaaagcugagcaucug

SEQ ID NO: 515178 - RNA, 19 nt, Homo sapiens
  misc_RNA (1)...(19): siRNA sense strand
gcagacaaggccacaguca

SEQ ID NO: 515179 - RNA, 19 nt, Homo sapiens
  misc_RNA (1)...(19): siRNA sense strand
gcauugacucaguaaguga

SEQ ID NO: 515180 - RNA, 19 nt, Homo sapiens
  misc_RNA (1)...(19): siRNA sense strand
ugaaagcugagcaucugua

SEQ ID NO: 515181 - RNA, 19 nt, Homo sapiens
  misc_RNA (1)...(19): siRNA sense strand
uaucgcugcaucuauuaua

SEQ ID NO: 515182 - RNA, 19 nt, Homo sapiens
  misc_RNA (1)...(19): siRNA sense strand
gcugagcaucuguauauuc

SEQ ID NO: 515183 - RNA, 19 nt, Homo sapiens
  misc_RNA (1)...(19): siRNA sense strand
ucaguggucuuccucuucu

SEQ ID NO: 515184 - RNA, 19 nt, Homo sapiens
  misc_RNA (1)...(19): siRNA sense strand
gcaucuguauauucucauc

SEQ ID NO: 515185 - RNA, 19 nt, Homo sapiens
  misc_RNA (1)...(19): siRNA sense strand
cugagcaucuguauauucu

SEQ ID NO: 515186 - RNA, 19 nt, Homo sapiens
  misc_RNA (1)...(19): siRNA sense strand
gucaauggacuuccugaga

SEQ ID NO: 515187 - RNA, 19 nt, Homo sapiens
  misc_RNA (1)...(19): siRNA sense strand
agauccacauacaaugaua

SEQ ID NO: 515188 - RNA, 19 nt, Homo sapiens
  misc_RNA (1)...(19): siRNA sense strand
gccagaaucagauaaagca

SEQ ID NO: 515189 - RNA, 19 nt, Homo sapiens
  misc_RNA (1)...(19): siRNA sense strand
cucaguaagugaaggaaau

SEQ ID NO: 515190 - RNA, 19 nt, Homo sapiens
  misc_RNA (1)...(19): siRNA sense strand
cauacaaugauacugaaga

SEQ ID NO: 515191 - RNA, 19 nt, Homo sapiens
  misc_RNA (1)...(19): siRNA sense strand
cccaggaggugacguaugc

SEQ ID NO: 515192 - RNA, 19 nt, Homo sapiens
  misc_RNA (1)...(19): siRNA sense strand
caagcuaguccaucugagu

SEQ ID NO: 515193 - RNA, 19 nt, Homo sapiens
  misc_RNA (1)...(19): siRNA sense strand
ggagccaugugacuuucgu

SEQ ID NO: 515194 - RNA, 19 nt, Homo sapiens
  misc_RNA (1)...(19): siRNA sense strand
cgcauugacucaguaagug

SEQ ID NO: 515195 - RNA, 19 nt, Homo sapiens
  misc_RNA (1)...(19): siRNA sense strand
gacaaggccacagucaaug

SEQ ID NO: 515196 - RNA, 19 nt, Homo sapiens
  misc_RNA (1)...(19): siRNA sense strand
cggacaacagucacaauga

SEQ ID NO: 515197 - RNA, 19 nt, Homo sapiens
  misc_RNA (1)...(19): siRNA sense strand
ggccuuaucgcugcaucua

SEQ ID NO: 515198 - RNA, 19 nt, Homo sapiens
  misc_RNA (1)...(19): siRNA sense strand
agaugugucucaagcuagu

SEQ ID NO: 515199 - RNA, 19 nt, Homo sapiens
  misc_RNA (1)...(19): siRNA sense strand
ccgaguccaucacguaugc

SEQ ID NO: 515200 - RNA, 19 nt, Homo sapiens
  misc_RNA (1)...(19): siRNA sense strand
ucucaguggucuuccucuu

SEQ ID NO: 515201 - RNA, 19 nt, Homo sapiens
  misc_RNA (1)...(19): siRNA sense strand
ugagucagaggccagauuc

SEQ ID NO: 515202 - RNA, 19 nt, Homo sapiens
  misc_RNA (1)...(19): siRNA sense strand
caaggccacagucaaugga

SEQ ID NO: 515203 - RNA, 19 nt, Homo sapiens
  misc_RNA (1)...(19): siRNA sense strand
cagacaaggccacagucaa

SEQ ID NO: 515204 - RNA, 19 nt, Homo sapiens
  misc_RNA (1)...(19): siRNA sense strand
cagcagacaaggccacagu

SEQ ID NO: 515205 - RNA, 19 nt, Homo sapiens
  misc_RNA (1)...(19): siRNA sense strand
aaagcugagcaucuguaua

SEQ ID NO: 515206 - RNA, 19 nt, Homo sapiens
  misc_RNA (1)...(19): siRNA sense strand
ccgcauugacucaguaagu

SEQ ID NO: 515207 - RNA, 19 nt, Homo sapiens
  misc_RNA (1)...(19): siRNA sense strand
gaagaugugucucaagcua

SEQ ID NO: 515208 - RNA, 19 nt, Homo sapiens
  misc_RNA (1)...(19): siRNA sense strand
gagcaucuguauauucuca

SEQ ID NO: 515209 - RNA, 19 nt, Homo sapiens
  misc_RNA (1)...(19): siRNA sense strand
ggacaacagucacaaugag

SEQ ID NO: 515210 - RNA, 19 nt, Homo sapiens
  misc_RNA (1)...(19): siRNA sense strand
ccacauacaaugauacuga

SEQ ID NO: 515211 - RNA, 19 nt, Homo sapiens
  misc_RNA (1)...(19): siRNA sense strand
gaggccagauuccgcauug

SEQ ID NO: 515212 - RNA, 19 nt, Homo sapiens
  misc_RNA (1)...(19): siRNA sense strand
guagauccacauacaauga

SEQ ID NO: 515213 - RNA, 19 nt, Homo sapiens
  misc_RNA (1)...(19): siRNA sense strand
ccuuaucgcugcaucuauu

SEQ ID NO: 515214 - RNA, 19 nt, Homo sapiens
  misc_RNA (1)...(19): siRNA sense strand
aagcugagcaucuguauau

SEQ ID NO: 515215 - RNA, 19 nt, Homo sapiens
  misc_RNA (1)...(19): siRNA sense strand
gcaaggacgaggagcagaa

SEQ ID NO: 515216 - RNA, 19 nt, Homo sapiens
  misc_RNA (1)...(19): siRNA sense strand
gaaagcugagcaucuguau

SEQ ID NO: 515217 - RNA, 19 nt, Homo sapiens
  misc_RNA (1)...(19): siRNA sense strand
caaugauacugaagaugug

SEQ ID NO: 515218 - RNA, 19 nt, Homo sapiens
  misc_RNA (1)...(19): siRNA sense strand
acaaugauacugaagaugu

SEQ ID NO: 515219 - RNA, 19 nt, Homo sapiens
  misc_RNA (1)...(19): siRNA sense strand
cacauacaaugauacugaa

SEQ ID NO: 515220 - RNA, 19 nt, Homo sapiens
  misc_RNA (1)...(19): siRNA sense strand
ccugaaagcugagcaucug

SEQ ID NO: 515221 - RNA, 19 nt, Homo sapiens
  misc_RNA (1)...(19): siRNA sense strand
gcauugacucaguaaguga

SEQ ID NO: 515222 - RNA, 19 nt, Homo sapiens
  misc_RNA (1)...(19): siRNA sense strand
ugaaagcugagcaucugua

SEQ ID NO: 515223 - RNA, 19 nt, Homo sapiens
  misc_RNA (1)...(19): siRNA sense strand
uaucgcugcaucuauuaua

SEQ ID NO: 515224 - RNA, 19 nt, Homo sapiens
  misc_RNA (1)...(19): siRNA sense strand
gcugagcaucuguauauuc

SEQ ID NO: 515225 - RNA, 19 nt, Homo sapiens
  misc_RNA (1)...(19): siRNA sense strand
ucaguggucuuccucuucu

SEQ ID NO: 515226 - RNA, 19 nt, Homo sapiens
  misc_RNA (1)...(19): siRNA sense strand
gcaucuguauauucucauc

SEQ ID NO: 515227 - RNA, 19 nt, Homo sapiens
  misc_RNA (1)...(19): siRNA sense strand
agauccacauacaaugaua

SEQ ID NO: 515228 - RNA, 19 nt, Homo sapiens
  misc_RNA (1)...(19): siRNA sense strand
gccagaaucagauaaagca

SEQ ID NO: 515229 - RNA, 19 nt, Homo sapiens
  misc_RNA (1)...(19): siRNA sense strand
cugagcaucuguauauucu

SEQ ID NO: 515230 - RNA, 19 nt, Homo sapiens
  misc_RNA (1)...(19): siRNA sense strand
cucaguaagugaaggaaau

SEQ ID NO: 515231 - RNA, 19 nt, Homo sapiens
  misc_RNA (1)...(19): siRNA sense strand
cauacaaugauacugaaga

SEQ ID NO: 515232 - RNA, 19 nt, Homo sapiens
  misc_RNA (1)...(19): siRNA sense strand
caagcuaguccaucugagu

SEQ ID NO: 515233 - RNA, 19 nt, Homo sapiens
  misc_RNA (1)...(19): siRNA sense strand
ggagccaugugacuuucgu

SEQ ID NO: 515234 - RNA, 19 nt, Homo sapiens
  misc_RNA (1)...(19): siRNA sense strand
cgcauugacucaguaagug

SEQ ID NO: 515235 - RNA, 19 nt, Homo sapiens
  misc_RNA (1)...(19): siRNA sense strand
cggacaacagucacaauga

SEQ ID NO: 515236 - RNA, 19 nt, Homo sapiens
  misc_RNA (1)...(19): siRNA sense strand
ggccuuaucgcugcaucua

SEQ ID NO: 515237 - RNA, 19 nt, Homo sapiens
  misc_RNA (1)...(19): siRNA sense strand
agaugugucucaagcuagu

SEQ ID NO: 515238 - RNA, 19 nt, Homo sapiens
  misc_RNA (1)...(19): siRNA sense strand
ucucaguggucuuccucuu

SEQ ID NO: 515239 - RNA, 19 nt, Homo sapiens
  misc_RNA (1)...(19): siRNA sense strand
ugagucagaggccagauuc

SEQ ID NO: 515240 - RNA, 19 nt, Homo sapiens
  misc_RNA (1)...(19): siRNA sense strand
aaagcugagcaucuguaua

SEQ ID NO: 515241 - RNA, 19 nt, Homo sapiens
  misc_RNA (1)...(19): siRNA sense strand
ccgcauugacucaguaagu

SEQ ID NO: 515242 - RNA, 19 nt, Homo sapiens
  misc_RNA (1)...(19): siRNA sense strand
gcagugacauguacgagaa

SEQ ID NO: 515243 - RNA, 19 nt, Homo sapiens
  misc_RNA (1)...(19): siRNA sense strand
ggacugcagugacauguac

SEQ ID NO: 515244 - RNA, 19 nt, Homo sapiens
  misc_RNA (1)...(19): siRNA sense strand
caccagcugugccauguuc

SEQ ID NO: 515245 - RNA, 19 nt, Homo sapiens
  misc_RNA (1)...(19): siRNA sense strand
uagcguccauugccuguuc

SEQ ID NO: 515246 - RNA, 19 nt, Homo sapiens
  misc_RNA (1)...(19): siRNA sense strand
ugacauguacgagaaagug

SEQ ID NO: 515247 - RNA, 19 nt, Homo sapiens
  misc_RNA (1)...(19): siRNA sense strand
gcagugacauguacgagaa

SEQ ID NO: 515248 - RNA, 19 nt, Homo sapiens
  misc_RNA (1)...(19): siRNA sense strand
ggacugcagugacauguac

SEQ ID NO: 515249 - RNA, 19 nt, Homo sapiens
  misc_RNA (1)...(19): siRNA sense strand
caccagcugugccauguuc

SEQ ID NO: 515250 - RNA, 19 nt, Homo sapiens
  misc_RNA (1)...(19): siRNA sense strand
uagcguccauugccuguuc

SEQ ID NO: 515251 - RNA, 19 nt, Homo sapiens
  misc_RNA (1)...(19): siRNA sense strand
ugacauguacgagaaagug

SEQ ID NO: 515252 - RNA, 19 nt, Homo sapiens
  misc_RNA (1)...(19): siRNA sense strand
gaacauggcagauuuaaua

SEQ ID NO: 515253 - RNA, 19 nt, Homo sapiens
  misc_RNA (1)...(19): siRNA sense strand
caacaaaccuucuaagcuu

SEQ ID NO: 515254 - RNA, 19 nt, Homo sapiens
  misc_RNA (1)...(19): siRNA sense strand
guaaugagcugaagugugu

SEQ ID NO: 515255 - RNA, 19 nt, Homo sapiens
  misc_RNA (1)...(19): siRNA sense strand
gaaauggaguuugcaguaa

SEQ ID NO: 515256 - RNA, 19 nt, Homo sapiens
  misc_RNA (1)...(19): siRNA sense strand
uaucaugacuuccugaaua

SEQ ID NO: 515257 - RNA, 19 nt, Homo sapiens
  misc_RNA (1)...(19): siRNA sense strand
gaaaucacaucuacuuuag

SEQ ID NO: 515258 - RNA, 19 nt, Homo sapiens
  misc_RNA (1)...(19): siRNA sense strand
gcaagacuguggaaguuaa

SEQ ID NO: 515259 - RNA, 19 nt, Homo sapiens
  misc_RNA (1)...(19): siRNA sense strand
gaagaaaccaaauacauug

SEQ ID NO: 515260 - RNA, 19 nt, Homo sapiens
  misc_RNA (1)...(19): siRNA sense strand
gaaacgugcucaggaaauu

SEQ ID NO: 515261 - RNA, 19 nt, Homo sapiens
  misc_RNA (1)...(19): siRNA sense strand
ggaaauggaguuugcagua

SEQ ID NO: 515262 - RNA, 19 nt, Homo sapiens
  misc_RNA (1)...(19): siRNA sense strand
gagaagcaguaaaugauug

SEQ ID NO: 515263 - RNA, 19 nt, Homo sapiens
  misc_RNA (1)...(19): siRNA sense strand
gaggaaacccugacucauu

SEQ ID NO: 515264 - RNA, 19 nt, Homo sapiens
  misc_RNA (1)...(19): siRNA sense strand
ggaauuugcuuuggaggaa

SEQ ID NO: 515265 - RNA, 19 nt, Homo sapiens
  misc_RNA (1)...(19): siRNA sense strand
gaggaggcgugaaugaauu

SEQ ID NO: 515266 - RNA, 19 nt, Homo sapiens
  misc_RNA (1)...(19): siRNA sense strand
gcuguccucugaauacaua

SEQ ID NO: 515267 - RNA, 19 nt, Homo sapiens
  misc_RNA (1)...(19): siRNA sense strand
gggagacacuggcuauuau

SEQ ID NO: 515268 - RNA, 19 nt, Homo sapiens
  misc_RNA (1)...(19): siRNA sense strand
ccaaauacauugaacugau

SEQ ID NO: 515269 - RNA, 19 nt, Homo sapiens
  misc_RNA (1)...(19): siRNA sense strand
gggaugugcuuugugguua

SEQ ID NO: 515270 - RNA, 19 nt, Homo sapiens
  misc_RNA (1)...(19): siRNA sense strand
cauaauugcuggcaccauu

SEQ ID NO: 515271 - RNA, 19 nt, Homo sapiens
  misc_RNA (1)...(19): siRNA sense strand
gaaccacacauaucucauu

SEQ ID NO: 515272 - RNA, 19 nt, Homo sapiens
  misc_RNA (1)...(19): siRNA sense strand
caaauacauugaacugaug

SEQ ID NO: 515273 - RNA, 19 nt, Homo sapiens
  misc_RNA (1)...(19): siRNA sense strand
caacaaguuugccauaucu

SEQ ID NO: 515274 - RNA, 19 nt, Homo sapiens
  misc_RNA (1)...(19): siRNA sense strand
guaaagaaggcacuauuug

SEQ ID NO: 515275 - RNA, 19 nt, Homo sapiens
  misc_RNA (1)...(19): siRNA sense strand
caaaugaugugcuuagaac

SEQ ID NO: 515276 - RNA, 19 nt, Homo sapiens
  misc_RNA (1)...(19): siRNA sense strand
gaaaggaggaggcgugaau

SEQ ID NO: 515277 - RNA, 19 nt, Homo sapiens
  misc_RNA (1)...(19): siRNA sense strand
gcagaguguuguaagaaau

SEQ ID NO: 515278 - RNA, 19 nt, Homo sapiens
  misc_RNA (1)...(19): siRNA sense strand
gagcugaagugugugugua

SEQ ID NO: 515279 - RNA, 19 nt, Homo sapiens
  misc_RNA (1)...(19): siRNA sense strand
gcagcaaggaagaacauua

SEQ ID NO: 515280 - RNA, 19 nt, Homo sapiens
  misc_RNA (1)...(19): siRNA sense strand
gauagacaaugcaaauaca

SEQ ID NO: 515281 - RNA, 19 nt, Homo sapiens
  misc_RNA (1)...(19): siRNA sense strand
aggaaacccugacucauuu

SEQ ID NO: 515282 - RNA, 19 nt, Homo sapiens
  misc_RNA (1)...(19): siRNA sense strand
gcaccaauaucauaauagg

SEQ ID NO: 515283 - RNA, 19 nt, Homo sapiens
  misc_RNA (1)...(19): siRNA sense strand
ggagcagaguguuguaaga

SEQ ID NO: 515284 - RNA, 19 nt, Homo sapiens
  misc_RNA (1)...(19): siRNA sense strand
uuacaaauccagacuguuu

SEQ ID NO: 515285 - RNA, 19 nt, Homo sapiens
  misc_RNA (1)...(19): siRNA sense strand
gaggagagcacuguuacua

SEQ ID NO: 515286 - RNA, 19 nt, Homo sapiens
  misc_RNA (1)...(19): siRNA sense strand
agacaaagacacauggaua

SEQ ID NO: 515287 - RNA, 19 nt, Homo sapiens
  misc_RNA (1)...(19): siRNA sense strand
cgaaaucuguggugaacau

SEQ ID NO: 515288 - RNA, 19 nt, Homo sapiens
  misc_RNA (1)...(19): siRNA sense strand
uguaagaaaugcaccuuga

SEQ ID NO: 515289 - RNA, 19 nt, Homo sapiens
  misc_RNA (1)...(19): siRNA sense strand
gacaacaaguuugccauau

SEQ ID NO: 515290 - RNA, 19 nt, Homo sapiens
  misc_RNA (1)...(19): siRNA sense strand
cagcaaggaagaacauuaa

SEQ ID NO: 515291 - RNA, 19 nt, Homo sapiens
  misc_RNA (1)...(19): siRNA sense strand
ggaaagacaaagacacaug

SEQ ID NO: 515292 - RNA, 19 nt, Homo sapiens
  misc_RNA (1)...(19): siRNA sense strand
gacacuggcuauuaucuuc

SEQ ID NO: 515293 - RNA, 19 nt, Homo sapiens
  misc_RNA (1)...(19): siRNA sense strand
ugacucauuuguugcauug

SEQ ID NO: 515294 - RNA, 19 nt, Homo sapiens
  misc_RNA (1)...(19): siRNA sense strand
agacaaauauugcuaugag

SEQ ID NO: 515295 - RNA, 19 nt, Homo sapiens
  misc_RNA (1)...(19): siRNA sense strand
gcaguaaaugauugugaua

SEQ ID NO: 515296 - RNA, 19 nt, Homo sapiens
  misc_RNA (1)...(19): siRNA sense strand
gaacugaugauugugaaug

SEQ ID NO: 515297 - RNA, 19 nt, Homo sapiens
  misc_RNA (1)...(19): siRNA sense strand
gaucuuccaucugaauuuc

SEQ ID NO: 515298 - RNA, 19 nt, Homo sapiens
  misc_RNA (1)...(19): siRNA sense strand
gcuaugagaaacugaauau

SEQ ID NO: 515299 - RNA, 19 nt, Homo sapiens
  misc_RNA (1)...(19): siRNA sense strand
ggugacagcaucagacaaa

SEQ ID NO: 515300 - RNA, 19 nt, Homo sapiens
  misc_RNA (1)...(19): siRNA sense strand
gagauagacaaugcaaaua

SEQ ID NO: 515301 - RNA, 19 nt, Homo sapiens
  misc_RNA (1)...(19): siRNA sense strand
ggauggauauucaugugau

SEQ ID NO: 515302 - RNA, 19 nt, Homo sapiens
  misc_RNA (1)...(19): siRNA sense strand
gaaugaucaccuuauguuu

SEQ ID NO: 515303 - RNA, 19 nt, Homo sapiens
  misc_RNA (1)...(19): siRNA sense strand
gaagaagaaaccaaauaca

SEQ ID NO: 515304 - RNA, 19 nt, Homo sapiens
  misc_RNA (1)...(19): siRNA sense strand
uggcaccaauaucauaaua

SEQ ID NO: 515305 - RNA, 19 nt, Homo sapiens
  misc_RNA (1)...(19): siRNA sense strand
acauugaacugaugauugu

SEQ ID NO: 515306 - RNA, 19 nt, Homo sapiens
  misc_RNA (1)...(19): siRNA sense strand
gaaaccaaauacauugaac

SEQ ID NO: 515307 - RNA, 19 nt, Homo sapiens
  misc_RNA (1)...(19): siRNA sense strand
ugaaugaucaccuuauguu

SEQ ID NO: 515308 - RNA, 19 nt, Homo sapiens
  misc_RNA (1)...(19): siRNA sense strand
ucacaaugaugaugcaaag

SEQ ID NO: 515309 - RNA, 19 nt, Homo sapiens
  misc_RNA (1)...(19): siRNA sense strand
gaagaugggacaccuugug

SEQ ID NO: 515310 - RNA, 19 nt, Homo sapiens
  misc_RNA (1)...(19): siRNA sense strand
ggccgaauguguccuugaa

SEQ ID NO: 515311 - RNA, 19 nt, Homo sapiens
  misc_RNA (1)...(19): siRNA sense strand
uuuaauggcuguuacacuu

SEQ ID NO: 515312 - RNA, 19 nt, Homo sapiens
  misc_RNA (1)...(19): siRNA sense strand
cuacgugaguuuaugaaau

SEQ ID NO: 515313 - RNA, 19 nt, Homo sapiens
  misc_RNA (1)...(19): siRNA sense strand
gcaguugacucauguugac

SEQ ID NO: 515314 - RNA, 19 nt, Homo sapiens
  misc_RNA (1)...(19): siRNA sense strand
ucaagaggauuuccauuuu

SEQ ID NO: 515315 - RNA, 19 nt, Homo sapiens
  misc_RNA (1)...(19): siRNA sense strand
gacagcaucagacaaauau

SEQ ID NO: 515316 - RNA, 19 nt, Homo sapiens
  misc_RNA (1)...(19): siRNA sense strand
ggaggaggcgugaaugaau

SEQ ID NO: 515317 - RNA, 19 nt, Homo sapiens
  misc_RNA (1)...(19): siRNA sense strand
aauccagacuguuugaauu

SEQ ID NO: 515318 - RNA, 19 nt, Homo sapiens
  misc_RNA (1)...(19): siRNA sense strand
guuagcaaguggugaaugu

SEQ ID NO: 515319 - RNA, 19 nt, Homo sapiens
  misc_RNA (1)...(19): siRNA sense strand
caacaaacgggaugugcuu

SEQ ID NO: 515320 - RNA, 19 nt, Homo sapiens
  misc_RNA (1)...(19): siRNA sense strand
gacaaauauugcuaugaga

SEQ ID NO: 515321 - RNA, 19 nt, Homo sapiens
  misc_RNA (1)...(19): siRNA sense strand
ugacagcaucagacaaaua

SEQ ID NO: 515322 - RNA, 19 nt, Homo sapiens
  misc_RNA (1)...(19): siRNA sense strand
gcaggagacgccucauuga

SEQ ID NO: 515323 - RNA, 19 nt, Homo sapiens
  misc_RNA (1)...(19): siRNA sense strand
gagcagaguguuguaagaa

SEQ ID NO: 515324 - RNA, 19 nt, Homo sapiens
  misc_RNA (1)...(19): siRNA sense strand
ugacaacaaguuugccaua

SEQ ID NO: 515325 - RNA, 19 nt, Homo sapiens
  misc_RNA (1)...(19): siRNA sense strand
acacauggauacagugcaa

SEQ ID NO: 515326 - RNA, 19 nt, Homo sapiens
  misc_RNA (1)...(19): siRNA sense strand
aaagacacauggauacagu

SEQ ID NO: 515327 - RNA, 19 nt, Homo sapiens
  misc_RNA (1)...(19): siRNA sense strand
ggagaggagugugauugug

SEQ ID NO: 515328 - RNA, 19 nt, Homo sapiens
  misc_RNA (1)...(19): siRNA sense strand
ggagggauuuuaucaaaga

SEQ ID NO: 515329 - RNA, 19 nt, Homo sapiens
  misc_RNA (1)...(19): siRNA sense strand
ucgauauccucguaaugua

SEQ ID NO: 515330 - RNA, 19 nt, Homo sapiens
  misc_RNA (1)...(19): siRNA sense strand
guucugauugcaacacuua

SEQ ID NO: 515331 - RNA, 19 nt, Homo sapiens
  misc_RNA (1)...(19): siRNA sense strand
cgugaaacgugcucaggaa

SEQ ID NO: 515332 - RNA, 19 nt, Homo sapiens
  misc_RNA (1)...(19): siRNA sense strand
gguauuaucucagacaaaa

SEQ ID NO: 515333 - RNA, 19 nt, Homo sapiens
  misc_RNA (1)...(19): siRNA sense strand
caacuuaagaccaggauag

SEQ ID NO: 515334 - RNA, 19 nt, Homo sapiens
  misc_RNA (1)...(19): siRNA sense strand
cagcaucagacaaauauug

SEQ ID NO: 515335 - RNA, 19 nt, Homo sapiens
  misc_RNA (1)...(19): siRNA sense strand
gaaaaugggcgaccucgaa

SEQ ID NO: 515336 - RNA, 19 nt, Homo sapiens
  misc_RNA (1)...(19): siRNA sense strand
gcaguaaugagcugaagug

SEQ ID NO: 515337 - RNA, 19 nt, Homo sapiens
  misc_RNA (1)...(19): siRNA sense strand
gaaggagcagaguguugua

SEQ ID NO: 515338 - RNA, 19 nt, Homo sapiens
  misc_RNA (1)...(19): siRNA sense strand
gaaaggauuccagacacaa

SEQ ID NO: 515339 - RNA, 19 nt, Homo sapiens
  misc_RNA (1)...(19): siRNA sense strand
uuacuucccucacaaugau

SEQ ID NO: 515340 - RNA, 19 nt, Homo sapiens
  misc_RNA (1)...(19): siRNA sense strand
agaacucgauggugaaauc

SEQ ID NO: 515341 - RNA, 19 nt, Homo sapiens
  misc_RNA (1)...(19): siRNA sense strand
ggugaacauggcagauuua

SEQ ID NO: 515342 - RNA, 19 nt, Homo sapiens
  misc_RNA (1)...(19): siRNA sense strand
ugaaaggauuccagacaca

SEQ ID NO: 515343 - RNA, 19 nt, Homo sapiens
  misc_RNA (1)...(19): siRNA sense strand
caaggaagaacauuaaacu

SEQ ID NO: 515344 - RNA, 19 nt, Homo sapiens
  misc_RNA (1)...(19): siRNA sense strand
gugacggucuuugcuguaa

SEQ ID NO: 515345 - RNA, 19 nt, Homo sapiens
  misc_RNA (1)...(19): siRNA sense strand
gcaaguggugaauguaaau

SEQ ID NO: 515346 - RNA, 19 nt, Homo sapiens
  misc_RNA (1)...(19): siRNA sense strand
gaaaaucagaggcaaaaga

SEQ ID NO: 515347 - RNA, 19 nt, Homo sapiens
  misc_RNA (1)...(19): siRNA sense strand
gauuugcuguccucugaau

SEQ ID NO: 515348 - RNA, 19 nt, Homo sapiens
  misc_RNA (1)...(19): siRNA sense strand
ugauggagcuagagaagag

SEQ ID NO: 515349 - RNA, 19 nt, Homo sapiens
  misc_RNA (1)...(19): siRNA sense strand
acacuuacuucccucacaa

SEQ ID NO: 515350 - RNA, 19 nt, Homo sapiens
  misc_RNA (1)...(19): siRNA sense strand
aaauggaguuugcaguaau

SEQ ID NO: 515351 - RNA, 19 nt, Homo sapiens
  misc_RNA (1)...(19): siRNA sense strand
ccaaaugaugugcuuagaa

SEQ ID NO: 515352 - RNA, 19 nt, Homo sapiens
  misc_RNA (1)...(19): siRNA sense strand
gaacauggcagauuuaaua

SEQ ID NO: 515353 - RNA, 19 nt, Homo sapiens
  misc_RNA (1)...(19): siRNA sense strand
caacaaaccuucuaagcuu

SEQ ID NO: 515354 - RNA, 19 nt, Homo sapiens
  misc_RNA (1)...(19): siRNA sense strand
guaaugagcugaagugugu

SEQ ID NO: 515355 - RNA, 19 nt, Homo sapiens
  misc_RNA (1)...(19): siRNA sense strand
gaaauggaguuugcaguaa

SEQ ID NO: 515356 - RNA, 19 nt, Homo sapiens
  misc_RNA (1)...(19): siRNA sense strand
uaucaugacuuccugaaua

SEQ ID NO: 515357 - RNA, 19 nt, Homo sapiens
  misc_RNA (1)...(19): siRNA sense strand
gaaaucacaucuacuuuag

SEQ ID NO: 515358 - RNA, 19 nt, Homo sapiens
  misc_RNA (1)...(19): siRNA sense strand
gcaagacuguggaaguuaa

SEQ ID NO: 515359 - RNA, 19 nt, Homo sapiens
  misc_RNA (1)...(19): siRNA sense strand
gaagaaaccaaauacauug

SEQ ID NO: 515360 - RNA, 19 nt, Homo sapiens
  misc_RNA (1)...(19): siRNA sense strand
gaaacgugcucaggaaauu

SEQ ID NO: 515361 - RNA, 19 nt, Homo sapiens
  misc_RNA (1)...(19): siRNA sense strand
ggaaauggaguuugcagua

SEQ ID NO: 515362 - RNA, 19 nt, Homo sapiens
  misc_RNA (1)...(19): siRNA sense strand
gagaagcaguaaaugauug

SEQ ID NO: 515363 - RNA, 19 nt, Homo sapiens
  misc_RNA (1)...(19): siRNA sense strand
gaggaaacccugacucauu

SEQ ID NO: 515364 - RNA, 19 nt, Homo sapiens
  misc_RNA (1)...(19): siRNA sense strand
ggaauuugcuuuggaggaa

SEQ ID NO: 515365 - RNA, 19 nt, Homo sapiens
  misc_RNA (1)...(19): siRNA sense strand
gaggaggcgugaaugaauu

SEQ ID NO: 515366 - RNA, 19 nt, Homo sapiens
  misc_RNA (1)...(19): siRNA sense strand
gcuguccucugaauacaua

SEQ ID NO: 515367 - RNA, 19 nt, Homo sapiens
  misc_RNA (1)...(19): siRNA sense strand
gggagacacuggcuauuau

SEQ ID NO: 515368 - RNA, 19 nt, Homo sapiens
  misc_RNA (1)...(19): siRNA sense strand
ccaaauacauugaacugau

SEQ ID NO: 515369 - RNA, 19 nt, Homo sapiens
  misc_RNA (1)...(19): siRNA sense strand
gggaugugcuuugugguua

SEQ ID NO: 515370 - RNA, 19 nt, Homo sapiens
  misc_RNA (1)...(19): siRNA sense strand
cauaauugcuggcaccauu

SEQ ID NO: 515371 - RNA, 19 nt, Homo sapiens
  misc_RNA (1)...(19): siRNA sense strand
gaaccacacauaucucauu

SEQ ID NO: 515372 - RNA, 19 nt, Homo sapiens
  misc_RNA (1)...(19): siRNA sense strand
caaauacauugaacugaug

SEQ ID NO: 515373 - RNA, 19 nt, Homo sapiens
  misc_RNA (1)...(19): siRNA sense strand
caacaaguuugccauaucu

SEQ ID NO: 515374 - RNA, 19 nt, Homo sapiens
  misc_RNA (1)...(19): siRNA sense strand
guaaagaaggcacuauuug

SEQ ID NO: 515375 - RNA, 19 nt, Homo sapiens
  misc_RNA (1)...(19): siRNA sense strand
caaaugaugugcuuagaac

SEQ ID NO: 515376 - RNA, 19 nt, Homo sapiens
  misc_RNA (1)...(19): siRNA sense strand
gaaaggaggaggcgugaau

SEQ ID NO: 515377 - RNA, 19 nt, Homo sapiens
  misc_RNA (1)...(19): siRNA sense strand
gcagaguguuguaagaaau

SEQ ID NO: 515378 - RNA, 19 nt, Homo sapiens
  misc_RNA (1)...(19): siRNA sense strand
gagcugaagugugugugua

SEQ ID NO: 515379 - RNA, 19 nt, Homo sapiens
  misc_RNA (1)...(19): siRNA sense strand
gcagcaaggaagaacauua

SEQ ID NO: 515380 - RNA, 19 nt, Homo sapiens
  misc_RNA (1)...(19): siRNA sense strand
gauagacaaugcaaauaca

SEQ ID NO: 515381 - RNA, 19 nt, Homo sapiens
  misc_RNA (1)...(19): siRNA sense strand
aggaaacccugacucauuu

SEQ ID NO: 515382 - RNA, 19 nt, Homo sapiens
  misc_RNA (1)...(19): siRNA sense strand
gcaccaauaucauaauagg

SEQ ID NO: 515383 - RNA, 19 nt, Homo sapiens
  misc_RNA (1)...(19): siRNA sense strand
ggagcagaguguuguaaga

SEQ ID NO: 515384 - RNA, 19 nt, Homo sapiens
  misc_RNA (1)...(19): siRNA sense strand
uuacaaauccagacuguuu

SEQ ID NO: 515385 - RNA, 19 nt, Homo sapiens
  misc_RNA (1)...(19): siRNA sense strand
gaggagagcacuguuacua

SEQ ID NO: 515386 - RNA, 19 nt, Homo sapiens
  misc_RNA (1)...(19): siRNA sense strand
agacaaagacacauggaua

SEQ ID NO: 515387 - RNA, 19 nt, Homo sapiens
  misc_RNA (1)...(19): siRNA sense strand
cgaaaucuguggugaacau

SEQ ID NO: 515388 - RNA, 19 nt, Homo sapiens
  misc_RNA (1)...(19): siRNA sense strand
uguaagaaaugcaccuuga

SEQ ID NO: 515389 - RNA, 19 nt, Homo sapiens
  misc_RNA (1)...(19): siRNA sense strand
gacaacaaguuugccauau

SEQ ID NO: 515390 - RNA, 19 nt, Homo sapiens
  misc_RNA (1)...(19): siRNA sense strand
cagcaaggaagaacauuaa

SEQ ID NO: 515391 - RNA, 19 nt, Homo sapiens
  misc_RNA (1)...(19): siRNA sense strand
ggaaagacaaagacacaug

SEQ ID NO: 515392 - RNA, 19 nt, Homo sapiens
  misc_RNA (1)...(19): siRNA sense strand
gacacuggcuauuaucuuc

SEQ ID NO: 515393 - RNA, 19 nt, Homo sapiens
  misc_RNA (1)...(19): siRNA sense strand
ugacucauuuguugcauug

SEQ ID NO: 515394 - RNA, 19 nt, Homo sapiens
  misc_RNA (1)...(19): siRNA sense strand
agacaaauauugcuaugag

SEQ ID NO: 515395 - RNA, 19 nt, Homo sapiens
  misc_RNA (1)...(19): siRNA sense strand
gcaguaaaugauugugaua

SEQ ID NO: 515396 - RNA, 19 nt, Homo sapiens
  misc_RNA (1)...(19): siRNA sense strand
gaacugaugauugugaaug

SEQ ID NO: 515397 - RNA, 19 nt, Homo sapiens
  misc_RNA (1)...(19): siRNA sense strand
gaucuuccaucugaauuuc

SEQ ID NO: 515398 - RNA, 19 nt, Homo sapiens
  misc_RNA (1)...(19): siRNA sense strand
gcuaugagaaacugaauau

SEQ ID NO: 515399 - RNA, 19 nt, Homo sapiens
  misc_RNA (1)...(19): siRNA sense strand
ggugacagcaucagacaaa

SEQ ID NO: 515400 - RNA, 19 nt, Homo sapiens
  misc_RNA (1)...(19): siRNA sense strand
gagauagacaaugcaaaua

SEQ ID NO: 515401 - RNA, 19 nt, Homo sapiens
  misc_RNA (1)...(19): siRNA sense strand
ggauggauauucaugugau

SEQ ID NO: 515402 - RNA, 19 nt, Homo sapiens
  misc_RNA (1)...(19): siRNA sense strand
gaaugaucaccuuauguuu

SEQ ID NO: 515403 - RNA, 19 nt, Homo sapiens
  misc_RNA (1)...(19): siRNA sense strand
gaagaagaaaccaaauaca

SEQ ID NO: 515404 - RNA, 19 nt, Homo sapiens
  misc_RNA (1)...(19): siRNA sense strand
uggcaccaauaucauaaua

SEQ ID NO: 515405 - RNA, 19 nt, Homo sapiens
  misc_RNA (1)...(19): siRNA sense strand
acauugaacugaugauugu

SEQ ID NO: 515406 - RNA, 19 nt, Homo sapiens
  misc_RNA (1)...(19): siRNA sense strand
gaaaccaaauacauugaac

SEQ ID NO: 515407 - RNA, 19 nt, Homo sapiens
  misc_RNA (1)...(19): siRNA sense strand
ugaaugaucaccuuauguu

SEQ ID NO: 515408 - RNA, 19 nt, Homo sapiens
  misc_RNA (1)...(19): siRNA sense strand
ucacaaugaugaugcaaag

SEQ ID NO: 515409 - RNA, 19 nt, Homo sapiens
  misc_RNA (1)...(19): siRNA sense strand
gaagaugggacaccuugug

SEQ ID NO: 515410 - RNA, 19 nt, Homo sapiens
  misc_RNA (1)...(19): siRNA sense strand
ggccgaauguguccuugaa

SEQ ID NO: 515411 - RNA, 19 nt, Homo sapiens
  misc_RNA (1)...(19): siRNA sense strand
uuuaauggcuguuacacuu

SEQ ID NO: 515412 - RNA, 19 nt, Homo sapiens
  misc_RNA (1)...(19): siRNA sense strand
cuacgugaguuuaugaaau

SEQ ID NO: 515413 - RNA, 19 nt, Homo sapiens
  misc_RNA (1)...(19): siRNA sense strand
gcaguugacucauguugac

SEQ ID NO: 515414 - RNA, 19 nt, Homo sapiens
  misc_RNA (1)...(19): siRNA sense strand
ucaagaggauuuccauuuu

SEQ ID NO: 515415 - RNA, 19 nt, Homo sapiens
  misc_RNA (1)...(19): siRNA sense strand
gacagcaucagacaaauau

SEQ ID NO: 515416 - RNA, 19 nt, Homo sapiens
  misc_RNA (1)...(19): siRNA sense strand
ggaggaggcgugaaugaau

SEQ ID NO: 515417 - RNA, 19 nt, Homo sapiens
  misc_RNA (1)...(19): siRNA sense strand
aauccagacuguuugaauu

SEQ ID NO: 515418 - RNA, 19 nt, Homo sapiens
  misc_RNA (1)...(19): siRNA sense strand
guuagcaaguggugaaugu

SEQ ID NO: 515419 - RNA, 19 nt, Homo sapiens
  misc_RNA (1)...(19): siRNA sense strand
caacaaacgggaugugcuu

SEQ ID NO: 515420 - RNA, 19 nt, Homo sapiens
  misc_RNA (1)...(19): siRNA sense strand
gacaaauauugcuaugaga

SEQ ID NO: 515421 - RNA, 19 nt, Homo sapiens
  misc_RNA (1)...(19): siRNA sense strand
ugacagcaucagacaaaua

SEQ ID NO: 515422 - RNA, 19 nt, Homo sapiens
  misc_RNA (1)...(19): siRNA sense strand
gcaggagacgccucauuga

SEQ ID NO: 515423 - RNA, 19 nt, Homo sapiens
  misc_RNA (1)...(19): siRNA sense strand
gagcagaguguuguaagaa

SEQ ID NO: 515424 - RNA, 19 nt, Homo sapiens
  misc_RNA (1)...(19): siRNA sense strand
ugacaacaaguuugccaua

SEQ ID NO: 515425 - RNA, 19 nt, Homo sapiens
  misc_RNA (1)...(19): siRNA sense strand
acacauggauacagugcaa

SEQ ID NO: 515426 - RNA, 19 nt, Homo sapiens
  misc_RNA (1)...(19): siRNA sense strand
aaagacacauggauacagu

SEQ ID NO: 515427 - RNA, 19 nt, Homo sapiens
  misc_RNA (1)...(19): siRNA sense strand
ggagaggagugugauugug

SEQ ID NO: 515428 - RNA, 19 nt, Homo sapiens
  misc_RNA (1)...(19): siRNA sense strand
ggagggauuuuaucaaaga

SEQ ID NO: 515429 - RNA, 19 nt, Homo sapiens
  misc_RNA (1)...(19): siRNA sense strand
ucgauauccucguaaugua

SEQ ID NO: 515430 - RNA, 19 nt, Homo sapiens
  misc_RNA (1)...(19): siRNA sense strand
guucugauugcaacacuua

SEQ ID NO: 515431 - RNA, 19 nt, Homo sapiens
  misc_RNA (1)...(19): siRNA sense strand
cgugaaacgugcucaggaa

SEQ ID NO: 515432 - RNA, 19 nt, Homo sapiens
  misc_RNA (1)...(19): siRNA sense strand
gguauuaucucagacaaaa

SEQ ID NO: 515433 - RNA, 19 nt, Homo sapiens
  misc_RNA (1)...(19): siRNA sense strand
caacuuaagaccaggauag

SEQ ID NO: 515434 - RNA, 19 nt, Homo sapiens
  misc_RNA (1)...(19): siRNA sense strand
cagcaucagacaaauauug

SEQ ID NO: 515435 - RNA, 19 nt, Homo sapiens
  misc_RNA (1)...(19): siRNA sense strand
gaaaaugggcgaccucgaa

SEQ ID NO: 515436 - RNA, 19 nt, Homo sapiens
  misc_RNA (1)...(19): siRNA sense strand
gcaguaaugagcugaagug

SEQ ID NO: 515437 - RNA, 19 nt, Homo sapiens
  misc_RNA (1)...(19): siRNA sense strand
gaaggagcagaguguugua

SEQ ID NO: 515438 - RNA, 19 nt, Homo sapiens
  misc_RNA (1)...(19): siRNA sense strand
gaaaggauuccagacacaa

SEQ ID NO: 515439 - RNA, 19 nt, Homo sapiens
  misc_RNA (1)...(19): siRNA sense strand
uuacuucccucacaaugau

SEQ ID NO: 515440 - RNA, 19 nt, Homo sapiens
  misc_RNA (1)...(19): siRNA sense strand
agaacucgauggugaaauc

SEQ ID NO: 515441 - RNA, 19 nt, Homo sapiens
  misc_RNA (1)...(19): siRNA sense strand
ggugaacauggcagauuua

SEQ ID NO: 515442 - RNA, 19 nt, Homo sapiens
  misc_RNA (1)...(19): siRNA sense strand
ugaaaggauuccagacaca

SEQ ID NO: 515443 - RNA, 19 nt, Homo sapiens
  misc_RNA (1)...(19): siRNA sense strand
caaggaagaacauuaaacu

SEQ ID NO: 515444 - RNA, 19 nt, Homo sapiens
  misc_RNA (1)...(19): siRNA sense strand
gugacggucuuugcuguaa

SEQ ID NO: 515445 - RNA, 19 nt, Homo sapiens
  misc_RNA (1)...(19): siRNA sense strand
gcaaguggugaauguaaau

SEQ ID NO: 515446 - RNA, 19 nt, Homo sapiens
  misc_RNA (1)...(19): siRNA sense strand
gaaaaucagaggcaaaaga

SEQ ID NO: 515447 - RNA, 19 nt, Homo sapiens
  misc_RNA (1)...(19): siRNA sense strand
gauuugcuguccucugaau

SEQ ID NO: 515448 - RNA, 19 nt, Homo sapiens
  misc_RNA (1)...(19): siRNA sense strand
ugauggagcuagagaagag

SEQ ID NO: 515449 - RNA, 19 nt, Homo sapiens
  misc_RNA (1)...(19): siRNA sense strand
acacuuacuucccucacaa

SEQ ID NO: 515450 - RNA, 19 nt, Homo sapiens
  misc_RNA (1)...(19): siRNA sense strand
aaauggaguuugcaguaau

SEQ ID NO: 515451 - RNA, 19 nt, Homo sapiens
  misc_RNA (1)...(19): siRNA sense strand
ccaaaugaugugcuuagaa

SEQ ID NO: 515452 - RNA, 19 nt, Homo sapiens
  misc_RNA (1)...(19): siRNA sense strand
gaacauggcagauuuaaua

SEQ ID NO: 515453 - RNA, 19 nt, Homo sapiens
  misc_RNA (1)...(19): siRNA sense strand
caacaaaccuucuaagcuu

SEQ ID NO: 515454 - RNA, 19 nt, Homo sapiens
  misc_RNA (1)...(19): siRNA sense strand
guaaugagcugaagugugu

SEQ ID NO: 515455 - RNA, 19 nt, Homo sapiens
  misc_RNA (1)...(19): siRNA sense strand
gaaauggaguuugcaguaa

SEQ ID NO: 515456 - RNA, 19 nt, Homo sapiens
  misc_RNA (1)...(19): siRNA sense strand
uaucaugacuuccugaaua

SEQ ID NO: 515457 - RNA, 19 nt, Homo sapiens
  misc_RNA (1)...(19): siRNA sense strand
gaaaucacaucuacuuuag

SEQ ID NO: 515458 - RNA, 19 nt, Homo sapiens
  misc_RNA (1)...(19): siRNA sense strand
gcaagacuguggaaguuaa

SEQ ID NO: 515459 - RNA, 19 nt, Homo sapiens
  misc_RNA (1)...(19): siRNA sense strand
gaagaaaccaaauacauug

SEQ ID NO: 515460 - RNA, 19 nt, Homo sapiens
  misc_RNA (1)...(19): siRNA sense strand
gaaacgugcucaggaaauu

SEQ ID NO: 515461 - RNA, 19 nt, Homo sapiens
  misc_RNA (1)...(19): siRNA sense strand
ggaaauggaguuugcagua

SEQ ID NO: 515462 - RNA, 19 nt, Homo sapiens
  misc_RNA (1)...(19): siRNA sense strand
gagaagcaguaaaugauug

SEQ ID NO: 515463 - RNA, 19 nt, Homo sapiens
  misc_RNA (1)...(19): siRNA sense strand
gaggaaacccugacucauu

SEQ ID NO: 515464 - RNA, 19 nt, Homo sapiens
  misc_RNA (1)...(19): siRNA sense strand
ggaauuugcuuuggaggaa

SEQ ID NO: 515465 - RNA, 19 nt, Homo sapiens
  misc_RNA (1)...(19): siRNA sense strand
gaggaggcgugaaugaauu

SEQ ID NO: 515466 - RNA, 19 nt, Homo sapiens
  misc_RNA (1)...(19): siRNA sense strand
gcuguccucugaauacaua

SEQ ID NO: 515467 - RNA, 19 nt, Homo sapiens
  misc_RNA (1)...(19): siRNA sense strand
gggagacacuggcuauuau

SEQ ID NO: 515468 - RNA, 19 nt, Homo sapiens
  misc_RNA (1)...(19): siRNA sense strand
ccaaauacauugaacugau

SEQ ID NO: 515469 - RNA, 19 nt, Homo sapiens
  misc_RNA (1)...(19): siRNA sense strand
gggaugugcuuugugguua

SEQ ID NO: 515470 - RNA, 19 nt, Homo sapiens
  misc_RNA (1)...(19): siRNA sense strand
cauaauugcuggcaccauu

SEQ ID NO: 515471 - RNA, 19 nt, Homo sapiens
  misc_RNA (1)...(19): siRNA sense strand
gaaccacacauaucucauu

SEQ ID NO: 515472 - RNA, 19 nt, Homo sapiens
  misc_RNA (1)...(19): siRNA sense strand
caaauacauugaacugaug

SEQ ID NO: 515473 - RNA, 19 nt, Homo sapiens
  misc_RNA (1)...(19): siRNA sense strand
caacaaguuugccauaucu

SEQ ID NO: 515474 - RNA, 19 nt, Homo sapiens
  misc_RNA (1)...(19): siRNA sense strand
guaaagaaggcacuauuug

SEQ ID NO: 515475 - RNA, 19 nt, Homo sapiens
  misc_RNA (1)...(19): siRNA sense strand
caaaugaugugcuuagaac

SEQ ID NO: 515476 - RNA, 19 nt, Homo sapiens
  misc_RNA (1)...(19): siRNA sense strand
gaaaggaggaggcgugaau

SEQ ID NO: 515477 - RNA, 19 nt, Homo sapiens
  misc_RNA (1)...(19): siRNA sense strand
gcagaguguuguaagaaau

SEQ ID NO: 515478 - RNA, 19 nt, Homo sapiens
  misc_RNA (1)...(19): siRNA sense strand
gagcugaagugugugugua

SEQ ID NO: 515479 - RNA, 19 nt, Homo sapiens
  misc_RNA (1)...(19): siRNA sense strand
gcagcaaggaagaacauua

SEQ ID NO: 515480 - RNA, 19 nt, Homo sapiens
  misc_RNA (1)...(19): siRNA sense strand
gauagacaaugcaaauaca

SEQ ID NO: 515481 - RNA, 19 nt, Homo sapiens
  misc_RNA (1)...(19): siRNA sense strand
aggaaacccugacucauuu

SEQ ID NO: 515482 - RNA, 19 nt, Homo sapiens
  misc_RNA (1)...(19): siRNA sense strand
gcaccaauaucauaauagg

SEQ ID NO: 515483 - RNA, 19 nt, Homo sapiens
  misc_RNA (1)...(19): siRNA sense strand
ggagcagaguguuguaaga

SEQ ID NO: 515484 - RNA, 19 nt, Homo sapiens
  misc_RNA (1)...(19): siRNA sense strand
uuacaaauccagacuguuu

SEQ ID NO: 515485 - RNA, 19 nt, Homo sapiens
  misc_RNA (1)...(19): siRNA sense strand
gaggagagcacuguuacua

SEQ ID NO: 515486 - RNA, 19 nt, Homo sapiens
  misc_RNA (1)...(19): siRNA sense strand
agacaaagacacauggaua

SEQ ID NO: 515487 - RNA, 19 nt, Homo sapiens
  misc_RNA (1)...(19): siRNA sense strand
cgaaaucuguggugaacau

SEQ ID NO: 515488 - RNA, 19 nt, Homo sapiens
  misc_RNA (1)...(19): siRNA sense strand
uguaagaaaugcaccuuga

SEQ ID NO: 515489 - RNA, 19 nt, Homo sapiens
  misc_RNA (1)...(19): siRNA sense strand
gacaacaaguuugccauau

SEQ ID NO: 515490 - RNA, 19 nt, Homo sapiens
  misc_RNA (1)...(19): siRNA sense strand
cagcaaggaagaacauuaa

SEQ ID NO: 515491 - RNA, 19 nt, Homo sapiens
  misc_RNA (1)...(19): siRNA sense strand
ggaaagacaaagacacaug

SEQ ID NO: 515492 - RNA, 19 nt, Homo sapiens
  misc_RNA (1)...(19): siRNA sense strand
gacacuggcuauuaucuuc

SEQ ID NO: 515493 - RNA, 19 nt, Homo sapiens
  misc_RNA (1)...(19): siRNA sense strand
ugacucauuuguugcauug

SEQ ID NO: 515494 - RNA, 19 nt, Homo sapiens
  misc_RNA (1)...(19): siRNA sense strand
agacaaauauugcuaugag

SEQ ID NO: 515495 - RNA, 19 nt, Homo sapiens
  misc_RNA (1)...(19): siRNA sense strand
gcaguaaaugauugugaua

SEQ ID NO: 515496 - RNA, 19 nt, Homo sapiens
  misc_RNA (1)...(19): siRNA sense strand
gaacugaugauugugaaug

SEQ ID NO: 515497 - RNA, 19 nt, Homo sapiens
  misc_RNA (1)...(19): siRNA sense strand
gaucuuccaucugaauuuc

SEQ ID NO: 515498 - RNA, 19 nt, Homo sapiens
  misc_RNA (1)...(19): siRNA sense strand
gcuaugagaaacugaauau

SEQ ID NO: 515499 - RNA, 19 nt, Homo sapiens
  misc_RNA (1)...(19): siRNA sense strand
ggugacagcaucagacaaa

SEQ ID NO: 515500 - RNA, 19 nt, Homo sapiens
  misc_RNA (1)...(19): siRNA sense strand
gagauagacaaugcaaaua

SEQ ID NO: 515501 - RNA, 19 nt, Homo sapiens
  misc_RNA (1)...(19): siRNA sense strand
ggauggauauucaugugau

SEQ ID NO: 515502 - RNA, 19 nt, Homo sapiens
  misc_RNA (1)...(19): siRNA sense strand
gaaugaucaccuuauguuu

SEQ ID NO: 515503 - RNA, 19 nt, Homo sapiens
  misc_RNA (1)...(19): siRNA sense strand
gaagaagaaaccaaauaca

SEQ ID NO: 515504 - RNA, 19 nt, Homo sapiens
  misc_RNA (1)...(19): siRNA sense strand
uggcaccaauaucauaaua

SEQ ID NO: 515505 - RNA, 19 nt, Homo sapiens
  misc_RNA (1)...(19): siRNA sense strand
acauugaacugaugauugu

SEQ ID NO: 515506 - RNA, 19 nt, Homo sapiens
  misc_RNA (1)...(19): siRNA sense strand
gaaaccaaauacauugaac

SEQ ID NO: 515507 - RNA, 19 nt, Homo sapiens
  misc_RNA (1)...(19): siRNA sense strand
ugaaugaucaccuuauguu

SEQ ID NO: 515508 - RNA, 19 nt, Homo sapiens
  misc_RNA (1)...(19): siRNA sense strand
ucacaaugaugaugcaaag

SEQ ID NO: 515509 - RNA, 19 nt, Homo sapiens
  misc_RNA (1)...(19): siRNA sense strand
gaagaugggacaccuugug

SEQ ID NO: 515510 - RNA, 19 nt, Homo sapiens
  misc_RNA (1)...(19): siRNA sense strand
ggccgaauguguccuugaa

SEQ ID NO: 515511 - RNA, 19 nt, Homo sapiens
  misc_RNA (1)...(19): siRNA sense strand
uuuaauggcuguuacacuu

SEQ ID NO: 515512 - RNA, 19 nt, Homo sapiens
  misc_RNA (1)...(19): siRNA sense strand
cuacgugaguuuaugaaau

SEQ ID NO: 515513 - RNA, 19 nt, Homo sapiens
  misc_RNA (1)...(19): siRNA sense strand
gcaguugacucauguugac

SEQ ID NO: 515514 - RNA, 19 nt, Homo sapiens
  misc_RNA (1)...(19): siRNA sense strand
ucaagaggauuuccauuuu

SEQ ID NO: 515515 - RNA, 19 nt, Homo sapiens
  misc_RNA (1)...(19): siRNA sense strand
gacagcaucagacaaauau

SEQ ID NO: 515516 - RNA, 19 nt, Homo sapiens
  misc_RNA (1)...(19): siRNA sense strand
ggaggaggcgugaaugaau

SEQ ID NO: 515517 - RNA, 19 nt, Homo sapiens
  misc_RNA (1)...(19): siRNA sense strand
aauccagacuguuugaauu

SEQ ID NO: 515518 - RNA, 19 nt, Homo sapiens
  misc_RNA (1)...(19): siRNA sense strand
guuagcaaguggugaaugu

SEQ ID NO: 515519 - RNA, 19 nt, Homo sapiens
  misc_RNA (1)...(19): siRNA sense strand
caacaaacgggaugugcuu

SEQ ID NO: 515520 - RNA, 19 nt, Homo sapiens
  misc_RNA (1)...(19): siRNA sense strand
gacaaauauugcuaugaga

SEQ ID NO: 515521 - RNA, 19 nt, Homo sapiens
  misc_RNA (1)...(19): siRNA sense strand
ugacagcaucagacaaaua

SEQ ID NO: 515522 - RNA, 19 nt, Homo sapiens
  misc_RNA (1)...(19): siRNA sense strand
gcaggagacgccucauuga

SEQ ID NO: 515523 - RNA, 19 nt, Homo sapiens
  misc_RNA (1)...(19): siRNA sense strand
gagcagaguguuguaagaa

SEQ ID NO: 515524 - RNA, 19 nt, Homo sapiens
  misc_RNA (1)...(19): siRNA sense strand
ugacaacaaguuugccaua

SEQ ID NO: 515525 - RNA, 19 nt, Homo sapiens
  misc_RNA (1)...(19): siRNA sense strand
acacauggauacagugcaa

SEQ ID NO: 515526 - RNA, 19 nt, Homo sapiens
  misc_RNA (1)...(19): siRNA sense strand
aaagacacauggauacagu

SEQ ID NO: 515527 - RNA, 19 nt, Homo sapiens
  misc_RNA (1)...(19): siRNA sense strand
ggagaggagugugauugug

SEQ ID NO: 515528 - RNA, 19 nt, Homo sapiens
  misc_RNA (1)...(19): siRNA sense strand
ggagggauuuuaucaaaga

SEQ ID NO: 515529 - RNA, 19 nt, Homo sapiens
  misc_RNA (1)...(19): siRNA sense strand
ucgauauccucguaaugua

SEQ ID NO: 515530 - RNA, 19 nt, Homo sapiens
  misc_RNA (1)...(19): siRNA sense strand
guucugauugcaacacuua

SEQ ID NO: 515531 - RNA, 19 nt, Homo sapiens
  misc_RNA (1)...(19): siRNA sense strand
cgugaaacgugcucaggaa

SEQ ID NO: 515532 - RNA, 19 nt, Homo sapiens
  misc_RNA (1)...(19): siRNA sense strand
gguauuaucucagacaaaa

SEQ ID NO: 515533 - RNA, 19 nt, Homo sapiens
  misc_RNA (1)...(19): siRNA sense strand
caacuuaagaccaggauag

SEQ ID NO: 515534 - RNA, 19 nt, Homo sapiens
  misc_RNA (1)...(19): siRNA sense strand
cagcaucagacaaauauug

SEQ ID NO: 515535 - RNA, 19 nt, Homo sapiens
  misc_RNA (1)...(19): siRNA sense strand
gaaaaugggcgaccucgaa

SEQ ID NO: 515536 - RNA, 19 nt, Homo sapiens
  misc_RNA (1)...(19): siRNA sense strand
gcaguaaugagcugaagug

SEQ ID NO: 515537 - RNA, 19 nt, Homo sapiens
  misc_RNA (1)...(19): siRNA sense strand
gaaggagcagaguguugua

SEQ ID NO: 515538 - RNA, 19 nt, Homo sapiens
  misc_RNA (1)...(19): siRNA sense strand
gaaaggauuccagacacaa

SEQ ID NO: 515539 - RNA, 19 nt, Homo sapiens
  misc_RNA (1)...(19): siRNA sense strand
uuacuucccucacaaugau

SEQ ID NO: 515540 - RNA, 19 nt, Homo sapiens
  misc_RNA (1)...(19): siRNA sense strand
agaacucgauggugaaauc

SEQ ID NO: 515541 - RNA, 19 nt, Homo sapiens
  misc_RNA (1)...(19): siRNA sense strand
ggugaacauggcagauuua

SEQ ID NO: 515542 - RNA, 19 nt, Homo sapiens
  misc_RNA (1)...(19): siRNA sense strand
ugaaaggauuccagacaca

SEQ ID NO: 515543 - RNA, 19 nt, Homo sapiens
  misc_RNA (1)...(19): siRNA sense strand
caaggaagaacauuaaacu

SEQ ID NO: 515544 - RNA, 19 nt, Homo sapiens
  misc_RNA (1)...(19): siRNA sense strand
gugacggucuuugcuguaa

SEQ ID NO: 515545 - RNA, 19 nt, Homo sapiens
  misc_RNA (1)...(19): siRNA sense strand
gcaaguggugaauguaaau

SEQ ID NO: 515546 - RNA, 19 nt, Homo sapiens
  misc_RNA (1)...(19): siRNA sense strand
gaaaaucagaggcaaaaga

SEQ ID NO: 515547 - RNA, 19 nt, Homo sapiens
  misc_RNA (1)...(19): siRNA sense strand
gauuugcuguccucugaau

SEQ ID NO: 515548 - RNA, 19 nt, Homo sapiens
  misc_RNA (1)...(19): siRNA sense strand
ugauggagcuagagaagag

SEQ ID NO: 515549 - RNA, 19 nt, Homo sapiens
  misc_RNA (1)...(19): siRNA sense strand
acacuuacuucccucacaa

SEQ ID NO: 515550 - RNA, 19 nt, Homo sapiens
  misc_RNA (1)...(19): siRNA sense strand
aaauggaguuugcaguaau

SEQ ID NO: 515551 - RNA, 19 nt, Homo sapiens
  misc_RNA (1)...(19): siRNA sense strand
ccaaaugaugugcuuagaa

SEQ ID NO: 515552 - RNA, 19 nt, Homo sapiens
  misc_RNA (1)...(19): siRNA sense strand
gaacauggcagauuuaaua

SEQ ID NO: 515553 - RNA, 19 nt, Homo sapiens
  misc_RNA (1)...(19): siRNA sense strand
caacaaaccuucuaagcuu

SEQ ID NO: 515554 - RNA, 19 nt, Homo sapiens
  misc_RNA (1)...(19): siRNA sense strand
guaaugagcugaagugugu

SEQ ID NO: 515555 - RNA, 19 nt, Homo sapiens
  misc_RNA (1)...(19): siRNA sense strand
gaaauggaguuugcaguaa

SEQ ID NO: 515556 - RNA, 19 nt, Homo sapiens
  misc_RNA (1)...(19): siRNA sense strand
uaucaugacuuccugaaua

SEQ ID NO: 515557 - RNA, 19 nt, Homo sapiens
  misc_RNA (1)...(19): siRNA sense strand
gaaaucacaucuacuuuag

SEQ ID NO: 515558 - RNA, 19 nt, Homo sapiens
  misc_RNA (1)...(19): siRNA sense strand
gcaagacuguggaaguuaa

SEQ ID NO: 515559 - RNA, 19 nt, Homo sapiens
  misc_RNA (1)...(19): siRNA sense strand
gaagaaaccaaauacauug

SEQ ID NO: 515560 - RNA, 19 nt, Homo sapiens
  misc_RNA (1)...(19): siRNA sense strand
gaaacgugcucaggaaauu

SEQ ID NO: 515561 - RNA, 19 nt, Homo sapiens
  misc_RNA (1)...(19): siRNA sense strand
ggaaauggaguuugcagua

SEQ ID NO: 515562 - RNA, 19 nt, Homo sapiens
  misc_RNA (1)...(19): siRNA sense strand
gagaagcaguaaaugauug

SEQ ID NO: 515563 - RNA, 19 nt, Homo sapiens
  misc_RNA (1)...(19): siRNA sense strand
gaggaaacccugacucauu

SEQ ID NO: 515564 - RNA, 19 nt, Homo sapiens
  misc_RNA (1)...(19): siRNA sense strand
ggaauuugcuuuggaggaa

SEQ ID NO: 515565 - RNA, 19 nt, Homo sapiens
  misc_RNA (1)...(19): siRNA sense strand
gaggaggcgugaaugaauu

SEQ ID NO: 515566 - RNA, 19 nt, Homo sapiens
  misc_RNA (1)...(19): siRNA sense strand
gcuguccucugaauacaua

SEQ ID NO: 515567 - RNA, 19 nt, Homo sapiens
  misc_RNA (1)...(19): siRNA sense strand
gggagacacuggcuauuau

SEQ ID NO: 515568 - RNA, 19 nt, Homo sapiens
  misc_RNA (1)...(19): siRNA sense strand
ccaaauacauugaacugau

SEQ ID NO: 515569 - RNA, 19 nt, Homo sapiens
  misc_RNA (1)...(19): siRNA sense strand
gggaugugcuuugugguua

SEQ ID NO: 515570 - RNA, 19 nt, Homo sapiens
  misc_RNA (1)...(19): siRNA sense strand
cauaauugcuggcaccauu

SEQ ID NO: 515571 - RNA, 19 nt, Homo sapiens
  misc_RNA (1)...(19): siRNA sense strand
gaaccacacauaucucauu

SEQ ID NO: 515572 - RNA, 19 nt, Homo sapiens
  misc_RNA (1)...(19): siRNA sense strand
caaauacauugaacugaug

SEQ ID NO: 515573 - RNA, 19 nt, Homo sapiens
  misc_RNA (1)...(19): siRNA sense strand
caacaaguuugccauaucu

SEQ ID NO: 515574 - RNA, 19 nt, Homo sapiens
  misc_RNA (1)...(19): siRNA sense strand
guaaagaaggcacuauuug

SEQ ID NO: 515575 - RNA, 19 nt, Homo sapiens
  misc_RNA (1)...(19): siRNA sense strand
caaaugaugugcuuagaac

SEQ ID NO: 515576 - RNA, 19 nt, Homo sapiens
  misc_RNA (1)...(19): siRNA sense strand
gaaaggaggaggcgugaau

SEQ ID NO: 515577 - RNA, 19 nt, Homo sapiens
  misc_RNA (1)...(19): siRNA sense strand
gcagaguguuguaagaaau

SEQ ID NO: 515578 - RNA, 19 nt, Homo sapiens
  misc_RNA (1)...(19): siRNA sense strand
gagcugaagugugugugua

SEQ ID NO: 515579 - RNA, 19 nt, Homo sapiens
  misc_RNA (1)...(19): siRNA sense strand
gcagcaaggaagaacauua

SEQ ID NO: 515580 - RNA, 19 nt, Homo sapiens
  misc_RNA (1)...(19): siRNA sense strand
gauagacaaugcaaauaca

SEQ ID NO: 515581 - RNA, 19 nt, Homo sapiens
  misc_RNA (1)...(19): siRNA sense strand
aggaaacccugacucauuu

SEQ ID NO: 515582 - RNA, 19 nt, Homo sapiens
  misc_RNA (1)...(19): siRNA sense strand
gcaccaauaucauaauagg

SEQ ID NO: 515583 - RNA, 19 nt, Homo sapiens
  misc_RNA (1)...(19): siRNA sense strand
ggagcagaguguuguaaga

SEQ ID NO: 515584 - RNA, 19 nt, Homo sapiens
  misc_RNA (1)...(19): siRNA sense strand
uuacaaauccagacuguuu

SEQ ID NO: 515585 - RNA, 19 nt, Homo sapiens
  misc_RNA (1)...(19): siRNA sense strand
gaggagagcacuguuacua

SEQ ID NO: 515586 - RNA, 19 nt, Homo sapiens
  misc_RNA (1)...(19): siRNA sense strand
agacaaagacacauggaua

SEQ ID NO: 515587 - RNA, 19 nt, Homo sapiens
  misc_RNA (1)...(19): siRNA sense strand
cgaaaucuguggugaacau

SEQ ID NO: 515588 - RNA, 19 nt, Homo sapiens
  misc_RNA (1)...(19): siRNA sense strand
uguaagaaaugcaccuuga

SEQ ID NO: 515589 - RNA, 19 nt, Homo sapiens
  misc_RNA (1)...(19): siRNA sense strand
gacaacaaguuugccauau

SEQ ID NO: 515590 - RNA, 19 nt, Homo sapiens
  misc_RNA (1)...(19): siRNA sense strand
cagcaaggaagaacauuaa

SEQ ID NO: 515591 - RNA, 19 nt, Homo sapiens
  misc_RNA (1)...(19): siRNA sense strand
ggaaagacaaagacacaug

SEQ ID NO: 515592 - RNA, 19 nt, Homo sapiens
  misc_RNA (1)...(19): siRNA sense strand
gacacuggcuauuaucuuc

SEQ ID NO: 515593 - RNA, 19 nt, Homo sapiens
  misc_RNA (1)...(19): siRNA sense strand
ugacucauuuguugcauug

SEQ ID NO: 515594 - RNA, 19 nt, Homo sapiens
  misc_RNA (1)...(19): siRNA sense strand
agacaaauauugcuaugag

SEQ ID NO: 515595 - RNA, 19 nt, Homo sapiens
  misc_RNA (1)...(19): siRNA sense strand
gcaguaaaugauugugaua

SEQ ID NO: 515596 - RNA, 19 nt, Homo sapiens
  misc_RNA (1)...(19): siRNA sense strand
gaacugaugauugugaaug

SEQ ID NO: 515597 - RNA, 19 nt, Homo sapiens
  misc_RNA (1)...(19): siRNA sense strand
gaucuuccaucugaauuuc

SEQ ID NO: 515598 - RNA, 19 nt, Homo sapiens
  misc_RNA (1)...(19): siRNA sense strand
gcuaugagaaacugaauau

SEQ ID NO: 515599 - RNA, 19 nt, Homo sapiens
  misc_RNA (1)...(19): siRNA sense strand
ggugacagcaucagacaaa

SEQ ID NO: 515600 - RNA, 19 nt, Homo sapiens
  misc_RNA (1)...(19): siRNA sense strand
gagauagacaaugcaaaua

SEQ ID NO: 515601 - RNA, 19 nt, Homo sapiens
  misc_RNA (1)...(19): siRNA sense strand
ggauggauauucaugugau

SEQ ID NO: 515602 - RNA, 19 nt, Homo sapiens
  misc_RNA (1)...(19): siRNA sense strand
gaaugaucaccuuauguuu

SEQ ID NO: 515603 - RNA, 19 nt, Homo sapiens
  misc_RNA (1)...(19): siRNA sense strand
gaagaagaaaccaaauaca

SEQ ID NO: 515604 - RNA, 19 nt, Homo sapiens
  misc_RNA (1)...(19): siRNA sense strand
uggcaccaauaucauaaua

SEQ ID NO: 515605 - RNA, 19 nt, Homo sapiens
  misc_RNA (1)...(19): siRNA sense strand
acauugaacugaugauugu

SEQ ID NO: 515606 - RNA, 19 nt, Homo sapiens
  misc_RNA (1)...(19): siRNA sense strand
gaaaccaaauacauugaac

SEQ ID NO: 515607 - RNA, 19 nt, Homo sapiens
  misc_RNA (1)...(19): siRNA sense strand
ugaaugaucaccuuauguu

SEQ ID NO: 515608 - RNA, 19 nt, Homo sapiens
  misc_RNA (1)...(19): siRNA sense strand
ucacaaugaugaugcaaag

SEQ ID NO: 515609 - RNA, 19 nt, Homo sapiens
  misc_RNA (1)...(19): siRNA sense strand
gaagaugggacaccuugug

SEQ ID NO: 515610 - RNA, 19 nt, Homo sapiens
  misc_RNA (1)...(19): siRNA sense strand
ggccgaauguguccuugaa

SEQ ID NO: 515611 - RNA, 19 nt, Homo sapiens
  misc_RNA (1)...(19): siRNA sense strand
uuuaauggcuguuacacuu

SEQ ID NO: 515612 - RNA, 19 nt, Homo sapiens
  misc_RNA (1)...(19): siRNA sense strand
cuacgugaguuuaugaaau

SEQ ID NO: 515613 - RNA, 19 nt, Homo sapiens
  misc_RNA (1)...(19): siRNA sense strand
gcaguugacucauguugac

SEQ ID NO: 515614 - RNA, 19 nt, Homo sapiens
  misc_RNA (1)...(19): siRNA sense strand
ucaagaggauuuccauuuu

SEQ ID NO: 515615 - RNA, 19 nt, Homo sapiens
  misc_RNA (1)...(19): siRNA sense strand
gacagcaucagacaaauau

SEQ ID NO: 515616 - RNA, 19 nt, Homo sapiens
  misc_RNA (1)...(19): siRNA sense strand
ggaggaggcgugaaugaau

SEQ ID NO: 515617 - RNA, 19 nt, Homo sapiens
  misc_RNA (1)...(19): siRNA sense strand
aauccagacuguuugaauu

SEQ ID NO: 515618 - RNA, 19 nt, Homo sapiens
  misc_RNA (1)...(19): siRNA sense strand
guuagcaaguggugaaugu

SEQ ID NO: 515619 - RNA, 19 nt, Homo sapiens
  misc_RNA (1)...(19): siRNA sense strand
caacaaacgggaugugcuu

SEQ ID NO: 515620 - RNA, 19 nt, Homo sapiens
  misc_RNA (1)...(19): siRNA sense strand
gacaaauauugcuaugaga

SEQ ID NO: 515621 - RNA, 19 nt, Homo sapiens
  misc_RNA (1)...(19): siRNA sense strand
ugacagcaucagacaaaua

SEQ ID NO: 515622 - RNA, 19 nt, Homo sapiens
  misc_RNA (1)...(19): siRNA sense strand
gcaggagacgccucauuga

SEQ ID NO: 515623 - RNA, 19 nt, Homo sapiens
  misc_RNA (1)...(19): siRNA sense strand
gagcagaguguuguaagaa

SEQ ID NO: 515624 - RNA, 19 nt, Homo sapiens
  misc_RNA (1)...(19): siRNA sense strand
ugacaacaaguuugccaua

SEQ ID NO: 515625 - RNA, 19 nt, Homo sapiens
  misc_RNA (1)...(19): siRNA sense strand
acacauggauacagugcaa

SEQ ID NO: 515626 - RNA, 19 nt, Homo sapiens
  misc_RNA (1)...(19): siRNA sense strand
aaagacacauggauacagu

SEQ ID NO: 515627 - RNA, 19 nt, Homo sapiens
  misc_RNA (1)...(19): siRNA sense strand
ggagaggagugugauugug

SEQ ID NO: 515628 - RNA, 19 nt, Homo sapiens
  misc_RNA (1)...(19): siRNA sense strand
ggagggauuuuaucaaaga

SEQ ID NO: 515629 - RNA, 19 nt, Homo sapiens
  misc_RNA (1)...(19): siRNA sense strand
ucgauauccucguaaugua

SEQ ID NO: 515630 - RNA, 19 nt, Homo sapiens
  misc_RNA (1)...(19): siRNA sense strand
guucugauugcaacacuua

SEQ ID NO: 515631 - RNA, 19 nt, Homo sapiens
  misc_RNA (1)...(19): siRNA sense strand
cgugaaacgugcucaggaa

SEQ ID NO: 515632 - RNA, 19 nt, Homo sapiens
  misc_RNA (1)...(19): siRNA sense strand
gguauuaucucagacaaaa

SEQ ID NO: 515633 - RNA, 19 nt, Homo sapiens
  misc_RNA (1)...(19): siRNA sense strand
caacuuaagaccaggauag

SEQ ID NO: 515634 - RNA, 19 nt, Homo sapiens
  misc_RNA (1)...(19): siRNA sense strand
cagcaucagacaaauauug

SEQ ID NO: 515635 - RNA, 19 nt, Homo sapiens
  misc_RNA (1)...(19): siRNA sense strand
gaaaaugggcgaccucgaa

SEQ ID NO: 515636 - RNA, 19 nt, Homo sapiens
  misc_RNA (1)...(19): siRNA sense strand
gcaguaaugagcugaagug

SEQ ID NO: 515637 - RNA, 19 nt, Homo sapiens
  misc_RNA (1)...(19): siRNA sense strand
gaaggagcagaguguugua

SEQ ID NO: 515638 - RNA, 19 nt, Homo sapiens
  misc_RNA (1)...(19): siRNA sense strand
gaaaggauuccagacacaa

SEQ ID NO: 515639 - RNA, 19 nt, Homo sapiens
  misc_RNA (1)...(19): siRNA sense strand
uuacuucccucacaaugau

SEQ ID NO: 515640 - RNA, 19 nt, Homo sapiens
  misc_RNA (1)...(19): siRNA sense strand
agaacucgauggugaaauc

SEQ ID NO: 515641 - RNA, 19 nt, Homo sapiens
  misc_RNA (1)...(19): siRNA sense strand
ggugaacauggcagauuua

SEQ ID NO: 515642 - RNA, 19 nt, Homo sapiens
  misc_RNA (1)...(19): siRNA sense strand
ugaaaggauuccagacaca

SEQ ID NO: 515643 - RNA, 19 nt, Homo sapiens
  misc_RNA (1)...(19): siRNA sense strand
caaggaagaacauuaaacu

SEQ ID NO: 515644 - RNA, 19 nt, Homo sapiens
  misc_RNA (1)...(19): siRNA sense strand
gugacggucuuugcuguaa

SEQ ID NO: 515645 - RNA, 19 nt, Homo sapiens
  misc_RNA (1)...(19): siRNA sense strand
gcaaguggugaauguaaau

SEQ ID NO: 515646 - RNA, 19 nt, Homo sapiens
  misc_RNA (1)...(19): siRNA sense strand
gaaaaucagaggcaaaaga

SEQ ID NO: 515647 - RNA, 19 nt, Homo sapiens
  misc_RNA (1)...(19): siRNA sense strand
gauuugcuguccucugaau

SEQ ID NO: 515648 - RNA, 19 nt, Homo sapiens
  misc_RNA (1)...(19): siRNA sense strand
ugauggagcuagagaagag

SEQ ID NO: 515649 - RNA, 19 nt, Homo sapiens
  misc_RNA (1)...(19): siRNA sense strand
acacuuacuucccucacaa

SEQ ID NO: 515650 - RNA, 19 nt, Homo sapiens
  misc_RNA (1)...(19): siRNA sense strand
aaauggaguuugcaguaau

SEQ ID NO: 515651 - RNA, 19 nt, Homo sapiens
  misc_RNA (1)...(19): siRNA sense strand
ccaaaugaugugcuuagaa

SEQ ID NO: 515652 - RNA, 19 nt, Homo sapiens
  misc_RNA (1)...(19): siRNA sense strand
gaacauggcagauuuaaua

SEQ ID NO: 515653 - RNA, 19 nt, Homo sapiens
  misc_RNA (1)...(19): siRNA sense strand
caacaaaccuucuaagcuu

SEQ ID NO: 515654 - RNA, 19 nt, Homo sapiens
  misc_RNA (1)...(19): siRNA sense strand
guaaugagcugaagugugu

SEQ ID NO: 515655 - RNA, 19 nt, Homo sapiens
  misc_RNA (1)...(19): siRNA sense strand
gaaauggaguuugcaguaa

SEQ ID NO: 515656 - RNA, 19 nt, Homo sapiens
  misc_RNA (1)...(19): siRNA sense strand
uaucaugacuuccugaaua

SEQ ID NO: 515657 - RNA, 19 nt, Homo sapiens
  misc_RNA (1)...(19): siRNA sense strand
gaaaucacaucuacuuuag

SEQ ID NO: 515658 - RNA, 19 nt, Homo sapiens
  misc_RNA (1)...(19): siRNA sense strand
gcaagacuguggaaguuaa

SEQ ID NO: 515659 - RNA, 19 nt, Homo sapiens
  misc_RNA (1)...(19): siRNA sense strand
gaagaaaccaaauacauug

SEQ ID NO: 515660 - RNA, 19 nt, Homo sapiens
  misc_RNA (1)...(19): siRNA sense strand
gaaacgugcucaggaaauu

SEQ ID NO: 515661 - RNA, 19 nt, Homo sapiens
  misc_RNA (1)...(19): siRNA sense strand
ggaaauggaguuugcagua

SEQ ID NO: 515662 - RNA, 19 nt, Homo sapiens
  misc_RNA (1)...(19): siRNA sense strand
gagaagcaguaaaugauug

SEQ ID NO: 515663 - RNA, 19 nt, Homo sapiens
  misc_RNA (1)...(19): siRNA sense strand
gaggaaacccugacucauu

SEQ ID NO: 515664 - RNA, 19 nt, Homo sapiens
  misc_RNA (1)...(19): siRNA sense strand
ggaauuugcuuuggaggaa

SEQ ID NO: 515665 - RNA, 19 nt, Homo sapiens
  misc_RNA (1)...(19): siRNA sense strand
gaggaggcgugaaugaauu

SEQ ID NO: 515666 - RNA, 19 nt, Homo sapiens
  misc_RNA (1)...(19): siRNA sense strand
gcuguccucugaauacaua

SEQ ID NO: 515667 - RNA, 19 nt, Homo sapiens
  misc_RNA (1)...(19): siRNA sense strand
gggagacacuggcuauuau

SEQ ID NO: 515668 - RNA, 19 nt, Homo sapiens
  misc_RNA (1)...(19): siRNA sense strand
ccaaauacauugaacugau

SEQ ID NO: 515669 - RNA, 19 nt, Homo sapiens
  misc_RNA (1)...(19): siRNA sense strand
gggaugugcuuugugguua

SEQ ID NO: 515670 - RNA, 19 nt, Homo sapiens
  misc_RNA (1)...(19): siRNA sense strand
cauaauugcuggcaccauu

SEQ ID NO: 515671 - RNA, 19 nt, Homo sapiens
  misc_RNA (1)...(19): siRNA sense strand
gaaccacacauaucucauu

SEQ ID NO: 515672 - RNA, 19 nt, Homo sapiens
  misc_RNA (1)...(19): siRNA sense strand
caaauacauugaacugaug

SEQ ID NO: 515673 - RNA, 19 nt, Homo sapiens
  misc_RNA (1)...(19): siRNA sense strand
caacaaguuugccauaucu

SEQ ID NO: 515674 - RNA, 19 nt, Homo sapiens
  misc_RNA (1)...(19): siRNA sense strand
guaaagaaggcacuauuug

SEQ ID NO: 515675 - RNA, 19 nt, Homo sapiens
  misc_RNA (1)...(19): siRNA sense strand
caaaugaugugcuuagaac

SEQ ID NO: 515676 - RNA, 19 nt, Homo sapiens
  misc_RNA (1)...(19): siRNA sense strand
gaaaggaggaggcgugaau

SEQ ID NO: 515677 - RNA, 19 nt, Homo sapiens
  misc_RNA (1)...(19): siRNA sense strand
gcagaguguuguaagaaau

SEQ ID NO: 515678 - RNA, 19 nt, Homo sapiens
  misc_RNA (1)...(19): siRNA sense strand
gagcugaagugugugugua

SEQ ID NO: 515679 - RNA, 19 nt, Homo sapiens
  misc_RNA (1)...(19): siRNA sense strand
gcagcaaggaagaacauua

SEQ ID NO: 515680 - RNA, 19 nt, Homo sapiens
  misc_RNA (1)...(19): siRNA sense strand
gauagacaaugcaaauaca

SEQ ID NO: 515681 - RNA, 19 nt, Homo sapiens
  misc_RNA (1)...(19): siRNA sense strand
aggaaacccugacucauuu

SEQ ID NO: 515682 - RNA, 19 nt, Homo sapiens
  misc_RNA (1)...(19): siRNA sense strand
gcaccaauaucauaauagg

SEQ ID NO: 515683 - RNA, 19 nt, Homo sapiens
  misc_RNA (1)...(19): siRNA sense strand
ggagcagaguguuguaaga

SEQ ID NO: 515684 - RNA, 19 nt, Homo sapiens
  misc_RNA (1)...(19): siRNA sense strand
uuacaaauccagacuguuu

SEQ ID NO: 515685 - RNA, 19 nt, Homo sapiens
  misc_RNA (1)...(19): siRNA sense strand
gaggagagcacuguuacua

SEQ ID NO: 515686 - RNA, 19 nt, Homo sapiens
  misc_RNA (1)...(19): siRNA sense strand
agacaaagacacauggaua

SEQ ID NO: 515687 - RNA, 19 nt, Homo sapiens
  misc_RNA (1)...(19): siRNA sense strand
cgaaaucuguggugaacau

SEQ ID NO: 515688 - RNA, 19 nt, Homo sapiens
  misc_RNA (1)...(19): siRNA sense strand
uguaagaaaugcaccuuga

SEQ ID NO: 515689 - RNA, 19 nt, Homo sapiens
  misc_RNA (1)...(19): siRNA sense strand
gacaacaaguuugccauau

SEQ ID NO: 515690 - RNA, 19 nt, Homo sapiens
  misc_RNA (1)...(19): siRNA sense strand
cagcaaggaagaacauuaa

SEQ ID NO: 515691 - RNA, 19 nt, Homo sapiens
  misc_RNA (1)...(19): siRNA sense strand
ggaaagacaaagacacaug

SEQ ID NO: 515692 - RNA, 19 nt, Homo sapiens
  misc_RNA (1)...(19): siRNA sense strand
gacacuggcuauuaucuuc

SEQ ID NO: 515693 - RNA, 19 nt, Homo sapiens
  misc_RNA (1)...(19): siRNA sense strand
ugacucauuuguugcauug

SEQ ID NO: 515694 - RNA, 19 nt, Homo sapiens
  misc_RNA (1)...(19): siRNA sense strand
agacaaauauugcuaugag

SEQ ID NO: 515695 - RNA, 19 nt, Homo sapiens
  misc_RNA (1)...(19): siRNA sense strand
gcaguaaaugauugugaua

SEQ ID NO: 515696 - RNA, 19 nt, Homo sapiens
  misc_RNA (1)...(19): siRNA sense strand
gaacugaugauugugaaug

SEQ ID NO: 515697 - RNA, 19 nt, Homo sapiens
  misc_RNA (1)...(19): siRNA sense strand
gaucuuccaucugaauuuc

SEQ ID NO: 515698 - RNA, 19 nt, Homo sapiens
  misc_RNA (1)...(19): siRNA sense strand
gcuaugagaaacugaauau

SEQ ID NO: 515699 - RNA, 19 nt, Homo sapiens
  misc_RNA (1)...(19): siRNA sense strand
ggugacagcaucagacaaa

SEQ ID NO: 515700 - RNA, 19 nt, Homo sapiens
  misc_RNA (1)...(19): siRNA sense strand
gagauagacaaugcaaaua

SEQ ID NO: 515701 - RNA, 19 nt, Homo sapiens
  misc_RNA (1)...(19): siRNA sense strand
ggauggauauucaugugau

SEQ ID NO: 515702 - RNA, 19 nt, Homo sapiens
  misc_RNA (1)...(19): siRNA sense strand
gaaugaucaccuuauguuu

SEQ ID NO: 515703 - RNA, 19 nt, Homo sapiens
  misc_RNA (1)...(19): siRNA sense strand
gaagaagaaaccaaauaca

SEQ ID NO: 515704 - RNA, 19 nt, Homo sapiens
  misc_RNA (1)...(19): siRNA sense strand
uggcaccaauaucauaaua

SEQ ID NO: 515705 - RNA, 19 nt, Homo sapiens
  misc_RNA (1)...(19): siRNA sense strand
acauugaacugaugauugu

SEQ ID NO: 515706 - RNA, 19 nt, Homo sapiens
  misc_RNA (1)...(19): siRNA sense strand
gaaaccaaauacauugaac

SEQ ID NO: 515707 - RNA, 19 nt, Homo sapiens
  misc_RNA (1)...(19): siRNA sense strand
ugaaugaucaccuuauguu

SEQ ID NO: 515708 - RNA, 19 nt, Homo sapiens
  misc_RNA (1)...(19): siRNA sense strand
ucacaaugaugaugcaaag

SEQ ID NO: 515709 - RNA, 19 nt, Homo sapiens
  misc_RNA (1)...(19): siRNA sense strand
gaagaugggacaccuugug

SEQ ID NO: 515710 - RNA, 19 nt, Homo sapiens
  misc_RNA (1)...(19): siRNA sense strand
ggccgaauguguccuugaa

SEQ ID NO: 515711 - RNA, 19 nt, Homo sapiens
  misc_RNA (1)...(19): siRNA sense strand
uuuaauggcuguuacacuu

SEQ ID NO: 515712 - RNA, 19 nt, Homo sapiens
  misc_RNA (1)...(19): siRNA sense strand
cuacgugaguuuaugaaau

SEQ ID NO: 515713 - RNA, 19 nt, Homo sapiens
  misc_RNA (1)...(19): siRNA sense strand
gcaguugacucauguugac

SEQ ID NO: 515714 - RNA, 19 nt, Homo sapiens
  misc_RNA (1)...(19): siRNA sense strand
ucaagaggauuuccauuuu

SEQ ID NO: 515715 - RNA, 19 nt, Homo sapiens
  misc_RNA (1)...(19): siRNA sense strand
gacagcaucagacaaauau

SEQ ID NO: 515716 - RNA, 19 nt, Homo sapiens
  misc_RNA (1)...(19): siRNA sense strand
ggaggaggcgugaaugaau

SEQ ID NO: 515717 - RNA, 19 nt, Homo sapiens
  misc_RNA (1)...(19): siRNA sense strand
aauccagacuguuugaauu

SEQ ID NO: 515718 - RNA, 19 nt, Homo sapiens
  misc_RNA (1)...(19): siRNA sense strand
guuagcaaguggugaaugu

SEQ ID NO: 515719 - RNA, 19 nt, Homo sapiens
  misc_RNA (1)...(19): siRNA sense strand
caacaaacgggaugugcuu

SEQ ID NO: 515720 - RNA, 19 nt, Homo sapiens
  misc_RNA (1)...(19): siRNA sense strand
gacaaauauugcuaugaga

SEQ ID NO: 515721 - RNA, 19 nt, Homo sapiens
  misc_RNA (1)...(19): siRNA sense strand
ugacagcaucagacaaaua

SEQ ID NO: 515722 - RNA, 19 nt, Homo sapiens
  misc_RNA (1)...(19): siRNA sense strand
gcaggagacgccucauuga

SEQ ID NO: 515723 - RNA, 19 nt, Homo sapiens
  misc_RNA (1)...(19): siRNA sense strand
gagcagaguguuguaagaa

SEQ ID NO: 515724 - RNA, 19 nt, Homo sapiens
  misc_RNA (1)...(19): siRNA sense strand
ugacaacaaguuugccaua

SEQ ID NO: 515725 - RNA, 19 nt, Homo sapiens
  misc_RNA (1)...(19): siRNA sense strand
acacauggauacagugcaa

SEQ ID NO: 515726 - RNA, 19 nt, Homo sapiens
  misc_RNA (1)...(19): siRNA sense strand
aaagacacauggauacagu

SEQ ID NO: 515727 - RNA, 19 nt, Homo sapiens
  misc_RNA (1)...(19): siRNA sense strand
ggagaggagugugauugug

SEQ ID NO: 515728 - RNA, 19 nt, Homo sapiens
  misc_RNA (1)...(19): siRNA sense strand
ggagggauuuuaucaaaga

SEQ ID NO: 515729 - RNA, 19 nt, Homo sapiens
  misc_RNA (1)...(19): siRNA sense strand
ucgauauccucguaaugua

SEQ ID NO: 515730 - RNA, 19 nt, Homo sapiens
  misc_RNA (1)...(19): siRNA sense strand
guucugauugcaacacuua

SEQ ID NO: 515731 - RNA, 19 nt, Homo sapiens
  misc_RNA (1)...(19): siRNA sense strand
cgugaaacgugcucaggaa

SEQ ID NO: 515732 - RNA, 19 nt, Homo sapiens
  misc_RNA (1)...(19): siRNA sense strand
gguauuaucucagacaaaa

SEQ ID NO: 515733 - RNA, 19 nt, Homo sapiens
  misc_RNA (1)...(19): siRNA sense strand
caacuuaagaccaggauag

SEQ ID NO: 515734 - RNA, 19 nt, Homo sapiens
  misc_RNA (1)...(19): siRNA sense strand
cagcaucagacaaauauug

SEQ ID NO: 515735 - RNA, 19 nt, Homo sapiens
  misc_RNA (1)...(19): siRNA sense strand
gaaaaugggcgaccucgaa

SEQ ID NO: 515736 - RNA, 19 nt, Homo sapiens
  misc_RNA (1)...(19): siRNA sense strand
gcaguaaugagcugaagug

SEQ ID NO: 515737 - RNA, 19 nt, Homo sapiens
  misc_RNA (1)...(19): siRNA sense strand
gaaggagcagaguguugua

SEQ ID NO: 515738 - RNA, 19 nt, Homo sapiens
  misc_RNA (1)...(19): siRNA sense strand
gaaaggauuccagacacaa

SEQ ID NO: 515739 - RNA, 19 nt, Homo sapiens
  misc_RNA (1)...(19): siRNA sense strand
uuacuucccucacaaugau

SEQ ID NO: 515740 - RNA, 19 nt, Homo sapiens
  misc_RNA (1)...(19): siRNA sense strand
agaacucgauggugaaauc

SEQ ID NO: 515741 - RNA, 19 nt, Homo sapiens
  misc_RNA (1)...(19): siRNA sense strand
ggugaacauggcagauuua

SEQ ID NO: 515742 - RNA, 19 nt, Homo sapiens
  misc_RNA (1)...(19): siRNA sense strand
ugaaaggauuccagacaca

SEQ ID NO: 515743 - RNA, 19 nt, Homo sapiens
  misc_RNA (1)...(19): siRNA sense strand
caaggaagaacauuaaacu

SEQ ID NO: 515744 - RNA, 19 nt, Homo sapiens
  misc_RNA (1)...(19): siRNA sense strand
gugacggucuuugcuguaa

SEQ ID NO: 515745 - RNA, 19 nt, Homo sapiens
  misc_RNA (1)...(19): siRNA sense strand
gcaaguggugaauguaaau

SEQ ID NO: 515746 - RNA, 19 nt, Homo sapiens
  misc_RNA (1)...(19): siRNA sense strand
gaaaaucagaggcaaaaga

SEQ ID NO: 515747 - RNA, 19 nt, Homo sapiens
  misc_RNA (1)...(19): siRNA sense strand
gauuugcuguccucugaau

SEQ ID NO: 515748 - RNA, 19 nt, Homo sapiens
  misc_RNA (1)...(19): siRNA sense strand
ugauggagcuagagaagag

SEQ ID NO: 515749 - RNA, 19 nt, Homo sapiens
  misc_RNA (1)...(19): siRNA sense strand
acacuuacuucccucacaa

SEQ ID NO: 515750 - RNA, 19 nt, Homo sapiens
  misc_RNA (1)...(19): siRNA sense strand
aaauggaguuugcaguaau

SEQ ID NO: 515751 - RNA, 19 nt, Homo sapiens
  misc_RNA (1)...(19): siRNA sense strand
ccaaaugaugugcuuagaa

SEQ ID NO: 515752 - RNA, 19 nt, Homo sapiens
  misc_RNA (1)...(19): siRNA sense strand
gaacauggcagauuuaaua

SEQ ID NO: 515753 - RNA, 19 nt, Homo sapiens
  misc_RNA (1)...(19): siRNA sense strand
caacaaaccuucuaagcuu

SEQ ID NO: 515754 - RNA, 19 nt, Homo sapiens
  misc_RNA (1)...(19): siRNA sense strand
guaaugagcugaagugugu

SEQ ID NO: 515755 - RNA, 19 nt, Homo sapiens
  misc_RNA (1)...(19): siRNA sense strand
gaaauggaguuugcaguaa

SEQ ID NO: 515756 - RNA, 19 nt, Homo sapiens
  misc_RNA (1)...(19): siRNA sense strand
uaucaugacuuccugaaua

SEQ ID NO: 515757 - RNA, 19 nt, Homo sapiens
  misc_RNA (1)...(19): siRNA sense strand
gaaaucacaucuacuuuag

SEQ ID NO: 515758 - RNA, 19 nt, Homo sapiens
  misc_RNA (1)...(19): siRNA sense strand
gcaagacuguggaaguuaa

SEQ ID NO: 515759 - RNA, 19 nt, Homo sapiens
  misc_RNA (1)...(19): siRNA sense strand
gaagaaaccaaauacauug

SEQ ID NO: 515760 - RNA, 19 nt, Homo sapiens
  misc_RNA (1)...(19): siRNA sense strand
gaaacgugcucaggaaauu

SEQ ID NO: 515761 - RNA, 19 nt, Homo sapiens
  misc_RNA (1)...(19): siRNA sense strand
ggaaauggaguuugcagua

SEQ ID NO: 515762 - RNA, 19 nt, Homo sapiens
  misc_RNA (1)...(19): siRNA sense strand
gagaagcaguaaaugauug

SEQ ID NO: 515763 - RNA, 19 nt, Homo sapiens
  misc_RNA (1)...(19): siRNA sense strand
gaggaaacccugacucauu

SEQ ID NO: 515764 - RNA, 19 nt, Homo sapiens
  misc_RNA (1)...(19): siRNA sense strand
ggaauuugcuuuggaggaa

SEQ ID NO: 515765 - RNA, 19 nt, Homo sapiens
  misc_RNA (1)...(19): siRNA sense strand
gaggaggcgugaaugaauu

SEQ ID NO: 515766 - RNA, 19 nt, Homo sapiens
  misc_RNA (1)...(19): siRNA sense strand
gcuguccucugaauacaua

SEQ ID NO: 515767 - RNA, 19 nt, Homo sapiens
  misc_RNA (1)...(19): siRNA sense strand
gggagacacuggcuauuau

SEQ ID NO: 515768 - RNA, 19 nt, Homo sapiens
  misc_RNA (1)...(19): siRNA sense strand
ccaaauacauugaacugau

SEQ ID NO: 515769 - RNA, 19 nt, Homo sapiens
  misc_RNA (1)...(19): siRNA sense strand
gggaugugcuuugugguua

SEQ ID NO: 515770 - RNA, 19 nt, Homo sapiens
  misc_RNA (1)...(19): siRNA sense strand
cauaauugcuggcaccauu

SEQ ID NO: 515771 - RNA, 19 nt, Homo sapiens
  misc_RNA (1)...(19): siRNA sense strand
gaaccacacauaucucauu

SEQ ID NO: 515772 - RNA, 19 nt, Homo sapiens
  misc_RNA (1)...(19): siRNA sense strand
caaauacauugaacugaug

SEQ ID NO: 515773 - RNA, 19 nt, Homo sapiens
  misc_RNA (1)...(19): siRNA sense strand
caacaaguuugccauaucu

SEQ ID NO: 515774 - RNA, 19 nt, Homo sapiens
  misc_RNA (1)...(19): siRNA sense strand
guaaagaaggcacuauuug

SEQ ID NO: 515775 - RNA, 19 nt, Homo sapiens
  misc_RNA (1)...(19): siRNA sense strand
caaaugaugugcuuagaac

SEQ ID NO: 515776 - RNA, 19 nt, Homo sapiens
  misc_RNA (1)...(19): siRNA sense strand
gaaaggaggaggcgugaau

SEQ ID NO: 515777 - RNA, 19 nt, Homo sapiens
  misc_RNA (1)...(19): siRNA sense strand
gcagaguguuguaagaaau

SEQ ID NO: 515778 - RNA, 19 nt, Homo sapiens
  misc_RNA (1)...(19): siRNA sense strand
gagcugaagugugugugua

SEQ ID NO: 515779 - RNA, 19 nt, Homo sapiens
  misc_RNA (1)...(19): siRNA sense strand
gcagcaaggaagaacauua

SEQ ID NO: 515780 - RNA, 19 nt, Homo sapiens
  misc_RNA (1)...(19): siRNA sense strand
gauagacaaugcaaauaca

SEQ ID NO: 515781 - RNA, 19 nt, Homo sapiens
  misc_RNA (1)...(19): siRNA sense strand
aggaaacccugacucauuu

SEQ ID NO: 515782 - RNA, 19 nt, Homo sapiens
  misc_RNA (1)...(19): siRNA sense strand
gcaccaauaucauaauagg

SEQ ID NO: 515783 - RNA, 19 nt, Homo sapiens
  misc_RNA (1)...(19): siRNA sense strand
ggagcagaguguuguaaga

SEQ ID NO: 515784 - RNA, 19 nt, Homo sapiens
  misc_RNA (1)...(19): siRNA sense strand
uuacaaauccagacuguuu

SEQ ID NO: 515785 - RNA, 19 nt, Homo sapiens
  misc_RNA (1)...(19): siRNA sense strand
gaggagagcacuguuacua

SEQ ID NO: 515786 - RNA, 19 nt, Homo sapiens
  misc_RNA (1)...(19): siRNA sense strand
agacaaagacacauggaua

SEQ ID NO: 515787 - RNA, 19 nt, Homo sapiens
  misc_RNA (1)...(19): siRNA sense strand
cgaaaucuguggugaacau

SEQ ID NO: 515788 - RNA, 19 nt, Homo sapiens
  misc_RNA (1)...(19): siRNA sense strand
uguaagaaaugcaccuuga

SEQ ID NO: 515789 - RNA, 19 nt, Homo sapiens
  misc_RNA (1)...(19): siRNA sense strand
gacaacaaguuugccauau

SEQ ID NO: 515790 - RNA, 19 nt, Homo sapiens
  misc_RNA (1)...(19): siRNA sense strand
cagcaaggaagaacauuaa

SEQ ID NO: 515791 - RNA, 19 nt, Homo sapiens
  misc_RNA (1)...(19): siRNA sense strand
ggaaagacaaagacacaug

SEQ ID NO: 515792 - RNA, 19 nt, Homo sapiens
  misc_RNA (1)...(19): siRNA sense strand
gacacuggcuauuaucuuc

SEQ ID NO: 515793 - RNA, 19 nt, Homo sapiens
  misc_RNA (1)...(19): siRNA sense strand
ugacucauuuguugcauug

SEQ ID NO: 515794 - RNA, 19 nt, Homo sapiens
  misc_RNA (1)...(19): siRNA sense strand
agacaaauauugcuaugag

SEQ ID NO: 515795 - RNA, 19 nt, Homo sapiens
  misc_RNA (1)...(19): siRNA sense strand
gcaguaaaugauugugaua

SEQ ID NO: 515796 - RNA, 19 nt, Homo sapiens
  misc_RNA (1)...(19): siRNA sense strand
gaacugaugauugugaaug

SEQ ID NO: 515797 - RNA, 19 nt, Homo sapiens
  misc_RNA (1)...(19): siRNA sense strand
gaucuuccaucugaauuuc

SEQ ID NO: 515798 - RNA, 19 nt, Homo sapiens
  misc_RNA (1)...(19): siRNA sense strand
gcuaugagaaacugaauau

SEQ ID NO: 515799 - RNA, 19 nt, Homo sapiens
  misc_RNA (1)...(19): siRNA sense strand
ggugacagcaucagacaaa

SEQ ID NO: 515800 - RNA, 19 nt, Homo sapiens
  misc_RNA (1)...(19): siRNA sense strand
gagauagacaaugcaaaua

SEQ ID NO: 515801 - RNA, 19 nt, Homo sapiens
  misc_RNA (1)...(19): siRNA sense strand
ggauggauauucaugugau

SEQ ID NO: 515802 - RNA, 19 nt, Homo sapiens
  misc_RNA (1)...(19): siRNA sense strand
gaaugaucaccuuauguuu

SEQ ID NO: 515803 - RNA, 19 nt, Homo sapiens
  misc_RNA (1)...(19): siRNA sense strand
gaagaagaaaccaaauaca

SEQ ID NO: 515804 - RNA, 19 nt, Homo sapiens
  misc_RNA (1)...(19): siRNA sense strand
uggcaccaauaucauaaua

SEQ ID NO: 515805 - RNA, 19 nt, Homo sapiens
  misc_RNA (1)...(19): siRNA sense strand
acauugaacugaugauugu

SEQ ID NO: 515806 - RNA, 19 nt, Homo sapiens
  misc_RNA (1)...(19): siRNA sense strand
gaaaccaaauacauugaac

SEQ ID NO: 515807 - RNA, 19 nt, Homo sapiens
  misc_RNA (1)...(19): siRNA sense strand
ugaaugaucaccuuauguu

SEQ ID NO: 515808 - RNA, 19 nt, Homo sapiens
  misc_RNA (1)...(19): siRNA sense strand
ucacaaugaugaugcaaag

SEQ ID NO: 515809 - RNA, 19 nt, Homo sapiens
  misc_RNA (1)...(19): siRNA sense strand
gaagaugggacaccuugug

SEQ ID NO: 515810 - RNA, 19 nt, Homo sapiens
  misc_RNA (1)...(19): siRNA sense strand
ggccgaauguguccuugaa

SEQ ID NO: 515811 - RNA, 19 nt, Homo sapiens
  misc_RNA (1)...(19): siRNA sense strand
uuuaauggcuguuacacuu

SEQ ID NO: 515812 - RNA, 19 nt, Homo sapiens
  misc_RNA (1)...(19): siRNA sense strand
cuacgugaguuuaugaaau

SEQ ID NO: 515813 - RNA, 19 nt, Homo sapiens
  misc_RNA (1)...(19): siRNA sense strand
gcaguugacucauguugac

SEQ ID NO: 515814 - RNA, 19 nt, Homo sapiens
  misc_RNA (1)...(19): siRNA sense strand
ucaagaggauuuccauuuu

SEQ ID NO: 515815 - RNA, 19 nt, Homo sapiens
  misc_RNA (1)...(19): siRNA sense strand
gacagcaucagacaaauau

SEQ ID NO: 515816 - RNA, 19 nt, Homo sapiens
  misc_RNA (1)...(19): siRNA sense strand
ggaggaggcgugaaugaau

SEQ ID NO: 515817 - RNA, 19 nt, Homo sapiens
  misc_RNA (1)...(19): siRNA sense strand
aauccagacuguuugaauu

SEQ ID NO: 515818 - RNA, 19 nt, Homo sapiens
  misc_RNA (1)...(19): siRNA sense strand
guuagcaaguggugaaugu

SEQ ID NO: 515819 - RNA, 19 nt, Homo sapiens
  misc_RNA (1)...(19): siRNA sense strand
caacaaacgggaugugcuu

SEQ ID NO: 515820 - RNA, 19 nt, Homo sapiens
  misc_RNA (1)...(19): siRNA sense strand
gacaaauauugcuaugaga

SEQ ID NO: 515821 - RNA, 19 nt, Homo sapiens
  misc_RNA (1)...(19): siRNA sense strand
ugacagcaucagacaaaua

SEQ ID NO: 515822 - RNA, 19 nt, Homo sapiens
  misc_RNA (1)...(19): siRNA sense strand
gcaggagacgccucauuga

SEQ ID NO: 515823 - RNA, 19 nt, Homo sapiens
  misc_RNA (1)...(19): siRNA sense strand
gagcagaguguuguaagaa

SEQ ID NO: 515824 - RNA, 19 nt, Homo sapiens
  misc_RNA (1)...(19): siRNA sense strand
ugacaacaaguuugccaua

SEQ ID NO: 515825 - RNA, 19 nt, Homo sapiens
  misc_RNA (1)...(19): siRNA sense strand
acacauggauacagugcaa

SEQ ID NO: 515826 - RNA, 19 nt, Homo sapiens
  misc_RNA (1)...(19): siRNA sense strand
aaagacacauggauacagu

SEQ ID NO: 515827 - RNA, 19 nt, Homo sapiens
  misc_RNA (1)...(19): siRNA sense strand
ggagaggagugugauugug

SEQ ID NO: 515828 - RNA, 19 nt, Homo sapiens
  misc_RNA (1)...(19): siRNA sense strand
ggagggauuuuaucaaaga

SEQ ID NO: 515829 - RNA, 19 nt, Homo sapiens
  misc_RNA (1)...(19): siRNA sense strand
ucgauauccucguaaugua

SEQ ID NO: 515830 - RNA, 19 nt, Homo sapiens
  misc_RNA (1)...(19): siRNA sense strand
guucugauugcaacacuua

SEQ ID NO: 515831 - RNA, 19 nt, Homo sapiens
  misc_RNA (1)...(19): siRNA sense strand
cgugaaacgugcucaggaa

SEQ ID NO: 515832 - RNA, 19 nt, Homo sapiens
  misc_RNA (1)...(19): siRNA sense strand
gguauuaucucagacaaaa

SEQ ID NO: 515833 - RNA, 19 nt, Homo sapiens
  misc_RNA (1)...(19): siRNA sense strand
caacuuaagaccaggauag

SEQ ID NO: 515834 - RNA, 19 nt, Homo sapiens
  misc_RNA (1)...(19): siRNA sense strand
cagcaucagacaaauauug

SEQ ID NO: 515835 - RNA, 19 nt, Homo sapiens
  misc_RNA (1)...(19): siRNA sense strand
gaaaaugggcgaccucgaa

SEQ ID NO: 515836 - RNA, 19 nt, Homo sapiens
  misc_RNA (1)...(19): siRNA sense strand
gcaguaaugagcugaagug

SEQ ID NO: 515837 - RNA, 19 nt, Homo sapiens
  misc_RNA (1)...(19): siRNA sense strand
gaaggagcagaguguugua

SEQ ID NO: 515838 - RNA, 19 nt, Homo sapiens
  misc_RNA (1)...(19): siRNA sense strand
gaaaggauuccagacacaa

SEQ ID NO: 515839 - RNA, 19 nt, Homo sapiens
  misc_RNA (1)...(19): siRNA sense strand
uuacuucccucacaaugau

SEQ ID NO: 515840 - RNA, 19 nt, Homo sapiens
  misc_RNA (1)...(19): siRNA sense strand
agaacucgauggugaaauc

SEQ ID NO: 515841 - RNA, 19 nt, Homo sapiens
  misc_RNA (1)...(19): siRNA sense strand
ggugaacauggcagauuua

SEQ ID NO: 515842 - RNA, 19 nt, Homo sapiens
  misc_RNA (1)...(19): siRNA sense strand
ugaaaggauuccagacaca

SEQ ID NO: 515843 - RNA, 19 nt, Homo sapiens
  misc_RNA (1)...(19): siRNA sense strand
caaggaagaacauuaaacu

SEQ ID NO: 515844 - RNA, 19 nt, Homo sapiens
  misc_RNA (1)...(19): siRNA sense strand
gugacggucuuugcuguaa

SEQ ID NO: 515845 - RNA, 19 nt, Homo sapiens
  misc_RNA (1)...(19): siRNA sense strand
gcaaguggugaauguaaau

SEQ ID NO: 515846 - RNA, 19 nt, Homo sapiens
  misc_RNA (1)...(19): siRNA sense strand
gaaaaucagaggcaaaaga

SEQ ID NO: 515847 - RNA, 19 nt, Homo sapiens
  misc_RNA (1)...(19): siRNA sense strand
gauuugcuguccucugaau

SEQ ID NO: 515848 - RNA, 19 nt, Homo sapiens
  misc_RNA (1)...(19): siRNA sense strand
ugauggagcuagagaagag

SEQ ID NO: 515849 - RNA, 19 nt, Homo sapiens
  misc_RNA (1)...(19): siRNA sense strand
acacuuacuucccucacaa

SEQ ID NO: 515850 - RNA, 19 nt, Homo sapiens
  misc_RNA (1)...(19): siRNA sense strand
aaauggaguuugcaguaau

SEQ ID NO: 515851 - RNA, 19 nt, Homo sapiens
  misc_RNA (1)...(19): siRNA sense strand
ccaaaugaugugcuuagaa

SEQ ID NO: 515852 - RNA, 19 nt, Homo sapiens
  misc_RNA (1)...(19): siRNA sense strand
gaacauggcagauuuaaua

SEQ ID NO: 515853 - RNA, 19 nt, Homo sapiens
  misc_RNA (1)...(19): siRNA sense strand
caacaaaccuucuaagcuu

SEQ ID NO: 515854 - RNA, 19 nt, Homo sapiens
  misc_RNA (1)...(19): siRNA sense strand
guaaugagcugaagugugu

SEQ ID NO: 515855 - RNA, 19 nt, Homo sapiens
  misc_RNA (1)...(19): siRNA sense strand
gaaauggaguuugcaguaa

SEQ ID NO: 515856 - RNA, 19 nt, Homo sapiens
  misc_RNA (1)...(19): siRNA sense strand
uaucaugacuuccugaaua

SEQ ID NO: 515857 - RNA, 19 nt, Homo sapiens
  misc_RNA (1)...(19): siRNA sense strand
gaaaucacaucuacuuuag

SEQ ID NO: 515858 - RNA, 19 nt, Homo sapiens
  misc_RNA (1)...(19): siRNA sense strand
gcaagacuguggaaguuaa

SEQ ID NO: 515859 - RNA, 19 nt, Homo sapiens
  misc_RNA (1)...(19): siRNA sense strand
gaagaaaccaaauacauug

SEQ ID NO: 515860 - RNA, 19 nt, Homo sapiens
  misc_RNA (1)...(19): siRNA sense strand
gaaacgugcucaggaaauu

SEQ ID NO: 515861 - RNA, 19 nt, Homo sapiens
  misc_RNA (1)...(19): siRNA sense strand
ggaaauggaguuugcagua

SEQ ID NO: 515862 - RNA, 19 nt, Homo sapiens
  misc_RNA (1)...(19): siRNA sense strand
gagaagcaguaaaugauug

SEQ ID NO: 515863 - RNA, 19 nt, Homo sapiens
  misc_RNA (1)...(19): siRNA sense strand
gaggaaacccugacucauu

SEQ ID NO: 515864 - RNA, 19 nt, Homo sapiens
  misc_RNA (1)...(19): siRNA sense strand
ggaauuugcuuuggaggaa

SEQ ID NO: 515865 - RNA, 19 nt, Homo sapiens
  misc_RNA (1)...(19): siRNA sense strand
gaggaggcgugaaugaauu

SEQ ID NO: 515866 - RNA, 19 nt, Homo sapiens
  misc_RNA (1)...(19): siRNA sense strand
gcuguccucugaauacaua

SEQ ID NO: 515867 - RNA, 19 nt, Homo sapiens
  misc_RNA (1)...(19): siRNA sense strand
gggagacacuggcuauuau

SEQ ID NO: 515868 - RNA, 19 nt, Homo sapiens
  misc_RNA (1)...(19): siRNA sense strand
ccaaauacauugaacugau

SEQ ID NO: 515869 - RNA, 19 nt, Homo sapiens
  misc_RNA (1)...(19): siRNA sense strand
gggaugugcuuugugguua

SEQ ID NO: 515870 - RNA, 19 nt, Homo sapiens
  misc_RNA (1)...(19): siRNA sense strand
cauaauugcuggcaccauu

SEQ ID NO: 515871 - RNA, 19 nt, Homo sapiens
  misc_RNA (1)...(19): siRNA sense strand
gaaccacacauaucucauu

SEQ ID NO: 515872 - RNA, 19 nt, Homo sapiens
  misc_RNA (1)...(19): siRNA sense strand
caaauacauugaacugaug

SEQ ID NO: 515873 - RNA, 19 nt, Homo sapiens
  misc_RNA (1)...(19): siRNA sense strand
caacaaguuugccauaucu

SEQ ID NO: 515874 - RNA, 19 nt, Homo sapiens
  misc_RNA (1)...(19): siRNA sense strand
guaaagaaggcacuauuug

SEQ ID NO: 515875 - RNA, 19 nt, Homo sapiens
  misc_RNA (1)...(19): siRNA sense strand
caaaugaugugcuuagaac

SEQ ID NO: 515876 - RNA, 19 nt, Homo sapiens
  misc_RNA (1)...(19): siRNA sense strand
gaaaggaggaggcgugaau

SEQ ID NO: 515877 - RNA, 19 nt, Homo sapiens
  misc_RNA (1)...(19): siRNA sense strand
gcagaguguuguaagaaau

SEQ ID NO: 515878 - RNA, 19 nt, Homo sapiens
  misc_RNA (1)...(19): siRNA sense strand
gagcugaagugugugugua

SEQ ID NO: 515879 - RNA, 19 nt, Homo sapiens
  misc_RNA (1)...(19): siRNA sense strand
gcagcaaggaagaacauua

SEQ ID NO: 515880 - RNA, 19 nt, Homo sapiens
  misc_RNA (1)...(19): siRNA sense strand
gauagacaaugcaaauaca

SEQ ID NO: 515881 - RNA, 19 nt, Homo sapiens
  misc_RNA (1)...(19): siRNA sense strand
aggaaacccugacucauuu

SEQ ID NO: 515882 - RNA, 19 nt, Homo sapiens
  misc_RNA (1)...(19): siRNA sense strand
gcaccaauaucauaauagg

SEQ ID NO: 515883 - RNA, 19 nt, Homo sapiens
  misc_RNA (1)...(19): siRNA sense strand
ggagcagaguguuguaaga

SEQ ID NO: 515884 - RNA, 19 nt, Homo sapiens
  misc_RNA (1)...(19): siRNA sense strand
uuacaaauccagacuguuu

SEQ ID NO: 515885 - RNA, 19 nt, Homo sapiens
  misc_RNA (1)...(19): siRNA sense strand
gaggagagcacuguuacua

SEQ ID NO: 515886 - RNA, 19 nt, Homo sapiens
  misc_RNA (1)...(19): siRNA sense strand
agacaaagacacauggaua

SEQ ID NO: 515887 - RNA, 19 nt, Homo sapiens
  misc_RNA (1)...(19): siRNA sense strand
cgaaaucuguggugaacau

SEQ ID NO: 515888 - RNA, 19 nt, Homo sapiens
  misc_RNA (1)...(19): siRNA sense strand
uguaagaaaugcaccuuga

SEQ ID NO: 515889 - RNA, 19 nt, Homo sapiens
  misc_RNA (1)...(19): siRNA sense strand
gacaacaaguuugccauau

SEQ ID NO: 515890 - RNA, 19 nt, Homo sapiens
  misc_RNA (1)...(19): siRNA sense strand
cagcaaggaagaacauuaa

SEQ ID NO: 515891 - RNA, 19 nt, Homo sapiens
  misc_RNA (1)...(19): siRNA sense strand
ggaaagacaaagacacaug

SEQ ID NO: 515892 - RNA, 19 nt, Homo sapiens
  misc_RNA (1)...(19): siRNA sense strand
gacacuggcuauuaucuuc

SEQ ID NO: 515893 - RNA, 19 nt, Homo sapiens
  misc_RNA (1)...(19): siRNA sense strand
ugacucauuuguugcauug

SEQ ID NO: 515894 - RNA, 19 nt, Homo sapiens
  misc_RNA (1)...(19): siRNA sense strand
agacaaauauugcuaugag

SEQ ID NO: 515895 - RNA, 19 nt, Homo sapiens
  misc_RNA (1)...(19): siRNA sense strand
gcaguaaaugauugugaua

SEQ ID NO: 515896 - RNA, 19 nt, Homo sapiens
  misc_RNA (1)...(19): siRNA sense strand
gaacugaugauugugaaug

SEQ ID NO: 515897 - RNA, 19 nt, Homo sapiens
  misc_RNA (1)...(19): siRNA sense strand
gaucuuccaucugaauuuc

SEQ ID NO: 515898 - RNA, 19 nt, Homo sapiens
  misc_RNA (1)...(19): siRNA sense strand
gcuaugagaaacugaauau

SEQ ID NO: 515899 - RNA, 19 nt, Homo sapiens
  misc_RNA (1)...(19): siRNA sense strand
ggugacagcaucagacaaa

SEQ ID NO: 515900 - RNA, 19 nt, Homo sapiens
  misc_RNA (1)...(19): siRNA sense strand
gagauagacaaugcaaaua

SEQ ID NO: 515901 - RNA, 19 nt, Homo sapiens
  misc_RNA (1)...(19): siRNA sense strand
ggauggauauucaugugau

SEQ ID NO: 515902 - RNA, 19 nt, Homo sapiens
  misc_RNA (1)...(19): siRNA sense strand
gaaugaucaccuuauguuu

SEQ ID NO: 515903 - RNA, 19 nt, Homo sapiens
  misc_RNA (1)...(19): siRNA sense strand
gaagaagaaaccaaauaca

SEQ ID NO: 515904 - RNA, 19 nt, Homo sapiens
  misc_RNA (1)...(19): siRNA sense strand
uggcaccaauaucauaaua

SEQ ID NO: 515905 - RNA, 19 nt, Homo sapiens
  misc_RNA (1)...(19): siRNA sense strand
acauugaacugaugauugu

SEQ ID NO: 515906 - RNA, 19 nt, Homo sapiens
  misc_RNA (1)...(19): siRNA sense strand
gaaaccaaauacauugaac

SEQ ID NO: 515907 - RNA, 19 nt, Homo sapiens
  misc_RNA (1)...(19): siRNA sense strand
ugaaugaucaccuuauguu

SEQ ID NO: 515908 - RNA, 19 nt, Homo sapiens
  misc_RNA (1)...(19): siRNA sense strand
ucacaaugaugaugcaaag

SEQ ID NO: 515909 - RNA, 19 nt, Homo sapiens
  misc_RNA (1)...(19): siRNA sense strand
gaagaugggacaccuugug

SEQ ID NO: 515910 - RNA, 19 nt, Homo sapiens
  misc_RNA (1)...(19): siRNA sense strand
ggccgaauguguccuugaa

SEQ ID NO: 515911 - RNA, 19 nt, Homo sapiens
  misc_RNA (1)...(19): siRNA sense strand
uuuaauggcuguuacacuu

SEQ ID NO: 515912 - RNA, 19 nt, Homo sapiens
  misc_RNA (1)...(19): siRNA sense strand
cuacgugaguuuaugaaau

SEQ ID NO: 515913 - RNA, 19 nt, Homo sapiens
  misc_RNA (1)...(19): siRNA sense strand
gcaguugacucauguugac

SEQ ID NO: 515914 - RNA, 19 nt, Homo sapiens
  misc_RNA (1)...(19): siRNA sense strand
ucaagaggauuuccauuuu

SEQ ID NO: 515915 - RNA, 19 nt, Homo sapiens
  misc_RNA (1)...(19): siRNA sense strand
gacagcaucagacaaauau

SEQ ID NO: 515916 - RNA, 19 nt, Homo sapiens
  misc_RNA (1)...(19): siRNA sense strand
ggaggaggcgugaaugaau

SEQ ID NO: 515917 - RNA, 19 nt, Homo sapiens
  misc_RNA (1)...(19): siRNA sense strand
aauccagacuguuugaauu

SEQ ID NO: 515918 - RNA, 19 nt, Homo sapiens
  misc_RNA (1)...(19): siRNA sense strand
guuagcaaguggugaaugu

SEQ ID NO: 515919 - RNA, 19 nt, Homo sapiens
  misc_RNA (1)...(19): siRNA sense strand
caacaaacgggaugugcuu

SEQ ID NO: 515920 - RNA, 19 nt, Homo sapiens
  misc_RNA (1)...(19): siRNA sense strand
gacaaauauugcuaugaga

SEQ ID NO: 515921 - RNA, 19 nt, Homo sapiens
  misc_RNA (1)...(19): siRNA sense strand
ugacagcaucagacaaaua

SEQ ID NO: 515922 - RNA, 19 nt, Homo sapiens
  misc_RNA (1)...(19): siRNA sense strand
gcaggagacgccucauuga

SEQ ID NO: 515923 - RNA, 19 nt, Homo sapiens
  misc_RNA (1)...(19): siRNA sense strand
gagcagaguguuguaagaa

SEQ ID NO: 515924 - RNA, 19 nt, Homo sapiens
  misc_RNA (1)...(19): siRNA sense strand
ugacaacaaguuugccaua

SEQ ID NO: 515925 - RNA, 19 nt, Homo sapiens
  misc_RNA (1)...(19): siRNA sense strand
acacauggauacagugcaa

SEQ ID NO: 515926 - RNA, 19 nt, Homo sapiens
  misc_RNA (1)...(19): siRNA sense strand
aaagacacauggauacagu

SEQ ID NO: 515927 - RNA, 19 nt, Homo sapiens
  misc_RNA (1)...(19): siRNA sense strand
ggagaggagugugauugug

SEQ ID NO: 515928 - RNA, 19 nt, Homo sapiens
  misc_RNA (1)...(19): siRNA sense strand
ggagggauuuuaucaaaga

SEQ ID NO: 515929 - RNA, 19 nt, Homo sapiens
  misc_RNA (1)...(19): siRNA sense strand
ucgauauccucguaaugua

SEQ ID NO: 515930 - RNA, 19 nt, Homo sapiens
  misc_RNA (1)...(19): siRNA sense strand
guucugauugcaacacuua

SEQ ID NO: 515931 - RNA, 19 nt, Homo sapiens
  misc_RNA (1)...(19): siRNA sense strand
cgugaaacgugcucaggaa

SEQ ID NO: 515932 - RNA, 19 nt, Homo sapiens
  misc_RNA (1)...(19): siRNA sense strand
gguauuaucucagacaaaa

SEQ ID NO: 515933 - RNA, 19 nt, Homo sapiens
  misc_RNA (1)...(19): siRNA sense strand
caacuuaagaccaggauag

SEQ ID NO: 515934 - RNA, 19 nt, Homo sapiens
  misc_RNA (1)...(19): siRNA sense strand
cagcaucagacaaauauug

SEQ ID NO: 515935 - RNA, 19 nt, Homo sapiens
  misc_RNA (1)...(19): siRNA sense strand
gaaaaugggcgaccucgaa

SEQ ID NO: 515936 - RNA, 19 nt, Homo sapiens
  misc_RNA (1)...(19): siRNA sense strand
gcaguaaugagcugaagug

SEQ ID NO: 515937 - RNA, 19 nt, Homo sapiens
  misc_RNA (1)...(19): siRNA sense strand
gaaggagcagaguguugua

SEQ ID NO: 515938 - RNA, 19 nt, Homo sapiens
  misc_RNA (1)...(19): siRNA sense strand
gaaaggauuccagacacaa

SEQ ID NO: 515939 - RNA, 19 nt, Homo sapiens
  misc_RNA (1)...(19): siRNA sense strand
uuacuucccucacaaugau

SEQ ID NO: 515940 - RNA, 19 nt, Homo sapiens
  misc_RNA (1)...(19): siRNA sense strand
agaacucgauggugaaauc

SEQ ID NO: 515941 - RNA, 19 nt, Homo sapiens
  misc_RNA (1)...(19): siRNA sense strand
ggugaacauggcagauuua

SEQ ID NO: 515942 - RNA, 19 nt, Homo sapiens
  misc_RNA (1)...(19): siRNA sense strand
ugaaaggauuccagacaca

SEQ ID NO: 515943 - RNA, 19 nt, Homo sapiens
  misc_RNA (1)...(19): siRNA sense strand
caaggaagaacauuaaacu

SEQ ID NO: 515944 - RNA, 19 nt, Homo sapiens
  misc_RNA (1)...(19): siRNA sense strand
gugacggucuuugcuguaa

SEQ ID NO: 515945 - RNA, 19 nt, Homo sapiens
  misc_RNA (1)...(19): siRNA sense strand
gcaaguggugaauguaaau

SEQ ID NO: 515946 - RNA, 19 nt, Homo sapiens
  misc_RNA (1)...(19): siRNA sense strand
gaaaaucagaggcaaaaga

SEQ ID NO: 515947 - RNA, 19 nt, Homo sapiens
  misc_RNA (1)...(19): siRNA sense strand
gauuugcuguccucugaau

SEQ ID NO: 515948 - RNA, 19 nt, Homo sapiens
  misc_RNA (1)...(19): siRNA sense strand
ugauggagcuagagaagag

SEQ ID NO: 515949 - RNA, 19 nt, Homo sapiens
  misc_RNA (1)...(19): siRNA sense strand
acacuuacuucccucacaa

SEQ ID NO: 515950 - RNA, 19 nt, Homo sapiens
  misc_RNA (1)...(19): siRNA sense strand
aaauggaguuugcaguaau

SEQ ID NO: 515951 - RNA, 19 nt, Homo sapiens
  misc_RNA (1)...(19): siRNA sense strand
ccaaaugaugugcuuagaa

SEQ ID NO: 515952 - RNA, 19 nt, Homo sapiens
  misc_RNA (1)...(19): siRNA sense strand
gaacauggcagauuuaaua

SEQ ID NO: 515953 - RNA, 19 nt, Homo sapiens
  misc_RNA (1)...(19): siRNA sense strand
caacaaaccuucuaagcuu

SEQ ID NO: 515954 - RNA, 19 nt, Homo sapiens
  misc_RNA (1)...(19): siRNA sense strand
guaaugagcugaagugugu

SEQ ID NO: 515955 - RNA, 19 nt, Homo sapiens
  misc_RNA (1)...(19): siRNA sense strand
gaaauggaguuugcaguaa

SEQ ID NO: 515956 - RNA, 19 nt, Homo sapiens
  misc_RNA (1)...(19): siRNA sense strand
uaucaugacuuccugaaua

SEQ ID NO: 515957 - RNA, 19 nt, Homo sapiens
  misc_RNA (1)...(19): siRNA sense strand
gaaaucacaucuacuuuag

SEQ ID NO: 515958 - RNA, 19 nt, Homo sapiens
  misc_RNA (1)...(19): siRNA sense strand
gcaagacuguggaaguuaa

SEQ ID NO: 515959 - RNA, 19 nt, Homo sapiens
  misc_RNA (1)...(19): siRNA sense strand
gaagaaaccaaauacauug

SEQ ID NO: 515960 - RNA, 19 nt, Homo sapiens
  misc_RNA (1)...(19): siRNA sense strand
gaaacgugcucaggaaauu

SEQ ID NO: 515961 - RNA, 19 nt, Homo sapiens
  misc_RNA (1)...(19): siRNA sense strand
ggaaauggaguuugcagua

SEQ ID NO: 515962 - RNA, 19 nt, Homo sapiens
  misc_RNA (1)...(19): siRNA sense strand
gagaagcaguaaaugauug

SEQ ID NO: 515963 - RNA, 19 nt, Homo sapiens
  misc_RNA (1)...(19): siRNA sense strand
gaggaaacccugacucauu

SEQ ID NO: 515964 - RNA, 19 nt, Homo sapiens
  misc_RNA (1)...(19): siRNA sense strand
ggaauuugcuuuggaggaa

SEQ ID NO: 515965 - RNA, 19 nt, Homo sapiens
  misc_RNA (1)...(19): siRNA sense strand
gaggaggcgugaaugaauu

SEQ ID NO: 515966 - RNA, 19 nt, Homo sapiens
  misc_RNA (1)...(19): siRNA sense strand
gcuguccucugaauacaua

SEQ ID NO: 515967 - RNA, 19 nt, Homo sapiens
  misc_RNA (1)...(19): siRNA sense strand
gggagacacuggcuauuau

SEQ ID NO: 515968 - RNA, 19 nt, Homo sapiens
  misc_RNA (1)...(19): siRNA sense strand
ccaaauacauugaacugau

SEQ ID NO: 515969 - RNA, 19 nt, Homo sapiens
  misc_RNA (1)...(19): siRNA sense strand
gggaugugcuuugugguua

SEQ ID NO: 515970 - RNA, 19 nt, Homo sapiens
  misc_RNA (1)...(19): siRNA sense strand
cauaauugcuggcaccauu

SEQ ID NO: 515971 - RNA, 19 nt, Homo sapiens
  misc_RNA (1)...(19): siRNA sense strand
gaaccacacauaucucauu

SEQ ID NO: 515972 - RNA, 19 nt, Homo sapiens
  misc_RNA (1)...(19): siRNA sense strand
caaauacauugaacugaug

SEQ ID NO: 515973 - RNA, 19 nt, Homo sapiens
  misc_RNA (1)...(19): siRNA sense strand
caacaaguuugccauaucu

SEQ ID NO: 515974 - RNA, 19 nt, Homo sapiens
  misc_RNA (1)...(19): siRNA sense strand
guaaagaaggcacuauuug

SEQ ID NO: 515975 - RNA, 19 nt, Homo sapiens
  misc_RNA (1)...(19): siRNA sense strand
caaaugaugugcuuagaac

SEQ ID NO: 515976 - RNA, 19 nt, Homo sapiens
  misc_RNA (1)...(19): siRNA sense strand
gaaaggaggaggcgugaau

SEQ ID NO: 515977 - RNA, 19 nt, Homo sapiens
  misc_RNA (1)...(19): siRNA sense strand
gcagaguguuguaagaaau

SEQ ID NO: 515978 - RNA, 19 nt, Homo sapiens
  misc_RNA (1)...(19): siRNA sense strand
gagcugaagugugugugua

SEQ ID NO: 515979 - RNA, 19 nt, Homo sapiens
  misc_RNA (1)...(19): siRNA sense strand
gcagcaaggaagaacauua

SEQ ID NO: 515980 - RNA, 19 nt, Homo sapiens
  misc_RNA (1)...(19): siRNA sense strand
gauagacaaugcaaauaca

SEQ ID NO: 515981 - RNA, 19 nt, Homo sapiens
  misc_RNA (1)...(19): siRNA sense strand
aggaaacccugacucauuu

SEQ ID NO: 515982 - RNA, 19 nt, Homo sapiens
  misc_RNA (1)...(19): siRNA sense strand
gcaccaauaucauaauagg

SEQ ID NO: 515983 - RNA, 19 nt, Homo sapiens
  misc_RNA (1)...(19): siRNA sense strand
ggagcagaguguuguaaga

SEQ ID NO: 515984 - RNA, 19 nt, Homo sapiens
  misc_RNA (1)...(19): siRNA sense strand
uuacaaauccagacuguuu

SEQ ID NO: 515985 - RNA, 19 nt, Homo sapiens
  misc_RNA (1)...(19): siRNA sense strand
gaggagagcacuguuacua

SEQ ID NO: 515986 - RNA, 19 nt, Homo sapiens
  misc_RNA (1)...(19): siRNA sense strand
agacaaagacacauggaua

SEQ ID NO: 515987 - RNA, 19 nt, Homo sapiens
  misc_RNA (1)...(19): siRNA sense strand
cgaaaucuguggugaacau

SEQ ID NO: 515988 - RNA, 19 nt, Homo sapiens
  misc_RNA (1)...(19): siRNA sense strand
uguaagaaaugcaccuuga

SEQ ID NO: 515989 - RNA, 19 nt, Homo sapiens
  misc_RNA (1)...(19): siRNA sense strand
gacaacaaguuugccauau

SEQ ID NO: 515990 - RNA, 19 nt, Homo sapiens
  misc_RNA (1)...(19): siRNA sense strand
cagcaaggaagaacauuaa

SEQ ID NO: 515991 - RNA, 19 nt, Homo sapiens
  misc_RNA (1)...(19): siRNA sense strand
ggaaagacaaagacacaug

SEQ ID NO: 515992 - RNA, 19 nt, Homo sapiens
  misc_RNA (1)...(19): siRNA sense strand
gacacuggcuauuaucuuc

SEQ ID NO: 515993 - RNA, 19 nt, Homo sapiens
  misc_RNA (1)...(19): siRNA sense strand
ugacucauuuguugcauug

SEQ ID NO: 515994 - RNA, 19 nt, Homo sapiens
  misc_RNA (1)...(19): siRNA sense strand
agacaaauauugcuaugag

SEQ ID NO: 515995 - RNA, 19 nt, Homo sapiens
  misc_RNA (1)...(19): siRNA sense strand
gcaguaaaugauugugaua

SEQ ID NO: 515996 - RNA, 19 nt, Homo sapiens
  misc_RNA (1)...(19): siRNA sense strand
gaacugaugauugugaaug

SEQ ID NO: 515997 - RNA, 19 nt, Homo sapiens
  misc_RNA (1)...(19): siRNA sense strand
gaucuuccaucugaauuuc

SEQ ID NO: 515998 - RNA, 19 nt, Homo sapiens
  misc_RNA (1)...(19): siRNA sense strand
gcuaugagaaacugaauau

SEQ ID NO: 515999 - RNA, 19 nt, Homo sapiens
  misc_RNA (1)...(19): siRNA sense strand
ggugacagcaucagacaaa

SEQ ID NO: 516000 - RNA, 19 nt, Homo sapiens
  misc_RNA (1)...(19): siRNA sense strand
gagauagacaaugcaaaua

SEQ ID NO: 516001 - RNA, 19 nt, Homo sapiens
  misc_RNA (1)...(19): siRNA sense strand
ggauggauauucaugugau

SEQ ID NO: 516002 - RNA, 19 nt, Homo sapiens
  misc_RNA (1)...(19): siRNA sense strand
gaaugaucaccuuauguuu

SEQ ID NO: 516003 - RNA, 19 nt, Homo sapiens
  misc_RNA (1)...(19): siRNA sense strand
gaagaagaaaccaaauaca

SEQ ID NO: 516004 - RNA, 19 nt, Homo sapiens
  misc_RNA (1)...(19): siRNA sense strand
uggcaccaauaucauaaua

SEQ ID NO: 516005 - RNA, 19 nt, Homo sapiens
  misc_RNA (1)...(19): siRNA sense strand
acauugaacugaugauugu

SEQ ID NO: 516006 - RNA, 19 nt, Homo sapiens
  misc_RNA (1)...(19): siRNA sense strand
gaaaccaaauacauugaac

SEQ ID NO: 516007 - RNA, 19 nt, Homo sapiens
  misc_RNA (1)...(19): siRNA sense strand
ugaaugaucaccuuauguu

SEQ ID NO: 516008 - RNA, 19 nt, Homo sapiens
  misc_RNA (1)...(19): siRNA sense strand
ucacaaugaugaugcaaag

SEQ ID NO: 516009 - RNA, 19 nt, Homo sapiens
  misc_RNA (1)...(19): siRNA sense strand
gaagaugggacaccuugug

SEQ ID NO: 516010 - RNA, 19 nt, Homo sapiens
  misc_RNA (1)...(19): siRNA sense strand
ggccgaauguguccuugaa

SEQ ID NO: 516011 - RNA, 19 nt, Homo sapiens
  misc_RNA (1)...(19): siRNA sense strand
uuuaauggcuguuacacuu

SEQ ID NO: 516012 - RNA, 19 nt, Homo sapiens
  misc_RNA (1)...(19): siRNA sense strand
cuacgugaguuuaugaaau

SEQ ID NO: 516013 - RNA, 19 nt, Homo sapiens
  misc_RNA (1)...(19): siRNA sense strand
gcaguugacucauguugac

SEQ ID NO: 516014 - RNA, 19 nt, Homo sapiens
  misc_RNA (1)...(19): siRNA sense strand
ucaagaggauuuccauuuu

SEQ ID NO: 516015 - RNA, 19 nt, Homo sapiens
  misc_RNA (1)...(19): siRNA sense strand
gacagcaucagacaaauau

SEQ ID NO: 516016 - RNA, 19 nt, Homo sapiens
  misc_RNA (1)...(19): siRNA sense strand
ggaggaggcgugaaugaau

SEQ ID NO: 516017 - RNA, 19 nt, Homo sapiens
  misc_RNA (1)...(19): siRNA sense strand
aauccagacuguuugaauu

SEQ ID NO: 516018 - RNA, 19 nt, Homo sapiens
  misc_RNA (1)...(19): siRNA sense strand
guuagcaaguggugaaugu

SEQ ID NO: 516019 - RNA, 19 nt, Homo sapiens
  misc_RNA (1)...(19): siRNA sense strand
caacaaacgggaugugcuu

SEQ ID NO: 516020 - RNA, 19 nt, Homo sapiens
  misc_RNA (1)...(19): siRNA sense strand
gacaaauauugcuaugaga

SEQ ID NO: 516021 - RNA, 19 nt, Homo sapiens
  misc_RNA (1)...(19): siRNA sense strand
ugacagcaucagacaaaua

SEQ ID NO: 516022 - RNA, 19 nt, Homo sapiens
  misc_RNA (1)...(19): siRNA sense strand
gcaggagacgccucauuga

SEQ ID NO: 516023 - RNA, 19 nt, Homo sapiens
  misc_RNA (1)...(19): siRNA sense strand
gagcagaguguuguaagaa

SEQ ID NO: 516024 - RNA, 19 nt, Homo sapiens
  misc_RNA (1)...(19): siRNA sense strand
ugacaacaaguuugccaua

SEQ ID NO: 516025 - RNA, 19 nt, Homo sapiens
  misc_RNA (1)...(19): siRNA sense strand
acacauggauacagugcaa

SEQ ID NO: 516026 - RNA, 19 nt, Homo sapiens
  misc_RNA (1)...(19): siRNA sense strand
aaagacacauggauacagu

SEQ ID NO: 516027 - RNA, 19 nt, Homo sapiens
  misc_RNA (1)...(19): siRNA sense strand
ggagaggagugugauugug

SEQ ID NO: 516028 - RNA, 19 nt, Homo sapiens
  misc_RNA (1)...(19): siRNA sense strand
ggagggauuuuaucaaaga

SEQ ID NO: 516029 - RNA, 19 nt, Homo sapiens
  misc_RNA (1)...(19): siRNA sense strand
ucgauauccucguaaugua

SEQ ID NO: 516030 - RNA, 19 nt, Homo sapiens
  misc_RNA (1)...(19): siRNA sense strand
guucugauugcaacacuua

SEQ ID NO: 516031 - RNA, 19 nt, Homo sapiens
  misc_RNA (1)...(19): siRNA sense strand
cgugaaacgugcucaggaa

SEQ ID NO: 516032 - RNA, 19 nt, Homo sapiens
  misc_RNA (1)...(19): siRNA sense strand
gguauuaucucagacaaaa

SEQ ID NO: 516033 - RNA, 19 nt, Homo sapiens
  misc_RNA (1)...(19): siRNA sense strand
caacuuaagaccaggauag

SEQ ID NO: 516034 - RNA, 19 nt, Homo sapiens
  misc_RNA (1)...(19): siRNA sense strand
cagcaucagacaaauauug

SEQ ID NO: 516035 - RNA, 19 nt, Homo sapiens
  misc_RNA (1)...(19): siRNA sense strand
gaaaaugggcgaccucgaa

SEQ ID NO: 516036 - RNA, 19 nt, Homo sapiens
  misc_RNA (1)...(19): siRNA sense strand
gcaguaaugagcugaagug

SEQ ID NO: 516037 - RNA, 19 nt, Homo sapiens
  misc_RNA (1)...(19): siRNA sense strand
gaaggagcagaguguugua

SEQ ID NO: 516038 - RNA, 19 nt, Homo sapiens
  misc_RNA (1)...(19): siRNA sense strand
gaaaggauuccagacacaa

SEQ ID NO: 516039 - RNA, 19 nt, Homo sapiens
  misc_RNA (1)...(19): siRNA sense strand
uuacuucccucacaaugau

SEQ ID NO: 516040 - RNA, 19 nt, Homo sapiens
  misc_RNA (1)...(19): siRNA sense strand
agaacucgauggugaaauc

SEQ ID NO: 516041 - RNA, 19 nt, Homo sapiens
  misc_RNA (1)...(19): siRNA sense strand
ggugaacauggcagauuua

SEQ ID NO: 516042 - RNA, 19 nt, Homo sapiens
  misc_RNA (1)...(19): siRNA sense strand
ugaaaggauuccagacaca

SEQ ID NO: 516043 - RNA, 19 nt, Homo sapiens
  misc_RNA (1)...(19): siRNA sense strand
caaggaagaacauuaaacu

SEQ ID NO: 516044 - RNA, 19 nt, Homo sapiens
  misc_RNA (1)...(19): siRNA sense strand
gugacggucuuugcuguaa

SEQ ID NO: 516045 - RNA, 19 nt, Homo sapiens
  misc_RNA (1)...(19): siRNA sense strand
gcaaguggugaauguaaau

SEQ ID NO: 516046 - RNA, 19 nt, Homo sapiens
  misc_RNA (1)...(19): siRNA sense strand
gaaaaucagaggcaaaaga

SEQ ID NO: 516047 - RNA, 19 nt, Homo sapiens
  misc_RNA (1)...(19): siRNA sense strand
gauuugcuguccucugaau

SEQ ID NO: 516048 - RNA, 19 nt, Homo sapiens
  misc_RNA (1)...(19): siRNA sense strand
ugauggagcuagagaagag

SEQ ID NO: 516049 - RNA, 19 nt, Homo sapiens
  misc_RNA (1)...(19): siRNA sense strand
acacuuacuucccucacaa

SEQ ID NO: 516050 - RNA, 19 nt, Homo sapiens
  misc_RNA (1)...(19): siRNA sense strand
aaauggaguuugcaguaau

SEQ ID NO: 516051 - RNA, 19 nt, Homo sapiens
  misc_RNA (1)...(19): siRNA sense strand
ccaaaugaugugcuuagaa

SEQ ID NO: 516052 - RNA, 19 nt, Homo sapiens
  misc_RNA (1)...(19): siRNA sense strand
gaacauggcagauuuaaua

SEQ ID NO: 516053 - RNA, 19 nt, Homo sapiens
  misc_RNA (1)...(19): siRNA sense strand
caacaaaccuucuaagcuu

SEQ ID NO: 516054 - RNA, 19 nt, Homo sapiens
  misc_RNA (1)...(19): siRNA sense strand
guaaugagcugaagugugu

SEQ ID NO: 516055 - RNA, 19 nt, Homo sapiens
  misc_RNA (1)...(19): siRNA sense strand
gaaauggaguuugcaguaa

SEQ ID NO: 516056 - RNA, 19 nt, Homo sapiens
  misc_RNA (1)...(19): siRNA sense strand
uaucaugacuuccugaaua

SEQ ID NO: 516057 - RNA, 19 nt, Homo sapiens
  misc_RNA (1)...(19): siRNA sense strand
gaaaucacaucuacuuuag

SEQ ID NO: 516058 - RNA, 19 nt, Homo sapiens
  misc_RNA (1)...(19): siRNA sense strand
gcaagacuguggaaguuaa

SEQ ID NO: 516059 - RNA, 19 nt, Homo sapiens
  misc_RNA (1)...(19): siRNA sense strand
gaagaaaccaaauacauug

SEQ ID NO: 516060 - RNA, 19 nt, Homo sapiens
  misc_RNA (1)...(19): siRNA sense strand
gaaacgugcucaggaaauu

SEQ ID NO: 516061 - RNA, 19 nt, Homo sapiens
  misc_RNA (1)...(19): siRNA sense strand
ggaaauggaguuugcagua

SEQ ID NO: 516062 - RNA, 19 nt, Homo sapiens
  misc_RNA (1)...(19): siRNA sense strand
gagaagcaguaaaugauug

SEQ ID NO: 516063 - RNA, 19 nt, Homo sapiens
  misc_RNA (1)...(19): siRNA sense strand
gaggaaacccugacucauu

SEQ ID NO: 516064 - RNA, 19 nt, Homo sapiens
  misc_RNA (1)...(19): siRNA sense strand
ggaauuugcuuuggaggaa

SEQ ID NO: 516065 - RNA, 19 nt, Homo sapiens
  misc_RNA (1)...(19): siRNA sense strand
gaggaggcgugaaugaauu

SEQ ID NO: 516066 - RNA, 19 nt, Homo sapiens
  misc_RNA (1)...(19): siRNA sense strand
gcuguccucugaauacaua

SEQ ID NO: 516067 - RNA, 19 nt, Homo sapiens
  misc_RNA (1)...(19): siRNA sense strand
gggagacacuggcuauuau

SEQ ID NO: 516068 - RNA, 19 nt, Homo sapiens
  misc_RNA (1)...(19): siRNA sense strand
ccaaauacauugaacugau

SEQ ID NO: 516069 - RNA, 19 nt, Homo sapiens
  misc_RNA (1)...(19): siRNA sense strand
gggaugugcuuugugguua

SEQ ID NO: 516070 - RNA, 19 nt, Homo sapiens
  misc_RNA (1)...(19): siRNA sense strand
cauaauugcuggcaccauu

SEQ ID NO: 516071 - RNA, 19 nt, Homo sapiens
  misc_RNA (1)...(19): siRNA sense strand
gaaccacacauaucucauu

SEQ ID NO: 516072 - RNA, 19 nt, Homo sapiens
  misc_RNA (1)...(19): siRNA sense strand
caaauacauugaacugaug

SEQ ID NO: 516073 - RNA, 19 nt, Homo sapiens
  misc_RNA (1)...(19): siRNA sense strand
caacaaguuugccauaucu

SEQ ID NO: 516074 - RNA, 19 nt, Homo sapiens
  misc_RNA (1)...(19): siRNA sense strand
guaaagaaggcacuauuug

SEQ ID NO: 516075 - RNA, 19 nt, Homo sapiens
  misc_RNA (1)...(19): siRNA sense strand
caaaugaugugcuuagaac

SEQ ID NO: 516076 - RNA, 19 nt, Homo sapiens
  misc_RNA (1)...(19): siRNA sense strand
gaaaggaggaggcgugaau

SEQ ID NO: 516077 - RNA, 19 nt, Homo sapiens
  misc_RNA (1)...(19): siRNA sense strand
gcagaguguuguaagaaau

SEQ ID NO: 516078 - RNA, 19 nt, Homo sapiens
  misc_RNA (1)...(19): siRNA sense strand
gagcugaagugugugugua

SEQ ID NO: 516079 - RNA, 19 nt, Homo sapiens
  misc_RNA (1)...(19): siRNA sense strand
gcagcaaggaagaacauua

SEQ ID NO: 516080 - RNA, 19 nt, Homo sapiens
  misc_RNA (1)...(19): siRNA sense strand
gauagacaaugcaaauaca

SEQ ID NO: 516081 - RNA, 19 nt, Homo sapiens
  misc_RNA (1)...(19): siRNA sense strand
aggaaacccugacucauuu

SEQ ID NO: 516082 - RNA, 19 nt, Homo sapiens
  misc_RNA (1)...(19): siRNA sense strand
gcaccaauaucauaauagg

SEQ ID NO: 516083 - RNA, 19 nt, Homo sapiens
  misc_RNA (1)...(19): siRNA sense strand
ggagcagaguguuguaaga

SEQ ID NO: 516084 - RNA, 19 nt, Homo sapiens
  misc_RNA (1)...(19): siRNA sense strand
uuacaaauccagacuguuu

SEQ ID NO: 516085 - RNA, 19 nt, Homo sapiens
  misc_RNA (1)...(19): siRNA sense strand
gaggagagcacuguuacua

SEQ ID NO: 516086 - RNA, 19 nt, Homo sapiens
  misc_RNA (1)...(19): siRNA sense strand
agacaaagacacauggaua

SEQ ID NO: 516087 - RNA, 19 nt, Homo sapiens
  misc_RNA (1)...(19): siRNA sense strand
cgaaaucuguggugaacau

SEQ ID NO: 516088 - RNA, 19 nt, Homo sapiens
  misc_RNA (1)...(19): siRNA sense strand
uguaagaaaugcaccuuga

SEQ ID NO: 516089 - RNA, 19 nt, Homo sapiens
  misc_RNA (1)...(19): siRNA sense strand
gacaacaaguuugccauau

SEQ ID NO: 516090 - RNA, 19 nt, Homo sapiens
  misc_RNA (1)...(19): siRNA sense strand
cagcaaggaagaacauuaa

SEQ ID NO: 516091 - RNA, 19 nt, Homo sapiens
  misc_RNA (1)...(19): siRNA sense strand
ggaaagacaaagacacaug

SEQ ID NO: 516092 - RNA, 19 nt, Homo sapiens
  misc_RNA (1)...(19): siRNA sense strand
gacacuggcuauuaucuuc

SEQ ID NO: 516093 - RNA, 19 nt, Homo sapiens
  misc_RNA (1)...(19): siRNA sense strand
ugacucauuuguugcauug

SEQ ID NO: 516094 - RNA, 19 nt, Homo sapiens
  misc_RNA (1)...(19): siRNA sense strand
agacaaauauugcuaugag

SEQ ID NO: 516095 - RNA, 19 nt, Homo sapiens
  misc_RNA (1)...(19): siRNA sense strand
gcaguaaaugauugugaua

SEQ ID NO: 516096 - RNA, 19 nt, Homo sapiens
  misc_RNA (1)...(19): siRNA sense strand
gaacugaugauugugaaug

SEQ ID NO: 516097 - RNA, 19 nt, Homo sapiens
  misc_RNA (1)...(19): siRNA sense strand
gaucuuccaucugaauuuc

SEQ ID NO: 516098 - RNA, 19 nt, Homo sapiens
  misc_RNA (1)...(19): siRNA sense strand
gcuaugagaaacugaauau

SEQ ID NO: 516099 - RNA, 19 nt, Homo sapiens
  misc_RNA (1)...(19): siRNA sense strand
ggugacagcaucagacaaa

SEQ ID NO: 516100 - RNA, 19 nt, Homo sapiens
  misc_RNA (1)...(19): siRNA sense strand
gagauagacaaugcaaaua

SEQ ID NO: 516101 - RNA, 19 nt, Homo sapiens
  misc_RNA (1)...(19): siRNA sense strand
ggauggauauucaugugau

SEQ ID NO: 516102 - RNA, 19 nt, Homo sapiens
  misc_RNA (1)...(19): siRNA sense strand
gaaugaucaccuuauguuu

SEQ ID NO: 516103 - RNA, 19 nt, Homo sapiens
  misc_RNA (1)...(19): siRNA sense strand
gaagaagaaaccaaauaca

SEQ ID NO: 516104 - RNA, 19 nt, Homo sapiens
  misc_RNA (1)...(19): siRNA sense strand
uggcaccaauaucauaaua

SEQ ID NO: 516105 - RNA, 19 nt, Homo sapiens
  misc_RNA (1)...(19): siRNA sense strand
acauugaacugaugauugu

SEQ ID NO: 516106 - RNA, 19 nt, Homo sapiens
  misc_RNA (1)...(19): siRNA sense strand
gaaaccaaauacauugaac

SEQ ID NO: 516107 - RNA, 19 nt, Homo sapiens
  misc_RNA (1)...(19): siRNA sense strand
ugaaugaucaccuuauguu

SEQ ID NO: 516108 - RNA, 19 nt, Homo sapiens
  misc_RNA (1)...(19): siRNA sense strand
ucacaaugaugaugcaaag

SEQ ID NO: 516109 - RNA, 19 nt, Homo sapiens
  misc_RNA (1)...(19): siRNA sense strand
gaagaugggacaccuugug

SEQ ID NO: 516110 - RNA, 19 nt, Homo sapiens
  misc_RNA (1)...(19): siRNA sense strand
ggccgaauguguccuugaa

SEQ ID NO: 516111 - RNA, 19 nt, Homo sapiens
  misc_RNA (1)...(19): siRNA sense strand
uuuaauggcuguuacacuu

SEQ ID NO: 516112 - RNA, 19 nt, Homo sapiens
  misc_RNA (1)...(19): siRNA sense strand
cuacgugaguuuaugaaau

SEQ ID NO: 516113 - RNA, 19 nt, Homo sapiens
  misc_RNA (1)...(19): siRNA sense strand
gcaguugacucauguugac

SEQ ID NO: 516114 - RNA, 19 nt, Homo sapiens
  misc_RNA (1)...(19): siRNA sense strand
ucaagaggauuuccauuuu

SEQ ID NO: 516115 - RNA, 19 nt, Homo sapiens
  misc_RNA (1)...(19): siRNA sense strand
gacagcaucagacaaauau

SEQ ID NO: 516116 - RNA, 19 nt, Homo sapiens
  misc_RNA (1)...(19): siRNA sense strand
ggaggaggcgugaaugaau

SEQ ID NO: 516117 - RNA, 19 nt, Homo sapiens
  misc_RNA (1)...(19): siRNA sense strand
aauccagacuguuugaauu

SEQ ID NO: 516118 - RNA, 19 nt, Homo sapiens
  misc_RNA (1)...(19): siRNA sense strand
guuagcaaguggugaaugu

SEQ ID NO: 516119 - RNA, 19 nt, Homo sapiens
  misc_RNA (1)...(19): siRNA sense strand
caacaaacgggaugugcuu

SEQ ID NO: 516120 - RNA, 19 nt, Homo sapiens
  misc_RNA (1)...(19): siRNA sense strand
gacaaauauugcuaugaga

SEQ ID NO: 516121 - RNA, 19 nt, Homo sapiens
  misc_RNA (1)...(19): siRNA sense strand
ugacagcaucagacaaaua

SEQ ID NO: 516122 - RNA, 19 nt, Homo sapiens
  misc_RNA (1)...(19): siRNA sense strand
gcaggagacgccucauuga

SEQ ID NO: 516123 - RNA, 19 nt, Homo sapiens
  misc_RNA (1)...(19): siRNA sense strand
gagcagaguguuguaagaa

SEQ ID NO: 516124 - RNA, 19 nt, Homo sapiens
  misc_RNA (1)...(19): siRNA sense strand
ugacaacaaguuugccaua

SEQ ID NO: 516125 - RNA, 19 nt, Homo sapiens
  misc_RNA (1)...(19): siRNA sense strand
acacauggauacagugcaa

SEQ ID NO: 516126 - RNA, 19 nt, Homo sapiens
  misc_RNA (1)...(19): siRNA sense strand
aaagacacauggauacagu

SEQ ID NO: 516127 - RNA, 19 nt, Homo sapiens
  misc_RNA (1)...(19): siRNA sense strand
ggagaggagugugauugug

SEQ ID NO: 516128 - RNA, 19 nt, Homo sapiens
  misc_RNA (1)...(19): siRNA sense strand
ggagggauuuuaucaaaga

SEQ ID NO: 516129 - RNA, 19 nt, Homo sapiens
  misc_RNA (1)...(19): siRNA sense strand
ucgauauccucguaaugua

SEQ ID NO: 516130 - RNA, 19 nt, Homo sapiens
  misc_RNA (1)...(19): siRNA sense strand
guucugauugcaacacuua

SEQ ID NO: 516131 - RNA, 19 nt, Homo sapiens
  misc_RNA (1)...(19): siRNA sense strand
cgugaaacgugcucaggaa

SEQ ID NO: 516132 - RNA, 19 nt, Homo sapiens
  misc_RNA (1)...(19): siRNA sense strand
gguauuaucucagacaaaa

SEQ ID NO: 516133 - RNA, 19 nt, Homo sapiens
  misc_RNA (1)...(19): siRNA sense strand
caacuuaagaccaggauag

SEQ ID NO: 516134 - RNA, 19 nt, Homo sapiens
  misc_RNA (1)...(19): siRNA sense strand
cagcaucagacaaauauug

SEQ ID NO: 516135 - RNA, 19 nt, Homo sapiens
  misc_RNA (1)...(19): siRNA sense strand
gaaaaugggcgaccucgaa

SEQ ID NO: 516136 - RNA, 19 nt, Homo sapiens
  misc_RNA (1)...(19): siRNA sense strand
gcaguaaugagcugaagug

SEQ ID NO: 516137 - RNA, 19 nt, Homo sapiens
  misc_RNA (1)...(19): siRNA sense strand
gaaggagcagaguguugua

SEQ ID NO: 516138 - RNA, 19 nt, Homo sapiens
  misc_RNA (1)...(19): siRNA sense strand
gaaaggauuccagacacaa

SEQ ID NO: 516139 - RNA, 19 nt, Homo sapiens
  misc_RNA (1)...(19): siRNA sense strand
uuacuucccucacaaugau

SEQ ID NO: 516140 - RNA, 19 nt, Homo sapiens
  misc_RNA (1)...(19): siRNA sense strand
agaacucgauggugaaauc

SEQ ID NO: 516141 - RNA, 19 nt, Homo sapiens
  misc_RNA (1)...(19): siRNA sense strand
ggugaacauggcagauuua

SEQ ID NO: 516142 - RNA, 19 nt, Homo sapiens
  misc_RNA (1)...(19): siRNA sense strand
ugaaaggauuccagacaca

SEQ ID NO: 516143 - RNA, 19 nt, Homo sapiens
  misc_RNA (1)...(19): siRNA sense strand
caaggaagaacauuaaacu

SEQ ID NO: 516144 - RNA, 19 nt, Homo sapiens
  misc_RNA (1)...(19): siRNA sense strand
gugacggucuuugcuguaa

SEQ ID NO: 516145 - RNA, 19 nt, Homo sapiens
  misc_RNA (1)...(19): siRNA sense strand
gcaaguggugaauguaaau

SEQ ID NO: 516146 - RNA, 19 nt, Homo sapiens
  misc_RNA (1)...(19): siRNA sense strand
gaaaaucagaggcaaaaga

SEQ ID NO: 516147 - RNA, 19 nt, Homo sapiens
  misc_RNA (1)...(19): siRNA sense strand
gauuugcuguccucugaau

SEQ ID NO: 516148 - RNA, 19 nt, Homo sapiens
  misc_RNA (1)...(19): siRNA sense strand
ugauggagcuagagaagag

SEQ ID NO: 516149 - RNA, 19 nt, Homo sapiens
  misc_RNA (1)...(19): siRNA sense strand
acacuuacuucccucacaa

SEQ ID NO: 516150 - RNA, 19 nt, Homo sapiens
  misc_RNA (1)...(19): siRNA sense strand
aaauggaguuugcaguaau

SEQ ID NO: 516151 - RNA, 19 nt, Homo sapiens
  misc_RNA (1)...(19): siRNA sense strand
ccaaaugaugugcuuagaa

SEQ ID NO: 516152 - RNA, 19 nt, Homo sapiens
  misc_RNA (1)...(19): siRNA sense strand
gaacauggcagauuuaaua

SEQ ID NO: 516153 - RNA, 19 nt, Homo sapiens
  misc_RNA (1)...(19): siRNA sense strand
caacaaaccuucuaagcuu

SEQ ID NO: 516154 - RNA, 19 nt, Homo sapiens
  misc_RNA (1)...(19): siRNA sense strand
guaaugagcugaagugugu

SEQ ID NO: 516155 - RNA, 19 nt, Homo sapiens
  misc_RNA (1)...(19): siRNA sense strand
gaaauggaguuugcaguaa

SEQ ID NO: 516156 - RNA, 19 nt, Homo sapiens
  misc_RNA (1)...(19): siRNA sense strand
uaucaugacuuccugaaua

SEQ ID NO: 516157 - RNA, 19 nt, Homo sapiens
  misc_RNA (1)...(19): siRNA sense strand
gaaaucacaucuacuuuag

SEQ ID NO: 516158 - RNA, 19 nt, Homo sapiens
  misc_RNA (1)...(19): siRNA sense strand
gcaagacuguggaaguuaa

SEQ ID NO: 516159 - RNA, 19 nt, Homo sapiens
  misc_RNA (1)...(19): siRNA sense strand
gaagaaaccaaauacauug

SEQ ID NO: 516160 - RNA, 19 nt, Homo sapiens
  misc_RNA (1)...(19): siRNA sense strand
gaaacgugcucaggaaauu

SEQ ID NO: 516161 - RNA, 19 nt, Homo sapiens
  misc_RNA (1)...(19): siRNA sense strand
ggaaauggaguuugcagua

SEQ ID NO: 516162 - RNA, 19 nt, Homo sapiens
  misc_RNA (1)...(19): siRNA sense strand
gagaagcaguaaaugauug

SEQ ID NO: 516163 - RNA, 19 nt, Homo sapiens
  misc_RNA (1)...(19): siRNA sense strand
gaggaaacccugacucauu

SEQ ID NO: 516164 - RNA, 19 nt, Homo sapiens
  misc_RNA (1)...(19): siRNA sense strand
ggaauuugcuuuggaggaa

SEQ ID NO: 516165 - RNA, 19 nt, Homo sapiens
  misc_RNA (1)...(19): siRNA sense strand
gaggaggcgugaaugaauu

SEQ ID NO: 516166 - RNA, 19 nt, Homo sapiens
  misc_RNA (1)...(19): siRNA sense strand
gcuguccucugaauacaua

SEQ ID NO: 516167 - RNA, 19 nt, Homo sapiens
  misc_RNA (1)...(19): siRNA sense strand
gggagacacuggcuauuau

SEQ ID NO: 516168 - RNA, 19 nt, Homo sapiens
  misc_RNA (1)...(19): siRNA sense strand
ccaaauacauugaacugau

SEQ ID NO: 516169 - RNA, 19 nt, Homo sapiens
  misc_RNA (1)...(19): siRNA sense strand
gggaugugcuuugugguua

SEQ ID NO: 516170 - RNA, 19 nt, Homo sapiens
  misc_RNA (1)...(19): siRNA sense strand
cauaauugcuggcaccauu

SEQ ID NO: 516171 - RNA, 19 nt, Homo sapiens
  misc_RNA (1)...(19): siRNA sense strand
gaaccacacauaucucauu

SEQ ID NO: 516172 - RNA, 19 nt, Homo sapiens
  misc_RNA (1)...(19): siRNA sense strand
caaauacauugaacugaug

SEQ ID NO: 516173 - RNA, 19 nt, Homo sapiens
  misc_RNA (1)...(19): siRNA sense strand
caacaaguuugccauaucu

SEQ ID NO: 516174 - RNA, 19 nt, Homo sapiens
  misc_RNA (1)...(19): siRNA sense strand
guaaagaaggcacuauuug

SEQ ID NO: 516175 - RNA, 19 nt, Homo sapiens
  misc_RNA (1)...(19): siRNA sense strand
caaaugaugugcuuagaac

SEQ ID NO: 516176 - RNA, 19 nt, Homo sapiens
  misc_RNA (1)...(19): siRNA sense strand
gaaaggaggaggcgugaau

SEQ ID NO: 516177 - RNA, 19 nt, Homo sapiens
  misc_RNA (1)...(19): siRNA sense strand
gcagaguguuguaagaaau

SEQ ID NO: 516178 - RNA, 19 nt, Homo sapiens
  misc_RNA (1)...(19): siRNA sense strand
gagcugaagugugugugua

SEQ ID NO: 516179 - RNA, 19 nt, Homo sapiens
  misc_RNA (1)...(19): siRNA sense strand
gcagcaaggaagaacauua

SEQ ID NO: 516180 - RNA, 19 nt, Homo sapiens
  misc_RNA (1)...(19): siRNA sense strand
gauagacaaugcaaauaca

SEQ ID NO: 516181 - RNA, 19 nt, Homo sapiens
  misc_RNA (1)...(19): siRNA sense strand
aggaaacccugacucauuu

SEQ ID NO: 516182 - RNA, 19 nt, Homo sapiens
  misc_RNA (1)...(19): siRNA sense strand
gcaccaauaucauaauagg

SEQ ID NO: 516183 - RNA, 19 nt, Homo sapiens
  misc_RNA (1)...(19): siRNA sense strand
ggagcagaguguuguaaga

SEQ ID NO: 516184 - RNA, 19 nt, Homo sapiens
  misc_RNA (1)...(19): siRNA sense strand
uuacaaauccagacuguuu

SEQ ID NO: 516185 - RNA, 19 nt, Homo sapiens
  misc_RNA (1)...(19): siRNA sense strand
gaggagagcacuguuacua

SEQ ID NO: 516186 - RNA, 19 nt, Homo sapiens
  misc_RNA (1)...(19): siRNA sense strand
agacaaagacacauggaua

SEQ ID NO: 516187 - RNA, 19 nt, Homo sapiens
  misc_RNA (1)...(19): siRNA sense strand
cgaaaucuguggugaacau

SEQ ID NO: 516188 - RNA, 19 nt, Homo sapiens
  misc_RNA (1)...(19): siRNA sense strand
uguaagaaaugcaccuuga

SEQ ID NO: 516189 - RNA, 19 nt, Homo sapiens
  misc_RNA (1)...(19): siRNA sense strand
gacaacaaguuugccauau

SEQ ID NO: 516190 - RNA, 19 nt, Homo sapiens
  misc_RNA (1)...(19): siRNA sense strand
cagcaaggaagaacauuaa

SEQ ID NO: 516191 - RNA, 19 nt, Homo sapiens
  misc_RNA (1)...(19): siRNA sense strand
ggaaagacaaagacacaug

SEQ ID NO: 516192 - RNA, 19 nt, Homo sapiens
  misc_RNA (1)...(19): siRNA sense strand
gacacuggcuauuaucuuc

SEQ ID NO: 516193 - RNA, 19 nt, Homo sapiens
  misc_RNA (1)...(19): siRNA sense strand
ugacucauuuguugcauug

SEQ ID NO: 516194 - RNA, 19 nt, Homo sapiens
  misc_RNA (1)...(19): siRNA sense strand
agacaaauauugcuaugag

SEQ ID NO: 516195 - RNA, 19 nt, Homo sapiens
  misc_RNA (1)...(19): siRNA sense strand
gcaguaaaugauugugaua

SEQ ID NO: 516196 - RNA, 19 nt, Homo sapiens
  misc_RNA (1)...(19): siRNA sense strand
gaacugaugauugugaaug

SEQ ID NO: 516197 - RNA, 19 nt, Homo sapiens
  misc_RNA (1)...(19): siRNA sense strand
gaucuuccaucugaauuuc

SEQ ID NO: 516198 - RNA, 19 nt, Homo sapiens
  misc_RNA (1)...(19): siRNA sense strand
gcuaugagaaacugaauau

SEQ ID NO: 516199 - RNA, 19 nt, Homo sapiens
  misc_RNA (1)...(19): siRNA sense strand
ggugacagcaucagacaaa

SEQ ID NO: 516200 - RNA, 19 nt, Homo sapiens
  misc_RNA (1)...(19): siRNA sense strand
gagauagacaaugcaaaua

SEQ ID NO: 516201 - RNA, 19 nt, Homo sapiens
  misc_RNA (1)...(19): siRNA sense strand
ggauggauauucaugugau

SEQ ID NO: 516202 - RNA, 19 nt, Homo sapiens
  misc_RNA (1)...(19): siRNA sense strand
gaaugaucaccuuauguuu

SEQ ID NO: 516203 - RNA, 19 nt, Homo sapiens
  misc_RNA (1)...(19): siRNA sense strand
gaagaagaaaccaaauaca

SEQ ID NO: 516204 - RNA, 19 nt, Homo sapiens
  misc_RNA (1)...(19): siRNA sense strand
uggcaccaauaucauaaua

SEQ ID NO: 516205 - RNA, 19 nt, Homo sapiens
  misc_RNA (1)...(19): siRNA sense strand
acauugaacugaugauugu

SEQ ID NO: 516206 - RNA, 19 nt, Homo sapiens
  misc_RNA (1)...(19): siRNA sense strand
gaaaccaaauacauugaac

SEQ ID NO: 516207 - RNA, 19 nt, Homo sapiens
  misc_RNA (1)...(19): siRNA sense strand
ugaaugaucaccuuauguu

SEQ ID NO: 516208 - RNA, 19 nt, Homo sapiens
  misc_RNA (1)...(19): siRNA sense strand
ucacaaugaugaugcaaag

SEQ ID NO: 516209 - RNA, 19 nt, Homo sapiens
  misc_RNA (1)...(19): siRNA sense strand
gaagaugggacaccuugug

SEQ ID NO: 516210 - RNA, 19 nt, Homo sapiens
  misc_RNA (1)...(19): siRNA sense strand
ggccgaauguguccuugaa

SEQ ID NO: 516211 - RNA, 19 nt, Homo sapiens
  misc_RNA (1)...(19): siRNA sense strand
uuuaauggcuguuacacuu

SEQ ID NO: 516212 - RNA, 19 nt, Homo sapiens
  misc_RNA (1)...(19): siRNA sense strand
cuacgugaguuuaugaaau

SEQ ID NO: 516213 - RNA, 19 nt, Homo sapiens
  misc_RNA (1)...(19): siRNA sense strand
gcaguugacucauguugac

SEQ ID NO: 516214 - RNA, 19 nt, Homo sapiens
  misc_RNA (1)...(19): siRNA sense strand
ucaagaggauuuccauuuu

SEQ ID NO: 516215 - RNA, 19 nt, Homo sapiens
  misc_RNA (1)...(19): siRNA sense strand
gacagcaucagacaaauau

SEQ ID NO: 516216 - RNA, 19 nt, Homo sapiens
  misc_RNA (1)...(19): siRNA sense strand
ggaggaggcgugaaugaau

SEQ ID NO: 516217 - RNA, 19 nt, Homo sapiens
  misc_RNA (1)...(19): siRNA sense strand
aauccagacuguuugaauu

SEQ ID NO: 516218 - RNA, 19 nt, Homo sapiens
  misc_RNA (1)...(19): siRNA sense strand
guuagcaaguggugaaugu

SEQ ID NO: 516219 - RNA, 19 nt, Homo sapiens
  misc_RNA (1)...(19): siRNA sense strand
caacaaacgggaugugcuu

SEQ ID NO: 516220 - RNA, 19 nt, Homo sapiens
  misc_RNA (1)...(19): siRNA sense strand
gacaaauauugcuaugaga

SEQ ID NO: 516221 - RNA, 19 nt, Homo sapiens
  misc_RNA (1)...(19): siRNA sense strand
ugacagcaucagacaaaua

SEQ ID NO: 516222 - RNA, 19 nt, Homo sapiens
  misc_RNA (1)...(19): siRNA sense strand
gcaggagacgccucauuga

SEQ ID NO: 516223 - RNA, 19 nt, Homo sapiens
  misc_RNA (1)...(19): siRNA sense strand
gagcagaguguuguaagaa

SEQ ID NO: 516224 - RNA, 19 nt, Homo sapiens
  misc_RNA (1)...(19): siRNA sense strand
ugacaacaaguuugccaua

SEQ ID NO: 516225 - RNA, 19 nt, Homo sapiens
  misc_RNA (1)...(19): siRNA sense strand
acacauggauacagugcaa

SEQ ID NO: 516226 - RNA, 19 nt, Homo sapiens
  misc_RNA (1)...(19): siRNA sense strand
aaagacacauggauacagu

SEQ ID NO: 516227 - RNA, 19 nt, Homo sapiens
  misc_RNA (1)...(19): siRNA sense strand
ggagaggagugugauugug

SEQ ID NO: 516228 - RNA, 19 nt, Homo sapiens
  misc_RNA (1)...(19): siRNA sense strand
ggagggauuuuaucaaaga

SEQ ID NO: 516229 - RNA, 19 nt, Homo sapiens
  misc_RNA (1)...(19): siRNA sense strand
ucgauauccucguaaugua

SEQ ID NO: 516230 - RNA, 19 nt, Homo sapiens
  misc_RNA (1)...(19): siRNA sense strand
guucugauugcaacacuua

SEQ ID NO: 516231 - RNA, 19 nt, Homo sapiens
  misc_RNA (1)...(19): siRNA sense strand
cgugaaacgugcucaggaa

SEQ ID NO: 516232 - RNA, 19 nt, Homo sapiens
  misc_RNA (1)...(19): siRNA sense strand
gguauuaucucagacaaaa

SEQ ID NO: 516233 - RNA, 19 nt, Homo sapiens
  misc_RNA (1)...(19): siRNA sense strand
caacuuaagaccaggauag

SEQ ID NO: 516234 - RNA, 19 nt, Homo sapiens
  misc_RNA (1)...(19): siRNA sense strand
cagcaucagacaaauauug

SEQ ID NO: 516235 - RNA, 19 nt, Homo sapiens
  misc_RNA (1)...(19): siRNA sense strand
gaaaaugggcgaccucgaa

SEQ ID NO: 516236 - RNA, 19 nt, Homo sapiens
  misc_RNA (1)...(19): siRNA sense strand
gcaguaaugagcugaagug

SEQ ID NO: 516237 - RNA, 19 nt, Homo sapiens
  misc_RNA (1)...(19): siRNA sense strand
gaaggagcagaguguugua

SEQ ID NO: 516238 - RNA, 19 nt, Homo sapiens
  misc_RNA (1)...(19): siRNA sense strand
gaaaggauuccagacacaa

SEQ ID NO: 516239 - RNA, 19 nt, Homo sapiens
  misc_RNA (1)...(19): siRNA sense strand
uuacuucccucacaaugau

SEQ ID NO: 516240 - RNA, 19 nt, Homo sapiens
  misc_RNA (1)...(19): siRNA sense strand
agaacucgauggugaaauc

SEQ ID NO: 516241 - RNA, 19 nt, Homo sapiens
  misc_RNA (1)...(19): siRNA sense strand
ggugaacauggcagauuua

SEQ ID NO: 516242 - RNA, 19 nt, Homo sapiens
  misc_RNA (1)...(19): siRNA sense strand
ugaaaggauuccagacaca

SEQ ID NO: 516243 - RNA, 19 nt, Homo sapiens
  misc_RNA (1)...(19): siRNA sense strand
caaggaagaacauuaaacu

SEQ ID NO: 516244 - RNA, 19 nt, Homo sapiens
  misc_RNA (1)...(19): siRNA sense strand
gugacggucuuugcuguaa

SEQ ID NO: 516245 - RNA, 19 nt, Homo sapiens
  misc_RNA (1)...(19): siRNA sense strand
gcaaguggugaauguaaau

SEQ ID NO: 516246 - RNA, 19 nt, Homo sapiens
  misc_RNA (1)...(19): siRNA sense strand
gaaaaucagaggcaaaaga

SEQ ID NO: 516247 - RNA, 19 nt, Homo sapiens
  misc_RNA (1)...(19): siRNA sense strand
gauuugcuguccucugaau

SEQ ID NO: 516248 - RNA, 19 nt, Homo sapiens
  misc_RNA (1)...(19): siRNA sense strand
ugauggagcuagagaagag

SEQ ID NO: 516249 - RNA, 19 nt, Homo sapiens
  misc_RNA (1)...(19): siRNA sense strand
acacuuacuucccucacaa

SEQ ID NO: 516250 - RNA, 19 nt, Homo sapiens
  misc_RNA (1)...(19): siRNA sense strand
aaauggaguuugcaguaau

SEQ ID NO: 516251 - RNA, 19 nt, Homo sapiens
  misc_RNA (1)...(19): siRNA sense strand
ccaaaugaugugcuuagaa

SEQ ID NO: 516252 - RNA, 19 nt, Homo sapiens
  misc_RNA (1)...(19): siRNA sense strand
gaacauggcagauuuaaua

SEQ ID NO: 516253 - RNA, 19 nt, Homo sapiens
  misc_RNA (1)...(19): siRNA sense strand
caacaaaccuucuaagcuu

SEQ ID NO: 516254 - RNA, 19 nt, Homo sapiens
  misc_RNA (1)...(19): siRNA sense strand
guaaugagcugaagugugu

SEQ ID NO: 516255 - RNA, 19 nt, Homo sapiens
  misc_RNA (1)...(19): siRNA sense strand
gaaauggaguuugcaguaa

SEQ ID NO: 516256 - RNA, 19 nt, Homo sapiens
  misc_RNA (1)...(19): siRNA sense strand
uaucaugacuuccugaaua

SEQ ID NO: 516257 - RNA, 19 nt, Homo sapiens
  misc_RNA (1)...(19): siRNA sense strand
gaaaucacaucuacuuuag

SEQ ID NO: 516258 - RNA, 19 nt, Homo sapiens
  misc_RNA (1)...(19): siRNA sense strand
gcaagacuguggaaguuaa

SEQ ID NO: 516259 - RNA, 19 nt, Homo sapiens
  misc_RNA (1)...(19): siRNA sense strand
gaagaaaccaaauacauug

SEQ ID NO: 516260 - RNA, 19 nt, Homo sapiens
  misc_RNA (1)...(19): siRNA sense strand
gaaacgugcucaggaaauu

SEQ ID NO: 516261 - RNA, 19 nt, Homo sapiens
  misc_RNA (1)...(19): siRNA sense strand
ggaaauggaguuugcagua

SEQ ID NO: 516262 - RNA, 19 nt, Homo sapiens
  misc_RNA (1)...(19): siRNA sense strand
gagaagcaguaaaugauug

SEQ ID NO: 516263 - RNA, 19 nt, Homo sapiens
  misc_RNA (1)...(19): siRNA sense strand
gaggaaacccugacucauu

SEQ ID NO: 516264 - RNA, 19 nt, Homo sapiens
  misc_RNA (1)...(19): siRNA sense strand
ggaauuugcuuuggaggaa

SEQ ID NO: 516265 - RNA, 19 nt, Homo sapiens
  misc_RNA (1)...(19): siRNA sense strand
gaggaggcgugaaugaauu

SEQ ID NO: 516266 - RNA, 19 nt, Homo sapiens
  misc_RNA (1)...(19): siRNA sense strand
gcuguccucugaauacaua

SEQ ID NO: 516267 - RNA, 19 nt, Homo sapiens
  misc_RNA (1)...(19): siRNA sense strand
gggagacacuggcuauuau

SEQ ID NO: 516268 - RNA, 19 nt, Homo sapiens
  misc_RNA (1)...(19): siRNA sense strand
ccaaauacauugaacugau

SEQ ID NO: 516269 - RNA, 19 nt, Homo sapiens
  misc_RNA (1)...(19): siRNA sense strand
gggaugugcuuugugguua

SEQ ID NO: 516270 - RNA, 19 nt, Homo sapiens
  misc_RNA (1)...(19): siRNA sense strand
cauaauugcuggcaccauu

SEQ ID NO: 516271 - RNA, 19 nt, Homo sapiens
  misc_RNA (1)...(19): siRNA sense strand
gaaccacacauaucucauu

SEQ ID NO: 516272 - RNA, 19 nt, Homo sapiens
  misc_RNA (1)...(19): siRNA sense strand
caaauacauugaacugaug

SEQ ID NO: 516273 - RNA, 19 nt, Homo sapiens
  misc_RNA (1)...(19): siRNA sense strand
caacaaguuugccauaucu

SEQ ID NO: 516274 - RNA, 19 nt, Homo sapiens
  misc_RNA (1)...(19): siRNA sense strand
guaaagaaggcacuauuug

SEQ ID NO: 516275 - RNA, 19 nt, Homo sapiens
  misc_RNA (1)...(19): siRNA sense strand
caaaugaugugcuuagaac

SEQ ID NO: 516276 - RNA, 19 nt, Homo sapiens
  misc_RNA (1)...(19): siRNA sense strand
gaaaggaggaggcgugaau

SEQ ID NO: 516277 - RNA, 19 nt, Homo sapiens
  misc_RNA (1)...(19): siRNA sense strand
gcagaguguuguaagaaau

SEQ ID NO: 516278 - RNA, 19 nt, Homo sapiens
  misc_RNA (1)...(19): siRNA sense strand
gagcugaagugugugugua

SEQ ID NO: 516279 - RNA, 19 nt, Homo sapiens
  misc_RNA (1)...(19): siRNA sense strand
gcagcaaggaagaacauua

SEQ ID NO: 516280 - RNA, 19 nt, Homo sapiens
  misc_RNA (1)...(19): siRNA sense strand
gauagacaaugcaaauaca

SEQ ID NO: 516281 - RNA, 19 nt, Homo sapiens
  misc_RNA (1)...(19): siRNA sense strand
aggaaacccugacucauuu

SEQ ID NO: 516282 - RNA, 19 nt, Homo sapiens
  misc_RNA (1)...(19): siRNA sense strand
gcaccaauaucauaauagg

SEQ ID NO: 516283 - RNA, 19 nt, Homo sapiens
  misc_RNA (1)...(19): siRNA sense strand
ggagcagaguguuguaaga

SEQ ID NO: 516284 - RNA, 19 nt, Homo sapiens
  misc_RNA (1)...(19): siRNA sense strand
uuacaaauccagacuguuu

SEQ ID NO: 516285 - RNA, 19 nt, Homo sapiens
  misc_RNA (1)...(19): siRNA sense strand
gaggagagcacuguuacua

SEQ ID NO: 516286 - RNA, 19 nt, Homo sapiens
  misc_RNA (1)...(19): siRNA sense strand
agacaaagacacauggaua

SEQ ID NO: 516287 - RNA, 19 nt, Homo sapiens
  misc_RNA (1)...(19): siRNA sense strand
cgaaaucuguggugaacau

SEQ ID NO: 516288 - RNA, 19 nt, Homo sapiens
  misc_RNA (1)...(19): siRNA sense strand
uguaagaaaugcaccuuga

SEQ ID NO: 516289 - RNA, 19 nt, Homo sapiens
  misc_RNA (1)...(19): siRNA sense strand
gacaacaaguuugccauau

SEQ ID NO: 516290 - RNA, 19 nt, Homo sapiens
  misc_RNA (1)...(19): siRNA sense strand
cagcaaggaagaacauuaa

SEQ ID NO: 516291 - RNA, 19 nt, Homo sapiens
  misc_RNA (1)...(19): siRNA sense strand
ggaaagacaaagacacaug

SEQ ID NO: 516292 - RNA, 19 nt, Homo sapiens
  misc_RNA (1)...(19): siRNA sense strand
gacacuggcuauuaucuuc

SEQ ID NO: 516293 - RNA, 19 nt, Homo sapiens
  misc_RNA (1)...(19): siRNA sense strand
ugacucauuuguugcauug

SEQ ID NO: 516294 - RNA, 19 nt, Homo sapiens
  misc_RNA (1)...(19): siRNA sense strand
agacaaauauugcuaugag

SEQ ID NO: 516295 - RNA, 19 nt, Homo sapiens
  misc_RNA (1)...(19): siRNA sense strand
gcaguaaaugauugugaua

SEQ ID NO: 516296 - RNA, 19 nt, Homo sapiens
  misc_RNA (1)...(19): siRNA sense strand
gaacugaugauugugaaug

SEQ ID NO: 516297 - RNA, 19 nt, Homo sapiens
  misc_RNA (1)...(19): siRNA sense strand
gaucuuccaucugaauuuc

SEQ ID NO: 516298 - RNA, 19 nt, Homo sapiens
  misc_RNA (1)...(19): siRNA sense strand
gcuaugagaaacugaauau

SEQ ID NO: 516299 - RNA, 19 nt, Homo sapiens
  misc_RNA (1)...(19): siRNA sense strand
ggugacagcaucagacaaa

SEQ ID NO: 516300 - RNA, 19 nt, Homo sapiens
  misc_RNA (1)...(19): siRNA sense strand
gagauagacaaugcaaaua

SEQ ID NO: 516301 - RNA, 19 nt, Homo sapiens
  misc_RNA (1)...(19): siRNA sense strand
ggauggauauucaugugau

SEQ ID NO: 516302 - RNA, 19 nt, Homo sapiens
  misc_RNA (1)...(19): siRNA sense strand
gaaugaucaccuuauguuu

SEQ ID NO: 516303 - RNA, 19 nt, Homo sapiens
  misc_RNA (1)...(19): siRNA sense strand
gaagaagaaaccaaauaca

SEQ ID NO: 516304 - RNA, 19 nt, Homo sapiens
  misc_RNA (1)...(19): siRNA sense strand
uggcaccaauaucauaaua

SEQ ID NO: 516305 - RNA, 19 nt, Homo sapiens
  misc_RNA (1)...(19): siRNA sense strand
acauugaacugaugauugu

SEQ ID NO: 516306 - RNA, 19 nt, Homo sapiens
  misc_RNA (1)...(19): siRNA sense strand
gaaaccaaauacauugaac

SEQ ID NO: 516307 - RNA, 19 nt, Homo sapiens
  misc_RNA (1)...(19): siRNA sense strand
ugaaugaucaccuuauguu

SEQ ID NO: 516308 - RNA, 19 nt, Homo sapiens
  misc_RNA (1)...(19): siRNA sense strand
ucacaaugaugaugcaaag

SEQ ID NO: 516309 - RNA, 19 nt, Homo sapiens
  misc_RNA (1)...(19): siRNA sense strand
gaagaugggacaccuugug

SEQ ID NO: 516310 - RNA, 19 nt, Homo sapiens
  misc_RNA (1)...(19): siRNA sense strand
ggccgaauguguccuugaa

SEQ ID NO: 516311 - RNA, 19 nt, Homo sapiens
  misc_RNA (1)...(19): siRNA sense strand
uuuaauggcuguuacacuu

SEQ ID NO: 516312 - RNA, 19 nt, Homo sapiens
  misc_RNA (1)...(19): siRNA sense strand
cuacgugaguuuaugaaau

SEQ ID NO: 516313 - RNA, 19 nt, Homo sapiens
  misc_RNA (1)...(19): siRNA sense strand
gcaguugacucauguugac

SEQ ID NO: 516314 - RNA, 19 nt, Homo sapiens
  misc_RNA (1)...(19): siRNA sense strand
ucaagaggauuuccauuuu

SEQ ID NO: 516315 - RNA, 19 nt, Homo sapiens
  misc_RNA (1)...(19): siRNA sense strand
gacagcaucagacaaauau

SEQ ID NO: 516316 - RNA, 19 nt, Homo sapiens
  misc_RNA (1)...(19): siRNA sense strand
ggaggaggcgugaaugaau

SEQ ID NO: 516317 - RNA, 19 nt, Homo sapiens
  misc_RNA (1)...(19): siRNA sense strand
aauccagacuguuugaauu

SEQ ID NO: 516318 - RNA, 19 nt, Homo sapiens
  misc_RNA (1)...(19): siRNA sense strand
guuagcaaguggugaaugu

SEQ ID NO: 516319 - RNA, 19 nt, Homo sapiens
  misc_RNA (1)...(19): siRNA sense strand
caacaaacgggaugugcuu

SEQ ID NO: 516320 - RNA, 19 nt, Homo sapiens
  misc_RNA (1)...(19): siRNA sense strand
gacaaauauugcuaugaga

SEQ ID NO: 516321 - RNA, 19 nt, Homo sapiens
  misc_RNA (1)...(19): siRNA sense strand
ugacagcaucagacaaaua

SEQ ID NO: 516322 - RNA, 19 nt, Homo sapiens
  misc_RNA (1)...(19): siRNA sense strand
gcaggagacgccucauuga

SEQ ID NO: 516323 - RNA, 19 nt, Homo sapiens
  misc_RNA (1)...(19): siRNA sense strand
gagcagaguguuguaagaa

SEQ ID NO: 516324 - RNA, 19 nt, Homo sapiens
  misc_RNA (1)...(19): siRNA sense strand
ugacaacaaguuugccaua

SEQ ID NO: 516325 - RNA, 19 nt, Homo sapiens
  misc_RNA (1)...(19): siRNA sense strand
acacauggauacagugcaa

SEQ ID NO: 516326 - RNA, 19 nt, Homo sapiens
  misc_RNA (1)...(19): siRNA sense strand
aaagacacauggauacagu

SEQ ID NO: 516327 - RNA, 19 nt, Homo sapiens
  misc_RNA (1)...(19): siRNA sense strand
ggagaggagugugauugug

SEQ ID NO: 516328 - RNA, 19 nt, Homo sapiens
  misc_RNA (1)...(19): siRNA sense strand
ggagggauuuuaucaaaga

SEQ ID NO: 516329 - RNA, 19 nt, Homo sapiens
  misc_RNA (1)...(19): siRNA sense strand
ucgauauccucguaaugua

SEQ ID NO: 516330 - RNA, 19 nt, Homo sapiens
  misc_RNA (1)...(19): siRNA sense strand
guucugauugcaacacuua

SEQ ID NO: 516331 - RNA, 19 nt, Homo sapiens
  misc_RNA (1)...(19): siRNA sense strand
cgugaaacgugcucaggaa

SEQ ID NO: 516332 - RNA, 19 nt, Homo sapiens
  misc_RNA (1)...(19): siRNA sense strand
gguauuaucucagacaaaa

SEQ ID NO: 516333 - RNA, 19 nt, Homo sapiens
  misc_RNA (1)...(19): siRNA sense strand
caacuuaagaccaggauag

SEQ ID NO: 516334 - RNA, 19 nt, Homo sapiens
  misc_RNA (1)...(19): siRNA sense strand
cagcaucagacaaauauug

SEQ ID NO: 516335 - RNA, 19 nt, Homo sapiens
  misc_RNA (1)...(19): siRNA sense strand
gaaaaugggcgaccucgaa

SEQ ID NO: 516336 - RNA, 19 nt, Homo sapiens
  misc_RNA (1)...(19): siRNA sense strand
gcaguaaugagcugaagug

SEQ ID NO: 516337 - RNA, 19 nt, Homo sapiens
  misc_RNA (1)...(19): siRNA sense strand
gaaggagcagaguguugua

SEQ ID NO: 516338 - RNA, 19 nt, Homo sapiens
  misc_RNA (1)...(19): siRNA sense strand
gaaaggauuccagacacaa

SEQ ID NO: 516339 - RNA, 19 nt, Homo sapiens
  misc_RNA (1)...(19): siRNA sense strand
uuacuucccucacaaugau

SEQ ID NO: 516340 - RNA, 19 nt, Homo sapiens
  misc_RNA (1)...(19): siRNA sense strand
agaacucgauggugaaauc

SEQ ID NO: 516341 - RNA, 19 nt, Homo sapiens
  misc_RNA (1)...(19): siRNA sense strand
ggugaacauggcagauuua

SEQ ID NO: 516342 - RNA, 19 nt, Homo sapiens
  misc_RNA (1)...(19): siRNA sense strand
ugaaaggauuccagacaca

SEQ ID NO: 516343 - RNA, 19 nt, Homo sapiens
  misc_RNA (1)...(19): siRNA sense strand
caaggaagaacauuaaacu

SEQ ID NO: 516344 - RNA, 19 nt, Homo sapiens
  misc_RNA (1)...(19): siRNA sense strand
gugacggucuuugcuguaa

SEQ ID NO: 516345 - RNA, 19 nt, Homo sapiens
  misc_RNA (1)...(19): siRNA sense strand
gcaaguggugaauguaaau

SEQ ID NO: 516346 - RNA, 19 nt, Homo sapiens
  misc_RNA (1)...(19): siRNA sense strand
gaaaaucagaggcaaaaga

SEQ ID NO: 516347 - RNA, 19 nt, Homo sapiens
  misc_RNA (1)...(19): siRNA sense strand
gauuugcuguccucugaau

SEQ ID NO: 516348 - RNA, 19 nt, Homo sapiens
  misc_RNA (1)...(19): siRNA sense strand
ugauggagcuagagaagag

SEQ ID NO: 516349 - RNA, 19 nt, Homo sapiens
  misc_RNA (1)...(19): siRNA sense strand
acacuuacuucccucacaa

SEQ ID NO: 516350 - RNA, 19 nt, Homo sapiens
  misc_RNA (1)...(19): siRNA sense strand
aaauggaguuugcaguaau

SEQ ID NO: 516351 - RNA, 19 nt, Homo sapiens
  misc_RNA (1)...(19): siRNA sense strand
ccaaaugaugugcuuagaa

SEQ ID NO: 516352 - RNA, 19 nt, Homo sapiens
  misc_RNA (1)...(19): siRNA sense strand
gaacauggcagauuuaaua

SEQ ID NO: 516353 - RNA, 19 nt, Homo sapiens
  misc_RNA (1)...(19): siRNA sense strand
caacaaaccuucuaagcuu

SEQ ID NO: 516354 - RNA, 19 nt, Homo sapiens
  misc_RNA (1)...(19): siRNA sense strand
guaaugagcugaagugugu

SEQ ID NO: 516355 - RNA, 19 nt, Homo sapiens
  misc_RNA (1)...(19): siRNA sense strand
gaaauggaguuugcaguaa

SEQ ID NO: 516356 - RNA, 19 nt, Homo sapiens
  misc_RNA (1)...(19): siRNA sense strand
uaucaugacuuccugaaua

SEQ ID NO: 516357 - RNA, 19 nt, Homo sapiens
  misc_RNA (1)...(19): siRNA sense strand
gaaaucacaucuacuuuag

SEQ ID NO: 516358 - RNA, 19 nt, Homo sapiens
  misc_RNA (1)...(19): siRNA sense strand
gcaagacuguggaaguuaa

SEQ ID NO: 516359 - RNA, 19 nt, Homo sapiens
  misc_RNA (1)...(19): siRNA sense strand
gaagaaaccaaauacauug

SEQ ID NO: 516360 - RNA, 19 nt, Homo sapiens
  misc_RNA (1)...(19): siRNA sense strand
gaaacgugcucaggaaauu

SEQ ID NO: 516361 - RNA, 19 nt, Homo sapiens
  misc_RNA (1)...(19): siRNA sense strand
ggaaauggaguuugcagua

SEQ ID NO: 516362 - RNA, 19 nt, Homo sapiens
  misc_RNA (1)...(19): siRNA sense strand
gagaagcaguaaaugauug

SEQ ID NO: 516363 - RNA, 19 nt, Homo sapiens
  misc_RNA (1)...(19): siRNA sense strand
gaggaaacccugacucauu

SEQ ID NO: 516364 - RNA, 19 nt, Homo sapiens
  misc_RNA (1)...(19): siRNA sense strand
ggaauuugcuuuggaggaa

SEQ ID NO: 516365 - RNA, 19 nt, Homo sapiens
  misc_RNA (1)...(19): siRNA sense strand
gaggaggcgugaaugaauu

SEQ ID NO: 516366 - RNA, 19 nt, Homo sapiens
  misc_RNA (1)...(19): siRNA sense strand
gcuguccucugaauacaua

SEQ ID NO: 516367 - RNA, 19 nt, Homo sapiens
  misc_RNA (1)...(19): siRNA sense strand
gggagacacuggcuauuau

SEQ ID NO: 516368 - RNA, 19 nt, Homo sapiens
  misc_RNA (1)...(19): siRNA sense strand
ccaaauacauugaacugau

SEQ ID NO: 516369 - RNA, 19 nt, Homo sapiens
  misc_RNA (1)...(19): siRNA sense strand
gggaugugcuuugugguua

SEQ ID NO: 516370 - RNA, 19 nt, Homo sapiens
  misc_RNA (1)...(19): siRNA sense strand
cauaauugcuggcaccauu

SEQ ID NO: 516371 - RNA, 19 nt, Homo sapiens
  misc_RNA (1)...(19): siRNA sense strand
gaaccacacauaucucauu

SEQ ID NO: 516372 - RNA, 19 nt, Homo sapiens
  misc_RNA (1)...(19): siRNA sense strand
caaauacauugaacugaug

SEQ ID NO: 516373 - RNA, 19 nt, Homo sapiens
  misc_RNA (1)...(19): siRNA sense strand
caacaaguuugccauaucu

SEQ ID NO: 516374 - RNA, 19 nt, Homo sapiens
  misc_RNA (1)...(19): siRNA sense strand
guaaagaaggcacuauuug

SEQ ID NO: 516375 - RNA, 19 nt, Homo sapiens
  misc_RNA (1)...(19): siRNA sense strand
caaaugaugugcuuagaac

SEQ ID NO: 516376 - RNA, 19 nt, Homo sapiens
  misc_RNA (1)...(19): siRNA sense strand
gaaaggaggaggcgugaau

SEQ ID NO: 516377 - RNA, 19 nt, Homo sapiens
  misc_RNA (1)...(19): siRNA sense strand
gcagaguguuguaagaaau

SEQ ID NO: 516378 - RNA, 19 nt, Homo sapiens
  misc_RNA (1)...(19): siRNA sense strand
gagcugaagugugugugua

SEQ ID NO: 516379 - RNA, 19 nt, Homo sapiens
  misc_RNA (1)...(19): siRNA sense strand
gcagcaaggaagaacauua

SEQ ID NO: 516380 - RNA, 19 nt, Homo sapiens
  misc_RNA (1)...(19): siRNA sense strand
gauagacaaugcaaauaca

SEQ ID NO: 516381 - RNA, 19 nt, Homo sapiens
  misc_RNA (1)...(19): siRNA sense strand
aggaaacccugacucauuu

SEQ ID NO: 516382 - RNA, 19 nt, Homo sapiens
  misc_RNA (1)...(19): siRNA sense strand
gcaccaauaucauaauagg

SEQ ID NO: 516383 - RNA, 19 nt, Homo sapiens
  misc_RNA (1)...(19): siRNA sense strand
ggagcagaguguuguaaga

SEQ ID NO: 516384 - RNA, 19 nt, Homo sapiens
  misc_RNA (1)...(19): siRNA sense strand
uuacaaauccagacuguuu

SEQ ID NO: 516385 - RNA, 19 nt, Homo sapiens
  misc_RNA (1)...(19): siRNA sense strand
gaggagagcacuguuacua

SEQ ID NO: 516386 - RNA, 19 nt, Homo sapiens
  misc_RNA (1)...(19): siRNA sense strand
agacaaagacacauggaua

SEQ ID NO: 516387 - RNA, 19 nt, Homo sapiens
  misc_RNA (1)...(19): siRNA sense strand
cgaaaucuguggugaacau

SEQ ID NO: 516388 - RNA, 19 nt, Homo sapiens
  misc_RNA (1)...(19): siRNA sense strand
uguaagaaaugcaccuuga

SEQ ID NO: 516389 - RNA, 19 nt, Homo sapiens
  misc_RNA (1)...(19): siRNA sense strand
gacaacaaguuugccauau

SEQ ID NO: 516390 - RNA, 19 nt, Homo sapiens
  misc_RNA (1)...(19): siRNA sense strand
cagcaaggaagaacauuaa

SEQ ID NO: 516391 - RNA, 19 nt, Homo sapiens
  misc_RNA (1)...(19): siRNA sense strand
ggaaagacaaagacacaug

SEQ ID NO: 516392 - RNA, 19 nt, Homo sapiens
  misc_RNA (1)...(19): siRNA sense strand
gacacuggcuauuaucuuc

SEQ ID NO: 516393 - RNA, 19 nt, Homo sapiens
  misc_RNA (1)...(19): siRNA sense strand
ugacucauuuguugcauug

SEQ ID NO: 516394 - RNA, 19 nt, Homo sapiens
  misc_RNA (1)...(19): siRNA sense strand
agacaaauauugcuaugag

SEQ ID NO: 516395 - RNA, 19 nt, Homo sapiens
  misc_RNA (1)...(19): siRNA sense strand
gcaguaaaugauugugaua

SEQ ID NO: 516396 - RNA, 19 nt, Homo sapiens
  misc_RNA (1)...(19): siRNA sense strand
gaacugaugauugugaaug

SEQ ID NO: 516397 - RNA, 19 nt, Homo sapiens
  misc_RNA (1)...(19): siRNA sense strand
gaucuuccaucugaauuuc

SEQ ID NO: 516398 - RNA, 19 nt, Homo sapiens
  misc_RNA (1)...(19): siRNA sense strand
gcuaugagaaacugaauau

SEQ ID NO: 516399 - RNA, 19 nt, Homo sapiens
  misc_RNA (1)...(19): siRNA sense strand
ggugacagcaucagacaaa

SEQ ID NO: 516400 - RNA, 19 nt, Homo sapiens
  misc_RNA (1)...(19): siRNA sense strand
gagauagacaaugcaaaua

SEQ ID NO: 516401 - RNA, 19 nt, Homo sapiens
  misc_RNA (1)...(19): siRNA sense strand
ggauggauauucaugugau

SEQ ID NO: 516402 - RNA, 19 nt, Homo sapiens
  misc_RNA (1)...(19): siRNA sense strand
gaaugaucaccuuauguuu

SEQ ID NO: 516403 - RNA, 19 nt, Homo sapiens
  misc_RNA (1)...(19): siRNA sense strand
gaagaagaaaccaaauaca

SEQ ID NO: 516404 - RNA, 19 nt, Homo sapiens
  misc_RNA (1)...(19): siRNA sense strand
uggcaccaauaucauaaua

SEQ ID NO: 516405 - RNA, 19 nt, Homo sapiens
  misc_RNA (1)...(19): siRNA sense strand
acauugaacugaugauugu

SEQ ID NO: 516406 - RNA, 19 nt, Homo sapiens
  misc_RNA (1)...(19): siRNA sense strand
gaaaccaaauacauugaac

SEQ ID NO: 516407 - RNA, 19 nt, Homo sapiens
  misc_RNA (1)...(19): siRNA sense strand
ugaaugaucaccuuauguu

SEQ ID NO: 516408 - RNA, 19 nt, Homo sapiens
  misc_RNA (1)...(19): siRNA sense strand
ucacaaugaugaugcaaag

SEQ ID NO: 516409 - RNA, 19 nt, Homo sapiens
  misc_RNA (1)...(19): siRNA sense strand
gaagaugggacaccuugug

SEQ ID NO: 516410 - RNA, 19 nt, Homo sapiens
  misc_RNA (1)...(19): siRNA sense strand
ggccgaauguguccuugaa

SEQ ID NO: 516411 - RNA, 19 nt, Homo sapiens
  misc_RNA (1)...(19): siRNA sense strand
uuuaauggcuguuacacuu

SEQ ID NO: 516412 - RNA, 19 nt, Homo sapiens
  misc_RNA (1)...(19): siRNA sense strand
cuacgugaguuuaugaaau

SEQ ID NO: 516413 - RNA, 19 nt, Homo sapiens
  misc_RNA (1)...(19): siRNA sense strand
gcaguugacucauguugac

SEQ ID NO: 516414 - RNA, 19 nt, Homo sapiens
  misc_RNA (1)...(19): siRNA sense strand
ucaagaggauuuccauuuu

SEQ ID NO: 516415 - RNA, 19 nt, Homo sapiens
  misc_RNA (1)...(19): siRNA sense strand
gacagcaucagacaaauau

SEQ ID NO: 516416 - RNA, 19 nt, Homo sapiens
  misc_RNA (1)...(19): siRNA sense strand
ggaggaggcgugaaugaau

SEQ ID NO: 516417 - RNA, 19 nt, Homo sapiens
  misc_RNA (1)...(19): siRNA sense strand
aauccagacuguuugaauu

SEQ ID NO: 516418 - RNA, 19 nt, Homo sapiens
  misc_RNA (1)...(19): siRNA sense strand
guuagcaaguggugaaugu

SEQ ID NO: 516419 - RNA, 19 nt, Homo sapiens
  misc_RNA (1)...(19): siRNA sense strand
caacaaacgggaugugcuu

SEQ ID NO: 516420 - RNA, 19 nt, Homo sapiens
  misc_RNA (1)...(19): siRNA sense strand
gacaaauauugcuaugaga

SEQ ID NO: 516421 - RNA, 19 nt, Homo sapiens
  misc_RNA (1)...(19): siRNA sense strand
ugacagcaucagacaaaua

SEQ ID NO: 516422 - RNA, 19 nt, Homo sapiens
  misc_RNA (1)...(19): siRNA sense strand
gcaggagacgccucauuga

SEQ ID NO: 516423 - RNA, 19 nt, Homo sapiens
  misc_RNA (1)...(19): siRNA sense strand
gagcagaguguuguaagaa

SEQ ID NO: 516424 - RNA, 19 nt, Homo sapiens
  misc_RNA (1)...(19): siRNA sense strand
ugacaacaaguuugccaua

SEQ ID NO: 516425 - RNA, 19 nt, Homo sapiens
  misc_RNA (1)...(19): siRNA sense strand
acacauggauacagugcaa

SEQ ID NO: 516426 - RNA, 19 nt, Homo sapiens
  misc_RNA (1)...(19): siRNA sense strand
aaagacacauggauacagu

SEQ ID NO: 516427 - RNA, 19 nt, Homo sapiens
  misc_RNA (1)...(19): siRNA sense strand
ggagaggagugugauugug

SEQ ID NO: 516428 - RNA, 19 nt, Homo sapiens
  misc_RNA (1)...(19): siRNA sense strand
ggagggauuuuaucaaaga

SEQ ID NO: 516429 - RNA, 19 nt, Homo sapiens
  misc_RNA (1)...(19): siRNA sense strand
ucgauauccucguaaugua

SEQ ID NO: 516430 - RNA, 19 nt, Homo sapiens
  misc_RNA (1)...(19): siRNA sense strand
guucugauugcaacacuua

SEQ ID NO: 516431 - RNA, 19 nt, Homo sapiens
  misc_RNA (1)...(19): siRNA sense strand
cgugaaacgugcucaggaa

SEQ ID NO: 516432 - RNA, 19 nt, Homo sapiens
  misc_RNA (1)...(19): siRNA sense strand
gguauuaucucagacaaaa

SEQ ID NO: 516433 - RNA, 19 nt, Homo sapiens
  misc_RNA (1)...(19): siRNA sense strand
caacuuaagaccaggauag

SEQ ID NO: 516434 - RNA, 19 nt, Homo sapiens
  misc_RNA (1)...(19): siRNA sense strand
cagcaucagacaaauauug

SEQ ID NO: 516435 - RNA, 19 nt, Homo sapiens
  misc_RNA (1)...(19): siRNA sense strand
gaaaaugggcgaccucgaa

SEQ ID NO: 516436 - RNA, 19 nt, Homo sapiens
  misc_RNA (1)...(19): siRNA sense strand
gcaguaaugagcugaagug

SEQ ID NO: 516437 - RNA, 19 nt, Homo sapiens
  misc_RNA (1)...(19): siRNA sense strand
gaaggagcagaguguugua

SEQ ID NO: 516438 - RNA, 19 nt, Homo sapiens
  misc_RNA (1)...(19): siRNA sense strand
gaaaggauuccagacacaa

SEQ ID NO: 516439 - RNA, 19 nt, Homo sapiens
  misc_RNA (1)...(19): siRNA sense strand
uuacuucccucacaaugau

SEQ ID NO: 516440 - RNA, 19 nt, Homo sapiens
  misc_RNA (1)...(19): siRNA sense strand
agaacucgauggugaaauc

SEQ ID NO: 516441 - RNA, 19 nt, Homo sapiens
  misc_RNA (1)...(19): siRNA sense strand
ggugaacauggcagauuua

SEQ ID NO: 516442 - RNA, 19 nt, Homo sapiens
  misc_RNA (1)...(19): siRNA sense strand
ugaaaggauuccagacaca

SEQ ID NO: 516443 - RNA, 19 nt, Homo sapiens
  misc_RNA (1)...(19): siRNA sense strand
caaggaagaacauuaaacu

SEQ ID NO: 516444 - RNA, 19 nt, Homo sapiens
  misc_RNA (1)...(19): siRNA sense strand
gugacggucuuugcuguaa

SEQ ID NO: 516445 - RNA, 19 nt, Homo sapiens
  misc_RNA (1)...(19): siRNA sense strand
gcaaguggugaauguaaau

SEQ ID NO: 516446 - RNA, 19 nt, Homo sapiens
  misc_RNA (1)...(19): siRNA sense strand
gaaaaucagaggcaaaaga

SEQ ID NO: 516447 - RNA, 19 nt, Homo sapiens
  misc_RNA (1)...(19): siRNA sense strand
gauuugcuguccucugaau

SEQ ID NO: 516448 - RNA, 19 nt, Homo sapiens
  misc_RNA (1)...(19): siRNA sense strand
ugauggagcuagagaagag

SEQ ID NO: 516449 - RNA, 19 nt, Homo sapiens
  misc_RNA (1)...(19): siRNA sense strand
acacuuacuucccucacaa

SEQ ID NO: 516450 - RNA, 19 nt, Homo sapiens
  misc_RNA (1)...(19): siRNA sense strand
aaauggaguuugcaguaau

SEQ ID NO: 516451 - RNA, 19 nt, Homo sapiens
  misc_RNA (1)...(19): siRNA sense strand
ccaaaugaugugcuuagaa

SEQ ID NO: 516452 - RNA, 19 nt, Homo sapiens
  misc_RNA (1)...(19): siRNA sense strand
gaacauggcagauuuaaua

SEQ ID NO: 516453 - RNA, 19 nt, Homo sapiens
  misc_RNA (1)...(19): siRNA sense strand
caacaaaccuucuaagcuu

SEQ ID NO: 516454 - RNA, 19 nt, Homo sapiens
  misc_RNA (1)...(19): siRNA sense strand
guaaugagcugaagugugu

SEQ ID NO: 516455 - RNA, 19 nt, Homo sapiens
  misc_RNA (1)...(19): siRNA sense strand
gaaauggaguuugcaguaa

SEQ ID NO: 516456 - RNA, 19 nt, Homo sapiens
  misc_RNA (1)...(19): siRNA sense strand
uaucaugacuuccugaaua

SEQ ID NO: 516457 - RNA, 19 nt, Homo sapiens
  misc_RNA (1)...(19): siRNA sense strand
gaaaucacaucuacuuuag

SEQ ID NO: 516458 - RNA, 19 nt, Homo sapiens
  misc_RNA (1)...(19): siRNA sense strand
gcaagacuguggaaguuaa

SEQ ID NO: 516459 - RNA, 19 nt, Homo sapiens
  misc_RNA (1)...(19): siRNA sense strand
gaagaaaccaaauacauug

SEQ ID NO: 516460 - RNA, 19 nt, Homo sapiens
  misc_RNA (1)...(19): siRNA sense strand
gaaacgugcucaggaaauu

SEQ ID NO: 516461 - RNA, 19 nt, Homo sapiens
  misc_RNA (1)...(19): siRNA sense strand
ggaaauggaguuugcagua

SEQ ID NO: 516462 - RNA, 19 nt, Homo sapiens
  misc_RNA (1)...(19): siRNA sense strand
gagaagcaguaaaugauug

SEQ ID NO: 516463 - RNA, 19 nt, Homo sapiens
  misc_RNA (1)...(19): siRNA sense strand
gaggaaacccugacucauu

SEQ ID NO: 516464 - RNA, 19 nt, Homo sapiens
  misc_RNA (1)...(19): siRNA sense strand
ggaauuugcuuuggaggaa

SEQ ID NO: 516465 - RNA, 19 nt, Homo sapiens
  misc_RNA (1)...(19): siRNA sense strand
gaggaggcgugaaugaauu

SEQ ID NO: 516466 - RNA, 19 nt, Homo sapiens
  misc_RNA (1)...(19): siRNA sense strand
gcuguccucugaauacaua

SEQ ID NO: 516467 - RNA, 19 nt, Homo sapiens
  misc_RNA (1)...(19): siRNA sense strand
gggagacacuggcuauuau

SEQ ID NO: 516468 - RNA, 19 nt, Homo sapiens
  misc_RNA (1)...(19): siRNA sense strand
ccaaauacauugaacugau

SEQ ID NO: 516469 - RNA, 19 nt, Homo sapiens
  misc_RNA (1)...(19): siRNA sense strand
gggaugugcuuugugguua

SEQ ID NO: 516470 - RNA, 19 nt, Homo sapiens
  misc_RNA (1)...(19): siRNA sense strand
cauaauugcuggcaccauu

SEQ ID NO: 516471 - RNA, 19 nt, Homo sapiens
  misc_RNA (1)...(19): siRNA sense strand
gaaccacacauaucucauu

SEQ ID NO: 516472 - RNA, 19 nt, Homo sapiens
  misc_RNA (1)...(19): siRNA sense strand
caaauacauugaacugaug

SEQ ID NO: 516473 - RNA, 19 nt, Homo sapiens
  misc_RNA (1)...(19): siRNA sense strand
caacaaguuugccauaucu

SEQ ID NO: 516474 - RNA, 19 nt, Homo sapiens
  misc_RNA (1)...(19): siRNA sense strand
guaaagaaggcacuauuug

SEQ ID NO: 516475 - RNA, 19 nt, Homo sapiens
  misc_RNA (1)...(19): siRNA sense strand
caaaugaugugcuuagaac

SEQ ID NO: 516476 - RNA, 19 nt, Homo sapiens
  misc_RNA (1)...(19): siRNA sense strand
gaaaggaggaggcgugaau

SEQ ID NO: 516477 - RNA, 19 nt, Homo sapiens
  misc_RNA (1)...(19): siRNA sense strand
gcagaguguuguaagaaau

SEQ ID NO: 516478 - RNA, 19 nt, Homo sapiens
  misc_RNA (1)...(19): siRNA sense strand
gagcugaagugugugugua

SEQ ID NO: 516479 - RNA, 19 nt, Homo sapiens
  misc_RNA (1)...(19): siRNA sense strand
gcagcaaggaagaacauua

SEQ ID NO: 516480 - RNA, 19 nt, Homo sapiens
  misc_RNA (1)...(19): siRNA sense strand
gauagacaaugcaaauaca

SEQ ID NO: 516481 - RNA, 19 nt, Homo sapiens
  misc_RNA (1)...(19): siRNA sense strand
aggaaacccugacucauuu

SEQ ID NO: 516482 - RNA, 19 nt, Homo sapiens
  misc_RNA (1)...(19): siRNA sense strand
gcaccaauaucauaauagg

SEQ ID NO: 516483 - RNA, 19 nt, Homo sapiens
  misc_RNA (1)...(19): siRNA sense strand
ggagcagaguguuguaaga

SEQ ID NO: 516484 - RNA, 19 nt, Homo sapiens
  misc_RNA (1)...(19): siRNA sense strand
uuacaaauccagacuguuu

SEQ ID NO: 516485 - RNA, 19 nt, Homo sapiens
  misc_RNA (1)...(19): siRNA sense strand
gaggagagcacuguuacua

SEQ ID NO: 516486 - RNA, 19 nt, Homo sapiens
  misc_RNA (1)...(19): siRNA sense strand
agacaaagacacauggaua

SEQ ID NO: 516487 - RNA, 19 nt, Homo sapiens
  misc_RNA (1)...(19): siRNA sense strand
cgaaaucuguggugaacau

SEQ ID NO: 516488 - RNA, 19 nt, Homo sapiens
  misc_RNA (1)...(19): siRNA sense strand
uguaagaaaugcaccuuga

SEQ ID NO: 516489 - RNA, 19 nt, Homo sapiens
  misc_RNA (1)...(19): siRNA sense strand
gacaacaaguuugccauau

SEQ ID NO: 516490 - RNA, 19 nt, Homo sapiens
  misc_RNA (1)...(19): siRNA sense strand
cagcaaggaagaacauuaa

SEQ ID NO: 516491 - RNA, 19 nt, Homo sapiens
  misc_RNA (1)...(19): siRNA sense strand
ggaaagacaaagacacaug

SEQ ID NO: 516492 - RNA, 19 nt, Homo sapiens
  misc_RNA (1)...(19): siRNA sense strand
gacacuggcuauuaucuuc

SEQ ID NO: 516493 - RNA, 19 nt, Homo sapiens
  misc_RNA (1)...(19): siRNA sense strand
ugacucauuuguugcauug

SEQ ID NO: 516494 - RNA, 19 nt, Homo sapiens
  misc_RNA (1)...(19): siRNA sense strand
agacaaauauugcuaugag

SEQ ID NO: 516495 - RNA, 19 nt, Homo sapiens
  misc_RNA (1)...(19): siRNA sense strand
gcaguaaaugauugugaua

SEQ ID NO: 516496 - RNA, 19 nt, Homo sapiens
  misc_RNA (1)...(19): siRNA sense strand
gaacugaugauugugaaug

SEQ ID NO: 516497 - RNA, 19 nt, Homo sapiens
  misc_RNA (1)...(19): siRNA sense strand
gaucuuccaucugaauuuc

SEQ ID NO: 516498 - RNA, 19 nt, Homo sapiens
  misc_RNA (1)...(19): siRNA sense strand
gcuaugagaaacugaauau

SEQ ID NO: 516499 - RNA, 19 nt, Homo sapiens
  misc_RNA (1)...(19): siRNA sense strand
ggugacagcaucagacaaa

SEQ ID NO: 516500 - RNA, 19 nt, Homo sapiens
  misc_RNA (1)...(19): siRNA sense strand
gagauagacaaugcaaaua

SEQ ID NO: 516501 - RNA, 19 nt, Homo sapiens
  misc_RNA (1)...(19): siRNA sense strand
ggauggauauucaugugau

SEQ ID NO: 516502 - RNA, 19 nt, Homo sapiens
  misc_RNA (1)...(19): siRNA sense strand
gaaugaucaccuuauguuu

SEQ ID NO: 516503 - RNA, 19 nt, Homo sapiens
  misc_RNA (1)...(19): siRNA sense strand
gaagaagaaaccaaauaca

SEQ ID NO: 516504 - RNA, 19 nt, Homo sapiens
  misc_RNA (1)...(19): siRNA sense strand
uggcaccaauaucauaaua

SEQ ID NO: 516505 - RNA, 19 nt, Homo sapiens
  misc_RNA (1)...(19): siRNA sense strand
acauugaacugaugauugu

SEQ ID NO: 516506 - RNA, 19 nt, Homo sapiens
  misc_RNA (1)...(19): siRNA sense strand
gaaaccaaauacauugaac

SEQ ID NO: 516507 - RNA, 19 nt, Homo sapiens
  misc_RNA (1)...(19): siRNA sense strand
ugaaugaucaccuuauguu

SEQ ID NO: 516508 - RNA, 19 nt, Homo sapiens
  misc_RNA (1)...(19): siRNA sense strand
ucacaaugaugaugcaaag

SEQ ID NO: 516509 - RNA, 19 nt, Homo sapiens
  misc_RNA (1)...(19): siRNA sense strand
gaagaugggacaccuugug

SEQ ID NO: 516510 - RNA, 19 nt, Homo sapiens
  misc_RNA (1)...(19): siRNA sense strand
ggccgaauguguccuugaa

SEQ ID NO: 516511 - RNA, 19 nt, Homo sapiens
  misc_RNA (1)...(19): siRNA sense strand
uuuaauggcuguuacacuu

SEQ ID NO: 516512 - RNA, 19 nt, Homo sapiens
  misc_RNA (1)...(19): siRNA sense strand
cuacgugaguuuaugaaau

SEQ ID NO: 516513 - RNA, 19 nt, Homo sapiens
  misc_RNA (1)...(19): siRNA sense strand
gcaguugacucauguugac

SEQ ID NO: 516514 - RNA, 19 nt, Homo sapiens
  misc_RNA (1)...(19): siRNA sense strand
ucaagaggauuuccauuuu

SEQ ID NO: 516515 - RNA, 19 nt, Homo sapiens
  misc_RNA (1)...(19): siRNA sense strand
gacagcaucagacaaauau

SEQ ID NO: 516516 - RNA, 19 nt, Homo sapiens
  misc_RNA (1)...(19): siRNA sense strand
ggaggaggcgugaaugaau

SEQ ID NO: 516517 - RNA, 19 nt, Homo sapiens
  misc_RNA (1)...(19): siRNA sense strand
aauccagacuguuugaauu

SEQ ID NO: 516518 - RNA, 19 nt, Homo sapiens
  misc_RNA (1)...(19): siRNA sense strand
guuagcaaguggugaaugu

SEQ ID NO: 516519 - RNA, 19 nt, Homo sapiens
  misc_RNA (1)...(19): siRNA sense strand
caacaaacgggaugugcuu

SEQ ID NO: 516520 - RNA, 19 nt, Homo sapiens
  misc_RNA (1)...(19): siRNA sense strand
gacaaauauugcuaugaga

SEQ ID NO: 516521 - RNA, 19 nt, Homo sapiens
  misc_RNA (1)...(19): siRNA sense strand
ugacagcaucagacaaaua

SEQ ID NO: 516522 - RNA, 19 nt, Homo sapiens
  misc_RNA (1)...(19): siRNA sense strand
gcaggagacgccucauuga

SEQ ID NO: 516523 - RNA, 19 nt, Homo sapiens
  misc_RNA (1)...(19): siRNA sense strand
gagcagaguguuguaagaa

SEQ ID NO: 516524 - RNA, 19 nt, Homo sapiens
  misc_RNA (1)...(19): siRNA sense strand
ugacaacaaguuugccaua

SEQ ID NO: 516525 - RNA, 19 nt, Homo sapiens
  misc_RNA (1)...(19): siRNA sense strand
acacauggauacagugcaa

SEQ ID NO: 516526 - RNA, 19 nt, Homo sapiens
  misc_RNA (1)...(19): siRNA sense strand
aaagacacauggauacagu

SEQ ID NO: 516527 - RNA, 19 nt, Homo sapiens
  misc_RNA (1)...(19): siRNA sense strand
ggagaggagugugauugug

SEQ ID NO: 516528 - RNA, 19 nt, Homo sapiens
  misc_RNA (1)...(19): siRNA sense strand
ggagggauuuuaucaaaga

SEQ ID NO: 516529 - RNA, 19 nt, Homo sapiens
  misc_RNA (1)...(19): siRNA sense strand
ucgauauccucguaaugua

SEQ ID NO: 516530 - RNA, 19 nt, Homo sapiens
  misc_RNA (1)...(19): siRNA sense strand
guucugauugcaacacuua

SEQ ID NO: 516531 - RNA, 19 nt, Homo sapiens
  misc_RNA (1)...(19): siRNA sense strand
cgugaaacgugcucaggaa

SEQ ID NO: 516532 - RNA, 19 nt, Homo sapiens
  misc_RNA (1)...(19): siRNA sense strand
gguauuaucucagacaaaa

SEQ ID NO: 516533 - RNA, 19 nt, Homo sapiens
  misc_RNA (1)...(19): siRNA sense strand
caacuuaagaccaggauag

SEQ ID NO: 516534 - RNA, 19 nt, Homo sapiens
  misc_RNA (1)...(19): siRNA sense strand
cagcaucagacaaauauug

SEQ ID NO: 516535 - RNA, 19 nt, Homo sapiens
  misc_RNA (1)...(19): siRNA sense strand
gaaaaugggcgaccucgaa

SEQ ID NO: 516536 - RNA, 19 nt, Homo sapiens
  misc_RNA (1)...(19): siRNA sense strand
gcaguaaugagcugaagug

SEQ ID NO: 516537 - RNA, 19 nt, Homo sapiens
  misc_RNA (1)...(19): siRNA sense strand
gaaggagcagaguguugua

SEQ ID NO: 516538 - RNA, 19 nt, Homo sapiens
  misc_RNA (1)...(19): siRNA sense strand
gaaaggauuccagacacaa

SEQ ID NO: 516539 - RNA, 19 nt, Homo sapiens
  misc_RNA (1)...(19): siRNA sense strand
uuacuucccucacaaugau

SEQ ID NO: 516540 - RNA, 19 nt, Homo sapiens
  misc_RNA (1)...(19): siRNA sense strand
agaacucgauggugaaauc

SEQ ID NO: 516541 - RNA, 19 nt, Homo sapiens
  misc_RNA (1)...(19): siRNA sense strand
ggugaacauggcagauuua

SEQ ID NO: 516542 - RNA, 19 nt, Homo sapiens
  misc_RNA (1)...(19): siRNA sense strand
ugaaaggauuccagacaca

SEQ ID NO: 516543 - RNA, 19 nt, Homo sapiens
  misc_RNA (1)...(19): siRNA sense strand
caaggaagaacauuaaacu

SEQ ID NO: 516544 - RNA, 19 nt, Homo sapiens
  misc_RNA (1)...(19): siRNA sense strand
gugacggucuuugcuguaa

SEQ ID NO: 516545 - RNA, 19 nt, Homo sapiens
  misc_RNA (1)...(19): siRNA sense strand
gcaaguggugaauguaaau

SEQ ID NO: 516546 - RNA, 19 nt, Homo sapiens
  misc_RNA (1)...(19): siRNA sense strand
gaaaaucagaggcaaaaga

SEQ ID NO: 516547 - RNA, 19 nt, Homo sapiens
  misc_RNA (1)...(19): siRNA sense strand
gauuugcuguccucugaau

SEQ ID NO: 516548 - RNA, 19 nt, Homo sapiens
  misc_RNA (1)...(19): siRNA sense strand
ugauggagcuagagaagag

SEQ ID NO: 516549 - RNA, 19 nt, Homo sapiens
  misc_RNA (1)...(19): siRNA sense strand
acacuuacuucccucacaa

SEQ ID NO: 516550 - RNA, 19 nt, Homo sapiens
  misc_RNA (1)...(19): siRNA sense strand
aaauggaguuugcaguaau

SEQ ID NO: 516551 - RNA, 19 nt, Homo sapiens
  misc_RNA (1)...(19): siRNA sense strand
ccaaaugaugugcuuagaa

SEQ ID NO: 516552 - RNA, 19 nt, Homo sapiens
  misc_RNA (1)...(19): siRNA sense strand
gaacauggcagauuuaaua

SEQ ID NO: 516553 - RNA, 19 nt, Homo sapiens
  misc_RNA (1)...(19): siRNA sense strand
caacaaaccuucuaagcuu

SEQ ID NO: 516554 - RNA, 19 nt, Homo sapiens
  misc_RNA (1)...(19): siRNA sense strand
guaaugagcugaagugugu

SEQ ID NO: 516555 - RNA, 19 nt, Homo sapiens
  misc_RNA (1)...(19): siRNA sense strand
gaaauggaguuugcaguaa

SEQ ID NO: 516556 - RNA, 19 nt, Homo sapiens
  misc_RNA (1)...(19): siRNA sense strand
uaucaugacuuccugaaua

SEQ ID NO: 516557 - RNA, 19 nt, Homo sapiens
  misc_RNA (1)...(19): siRNA sense strand
gaaaucacaucuacuuuag

SEQ ID NO: 516558 - RNA, 19 nt, Homo sapiens
  misc_RNA (1)...(19): siRNA sense strand
gcaagacuguggaaguuaa

SEQ ID NO: 516559 - RNA, 19 nt, Homo sapiens
  misc_RNA (1)...(19): siRNA sense strand
gaagaaaccaaauacauug

SEQ ID NO: 516560 - RNA, 19 nt, Homo sapiens
  misc_RNA (1)...(19): siRNA sense strand
gaaacgugcucaggaaauu

SEQ ID NO: 516561 - RNA, 19 nt, Homo sapiens
  misc_RNA (1)...(19): siRNA sense strand
ggaaauggaguuugcagua

SEQ ID NO: 516562 - RNA, 19 nt, Homo sapiens
  misc_RNA (1)...(19): siRNA sense strand
gagaagcaguaaaugauug

SEQ ID NO: 516563 - RNA, 19 nt, Homo sapiens
  misc_RNA (1)...(19): siRNA sense strand
gaggaaacccugacucauu

SEQ ID NO: 516564 - RNA, 19 nt, Homo sapiens
  misc_RNA (1)...(19): siRNA sense strand
ggaauuugcuuuggaggaa

SEQ ID NO: 516565 - RNA, 19 nt, Homo sapiens
  misc_RNA (1)...(19): siRNA sense strand
gaggaggcgugaaugaauu

SEQ ID NO: 516566 - RNA, 19 nt, Homo sapiens
  misc_RNA (1)...(19): siRNA sense strand
gcuguccucugaauacaua

SEQ ID NO: 516567 - RNA, 19 nt, Homo sapiens
  misc_RNA (1)...(19): siRNA sense strand
gggagacacuggcuauuau

SEQ ID NO: 516568 - RNA, 19 nt, Homo sapiens
  misc_RNA (1)...(19): siRNA sense strand
ccaaauacauugaacugau

SEQ ID NO: 516569 - RNA, 19 nt, Homo sapiens
  misc_RNA (1)...(19): siRNA sense strand
gggaugugcuuugugguua

SEQ ID NO: 516570 - RNA, 19 nt, Homo sapiens
  misc_RNA (1)...(19): siRNA sense strand
cauaauugcuggcaccauu

SEQ ID NO: 516571 - RNA, 19 nt, Homo sapiens
  misc_RNA (1)...(19): siRNA sense strand
gaaccacacauaucucauu

SEQ ID NO: 516572 - RNA, 19 nt, Homo sapiens
  misc_RNA (1)...(19): siRNA sense strand
caaauacauugaacugaug

SEQ ID NO: 516573 - RNA, 19 nt, Homo sapiens
  misc_RNA (1)...(19): siRNA sense strand
caacaaguuugccauaucu

SEQ ID NO: 516574 - RNA, 19 nt, Homo sapiens
  misc_RNA (1)...(19): siRNA sense strand
guaaagaaggcacuauuug

SEQ ID NO: 516575 - RNA, 19 nt, Homo sapiens
  misc_RNA (1)...(19): siRNA sense strand
caaaugaugugcuuagaac

SEQ ID NO: 516576 - RNA, 19 nt, Homo sapiens
  misc_RNA (1)...(19): siRNA sense strand
gaaaggaggaggcgugaau

SEQ ID NO: 516577 - RNA, 19 nt, Homo sapiens
  misc_RNA (1)...(19): siRNA sense strand
gcagaguguuguaagaaau

SEQ ID NO: 516578 - RNA, 19 nt, Homo sapiens
  misc_RNA (1)...(19): siRNA sense strand
gagcugaagugugugugua

SEQ ID NO: 516579 - RNA, 19 nt, Homo sapiens
  misc_RNA (1)...(19): siRNA sense strand
gcagcaaggaagaacauua

SEQ ID NO: 516580 - RNA, 19 nt, Homo sapiens
  misc_RNA (1)...(19): siRNA sense strand
gauagacaaugcaaauaca

SEQ ID NO: 516581 - RNA, 19 nt, Homo sapiens
  misc_RNA (1)...(19): siRNA sense strand
aggaaacccugacucauuu

SEQ ID NO: 516582 - RNA, 19 nt, Homo sapiens
  misc_RNA (1)...(19): siRNA sense strand
gcaccaauaucauaauagg

SEQ ID NO: 516583 - RNA, 19 nt, Homo sapiens
  misc_RNA (1)...(19): siRNA sense strand
ggagcagaguguuguaaga

SEQ ID NO: 516584 - RNA, 19 nt, Homo sapiens
  misc_RNA (1)...(19): siRNA sense strand
uuacaaauccagacuguuu

SEQ ID NO: 516585 - RNA, 19 nt, Homo sapiens
  misc_RNA (1)...(19): siRNA sense strand
gaggagagcacuguuacua

SEQ ID NO: 516586 - RNA, 19 nt, Homo sapiens
  misc_RNA (1)...(19): siRNA sense strand
agacaaagacacauggaua

SEQ ID NO: 516587 - RNA, 19 nt, Homo sapiens
  misc_RNA (1)...(19): siRNA sense strand
cgaaaucuguggugaacau

SEQ ID NO: 516588 - RNA, 19 nt, Homo sapiens
  misc_RNA (1)...(19): siRNA sense strand
uguaagaaaugcaccuuga

SEQ ID NO: 516589 - RNA, 19 nt, Homo sapiens
  misc_RNA (1)...(19): siRNA sense strand
gacaacaaguuugccauau

SEQ ID NO: 516590 - RNA, 19 nt, Homo sapiens
  misc_RNA (1)...(19): siRNA sense strand
cagcaaggaagaacauuaa

SEQ ID NO: 516591 - RNA, 19 nt, Homo sapiens
  misc_RNA (1)...(19): siRNA sense strand
ggaaagacaaagacacaug

SEQ ID NO: 516592 - RNA, 19 nt, Homo sapiens
  misc_RNA (1)...(19): siRNA sense strand
gacacuggcuauuaucuuc

SEQ ID NO: 516593 - RNA, 19 nt, Homo sapiens
  misc_RNA (1)...(19): siRNA sense strand
ugacucauuuguugcauug

SEQ ID NO: 516594 - RNA, 19 nt, Homo sapiens
  misc_RNA (1)...(19): siRNA sense strand
agacaaauauugcuaugag

SEQ ID NO: 516595 - RNA, 19 nt, Homo sapiens
  misc_RNA (1)...(19): siRNA sense strand
gcaguaaaugauugugaua

SEQ ID NO: 516596 - RNA, 19 nt, Homo sapiens
  misc_RNA (1)...(19): siRNA sense strand
gaacugaugauugugaaug

SEQ ID NO: 516597 - RNA, 19 nt, Homo sapiens
  misc_RNA (1)...(19): siRNA sense strand
gaucuuccaucugaauuuc

SEQ ID NO: 516598 - RNA, 19 nt, Homo sapiens
  misc_RNA (1)...(19): siRNA sense strand
gcuaugagaaacugaauau

SEQ ID NO: 516599 - RNA, 19 nt, Homo sapiens
  misc_RNA (1)...(19): siRNA sense strand
ggugacagcaucagacaaa

SEQ ID NO: 516600 - RNA, 19 nt, Homo sapiens
  misc_RNA (1)...(19): siRNA sense strand
gagauagacaaugcaaaua

SEQ ID NO: 516601 - RNA, 19 nt, Homo sapiens
  misc_RNA (1)...(19): siRNA sense strand
ggauggauauucaugugau

SEQ ID NO: 516602 - RNA, 19 nt, Homo sapiens
  misc_RNA (1)...(19): siRNA sense strand
gaaugaucaccuuauguuu

SEQ ID NO: 516603 - RNA, 19 nt, Homo sapiens
  misc_RNA (1)...(19): siRNA sense strand
gaagaagaaaccaaauaca

SEQ ID NO: 516604 - RNA, 19 nt, Homo sapiens
  misc_RNA (1)...(19): siRNA sense strand
uggcaccaauaucauaaua

SEQ ID NO: 516605 - RNA, 19 nt, Homo sapiens
  misc_RNA (1)...(19): siRNA sense strand
acauugaacugaugauugu

SEQ ID NO: 516606 - RNA, 19 nt, Homo sapiens
  misc_RNA (1)...(19): siRNA sense strand
gaaaccaaauacauugaac

SEQ ID NO: 516607 - RNA, 19 nt, Homo sapiens
  misc_RNA (1)...(19): siRNA sense strand
ugaaugaucaccuuauguu

SEQ ID NO: 516608 - RNA, 19 nt, Homo sapiens
  misc_RNA (1)...(19): siRNA sense strand
ucacaaugaugaugcaaag

SEQ ID NO: 516609 - RNA, 19 nt, Homo sapiens
  misc_RNA (1)...(19): siRNA sense strand
gaagaugggacaccuugug

SEQ ID NO: 516610 - RNA, 19 nt, Homo sapiens
  misc_RNA (1)...(19): siRNA sense strand
ggccgaauguguccuugaa

SEQ ID NO: 516611 - RNA, 19 nt, Homo sapiens
  misc_RNA (1)...(19): siRNA sense strand
uuuaauggcuguuacacuu

SEQ ID NO: 516612 - RNA, 19 nt, Homo sapiens
  misc_RNA (1)...(19): siRNA sense strand
cuacgugaguuuaugaaau

SEQ ID NO: 516613 - RNA, 19 nt, Homo sapiens
  misc_RNA (1)...(19): siRNA sense strand
gcaguugacucauguugac

SEQ ID NO: 516614 - RNA, 19 nt, Homo sapiens
  misc_RNA (1)...(19): siRNA sense strand
ucaagaggauuuccauuuu

SEQ ID NO: 516615 - RNA, 19 nt, Homo sapiens
  misc_RNA (1)...(19): siRNA sense strand
gacagcaucagacaaauau

SEQ ID NO: 516616 - RNA, 19 nt, Homo sapiens
  misc_RNA (1)...(19): siRNA sense strand
ggaggaggcgugaaugaau

SEQ ID NO: 516617 - RNA, 19 nt, Homo sapiens
  misc_RNA (1)...(19): siRNA sense strand
aauccagacuguuugaauu

SEQ ID NO: 516618 - RNA, 19 nt, Homo sapiens
  misc_RNA (1)...(19): siRNA sense strand
guuagcaaguggugaaugu

SEQ ID NO: 516619 - RNA, 19 nt, Homo sapiens
  misc_RNA (1)...(19): siRNA sense strand
caacaaacgggaugugcuu

SEQ ID NO: 516620 - RNA, 19 nt, Homo sapiens
  misc_RNA (1)...(19): siRNA sense strand
gacaaauauugcuaugaga

SEQ ID NO: 516621 - RNA, 19 nt, Homo sapiens
  misc_RNA (1)...(19): siRNA sense strand
ugacagcaucagacaaaua

SEQ ID NO: 516622 - RNA, 19 nt, Homo sapiens
  misc_RNA (1)...(19): siRNA sense strand
gcaggagacgccucauuga

SEQ ID NO: 516623 - RNA, 19 nt, Homo sapiens
  misc_RNA (1)...(19): siRNA sense strand
gagcagaguguuguaagaa

SEQ ID NO: 516624 - RNA, 19 nt, Homo sapiens
  misc_RNA (1)...(19): siRNA sense strand
ugacaacaaguuugccaua

SEQ ID NO: 516625 - RNA, 19 nt, Homo sapiens
  misc_RNA (1)...(19): siRNA sense strand
acacauggauacagugcaa

SEQ ID NO: 516626 - RNA, 19 nt, Homo sapiens
  misc_RNA (1)...(19): siRNA sense strand
aaagacacauggauacagu

SEQ ID NO: 516627 - RNA, 19 nt, Homo sapiens
  misc_RNA (1)...(19): siRNA sense strand
ggagaggagugugauugug

SEQ ID NO: 516628 - RNA, 19 nt, Homo sapiens
  misc_RNA (1)...(19): siRNA sense strand
ggagggauuuuaucaaaga

SEQ ID NO: 516629 - RNA, 19 nt, Homo sapiens
  misc_RNA (1)...(19): siRNA sense strand
ucgauauccucguaaugua

SEQ ID NO: 516630 - RNA, 19 nt, Homo sapiens
  misc_RNA (1)...(19): siRNA sense strand
guucugauugcaacacuua

SEQ ID NO: 516631 - RNA, 19 nt, Homo sapiens
  misc_RNA (1)...(19): siRNA sense strand
cgugaaacgugcucaggaa

SEQ ID NO: 516632 - RNA, 19 nt, Homo sapiens
  misc_RNA (1)...(19): siRNA sense strand
gguauuaucucagacaaaa

SEQ ID NO: 516633 - RNA, 19 nt, Homo sapiens
  misc_RNA (1)...(19): siRNA sense strand
caacuuaagaccaggauag

SEQ ID NO: 516634 - RNA, 19 nt, Homo sapiens
  misc_RNA (1)...(19): siRNA sense strand
cagcaucagacaaauauug

SEQ ID NO: 516635 - RNA, 19 nt, Homo sapiens
  misc_RNA (1)...(19): siRNA sense strand
gaaaaugggcgaccucgaa

SEQ ID NO: 516636 - RNA, 19 nt, Homo sapiens
  misc_RNA (1)...(19): siRNA sense strand
gcaguaaugagcugaagug

SEQ ID NO: 516637 - RNA, 19 nt, Homo sapiens
  misc_RNA (1)...(19): siRNA sense strand
gaaggagcagaguguugua

SEQ ID NO: 516638 - RNA, 19 nt, Homo sapiens
  misc_RNA (1)...(19): siRNA sense strand
gaaaggauuccagacacaa

SEQ ID NO: 516639 - RNA, 19 nt, Homo sapiens
  misc_RNA (1)...(19): siRNA sense strand
uuacuucccucacaaugau

SEQ ID NO: 516640 - RNA, 19 nt, Homo sapiens
  misc_RNA (1)...(19): siRNA sense strand
agaacucgauggugaaauc

SEQ ID NO: 516641 - RNA, 19 nt, Homo sapiens
  misc_RNA (1)...(19): siRNA sense strand
ggugaacauggcagauuua

SEQ ID NO: 516642 - RNA, 19 nt, Homo sapiens
  misc_RNA (1)...(19): siRNA sense strand
ugaaaggauuccagacaca

SEQ ID NO: 516643 - RNA, 19 nt, Homo sapiens
  misc_RNA (1)...(19): siRNA sense strand
caaggaagaacauuaaacu

SEQ ID NO: 516644 - RNA, 19 nt, Homo sapiens
  misc_RNA (1)...(19): siRNA sense strand
gugacggucuuugcuguaa

SEQ ID NO: 516645 - RNA, 19 nt, Homo sapiens
  misc_RNA (1)...(19): siRNA sense strand
gcaaguggugaauguaaau

SEQ ID NO: 516646 - RNA, 19 nt, Homo sapiens
  misc_RNA (1)...(19): siRNA sense strand
gaaaaucagaggcaaaaga

SEQ ID NO: 516647 - RNA, 19 nt, Homo sapiens
  misc_RNA (1)...(19): siRNA sense strand
gauuugcuguccucugaau

SEQ ID NO: 516648 - RNA, 19 nt, Homo sapiens
  misc_RNA (1)...(19): siRNA sense strand
ugauggagcuagagaagag

SEQ ID NO: 516649 - RNA, 19 nt, Homo sapiens
  misc_RNA (1)...(19): siRNA sense strand
acacuuacuucccucacaa

SEQ ID NO: 516650 - RNA, 19 nt, Homo sapiens
  misc_RNA (1)...(19): siRNA sense strand
aaauggaguuugcaguaau

SEQ ID NO: 516651 - RNA, 19 nt, Homo sapiens
  misc_RNA (1)...(19): siRNA sense strand
ccaaaugaugugcuuagaa

SEQ ID NO: 516652 - RNA, 19 nt, Homo sapiens
  misc_RNA (1)...(19): siRNA sense strand
gaacauggcagauuuaaua

SEQ ID NO: 516653 - RNA, 19 nt, Homo sapiens
  misc_RNA (1)...(19): siRNA sense strand
caacaaaccuucuaagcuu

SEQ ID NO: 516654 - RNA, 19 nt, Homo sapiens
  misc_RNA (1)...(19): siRNA sense strand
guaaugagcugaagugugu

SEQ ID NO: 516655 - RNA, 19 nt, Homo sapiens
  misc_RNA (1)...(19): siRNA sense strand
gaaauggaguuugcaguaa

SEQ ID NO: 516656 - RNA, 19 nt, Homo sapiens
  misc_RNA (1)...(19): siRNA sense strand
uaucaugacuuccugaaua

SEQ ID NO: 516657 - RNA, 19 nt, Homo sapiens
  misc_RNA (1)...(19): siRNA sense strand
gaaaucacaucuacuuuag

SEQ ID NO: 516658 - RNA, 19 nt, Homo sapiens
  misc_RNA (1)...(19): siRNA sense strand
gcaagacuguggaaguuaa

SEQ ID NO: 516659 - RNA, 19 nt, Homo sapiens
  misc_RNA (1)...(19): siRNA sense strand
gaagaaaccaaauacauug

SEQ ID NO: 516660 - RNA, 19 nt, Homo sapiens
  misc_RNA (1)...(19): siRNA sense strand
gaaacgugcucaggaaauu

SEQ ID NO: 516661 - RNA, 19 nt, Homo sapiens
  misc_RNA (1)...(19): siRNA sense strand
ggaaauggaguuugcagua

SEQ ID NO: 516662 - RNA, 19 nt, Homo sapiens
  misc_RNA (1)...(19): siRNA sense strand
gagaagcaguaaaugauug

SEQ ID NO: 516663 - RNA, 19 nt, Homo sapiens
  misc_RNA (1)...(19): siRNA sense strand
gaggaaacccugacucauu

SEQ ID NO: 516664 - RNA, 19 nt, Homo sapiens
  misc_RNA (1)...(19): siRNA sense strand
ggaauuugcuuuggaggaa

SEQ ID NO: 516665 - RNA, 19 nt, Homo sapiens
  misc_RNA (1)...(19): siRNA sense strand
gaggaggcgugaaugaauu

SEQ ID NO: 516666 - RNA, 19 nt, Homo sapiens
  misc_RNA (1)...(19): siRNA sense strand
gcuguccucugaauacaua

SEQ ID NO: 516667 - RNA, 19 nt, Homo sapiens
  misc_RNA (1)...(19): siRNA sense strand
gggagacacuggcuauuau

SEQ ID NO: 516668 - RNA, 19 nt, Homo sapiens
  misc_RNA (1)...(19): siRNA sense strand
ccaaauacauugaacugau

SEQ ID NO: 516669 - RNA, 19 nt, Homo sapiens
  misc_RNA (1)...(19): siRNA sense strand
gggaugugcuuugugguua

SEQ ID NO: 516670 - RNA, 19 nt, Homo sapiens
  misc_RNA (1)...(19): siRNA sense strand
cauaauugcuggcaccauu

SEQ ID NO: 516671 - RNA, 19 nt, Homo sapiens
  misc_RNA (1)...(19): siRNA sense strand
gaaccacacauaucucauu

SEQ ID NO: 516672 - RNA, 19 nt, Homo sapiens
  misc_RNA (1)...(19): siRNA sense strand
caaauacauugaacugaug

SEQ ID NO: 516673 - RNA, 19 nt, Homo sapiens
  misc_RNA (1)...(19): siRNA sense strand
caacaaguuugccauaucu

SEQ ID NO: 516674 - RNA, 19 nt, Homo sapiens
  misc_RNA (1)...(19): siRNA sense strand
guaaagaaggcacuauuug

SEQ ID NO: 516675 - RNA, 19 nt, Homo sapiens
  misc_RNA (1)...(19): siRNA sense strand
caaaugaugugcuuagaac

SEQ ID NO: 516676 - RNA, 19 nt, Homo sapiens
  misc_RNA (1)...(19): siRNA sense strand
gaaaggaggaggcgugaau

SEQ ID NO: 516677 - RNA, 19 nt, Homo sapiens
  misc_RNA (1)...(19): siRNA sense strand
gcagaguguuguaagaaau

SEQ ID NO: 516678 - RNA, 19 nt, Homo sapiens
  misc_RNA (1)...(19): siRNA sense strand
gagcugaagugugugugua

SEQ ID NO: 516679 - RNA, 19 nt, Homo sapiens
  misc_RNA (1)...(19): siRNA sense strand
gcagcaaggaagaacauua

SEQ ID NO: 516680 - RNA, 19 nt, Homo sapiens
  misc_RNA (1)...(19): siRNA sense strand
gauagacaaugcaaauaca

SEQ ID NO: 516681 - RNA, 19 nt, Homo sapiens
  misc_RNA (1)...(19): siRNA sense strand
aggaaacccugacucauuu

SEQ ID NO: 516682 - RNA, 19 nt, Homo sapiens
  misc_RNA (1)...(19): siRNA sense strand
gcaccaauaucauaauagg

SEQ ID NO: 516683 - RNA, 19 nt, Homo sapiens
  misc_RNA (1)...(19): siRNA sense strand
ggagcagaguguuguaaga

SEQ ID NO: 516684 - RNA, 19 nt, Homo sapiens
  misc_RNA (1)...(19): siRNA sense strand
uuacaaauccagacuguuu

SEQ ID NO: 516685 - RNA, 19 nt, Homo sapiens
  misc_RNA (1)...(19): siRNA sense strand
gaggagagcacuguuacua

SEQ ID NO: 516686 - RNA, 19 nt, Homo sapiens
  misc_RNA (1)...(19): siRNA sense strand
agacaaagacacauggaua

SEQ ID NO: 516687 - RNA, 19 nt, Homo sapiens
  misc_RNA (1)...(19): siRNA sense strand
cgaaaucuguggugaacau

SEQ ID NO: 516688 - RNA, 19 nt, Homo sapiens
  misc_RNA (1)...(19): siRNA sense strand
uguaagaaaugcaccuuga

SEQ ID NO: 516689 - RNA, 19 nt, Homo sapiens
  misc_RNA (1)...(19): siRNA sense strand
gacaacaaguuugccauau

SEQ ID NO: 516690 - RNA, 19 nt, Homo sapiens
  misc_RNA (1)...(19): siRNA sense strand
cagcaaggaagaacauuaa

SEQ ID NO: 516691 - RNA, 19 nt, Homo sapiens
  misc_RNA (1)...(19): siRNA sense strand
ggaaagacaaagacacaug

SEQ ID NO: 516692 - RNA, 19 nt, Homo sapiens
  misc_RNA (1)...(19): siRNA sense strand
gacacuggcuauuaucuuc

SEQ ID NO: 516693 - RNA, 19 nt, Homo sapiens
  misc_RNA (1)...(19): siRNA sense strand
ugacucauuuguugcauug

SEQ ID NO: 516694 - RNA, 19 nt, Homo sapiens
  misc_RNA (1)...(19): siRNA sense strand
agacaaauauugcuaugag

SEQ ID NO: 516695 - RNA, 19 nt, Homo sapiens
  misc_RNA (1)...(19): siRNA sense strand
gcaguaaaugauugugaua

SEQ ID NO: 516696 - RNA, 19 nt, Homo sapiens
  misc_RNA (1)...(19): siRNA sense strand
gaacugaugauugugaaug

SEQ ID NO: 516697 - RNA, 19 nt, Homo sapiens
  misc_RNA (1)...(19): siRNA sense strand
gaucuuccaucugaauuuc

SEQ ID NO: 516698 - RNA, 19 nt, Homo sapiens
  misc_RNA (1)...(19): siRNA sense strand
gcuaugagaaacugaauau

SEQ ID NO: 516699 - RNA, 19 nt, Homo sapiens
  misc_RNA (1)...(19): siRNA sense strand
ggugacagcaucagacaaa

SEQ ID NO: 516700 - RNA, 19 nt, Homo sapiens
  misc_RNA (1)...(19): siRNA sense strand
gagauagacaaugcaaaua

SEQ ID NO: 516701 - RNA, 19 nt, Homo sapiens
  misc_RNA (1)...(19): siRNA sense strand
ggauggauauucaugugau

SEQ ID NO: 516702 - RNA, 19 nt, Homo sapiens
  misc_RNA (1)...(19): siRNA sense strand
gaaugaucaccuuauguuu

SEQ ID NO: 516703 - RNA, 19 nt, Homo sapiens
  misc_RNA (1)...(19): siRNA sense strand
gaagaagaaaccaaauaca

SEQ ID NO: 516704 - RNA, 19 nt, Homo sapiens
  misc_RNA (1)...(19): siRNA sense strand
uggcaccaauaucauaaua

SEQ ID NO: 516705 - RNA, 19 nt, Homo sapiens
  misc_RNA (1)...(19): siRNA sense strand
acauugaacugaugauugu

SEQ ID NO: 516706 - RNA, 19 nt, Homo sapiens
  misc_RNA (1)...(19): siRNA sense strand
gaaaccaaauacauugaac

SEQ ID NO: 516707 - RNA, 19 nt, Homo sapiens
  misc_RNA (1)...(19): siRNA sense strand
ugaaugaucaccuuauguu

SEQ ID NO: 516708 - RNA, 19 nt, Homo sapiens
  misc_RNA (1)...(19): siRNA sense strand
ucacaaugaugaugcaaag

SEQ ID NO: 516709 - RNA, 19 nt, Homo sapiens
  misc_RNA (1)...(19): siRNA sense strand
gaagaugggacaccuugug

SEQ ID NO: 516710 - RNA, 19 nt, Homo sapiens
  misc_RNA (1)...(19): siRNA sense strand
ggccgaauguguccuugaa

SEQ ID NO: 516711 - RNA, 19 nt, Homo sapiens
  misc_RNA (1)...(19): siRNA sense strand
uuuaauggcuguuacacuu

SEQ ID NO: 516712 - RNA, 19 nt, Homo sapiens
  misc_RNA (1)...(19): siRNA sense strand
cuacgugaguuuaugaaau

SEQ ID NO: 516713 - RNA, 19 nt, Homo sapiens
  misc_RNA (1)...(19): siRNA sense strand
gcaguugacucauguugac

SEQ ID NO: 516714 - RNA, 19 nt, Homo sapiens
  misc_RNA (1)...(19): siRNA sense strand
ucaagaggauuuccauuuu

SEQ ID NO: 516715 - RNA, 19 nt, Homo sapiens
  misc_RNA (1)...(19): siRNA sense strand
gacagcaucagacaaauau

SEQ ID NO: 516716 - RNA, 19 nt, Homo sapiens
  misc_RNA (1)...(19): siRNA sense strand
ggaggaggcgugaaugaau

SEQ ID NO: 516717 - RNA, 19 nt, Homo sapiens
  misc_RNA (1)...(19): siRNA sense strand
aauccagacuguuugaauu

SEQ ID NO: 516718 - RNA, 19 nt, Homo sapiens
  misc_RNA (1)...(19): siRNA sense strand
guuagcaaguggugaaugu

SEQ ID NO: 516719 - RNA, 19 nt, Homo sapiens
  misc_RNA (1)...(19): siRNA sense strand
caacaaacgggaugugcuu

SEQ ID NO: 516720 - RNA, 19 nt, Homo sapiens
  misc_RNA (1)...(19): siRNA sense strand
gacaaauauugcuaugaga

SEQ ID NO: 516721 - RNA, 19 nt, Homo sapiens
  misc_RNA (1)...(19): siRNA sense strand
ugacagcaucagacaaaua

SEQ ID NO: 516722 - RNA, 19 nt, Homo sapiens
  misc_RNA (1)...(19): siRNA sense strand
gcaggagacgccucauuga

SEQ ID NO: 516723 - RNA, 19 nt, Homo sapiens
  misc_RNA (1)...(19): siRNA sense strand
gagcagaguguuguaagaa

SEQ ID NO: 516724 - RNA, 19 nt, Homo sapiens
  misc_RNA (1)...(19): siRNA sense strand
ugacaacaaguuugccaua

SEQ ID NO: 516725 - RNA, 19 nt, Homo sapiens
  misc_RNA (1)...(19): siRNA sense strand
acacauggauacagugcaa

SEQ ID NO: 516726 - RNA, 19 nt, Homo sapiens
  misc_RNA (1)...(19): siRNA sense strand
aaagacacauggauacagu

SEQ ID NO: 516727 - RNA, 19 nt, Homo sapiens
  misc_RNA (1)...(19): siRNA sense strand
ggagaggagugugauugug

SEQ ID NO: 516728 - RNA, 19 nt, Homo sapiens
  misc_RNA (1)...(19): siRNA sense strand
ggagggauuuuaucaaaga

SEQ ID NO: 516729 - RNA, 19 nt, Homo sapiens
  misc_RNA (1)...(19): siRNA sense strand
ucgauauccucguaaugua

SEQ ID NO: 516730 - RNA, 19 nt, Homo sapiens
  misc_RNA (1)...(19): siRNA sense strand
guucugauugcaacacuua

SEQ ID NO: 516731 - RNA, 19 nt, Homo sapiens
  misc_RNA (1)...(19): siRNA sense strand
cgugaaacgugcucaggaa

SEQ ID NO: 516732 - RNA, 19 nt, Homo sapiens
  misc_RNA (1)...(19): siRNA sense strand
gguauuaucucagacaaaa

SEQ ID NO: 516733 - RNA, 19 nt, Homo sapiens
  misc_RNA (1)...(19): siRNA sense strand
caacuuaagaccaggauag

SEQ ID NO: 516734 - RNA, 19 nt, Homo sapiens
  misc_RNA (1)...(19): siRNA sense strand
cagcaucagacaaauauug

SEQ ID NO: 516735 - RNA, 19 nt, Homo sapiens
  misc_RNA (1)...(19): siRNA sense strand
gaaaaugggcgaccucgaa

SEQ ID NO: 516736 - RNA, 19 nt, Homo sapiens
  misc_RNA (1)...(19): siRNA sense strand
gcaguaaugagcugaagug

SEQ ID NO: 516737 - RNA, 19 nt, Homo sapiens
  misc_RNA (1)...(19): siRNA sense strand
gaaggagcagaguguugua

SEQ ID NO: 516738 - RNA, 19 nt, Homo sapiens
  misc_RNA (1)...(19): siRNA sense strand
gaaaggauuccagacacaa

SEQ ID NO: 516739 - RNA, 19 nt, Homo sapiens
  misc_RNA (1)...(19): siRNA sense strand
uuacuucccucacaaugau

SEQ ID NO: 516740 - RNA, 19 nt, Homo sapiens
  misc_RNA (1)...(19): siRNA sense strand
agaacucgauggugaaauc

SEQ ID NO: 516741 - RNA, 19 nt, Homo sapiens
  misc_RNA (1)...(19): siRNA sense strand
ggugaacauggcagauuua

SEQ ID NO: 516742 - RNA, 19 nt, Homo sapiens
  misc_RNA (1)...(19): siRNA sense strand
ugaaaggauuccagacaca

SEQ ID NO: 516743 - RNA, 19 nt, Homo sapiens
  misc_RNA (1)...(19): siRNA sense strand
caaggaagaacauuaaacu

SEQ ID NO: 516744 - RNA, 19 nt, Homo sapiens
  misc_RNA (1)...(19): siRNA sense strand
gugacggucuuugcuguaa

SEQ ID NO: 516745 - RNA, 19 nt, Homo sapiens
  misc_RNA (1)...(19): siRNA sense strand
gcaaguggugaauguaaau

SEQ ID NO: 516746 - RNA, 19 nt, Homo sapiens
  misc_RNA (1)...(19): siRNA sense strand
gaaaaucagaggcaaaaga

SEQ ID NO: 516747 - RNA, 19 nt, Homo sapiens
  misc_RNA (1)...(19): siRNA sense strand
gauuugcuguccucugaau

SEQ ID NO: 516748 - RNA, 19 nt, Homo sapiens
  misc_RNA (1)...(19): siRNA sense strand
ugauggagcuagagaagag

SEQ ID NO: 516749 - RNA, 19 nt, Homo sapiens
  misc_RNA (1)...(19): siRNA sense strand
acacuuacuucccucacaa

SEQ ID NO: 516750 - RNA, 19 nt, Homo sapiens
  misc_RNA (1)...(19): siRNA sense strand
aaauggaguuugcaguaau

SEQ ID NO: 516751 - RNA, 19 nt, Homo sapiens
  misc_RNA (1)...(19): siRNA sense strand
ccaaaugaugugcuuagaa

SEQ ID NO: 516752 - RNA, 19 nt, Homo sapiens
  misc_RNA (1)...(19): siRNA sense strand
gaacagggccuucuacaug

SEQ ID NO: 516753 - RNA, 19 nt, Homo sapiens
  misc_RNA (1)...(19): siRNA sense strand
gaagauguuuggcacgaaa

SEQ ID NO: 516754 - RNA, 19 nt, Homo sapiens
  misc_RNA (1)...(19): siRNA sense strand
gagcaucgauggcgagaau

SEQ ID NO: 516755 - RNA, 19 nt, Homo sapiens
  misc_RNA (1)...(19): siRNA sense strand
gcaccgaguucaugcaaga

SEQ ID NO: 516756 - RNA, 19 nt, Homo sapiens
  misc_RNA (1)...(19): siRNA sense strand
gaaagaccuucuacuccaa

SEQ ID NO: 516757 - RNA, 19 nt, Homo sapiens
  misc_RNA (1)...(19): siRNA sense strand
gcaagacucccguguguca

SEQ ID NO: 516758 - RNA, 19 nt, Homo sapiens
  misc_RNA (1)...(19): siRNA sense strand
caucgaagcucagaacaag

SEQ ID NO: 516759 - RNA, 19 nt, Homo sapiens
  misc_RNA (1)...(19): siRNA sense strand
gaggagcaccugaagaaau

SEQ ID NO: 516760 - RNA, 19 nt, Homo sapiens
  misc_RNA (1)...(19): siRNA sense strand
gagcgagacuaugagaaga

SEQ ID NO: 516761 - RNA, 19 nt, Homo sapiens
  misc_RNA (1)...(19): siRNA sense strand
gugggaagguccuggaaga

SEQ ID NO: 516762 - RNA, 19 nt, Homo sapiens
  misc_RNA (1)...(19): siRNA sense strand
cggcaagacucccgugugu

SEQ ID NO: 516763 - RNA, 19 nt, Homo sapiens
  misc_RNA (1)...(19): siRNA sense strand
gaagauuacaggcgagauc

SEQ ID NO: 516764 - RNA, 19 nt, Homo sapiens
  misc_RNA (1)...(19): siRNA sense strand
cggaggaguuuguguguag

SEQ ID NO: 516765 - RNA, 19 nt, Homo sapiens
  misc_RNA (1)...(19): siRNA sense strand
gggcaaggacuucaaugug

SEQ ID NO: 516766 - RNA, 19 nt, Homo sapiens
  misc_RNA (1)...(19): siRNA sense strand
agaucaaccuggaaggaaa

SEQ ID NO: 516767 - RNA, 19 nt, Homo sapiens
  misc_RNA (1)...(19): siRNA sense strand
ugccuucucucauguguga

SEQ ID NO: 516768 - RNA, 19 nt, Homo sapiens
  misc_RNA (1)...(19): siRNA sense strand
gcggguagccucacacaca

SEQ ID NO: 516769 - RNA, 19 nt, Homo sapiens
  misc_RNA (1)...(19): siRNA sense strand
gcgagacuaugagaagaug

SEQ ID NO: 516770 - RNA, 19 nt, Homo sapiens
  misc_RNA (1)...(19): siRNA sense strand
gagacuaugagaagauguu

SEQ ID NO: 516771 - RNA, 19 nt, Homo sapiens
  misc_RNA (1)...(19): siRNA sense strand
cgaaaugccauggcuguga

SEQ ID NO: 516772 - RNA, 19 nt, Homo sapiens
  misc_RNA (1)...(19): siRNA sense strand
ggaacagggccuucuacau

SEQ ID NO: 516773 - RNA, 19 nt, Homo sapiens
  misc_RNA (1)...(19): siRNA sense strand
gaaugcggguagccucaca

SEQ ID NO: 516774 - RNA, 19 nt, Homo sapiens
  misc_RNA (1)...(19): siRNA sense strand
aggagcaccugaagaaauc

SEQ ID NO: 516775 - RNA, 19 nt, Homo sapiens
  misc_RNA (1)...(19): siRNA sense strand
gaucaugcacgcccugaag

SEQ ID NO: 516776 - RNA, 19 nt, Homo sapiens
  misc_RNA (1)...(19): siRNA sense strand
gcagagccgcaccuccauu

SEQ ID NO: 516777 - RNA, 19 nt, Homo sapiens
  misc_RNA (1)...(19): siRNA sense strand
gcugugacuucaagaucga

SEQ ID NO: 516778 - RNA, 19 nt, Homo sapiens
  misc_RNA (1)...(19): siRNA sense strand
gcuaugacgugcgcuaugc

SEQ ID NO: 516779 - RNA, 19 nt, Homo sapiens
  misc_RNA (1)...(19): siRNA sense strand
gaugaggagcaccugaaga

SEQ ID NO: 516780 - RNA, 19 nt, Homo sapiens
  misc_RNA (1)...(19): siRNA sense strand
gagccgcaccuccauugug

SEQ ID NO: 516781 - RNA, 19 nt, Homo sapiens
  misc_RNA (1)...(19): siRNA sense strand
gcaagagccaugccuucuc

SEQ ID NO: 516782 - RNA, 19 nt, Homo sapiens
  misc_RNA (1)...(19): siRNA sense strand
gauuacaggcgagaucaug

SEQ ID NO: 516783 - RNA, 19 nt, Homo sapiens
  misc_RNA (1)...(19): siRNA sense strand
ccaagugcaagaagaagau

SEQ ID NO: 516784 - RNA, 19 nt, Homo sapiens
  misc_RNA (1)...(19): siRNA sense strand
guaccacccggaggaguuu

SEQ ID NO: 516785 - RNA, 19 nt, Homo sapiens
  misc_RNA (1)...(19): siRNA sense strand
cagagccgcaccuccauug

SEQ ID NO: 516786 - RNA, 19 nt, Homo sapiens
  misc_RNA (1)...(19): siRNA sense strand
ccggaggaguuugugugua

SEQ ID NO: 516787 - RNA, 19 nt, Homo sapiens
  misc_RNA (1)...(19): siRNA sense strand
cagaucaaccuggaaggaa

SEQ ID NO: 516788 - RNA, 19 nt, Homo sapiens
  misc_RNA (1)...(19): siRNA sense strand
ugugcgauaugucagauca

SEQ ID NO: 516789 - RNA, 19 nt, Homo sapiens
  misc_RNA (1)...(19): siRNA sense strand
ccauggcugugacuucaag

SEQ ID NO: 516790 - RNA, 19 nt, Homo sapiens
  misc_RNA (1)...(19): siRNA sense strand
cgagcgagacuaugagaag

SEQ ID NO: 516791 - RNA, 19 nt, Homo sapiens
  misc_RNA (1)...(19): siRNA sense strand
ugccauggcugugacuuca

SEQ ID NO: 516792 - RNA, 19 nt, Homo sapiens
  misc_RNA (1)...(19): siRNA sense strand
augaggagcaccugaagaa

SEQ ID NO: 516793 - RNA, 19 nt, Homo sapiens
  misc_RNA (1)...(19): siRNA sense strand
gaucaaccuggaaggaaag

SEQ ID NO: 516794 - RNA, 19 nt, Homo sapiens
  misc_RNA (1)...(19): siRNA sense strand
gugccaagugcaagaagaa

SEQ ID NO: 516795 - RNA, 19 nt, Homo sapiens
  misc_RNA (1)...(19): siRNA sense strand
gccaagugcaagaagaaga

SEQ ID NO: 516796 - RNA, 19 nt, Homo sapiens
  misc_RNA (1)...(19): siRNA sense strand
cagcgucucccucaacaag

SEQ ID NO: 516797 - RNA, 19 nt, Homo sapiens
  misc_RNA (1)...(19): siRNA sense strand
ucgaagcucagaacaagau

SEQ ID NO: 516798 - RNA, 19 nt, Homo sapiens
  misc_RNA (1)...(19): siRNA sense strand
agaagauguuuggcacgaa

SEQ ID NO: 516799 - RNA, 19 nt, Homo sapiens
  misc_RNA (1)...(19): siRNA sense strand
caagaagugugccuuugug

SEQ ID NO: 516800 - RNA, 19 nt, Homo sapiens
  misc_RNA (1)...(19): siRNA sense strand
gacaagcugugcuggagaa

SEQ ID NO: 516801 - RNA, 19 nt, Homo sapiens
  misc_RNA (1)...(19): siRNA sense strand
ccaggaugcugauaacuuc

SEQ ID NO: 516802 - RNA, 19 nt, Homo sapiens
  misc_RNA (1)...(19): siRNA sense strand
ggaggcagguauggaugua

SEQ ID NO: 516803 - RNA, 19 nt, Homo sapiens
  misc_RNA (1)...(19): siRNA sense strand
gcagagggauggacaagcu

SEQ ID NO: 516804 - RNA, 19 nt, Homo sapiens
  misc_RNA (1)...(19): siRNA sense strand
gcuggaagccggcugguuu

SEQ ID NO: 516805 - RNA, 19 nt, Homo sapiens
  misc_RNA (1)...(19): siRNA sense strand
gcaagaagugugccuuugu

SEQ ID NO: 516806 - RNA, 19 nt, Homo sapiens
  misc_RNA (1)...(19): siRNA sense strand
cgaaccaucuucagugagu

SEQ ID NO: 516807 - RNA, 19 nt, Homo sapiens
  misc_RNA (1)...(19): siRNA sense strand
ccacgugauugacaaguuc

SEQ ID NO: 516808 - RNA, 19 nt, Homo sapiens
  misc_RNA (1)...(19): siRNA sense strand
augaugaccucaaguaugu

SEQ ID NO: 516809 - RNA, 19 nt, Homo sapiens
  misc_RNA (1)...(19): siRNA sense strand
aagcugugcuggagaaugu

SEQ ID NO: 516810 - RNA, 19 nt, Homo sapiens
  misc_RNA (1)...(19): siRNA sense strand
gagcccacgugauugacaa

SEQ ID NO: 516811 - RNA, 19 nt, Homo sapiens
  misc_RNA (1)...(19): siRNA sense strand
ggagaaagagcgagagacu

SEQ ID NO: 516812 - RNA, 19 nt, Homo sapiens
  misc_RNA (1)...(19): siRNA sense strand
guacaccuuccgccaguuu

SEQ ID NO: 516813 - RNA, 19 nt, Homo sapiens
  misc_RNA (1)...(19): siRNA sense strand
cggaagcgguggagaugau

SEQ ID NO: 516814 - RNA, 19 nt, Homo sapiens
  misc_RNA (1)...(19): siRNA sense strand
gucagaggguggcaaggaa

SEQ ID NO: 516815 - RNA, 19 nt, Homo sapiens
  misc_RNA (1)...(19): siRNA sense strand
uguaugaugaccucaagua

SEQ ID NO: 516816 - RNA, 19 nt, Homo sapiens
  misc_RNA (1)...(19): siRNA sense strand
aggcagguauggauguauu

SEQ ID NO: 516817 - RNA, 19 nt, Homo sapiens
  misc_RNA (1)...(19): siRNA sense strand
gauugacaaguuccuauug

SEQ ID NO: 516818 - RNA, 19 nt, Homo sapiens
  misc_RNA (1)...(19): siRNA sense strand
gcagcgaaccaucuucagu

SEQ ID NO: 516819 - RNA, 19 nt, Homo sapiens
  misc_RNA (1)...(19): siRNA sense strand
ucuaccaaguggcugagua

SEQ ID NO: 516820 - RNA, 19 nt, Homo sapiens
  misc_RNA (1)...(19): siRNA sense strand
gaaaggcgaccccgaacuu

SEQ ID NO: 516821 - RNA, 19 nt, Homo sapiens
  misc_RNA (1)...(19): siRNA sense strand
gguguaugaugaccucaag

SEQ ID NO: 516822 - RNA, 19 nt, Homo sapiens
  misc_RNA (1)...(19): siRNA sense strand
gauguauugucgccuguac

SEQ ID NO: 516823 - RNA, 19 nt, Homo sapiens
  misc_RNA (1)...(19): siRNA sense strand
cagcuggagugggccauga

SEQ ID NO: 516824 - RNA, 19 nt, Homo sapiens
  misc_RNA (1)...(19): siRNA sense strand
aaaagcagguggugaguuc

SEQ ID NO: 516825 - RNA, 19 nt, Homo sapiens
  misc_RNA (1)...(19): siRNA sense strand
uaugaugaccucaaguaug

SEQ ID NO: 516826 - RNA, 19 nt, Homo sapiens
  misc_RNA (1)...(19): siRNA sense strand
guaugaugaccucaaguau

SEQ ID NO: 516827 - RNA, 19 nt, Homo sapiens
  misc_RNA (1)...(19): siRNA sense strand
acacagugaagccaugauu

SEQ ID NO: 516828 - RNA, 19 nt, Homo sapiens
  misc_RNA (1)...(19): siRNA sense strand
caucuucagugaguguuuc

SEQ ID NO: 516829 - RNA, 19 nt, Homo sapiens
  misc_RNA (1)...(19): siRNA sense strand
ugaccacggaggccucuuu

SEQ ID NO: 516830 - RNA, 19 nt, Homo sapiens
  misc_RNA (1)...(19): siRNA sense strand
uugccuuccucauggguua

SEQ ID NO: 516831 - RNA, 19 nt, Homo sapiens
  misc_RNA (1)...(19): siRNA sense strand
gaugaccucaaguaugugu

SEQ ID NO: 516832 - RNA, 19 nt, Homo sapiens
  misc_RNA (1)...(19): siRNA sense strand
agcgaaccaucuucaguga

SEQ ID NO: 516833 - RNA, 19 nt, Homo sapiens
  misc_RNA (1)...(19): siRNA sense strand
gcaagguggcccucuccau

SEQ ID NO: 516834 - RNA, 19 nt, Homo sapiens
  misc_RNA (1)...(19): siRNA sense strand
gguuucugcuccgucauug

SEQ ID NO: 516835 - RNA, 19 nt, Homo sapiens
  misc_RNA (1)...(19): siRNA sense strand
gacggaagcgguggagaug

SEQ ID NO: 516836 - RNA, 19 nt, Homo sapiens
  misc_RNA (1)...(19): siRNA sense strand
cccacgugauugacaaguu

SEQ ID NO: 516837 - RNA, 19 nt, Homo sapiens
  misc_RNA (1)...(19): siRNA sense strand
gcagguauggauguauugu

SEQ ID NO: 516838 - RNA, 19 nt, Homo sapiens
  misc_RNA (1)...(19): siRNA sense strand
ugauugacaaguuccuauu

SEQ ID NO: 516839 - RNA, 19 nt, Homo sapiens
  misc_RNA (1)...(19): siRNA sense strand
gugcagcgaaccaucuuca

SEQ ID NO: 516840 - RNA, 19 nt, Homo sapiens
  misc_RNA (1)...(19): siRNA sense strand
gaagagagaugguggcaau

SEQ ID NO: 516841 - RNA, 19 nt, Homo sapiens
  misc_RNA (1)...(19): siRNA sense strand
gaaacgagaucuccaugau

SEQ ID NO: 516842 - RNA, 19 nt, Homo sapiens
  misc_RNA (1)...(19): siRNA sense strand
gcucgaagcuggaggaguu

SEQ ID NO: 516843 - RNA, 19 nt, Homo sapiens
  misc_RNA (1)...(19): siRNA sense strand
acaaggagcuggugaagga

SEQ ID NO: 516844 - RNA, 19 nt, Homo sapiens
  misc_RNA (1)...(19): siRNA sense strand
gaacguccaguccuauaua

SEQ ID NO: 516845 - RNA, 19 nt, Homo sapiens
  misc_RNA (1)...(19): siRNA sense strand
aaagaccacucacuuguuu

SEQ ID NO: 516846 - RNA, 19 nt, Homo sapiens
  misc_RNA (1)...(19): siRNA sense strand
gaagguuucucccaaguca

SEQ ID NO: 516847 - RNA, 19 nt, Homo sapiens
  misc_RNA (1)...(19): siRNA sense strand
gagaugcuguuuaagaaga

SEQ ID NO: 516848 - RNA, 19 nt, Homo sapiens
  misc_RNA (1)...(19): siRNA sense strand
aaacagagccagcagauug

SEQ ID NO: 516849 - RNA, 19 nt, Homo sapiens
  misc_RNA (1)...(19): siRNA sense strand
caacugaagcagcacaaua

SEQ ID NO: 516850 - RNA, 19 nt, Homo sapiens
  misc_RNA (1)...(19): siRNA sense strand
gaggcuaccuuaucauugu

SEQ ID NO: 516851 - RNA, 19 nt, Homo sapiens
  misc_RNA (1)...(19): siRNA sense strand
ggaaagaccacucacuugu

SEQ ID NO: 516852 - RNA, 19 nt, Homo sapiens
  misc_RNA (1)...(19): siRNA sense strand
uauuugagauggcgauuaa

SEQ ID NO: 516853 - RNA, 19 nt, Homo sapiens
  misc_RNA (1)...(19): siRNA sense strand
gaaagaccacucacuuguu

SEQ ID NO: 516854 - RNA, 19 nt, Homo sapiens
  misc_RNA (1)...(19): siRNA sense strand
gaacugggcccacgagaag

SEQ ID NO: 516855 - RNA, 19 nt, Homo sapiens
  misc_RNA (1)...(19): siRNA sense strand
ggaugagugugucuacuug

SEQ ID NO: 516856 - RNA, 19 nt, Homo sapiens
  misc_RNA (1)...(19): siRNA sense strand
caacacugcuuugagaguu

SEQ ID NO: 516857 - RNA, 19 nt, Homo sapiens
  misc_RNA (1)...(19): siRNA sense strand
gaagggacuuuguacugau

SEQ ID NO: 516858 - RNA, 19 nt, Homo sapiens
  misc_RNA (1)...(19): siRNA sense strand
ugugauugcugacuacuuu

SEQ ID NO: 516859 - RNA, 19 nt, Homo sapiens
  misc_RNA (1)...(19): siRNA sense strand
cagagaacguccaguccua

SEQ ID NO: 516860 - RNA, 19 nt, Homo sapiens
  misc_RNA (1)...(19): siRNA sense strand
ugaagggacuuuguacuga

SEQ ID NO: 516861 - RNA, 19 nt, Homo sapiens
  misc_RNA (1)...(19): siRNA sense strand
caccaacacugcuuugaga

SEQ ID NO: 516862 - RNA, 19 nt, Homo sapiens
  misc_RNA (1)...(19): siRNA sense strand
gaugguguccuuuaccuuu

SEQ ID NO: 516863 - RNA, 19 nt, Homo sapiens
  misc_RNA (1)...(19): siRNA sense strand
ucaagcauaucgagaacaa

SEQ ID NO: 516864 - RNA, 19 nt, Homo sapiens
  misc_RNA (1)...(19): siRNA sense strand
gcucauugcccacugguuu

SEQ ID NO: 516865 - RNA, 19 nt, Homo sapiens
  misc_RNA (1)...(19): siRNA sense strand
gacaaucccuggccaaugc

SEQ ID NO: 516866 - RNA, 19 nt, Homo sapiens
  misc_RNA (1)...(19): siRNA sense strand
aagaagaaccuauuugaga

SEQ ID NO: 516867 - RNA, 19 nt, Homo sapiens
  misc_RNA (1)...(19): siRNA sense strand
gcagcuguccucaagcaua

SEQ ID NO: 516868 - RNA, 19 nt, Homo sapiens
  misc_RNA (1)...(19): siRNA sense strand
ggagaaccaugcacaucau

SEQ ID NO: 516869 - RNA, 19 nt, Homo sapiens
  misc_RNA (1)...(19): siRNA sense strand
agaagaaccuauuugagau

SEQ ID NO: 516870 - RNA, 19 nt, Homo sapiens
  misc_RNA (1)...(19): siRNA sense strand
uggagaugcuguuuaagaa

SEQ ID NO: 516871 - RNA, 19 nt, Homo sapiens
  misc_RNA (1)...(19): siRNA sense strand
caaggccaguccuaagauu

SEQ ID NO: 516872 - RNA, 19 nt, Homo sapiens
  misc_RNA (1)...(19): siRNA sense strand
gagaggagaccacccguau

SEQ ID NO: 516873 - RNA, 19 nt, Homo sapiens
  misc_RNA (1)...(19): siRNA sense strand
gaaaguuggagccauccua

SEQ ID NO: 516874 - RNA, 19 nt, Homo sapiens
  misc_RNA (1)...(19): siRNA sense strand
ccacguucccuacagcuua

SEQ ID NO: 516875 - RNA, 19 nt, Homo sapiens
  misc_RNA (1)...(19): siRNA sense strand
gcugaaagccuuccuagag

SEQ ID NO: 516876 - RNA, 19 nt, Homo sapiens
  misc_RNA (1)...(19): siRNA sense strand
uggaggaguucaucaagaa

SEQ ID NO: 516877 - RNA, 19 nt, Homo sapiens
  misc_RNA (1)...(19): siRNA sense strand
gagaacguccaguccuaua

SEQ ID NO: 516878 - RNA, 19 nt, Homo sapiens
  misc_RNA (1)...(19): siRNA sense strand
acucgaaucuucccugcua

SEQ ID NO: 516879 - RNA, 19 nt, Homo sapiens
  misc_RNA (1)...(19): siRNA sense strand
gcaaggaggaggacugcaa

SEQ ID NO: 516880 - RNA, 19 nt, Homo sapiens
  misc_RNA (1)...(19): siRNA sense strand
acaagcagauucuaaacau

SEQ ID NO: 516881 - RNA, 19 nt, Homo sapiens
  misc_RNA (1)...(19): siRNA sense strand
ugacacaccuguaccaacu

SEQ ID NO: 516882 - RNA, 19 nt, Homo sapiens
  misc_RNA (1)...(19): siRNA sense strand
gggcaacuauccuguaacu

SEQ ID NO: 516883 - RNA, 19 nt, Homo sapiens
  misc_RNA (1)...(19): siRNA sense strand
cagcuguccucaagcauau

SEQ ID NO: 516884 - RNA, 19 nt, Homo sapiens
  misc_RNA (1)...(19): siRNA sense strand
gcuagaagacauuaagaau

SEQ ID NO: 516885 - RNA, 19 nt, Homo sapiens
  misc_RNA (1)...(19): siRNA sense strand
gaagaaccuauuugagaug

SEQ ID NO: 516886 - RNA, 19 nt, Homo sapiens
  misc_RNA (1)...(19): siRNA sense strand
ugaaggagccgcugagcaa

SEQ ID NO: 516887 - RNA, 19 nt, Homo sapiens
  misc_RNA (1)...(19): siRNA sense strand
guccaguccuauauaguuu

SEQ ID NO: 516888 - RNA, 19 nt, Homo sapiens
  misc_RNA (1)...(19): siRNA sense strand
uaacagugccuuggaguug

SEQ ID NO: 516889 - RNA, 19 nt, Homo sapiens
  misc_RNA (1)...(19): siRNA sense strand
acaauauucuggcaucugu

SEQ ID NO: 516890 - RNA, 19 nt, Homo sapiens
  misc_RNA (1)...(19): siRNA sense strand
gcaacgcgaccuacucaug

SEQ ID NO: 516891 - RNA, 19 nt, Homo sapiens
  misc_RNA (1)...(19): siRNA sense strand
gagggagccuggucuuugg

SEQ ID NO: 516892 - RNA, 19 nt, Homo sapiens
  misc_RNA (1)...(19): siRNA sense strand
gccauugguuucacagaug

SEQ ID NO: 516893 - RNA, 19 nt, Homo sapiens
  misc_RNA (1)...(19): siRNA sense strand
ccaagugcagcaucuguaa

SEQ ID NO: 516894 - RNA, 19 nt, Homo sapiens
  misc_RNA (1)...(19): siRNA sense strand
aacuggagaugcuguuuaa

SEQ ID NO: 516895 - RNA, 19 nt, Homo sapiens
  misc_RNA (1)...(19): siRNA sense strand
aagggcaacuauccuguaa

SEQ ID NO: 516896 - RNA, 19 nt, Homo sapiens
  misc_RNA (1)...(19): siRNA sense strand
gaaacagagccagcagauu

SEQ ID NO: 516897 - RNA, 19 nt, Homo sapiens
  misc_RNA (1)...(19): siRNA sense strand
caagggcaacuauccugua

SEQ ID NO: 516898 - RNA, 19 nt, Homo sapiens
  misc_RNA (1)...(19): siRNA sense strand
cuuccaagccuacaaacua

SEQ ID NO: 516899 - RNA, 19 nt, Homo sapiens
  misc_RNA (1)...(19): siRNA sense strand
gaaggacacacagaccaaa

SEQ ID NO: 516900 - RNA, 19 nt, Homo sapiens
  misc_RNA (1)...(19): siRNA sense strand
ucuaugaccugugcaacaa

SEQ ID NO: 516901 - RNA, 19 nt, Homo sapiens
  misc_RNA (1)...(19): siRNA sense strand
uuuagaggcuaccuuauca

SEQ ID NO: 516902 - RNA, 19 nt, Homo sapiens
  misc_RNA (1)...(19): siRNA sense strand
guaccagccugaugaacgu

SEQ ID NO: 516903 - RNA, 19 nt, Homo sapiens
  misc_RNA (1)...(19): siRNA sense strand
ccaugaaaaucucaacuuu

SEQ ID NO: 516904 - RNA, 19 nt, Homo sapiens
  misc_RNA (1)...(19): siRNA sense strand
ccacucacuuguuuguugu

SEQ ID NO: 516905 - RNA, 19 nt, Homo sapiens
  misc_RNA (1)...(19): siRNA sense strand
caggaaagaccacucacuu

SEQ ID NO: 516906 - RNA, 19 nt, Homo sapiens
  misc_RNA (1)...(19): siRNA sense strand
gugcuccaaugacagcuuu

SEQ ID NO: 516907 - RNA, 19 nt, Homo sapiens
  misc_RNA (1)...(19): siRNA sense strand
acacaccuguaccaacuga

SEQ ID NO: 516908 - RNA, 19 nt, Homo sapiens
  misc_RNA (1)...(19): siRNA sense strand
ggccauugguuucacagau

SEQ ID NO: 516909 - RNA, 19 nt, Homo sapiens
  misc_RNA (1)...(19): siRNA sense strand
uaccagagcagacaacuca

SEQ ID NO: 516910 - RNA, 19 nt, Homo sapiens
  misc_RNA (1)...(19): siRNA sense strand
guaacuggauuggccuuuc

SEQ ID NO: 516911 - RNA, 19 nt, Homo sapiens
  misc_RNA (1)...(19): siRNA sense strand
gcaauauauccgaaccauu

SEQ ID NO: 516912 - RNA, 19 nt, Homo sapiens
  misc_RNA (1)...(19): siRNA sense strand
acucugcacucgaaucuuc

SEQ ID NO: 516913 - RNA, 19 nt, Homo sapiens
  misc_RNA (1)...(19): siRNA sense strand
caugccaccucuucuagug

SEQ ID NO: 516914 - RNA, 19 nt, Homo sapiens
  misc_RNA (1)...(19): siRNA sense strand
ccauuucccugcugaagag

SEQ ID NO: 516915 - RNA, 19 nt, Homo sapiens
  misc_RNA (1)...(19): siRNA sense strand
cgagggagccuggucuuug

SEQ ID NO: 516916 - RNA, 19 nt, Homo sapiens
  misc_RNA (1)...(19): siRNA sense strand
caagcagauucuaaacauc

SEQ ID NO: 516917 - RNA, 19 nt, Homo sapiens
  misc_RNA (1)...(19): siRNA sense strand
gaguuuaccagcagggauu

SEQ ID NO: 516918 - RNA, 19 nt, Homo sapiens
  misc_RNA (1)...(19): siRNA sense strand
gauggcaguguuacauuga

SEQ ID NO: 516919 - RNA, 19 nt, Homo sapiens
  misc_RNA (1)...(19): siRNA sense strand
gaaaaucucaacuuuaugg

SEQ ID NO: 516920 - RNA, 19 nt, Homo sapiens
  misc_RNA (1)...(19): siRNA sense strand
aauccacucugcacucgaa

SEQ ID NO: 516921 - RNA, 19 nt, Homo sapiens
  misc_RNA (1)...(19): siRNA sense strand
gauccgcugcuuccaaguu

SEQ ID NO: 516922 - RNA, 19 nt, Homo sapiens
  misc_RNA (1)...(19): siRNA sense strand
gaaggauccacaggucaaa

SEQ ID NO: 516923 - RNA, 19 nt, Homo sapiens
  misc_RNA (1)...(19): siRNA sense strand
gaagauccagcuagaagac

SEQ ID NO: 516924 - RNA, 19 nt, Homo sapiens
  misc_RNA (1)...(19): siRNA sense strand
cuacucccaugcccuguau

SEQ ID NO: 516925 - RNA, 19 nt, Homo sapiens
  misc_RNA (1)...(19): siRNA sense strand
ggaggaguucaucaagaaa

SEQ ID NO: 516926 - RNA, 19 nt, Homo sapiens
  misc_RNA (1)...(19): siRNA sense strand
ggagccauccuaugugauc

SEQ ID NO: 516927 - RNA, 19 nt, Homo sapiens
  misc_RNA (1)...(19): siRNA sense strand
gacaagcagauucuaaaca

SEQ ID NO: 516928 - RNA, 19 nt, Homo sapiens
  misc_RNA (1)...(19): siRNA sense strand
ucuggcaucuguuggagaa

SEQ ID NO: 516929 - RNA, 19 nt, Homo sapiens
  misc_RNA (1)...(19): siRNA sense strand
gggaugagugugucuacuu

SEQ ID NO: 516930 - RNA, 19 nt, Homo sapiens
  misc_RNA (1)...(19): siRNA sense strand
agauggcaguguuacauug

SEQ ID NO: 516931 - RNA, 19 nt, Homo sapiens
  misc_RNA (1)...(19): siRNA sense strand
gcacaauauucuggcaucu

SEQ ID NO: 516932 - RNA, 19 nt, Homo sapiens
  misc_RNA (1)...(19): siRNA sense strand
cauagcaagacccagauuu

SEQ ID NO: 516933 - RNA, 19 nt, Homo sapiens
  misc_RNA (1)...(19): siRNA sense strand
aacacugcuuugagaguua

SEQ ID NO: 516934 - RNA, 19 nt, Homo sapiens
  misc_RNA (1)...(19): siRNA sense strand
uccagcagaucaugcacua

SEQ ID NO: 516935 - RNA, 19 nt, Homo sapiens
  misc_RNA (1)...(19): siRNA sense strand
gaucuacgacacacuccuu

SEQ ID NO: 516936 - RNA, 19 nt, Homo sapiens
  misc_RNA (1)...(19): siRNA sense strand
ugaagcagcacaauauucu

SEQ ID NO: 516937 - RNA, 19 nt, Homo sapiens
  misc_RNA (1)...(19): siRNA sense strand
caugagugguaccugaaga

SEQ ID NO: 516938 - RNA, 19 nt, Homo sapiens
  misc_RNA (1)...(19): siRNA sense strand
ccgaaccauuggaaaguug

SEQ ID NO: 516939 - RNA, 19 nt, Homo sapiens
  misc_RNA (1)...(19): siRNA sense strand
gcaccgucuuugaggaugu

SEQ ID NO: 516940 - RNA, 19 nt, Homo sapiens
  misc_RNA (1)...(19): siRNA sense strand
gcagagauauuacagauug

SEQ ID NO: 516941 - RNA, 19 nt, Homo sapiens
  misc_RNA (1)...(19): siRNA sense strand
gguggaaucugcagaaaua

SEQ ID NO: 516942 - RNA, 19 nt, Homo sapiens
  misc_RNA (1)...(19): siRNA sense strand
caacagacauugcugaaga

SEQ ID NO: 516943 - RNA, 19 nt, Homo sapiens
  misc_RNA (1)...(19): siRNA sense strand
gagacaauguaucgaaaua

SEQ ID NO: 516944 - RNA, 19 nt, Homo sapiens
  misc_RNA (1)...(19): siRNA sense strand
caaaggacauguuaaagau

SEQ ID NO: 516945 - RNA, 19 nt, Homo sapiens
  misc_RNA (1)...(19): siRNA sense strand
gcaaauggagcucccuuua

SEQ ID NO: 516946 - RNA, 19 nt, Homo sapiens
  misc_RNA (1)...(19): siRNA sense strand
caaauauggugcugaugua

SEQ ID NO: 516947 - RNA, 19 nt, Homo sapiens
  misc_RNA (1)...(19): siRNA sense strand
gcaaaggacauguuaaaga

SEQ ID NO: 516948 - RNA, 19 nt, Homo sapiens
  misc_RNA (1)...(19): siRNA sense strand
caagucaucacaauaguua

SEQ ID NO: 516949 - RNA, 19 nt, Homo sapiens
  misc_RNA (1)...(19): siRNA sense strand
caacaaguauuaacaguac

SEQ ID NO: 516950 - RNA, 19 nt, Homo sapiens
  misc_RNA (1)...(19): siRNA sense strand
gaugacagcucuccauugg

SEQ ID NO: 516951 - RNA, 19 nt, Homo sapiens
  misc_RNA (1)...(19): siRNA sense strand
gacaauacaugcugcaaca

SEQ ID NO: 516952 - RNA, 19 nt, Homo sapiens
  misc_RNA (1)...(19): siRNA sense strand
gaugaugaaguucguauuu

SEQ ID NO: 516953 - RNA, 19 nt, Homo sapiens
  misc_RNA (1)...(19): siRNA sense strand
gaagaaacuguuauaagug

SEQ ID NO: 516954 - RNA, 19 nt, Homo sapiens
  misc_RNA (1)...(19): siRNA sense strand
gaccgaacaccauuacaua

SEQ ID NO: 516955 - RNA, 19 nt, Homo sapiens
  misc_RNA (1)...(19): siRNA sense strand
ccacagaacacaaucauca

SEQ ID NO: 516956 - RNA, 19 nt, Homo sapiens
  misc_RNA (1)...(19): siRNA sense strand
gcauggugcugaugucaau

SEQ ID NO: 516957 - RNA, 19 nt, Homo sapiens
  misc_RNA (1)...(19): siRNA sense strand
gcugggaacuucuccacuu

SEQ ID NO: 516958 - RNA, 19 nt, Homo sapiens
  misc_RNA (1)...(19): siRNA sense strand
gauguacacacgcaaagua

SEQ ID NO: 516959 - RNA, 19 nt, Homo sapiens
  misc_RNA (1)...(19): siRNA sense strand
gugcugaugucaaugcaaa

SEQ ID NO: 516960 - RNA, 19 nt, Homo sapiens
  misc_RNA (1)...(19): siRNA sense strand
uagcagagauauuacagau

SEQ ID NO: 516961 - RNA, 19 nt, Homo sapiens
  misc_RNA (1)...(19): siRNA sense strand
uggaaacucuucuacauca

SEQ ID NO: 516962 - RNA, 19 nt, Homo sapiens
  misc_RNA (1)...(19): siRNA sense strand
ggaaucugcagaaauagaa

SEQ ID NO: 516963 - RNA, 19 nt, Homo sapiens
  misc_RNA (1)...(19): siRNA sense strand
gaagaaccaccagcuaaga

SEQ ID NO: 516964 - RNA, 19 nt, Homo sapiens
  misc_RNA (1)...(19): siRNA sense strand
gaacuucuccacuucaucu

SEQ ID NO: 516965 - RNA, 19 nt, Homo sapiens
  misc_RNA (1)...(19): siRNA sense strand
agacauugcugaagaaacu

SEQ ID NO: 516966 - RNA, 19 nt, Homo sapiens
  misc_RNA (1)...(19): siRNA sense strand
aaggacauguuaaagauga

SEQ ID NO: 516967 - RNA, 19 nt, Homo sapiens
  misc_RNA (1)...(19): siRNA sense strand
gugaagaaccaccagcuaa

SEQ ID NO: 516968 - RNA, 19 nt, Homo sapiens
  misc_RNA (1)...(19): siRNA sense strand
gagcaggucaagaugauga

SEQ ID NO: 516969 - RNA, 19 nt, Homo sapiens
  misc_RNA (1)...(19): siRNA sense strand
ggaaauuugcacucuauuc

SEQ ID NO: 516970 - RNA, 19 nt, Homo sapiens
  misc_RNA (1)...(19): siRNA sense strand
aaacucuucuacaucagua

SEQ ID NO: 516971 - RNA, 19 nt, Homo sapiens
  misc_RNA (1)...(19): siRNA sense strand
caaugcaaaggacauguua

SEQ ID NO: 516972 - RNA, 19 nt, Homo sapiens
  misc_RNA (1)...(19): siRNA sense strand
uaagagacaauguaucgaa

SEQ ID NO: 516973 - RNA, 19 nt, Homo sapiens
  misc_RNA (1)...(19): siRNA sense strand
ggucagcccaucauuguga

SEQ ID NO: 516974 - RNA, 19 nt, Homo sapiens
  misc_RNA (1)...(19): siRNA sense strand
agaaccaaaucaacacaaa

SEQ ID NO: 516975 - RNA, 19 nt, Homo sapiens
  misc_RNA (1)...(19): siRNA sense strand
uguaucugcuguucaguuu

SEQ ID NO: 516976 - RNA, 19 nt, Homo sapiens
  misc_RNA (1)...(19): siRNA sense strand
gacaacaaguauuaacagu

SEQ ID NO: 516977 - RNA, 19 nt, Homo sapiens
  misc_RNA (1)...(19): siRNA sense strand
guacacacgcaaaguaaau

SEQ ID NO: 516978 - RNA, 19 nt, Homo sapiens
  misc_RNA (1)...(19): siRNA sense strand
aaauggagcucccuuuacu

SEQ ID NO: 516979 - RNA, 19 nt, Homo sapiens
  misc_RNA (1)...(19): siRNA sense strand
agauggacaacaaguauua

SEQ ID NO: 516980 - RNA, 19 nt, Homo sapiens
  misc_RNA (1)...(19): siRNA sense strand
acaccacaguuuaucauug

SEQ ID NO: 516981 - RNA, 19 nt, Homo sapiens
  misc_RNA (1)...(19): siRNA sense strand
caauagacaauggaaauga

SEQ ID NO: 516982 - RNA, 19 nt, Homo sapiens
  misc_RNA (1)...(19): siRNA sense strand
gcaagucaucacaauaguu

SEQ ID NO: 516983 - RNA, 19 nt, Homo sapiens
  misc_RNA (1)...(19): siRNA sense strand
ggagcucccuuuacuacag

SEQ ID NO: 516984 - RNA, 19 nt, Homo sapiens
  misc_RNA (1)...(19): siRNA sense strand
cacaauaguuacagaugga

SEQ ID NO: 516985 - RNA, 19 nt, Homo sapiens
  misc_RNA (1)...(19): siRNA sense strand
ggaccgaacaccauuacau

SEQ ID NO: 516986 - RNA, 19 nt, Homo sapiens
  misc_RNA (1)...(19): siRNA sense strand
aagagacaauguaucgaaa

SEQ ID NO: 516987 - RNA, 19 nt, Homo sapiens
  misc_RNA (1)...(19): siRNA sense strand
gagcucccuuuacuacaga

SEQ ID NO: 516988 - RNA, 19 nt, Homo sapiens
  misc_RNA (1)...(19): siRNA sense strand
cagcaagucaucacaauag

SEQ ID NO: 516989 - RNA, 19 nt, Homo sapiens
  misc_RNA (1)...(19): siRNA sense strand
gcugcaacaccacaguuua

SEQ ID NO: 516990 - RNA, 19 nt, Homo sapiens
  misc_RNA (1)...(19): siRNA sense strand
caacacaaacccagagagu

SEQ ID NO: 516991 - RNA, 19 nt, Homo sapiens
  misc_RNA (1)...(19): siRNA sense strand
ucaaauauggugcugaugu

SEQ ID NO: 516992 - RNA, 19 nt, Homo sapiens
  misc_RNA (1)...(19): siRNA sense strand
gcacaguauggucauuauu

SEQ ID NO: 516993 - RNA, 19 nt, Homo sapiens
  misc_RNA (1)...(19): siRNA sense strand
gcuaagagacaauguaucg

SEQ ID NO: 516994 - RNA, 19 nt, Homo sapiens
  misc_RNA (1)...(19): siRNA sense strand
ccagauggacaacaaguau

SEQ ID NO: 516995 - RNA, 19 nt, Homo sapiens
  misc_RNA (1)...(19): siRNA sense strand
gagcuggugugagcagaga

SEQ ID NO: 516996 - RNA, 19 nt, Homo sapiens
  misc_RNA (1)...(19): siRNA sense strand
ggacaacaaguauuaacag

SEQ ID NO: 516997 - RNA, 19 nt, Homo sapiens
  misc_RNA (1)...(19): siRNA sense strand
gcaacaccacaguuuauca

SEQ ID NO: 516998 - RNA, 19 nt, Homo sapiens
  misc_RNA (1)...(19): siRNA sense strand
gcugaagaaacuguuauaa

SEQ ID NO: 516999 - RNA, 19 nt, Homo sapiens
  misc_RNA (1)...(19): siRNA sense strand
gcagagaugccagaaccaa

SEQ ID NO: 517000 - RNA, 19 nt, Homo sapiens
  misc_RNA (1)...(19): siRNA sense strand
uaacaguaccagcaacaga

SEQ ID NO: 517001 - RNA, 19 nt, Homo sapiens
  misc_RNA (1)...(19): siRNA sense strand
cagcacaguauggucauua

SEQ ID NO: 517002 - RNA, 19 nt, Homo sapiens
  misc_RNA (1)...(19): siRNA sense strand
gaaauuugcacucuauucc

SEQ ID NO: 517003 - RNA, 19 nt, Homo sapiens
  misc_RNA (1)...(19): siRNA sense strand
ugccuuagcugaagcaucu

SEQ ID NO: 517004 - RNA, 19 nt, Homo sapiens
  misc_RNA (1)...(19): siRNA sense strand
gcacgagcaggucaagaug

SEQ ID NO: 517005 - RNA, 19 nt, Homo sapiens
  misc_RNA (1)...(19): siRNA sense strand
ggaauuggucagcccauca

SEQ ID NO: 517006 - RNA, 19 nt, Homo sapiens
  misc_RNA (1)...(19): siRNA sense strand
ggccacagaagaaguaguu

SEQ ID NO: 517007 - RNA, 19 nt, Homo sapiens
  misc_RNA (1)...(19): siRNA sense strand
caucaguauuagcuacauu

SEQ ID NO: 517008 - RNA, 19 nt, Homo sapiens
  misc_RNA (1)...(19): siRNA sense strand
gaagauuuagcagagauau

SEQ ID NO: 517009 - RNA, 19 nt, Homo sapiens
  misc_RNA (1)...(19): siRNA sense strand
caccacaguuuaucauugg

SEQ ID NO: 517010 - RNA, 19 nt, Homo sapiens
  misc_RNA (1)...(19): siRNA sense strand
cagcuaagagacaauguau

SEQ ID NO: 517011 - RNA, 19 nt, Homo sapiens
  misc_RNA (1)...(19): siRNA sense strand
caugccagauggacaacaa

SEQ ID NO: 517012 - RNA, 19 nt, Homo sapiens
  misc_RNA (1)...(19): siRNA sense strand
gaaacucuucuacaucagu

SEQ ID NO: 517013 - RNA, 19 nt, Homo sapiens
  misc_RNA (1)...(19): siRNA sense strand
caagaggugguggaacuuu

SEQ ID NO: 517014 - RNA, 19 nt, Homo sapiens
  misc_RNA (1)...(19): siRNA sense strand
cagacuggcugggaacuuc

SEQ ID NO: 517015 - RNA, 19 nt, Homo sapiens
  misc_RNA (1)...(19): siRNA sense strand
gauauuacagauugcuaug

SEQ ID NO: 517016 - RNA, 19 nt, Homo sapiens
  misc_RNA (1)...(19): siRNA sense strand
gcagcacaguauggucauu

SEQ ID NO: 517017 - RNA, 19 nt, Homo sapiens
  misc_RNA (1)...(19): siRNA sense strand
ucagcaagucaucacaaua

SEQ ID NO: 517018 - RNA, 19 nt, Homo sapiens
  misc_RNA (1)...(19): siRNA sense strand
caaauggagcucccuuuac

SEQ ID NO: 517019 - RNA, 19 nt, Homo sapiens
  misc_RNA (1)...(19): siRNA sense strand
uucagaaacuccaguagug

SEQ ID NO: 517020 - RNA, 19 nt, Homo sapiens
  misc_RNA (1)...(19): siRNA sense strand
cagaacacaaucaucaaga

SEQ ID NO: 517021 - RNA, 19 nt, Homo sapiens
  misc_RNA (1)...(19): siRNA sense strand
ccagcuaagagacaaugua

SEQ ID NO: 517022 - RNA, 19 nt, Homo sapiens
  misc_RNA (1)...(19): siRNA sense strand
uuggaaauuugcacucuau

SEQ ID NO: 517023 - RNA, 19 nt, Homo sapiens
  misc_RNA (1)...(19): siRNA sense strand
caacaccacaguuuaucau

SEQ ID NO: 517024 - RNA, 19 nt, Homo sapiens
  misc_RNA (1)...(19): siRNA sense strand
gagauauuacagauugcua

SEQ ID NO: 517025 - RNA, 19 nt, Homo sapiens
  misc_RNA (1)...(19): siRNA sense strand
gguggaacuuuuaaucaaa

SEQ ID NO: 517026 - RNA, 19 nt, Homo sapiens
  misc_RNA (1)...(19): siRNA sense strand
gggaacuucuccacuucau

SEQ ID NO: 517027 - RNA, 19 nt, Homo sapiens
  misc_RNA (1)...(19): siRNA sense strand
gauggacaacaaguauuaa

SEQ ID NO: 517028 - RNA, 19 nt, Homo sapiens
  misc_RNA (1)...(19): siRNA sense strand
uaucugcuguucaguuugg

SEQ ID NO: 517029 - RNA, 19 nt, Homo sapiens
  misc_RNA (1)...(19): siRNA sense strand
cagagaguccugacacugu

SEQ ID NO: 517030 - RNA, 19 nt, Homo sapiens
  misc_RNA (1)...(19): siRNA sense strand
uauuacagauugcuaugca

SEQ ID NO: 517031 - RNA, 19 nt, Homo sapiens
  misc_RNA (1)...(19): siRNA sense strand
acacacgcaaaguaaauuu

SEQ ID NO: 517032 - RNA, 19 nt, Homo sapiens
  misc_RNA (1)...(19): siRNA sense strand
gaaacuguuauaagugaag

SEQ ID NO: 517033 - RNA, 19 nt, Homo sapiens
  misc_RNA (1)...(19): siRNA sense strand
ccgaacaccauuacauaug

SEQ ID NO: 517034 - RNA, 19 nt, Homo sapiens
  misc_RNA (1)...(19): siRNA sense strand
gucagcaagucaucacaau

SEQ ID NO: 517035 - RNA, 19 nt, Homo sapiens
  misc_RNA (1)...(19): siRNA sense strand
cacaguauggucauuauuc

SEQ ID NO: 517036 - RNA, 19 nt, Homo sapiens
  misc_RNA (1)...(19): siRNA sense strand
uuuggaaacucuucuacau

SEQ ID NO: 517037 - RNA, 19 nt, Homo sapiens
  misc_RNA (1)...(19): siRNA sense strand
gacaauggaaaugaagauu

SEQ ID NO: 517038 - RNA, 19 nt, Homo sapiens
  misc_RNA (1)...(19): siRNA sense strand
gaaccaaaucaacacaaac

SEQ ID NO: 517039 - RNA, 19 nt, Homo sapiens
  misc_RNA (1)...(19): siRNA sense strand
ucaucuagcagcacaguau

SEQ ID NO: 517040 - RNA, 19 nt, Homo sapiens
  misc_RNA (1)...(19): siRNA sense strand
gcagagauauuacagauug

SEQ ID NO: 517041 - RNA, 19 nt, Homo sapiens
  misc_RNA (1)...(19): siRNA sense strand
gguggaaucugcagaaaua

SEQ ID NO: 517042 - RNA, 19 nt, Homo sapiens
  misc_RNA (1)...(19): siRNA sense strand
caacagacauugcugaaga

SEQ ID NO: 517043 - RNA, 19 nt, Homo sapiens
  misc_RNA (1)...(19): siRNA sense strand
gagacaauguaucgaaaua

SEQ ID NO: 517044 - RNA, 19 nt, Homo sapiens
  misc_RNA (1)...(19): siRNA sense strand
caaaggacauguuaaagau

SEQ ID NO: 517045 - RNA, 19 nt, Homo sapiens
  misc_RNA (1)...(19): siRNA sense strand
gcaaauggagcucccuuua

SEQ ID NO: 517046 - RNA, 19 nt, Homo sapiens
  misc_RNA (1)...(19): siRNA sense strand
caaauauggugcugaugua

SEQ ID NO: 517047 - RNA, 19 nt, Homo sapiens
  misc_RNA (1)...(19): siRNA sense strand
gcaaaggacauguuaaaga

SEQ ID NO: 517048 - RNA, 19 nt, Homo sapiens
  misc_RNA (1)...(19): siRNA sense strand
caagucaucacaauaguua

SEQ ID NO: 517049 - RNA, 19 nt, Homo sapiens
  misc_RNA (1)...(19): siRNA sense strand
caacaaguauuaacaguac

SEQ ID NO: 517050 - RNA, 19 nt, Homo sapiens
  misc_RNA (1)...(19): siRNA sense strand
gaugacagcucuccauugg

SEQ ID NO: 517051 - RNA, 19 nt, Homo sapiens
  misc_RNA (1)...(19): siRNA sense strand
gacaauacaugcugcaaca

SEQ ID NO: 517052 - RNA, 19 nt, Homo sapiens
  misc_RNA (1)...(19): siRNA sense strand
gaugaugaaguucguauuu

SEQ ID NO: 517053 - RNA, 19 nt, Homo sapiens
  misc_RNA (1)...(19): siRNA sense strand
gaagaaacuguuauaagug

SEQ ID NO: 517054 - RNA, 19 nt, Homo sapiens
  misc_RNA (1)...(19): siRNA sense strand
gaccgaacaccauuacaua

SEQ ID NO: 517055 - RNA, 19 nt, Homo sapiens
  misc_RNA (1)...(19): siRNA sense strand
ccacagaacacaaucauca

SEQ ID NO: 517056 - RNA, 19 nt, Homo sapiens
  misc_RNA (1)...(19): siRNA sense strand
gcauggugcugaugucaau

SEQ ID NO: 517057 - RNA, 19 nt, Homo sapiens
  misc_RNA (1)...(19): siRNA sense strand
gcugggaacuucuccacuu

SEQ ID NO: 517058 - RNA, 19 nt, Homo sapiens
  misc_RNA (1)...(19): siRNA sense strand
gauguacacacgcaaagua

SEQ ID NO: 517059 - RNA, 19 nt, Homo sapiens
  misc_RNA (1)...(19): siRNA sense strand
gugcugaugucaaugcaaa

SEQ ID NO: 517060 - RNA, 19 nt, Homo sapiens
  misc_RNA (1)...(19): siRNA sense strand
uagcagagauauuacagau

SEQ ID NO: 517061 - RNA, 19 nt, Homo sapiens
  misc_RNA (1)...(19): siRNA sense strand
uggaaacucuucuacauca

SEQ ID NO: 517062 - RNA, 19 nt, Homo sapiens
  misc_RNA (1)...(19): siRNA sense strand
ggaaucugcagaaauagaa

SEQ ID NO: 517063 - RNA, 19 nt, Homo sapiens
  misc_RNA (1)...(19): siRNA sense strand
gaagaaccaccagcuaaga

SEQ ID NO: 517064 - RNA, 19 nt, Homo sapiens
  misc_RNA (1)...(19): siRNA sense strand
gaacuucuccacuucaucu

SEQ ID NO: 517065 - RNA, 19 nt, Homo sapiens
  misc_RNA (1)...(19): siRNA sense strand
agacauugcugaagaaacu

SEQ ID NO: 517066 - RNA, 19 nt, Homo sapiens
  misc_RNA (1)...(19): siRNA sense strand
aaggacauguuaaagauga

SEQ ID NO: 517067 - RNA, 19 nt, Homo sapiens
  misc_RNA (1)...(19): siRNA sense strand
gugaagaaccaccagcuaa

SEQ ID NO: 517068 - RNA, 19 nt, Homo sapiens
  misc_RNA (1)...(19): siRNA sense strand
gagcaggucaagaugauga

SEQ ID NO: 517069 - RNA, 19 nt, Homo sapiens
  misc_RNA (1)...(19): siRNA sense strand
ggaaauuugcacucuauuc

SEQ ID NO: 517070 - RNA, 19 nt, Homo sapiens
  misc_RNA (1)...(19): siRNA sense strand
aaacucuucuacaucagua

SEQ ID NO: 517071 - RNA, 19 nt, Homo sapiens
  misc_RNA (1)...(19): siRNA sense strand
caaugcaaaggacauguua

SEQ ID NO: 517072 - RNA, 19 nt, Homo sapiens
  misc_RNA (1)...(19): siRNA sense strand
uaagagacaauguaucgaa

SEQ ID NO: 517073 - RNA, 19 nt, Homo sapiens
  misc_RNA (1)...(19): siRNA sense strand
ggucagcccaucauuguga

SEQ ID NO: 517074 - RNA, 19 nt, Homo sapiens
  misc_RNA (1)...(19): siRNA sense strand
agaaccaaaucaacacaaa

SEQ ID NO: 517075 - RNA, 19 nt, Homo sapiens
  misc_RNA (1)...(19): siRNA sense strand
uguaucugcuguucaguuu

SEQ ID NO: 517076 - RNA, 19 nt, Homo sapiens
  misc_RNA (1)...(19): siRNA sense strand
gacaacaaguauuaacagu

SEQ ID NO: 517077 - RNA, 19 nt, Homo sapiens
  misc_RNA (1)...(19): siRNA sense strand
guacacacgcaaaguaaau

SEQ ID NO: 517078 - RNA, 19 nt, Homo sapiens
  misc_RNA (1)...(19): siRNA sense strand
aaauggagcucccuuuacu

SEQ ID NO: 517079 - RNA, 19 nt, Homo sapiens
  misc_RNA (1)...(19): siRNA sense strand
agauggacaacaaguauua

SEQ ID NO: 517080 - RNA, 19 nt, Homo sapiens
  misc_RNA (1)...(19): siRNA sense strand
acaccacaguuuaucauug

SEQ ID NO: 517081 - RNA, 19 nt, Homo sapiens
  misc_RNA (1)...(19): siRNA sense strand
caauagacaauggaaauga

SEQ ID NO: 517082 - RNA, 19 nt, Homo sapiens
  misc_RNA (1)...(19): siRNA sense strand
gcaagucaucacaauaguu

SEQ ID NO: 517083 - RNA, 19 nt, Homo sapiens
  misc_RNA (1)...(19): siRNA sense strand
ggagcucccuuuacuacag

SEQ ID NO: 517084 - RNA, 19 nt, Homo sapiens
  misc_RNA (1)...(19): siRNA sense strand
cacaauaguuacagaugga

SEQ ID NO: 517085 - RNA, 19 nt, Homo sapiens
  misc_RNA (1)...(19): siRNA sense strand
ggaccgaacaccauuacau

SEQ ID NO: 517086 - RNA, 19 nt, Homo sapiens
  misc_RNA (1)...(19): siRNA sense strand
aagagacaauguaucgaaa

SEQ ID NO: 517087 - RNA, 19 nt, Homo sapiens
  misc_RNA (1)...(19): siRNA sense strand
gagcucccuuuacuacaga

SEQ ID NO: 517088 - RNA, 19 nt, Homo sapiens
  misc_RNA (1)...(19): siRNA sense strand
cagcaagucaucacaauag

SEQ ID NO: 517089 - RNA, 19 nt, Homo sapiens
  misc_RNA (1)...(19): siRNA sense strand
gcugcaacaccacaguuua

SEQ ID NO: 517090 - RNA, 19 nt, Homo sapiens
  misc_RNA (1)...(19): siRNA sense strand
caacacaaacccagagagu

SEQ ID NO: 517091 - RNA, 19 nt, Homo sapiens
  misc_RNA (1)...(19): siRNA sense strand
ucaaauauggugcugaugu

SEQ ID NO: 517092 - RNA, 19 nt, Homo sapiens
  misc_RNA (1)...(19): siRNA sense strand
gcacaguauggucauuauu

SEQ ID NO: 517093 - RNA, 19 nt, Homo sapiens
  misc_RNA (1)...(19): siRNA sense strand
gcuaagagacaauguaucg

SEQ ID NO: 517094 - RNA, 19 nt, Homo sapiens
  misc_RNA (1)...(19): siRNA sense strand
ccagauggacaacaaguau

SEQ ID NO: 517095 - RNA, 19 nt, Homo sapiens
  misc_RNA (1)...(19): siRNA sense strand
gagcuggugugagcagaga

SEQ ID NO: 517096 - RNA, 19 nt, Homo sapiens
  misc_RNA (1)...(19): siRNA sense strand
ggacaacaaguauuaacag

SEQ ID NO: 517097 - RNA, 19 nt, Homo sapiens
  misc_RNA (1)...(19): siRNA sense strand
gcaacaccacaguuuauca

SEQ ID NO: 517098 - RNA, 19 nt, Homo sapiens
  misc_RNA (1)...(19): siRNA sense strand
gcugaagaaacuguuauaa

SEQ ID NO: 517099 - RNA, 19 nt, Homo sapiens
  misc_RNA (1)...(19): siRNA sense strand
gcagagaugccagaaccaa

SEQ ID NO: 517100 - RNA, 19 nt, Homo sapiens
  misc_RNA (1)...(19): siRNA sense strand
uaacaguaccagcaacaga

SEQ ID NO: 517101 - RNA, 19 nt, Homo sapiens
  misc_RNA (1)...(19): siRNA sense strand
cagcacaguauggucauua

SEQ ID NO: 517102 - RNA, 19 nt, Homo sapiens
  misc_RNA (1)...(19): siRNA sense strand
gaaauuugcacucuauucc

SEQ ID NO: 517103 - RNA, 19 nt, Homo sapiens
  misc_RNA (1)...(19): siRNA sense strand
ugccuuagcugaagcaucu

SEQ ID NO: 517104 - RNA, 19 nt, Homo sapiens
  misc_RNA (1)...(19): siRNA sense strand
gcacgagcaggucaagaug

SEQ ID NO: 517105 - RNA, 19 nt, Homo sapiens
  misc_RNA (1)...(19): siRNA sense strand
ggaauuggucagcccauca

SEQ ID NO: 517106 - RNA, 19 nt, Homo sapiens
  misc_RNA (1)...(19): siRNA sense strand
ggccacagaagaaguaguu

SEQ ID NO: 517107 - RNA, 19 nt, Homo sapiens
  misc_RNA (1)...(19): siRNA sense strand
caucaguauuagcuacauu

SEQ ID NO: 517108 - RNA, 19 nt, Homo sapiens
  misc_RNA (1)...(19): siRNA sense strand
gaagauuuagcagagauau

SEQ ID NO: 517109 - RNA, 19 nt, Homo sapiens
  misc_RNA (1)...(19): siRNA sense strand
caccacaguuuaucauugg

SEQ ID NO: 517110 - RNA, 19 nt, Homo sapiens
  misc_RNA (1)...(19): siRNA sense strand
cagcuaagagacaauguau

SEQ ID NO: 517111 - RNA, 19 nt, Homo sapiens
  misc_RNA (1)...(19): siRNA sense strand
caugccagauggacaacaa

SEQ ID NO: 517112 - RNA, 19 nt, Homo sapiens
  misc_RNA (1)...(19): siRNA sense strand
gaaacucuucuacaucagu

SEQ ID NO: 517113 - RNA, 19 nt, Homo sapiens
  misc_RNA (1)...(19): siRNA sense strand
caagaggugguggaacuuu

SEQ ID NO: 517114 - RNA, 19 nt, Homo sapiens
  misc_RNA (1)...(19): siRNA sense strand
cagacuggcugggaacuuc

SEQ ID NO: 517115 - RNA, 19 nt, Homo sapiens
  misc_RNA (1)...(19): siRNA sense strand
gauauuacagauugcuaug

SEQ ID NO: 517116 - RNA, 19 nt, Homo sapiens
  misc_RNA (1)...(19): siRNA sense strand
gcagcacaguauggucauu

SEQ ID NO: 517117 - RNA, 19 nt, Homo sapiens
  misc_RNA (1)...(19): siRNA sense strand
ucagcaagucaucacaaua

SEQ ID NO: 517118 - RNA, 19 nt, Homo sapiens
  misc_RNA (1)...(19): siRNA sense strand
caaauggagcucccuuuac

SEQ ID NO: 517119 - RNA, 19 nt, Homo sapiens
  misc_RNA (1)...(19): siRNA sense strand
uucagaaacuccaguagug

SEQ ID NO: 517120 - RNA, 19 nt, Homo sapiens
  misc_RNA (1)...(19): siRNA sense strand
cagaacacaaucaucaaga

SEQ ID NO: 517121 - RNA, 19 nt, Homo sapiens
  misc_RNA (1)...(19): siRNA sense strand
ccagcuaagagacaaugua

SEQ ID NO: 517122 - RNA, 19 nt, Homo sapiens
  misc_RNA (1)...(19): siRNA sense strand
uuggaaauuugcacucuau

SEQ ID NO: 517123 - RNA, 19 nt, Homo sapiens
  misc_RNA (1)...(19): siRNA sense strand
caacaccacaguuuaucau

SEQ ID NO: 517124 - RNA, 19 nt, Homo sapiens
  misc_RNA (1)...(19): siRNA sense strand
gagauauuacagauugcua

SEQ ID NO: 517125 - RNA, 19 nt, Homo sapiens
  misc_RNA (1)...(19): siRNA sense strand
gguggaacuuuuaaucaaa

SEQ ID NO: 517126 - RNA, 19 nt, Homo sapiens
  misc_RNA (1)...(19): siRNA sense strand
gggaacuucuccacuucau

SEQ ID NO: 517127 - RNA, 19 nt, Homo sapiens
  misc_RNA (1)...(19): siRNA sense strand
gauggacaacaaguauuaa

SEQ ID NO: 517128 - RNA, 19 nt, Homo sapiens
  misc_RNA (1)...(19): siRNA sense strand
uaucugcuguucaguuugg

SEQ ID NO: 517129 - RNA, 19 nt, Homo sapiens
  misc_RNA (1)...(19): siRNA sense strand
cagagaguccugacacugu

SEQ ID NO: 517130 - RNA, 19 nt, Homo sapiens
  misc_RNA (1)...(19): siRNA sense strand
uauuacagauugcuaugca

SEQ ID NO: 517131 - RNA, 19 nt, Homo sapiens
  misc_RNA (1)...(19): siRNA sense strand
acacacgcaaaguaaauuu

SEQ ID NO: 517132 - RNA, 19 nt, Homo sapiens
  misc_RNA (1)...(19): siRNA sense strand
gaaacuguuauaagugaag

SEQ ID NO: 517133 - RNA, 19 nt, Homo sapiens
  misc_RNA (1)...(19): siRNA sense strand
ccgaacaccauuacauaug

SEQ ID NO: 517134 - RNA, 19 nt, Homo sapiens
  misc_RNA (1)...(19): siRNA sense strand
gucagcaagucaucacaau

SEQ ID NO: 517135 - RNA, 19 nt, Homo sapiens
  misc_RNA (1)...(19): siRNA sense strand
cacaguauggucauuauuc

SEQ ID NO: 517136 - RNA, 19 nt, Homo sapiens
  misc_RNA (1)...(19): siRNA sense strand
uuuggaaacucuucuacau

SEQ ID NO: 517137 - RNA, 19 nt, Homo sapiens
  misc_RNA (1)...(19): siRNA sense strand
gacaauggaaaugaagauu

SEQ ID NO: 517138 - RNA, 19 nt, Homo sapiens
  misc_RNA (1)...(19): siRNA sense strand
gaaccaaaucaacacaaac

SEQ ID NO: 517139 - RNA, 19 nt, Homo sapiens
  misc_RNA (1)...(19): siRNA sense strand
ucaucuagcagcacaguau

SEQ ID NO: 517140 - RNA, 19 nt, Homo sapiens
  misc_RNA (1)...(19): siRNA sense strand
gcagagauauuacagauug

SEQ ID NO: 517141 - RNA, 19 nt, Homo sapiens
  misc_RNA (1)...(19): siRNA sense strand
gguggaaucugcagaaaua

SEQ ID NO: 517142 - RNA, 19 nt, Homo sapiens
  misc_RNA (1)...(19): siRNA sense strand
caacagacauugcugaaga

SEQ ID NO: 517143 - RNA, 19 nt, Homo sapiens
  misc_RNA (1)...(19): siRNA sense strand
gagacaauguaucgaaaua

SEQ ID NO: 517144 - RNA, 19 nt, Homo sapiens
  misc_RNA (1)...(19): siRNA sense strand
caaaggacauguuaaagau

SEQ ID NO: 517145 - RNA, 19 nt, Homo sapiens
  misc_RNA (1)...(19): siRNA sense strand
gcaaauggagcucccuuua

SEQ ID NO: 517146 - RNA, 19 nt, Homo sapiens
  misc_RNA (1)...(19): siRNA sense strand
caaauauggugcugaugua

SEQ ID NO: 517147 - RNA, 19 nt, Homo sapiens
  misc_RNA (1)...(19): siRNA sense strand
gcaaaggacauguuaaaga

SEQ ID NO: 517148 - RNA, 19 nt, Homo sapiens
  misc_RNA (1)...(19): siRNA sense strand
caagucaucacaauaguua

SEQ ID NO: 517149 - RNA, 19 nt, Homo sapiens
  misc_RNA (1)...(19): siRNA sense strand
caacaaguauuaacaguac

SEQ ID NO: 517150 - RNA, 19 nt, Homo sapiens
  misc_RNA (1)...(19): siRNA sense strand
gaugacagcucuccauugg

SEQ ID NO: 517151 - RNA, 19 nt, Homo sapiens
  misc_RNA (1)...(19): siRNA sense strand
gacaauacaugcugcaaca

SEQ ID NO: 517152 - RNA, 19 nt, Homo sapiens
  misc_RNA (1)...(19): siRNA sense strand
gaugaugaaguucguauuu

SEQ ID NO: 517153 - RNA, 19 nt, Homo sapiens
  misc_RNA (1)...(19): siRNA sense strand
gaagaaacuguuauaagug

SEQ ID NO: 517154 - RNA, 19 nt, Homo sapiens
  misc_RNA (1)...(19): siRNA sense strand
gaccgaacaccauuacaua

SEQ ID NO: 517155 - RNA, 19 nt, Homo sapiens
  misc_RNA (1)...(19): siRNA sense strand
ccacagaacacaaucauca

SEQ ID NO: 517156 - RNA, 19 nt, Homo sapiens
  misc_RNA (1)...(19): siRNA sense strand
gcauggugcugaugucaau

SEQ ID NO: 517157 - RNA, 19 nt, Homo sapiens
  misc_RNA (1)...(19): siRNA sense strand
gcugggaacuucuccacuu

SEQ ID NO: 517158 - RNA, 19 nt, Homo sapiens
  misc_RNA (1)...(19): siRNA sense strand
gauguacacacgcaaagua

SEQ ID NO: 517159 - RNA, 19 nt, Homo sapiens
  misc_RNA (1)...(19): siRNA sense strand
gugcugaugucaaugcaaa

SEQ ID NO: 517160 - RNA, 19 nt, Homo sapiens
  misc_RNA (1)...(19): siRNA sense strand
uagcagagauauuacagau

SEQ ID NO: 517161 - RNA, 19 nt, Homo sapiens
  misc_RNA (1)...(19): siRNA sense strand
uggaaacucuucuacauca

SEQ ID NO: 517162 - RNA, 19 nt, Homo sapiens
  misc_RNA (1)...(19): siRNA sense strand
ggaaucugcagaaauagaa

SEQ ID NO: 517163 - RNA, 19 nt, Homo sapiens
  misc_RNA (1)...(19): siRNA sense strand
gaagaaccaccagcuaaga

SEQ ID NO: 517164 - RNA, 19 nt, Homo sapiens
  misc_RNA (1)...(19): siRNA sense strand
gaacuucuccacuucaucu

SEQ ID NO: 517165 - RNA, 19 nt, Homo sapiens
  misc_RNA (1)...(19): siRNA sense strand
agacauugcugaagaaacu

SEQ ID NO: 517166 - RNA, 19 nt, Homo sapiens
  misc_RNA (1)...(19): siRNA sense strand
aaggacauguuaaagauga

SEQ ID NO: 517167 - RNA, 19 nt, Homo sapiens
  misc_RNA (1)...(19): siRNA sense strand
gugaagaaccaccagcuaa

SEQ ID NO: 517168 - RNA, 19 nt, Homo sapiens
  misc_RNA (1)...(19): siRNA sense strand
gagcaggucaagaugauga

SEQ ID NO: 517169 - RNA, 19 nt, Homo sapiens
  misc_RNA (1)...(19): siRNA sense strand
ggaaauuugcacucuauuc

SEQ ID NO: 517170 - RNA, 19 nt, Homo sapiens
  misc_RNA (1)...(19): siRNA sense strand
aaacucuucuacaucagua

SEQ ID NO: 517171 - RNA, 19 nt, Homo sapiens
  misc_RNA (1)...(19): siRNA sense strand
caaugcaaaggacauguua

SEQ ID NO: 517172 - RNA, 19 nt, Homo sapiens
  misc_RNA (1)...(19): siRNA sense strand
uaagagacaauguaucgaa

SEQ ID NO: 517173 - RNA, 19 nt, Homo sapiens
  misc_RNA (1)...(19): siRNA sense strand
ggucagcccaucauuguga

SEQ ID NO: 517174 - RNA, 19 nt, Homo sapiens
  misc_RNA (1)...(19): siRNA sense strand
agaaccaaaucaacacaaa

SEQ ID NO: 517175 - RNA, 19 nt, Homo sapiens
  misc_RNA (1)...(19): siRNA sense strand
uguaucugcuguucaguuu

SEQ ID NO: 517176 - RNA, 19 nt, Homo sapiens
  misc_RNA (1)...(19): siRNA sense strand
gacaacaaguauuaacagu

SEQ ID NO: 517177 - RNA, 19 nt, Homo sapiens
  misc_RNA (1)...(19): siRNA sense strand
guacacacgcaaaguaaau

SEQ ID NO: 517178 - RNA, 19 nt, Homo sapiens
  misc_RNA (1)...(19): siRNA sense strand
aaauggagcucccuuuacu

SEQ ID NO: 517179 - RNA, 19 nt, Homo sapiens
  misc_RNA (1)...(19): siRNA sense strand
agauggacaacaaguauua

SEQ ID NO: 517180 - RNA, 19 nt, Homo sapiens
  misc_RNA (1)...(19): siRNA sense strand
acaccacaguuuaucauug

SEQ ID NO: 517181 - RNA, 19 nt, Homo sapiens
  misc_RNA (1)...(19): siRNA sense strand
caauagacaauggaaauga

SEQ ID NO: 517182 - RNA, 19 nt, Homo sapiens
  misc_RNA (1)...(19): siRNA sense strand
gcaagucaucacaauaguu

SEQ ID NO: 517183 - RNA, 19 nt, Homo sapiens
  misc_RNA (1)...(19): siRNA sense strand
ggagcucccuuuacuacag

SEQ ID NO: 517184 - RNA, 19 nt, Homo sapiens
  misc_RNA (1)...(19): siRNA sense strand
cacaauaguuacagaugga

SEQ ID NO: 517185 - RNA, 19 nt, Homo sapiens
  misc_RNA (1)...(19): siRNA sense strand
ggaccgaacaccauuacau

SEQ ID NO: 517186 - RNA, 19 nt, Homo sapiens
  misc_RNA (1)...(19): siRNA sense strand
aagagacaauguaucgaaa

SEQ ID NO: 517187 - RNA, 19 nt, Homo sapiens
  misc_RNA (1)...(19): siRNA sense strand
gagcucccuuuacuacaga

SEQ ID NO: 517188 - RNA, 19 nt, Homo sapiens
  misc_RNA (1)...(19): siRNA sense strand
cagcaagucaucacaauag

SEQ ID NO: 517189 - RNA, 19 nt, Homo sapiens
  misc_RNA (1)...(19): siRNA sense strand
gcugcaacaccacaguuua

SEQ ID NO: 517190 - RNA, 19 nt, Homo sapiens
  misc_RNA (1)...(19): siRNA sense strand
caacacaaacccagagagu

SEQ ID NO: 517191 - RNA, 19 nt, Homo sapiens
  misc_RNA (1)...(19): siRNA sense strand
ucaaauauggugcugaugu

SEQ ID NO: 517192 - RNA, 19 nt, Homo sapiens
  misc_RNA (1)...(19): siRNA sense strand
gcacaguauggucauuauu

SEQ ID NO: 517193 - RNA, 19 nt, Homo sapiens
  misc_RNA (1)...(19): siRNA sense strand
gcuaagagacaauguaucg

SEQ ID NO: 517194 - RNA, 19 nt, Homo sapiens
  misc_RNA (1)...(19): siRNA sense strand
ccagauggacaacaaguau

SEQ ID NO: 517195 - RNA, 19 nt, Homo sapiens
  misc_RNA (1)...(19): siRNA sense strand
gagcuggugugagcagaga

SEQ ID NO: 517196 - RNA, 19 nt, Homo sapiens
  misc_RNA (1)...(19): siRNA sense strand
ggacaacaaguauuaacag

SEQ ID NO: 517197 - RNA, 19 nt, Homo sapiens
  misc_RNA (1)...(19): siRNA sense strand
gcaacaccacaguuuauca

SEQ ID NO: 517198 - RNA, 19 nt, Homo sapiens
  misc_RNA (1)...(19): siRNA sense strand
gcugaagaaacuguuauaa

SEQ ID NO: 517199 - RNA, 19 nt, Homo sapiens
  misc_RNA (1)...(19): siRNA sense strand
gcagagaugccagaaccaa

SEQ ID NO: 517200 - RNA, 19 nt, Homo sapiens
  misc_RNA (1)...(19): siRNA sense strand
uaacaguaccagcaacaga

SEQ ID NO: 517201 - RNA, 19 nt, Homo sapiens
  misc_RNA (1)...(19): siRNA sense strand
cagcacaguauggucauua

SEQ ID NO: 517202 - RNA, 19 nt, Homo sapiens
  misc_RNA (1)...(19): siRNA sense strand
gaaauuugcacucuauucc

SEQ ID NO: 517203 - RNA, 19 nt, Homo sapiens
  misc_RNA (1)...(19): siRNA sense strand
ugccuuagcugaagcaucu

SEQ ID NO: 517204 - RNA, 19 nt, Homo sapiens
  misc_RNA (1)...(19): siRNA sense strand
gcacgagcaggucaagaug

SEQ ID NO: 517205 - RNA, 19 nt, Homo sapiens
  misc_RNA (1)...(19): siRNA sense strand
ggaauuggucagcccauca

SEQ ID NO: 517206 - RNA, 19 nt, Homo sapiens
  misc_RNA (1)...(19): siRNA sense strand
ggccacagaagaaguaguu

SEQ ID NO: 517207 - RNA, 19 nt, Homo sapiens
  misc_RNA (1)...(19): siRNA sense strand
caucaguauuagcuacauu

SEQ ID NO: 517208 - RNA, 19 nt, Homo sapiens
  misc_RNA (1)...(19): siRNA sense strand
gaagauuuagcagagauau

SEQ ID NO: 517209 - RNA, 19 nt, Homo sapiens
  misc_RNA (1)...(19): siRNA sense strand
caccacaguuuaucauugg

SEQ ID NO: 517210 - RNA, 19 nt, Homo sapiens
  misc_RNA (1)...(19): siRNA sense strand
cagcuaagagacaauguau

SEQ ID NO: 517211 - RNA, 19 nt, Homo sapiens
  misc_RNA (1)...(19): siRNA sense strand
caugccagauggacaacaa

SEQ ID NO: 517212 - RNA, 19 nt, Homo sapiens
  misc_RNA (1)...(19): siRNA sense strand
gaaacucuucuacaucagu

SEQ ID NO: 517213 - RNA, 19 nt, Homo sapiens
  misc_RNA (1)...(19): siRNA sense strand
caagaggugguggaacuuu

SEQ ID NO: 517214 - RNA, 19 nt, Homo sapiens
  misc_RNA (1)...(19): siRNA sense strand
cagacuggcugggaacuuc

SEQ ID NO: 517215 - RNA, 19 nt, Homo sapiens
  misc_RNA (1)...(19): siRNA sense strand
gauauuacagauugcuaug

SEQ ID NO: 517216 - RNA, 19 nt, Homo sapiens
  misc_RNA (1)...(19): siRNA sense strand
gcagcacaguauggucauu

SEQ ID NO: 517217 - RNA, 19 nt, Homo sapiens
  misc_RNA (1)...(19): siRNA sense strand
ucagcaagucaucacaaua

SEQ ID NO: 517218 - RNA, 19 nt, Homo sapiens
  misc_RNA (1)...(19): siRNA sense strand
caaauggagcucccuuuac

SEQ ID NO: 517219 - RNA, 19 nt, Homo sapiens
  misc_RNA (1)...(19): siRNA sense strand
uucagaaacuccaguagug

SEQ ID NO: 517220 - RNA, 19 nt, Homo sapiens
  misc_RNA (1)...(19): siRNA sense strand
cagaacacaaucaucaaga

SEQ ID NO: 517221 - RNA, 19 nt, Homo sapiens
  misc_RNA (1)...(19): siRNA sense strand
ccagcuaagagacaaugua

SEQ ID NO: 517222 - RNA, 19 nt, Homo sapiens
  misc_RNA (1)...(19): siRNA sense strand
uuggaaauuugcacucuau

SEQ ID NO: 517223 - RNA, 19 nt, Homo sapiens
  misc_RNA (1)...(19): siRNA sense strand
caacaccacaguuuaucau

SEQ ID NO: 517224 - RNA, 19 nt, Homo sapiens
  misc_RNA (1)...(19): siRNA sense strand
gagauauuacagauugcua

SEQ ID NO: 517225 - RNA, 19 nt, Homo sapiens
  misc_RNA (1)...(19): siRNA sense strand
gguggaacuuuuaaucaaa

SEQ ID NO: 517226 - RNA, 19 nt, Homo sapiens
  misc_RNA (1)...(19): siRNA sense strand
gggaacuucuccacuucau

SEQ ID NO: 517227 - RNA, 19 nt, Homo sapiens
  misc_RNA (1)...(19): siRNA sense strand
gauggacaacaaguauuaa

SEQ ID NO: 517228 - RNA, 19 nt, Homo sapiens
  misc_RNA (1)...(19): siRNA sense strand
uaucugcuguucaguuugg

SEQ ID NO: 517229 - RNA, 19 nt, Homo sapiens
  misc_RNA (1)...(19): siRNA sense strand
cagagaguccugacacugu

SEQ ID NO: 517230 - RNA, 19 nt, Homo sapiens
  misc_RNA (1)...(19): siRNA sense strand
uauuacagauugcuaugca

SEQ ID NO: 517231 - RNA, 19 nt, Homo sapiens
  misc_RNA (1)...(19): siRNA sense strand
acacacgcaaaguaaauuu

SEQ ID NO: 517232 - RNA, 19 nt, Homo sapiens
  misc_RNA (1)...(19): siRNA sense strand
gaaacuguuauaagugaag

SEQ ID NO: 517233 - RNA, 19 nt, Homo sapiens
  misc_RNA (1)...(19): siRNA sense strand
ccgaacaccauuacauaug

SEQ ID NO: 517234 - RNA, 19 nt, Homo sapiens
  misc_RNA (1)...(19): siRNA sense strand
gucagcaagucaucacaau

SEQ ID NO: 517235 - RNA, 19 nt, Homo sapiens
  misc_RNA (1)...(19): siRNA sense strand
cacaguauggucauuauuc

SEQ ID NO: 517236 - RNA, 19 nt, Homo sapiens
  misc_RNA (1)...(19): siRNA sense strand
uuuggaaacucuucuacau

SEQ ID NO: 517237 - RNA, 19 nt, Homo sapiens
  misc_RNA (1)...(19): siRNA sense strand
gacaauggaaaugaagauu

SEQ ID NO: 517238 - RNA, 19 nt, Homo sapiens
  misc_RNA (1)...(19): siRNA sense strand
gaaccaaaucaacacaaac

SEQ ID NO: 517239 - RNA, 19 nt, Homo sapiens
  misc_RNA (1)...(19): siRNA sense strand
ucaucuagcagcacaguau

SEQ ID NO: 517240 - RNA, 19 nt, Homo sapiens
  misc_RNA (1)...(19): siRNA sense strand
gcagagauauuacagauug

SEQ ID NO: 517241 - RNA, 19 nt, Homo sapiens
  misc_RNA (1)...(19): siRNA sense strand
gguggaaucugcagaaaua

SEQ ID NO: 517242 - RNA, 19 nt, Homo sapiens
  misc_RNA (1)...(19): siRNA sense strand
caacagacauugcugaaga

SEQ ID NO: 517243 - RNA, 19 nt, Homo sapiens
  misc_RNA (1)...(19): siRNA sense strand
gagacaauguaucgaaaua

SEQ ID NO: 517244 - RNA, 19 nt, Homo sapiens
  misc_RNA (1)...(19): siRNA sense strand
caaaggacauguuaaagau

SEQ ID NO: 517245 - RNA, 19 nt, Homo sapiens
  misc_RNA (1)...(19): siRNA sense strand
gcaaauggagcucccuuua

SEQ ID NO: 517246 - RNA, 19 nt, Homo sapiens
  misc_RNA (1)...(19): siRNA sense strand
caaauauggugcugaugua

SEQ ID NO: 517247 - RNA, 19 nt, Homo sapiens
  misc_RNA (1)...(19): siRNA sense strand
gcaaaggacauguuaaaga

SEQ ID NO: 517248 - RNA, 19 nt, Homo sapiens
  misc_RNA (1)...(19): siRNA sense strand
caagucaucacaauaguua

SEQ ID NO: 517249 - RNA, 19 nt, Homo sapiens
  misc_RNA (1)...(19): siRNA sense strand
caacaaguauuaacaguac

SEQ ID NO: 517250 - RNA, 19 nt, Homo sapiens
  misc_RNA (1)...(19): siRNA sense strand
gaugacagcucuccauugg

SEQ ID NO: 517251 - RNA, 19 nt, Homo sapiens
  misc_RNA (1)...(19): siRNA sense strand
gacaauacaugcugcaaca

SEQ ID NO: 517252 - RNA, 19 nt, Homo sapiens
  misc_RNA (1)...(19): siRNA sense strand
gaugaugaaguucguauuu

SEQ ID NO: 517253 - RNA, 19 nt, Homo sapiens
  misc_RNA (1)...(19): siRNA sense strand
gaagaaacuguuauaagug

SEQ ID NO: 517254 - RNA, 19 nt, Homo sapiens
  misc_RNA (1)...(19): siRNA sense strand
gaccgaacaccauuacaua

SEQ ID NO: 517255 - RNA, 19 nt, Homo sapiens
  misc_RNA (1)...(19): siRNA sense strand
ccacagaacacaaucauca

SEQ ID NO: 517256 - RNA, 19 nt, Homo sapiens
  misc_RNA (1)...(19): siRNA sense strand
gcauggugcugaugucaau

SEQ ID NO: 517257 - RNA, 19 nt, Homo sapiens
  misc_RNA (1)...(19): siRNA sense strand
gcugggaacuucuccacuu

SEQ ID NO: 517258 - RNA, 19 nt, Homo sapiens
  misc_RNA (1)...(19): siRNA sense strand
gauguacacacgcaaagua

SEQ ID NO: 517259 - RNA, 19 nt, Homo sapiens
  misc_RNA (1)...(19): siRNA sense strand
gugcugaugucaaugcaaa

SEQ ID NO: 517260 - RNA, 19 nt, Homo sapiens
  misc_RNA (1)...(19): siRNA sense strand
uagcagagauauuacagau

SEQ ID NO: 517261 - RNA, 19 nt, Homo sapiens
  misc_RNA (1)...(19): siRNA sense strand
uggaaacucuucuacauca

SEQ ID NO: 517262 - RNA, 19 nt, Homo sapiens
  misc_RNA (1)...(19): siRNA sense strand
ggaaucugcagaaauagaa

SEQ ID NO: 517263 - RNA, 19 nt, Homo sapiens
  misc_RNA (1)...(19): siRNA sense strand
gaagaaccaccagcuaaga

SEQ ID NO: 517264 - RNA, 19 nt, Homo sapiens
  misc_RNA (1)...(19): siRNA sense strand
gaacuucuccacuucaucu

SEQ ID NO: 517265 - RNA, 19 nt, Homo sapiens
  misc_RNA (1)...(19): siRNA sense strand
agacauugcugaagaaacu

SEQ ID NO: 517266 - RNA, 19 nt, Homo sapiens
  misc_RNA (1)...(19): siRNA sense strand
aaggacauguuaaagauga

SEQ ID NO: 517267 - RNA, 19 nt, Homo sapiens
  misc_RNA (1)...(19): siRNA sense strand
gugaagaaccaccagcuaa

SEQ ID NO: 517268 - RNA, 19 nt, Homo sapiens
  misc_RNA (1)...(19): siRNA sense strand
gagcaggucaagaugauga

SEQ ID NO: 517269 - RNA, 19 nt, Homo sapiens
  misc_RNA (1)...(19): siRNA sense strand
ggaaauuugcacucuauuc

SEQ ID NO: 517270 - RNA, 19 nt, Homo sapiens
  misc_RNA (1)...(19): siRNA sense strand
aaacucuucuacaucagua

SEQ ID NO: 517271 - RNA, 19 nt, Homo sapiens
  misc_RNA (1)...(19): siRNA sense strand
caaugcaaaggacauguua

SEQ ID NO: 517272 - RNA, 19 nt, Homo sapiens
  misc_RNA (1)...(19): siRNA sense strand
uaagagacaauguaucgaa

SEQ ID NO: 517273 - RNA, 19 nt, Homo sapiens
  misc_RNA (1)...(19): siRNA sense strand
ggucagcccaucauuguga

SEQ ID NO: 517274 - RNA, 19 nt, Homo sapiens
  misc_RNA (1)...(19): siRNA sense strand
agaaccaaaucaacacaaa

SEQ ID NO: 517275 - RNA, 19 nt, Homo sapiens
  misc_RNA (1)...(19): siRNA sense strand
uguaucugcuguucaguuu

SEQ ID NO: 517276 - RNA, 19 nt, Homo sapiens
  misc_RNA (1)...(19): siRNA sense strand
gacaacaaguauuaacagu

SEQ ID NO: 517277 - RNA, 19 nt, Homo sapiens
  misc_RNA (1)...(19): siRNA sense strand
guacacacgcaaaguaaau

SEQ ID NO: 517278 - RNA, 19 nt, Homo sapiens
  misc_RNA (1)...(19): siRNA sense strand
aaauggagcucccuuuacu

SEQ ID NO: 517279 - RNA, 19 nt, Homo sapiens
  misc_RNA (1)...(19): siRNA sense strand
agauggacaacaaguauua

SEQ ID NO: 517280 - RNA, 19 nt, Homo sapiens
  misc_RNA (1)...(19): siRNA sense strand
acaccacaguuuaucauug

SEQ ID NO: 517281 - RNA, 19 nt, Homo sapiens
  misc_RNA (1)...(19): siRNA sense strand
caauagacaauggaaauga

SEQ ID NO: 517282 - RNA, 19 nt, Homo sapiens
  misc_RNA (1)...(19): siRNA sense strand
gcaagucaucacaauaguu

SEQ ID NO: 517283 - RNA, 19 nt, Homo sapiens
  misc_RNA (1)...(19): siRNA sense strand
ggagcucccuuuacuacag

SEQ ID NO: 517284 - RNA, 19 nt, Homo sapiens
  misc_RNA (1)...(19): siRNA sense strand
cacaauaguuacagaugga

SEQ ID NO: 517285 - RNA, 19 nt, Homo sapiens
  misc_RNA (1)...(19): siRNA sense strand
ggaccgaacaccauuacau

SEQ ID NO: 517286 - RNA, 19 nt, Homo sapiens
  misc_RNA (1)...(19): siRNA sense strand
aagagacaauguaucgaaa

SEQ ID NO: 517287 - RNA, 19 nt, Homo sapiens
  misc_RNA (1)...(19): siRNA sense strand
gagcucccuuuacuacaga

SEQ ID NO: 517288 - RNA, 19 nt, Homo sapiens
  misc_RNA (1)...(19): siRNA sense strand
cagcaagucaucacaauag

SEQ ID NO: 517289 - RNA, 19 nt, Homo sapiens
  misc_RNA (1)...(19): siRNA sense strand
gcugcaacaccacaguuua

SEQ ID NO: 517290 - RNA, 19 nt, Homo sapiens
  misc_RNA (1)...(19): siRNA sense strand
caacacaaacccagagagu

SEQ ID NO: 517291 - RNA, 19 nt, Homo sapiens
  misc_RNA (1)...(19): siRNA sense strand
ucaaauauggugcugaugu

SEQ ID NO: 517292 - RNA, 19 nt, Homo sapiens
  misc_RNA (1)...(19): siRNA sense strand
gcacaguauggucauuauu

SEQ ID NO: 517293 - RNA, 19 nt, Homo sapiens
  misc_RNA (1)...(19): siRNA sense strand
gcuaagagacaauguaucg

SEQ ID NO: 517294 - RNA, 19 nt, Homo sapiens
  misc_RNA (1)...(19): siRNA sense strand
ccagauggacaacaaguau

SEQ ID NO: 517295 - RNA, 19 nt, Homo sapiens
  misc_RNA (1)...(19): siRNA sense strand
gagcuggugugagcagaga

SEQ ID NO: 517296 - RNA, 19 nt, Homo sapiens
  misc_RNA (1)...(19): siRNA sense strand
ggacaacaaguauuaacag

SEQ ID NO: 517297 - RNA, 19 nt, Homo sapiens
  misc_RNA (1)...(19): siRNA sense strand
gcaacaccacaguuuauca

SEQ ID NO: 517298 - RNA, 19 nt, Homo sapiens
  misc_RNA (1)...(19): siRNA sense strand
gcugaagaaacuguuauaa

SEQ ID NO: 517299 - RNA, 19 nt, Homo sapiens
  misc_RNA (1)...(19): siRNA sense strand
gcagagaugccagaaccaa

SEQ ID NO: 517300 - RNA, 19 nt, Homo sapiens
  misc_RNA (1)...(19): siRNA sense strand
uaacaguaccagcaacaga

SEQ ID NO: 517301 - RNA, 19 nt, Homo sapiens
  misc_RNA (1)...(19): siRNA sense strand
cagcacaguauggucauua

SEQ ID NO: 517302 - RNA, 19 nt, Homo sapiens
  misc_RNA (1)...(19): siRNA sense strand
gaaauuugcacucuauucc

SEQ ID NO: 517303 - RNA, 19 nt, Homo sapiens
  misc_RNA (1)...(19): siRNA sense strand
ugccuuagcugaagcaucu

SEQ ID NO: 517304 - RNA, 19 nt, Homo sapiens
  misc_RNA (1)...(19): siRNA sense strand
gcacgagcaggucaagaug

SEQ ID NO: 517305 - RNA, 19 nt, Homo sapiens
  misc_RNA (1)...(19): siRNA sense strand
ggaauuggucagcccauca

SEQ ID NO: 517306 - RNA, 19 nt, Homo sapiens
  misc_RNA (1)...(19): siRNA sense strand
ggccacagaagaaguaguu

SEQ ID NO: 517307 - RNA, 19 nt, Homo sapiens
  misc_RNA (1)...(19): siRNA sense strand
caucaguauuagcuacauu

SEQ ID NO: 517308 - RNA, 19 nt, Homo sapiens
  misc_RNA (1)...(19): siRNA sense strand
gaagauuuagcagagauau

SEQ ID NO: 517309 - RNA, 19 nt, Homo sapiens
  misc_RNA (1)...(19): siRNA sense strand
caccacaguuuaucauugg

SEQ ID NO: 517310 - RNA, 19 nt, Homo sapiens
  misc_RNA (1)...(19): siRNA sense strand
cagcuaagagacaauguau

SEQ ID NO: 517311 - RNA, 19 nt, Homo sapiens
  misc_RNA (1)...(19): siRNA sense strand
caugccagauggacaacaa

SEQ ID NO: 517312 - RNA, 19 nt, Homo sapiens
  misc_RNA (1)...(19): siRNA sense strand
gaaacucuucuacaucagu

SEQ ID NO: 517313 - RNA, 19 nt, Homo sapiens
  misc_RNA (1)...(19): siRNA sense strand
caagaggugguggaacuuu

SEQ ID NO: 517314 - RNA, 19 nt, Homo sapiens
  misc_RNA (1)...(19): siRNA sense strand
cagacuggcugggaacuuc

SEQ ID NO: 517315 - RNA, 19 nt, Homo sapiens
  misc_RNA (1)...(19): siRNA sense strand
gauauuacagauugcuaug

SEQ ID NO: 517316 - RNA, 19 nt, Homo sapiens
  misc_RNA (1)...(19): siRNA sense strand
gcagcacaguauggucauu

SEQ ID NO: 517317 - RNA, 19 nt, Homo sapiens
  misc_RNA (1)...(19): siRNA sense strand
ucagcaagucaucacaaua

SEQ ID NO: 517318 - RNA, 19 nt, Homo sapiens
  misc_RNA (1)...(19): siRNA sense strand
caaauggagcucccuuuac

SEQ ID NO: 517319 - RNA, 19 nt, Homo sapiens
  misc_RNA (1)...(19): siRNA sense strand
uucagaaacuccaguagug

SEQ ID NO: 517320 - RNA, 19 nt, Homo sapiens
  misc_RNA (1)...(19): siRNA sense strand
cagaacacaaucaucaaga

SEQ ID NO: 517321 - RNA, 19 nt, Homo sapiens
  misc_RNA (1)...(19): siRNA sense strand
ccagcuaagagacaaugua

SEQ ID NO: 517322 - RNA, 19 nt, Homo sapiens
  misc_RNA (1)...(19): siRNA sense strand
uuggaaauuugcacucuau

SEQ ID NO: 517323 - RNA, 19 nt, Homo sapiens
  misc_RNA (1)...(19): siRNA sense strand
caacaccacaguuuaucau

SEQ ID NO: 517324 - RNA, 19 nt, Homo sapiens
  misc_RNA (1)...(19): siRNA sense strand
gagauauuacagauugcua

SEQ ID NO: 517325 - RNA, 19 nt, Homo sapiens
  misc_RNA (1)...(19): siRNA sense strand
gguggaacuuuuaaucaaa

SEQ ID NO: 517326 - RNA, 19 nt, Homo sapiens
  misc_RNA (1)...(19): siRNA sense strand
gggaacuucuccacuucau

SEQ ID NO: 517327 - RNA, 19 nt, Homo sapiens
  misc_RNA (1)...(19): siRNA sense strand
gauggacaacaaguauuaa

SEQ ID NO: 517328 - RNA, 19 nt, Homo sapiens
  misc_RNA (1)...(19): siRNA sense strand
uaucugcuguucaguuugg

SEQ ID NO: 517329 - RNA, 19 nt, Homo sapiens
  misc_RNA (1)...(19): siRNA sense strand
cagagaguccugacacugu

SEQ ID NO: 517330 - RNA, 19 nt, Homo sapiens
  misc_RNA (1)...(19): siRNA sense strand
uauuacagauugcuaugca

SEQ ID NO: 517331 - RNA, 19 nt, Homo sapiens
  misc_RNA (1)...(19): siRNA sense strand
acacacgcaaaguaaauuu

SEQ ID NO: 517332 - RNA, 19 nt, Homo sapiens
  misc_RNA (1)...(19): siRNA sense strand
gaaacuguuauaagugaag

SEQ ID NO: 517333 - RNA, 19 nt, Homo sapiens
  misc_RNA (1)...(19): siRNA sense strand
ccgaacaccauuacauaug

SEQ ID NO: 517334 - RNA, 19 nt, Homo sapiens
  misc_RNA (1)...(19): siRNA sense strand
gucagcaagucaucacaau

SEQ ID NO: 517335 - RNA, 19 nt, Homo sapiens
  misc_RNA (1)...(19): siRNA sense strand
cacaguauggucauuauuc

SEQ ID NO: 517336 - RNA, 19 nt, Homo sapiens
  misc_RNA (1)...(19): siRNA sense strand
uuuggaaacucuucuacau

SEQ ID NO: 517337 - RNA, 19 nt, Homo sapiens
  misc_RNA (1)...(19): siRNA sense strand
gacaauggaaaugaagauu

SEQ ID NO: 517338 - RNA, 19 nt, Homo sapiens
  misc_RNA (1)...(19): siRNA sense strand
gaaccaaaucaacacaaac

SEQ ID NO: 517339 - RNA, 19 nt, Homo sapiens
  misc_RNA (1)...(19): siRNA sense strand
ucaucuagcagcacaguau

SEQ ID NO: 517340 - RNA, 19 nt, Homo sapiens
  misc_RNA (1)...(19): siRNA sense strand
gcagagauauuacagauug

SEQ ID NO: 517341 - RNA, 19 nt, Homo sapiens
  misc_RNA (1)...(19): siRNA sense strand
gguggaaucugcagaaaua

SEQ ID NO: 517342 - RNA, 19 nt, Homo sapiens
  misc_RNA (1)...(19): siRNA sense strand
caacagacauugcugaaga

SEQ ID NO: 517343 - RNA, 19 nt, Homo sapiens
  misc_RNA (1)...(19): siRNA sense strand
gagacaauguaucgaaaua

SEQ ID NO: 517344 - RNA, 19 nt, Homo sapiens
  misc_RNA (1)...(19): siRNA sense strand
caaaggacauguuaaagau

SEQ ID NO: 517345 - RNA, 19 nt, Homo sapiens
  misc_RNA (1)...(19): siRNA sense strand
gcaaauggagcucccuuua

SEQ ID NO: 517346 - RNA, 19 nt, Homo sapiens
  misc_RNA (1)...(19): siRNA sense strand
caaauauggugcugaugua

SEQ ID NO: 517347 - RNA, 19 nt, Homo sapiens
  misc_RNA (1)...(19): siRNA sense strand
gcaaaggacauguuaaaga

SEQ ID NO: 517348 - RNA, 19 nt, Homo sapiens
  misc_RNA (1)...(19): siRNA sense strand
caagucaucacaauaguua

SEQ ID NO: 517349 - RNA, 19 nt, Homo sapiens
  misc_RNA (1)...(19): siRNA sense strand
caacaaguauuaacaguac

SEQ ID NO: 517350 - RNA, 19 nt, Homo sapiens
  misc_RNA (1)...(19): siRNA sense strand
gaugacagcucuccauugg

SEQ ID NO: 517351 - RNA, 19 nt, Homo sapiens
  misc_RNA (1)...(19): siRNA sense strand
gacaauacaugcugcaaca

SEQ ID NO: 517352 - RNA, 19 nt, Homo sapiens
  misc_RNA (1)...(19): siRNA sense strand
gaugaugaaguucguauuu

SEQ ID NO: 517353 - RNA, 19 nt, Homo sapiens
  misc_RNA (1)...(19): siRNA sense strand
gaagaaacuguuauaagug

SEQ ID NO: 517354 - RNA, 19 nt, Homo sapiens
  misc_RNA (1)...(19): siRNA sense strand
gaccgaacaccauuacaua

SEQ ID NO: 517355 - RNA, 19 nt, Homo sapiens
  misc_RNA (1)...(19): siRNA sense strand
ccacagaacacaaucauca

SEQ ID NO: 517356 - RNA, 19 nt, Homo sapiens
  misc_RNA (1)...(19): siRNA sense strand
gcauggugcugaugucaau

SEQ ID NO: 517357 - RNA, 19 nt, Homo sapiens
  misc_RNA (1)...(19): siRNA sense strand
gcugggaacuucuccacuu

SEQ ID NO: 517358 - RNA, 19 nt, Homo sapiens
  misc_RNA (1)...(19): siRNA sense strand
gauguacacacgcaaagua

SEQ ID NO: 517359 - RNA, 19 nt, Homo sapiens
  misc_RNA (1)...(19): siRNA sense strand
gugcugaugucaaugcaaa

SEQ ID NO: 517360 - RNA, 19 nt, Homo sapiens
  misc_RNA (1)...(19): siRNA sense strand
uagcagagauauuacagau

SEQ ID NO: 517361 - RNA, 19 nt, Homo sapiens
  misc_RNA (1)...(19): siRNA sense strand
uggaaacucuucuacauca

SEQ ID NO: 517362 - RNA, 19 nt, Homo sapiens
  misc_RNA (1)...(19): siRNA sense strand
ggaaucugcagaaauagaa

SEQ ID NO: 517363 - RNA, 19 nt, Homo sapiens
  misc_RNA (1)...(19): siRNA sense strand
gaagaaccaccagcuaaga

SEQ ID NO: 517364 - RNA, 19 nt, Homo sapiens
  misc_RNA (1)...(19): siRNA sense strand
gaacuucuccacuucaucu

SEQ ID NO: 517365 - RNA, 19 nt, Homo sapiens
  misc_RNA (1)...(19): siRNA sense strand
agacauugcugaagaaacu

SEQ ID NO: 517366 - RNA, 19 nt, Homo sapiens
  misc_RNA (1)...(19): siRNA sense strand
aaggacauguuaaagauga

SEQ ID NO: 517367 - RNA, 19 nt, Homo sapiens
  misc_RNA (1)...(19): siRNA sense strand
gugaagaaccaccagcuaa

SEQ ID NO: 517368 - RNA, 19 nt, Homo sapiens
  misc_RNA (1)...(19): siRNA sense strand
gagcaggucaagaugauga

SEQ ID NO: 517369 - RNA, 19 nt, Homo sapiens
  misc_RNA (1)...(19): siRNA sense strand
ggaaauuugcacucuauuc

SEQ ID NO: 517370 - RNA, 19 nt, Homo sapiens
  misc_RNA (1)...(19): siRNA sense strand
aaacucuucuacaucagua

SEQ ID NO: 517371 - RNA, 19 nt, Homo sapiens
  misc_RNA (1)...(19): siRNA sense strand
caaugcaaaggacauguua

SEQ ID NO: 517372 - RNA, 19 nt, Homo sapiens
  misc_RNA (1)...(19): siRNA sense strand
uaagagacaauguaucgaa

SEQ ID NO: 517373 - RNA, 19 nt, Homo sapiens
  misc_RNA (1)...(19): siRNA sense strand
ggucagcccaucauuguga

SEQ ID NO: 517374 - RNA, 19 nt, Homo sapiens
  misc_RNA (1)...(19): siRNA sense strand
agaaccaaaucaacacaaa

SEQ ID NO: 517375 - RNA, 19 nt, Homo sapiens
  misc_RNA (1)...(19): siRNA sense strand
uguaucugcuguucaguuu

SEQ ID NO: 517376 - RNA, 19 nt, Homo sapiens
  misc_RNA (1)...(19): siRNA sense strand
gacaacaaguauuaacagu

SEQ ID NO: 517377 - RNA, 19 nt, Homo sapiens
  misc_RNA (1)...(19): siRNA sense strand
guacacacgcaaaguaaau

SEQ ID NO: 517378 - RNA, 19 nt, Homo sapiens
  misc_RNA (1)...(19): siRNA sense strand
aaauggagcucccuuuacu

SEQ ID NO: 517379 - RNA, 19 nt, Homo sapiens
  misc_RNA (1)...(19): siRNA sense strand
agauggacaacaaguauua

SEQ ID NO: 517380 - RNA, 19 nt, Homo sapiens
  misc_RNA (1)...(19): siRNA sense strand
acaccacaguuuaucauug

SEQ ID NO: 517381 - RNA, 19 nt, Homo sapiens
  misc_RNA (1)...(19): siRNA sense strand
caauagacaauggaaauga

SEQ ID NO: 517382 - RNA, 19 nt, Homo sapiens
  misc_RNA (1)...(19): siRNA sense strand
gcaagucaucacaauaguu

SEQ ID NO: 517383 - RNA, 19 nt, Homo sapiens
  misc_RNA (1)...(19): siRNA sense strand
ggagcucccuuuacuacag

SEQ ID NO: 517384 - RNA, 19 nt, Homo sapiens
  misc_RNA (1)...(19): siRNA sense strand
cacaauaguuacagaugga

SEQ ID NO: 517385 - RNA, 19 nt, Homo sapiens
  misc_RNA (1)...(19): siRNA sense strand
ggaccgaacaccauuacau

SEQ ID NO: 517386 - RNA, 19 nt, Homo sapiens
  misc_RNA (1)...(19): siRNA sense strand
aagagacaauguaucgaaa

SEQ ID NO: 517387 - RNA, 19 nt, Homo sapiens
  misc_RNA (1)...(19): siRNA sense strand
gagcucccuuuacuacaga

SEQ ID NO: 517388 - RNA, 19 nt, Homo sapiens
  misc_RNA (1)...(19): siRNA sense strand
cagcaagucaucacaauag

SEQ ID NO: 517389 - RNA, 19 nt, Homo sapiens
  misc_RNA (1)...(19): siRNA sense strand
gcugcaacaccacaguuua

SEQ ID NO: 517390 - RNA, 19 nt, Homo sapiens
  misc_RNA (1)...(19): siRNA sense strand
caacacaaacccagagagu

SEQ ID NO: 517391 - RNA, 19 nt, Homo sapiens
  misc_RNA (1)...(19): siRNA sense strand
ucaaauauggugcugaugu

SEQ ID NO: 517392 - RNA, 19 nt, Homo sapiens
  misc_RNA (1)...(19): siRNA sense strand
gcacaguauggucauuauu

SEQ ID NO: 517393 - RNA, 19 nt, Homo sapiens
  misc_RNA (1)...(19): siRNA sense strand
gcuaagagacaauguaucg

SEQ ID NO: 517394 - RNA, 19 nt, Homo sapiens
  misc_RNA (1)...(19): siRNA sense strand
ccagauggacaacaaguau

SEQ ID NO: 517395 - RNA, 19 nt, Homo sapiens
  misc_RNA (1)...(19): siRNA sense strand
gagcuggugugagcagaga

SEQ ID NO: 517396 - RNA, 19 nt, Homo sapiens
  misc_RNA (1)...(19): siRNA sense strand
ggacaacaaguauuaacag

SEQ ID NO: 517397 - RNA, 19 nt, Homo sapiens
  misc_RNA (1)...(19): siRNA sense strand
gcaacaccacaguuuauca

SEQ ID NO: 517398 - RNA, 19 nt, Homo sapiens
  misc_RNA (1)...(19): siRNA sense strand
gcugaagaaacuguuauaa

SEQ ID NO: 517399 - RNA, 19 nt, Homo sapiens
  misc_RNA (1)...(19): siRNA sense strand
gcagagaugccagaaccaa

SEQ ID NO: 517400 - RNA, 19 nt, Homo sapiens
  misc_RNA (1)...(19): siRNA sense strand
uaacaguaccagcaacaga

SEQ ID NO: 517401 - RNA, 19 nt, Homo sapiens
  misc_RNA (1)...(19): siRNA sense strand
cagcacaguauggucauua

SEQ ID NO: 517402 - RNA, 19 nt, Homo sapiens
  misc_RNA (1)...(19): siRNA sense strand
gaaauuugcacucuauucc

SEQ ID NO: 517403 - RNA, 19 nt, Homo sapiens
  misc_RNA (1)...(19): siRNA sense strand
ugccuuagcugaagcaucu

SEQ ID NO: 517404 - RNA, 19 nt, Homo sapiens
  misc_RNA (1)...(19): siRNA sense strand
gcacgagcaggucaagaug

SEQ ID NO: 517405 - RNA, 19 nt, Homo sapiens
  misc_RNA (1)...(19): siRNA sense strand
ggaauuggucagcccauca

SEQ ID NO: 517406 - RNA, 19 nt, Homo sapiens
  misc_RNA (1)...(19): siRNA sense strand
ggccacagaagaaguaguu

SEQ ID NO: 517407 - RNA, 19 nt, Homo sapiens
  misc_RNA (1)...(19): siRNA sense strand
caucaguauuagcuacauu

SEQ ID NO: 517408 - RNA, 19 nt, Homo sapiens
  misc_RNA (1)...(19): siRNA sense strand
gaagauuuagcagagauau

SEQ ID NO: 517409 - RNA, 19 nt, Homo sapiens
  misc_RNA (1)...(19): siRNA sense strand
caccacaguuuaucauugg

SEQ ID NO: 517410 - RNA, 19 nt, Homo sapiens
  misc_RNA (1)...(19): siRNA sense strand
cagcuaagagacaauguau

SEQ ID NO: 517411 - RNA, 19 nt, Homo sapiens
  misc_RNA (1)...(19): siRNA sense strand
caugccagauggacaacaa

SEQ ID NO: 517412 - RNA, 19 nt, Homo sapiens
  misc_RNA (1)...(19): siRNA sense strand
gaaacucuucuacaucagu

SEQ ID NO: 517413 - RNA, 19 nt, Homo sapiens
  misc_RNA (1)...(19): siRNA sense strand
caagaggugguggaacuuu

SEQ ID NO: 517414 - RNA, 19 nt, Homo sapiens
  misc_RNA (1)...(19): siRNA sense strand
cagacuggcugggaacuuc

SEQ ID NO: 517415 - RNA, 19 nt, Homo sapiens
  misc_RNA (1)...(19): siRNA sense strand
gauauuacagauugcuaug

SEQ ID NO: 517416 - RNA, 19 nt, Homo sapiens
  misc_RNA (1)...(19): siRNA sense strand
gcagcacaguauggucauu

SEQ ID NO: 517417 - RNA, 19 nt, Homo sapiens
  misc_RNA (1)...(19): siRNA sense strand
ucagcaagucaucacaaua

SEQ ID NO: 517418 - RNA, 19 nt, Homo sapiens
  misc_RNA (1)...(19): siRNA sense strand
caaauggagcucccuuuac

SEQ ID NO: 517419 - RNA, 19 nt, Homo sapiens
  misc_RNA (1)...(19): siRNA sense strand
uucagaaacuccaguagug

SEQ ID NO: 517420 - RNA, 19 nt, Homo sapiens
  misc_RNA (1)...(19): siRNA sense strand
cagaacacaaucaucaaga

SEQ ID NO: 517421 - RNA, 19 nt, Homo sapiens
  misc_RNA (1)...(19): siRNA sense strand
ccagcuaagagacaaugua

SEQ ID NO: 517422 - RNA, 19 nt, Homo sapiens
  misc_RNA (1)...(19): siRNA sense strand
uuggaaauuugcacucuau

SEQ ID NO: 517423 - RNA, 19 nt, Homo sapiens
  misc_RNA (1)...(19): siRNA sense strand
caacaccacaguuuaucau

SEQ ID NO: 517424 - RNA, 19 nt, Homo sapiens
  misc_RNA (1)...(19): siRNA sense strand
gagauauuacagauugcua

SEQ ID NO: 517425 - RNA, 19 nt, Homo sapiens
  misc_RNA (1)...(19): siRNA sense strand
gguggaacuuuuaaucaaa

SEQ ID NO: 517426 - RNA, 19 nt, Homo sapiens
  misc_RNA (1)...(19): siRNA sense strand
gggaacuucuccacuucau

SEQ ID NO: 517427 - RNA, 19 nt, Homo sapiens
  misc_RNA (1)...(19): siRNA sense strand
gauggacaacaaguauuaa

SEQ ID NO: 517428 - RNA, 19 nt, Homo sapiens
  misc_RNA (1)...(19): siRNA sense strand
uaucugcuguucaguuugg

SEQ ID NO: 517429 - RNA, 19 nt, Homo sapiens
  misc_RNA (1)...(19): siRNA sense strand
cagagaguccugacacugu

SEQ ID NO: 517430 - RNA, 19 nt, Homo sapiens
  misc_RNA (1)...(19): siRNA sense strand
uauuacagauugcuaugca

SEQ ID NO: 517431 - RNA, 19 nt, Homo sapiens
  misc_RNA (1)...(19): siRNA sense strand
acacacgcaaaguaaauuu

SEQ ID NO: 517432 - RNA, 19 nt, Homo sapiens
  misc_RNA (1)...(19): siRNA sense strand
gaaacuguuauaagugaag

SEQ ID NO: 517433 - RNA, 19 nt, Homo sapiens
  misc_RNA (1)...(19): siRNA sense strand
ccgaacaccauuacauaug

SEQ ID NO: 517434 - RNA, 19 nt, Homo sapiens
  misc_RNA (1)...(19): siRNA sense strand
gucagcaagucaucacaau

SEQ ID NO: 517435 - RNA, 19 nt, Homo sapiens
  misc_RNA (1)...(19): siRNA sense strand
cacaguauggucauuauuc

SEQ ID NO: 517436 - RNA, 19 nt, Homo sapiens
  misc_RNA (1)...(19): siRNA sense strand
uuuggaaacucuucuacau

SEQ ID NO: 517437 - RNA, 19 nt, Homo sapiens
  misc_RNA (1)...(19): siRNA sense strand
gacaauggaaaugaagauu

SEQ ID NO: 517438 - RNA, 19 nt, Homo sapiens
  misc_RNA (1)...(19): siRNA sense strand
gaaccaaaucaacacaaac

SEQ ID NO: 517439 - RNA, 19 nt, Homo sapiens
  misc_RNA (1)...(19): siRNA sense strand
ucaucuagcagcacaguau

SEQ ID NO: 517440 - RNA, 19 nt, Homo sapiens
  misc_RNA (1)...(19): siRNA sense strand
aaguugagcugacucgaua

SEQ ID NO: 517441 - RNA, 19 nt, Homo sapiens
  misc_RNA (1)...(19): siRNA sense strand
ggaugauucugccuccaaa

SEQ ID NO: 517442 - RNA, 19 nt, Homo sapiens
  misc_RNA (1)...(19): siRNA sense strand
gcacagagaauugccuuca

SEQ ID NO: 517443 - RNA, 19 nt, Homo sapiens
  misc_RNA (1)...(19): siRNA sense strand
ugugagaacuguggaauca

SEQ ID NO: 517444 - RNA, 19 nt, Homo sapiens
  misc_RNA (1)...(19): siRNA sense strand
gagccgaggguguggagua

SEQ ID NO: 517445 - RNA, 19 nt, Homo sapiens
  misc_RNA (1)...(19): siRNA sense strand
caucuuggcccuaccuuga

SEQ ID NO: 517446 - RNA, 19 nt, Homo sapiens
  misc_RNA (1)...(19): siRNA sense strand
gcuccugggugcugugaga

SEQ ID NO: 517447 - RNA, 19 nt, Homo sapiens
  misc_RNA (1)...(19): siRNA sense strand
caagaggauuguggccauu

SEQ ID NO: 517448 - RNA, 19 nt, Homo sapiens
  misc_RNA (1)...(19): siRNA sense strand
gacaggauccgaagcaaag

SEQ ID NO: 517449 - RNA, 19 nt, Homo sapiens
  misc_RNA (1)...(19): siRNA sense strand
gaggagaacaaggaugauu

SEQ ID NO: 517450 - RNA, 19 nt, Homo sapiens
  misc_RNA (1)...(19): siRNA sense strand
ggagacaggauccgaagca

SEQ ID NO: 517451 - RNA, 19 nt, Homo sapiens
  misc_RNA (1)...(19): siRNA sense strand
agaccaaggcugacacuga

SEQ ID NO: 517452 - RNA, 19 nt, Homo sapiens
  misc_RNA (1)...(19): siRNA sense strand
gagacaggauccgaagcaa

SEQ ID NO: 517453 - RNA, 19 nt, Homo sapiens
  misc_RNA (1)...(19): siRNA sense strand
gcucagacaccuauuacca

SEQ ID NO: 517454 - RNA, 19 nt, Homo sapiens
  misc_RNA (1)...(19): siRNA sense strand
gacgcucagacaccuauua

SEQ ID NO: 517455 - RNA, 19 nt, Homo sapiens
  misc_RNA (1)...(19): siRNA sense strand
acaaggaggagaacaagga

SEQ ID NO: 517456 - RNA, 19 nt, Homo sapiens
  misc_RNA (1)...(19): siRNA sense strand
guggugaggucaggaagga

SEQ ID NO: 517457 - RNA, 19 nt, Homo sapiens
  misc_RNA (1)...(19): siRNA sense strand
ggacaaggaggagaacaag

SEQ ID NO: 517458 - RNA, 19 nt, Homo sapiens
  misc_RNA (1)...(19): siRNA sense strand
uguugcagcuuccacagaa

SEQ ID NO: 517459 - RNA, 19 nt, Homo sapiens
  misc_RNA (1)...(19): siRNA sense strand
caaauuggccccagaggaa

SEQ ID NO: 517460 - RNA, 19 nt, Homo sapiens
  misc_RNA (1)...(19): siRNA sense strand
cacagagaauugccuucaa

SEQ ID NO: 517461 - RNA, 19 nt, Homo sapiens
  misc_RNA (1)...(19): siRNA sense strand
gagauacagcagucugguu

SEQ ID NO: 517462 - RNA, 19 nt, Homo sapiens
  misc_RNA (1)...(19): siRNA sense strand
ccucuucgacuucaaacaa

SEQ ID NO: 517463 - RNA, 19 nt, Homo sapiens
  misc_RNA (1)...(19): siRNA sense strand
acagagaauugccuucaac

SEQ ID NO: 517464 - RNA, 19 nt, Homo sapiens
  misc_RNA (1)...(19): siRNA sense strand
ucaaaacguugugcaaaga

SEQ ID NO: 517465 - RNA, 19 nt, Homo sapiens
  misc_RNA (1)...(19): siRNA sense strand
ugauucugccuccaaauug

SEQ ID NO: 517466 - RNA, 19 nt, Homo sapiens
  misc_RNA (1)...(19): siRNA sense strand
gaccauacccaggcuccaa

SEQ ID NO: 517467 - RNA, 19 nt, Homo sapiens
  misc_RNA (1)...(19): siRNA sense strand
ccaaaggcagcggcucaaa

SEQ ID NO: 517468 - RNA, 19 nt, Homo sapiens
  misc_RNA (1)...(19): siRNA sense strand
aggaggagaacaaggauga

SEQ ID NO: 517469 - RNA, 19 nt, Homo sapiens
  misc_RNA (1)...(19): siRNA sense strand
agacaggauccgaagcaaa

SEQ ID NO: 517470 - RNA, 19 nt, Homo sapiens
  misc_RNA (1)...(19): siRNA sense strand
ccagcaagaagcgaaagaa

SEQ ID NO: 517471 - RNA, 19 nt, Homo sapiens
  misc_RNA (1)...(19): siRNA sense strand
aagcaaaguugagcugacu

SEQ ID NO: 517472 - RNA, 19 nt, Homo sapiens
  misc_RNA (1)...(19): siRNA sense strand
gccuggcacugaccuugug

SEQ ID NO: 517473 - RNA, 19 nt, Homo sapiens
  misc_RNA (1)...(19): siRNA sense strand
gaacccgcuuccgagauac

SEQ ID NO: 517474 - RNA, 19 nt, Homo sapiens
  misc_RNA (1)...(19): siRNA sense strand
uggcacugaccuuguguuu

SEQ ID NO: 517475 - RNA, 19 nt, Homo sapiens
  misc_RNA (1)...(19): siRNA sense strand
aaguugagcugacucgaua

SEQ ID NO: 517476 - RNA, 19 nt, Homo sapiens
  misc_RNA (1)...(19): siRNA sense strand
ggaugauucugccuccaaa

SEQ ID NO: 517477 - RNA, 19 nt, Homo sapiens
  misc_RNA (1)...(19): siRNA sense strand
gcacagagaauugccuuca

SEQ ID NO: 517478 - RNA, 19 nt, Homo sapiens
  misc_RNA (1)...(19): siRNA sense strand
ugugagaacuguggaauca

SEQ ID NO: 517479 - RNA, 19 nt, Homo sapiens
  misc_RNA (1)...(19): siRNA sense strand
gagccgaggguguggagua

SEQ ID NO: 517480 - RNA, 19 nt, Homo sapiens
  misc_RNA (1)...(19): siRNA sense strand
caucuuggcccuaccuuga

SEQ ID NO: 517481 - RNA, 19 nt, Homo sapiens
  misc_RNA (1)...(19): siRNA sense strand
gcuccugggugcugugaga

SEQ ID NO: 517482 - RNA, 19 nt, Homo sapiens
  misc_RNA (1)...(19): siRNA sense strand
caagaggauuguggccauu

SEQ ID NO: 517483 - RNA, 19 nt, Homo sapiens
  misc_RNA (1)...(19): siRNA sense strand
gacaggauccgaagcaaag

SEQ ID NO: 517484 - RNA, 19 nt, Homo sapiens
  misc_RNA (1)...(19): siRNA sense strand
gaggagaacaaggaugauu

SEQ ID NO: 517485 - RNA, 19 nt, Homo sapiens
  misc_RNA (1)...(19): siRNA sense strand
ggagacaggauccgaagca

SEQ ID NO: 517486 - RNA, 19 nt, Homo sapiens
  misc_RNA (1)...(19): siRNA sense strand
agaccaaggcugacacuga

SEQ ID NO: 517487 - RNA, 19 nt, Homo sapiens
  misc_RNA (1)...(19): siRNA sense strand
gagacaggauccgaagcaa

SEQ ID NO: 517488 - RNA, 19 nt, Homo sapiens
  misc_RNA (1)...(19): siRNA sense strand
gcucagacaccuauuacca

SEQ ID NO: 517489 - RNA, 19 nt, Homo sapiens
  misc_RNA (1)...(19): siRNA sense strand
gacgcucagacaccuauua

SEQ ID NO: 517490 - RNA, 19 nt, Homo sapiens
  misc_RNA (1)...(19): siRNA sense strand
acaaggaggagaacaagga

SEQ ID NO: 517491 - RNA, 19 nt, Homo sapiens
  misc_RNA (1)...(19): siRNA sense strand
guggugaggucaggaagga

SEQ ID NO: 517492 - RNA, 19 nt, Homo sapiens
  misc_RNA (1)...(19): siRNA sense strand
ggacaaggaggagaacaag

SEQ ID NO: 517493 - RNA, 19 nt, Homo sapiens
  misc_RNA (1)...(19): siRNA sense strand
uguugcagcuuccacagaa

SEQ ID NO: 517494 - RNA, 19 nt, Homo sapiens
  misc_RNA (1)...(19): siRNA sense strand
caaauuggccccagaggaa

SEQ ID NO: 517495 - RNA, 19 nt, Homo sapiens
  misc_RNA (1)...(19): siRNA sense strand
cacagagaauugccuucaa

SEQ ID NO: 517496 - RNA, 19 nt, Homo sapiens
  misc_RNA (1)...(19): siRNA sense strand
gagauacagcagucugguu

SEQ ID NO: 517497 - RNA, 19 nt, Homo sapiens
  misc_RNA (1)...(19): siRNA sense strand
ccucuucgacuucaaacaa

SEQ ID NO: 517498 - RNA, 19 nt, Homo sapiens
  misc_RNA (1)...(19): siRNA sense strand
acagagaauugccuucaac

SEQ ID NO: 517499 - RNA, 19 nt, Homo sapiens
  misc_RNA (1)...(19): siRNA sense strand
ucaaaacguugugcaaaga

SEQ ID NO: 517500 - RNA, 19 nt, Homo sapiens
  misc_RNA (1)...(19): siRNA sense strand
ugauucugccuccaaauug

SEQ ID NO: 517501 - RNA, 19 nt, Homo sapiens
  misc_RNA (1)...(19): siRNA sense strand
gaccauacccaggcuccaa

SEQ ID NO: 517502 - RNA, 19 nt, Homo sapiens
  misc_RNA (1)...(19): siRNA sense strand
ccaaaggcagcggcucaaa

SEQ ID NO: 517503 - RNA, 19 nt, Homo sapiens
  misc_RNA (1)...(19): siRNA sense strand
aggaggagaacaaggauga

SEQ ID NO: 517504 - RNA, 19 nt, Homo sapiens
  misc_RNA (1)...(19): siRNA sense strand
agacaggauccgaagcaaa

SEQ ID NO: 517505 - RNA, 19 nt, Homo sapiens
  misc_RNA (1)...(19): siRNA sense strand
ccagcaagaagcgaaagaa

SEQ ID NO: 517506 - RNA, 19 nt, Homo sapiens
  misc_RNA (1)...(19): siRNA sense strand
aagcaaaguugagcugacu

SEQ ID NO: 517507 - RNA, 19 nt, Homo sapiens
  misc_RNA (1)...(19): siRNA sense strand
gccuggcacugaccuugug

SEQ ID NO: 517508 - RNA, 19 nt, Homo sapiens
  misc_RNA (1)...(19): siRNA sense strand
gaacccgcuuccgagauac

SEQ ID NO: 517509 - RNA, 19 nt, Homo sapiens
  misc_RNA (1)...(19): siRNA sense strand
uggcacugaccuuguguuu

SEQ ID NO: 517510 - RNA, 19 nt, Homo sapiens
  misc_RNA (1)...(19): siRNA sense strand
gaagauggauguaaagugu

SEQ ID NO: 517511 - RNA, 19 nt, Homo sapiens
  misc_RNA (1)...(19): siRNA sense strand
aaguugagcugacucgaua

SEQ ID NO: 517512 - RNA, 19 nt, Homo sapiens
  misc_RNA (1)...(19): siRNA sense strand
ccacgaggauggccuggaa

SEQ ID NO: 517513 - RNA, 19 nt, Homo sapiens
  misc_RNA (1)...(19): siRNA sense strand
gaagggaagauggauguaa

SEQ ID NO: 517514 - RNA, 19 nt, Homo sapiens
  misc_RNA (1)...(19): siRNA sense strand
ggaugauucugccuccaaa

SEQ ID NO: 517515 - RNA, 19 nt, Homo sapiens
  misc_RNA (1)...(19): siRNA sense strand
aagggaagauggauguaaa

SEQ ID NO: 517516 - RNA, 19 nt, Homo sapiens
  misc_RNA (1)...(19): siRNA sense strand
gcacagagaauugccuuca

SEQ ID NO: 517517 - RNA, 19 nt, Homo sapiens
  misc_RNA (1)...(19): siRNA sense strand
ugugagaacuguggaauca

SEQ ID NO: 517518 - RNA, 19 nt, Homo sapiens
  misc_RNA (1)...(19): siRNA sense strand
gagccgaggguguggagua

SEQ ID NO: 517519 - RNA, 19 nt, Homo sapiens
  misc_RNA (1)...(19): siRNA sense strand
caucuuggcccuaccuuga

SEQ ID NO: 517520 - RNA, 19 nt, Homo sapiens
  misc_RNA (1)...(19): siRNA sense strand
gcuccugggugcugugaga

SEQ ID NO: 517521 - RNA, 19 nt, Homo sapiens
  misc_RNA (1)...(19): siRNA sense strand
ggaagauggauguaaagug

SEQ ID NO: 517522 - RNA, 19 nt, Homo sapiens
  misc_RNA (1)...(19): siRNA sense strand
caagaggauuguggccauu

SEQ ID NO: 517523 - RNA, 19 nt, Homo sapiens
  misc_RNA (1)...(19): siRNA sense strand
gacaggauccgaagcaaag

SEQ ID NO: 517524 - RNA, 19 nt, Homo sapiens
  misc_RNA (1)...(19): siRNA sense strand
gaggagaacaaggaugauu

SEQ ID NO: 517525 - RNA, 19 nt, Homo sapiens
  misc_RNA (1)...(19): siRNA sense strand
agaccaaggcugacacuga

SEQ ID NO: 517526 - RNA, 19 nt, Homo sapiens
  misc_RNA (1)...(19): siRNA sense strand
ggagacaggauccgaagca

SEQ ID NO: 517527 - RNA, 19 nt, Homo sapiens
  misc_RNA (1)...(19): siRNA sense strand
gcucagacaccuauuacca

SEQ ID NO: 517528 - RNA, 19 nt, Homo sapiens
  misc_RNA (1)...(19): siRNA sense strand
gagacaggauccgaagcaa

SEQ ID NO: 517529 - RNA, 19 nt, Homo sapiens
  misc_RNA (1)...(19): siRNA sense strand
gggaagggaagauggaugu

SEQ ID NO: 517530 - RNA, 19 nt, Homo sapiens
  misc_RNA (1)...(19): siRNA sense strand
acaaggaggagaacaagga

SEQ ID NO: 517531 - RNA, 19 nt, Homo sapiens
  misc_RNA (1)...(19): siRNA sense strand
gacgcucagacaccuauua

SEQ ID NO: 517532 - RNA, 19 nt, Homo sapiens
  misc_RNA (1)...(19): siRNA sense strand
guggugaggucaggaagga

SEQ ID NO: 517533 - RNA, 19 nt, Homo sapiens
  misc_RNA (1)...(19): siRNA sense strand
ggacaaggaggagaacaag

SEQ ID NO: 517534 - RNA, 19 nt, Homo sapiens
  misc_RNA (1)...(19): siRNA sense strand
uguugcagcuuccacagaa

SEQ ID NO: 517535 - RNA, 19 nt, Homo sapiens
  misc_RNA (1)...(19): siRNA sense strand
caaauuggccccagaggaa

SEQ ID NO: 517536 - RNA, 19 nt, Homo sapiens
  misc_RNA (1)...(19): siRNA sense strand
cacagagaauugccuucaa

SEQ ID NO: 517537 - RNA, 19 nt, Homo sapiens
  misc_RNA (1)...(19): siRNA sense strand
gagauacagcagucugguu

SEQ ID NO: 517538 - RNA, 19 nt, Homo sapiens
  misc_RNA (1)...(19): siRNA sense strand
ccucuucgacuucaaacaa

SEQ ID NO: 517539 - RNA, 19 nt, Homo sapiens
  misc_RNA (1)...(19): siRNA sense strand
acagagaauugccuucaac

SEQ ID NO: 517540 - RNA, 19 nt, Homo sapiens
  misc_RNA (1)...(19): siRNA sense strand
ggaagggaagauggaugua

SEQ ID NO: 517541 - RNA, 19 nt, Homo sapiens
  misc_RNA (1)...(19): siRNA sense strand
ucaaaacguugugcaaaga

SEQ ID NO: 517542 - RNA, 19 nt, Homo sapiens
  misc_RNA (1)...(19): siRNA sense strand
gcccuuccucacagaguua

SEQ ID NO: 517543 - RNA, 19 nt, Homo sapiens
  misc_RNA (1)...(19): siRNA sense strand
uggguguccugcagaagaa

SEQ ID NO: 517544 - RNA, 19 nt, Homo sapiens
  misc_RNA (1)...(19): siRNA sense strand
ugauucugccuccaaauug

SEQ ID NO: 517545 - RNA, 19 nt, Homo sapiens
  misc_RNA (1)...(19): siRNA sense strand
gaccauacccaggcuccaa

SEQ ID NO: 517546 - RNA, 19 nt, Homo sapiens
  misc_RNA (1)...(19): siRNA sense strand
ccaaaggcagcggcucaaa

SEQ ID NO: 517547 - RNA, 19 nt, Homo sapiens
  misc_RNA (1)...(19): siRNA sense strand
aggaggagaacaaggauga

SEQ ID NO: 517548 - RNA, 19 nt, Homo sapiens
  misc_RNA (1)...(19): siRNA sense strand
agacaggauccgaagcaaa

SEQ ID NO: 517549 - RNA, 19 nt, Homo sapiens
  misc_RNA (1)...(19): siRNA sense strand
ccagcaagaagcgaaagaa

SEQ ID NO: 517550 - RNA, 19 nt, Homo sapiens
  misc_RNA (1)...(19): siRNA sense strand
aagcaaaguugagcugacu

SEQ ID NO: 517551 - RNA, 19 nt, Homo sapiens
  misc_RNA (1)...(19): siRNA sense strand
guggguguccugcagaaga

SEQ ID NO: 517552 - RNA, 19 nt, Homo sapiens
  misc_RNA (1)...(19): siRNA sense strand
ccaccuccagcuucgauga

SEQ ID NO: 517553 - RNA, 19 nt, Homo sapiens
  misc_RNA (1)...(19): siRNA sense strand
gccuggcacugaccuugug

SEQ ID NO: 517554 - RNA, 19 nt, Homo sapiens
  misc_RNA (1)...(19): siRNA sense strand
gcuggugcccuuccucaca

SEQ ID NO: 517555 - RNA, 19 nt, Homo sapiens
  misc_RNA (1)...(19): siRNA sense strand
gaacccgcuuccgagauac

SEQ ID NO: 517556 - RNA, 19 nt, Homo sapiens
  misc_RNA (1)...(19): siRNA sense strand
uggcacugaccuuguguuu

SEQ ID NO: 517557 - RNA, 19 nt, Homo sapiens
  misc_RNA (1)...(19): siRNA sense strand
aaguugagcugacucgaua

SEQ ID NO: 517558 - RNA, 19 nt, Homo sapiens
  misc_RNA (1)...(19): siRNA sense strand
ggaugauucugccuccaaa

SEQ ID NO: 517559 - RNA, 19 nt, Homo sapiens
  misc_RNA (1)...(19): siRNA sense strand
gcacagagaauugccuuca

SEQ ID NO: 517560 - RNA, 19 nt, Homo sapiens
  misc_RNA (1)...(19): siRNA sense strand
ugugagaacuguggaauca

SEQ ID NO: 517561 - RNA, 19 nt, Homo sapiens
  misc_RNA (1)...(19): siRNA sense strand
gagccgaggguguggagua

SEQ ID NO: 517562 - RNA, 19 nt, Homo sapiens
  misc_RNA (1)...(19): siRNA sense strand
caucuuggcccuaccuuga

SEQ ID NO: 517563 - RNA, 19 nt, Homo sapiens
  misc_RNA (1)...(19): siRNA sense strand
gcuccugggugcugugaga

SEQ ID NO: 517564 - RNA, 19 nt, Homo sapiens
  misc_RNA (1)...(19): siRNA sense strand
caagaggauuguggccauu

SEQ ID NO: 517565 - RNA, 19 nt, Homo sapiens
  misc_RNA (1)...(19): siRNA sense strand
gacaggauccgaagcaaag

SEQ ID NO: 517566 - RNA, 19 nt, Homo sapiens
  misc_RNA (1)...(19): siRNA sense strand
gaggagaacaaggaugauu

SEQ ID NO: 517567 - RNA, 19 nt, Homo sapiens
  misc_RNA (1)...(19): siRNA sense strand
ggagacaggauccgaagca

SEQ ID NO: 517568 - RNA, 19 nt, Homo sapiens
  misc_RNA (1)...(19): siRNA sense strand
agaccaaggcugacacuga

SEQ ID NO: 517569 - RNA, 19 nt, Homo sapiens
  misc_RNA (1)...(19): siRNA sense strand
gagacaggauccgaagcaa

SEQ ID NO: 517570 - RNA, 19 nt, Homo sapiens
  misc_RNA (1)...(19): siRNA sense strand
gcucagacaccuauuacca

SEQ ID NO: 517571 - RNA, 19 nt, Homo sapiens
  misc_RNA (1)...(19): siRNA sense strand
gacgcucagacaccuauua

SEQ ID NO: 517572 - RNA, 19 nt, Homo sapiens
  misc_RNA (1)...(19): siRNA sense strand
acaaggaggagaacaagga

SEQ ID NO: 517573 - RNA, 19 nt, Homo sapiens
  misc_RNA (1)...(19): siRNA sense strand
guggugaggucaggaagga

SEQ ID NO: 517574 - RNA, 19 nt, Homo sapiens
  misc_RNA (1)...(19): siRNA sense strand
ggacaaggaggagaacaag

SEQ ID NO: 517575 - RNA, 19 nt, Homo sapiens
  misc_RNA (1)...(19): siRNA sense strand
uguugcagcuuccacagaa

SEQ ID NO: 517576 - RNA, 19 nt, Homo sapiens
  misc_RNA (1)...(19): siRNA sense strand
caaauuggccccagaggaa

SEQ ID NO: 517577 - RNA, 19 nt, Homo sapiens
  misc_RNA (1)...(19): siRNA sense strand
cacagagaauugccuucaa

SEQ ID NO: 517578 - RNA, 19 nt, Homo sapiens
  misc_RNA (1)...(19): siRNA sense strand
gagauacagcagucugguu

SEQ ID NO: 517579 - RNA, 19 nt, Homo sapiens
  misc_RNA (1)...(19): siRNA sense strand
ccucuucgacuucaaacaa

SEQ ID NO: 517580 - RNA, 19 nt, Homo sapiens
  misc_RNA (1)...(19): siRNA sense strand
acagagaauugccuucaac

SEQ ID NO: 517581 - RNA, 19 nt, Homo sapiens
  misc_RNA (1)...(19): siRNA sense strand
ucaaaacguugugcaaaga

SEQ ID NO: 517582 - RNA, 19 nt, Homo sapiens
  misc_RNA (1)...(19): siRNA sense strand
ugauucugccuccaaauug

SEQ ID NO: 517583 - RNA, 19 nt, Homo sapiens
  misc_RNA (1)...(19): siRNA sense strand
gaccauacccaggcuccaa

SEQ ID NO: 517584 - RNA, 19 nt, Homo sapiens
  misc_RNA (1)...(19): siRNA sense strand
ccaaaggcagcggcucaaa

SEQ ID NO: 517585 - RNA, 19 nt, Homo sapiens
  misc_RNA (1)...(19): siRNA sense strand
aggaggagaacaaggauga

SEQ ID NO: 517586 - RNA, 19 nt, Homo sapiens
  misc_RNA (1)...(19): siRNA sense strand
agacaggauccgaagcaaa

SEQ ID NO: 517587 - RNA, 19 nt, Homo sapiens
  misc_RNA (1)...(19): siRNA sense strand
ccagcaagaagcgaaagaa

SEQ ID NO: 517588 - RNA, 19 nt, Homo sapiens
  misc_RNA (1)...(19): siRNA sense strand
aagcaaaguugagcugacu

SEQ ID NO: 517589 - RNA, 19 nt, Homo sapiens
  misc_RNA (1)...(19): siRNA sense strand
gccuggcacugaccuugug

SEQ ID NO: 517590 - RNA, 19 nt, Homo sapiens
  misc_RNA (1)...(19): siRNA sense strand
gaacccgcuuccgagauac

SEQ ID NO: 517591 - RNA, 19 nt, Homo sapiens
  misc_RNA (1)...(19): siRNA sense strand
uggcacugaccuuguguuu

SEQ ID NO: 517592 - RNA, 19 nt, Homo sapiens
  misc_RNA (1)...(19): siRNA sense strand
aaguugagcugacucgaua

SEQ ID NO: 517593 - RNA, 19 nt, Homo sapiens
  misc_RNA (1)...(19): siRNA sense strand
ggaugauucugccuccaaa

SEQ ID NO: 517594 - RNA, 19 nt, Homo sapiens
  misc_RNA (1)...(19): siRNA sense strand
gcacagagaauugccuuca

SEQ ID NO: 517595 - RNA, 19 nt, Homo sapiens
  misc_RNA (1)...(19): siRNA sense strand
ugugagaacuguggaauca

SEQ ID NO: 517596 - RNA, 19 nt, Homo sapiens
  misc_RNA (1)...(19): siRNA sense strand
gagccgaggguguggagua

SEQ ID NO: 517597 - RNA, 19 nt, Homo sapiens
  misc_RNA (1)...(19): siRNA sense strand
caucuuggcccuaccuuga

SEQ ID NO: 517598 - RNA, 19 nt, Homo sapiens
  misc_RNA (1)...(19): siRNA sense strand
gcuccugggugcugugaga

SEQ ID NO: 517599 - RNA, 19 nt, Homo sapiens
  misc_RNA (1)...(19): siRNA sense strand
caagaggauuguggccauu

SEQ ID NO: 517600 - RNA, 19 nt, Homo sapiens
  misc_RNA (1)...(19): siRNA sense strand
gacaggauccgaagcaaag

SEQ ID NO: 517601 - RNA, 19 nt, Homo sapiens
  misc_RNA (1)...(19): siRNA sense strand
gaggagaacaaggaugauu

SEQ ID NO: 517602 - RNA, 19 nt, Homo sapiens
  misc_RNA (1)...(19): siRNA sense strand
ggagacaggauccgaagca

SEQ ID NO: 517603 - RNA, 19 nt, Homo sapiens
  misc_RNA (1)...(19): siRNA sense strand
agaccaaggcugacacuga

SEQ ID NO: 517604 - RNA, 19 nt, Homo sapiens
  misc_RNA (1)...(19): siRNA sense strand
gagacaggauccgaagcaa

SEQ ID NO: 517605 - RNA, 19 nt, Homo sapiens
  misc_RNA (1)...(19): siRNA sense strand
gcucagacaccuauuacca

SEQ ID NO: 517606 - RNA, 19 nt, Homo sapiens
  misc_RNA (1)...(19): siRNA sense strand
gacgcucagacaccuauua

SEQ ID NO: 517607 - RNA, 19 nt, Homo sapiens
  misc_RNA (1)...(19): siRNA sense strand
acaaggaggagaacaagga

SEQ ID NO: 517608 - RNA, 19 nt, Homo sapiens
  misc_RNA (1)...(19): siRNA sense strand
guggugaggucaggaagga

SEQ ID NO: 517609 - RNA, 19 nt, Homo sapiens
  misc_RNA (1)...(19): siRNA sense strand
ggacaaggaggagaacaag

SEQ ID NO: 517610 - RNA, 19 nt, Homo sapiens
  misc_RNA (1)...(19): siRNA sense strand
uguugcagcuuccacagaa

SEQ ID NO: 517611 - RNA, 19 nt, Homo sapiens
  misc_RNA (1)...(19): siRNA sense strand
caaauuggccccagaggaa

SEQ ID NO: 517612 - RNA, 19 nt, Homo sapiens
  misc_RNA (1)...(19): siRNA sense strand
cacagagaauugccuucaa

SEQ ID NO: 517613 - RNA, 19 nt, Homo sapiens
  misc_RNA (1)...(19): siRNA sense strand
gagauacagcagucugguu

SEQ ID NO: 517614 - RNA, 19 nt, Homo sapiens
  misc_RNA (1)...(19): siRNA sense strand
ccucuucgacuucaaacaa

SEQ ID NO: 517615 - RNA, 19 nt, Homo sapiens
  misc_RNA (1)...(19): siRNA sense strand
acagagaauugccuucaac

SEQ ID NO: 517616 - RNA, 19 nt, Homo sapiens
  misc_RNA (1)...(19): siRNA sense strand
ucaaaacguugugcaaaga

SEQ ID NO: 517617 - RNA, 19 nt, Homo sapiens
  misc_RNA (1)...(19): siRNA sense strand
ugauucugccuccaaauug

SEQ ID NO: 517618 - RNA, 19 nt, Homo sapiens
  misc_RNA (1)...(19): siRNA sense strand
gaccauacccaggcuccaa

SEQ ID NO: 517619 - RNA, 19 nt, Homo sapiens
  misc_RNA (1)...(19): siRNA sense strand
ccaaaggcagcggcucaaa

SEQ ID NO: 517620 - RNA, 19 nt, Homo sapiens
  misc_RNA (1)...(19): siRNA sense strand
aggaggagaacaaggauga

SEQ ID NO: 517621 - RNA, 19 nt, Homo sapiens
  misc_RNA (1)...(19): siRNA sense strand
agacaggauccgaagcaaa

SEQ ID NO: 517622 - RNA, 19 nt, Homo sapiens
  misc_RNA (1)...(19): siRNA sense strand
ccagcaagaagcgaaagaa

SEQ ID NO: 517623 - RNA, 19 nt, Homo sapiens
  misc_RNA (1)...(19): siRNA sense strand
aagcaaaguugagcugacu

SEQ ID NO: 517624 - RNA, 19 nt, Homo sapiens
  misc_RNA (1)...(19): siRNA sense strand
gccuggcacugaccuugug

SEQ ID NO: 517625 - RNA, 19 nt, Homo sapiens
  misc_RNA (1)...(19): siRNA sense strand
gaacccgcuuccgagauac

SEQ ID NO: 517626 - RNA, 19 nt, Homo sapiens
  misc_RNA (1)...(19): siRNA sense strand
uggcacugaccuuguguuu

SEQ ID NO: 517627 - RNA, 19 nt, Homo sapiens
  misc_RNA (1)...(19): siRNA sense strand
gagaaaguaugccuaauua

SEQ ID NO: 517628 - RNA, 19 nt, Homo sapiens
  misc_RNA (1)...(19): siRNA sense strand
gaaucuagauccacuaauu

SEQ ID NO: 517629 - RNA, 19 nt, Homo sapiens
  misc_RNA (1)...(19): siRNA sense strand
gaaaccaggugacaaaguu

SEQ ID NO: 517630 - RNA, 19 nt, Homo sapiens
  misc_RNA (1)...(19): siRNA sense strand
caaugaagcaguugaauua

SEQ ID NO: 517631 - RNA, 19 nt, Homo sapiens
  misc_RNA (1)...(19): siRNA sense strand
guacagagaugaaaguguu

SEQ ID NO: 517632 - RNA, 19 nt, Homo sapiens
  misc_RNA (1)...(19): siRNA sense strand
gcagagaaguugaaucuag

SEQ ID NO: 517633 - RNA, 19 nt, Homo sapiens
  misc_RNA (1)...(19): siRNA sense strand
gcacaucccuaaacugguu

SEQ ID NO: 517634 - RNA, 19 nt, Homo sapiens
  misc_RNA (1)...(19): siRNA sense strand
caaaggagguucgcauaaa

SEQ ID NO: 517635 - RNA, 19 nt, Homo sapiens
  misc_RNA (1)...(19): siRNA sense strand
caacugaugucugauggua

SEQ ID NO: 517636 - RNA, 19 nt, Homo sapiens
  misc_RNA (1)...(19): siRNA sense strand
ggagucggcuugucuguug

SEQ ID NO: 517637 - RNA, 19 nt, Homo sapiens
  misc_RNA (1)...(19): siRNA sense strand
cuaaacugguugcugauua

SEQ ID NO: 517638 - RNA, 19 nt, Homo sapiens
  misc_RNA (1)...(19): siRNA sense strand
uaaagaaacccauucaaga

SEQ ID NO: 517639 - RNA, 19 nt, Homo sapiens
  misc_RNA (1)...(19): siRNA sense strand
gcagacagcacaucccuaa

SEQ ID NO: 517640 - RNA, 19 nt, Homo sapiens
  misc_RNA (1)...(19): siRNA sense strand
gguauagacuucugcuuug

SEQ ID NO: 517641 - RNA, 19 nt, Homo sapiens
  misc_RNA (1)...(19): siRNA sense strand
gcaaaggagguucgcauaa

SEQ ID NO: 517642 - RNA, 19 nt, Homo sapiens
  misc_RNA (1)...(19): siRNA sense strand
ccucaacccucaggacuua

SEQ ID NO: 517643 - RNA, 19 nt, Homo sapiens
  misc_RNA (1)...(19): siRNA sense strand
ugaagcaguugaauuaaug

SEQ ID NO: 517644 - RNA, 19 nt, Homo sapiens
  misc_RNA (1)...(19): siRNA sense strand
uaugacagaugcugguaua

SEQ ID NO: 517645 - RNA, 19 nt, Homo sapiens
  misc_RNA (1)...(19): siRNA sense strand
aaacccaacugaugucuga

SEQ ID NO: 517646 - RNA, 19 nt, Homo sapiens
  misc_RNA (1)...(19): siRNA sense strand
gaugguaccagcagguuua

SEQ ID NO: 517647 - RNA, 19 nt, Homo sapiens
  misc_RNA (1)...(19): siRNA sense strand
gaaacccauucaagaaguu

SEQ ID NO: 517648 - RNA, 19 nt, Homo sapiens
  misc_RNA (1)...(19): siRNA sense strand
aaagaaacccauucaagaa

SEQ ID NO: 517649 - RNA, 19 nt, Homo sapiens
  misc_RNA (1)...(19): siRNA sense strand
uaaacugguugcugauuau

SEQ ID NO: 517650 - RNA, 19 nt, Homo sapiens
  misc_RNA (1)...(19): siRNA sense strand
ccucuugccugaauucuga

SEQ ID NO: 517651 - RNA, 19 nt, Homo sapiens
  misc_RNA (1)...(19): siRNA sense strand
cagagaaguugaaucuaga

SEQ ID NO: 517652 - RNA, 19 nt, Homo sapiens
  misc_RNA (1)...(19): siRNA sense strand
gaaguugaaucuagaucca

SEQ ID NO: 517653 - RNA, 19 nt, Homo sapiens
  misc_RNA (1)...(19): siRNA sense strand
gaguggaugucaacaagga

SEQ ID NO: 517654 - RNA, 19 nt, Homo sapiens
  misc_RNA (1)...(19): siRNA sense strand
gaaaguaugccuaauuagc

SEQ ID NO: 517655 - RNA, 19 nt, Homo sapiens
  misc_RNA (1)...(19): siRNA sense strand
gaaggaguaagcacaguga

SEQ ID NO: 517656 - RNA, 19 nt, Homo sapiens
  misc_RNA (1)...(19): siRNA sense strand
uaagaaggcacaggaauug

SEQ ID NO: 517657 - RNA, 19 nt, Homo sapiens
  misc_RNA (1)...(19): siRNA sense strand
ggacuuaaagaaacccauu

SEQ ID NO: 517658 - RNA, 19 nt, Homo sapiens
  misc_RNA (1)...(19): siRNA sense strand
guauagacuucugcuuuga

SEQ ID NO: 517659 - RNA, 19 nt, Homo sapiens
  misc_RNA (1)...(19): siRNA sense strand
gauaaaggaaaucucaguu

SEQ ID NO: 517660 - RNA, 19 nt, Homo sapiens
  misc_RNA (1)...(19): siRNA sense strand
gauccacuaauuacucaua

SEQ ID NO: 517661 - RNA, 19 nt, Homo sapiens
  misc_RNA (1)...(19): siRNA sense strand
caaaaucaguggccaguug

SEQ ID NO: 517662 - RNA, 19 nt, Homo sapiens
  misc_RNA (1)...(19): siRNA sense strand
guaaacacuuggaccucuu

SEQ ID NO: 517663 - RNA, 19 nt, Homo sapiens
  misc_RNA (1)...(19): siRNA sense strand
gugaauacacagugauaaa

SEQ ID NO: 517664 - RNA, 19 nt, Homo sapiens
  misc_RNA (1)...(19): siRNA sense strand
cggcuugucuguugucaug

SEQ ID NO: 517665 - RNA, 19 nt, Homo sapiens
  misc_RNA (1)...(19): siRNA sense strand
agagaaaguaugccuaauu

SEQ ID NO: 517666 - RNA, 19 nt, Homo sapiens
  misc_RNA (1)...(19): siRNA sense strand
caaggugacuccagguucu

SEQ ID NO: 517667 - RNA, 19 nt, Homo sapiens
  misc_RNA (1)...(19): siRNA sense strand
cugauuauauggcagagaa

SEQ ID NO: 517668 - RNA, 19 nt, Homo sapiens
  misc_RNA (1)...(19): siRNA sense strand
acacagugauaaaggaaau

SEQ ID NO: 517669 - RNA, 19 nt, Homo sapiens
  misc_RNA (1)...(19): siRNA sense strand
ccucaggacuuaaagaaac

SEQ ID NO: 517670 - RNA, 19 nt, Homo sapiens
  misc_RNA (1)...(19): siRNA sense strand
ugucauggguuguaaagca

SEQ ID NO: 517671 - RNA, 19 nt, Homo sapiens
  misc_RNA (1)...(19): siRNA sense strand
cuaauuagcuguggcuuuu

SEQ ID NO: 517672 - RNA, 19 nt, Homo sapiens
  misc_RNA (1)...(19): siRNA sense strand
cuagagaaaguaugccuaa

SEQ ID NO: 517673 - RNA, 19 nt, Homo sapiens
  misc_RNA (1)...(19): siRNA sense strand
aaaggagguucgcauaaag

SEQ ID NO: 517674 - RNA, 19 nt, Homo sapiens
  misc_RNA (1)...(19): siRNA sense strand
gacagaugcugguauagac

SEQ ID NO: 517675 - RNA, 19 nt, Homo sapiens
  misc_RNA (1)...(19): siRNA sense strand
caacaaggagaaauuuaag

SEQ ID NO: 517676 - RNA, 19 nt, Homo sapiens
  misc_RNA (1)...(19): siRNA sense strand
ggcaaaggagguucgcaua

SEQ ID NO: 517677 - RNA, 19 nt, Homo sapiens
  misc_RNA (1)...(19): siRNA sense strand
uuaagaaggcacaggaauu

SEQ ID NO: 517678 - RNA, 19 nt, Homo sapiens
  misc_RNA (1)...(19): siRNA sense strand
acacuuggaccucuuguau

SEQ ID NO: 517679 - RNA, 19 nt, Homo sapiens
  misc_RNA (1)...(19): siRNA sense strand
gaauacacagugauaaagg

SEQ ID NO: 517680 - RNA, 19 nt, Homo sapiens
  misc_RNA (1)...(19): siRNA sense strand
gaagcaguugaauuaauga

SEQ ID NO: 517681 - RNA, 19 nt, Homo sapiens
  misc_RNA (1)...(19): siRNA sense strand
uagauccacuaauuacuca

SEQ ID NO: 517682 - RNA, 19 nt, Homo sapiens
  misc_RNA (1)...(19): siRNA sense strand
gacagcacaucccuaaacu

SEQ ID NO: 517683 - RNA, 19 nt, Homo sapiens
  misc_RNA (1)...(19): siRNA sense strand
ggagcagccaggaucauug

SEQ ID NO: 517684 - RNA, 19 nt, Homo sapiens
  misc_RNA (1)...(19): siRNA sense strand
ugacagaugcugguauaga

SEQ ID NO: 517685 - RNA, 19 nt, Homo sapiens
  misc_RNA (1)...(19): siRNA sense strand
agaaacccauucaagaagu

SEQ ID NO: 517686 - RNA, 19 nt, Homo sapiens
  misc_RNA (1)...(19): siRNA sense strand
ugaaggggcuggaaucguu

SEQ ID NO: 517687 - RNA, 19 nt, Homo sapiens
  misc_RNA (1)...(19): siRNA sense strand
gcuuugaggccauuggaaa

SEQ ID NO: 517688 - RNA, 19 nt, Homo sapiens
  misc_RNA (1)...(19): siRNA sense strand
uuaaagaaacccauucaag

SEQ ID NO: 517689 - RNA, 19 nt, Homo sapiens
  misc_RNA (1)...(19): siRNA sense strand
gcuggaaucguugagagua

SEQ ID NO: 517690 - RNA, 19 nt, Homo sapiens
  misc_RNA (1)...(19): siRNA sense strand
gagaaggaguaagcacagu

SEQ ID NO: 517691 - RNA, 19 nt, Homo sapiens
  misc_RNA (1)...(19): siRNA sense strand
cucauacucugaaucuuga

SEQ ID NO: 517692 - RNA, 19 nt, Homo sapiens
  misc_RNA (1)...(19): siRNA sense strand
gucaacaaggagaaauuua

SEQ ID NO: 517693 - RNA, 19 nt, Homo sapiens
  misc_RNA (1)...(19): siRNA sense strand
gaguauuggagaaggagua

SEQ ID NO: 517694 - RNA, 19 nt, Homo sapiens
  misc_RNA (1)...(19): siRNA sense strand
cuaauuacucauacucuga

SEQ ID NO: 517695 - RNA, 19 nt, Homo sapiens
  misc_RNA (1)...(19): siRNA sense strand
ugguauagacuucugcuuu

SEQ ID NO: 517696 - RNA, 19 nt, Homo sapiens
  misc_RNA (1)...(19): siRNA sense strand
gauaugacagaugcuggua

SEQ ID NO: 517697 - RNA, 19 nt, Homo sapiens
  misc_RNA (1)...(19): siRNA sense strand
acaaaguuaucacacucuu

SEQ ID NO: 517698 - RNA, 19 nt, Homo sapiens
  misc_RNA (1)...(19): siRNA sense strand
aaaccaggugacaaaguua

SEQ ID NO: 517699 - RNA, 19 nt, Homo sapiens
  misc_RNA (1)...(19): siRNA sense strand
ggaguaagcacagugaaac

SEQ ID NO: 517700 - RNA, 19 nt, Homo sapiens
  misc_RNA (1)...(19): siRNA sense strand
aauacacagugauaaagga

SEQ ID NO: 517701 - RNA, 19 nt, Homo sapiens
  misc_RNA (1)...(19): siRNA sense strand
ugagaguauuggagaagga

SEQ ID NO: 517702 - RNA, 19 nt, Homo sapiens
  misc_RNA (1)...(19): siRNA sense strand
aagcagccauacucuggaa

SEQ ID NO: 517703 - RNA, 19 nt, Homo sapiens
  misc_RNA (1)...(19): siRNA sense strand
ccagcaccuucugugaaua

SEQ ID NO: 517704 - RNA, 19 nt, Homo sapiens
  misc_RNA (1)...(19): siRNA sense strand
ggaaucguugagaguauug

SEQ ID NO: 517705 - RNA, 19 nt, Homo sapiens
  misc_RNA (1)...(19): siRNA sense strand
guuuggugcugcaaucaau

SEQ ID NO: 517706 - RNA, 19 nt, Homo sapiens
  misc_RNA (1)...(19): siRNA sense strand
uggaguggaugucaacaag

SEQ ID NO: 517707 - RNA, 19 nt, Homo sapiens
  misc_RNA (1)...(19): siRNA sense strand
aaugaaaacuggaaaaugg

SEQ ID NO: 517708 - RNA, 19 nt, Homo sapiens
  misc_RNA (1)...(19): siRNA sense strand
uggaaucguugagaguauu

SEQ ID NO: 517709 - RNA, 19 nt, Homo sapiens
  misc_RNA (1)...(19): siRNA sense strand
acugguugcugauuauaug

SEQ ID NO: 517710 - RNA, 19 nt, Homo sapiens
  misc_RNA (1)...(19): siRNA sense strand
cagaugcaaagcagccaua

SEQ ID NO: 517711 - RNA, 19 nt, Homo sapiens
  misc_RNA (1)...(19): siRNA sense strand
agugaaaccaggugacaaa

SEQ ID NO: 517712 - RNA, 19 nt, Homo sapiens
  misc_RNA (1)...(19): siRNA sense strand
acucauacucugaaucuug

SEQ ID NO: 517713 - RNA, 19 nt, Homo sapiens
  misc_RNA (1)...(19): siRNA sense strand
auaaaggaaaucucaguug

SEQ ID NO: 517714 - RNA, 19 nt, Homo sapiens
  misc_RNA (1)...(19): siRNA sense strand
gcaagggaaaaucaauaua

SEQ ID NO: 517715 - RNA, 19 nt, Homo sapiens
  misc_RNA (1)...(19): siRNA sense strand
caggaucauuggaguggau

SEQ ID NO: 517716 - RNA, 19 nt, Homo sapiens
  misc_RNA (1)...(19): siRNA sense strand
uggcagagaaguugaaucu

SEQ ID NO: 517717 - RNA, 19 nt, Homo sapiens
  misc_RNA (1)...(19): siRNA sense strand
gaagagcagacagcacauc

SEQ ID NO: 517718 - RNA, 19 nt, Homo sapiens
  misc_RNA (1)...(19): siRNA sense strand
ugccaguguucaacucaaa

SEQ ID NO: 517719 - RNA, 19 nt, Homo sapiens
  misc_RNA (1)...(19): siRNA sense strand
cauuggaaaucuggacguu

SEQ ID NO: 517720 - RNA, 19 nt, Homo sapiens
  misc_RNA (1)...(19): siRNA sense strand
caaggagaaauuuaagaag

SEQ ID NO: 517721 - RNA, 19 nt, Homo sapiens
  misc_RNA (1)...(19): siRNA sense strand
gguucuaccugugcugugu

SEQ ID NO: 517722 - RNA, 19 nt, Homo sapiens
  misc_RNA (1)...(19): siRNA sense strand
aaacugguugcugauuaua

SEQ ID NO: 517723 - RNA, 19 nt, Homo sapiens
  misc_RNA (1)...(19): siRNA sense strand
ucucaggacguucuuugaa

SEQ ID NO: 517724 - RNA, 19 nt, Homo sapiens
  misc_RNA (1)...(19): siRNA sense strand
ugucaacaaggagaaauuu

SEQ ID NO: 517725 - RNA, 19 nt, Homo sapiens
  misc_RNA (1)...(19): siRNA sense strand
gagcagccaggaucauugg

SEQ ID NO: 517726 - RNA, 19 nt, Homo sapiens
  misc_RNA (1)...(19): siRNA sense strand
gcaggagcagccaggauca

SEQ ID NO: 517727 - RNA, 19 nt, Homo sapiens
  misc_RNA (1)...(19): siRNA sense strand
gaugggagaucucaaguuu

SEQ ID NO: 517728 - RNA, 19 nt, Homo sapiens
  misc_RNA (1)...(19): siRNA sense strand
gcugugacauagauauuua

SEQ ID NO: 517729 - RNA, 19 nt, Homo sapiens
  misc_RNA (1)...(19): siRNA sense strand
gaugaugccuauccagaaa

SEQ ID NO: 517730 - RNA, 19 nt, Homo sapiens
  misc_RNA (1)...(19): siRNA sense strand
caacagagcuacagaaaag

SEQ ID NO: 517731 - RNA, 19 nt, Homo sapiens
  misc_RNA (1)...(19): siRNA sense strand
gaucuauguugauaaggaa

SEQ ID NO: 517732 - RNA, 19 nt, Homo sapiens
  misc_RNA (1)...(19): siRNA sense strand
ugagaagacuguuaaagca

SEQ ID NO: 517733 - RNA, 19 nt, Homo sapiens
  misc_RNA (1)...(19): siRNA sense strand
gcacccgugugguugcuaa

SEQ ID NO: 517734 - RNA, 19 nt, Homo sapiens
  misc_RNA (1)...(19): siRNA sense strand
cuucaauccucuagacuuu

SEQ ID NO: 517735 - RNA, 19 nt, Homo sapiens
  misc_RNA (1)...(19): siRNA sense strand
agaagacuguuaaagcaaa

SEQ ID NO: 517736 - RNA, 19 nt, Homo sapiens
  misc_RNA (1)...(19): siRNA sense strand
ugacugagaagacuguuaa

SEQ ID NO: 517737 - RNA, 19 nt, Homo sapiens
  misc_RNA (1)...(19): siRNA sense strand
ugggagaucucaaguuuca

SEQ ID NO: 517738 - RNA, 19 nt, Homo sapiens
  misc_RNA (1)...(19): siRNA sense strand
gcagucuccuucaagcauu

SEQ ID NO: 517739 - RNA, 19 nt, Homo sapiens
  misc_RNA (1)...(19): siRNA sense strand
ccaccagccuuaccuaaag

SEQ ID NO: 517740 - RNA, 19 nt, Homo sapiens
  misc_RNA (1)...(19): siRNA sense strand
gaggagagagagcuugaaa

SEQ ID NO: 517741 - RNA, 19 nt, Homo sapiens
  misc_RNA (1)...(19): siRNA sense strand
ugaugccuauccagaaaua

SEQ ID NO: 517742 - RNA, 19 nt, Homo sapiens
  misc_RNA (1)...(19): siRNA sense strand
acucugaucuauguugaua

SEQ ID NO: 517743 - RNA, 19 nt, Homo sapiens
  misc_RNA (1)...(19): siRNA sense strand
gucuggaccuucaaucaaa

SEQ ID NO: 517744 - RNA, 19 nt, Homo sapiens
  misc_RNA (1)...(19): siRNA sense strand
gagaagacuguuaaagcaa

SEQ ID NO: 517745 - RNA, 19 nt, Homo sapiens
  misc_RNA (1)...(19): siRNA sense strand
ugaucuauguugauaagga

SEQ ID NO: 517746 - RNA, 19 nt, Homo sapiens
  misc_RNA (1)...(19): siRNA sense strand
cuacucugaucuauguuga

SEQ ID NO: 517747 - RNA, 19 nt, Homo sapiens
  misc_RNA (1)...(19): siRNA sense strand
uaccuaaagcuacuagaaa

SEQ ID NO: 517748 - RNA, 19 nt, Homo sapiens
  misc_RNA (1)...(19): siRNA sense strand
aaagaugacugagaagacu

SEQ ID NO: 517749 - RNA, 19 nt, Homo sapiens
  misc_RNA (1)...(19): siRNA sense strand
ccaugggaauccaaucugu

SEQ ID NO: 517750 - RNA, 19 nt, Homo sapiens
  misc_RNA (1)...(19): siRNA sense strand
gaagacuguuaaagcaaaa

SEQ ID NO: 517751 - RNA, 19 nt, Homo sapiens
  misc_RNA (1)...(19): siRNA sense strand
uggagugccucucaugauc

SEQ ID NO: 517752 - RNA, 19 nt, Homo sapiens
  misc_RNA (1)...(19): siRNA sense strand
ggagaucucaaguuucaac

SEQ ID NO: 517753 - RNA, 19 nt, Homo sapiens
  misc_RNA (1)...(19): siRNA sense strand
ucugaucuauguugauaag

SEQ ID NO: 517754 - RNA, 19 nt, Homo sapiens
  misc_RNA (1)...(19): siRNA sense strand
ggagagagagcuugaaaag

SEQ ID NO: 517755 - RNA, 19 nt, Homo sapiens
  misc_RNA (1)...(19): siRNA sense strand
ucaaucaaagccuuagaug

SEQ ID NO: 517756 - RNA, 19 nt, Homo sapiens
  misc_RNA (1)...(19): siRNA sense strand
uuaccuaaagcuacuagaa

SEQ ID NO: 517757 - RNA, 19 nt, Homo sapiens
  misc_RNA (1)...(19): siRNA sense strand
guugaauugccaccuguuu

SEQ ID NO: 517758 - RNA, 19 nt, Homo sapiens
  misc_RNA (1)...(19): siRNA sense strand
ugccucagaugaugccuau

SEQ ID NO: 517759 - RNA, 19 nt, Homo sapiens
  misc_RNA (1)...(19): siRNA sense strand
guuccugccucagaugaug

SEQ ID NO: 517760 - RNA, 19 nt, Homo sapiens
  misc_RNA (1)...(19): siRNA sense strand
ccaccuguuugcugugaca

SEQ ID NO: 517761 - RNA, 19 nt, Homo sapiens
  misc_RNA (1)...(19): siRNA sense strand
gcuacucugaucuauguug

SEQ ID NO: 517762 - RNA, 19 nt, Homo sapiens
  misc_RNA (1)...(19): siRNA sense strand
accuaaagcuacuagaaag

SEQ ID NO: 517763 - RNA, 19 nt, Homo sapiens
  misc_RNA (1)...(19): siRNA sense strand
ccuguuugcugugacauag

SEQ ID NO: 517764 - RNA, 19 nt, Homo sapiens
  misc_RNA (1)...(19): siRNA sense strand
uaaggaaaauggagaacca

SEQ ID NO: 517765 - RNA, 19 nt, Homo sapiens
  misc_RNA (1)...(19): siRNA sense strand
gaguggagugccucucaug

SEQ ID NO: 517766 - RNA, 19 nt, Homo sapiens
  misc_RNA (1)...(19): siRNA sense strand
gccugaagagcaccagauu

SEQ ID NO: 517767 - RNA, 19 nt, Homo sapiens
  misc_RNA (1)...(19): siRNA sense strand
ggacugcacuacuccauga

SEQ ID NO: 517768 - RNA, 19 nt, Homo sapiens
  misc_RNA (1)...(19): siRNA sense strand
ucaaugaaaucuaccauga

SEQ ID NO: 517769 - RNA, 19 nt, Homo sapiens
  misc_RNA (1)...(19): siRNA sense strand
ggaaggagcacguacagaa

SEQ ID NO: 517770 - RNA, 19 nt, Homo sapiens
  misc_RNA (1)...(19): siRNA sense strand
gggccuaccuccagcagaa

SEQ ID NO: 517771 - RNA, 19 nt, Homo sapiens
  misc_RNA (1)...(19): siRNA sense strand
gaacgagcaaugccgcuuu

SEQ ID NO: 517772 - RNA, 19 nt, Homo sapiens
  misc_RNA (1)...(19): siRNA sense strand
gcaaugccgcuuugacuuc

SEQ ID NO: 517773 - RNA, 19 nt, Homo sapiens
  misc_RNA (1)...(19): siRNA sense strand
gcugcacccugaaccauga

SEQ ID NO: 517774 - RNA, 19 nt, Homo sapiens
  misc_RNA (1)...(19): siRNA sense strand
agaaguaccugcugacacu

SEQ ID NO: 517775 - RNA, 19 nt, Homo sapiens
  misc_RNA (1)...(19): siRNA sense strand
gcaaggccgugugcaugug

SEQ ID NO: 517776 - RNA, 19 nt, Homo sapiens
  misc_RNA (1)...(19): siRNA sense strand
gccgcuaccugcacuccua

SEQ ID NO: 517777 - RNA, 19 nt, Homo sapiens
  misc_RNA (1)...(19): siRNA sense strand
acacgggccacgaugaaua

SEQ ID NO: 517778 - RNA, 19 nt, Homo sapiens
  misc_RNA (1)...(19): siRNA sense strand
gaaggagcacguacagaag

SEQ ID NO: 517779 - RNA, 19 nt, Homo sapiens
  misc_RNA (1)...(19): siRNA sense strand
ggauggaggaggaggaguu

SEQ ID NO: 517780 - RNA, 19 nt, Homo sapiens
  misc_RNA (1)...(19): siRNA sense strand
ugacacucaugaacauugu

SEQ ID NO: 517781 - RNA, 19 nt, Homo sapiens
  misc_RNA (1)...(19): siRNA sense strand
ggaggaguucuucaucgaa

SEQ ID NO: 517782 - RNA, 19 nt, Homo sapiens
  misc_RNA (1)...(19): siRNA sense strand
gagcaaugccgcuuugacu

SEQ ID NO: 517783 - RNA, 19 nt, Homo sapiens
  misc_RNA (1)...(19): siRNA sense strand
ggaggaggaguucuucauc

SEQ ID NO: 517784 - RNA, 19 nt, Homo sapiens
  misc_RNA (1)...(19): siRNA sense strand
aggagcacguacagaagua

SEQ ID NO: 517785 - RNA, 19 nt, Homo sapiens
  misc_RNA (1)...(19): siRNA sense strand
cucagagccuggagaaugu

SEQ ID NO: 517786 - RNA, 19 nt, Homo sapiens
  misc_RNA (1)...(19): siRNA sense strand
gugcagccauccugacaac

SEQ ID NO: 517787 - RNA, 19 nt, Homo sapiens
  misc_RNA (1)...(19): siRNA sense strand
ggaggaggaggaguucuuc

SEQ ID NO: 517788 - RNA, 19 nt, Homo sapiens
  misc_RNA (1)...(19): siRNA sense strand
agacacgggccacgaugaa

SEQ ID NO: 517789 - RNA, 19 nt, Homo sapiens
  misc_RNA (1)...(19): siRNA sense strand
ucaucgaacccuuggagaa

SEQ ID NO: 517790 - RNA, 19 nt, Homo sapiens
  misc_RNA (1)...(19): siRNA sense strand
gcuaccugcacuccuauga

SEQ ID NO: 517791 - RNA, 19 nt, Homo sapiens
  misc_RNA (1)...(19): siRNA sense strand
gaucauccuccugagcuau

SEQ ID NO: 517792 - RNA, 19 nt, Homo sapiens
  misc_RNA (1)...(19): siRNA sense strand
ucacacggcaggacuuugg

SEQ ID NO: 517793 - RNA, 19 nt, Homo sapiens
  misc_RNA (1)...(19): siRNA sense strand
aggaggaguucuucaucga

SEQ ID NO: 517794 - RNA, 19 nt, Homo sapiens
  misc_RNA (1)...(19): siRNA sense strand
caucgaacccuuggagaag

SEQ ID NO: 517795 - RNA, 19 nt, Homo sapiens
  misc_RNA (1)...(19): siRNA sense strand
uaccugcacuccuaugacu

SEQ ID NO: 517796 - RNA, 19 nt, Homo sapiens
  misc_RNA (1)...(19): siRNA sense strand
ucuacaaugucacggucuu

SEQ ID NO: 517797 - RNA, 19 nt, Homo sapiens
  misc_RNA (1)...(19): siRNA sense strand
aacgagcaaugccgcuuug

SEQ ID NO: 517798 - RNA, 19 nt, Homo sapiens
  misc_RNA (1)...(19): siRNA sense strand
augacugccugcuggauga

SEQ ID NO: 517799 - RNA, 19 nt, Homo sapiens
  misc_RNA (1)...(19): siRNA sense strand
ggacugcacuacuccauga

SEQ ID NO: 517800 - RNA, 19 nt, Homo sapiens
  misc_RNA (1)...(19): siRNA sense strand
ucaaugaaaucuaccauga

SEQ ID NO: 517801 - RNA, 19 nt, Homo sapiens
  misc_RNA (1)...(19): siRNA sense strand
ggaaggagcacguacagaa

SEQ ID NO: 517802 - RNA, 19 nt, Homo sapiens
  misc_RNA (1)...(19): siRNA sense strand
gggccuaccuccagcagaa

SEQ ID NO: 517803 - RNA, 19 nt, Homo sapiens
  misc_RNA (1)...(19): siRNA sense strand
gaacgagcaaugccgcuuu

SEQ ID NO: 517804 - RNA, 19 nt, Homo sapiens
  misc_RNA (1)...(19): siRNA sense strand
gcaaugccgcuuugacuuc

SEQ ID NO: 517805 - RNA, 19 nt, Homo sapiens
  misc_RNA (1)...(19): siRNA sense strand
gcugcacccugaaccauga

SEQ ID NO: 517806 - RNA, 19 nt, Homo sapiens
  misc_RNA (1)...(19): siRNA sense strand
agaaguaccugcugacacu

SEQ ID NO: 517807 - RNA, 19 nt, Homo sapiens
  misc_RNA (1)...(19): siRNA sense strand
gcaaggccgugugcaugug

SEQ ID NO: 517808 - RNA, 19 nt, Homo sapiens
  misc_RNA (1)...(19): siRNA sense strand
gccgcuaccugcacuccua

SEQ ID NO: 517809 - RNA, 19 nt, Homo sapiens
  misc_RNA (1)...(19): siRNA sense strand
acacgggccacgaugaaua

SEQ ID NO: 517810 - RNA, 19 nt, Homo sapiens
  misc_RNA (1)...(19): siRNA sense strand
gaaggagcacguacagaag

SEQ ID NO: 517811 - RNA, 19 nt, Homo sapiens
  misc_RNA (1)...(19): siRNA sense strand
ggauggaggaggaggaguu

SEQ ID NO: 517812 - RNA, 19 nt, Homo sapiens
  misc_RNA (1)...(19): siRNA sense strand
ugacacucaugaacauugu

SEQ ID NO: 517813 - RNA, 19 nt, Homo sapiens
  misc_RNA (1)...(19): siRNA sense strand
ggaggaguucuucaucgaa

SEQ ID NO: 517814 - RNA, 19 nt, Homo sapiens
  misc_RNA (1)...(19): siRNA sense strand
gagcaaugccgcuuugacu

SEQ ID NO: 517815 - RNA, 19 nt, Homo sapiens
  misc_RNA (1)...(19): siRNA sense strand
ggaggaggaguucuucauc

SEQ ID NO: 517816 - RNA, 19 nt, Homo sapiens
  misc_RNA (1)...(19): siRNA sense strand
aggagcacguacagaagua

SEQ ID NO: 517817 - RNA, 19 nt, Homo sapiens
  misc_RNA (1)...(19): siRNA sense strand
cucagagccuggagaaugu

SEQ ID NO: 517818 - RNA, 19 nt, Homo sapiens
  misc_RNA (1)...(19): siRNA sense strand
gugcagccauccugacaac

SEQ ID NO: 517819 - RNA, 19 nt, Homo sapiens
  misc_RNA (1)...(19): siRNA sense strand
ggaggaggaggaguucuuc

SEQ ID NO: 517820 - RNA, 19 nt, Homo sapiens
  misc_RNA (1)...(19): siRNA sense strand
agacacgggccacgaugaa

SEQ ID NO: 517821 - RNA, 19 nt, Homo sapiens
  misc_RNA (1)...(19): siRNA sense strand
ucaucgaacccuuggagaa

SEQ ID NO: 517822 - RNA, 19 nt, Homo sapiens
  misc_RNA (1)...(19): siRNA sense strand
gcuaccugcacuccuauga

SEQ ID NO: 517823 - RNA, 19 nt, Homo sapiens
  misc_RNA (1)...(19): siRNA sense strand
gaucauccuccugagcuau

SEQ ID NO: 517824 - RNA, 19 nt, Homo sapiens
  misc_RNA (1)...(19): siRNA sense strand
ucacacggcaggacuuugg

SEQ ID NO: 517825 - RNA, 19 nt, Homo sapiens
  misc_RNA (1)...(19): siRNA sense strand
aggaggaguucuucaucga

SEQ ID NO: 517826 - RNA, 19 nt, Homo sapiens
  misc_RNA (1)...(19): siRNA sense strand
caucgaacccuuggagaag

SEQ ID NO: 517827 - RNA, 19 nt, Homo sapiens
  misc_RNA (1)...(19): siRNA sense strand
uaccugcacuccuaugacu

SEQ ID NO: 517828 - RNA, 19 nt, Homo sapiens
  misc_RNA (1)...(19): siRNA sense strand
caggcaugcugcagacgau

SEQ ID NO: 517829 - RNA, 19 nt, Homo sapiens
  misc_RNA (1)...(19): siRNA sense strand
aacgagcaaugccgcuuug

SEQ ID NO: 517830 - RNA, 19 nt, Homo sapiens
  misc_RNA (1)...(19): siRNA sense strand
augacugccugcuggauga

SEQ ID NO: 517831 - RNA, 19 nt, Homo sapiens
  misc_RNA (1)...(19): siRNA sense strand
ucuacaaugucacggucuu

SEQ ID NO: 517832 - RNA, 19 nt, Homo sapiens
  misc_RNA (1)...(19): siRNA sense strand
ccagcaagguggaggagaa

SEQ ID NO: 517833 - RNA, 19 nt, Homo sapiens
  misc_RNA (1)...(19): siRNA sense strand
ucaagaagaacaagaagga

SEQ ID NO: 517834 - RNA, 19 nt, Homo sapiens
  misc_RNA (1)...(19): siRNA sense strand
caagaaggaggcuggagaa

SEQ ID NO: 517835 - RNA, 19 nt, Homo sapiens
  misc_RNA (1)...(19): siRNA sense strand
gaauggccacgugaaggua

SEQ ID NO: 517836 - RNA, 19 nt, Homo sapiens
  misc_RNA (1)...(19): siRNA sense strand
ggagaauggccacgugaag

SEQ ID NO: 517837 - RNA, 19 nt, Homo sapiens
  misc_RNA (1)...(19): siRNA sense strand
cugagcggcuucuccuuca

SEQ ID NO: 517838 - RNA, 19 nt, Homo sapiens
  misc_RNA (1)...(19): siRNA sense strand
cgaacggacaggagaaugg

SEQ ID NO: 517839 - RNA, 19 nt, Homo sapiens
  misc_RNA (1)...(19): siRNA sense strand
ggugcccaguucuccaaga

SEQ ID NO: 517840 - RNA, 19 nt, Homo sapiens
  misc_RNA (1)...(19): siRNA sense strand
ggaugaauaugaagaugaa

SEQ ID NO: 517841 - RNA, 19 nt, Homo sapiens
  misc_RNA (1)...(19): siRNA sense strand
gcacaaggucccagcauca

SEQ ID NO: 517842 - RNA, 19 nt, Homo sapiens
  misc_RNA (1)...(19): siRNA sense strand
ggacgacugcuccauguau

SEQ ID NO: 517843 - RNA, 19 nt, Homo sapiens
  misc_RNA (1)...(19): siRNA sense strand
caaggucccagcaucauug

SEQ ID NO: 517844 - RNA, 19 nt, Homo sapiens
  misc_RNA (1)...(19): siRNA sense strand
gggaugaauaugaagauga

SEQ ID NO: 517845 - RNA, 19 nt, Homo sapiens
  misc_RNA (1)...(19): siRNA sense strand
gacgacugcuccauguaug

SEQ ID NO: 517846 - RNA, 19 nt, Homo sapiens
  misc_RNA (1)...(19): siRNA sense strand
ggacgcugcugcuguucag

SEQ ID NO: 517847 - RNA, 19 nt, Homo sapiens
  misc_RNA (1)...(19): siRNA sense strand
gaugaaaaccuuuaugaag

SEQ ID NO: 517848 - RNA, 19 nt, Homo sapiens
  misc_RNA (1)...(19): siRNA sense strand
gaugugggcagccucaaca

SEQ ID NO: 517849 - RNA, 19 nt, Homo sapiens
  misc_RNA (1)...(19): siRNA sense strand
accaagaaccgaaucauca

SEQ ID NO: 517850 - RNA, 19 nt, Homo sapiens
  misc_RNA (1)...(19): siRNA sense strand
gugggcagccucaacauag

SEQ ID NO: 517851 - RNA, 19 nt, Homo sapiens
  misc_RNA (1)...(19): siRNA sense strand
uuccaaugcccgcacaaua

SEQ ID NO: 517852 - RNA, 19 nt, Homo sapiens
  misc_RNA (1)...(19): siRNA sense strand
ggaaacgauggcagaacga

SEQ ID NO: 517853 - RNA, 19 nt, Homo sapiens
  misc_RNA (1)...(19): siRNA sense strand
cugggacgcugcugcuguu

SEQ ID NO: 517854 - RNA, 19 nt, Homo sapiens
  misc_RNA (1)...(19): siRNA sense strand
uccaaugcccgcacaauag

SEQ ID NO: 517855 - RNA, 19 nt, Homo sapiens
  misc_RNA (1)...(19): siRNA sense strand
ccagggcaccuaccaggau

SEQ ID NO: 517856 - RNA, 19 nt, Homo sapiens
  misc_RNA (1)...(19): siRNA sense strand
caagaaccgaaucaucaca

SEQ ID NO: 517857 - RNA, 19 nt, Homo sapiens
  misc_RNA (1)...(19): siRNA sense strand
gcacaauagcagcaacaac

SEQ ID NO: 517858 - RNA, 19 nt, Homo sapiens
  misc_RNA (1)...(19): siRNA sense strand
gcaccaagaaccgaaucau

SEQ ID NO: 517859 - RNA, 19 nt, Homo sapiens
  misc_RNA (1)...(19): siRNA sense strand
ggaugaauaugaagaugaa

SEQ ID NO: 517860 - RNA, 19 nt, Homo sapiens
  misc_RNA (1)...(19): siRNA sense strand
gcacaaggucccagcauca

SEQ ID NO: 517861 - RNA, 19 nt, Homo sapiens
  misc_RNA (1)...(19): siRNA sense strand
ggacgacugcuccauguau

SEQ ID NO: 517862 - RNA, 19 nt, Homo sapiens
  misc_RNA (1)...(19): siRNA sense strand
caaggucccagcaucauug

SEQ ID NO: 517863 - RNA, 19 nt, Homo sapiens
  misc_RNA (1)...(19): siRNA sense strand
gggaugaauaugaagauga

SEQ ID NO: 517864 - RNA, 19 nt, Homo sapiens
  misc_RNA (1)...(19): siRNA sense strand
gacgacugcuccauguaug

SEQ ID NO: 517865 - RNA, 19 nt, Homo sapiens
  misc_RNA (1)...(19): siRNA sense strand
ggacgcugcugcuguucag

SEQ ID NO: 517866 - RNA, 19 nt, Homo sapiens
  misc_RNA (1)...(19): siRNA sense strand
gaugaaaaccuuuaugaag

SEQ ID NO: 517867 - RNA, 19 nt, Homo sapiens
  misc_RNA (1)...(19): siRNA sense strand
gaugugggcagccucaaca

SEQ ID NO: 517868 - RNA, 19 nt, Homo sapiens
  misc_RNA (1)...(19): siRNA sense strand
accaagaaccgaaucauca

SEQ ID NO: 517869 - RNA, 19 nt, Homo sapiens
  misc_RNA (1)...(19): siRNA sense strand
gugggcagccucaacauag

SEQ ID NO: 517870 - RNA, 19 nt, Homo sapiens
  misc_RNA (1)...(19): siRNA sense strand
uuccaaugcccgcacaaua

SEQ ID NO: 517871 - RNA, 19 nt, Homo sapiens
  misc_RNA (1)...(19): siRNA sense strand
ggaaacgauggcagaacga

SEQ ID NO: 517872 - RNA, 19 nt, Homo sapiens
  misc_RNA (1)...(19): siRNA sense strand
cugggacgcugcugcuguu

SEQ ID NO: 517873 - RNA, 19 nt, Homo sapiens
  misc_RNA (1)...(19): siRNA sense strand
uccaaugcccgcacaauag

SEQ ID NO: 517874 - RNA, 19 nt, Homo sapiens
  misc_RNA (1)...(19): siRNA sense strand
ccagggcaccuaccaggau

SEQ ID NO: 517875 - RNA, 19 nt, Homo sapiens
  misc_RNA (1)...(19): siRNA sense strand
caagaaccgaaucaucaca

SEQ ID NO: 517876 - RNA, 19 nt, Homo sapiens
  misc_RNA (1)...(19): siRNA sense strand
gcacaauagcagcaacaac

SEQ ID NO: 517877 - RNA, 19 nt, Homo sapiens
  misc_RNA (1)...(19): siRNA sense strand
gcaccaagaaccgaaucau

SEQ ID NO: 517878 - RNA, 19 nt, Homo sapiens
  misc_RNA (1)...(19): siRNA sense strand
gaucauccucuucaucauc

SEQ ID NO: 517879 - RNA, 19 nt, Homo sapiens
  misc_RNA (1)...(19): siRNA sense strand
acgagggccuggacauuga

SEQ ID NO: 517880 - RNA, 19 nt, Homo sapiens
  misc_RNA (1)...(19): siRNA sense strand
gaccagacagccaccuaug

SEQ ID NO: 517881 - RNA, 19 nt, Homo sapiens
  misc_RNA (1)...(19): siRNA sense strand
caucaucgugccuaucuuc

SEQ ID NO: 517882 - RNA, 19 nt, Homo sapiens
  misc_RNA (1)...(19): siRNA sense strand
agaggaacacgcugaagga

SEQ ID NO: 517883 - RNA, 19 nt, Homo sapiens
  misc_RNA (1)...(19): siRNA sense strand
ccagacagccaccuaugag

SEQ ID NO: 517884 - RNA, 19 nt, Homo sapiens
  misc_RNA (1)...(19): siRNA sense strand
cuacgagggccuggacauu

SEQ ID NO: 517885 - RNA, 19 nt, Homo sapiens
  misc_RNA (1)...(19): siRNA sense strand
uccagacgcugcugaucau

SEQ ID NO: 517886 - RNA, 19 nt, Homo sapiens
  misc_RNA (1)...(19): siRNA sense strand
aggaagaucacaccuacga

SEQ ID NO: 517887 - RNA, 19 nt, Homo sapiens
  misc_RNA (1)...(19): siRNA sense strand
aggcuggcauggaggaaga

SEQ ID NO: 517888 - RNA, 19 nt, Homo sapiens
  misc_RNA (1)...(19): siRNA sense strand
gaucauccucuucaucauc

SEQ ID NO: 517889 - RNA, 19 nt, Homo sapiens
  misc_RNA (1)...(19): siRNA sense strand
acgagggccuggacauuga

SEQ ID NO: 517890 - RNA, 19 nt, Homo sapiens
  misc_RNA (1)...(19): siRNA sense strand
gaccagacagccaccuaug

SEQ ID NO: 517891 - RNA, 19 nt, Homo sapiens
  misc_RNA (1)...(19): siRNA sense strand
caucaucgugccuaucuuc

SEQ ID NO: 517892 - RNA, 19 nt, Homo sapiens
  misc_RNA (1)...(19): siRNA sense strand
agaggaacacgcugaagga

SEQ ID NO: 517893 - RNA, 19 nt, Homo sapiens
  misc_RNA (1)...(19): siRNA sense strand
ccagacagccaccuaugag

SEQ ID NO: 517894 - RNA, 19 nt, Homo sapiens
  misc_RNA (1)...(19): siRNA sense strand
cuacgagggccuggacauu

SEQ ID NO: 517895 - RNA, 19 nt, Homo sapiens
  misc_RNA (1)...(19): siRNA sense strand
uccagacgcugcugaucau

SEQ ID NO: 517896 - RNA, 19 nt, Homo sapiens
  misc_RNA (1)...(19): siRNA sense strand
aggaagaucacaccuacga

SEQ ID NO: 517897 - RNA, 19 nt, Homo sapiens
  misc_RNA (1)...(19): siRNA sense strand
aggcuggcauggaggaaga

SEQ ID NO: 517898 - RNA, 19 nt, Homo sapiens
  misc_RNA (1)...(19): siRNA sense strand
gaaccuggccgaugugaua

SEQ ID NO: 517899 - RNA, 19 nt, Homo sapiens
  misc_RNA (1)...(19): siRNA sense strand
ggacagaaccugggcauga

SEQ ID NO: 517900 - RNA, 19 nt, Homo sapiens
  misc_RNA (1)...(19): siRNA sense strand
gaugggaacuugacuuaca

SEQ ID NO: 517901 - RNA, 19 nt, Homo sapiens
  misc_RNA (1)...(19): siRNA sense strand
gcagcugccucuucaacaa

SEQ ID NO: 517902 - RNA, 19 nt, Homo sapiens
  misc_RNA (1)...(19): siRNA sense strand
cuacggaggucgcugcaaa

SEQ ID NO: 517903 - RNA, 19 nt, Homo sapiens
  misc_RNA (1)...(19): siRNA sense strand
ccaaguauguggagcuaau

SEQ ID NO: 517904 - RNA, 19 nt, Homo sapiens
  misc_RNA (1)...(19): siRNA sense strand
gaacgaguacggcaacaug

SEQ ID NO: 517905 - RNA, 19 nt, Homo sapiens
  misc_RNA (1)...(19): siRNA sense strand
ugcacaagcuggacgguua

SEQ ID NO: 517906 - RNA, 19 nt, Homo sapiens
  misc_RNA (1)...(19): siRNA sense strand
gguggcaacugcugcaaga

SEQ ID NO: 517907 - RNA, 19 nt, Homo sapiens
  misc_RNA (1)...(19): siRNA sense strand
gcuggacgguuacuacugu

SEQ ID NO: 517908 - RNA, 19 nt, Homo sapiens
  misc_RNA (1)...(19): siRNA sense strand
ucaguagugucaccuucua

SEQ ID NO: 517909 - RNA, 19 nt, Homo sapiens
  misc_RNA (1)...(19): siRNA sense strand
ggcaacugcugcaagaaau

SEQ ID NO: 517910 - RNA, 19 nt, Homo sapiens
  misc_RNA (1)...(19): siRNA sense strand
gcacagugaaaccaaguau

SEQ ID NO: 517911 - RNA, 19 nt, Homo sapiens
  misc_RNA (1)...(19): siRNA sense strand
ggaggacacuggguucuac

SEQ ID NO: 517912 - RNA, 19 nt, Homo sapiens
  misc_RNA (1)...(19): siRNA sense strand
gacagaaccugggcaugau

SEQ ID NO: 517913 - RNA, 19 nt, Homo sapiens
  misc_RNA (1)...(19): siRNA sense strand
ggagacggagagauauaaa

SEQ ID NO: 517914 - RNA, 19 nt, Homo sapiens
  misc_RNA (1)...(19): siRNA sense strand
ggccgaggcugagaaggaa

SEQ ID NO: 517915 - RNA, 19 nt, Homo sapiens
  misc_RNA (1)...(19): siRNA sense strand
gcugcagcaucgacgagua

SEQ ID NO: 517916 - RNA, 19 nt, Homo sapiens
  misc_RNA (1)...(19): siRNA sense strand
gggagacggagagauauaa

SEQ ID NO: 517917 - RNA, 19 nt, Homo sapiens
  misc_RNA (1)...(19): siRNA sense strand
ggcaaagacugcaguaucc

SEQ ID NO: 517918 - RNA, 19 nt, Homo sapiens
  misc_RNA (1)...(19): siRNA sense strand
cgacgaguacaaccaguuu

SEQ ID NO: 517919 - RNA, 19 nt, Homo sapiens
  misc_RNA (1)...(19): siRNA sense strand
aaagacugcaguauccaua

SEQ ID NO: 517920 - RNA, 19 nt, Homo sapiens
  misc_RNA (1)...(19): siRNA sense strand
gcuacgagaagcugaaugu

SEQ ID NO: 517921 - RNA, 19 nt, Homo sapiens
  misc_RNA (1)...(19): siRNA sense strand
gcaaugaagggaagugcau

SEQ ID NO: 517922 - RNA, 19 nt, Homo sapiens
  misc_RNA (1)...(19): siRNA sense strand
ggcaugauguggaacaaac

SEQ ID NO: 517923 - RNA, 19 nt, Homo sapiens
  misc_RNA (1)...(19): siRNA sense strand
acagugaaaccaaguaugu

SEQ ID NO: 517924 - RNA, 19 nt, Homo sapiens
  misc_RNA (1)...(19): siRNA sense strand
cugaugggaacuugacuua

SEQ ID NO: 517925 - RNA, 19 nt, Homo sapiens
  misc_RNA (1)...(19): siRNA sense strand
gguccucaccagcaacuuu

SEQ ID NO: 517926 - RNA, 19 nt, Homo sapiens
  misc_RNA (1)...(19): siRNA sense strand
uggccgaugugauauacaa

SEQ ID NO: 517927 - RNA, 19 nt, Homo sapiens
  misc_RNA (1)...(19): siRNA sense strand
ccagucggcuccuccaaac

SEQ ID NO: 517928 - RNA, 19 nt, Homo sapiens
  misc_RNA (1)...(19): siRNA sense strand
gcaacugcugcaagaaaug

SEQ ID NO: 517929 - RNA, 19 nt, Homo sapiens
  misc_RNA (1)...(19): siRNA sense strand
agaaaugcacccugacuca

SEQ ID NO: 517930 - RNA, 19 nt, Homo sapiens
  misc_RNA (1)...(19): siRNA sense strand
ccgaugugauauacaagga

SEQ ID NO: 517931 - RNA, 19 nt, Homo sapiens
  misc_RNA (1)...(19): siRNA sense strand
gcuucugccuucaacuuca

SEQ ID NO: 517932 - RNA, 19 nt, Homo sapiens
  misc_RNA (1)...(19): siRNA sense strand
uggcaacugcugcaagaaa

SEQ ID NO: 517933 - RNA, 19 nt, Homo sapiens
  misc_RNA (1)...(19): siRNA sense strand
uauguggagcuaauuguga

SEQ ID NO: 517934 - RNA, 19 nt, Homo sapiens
  misc_RNA (1)...(19): siRNA sense strand
cagcuucugccuucaacuu

SEQ ID NO: 517935 - RNA, 19 nt, Homo sapiens
  misc_RNA (1)...(19): siRNA sense strand
caagaaaugcacccugacu

SEQ ID NO: 517936 - RNA, 19 nt, Homo sapiens
  misc_RNA (1)...(19): siRNA sense strand
ggagcuaauugugaucaac

SEQ ID NO: 517937 - RNA, 19 nt, Homo sapiens
  misc_RNA (1)...(19): siRNA sense strand
caacgaccaccagcuguuc

SEQ ID NO: 517938 - RNA, 19 nt, Homo sapiens
  misc_RNA (1)...(19): siRNA sense strand
uggugaaccuggccgaugu

SEQ ID NO: 517939 - RNA, 19 nt, Homo sapiens
  misc_RNA (1)...(19): siRNA sense strand
aaccaaguauguggagcua

SEQ ID NO: 517940 - RNA, 19 nt, Homo sapiens
  misc_RNA (1)...(19): siRNA sense strand
ugggagacaucaguagugu

SEQ ID NO: 517941 - RNA, 19 nt, Homo sapiens
  misc_RNA (1)...(19): siRNA sense strand
uuacuacugugaccaugag

SEQ ID NO: 517942 - RNA, 19 nt, Homo sapiens
  misc_RNA (1)...(19): siRNA sense strand
cgccuaaccugcacaagcu

SEQ ID NO: 517943 - RNA, 19 nt, Homo sapiens
  misc_RNA (1)...(19): siRNA sense strand
ccaaguccguggugaaccu

SEQ ID NO: 517944 - RNA, 19 nt, Homo sapiens
  misc_RNA (1)...(19): siRNA sense strand
cguccugguugccauggaa

SEQ ID NO: 517945 - RNA, 19 nt, Homo sapiens
  misc_RNA (1)...(19): siRNA sense strand
ggcacgggcuggggauuua

SEQ ID NO: 517946 - RNA, 19 nt, Homo sapiens
  misc_RNA (1)...(19): siRNA sense strand
ggcaccaacaucaucauug

SEQ ID NO: 517947 - RNA, 19 nt, Homo sapiens
  misc_RNA (1)...(19): siRNA sense strand
caagcuggacgguuacuac

SEQ ID NO: 517948 - RNA, 19 nt, Homo sapiens
  misc_RNA (1)...(19): siRNA sense strand
ucaacgaccaccagcuguu

SEQ ID NO: 517949 - RNA, 19 nt, Homo sapiens
  misc_RNA (1)...(19): siRNA sense strand
gagacggagagauauaaag

SEQ ID NO: 517950 - RNA, 19 nt, Homo sapiens
  misc_RNA (1)...(19): siRNA sense strand
cugcugaucgcuucugcua

SEQ ID NO: 517951 - RNA, 19 nt, Homo sapiens
  misc_RNA (1)...(19): siRNA sense strand
caaguauguggagcuaauu

SEQ ID NO: 517952 - RNA, 19 nt, Homo sapiens
  misc_RNA (1)...(19): siRNA sense strand
caaagacugcaguauccau

SEQ ID NO: 517953 - RNA, 19 nt, Homo sapiens
  misc_RNA (1)...(19): siRNA sense strand
guauguggagcuaauugug

SEQ ID NO: 517954 - RNA, 19 nt, Homo sapiens
  misc_RNA (1)...(19): siRNA sense strand
gcagugccagguucuuugg

SEQ ID NO: 517955 - RNA, 19 nt, Homo sapiens
  misc_RNA (1)...(19): siRNA sense strand
gcacaagcuggacgguuac

SEQ ID NO: 517956 - RNA, 19 nt, Homo sapiens
  misc_RNA (1)...(19): siRNA sense strand
gggcuggagaccacugcua

SEQ ID NO: 517957 - RNA, 19 nt, Homo sapiens
  misc_RNA (1)...(19): siRNA sense strand
acccuacagugcacaguga

SEQ ID NO: 517958 - RNA, 19 nt, Homo sapiens
  misc_RNA (1)...(19): siRNA sense strand
gaaccuggccgaugugaua

SEQ ID NO: 517959 - RNA, 19 nt, Homo sapiens
  misc_RNA (1)...(19): siRNA sense strand
ggacagaaccugggcauga

SEQ ID NO: 517960 - RNA, 19 nt, Homo sapiens
  misc_RNA (1)...(19): siRNA sense strand
gaugggaacuugacuuaca

SEQ ID NO: 517961 - RNA, 19 nt, Homo sapiens
  misc_RNA (1)...(19): siRNA sense strand
gcagcugccucuucaacaa

SEQ ID NO: 517962 - RNA, 19 nt, Homo sapiens
  misc_RNA (1)...(19): siRNA sense strand
cuacggaggucgcugcaaa

SEQ ID NO: 517963 - RNA, 19 nt, Homo sapiens
  misc_RNA (1)...(19): siRNA sense strand
ccaaguauguggagcuaau

SEQ ID NO: 517964 - RNA, 19 nt, Homo sapiens
  misc_RNA (1)...(19): siRNA sense strand
gaacgaguacggcaacaug

SEQ ID NO: 517965 - RNA, 19 nt, Homo sapiens
  misc_RNA (1)...(19): siRNA sense strand
ugcacaagcuggacgguua

SEQ ID NO: 517966 - RNA, 19 nt, Homo sapiens
  misc_RNA (1)...(19): siRNA sense strand
gguggcaacugcugcaaga

SEQ ID NO: 517967 - RNA, 19 nt, Homo sapiens
  misc_RNA (1)...(19): siRNA sense strand
gcuggacgguuacuacugu

SEQ ID NO: 517968 - RNA, 19 nt, Homo sapiens
  misc_RNA (1)...(19): siRNA sense strand
ggcaacugcugcaagaaau

SEQ ID NO: 517969 - RNA, 19 nt, Homo sapiens
  misc_RNA (1)...(19): siRNA sense strand
gcacagugaaaccaaguau

SEQ ID NO: 517970 - RNA, 19 nt, Homo sapiens
  misc_RNA (1)...(19): siRNA sense strand
ggaggacacuggguucuac

SEQ ID NO: 517971 - RNA, 19 nt, Homo sapiens
  misc_RNA (1)...(19): siRNA sense strand
gacagaaccugggcaugau

SEQ ID NO: 517972 - RNA, 19 nt, Homo sapiens
  misc_RNA (1)...(19): siRNA sense strand
ggccgaggcugagaaggaa

SEQ ID NO: 517973 - RNA, 19 nt, Homo sapiens
  misc_RNA (1)...(19): siRNA sense strand
gcugcagcaucgacgagua

SEQ ID NO: 517974 - RNA, 19 nt, Homo sapiens
  misc_RNA (1)...(19): siRNA sense strand
cgacgaguacaaccaguuu

SEQ ID NO: 517975 - RNA, 19 nt, Homo sapiens
  misc_RNA (1)...(19): siRNA sense strand
gcuacgagaagcugaaugu

SEQ ID NO: 517976 - RNA, 19 nt, Homo sapiens
  misc_RNA (1)...(19): siRNA sense strand
ggcaugauguggaacaaac

SEQ ID NO: 517977 - RNA, 19 nt, Homo sapiens
  misc_RNA (1)...(19): siRNA sense strand
cugaugggaacuugacuua

SEQ ID NO: 517978 - RNA, 19 nt, Homo sapiens
  misc_RNA (1)...(19): siRNA sense strand
gguccucaccagcaacuuu

SEQ ID NO: 517979 - RNA, 19 nt, Homo sapiens
  misc_RNA (1)...(19): siRNA sense strand
acagugaaaccaaguaugu

SEQ ID NO: 517980 - RNA, 19 nt, Homo sapiens
  misc_RNA (1)...(19): siRNA sense strand
uggccgaugugauauacaa

SEQ ID NO: 517981 - RNA, 19 nt, Homo sapiens
  misc_RNA (1)...(19): siRNA sense strand
ccagucggcuccuccaaac

SEQ ID NO: 517982 - RNA, 19 nt, Homo sapiens
  misc_RNA (1)...(19): siRNA sense strand
gcaacugcugcaagaaaug

SEQ ID NO: 517983 - RNA, 19 nt, Homo sapiens
  misc_RNA (1)...(19): siRNA sense strand
agaaaugcacccugacuca

SEQ ID NO: 517984 - RNA, 19 nt, Homo sapiens
  misc_RNA (1)...(19): siRNA sense strand
ccgaugugauauacaagga

SEQ ID NO: 517985 - RNA, 19 nt, Homo sapiens
  misc_RNA (1)...(19): siRNA sense strand
uggcaacugcugcaagaaa

SEQ ID NO: 517986 - RNA, 19 nt, Homo sapiens
  misc_RNA (1)...(19): siRNA sense strand
uauguggagcuaauuguga

SEQ ID NO: 517987 - RNA, 19 nt, Homo sapiens
  misc_RNA (1)...(19): siRNA sense strand
caagaaaugcacccugacu

SEQ ID NO: 517988 - RNA, 19 nt, Homo sapiens
  misc_RNA (1)...(19): siRNA sense strand
ggagcuaauugugaucaac

SEQ ID NO: 517989 - RNA, 19 nt, Homo sapiens
  misc_RNA (1)...(19): siRNA sense strand
caacgaccaccagcuguuc

SEQ ID NO: 517990 - RNA, 19 nt, Homo sapiens
  misc_RNA (1)...(19): siRNA sense strand
uggugaaccuggccgaugu

SEQ ID NO: 517991 - RNA, 19 nt, Homo sapiens
  misc_RNA (1)...(19): siRNA sense strand
aaccaaguauguggagcua

SEQ ID NO: 517992 - RNA, 19 nt, Homo sapiens
  misc_RNA (1)...(19): siRNA sense strand
uuacuacugugaccaugag

SEQ ID NO: 517993 - RNA, 19 nt, Homo sapiens
  misc_RNA (1)...(19): siRNA sense strand
cgccuaaccugcacaagcu

SEQ ID NO: 517994 - RNA, 19 nt, Homo sapiens
  misc_RNA (1)...(19): siRNA sense strand
ccaaguccguggugaaccu

SEQ ID NO: 517995 - RNA, 19 nt, Homo sapiens
  misc_RNA (1)...(19): siRNA sense strand
cguccugguugccauggaa

SEQ ID NO: 517996 - RNA, 19 nt, Homo sapiens
  misc_RNA (1)...(19): siRNA sense strand
caagcuggacgguuacuac

SEQ ID NO: 517997 - RNA, 19 nt, Homo sapiens
  misc_RNA (1)...(19): siRNA sense strand
ucaacgaccaccagcuguu

SEQ ID NO: 517998 - RNA, 19 nt, Homo sapiens
  misc_RNA (1)...(19): siRNA sense strand
cugcugaucgcuucugcua

SEQ ID NO: 517999 - RNA, 19 nt, Homo sapiens
  misc_RNA (1)...(19): siRNA sense strand
caaguauguggagcuaauu

SEQ ID NO: 518000 - RNA, 19 nt, Homo sapiens
  misc_RNA (1)...(19): siRNA sense strand
acccuacagugcacaguga

SEQ ID NO: 518001 - RNA, 19 nt, Homo sapiens
  misc_RNA (1)...(19): siRNA sense strand
gcagugccagguucuuugg

SEQ ID NO: 518002 - RNA, 19 nt, Homo sapiens
  misc_RNA (1)...(19): siRNA sense strand
gcacaagcuggacgguuac

SEQ ID NO: 518003 - RNA, 19 nt, Homo sapiens
  misc_RNA (1)...(19): siRNA sense strand
gggcuggagaccacugcua

SEQ ID NO: 518004 - RNA, 19 nt, Homo sapiens
  misc_RNA (1)...(19): siRNA sense strand
guauguggagcuaauugug

SEQ ID NO: 518005 - RNA, 19 nt, Homo sapiens
  misc_RNA (1)...(19): siRNA sense strand
aaaggagucugcuuacuua

SEQ ID NO: 518006 - RNA, 19 nt, Homo sapiens
  misc_RNA (1)...(19): siRNA sense strand
gcaagcuauucaucaauua

SEQ ID NO: 518007 - RNA, 19 nt, Homo sapiens
  misc_RNA (1)...(19): siRNA sense strand
gcagagagauuucauugag

SEQ ID NO: 518008 - RNA, 19 nt, Homo sapiens
  misc_RNA (1)...(19): siRNA sense strand
gcaaggaagcuagaacuua

SEQ ID NO: 518009 - RNA, 19 nt, Homo sapiens
  misc_RNA (1)...(19): siRNA sense strand
gcaaagacccagaacauca

SEQ ID NO: 518010 - RNA, 19 nt, Homo sapiens
  misc_RNA (1)...(19): siRNA sense strand
ggagcgaugugguugauau

SEQ ID NO: 518011 - RNA, 19 nt, Homo sapiens
  misc_RNA (1)...(19): siRNA sense strand
aaaugcagcugccaaugua

SEQ ID NO: 518012 - RNA, 19 nt, Homo sapiens
  misc_RNA (1)...(19): siRNA sense strand
gaaacugaaugaccaagca

SEQ ID NO: 518013 - RNA, 19 nt, Homo sapiens
  misc_RNA (1)...(19): siRNA sense strand
cuagagacuuugauuggua

SEQ ID NO: 518014 - RNA, 19 nt, Homo sapiens
  misc_RNA (1)...(19): siRNA sense strand
caaggaagcuagaacuuac

SEQ ID NO: 518015 - RNA, 19 nt, Homo sapiens
  misc_RNA (1)...(19): siRNA sense strand
gaacuuaccaaagcagaaa

SEQ ID NO: 518016 - RNA, 19 nt, Homo sapiens
  misc_RNA (1)...(19): siRNA sense strand
agggaaacauggcuaauuu

SEQ ID NO: 518017 - RNA, 19 nt, Homo sapiens
  misc_RNA (1)...(19): siRNA sense strand
gaagcuagaacuuaccaaa

SEQ ID NO: 518018 - RNA, 19 nt, Homo sapiens
  misc_RNA (1)...(19): siRNA sense strand
gaaaauuccugcaagcuau

SEQ ID NO: 518019 - RNA, 19 nt, Homo sapiens
  misc_RNA (1)...(19): siRNA sense strand
gcacgucacuuacaaugcu

SEQ ID NO: 518020 - RNA, 19 nt, Homo sapiens
  misc_RNA (1)...(19): siRNA sense strand
ggagucugcuuacuuacug

SEQ ID NO: 518021 - RNA, 19 nt, Homo sapiens
  misc_RNA (1)...(19): siRNA sense strand
gggaaacauggcuaauuua

SEQ ID NO: 518022 - RNA, 19 nt, Homo sapiens
  misc_RNA (1)...(19): siRNA sense strand
gagcagaggaaacugaaug

SEQ ID NO: 518023 - RNA, 19 nt, Homo sapiens
  misc_RNA (1)...(19): siRNA sense strand
ccaccaacuucaucagaga

SEQ ID NO: 518024 - RNA, 19 nt, Homo sapiens
  misc_RNA (1)...(19): siRNA sense strand
ggaaacauggcuaauuuac

SEQ ID NO: 518025 - RNA, 19 nt, Homo sapiens
  misc_RNA (1)...(19): siRNA sense strand
gaaacauggcuaauuuaca

SEQ ID NO: 518026 - RNA, 19 nt, Homo sapiens
  misc_RNA (1)...(19): siRNA sense strand
cagcagagagauuucauug

SEQ ID NO: 518027 - RNA, 19 nt, Homo sapiens
  misc_RNA (1)...(19): siRNA sense strand
acaagcacgucacuuacaa

SEQ ID NO: 518028 - RNA, 19 nt, Homo sapiens
  misc_RNA (1)...(19): siRNA sense strand
gauagaucaugcaaaagua

SEQ ID NO: 518029 - RNA, 19 nt, Homo sapiens
  misc_RNA (1)...(19): siRNA sense strand
ggauguuacuagcaacuuc

SEQ ID NO: 518030 - RNA, 19 nt, Homo sapiens
  misc_RNA (1)...(19): siRNA sense strand
ugcaagcuauucaucaauu

SEQ ID NO: 518031 - RNA, 19 nt, Homo sapiens
  misc_RNA (1)...(19): siRNA sense strand
caugguaccuaacacauac

SEQ ID NO: 518032 - RNA, 19 nt, Homo sapiens
  misc_RNA (1)...(19): siRNA sense strand
acgacaagcacgucacuua

SEQ ID NO: 518033 - RNA, 19 nt, Homo sapiens
  misc_RNA (1)...(19): siRNA sense strand
guaccaugaucaacaggau

SEQ ID NO: 518034 - RNA, 19 nt, Homo sapiens
  misc_RNA (1)...(19): siRNA sense strand
ccacagcaccaccaacuuc

SEQ ID NO: 518035 - RNA, 19 nt, Homo sapiens
  misc_RNA (1)...(19): siRNA sense strand
gaggauuguuacccuggaa

SEQ ID NO: 518036 - RNA, 19 nt, Homo sapiens
  misc_RNA (1)...(19): siRNA sense strand
ggaauuaugggugcugguu

SEQ ID NO: 518037 - RNA, 19 nt, Homo sapiens
  misc_RNA (1)...(19): siRNA sense strand
gcuagaacuuaccaaagca

SEQ ID NO: 518038 - RNA, 19 nt, Homo sapiens
  misc_RNA (1)...(19): siRNA sense strand
aaacuagagacuuugauug

SEQ ID NO: 518039 - RNA, 19 nt, Homo sapiens
  misc_RNA (1)...(19): siRNA sense strand
ccugcaagcuauucaucaa

SEQ ID NO: 518040 - RNA, 19 nt, Homo sapiens
  misc_RNA (1)...(19): siRNA sense strand
cacaauuucaugauggaua

SEQ ID NO: 518041 - RNA, 19 nt, Homo sapiens
  misc_RNA (1)...(19): siRNA sense strand
gcagcagagagauuucauu

SEQ ID NO: 518042 - RNA, 19 nt, Homo sapiens
  misc_RNA (1)...(19): siRNA sense strand
ccaacuucaucagagagua

SEQ ID NO: 518043 - RNA, 19 nt, Homo sapiens
  misc_RNA (1)...(19): siRNA sense strand
gacaagcacgucacuuaca

SEQ ID NO: 518044 - RNA, 19 nt, Homo sapiens
  misc_RNA (1)...(19): siRNA sense strand
gccaauguacucagggaaa

SEQ ID NO: 518045 - RNA, 19 nt, Homo sapiens
  misc_RNA (1)...(19): siRNA sense strand
cagggaaacauggcuaauu

SEQ ID NO: 518046 - RNA, 19 nt, Homo sapiens
  misc_RNA (1)...(19): siRNA sense strand
caaagacccagaacaucau

SEQ ID NO: 518047 - RNA, 19 nt, Homo sapiens
  misc_RNA (1)...(19): siRNA sense strand
uggauacucagcugacuaa

SEQ ID NO: 518048 - RNA, 19 nt, Homo sapiens
  misc_RNA (1)...(19): siRNA sense strand
ggcagcagcagagagauuu

SEQ ID NO: 518049 - RNA, 19 nt, Homo sapiens
  misc_RNA (1)...(19): siRNA sense strand
cugcuuacuuacuggaauu

SEQ ID NO: 518050 - RNA, 19 nt, Homo sapiens
  misc_RNA (1)...(19): siRNA sense strand
acaauuucaugauggauac

SEQ ID NO: 518051 - RNA, 19 nt, Homo sapiens
  misc_RNA (1)...(19): siRNA sense strand
uagcuguaguggcaaggaa

SEQ ID NO: 518052 - RNA, 19 nt, Homo sapiens
  misc_RNA (1)...(19): siRNA sense strand
acaugguaccuaacacaua

SEQ ID NO: 518053 - RNA, 19 nt, Homo sapiens
  misc_RNA (1)...(19): siRNA sense strand
ucaggcagcagcagagaga

SEQ ID NO: 518054 - RNA, 19 nt, Homo sapiens
  misc_RNA (1)...(19): siRNA sense strand
uggcaaagacccagaacau

SEQ ID NO: 518055 - RNA, 19 nt, Homo sapiens
  misc_RNA (1)...(19): siRNA sense strand
auggugacaugguaccuaa

SEQ ID NO: 518056 - RNA, 19 nt, Homo sapiens
  misc_RNA (1)...(19): siRNA sense strand
gaaaaggagucugcuuacu

SEQ ID NO: 518057 - RNA, 19 nt, Homo sapiens
  misc_RNA (1)...(19): siRNA sense strand
caacuucaucagagaguag

SEQ ID NO: 518058 - RNA, 19 nt, Homo sapiens
  misc_RNA (1)...(19): siRNA sense strand
cgacaagcacgucacuuac

SEQ ID NO: 518059 - RNA, 19 nt, Homo sapiens
  misc_RNA (1)...(19): siRNA sense strand
aaacacgugcacaauuuca

SEQ ID NO: 518060 - RNA, 19 nt, Homo sapiens
  misc_RNA (1)...(19): siRNA sense strand
ugguuauggugacauggua

SEQ ID NO: 518061 - RNA, 19 nt, Homo sapiens
  misc_RNA (1)...(19): siRNA sense strand
ggugacaugguaccuaaca

SEQ ID NO: 518062 - RNA, 19 nt, Homo sapiens
  misc_RNA (1)...(19): siRNA sense strand
ugacaugguaccuaacaca

SEQ ID NO: 518063 - RNA, 19 nt, Homo sapiens
  misc_RNA (1)...(19): siRNA sense strand
cuuacuuacuggaauuaug

SEQ ID NO: 518064 - RNA, 19 nt, Homo sapiens
  misc_RNA (1)...(19): siRNA sense strand
ccaauguacucagggaaac

SEQ ID NO: 518065 - RNA, 19 nt, Homo sapiens
  misc_RNA (1)...(19): siRNA sense strand
auacucagcugacuaaaag

SEQ ID NO: 518066 - RNA, 19 nt, Homo sapiens
  misc_RNA (1)...(19): siRNA sense strand
ggcaaggaagcuagaacuu

SEQ ID NO: 518067 - RNA, 19 nt, Homo sapiens
  misc_RNA (1)...(19): siRNA sense strand
uaaacgaaaggagugaaga

SEQ ID NO: 518068 - RNA, 19 nt, Homo sapiens
  misc_RNA (1)...(19): siRNA sense strand
gcaaaaguaagaaaacauc

SEQ ID NO: 518069 - RNA, 19 nt, Homo sapiens
  misc_RNA (1)...(19): siRNA sense strand
cgugcacaauuucaugaug

SEQ ID NO: 518070 - RNA, 19 nt, Homo sapiens
  misc_RNA (1)...(19): siRNA sense strand
uaacuuuucucuccauugg

SEQ ID NO: 518071 - RNA, 19 nt, Homo sapiens
  misc_RNA (1)...(19): siRNA sense strand
uucgagaagaggauuguua

SEQ ID NO: 518072 - RNA, 19 nt, Homo sapiens
  misc_RNA (1)...(19): siRNA sense strand
gaggaaacugaaugaccaa

SEQ ID NO: 518073 - RNA, 19 nt, Homo sapiens
  misc_RNA (1)...(19): siRNA sense strand
uggaaaaggagucugcuua

SEQ ID NO: 518074 - RNA, 19 nt, Homo sapiens
  misc_RNA (1)...(19): siRNA sense strand
gauggagagcuacgacaag

SEQ ID NO: 518075 - RNA, 19 nt, Homo sapiens
  misc_RNA (1)...(19): siRNA sense strand
gauuucugacuuaaacgaa

SEQ ID NO: 518076 - RNA, 19 nt, Homo sapiens
  misc_RNA (1)...(19): siRNA sense strand
cgaaaauuccugcaagcua

SEQ ID NO: 518077 - RNA, 19 nt, Homo sapiens
  misc_RNA (1)...(19): siRNA sense strand
guaagaaaacaucaacgaa

SEQ ID NO: 518078 - RNA, 19 nt, Homo sapiens
  misc_RNA (1)...(19): siRNA sense strand
gauacucagcugacuaaaa

SEQ ID NO: 518079 - RNA, 19 nt, Homo sapiens
  misc_RNA (1)...(19): siRNA sense strand
uugcacagcccugguggua

SEQ ID NO: 518080 - RNA, 19 nt, Homo sapiens
  misc_RNA (1)...(19): siRNA sense strand
aaaggagucugcuuacuua

SEQ ID NO: 518081 - RNA, 19 nt, Homo sapiens
  misc_RNA (1)...(19): siRNA sense strand
gcaagcuauucaucaauua

SEQ ID NO: 518082 - RNA, 19 nt, Homo sapiens
  misc_RNA (1)...(19): siRNA sense strand
gcagagagauuucauugag

SEQ ID NO: 518083 - RNA, 19 nt, Homo sapiens
  misc_RNA (1)...(19): siRNA sense strand
gcaaggaagcuagaacuua

SEQ ID NO: 518084 - RNA, 19 nt, Homo sapiens
  misc_RNA (1)...(19): siRNA sense strand
gcaaagacccagaacauca

SEQ ID NO: 518085 - RNA, 19 nt, Homo sapiens
  misc_RNA (1)...(19): siRNA sense strand
aaaugcagcugccaaugua

SEQ ID NO: 518086 - RNA, 19 nt, Homo sapiens
  misc_RNA (1)...(19): siRNA sense strand
gaaacugaaugaccaagca

SEQ ID NO: 518087 - RNA, 19 nt, Homo sapiens
  misc_RNA (1)...(19): siRNA sense strand
cuagagacuuugauuggua

SEQ ID NO: 518088 - RNA, 19 nt, Homo sapiens
  misc_RNA (1)...(19): siRNA sense strand
caaggaagcuagaacuuac

SEQ ID NO: 518089 - RNA, 19 nt, Homo sapiens
  misc_RNA (1)...(19): siRNA sense strand
gaacuuaccaaagcagaaa

SEQ ID NO: 518090 - RNA, 19 nt, Homo sapiens
  misc_RNA (1)...(19): siRNA sense strand
agggaaacauggcuaauuu

SEQ ID NO: 518091 - RNA, 19 nt, Homo sapiens
  misc_RNA (1)...(19): siRNA sense strand
gaagcuagaacuuaccaaa

SEQ ID NO: 518092 - RNA, 19 nt, Homo sapiens
  misc_RNA (1)...(19): siRNA sense strand
gaaaauuccugcaagcuau

SEQ ID NO: 518093 - RNA, 19 nt, Homo sapiens
  misc_RNA (1)...(19): siRNA sense strand
gcacgucacuuacaaugcu

SEQ ID NO: 518094 - RNA, 19 nt, Homo sapiens
  misc_RNA (1)...(19): siRNA sense strand
ggagucugcuuacuuacug

SEQ ID NO: 518095 - RNA, 19 nt, Homo sapiens
  misc_RNA (1)...(19): siRNA sense strand
gggaaacauggcuaauuua

SEQ ID NO: 518096 - RNA, 19 nt, Homo sapiens
  misc_RNA (1)...(19): siRNA sense strand
gagcagaggaaacugaaug

SEQ ID NO: 518097 - RNA, 19 nt, Homo sapiens
  misc_RNA (1)...(19): siRNA sense strand
ccaccaacuucaucagaga

SEQ ID NO: 518098 - RNA, 19 nt, Homo sapiens
  misc_RNA (1)...(19): siRNA sense strand
ggaaacauggcuaauuuac

SEQ ID NO: 518099 - RNA, 19 nt, Homo sapiens
  misc_RNA (1)...(19): siRNA sense strand
gaaacauggcuaauuuaca

SEQ ID NO: 518100 - RNA, 19 nt, Homo sapiens
  misc_RNA (1)...(19): siRNA sense strand
cagcagagagauuucauug

SEQ ID NO: 518101 - RNA, 19 nt, Homo sapiens
  misc_RNA (1)...(19): siRNA sense strand
acaagcacgucacuuacaa

SEQ ID NO: 518102 - RNA, 19 nt, Homo sapiens
  misc_RNA (1)...(19): siRNA sense strand
gauagaucaugcaaaagua

SEQ ID NO: 518103 - RNA, 19 nt, Homo sapiens
  misc_RNA (1)...(19): siRNA sense strand
ugcaagcuauucaucaauu

SEQ ID NO: 518104 - RNA, 19 nt, Homo sapiens
  misc_RNA (1)...(19): siRNA sense strand
caugguaccuaacacauac

SEQ ID NO: 518105 - RNA, 19 nt, Homo sapiens
  misc_RNA (1)...(19): siRNA sense strand
acgacaagcacgucacuua

SEQ ID NO: 518106 - RNA, 19 nt, Homo sapiens
  misc_RNA (1)...(19): siRNA sense strand
ggaauuaugggugcugguu

SEQ ID NO: 518107 - RNA, 19 nt, Homo sapiens
  misc_RNA (1)...(19): siRNA sense strand
ccacagcaccaccaacuuc

SEQ ID NO: 518108 - RNA, 19 nt, Homo sapiens
  misc_RNA (1)...(19): siRNA sense strand
gaggauuguuacccuggaa

SEQ ID NO: 518109 - RNA, 19 nt, Homo sapiens
  misc_RNA (1)...(19): siRNA sense strand
gcuagaacuuaccaaagca

SEQ ID NO: 518110 - RNA, 19 nt, Homo sapiens
  misc_RNA (1)...(19): siRNA sense strand
aaacuagagacuuugauug

SEQ ID NO: 518111 - RNA, 19 nt, Homo sapiens
  misc_RNA (1)...(19): siRNA sense strand
ccugcaagcuauucaucaa

SEQ ID NO: 518112 - RNA, 19 nt, Homo sapiens
  misc_RNA (1)...(19): siRNA sense strand
cacaauuucaugauggaua

SEQ ID NO: 518113 - RNA, 19 nt, Homo sapiens
  misc_RNA (1)...(19): siRNA sense strand
gcagcagagagauuucauu

SEQ ID NO: 518114 - RNA, 19 nt, Homo sapiens
  misc_RNA (1)...(19): siRNA sense strand
ccaacuucaucagagagua

SEQ ID NO: 518115 - RNA, 19 nt, Homo sapiens
  misc_RNA (1)...(19): siRNA sense strand
gacaagcacgucacuuaca

SEQ ID NO: 518116 - RNA, 19 nt, Homo sapiens
  misc_RNA (1)...(19): siRNA sense strand
gccaauguacucagggaaa

SEQ ID NO: 518117 - RNA, 19 nt, Homo sapiens
  misc_RNA (1)...(19): siRNA sense strand
cagggaaacauggcuaauu

SEQ ID NO: 518118 - RNA, 19 nt, Homo sapiens
  misc_RNA (1)...(19): siRNA sense strand
caaagacccagaacaucau

SEQ ID NO: 518119 - RNA, 19 nt, Homo sapiens
  misc_RNA (1)...(19): siRNA sense strand
uggauacucagcugacuaa

SEQ ID NO: 518120 - RNA, 19 nt, Homo sapiens
  misc_RNA (1)...(19): siRNA sense strand
ggcagcagcagagagauuu

SEQ ID NO: 518121 - RNA, 19 nt, Homo sapiens
  misc_RNA (1)...(19): siRNA sense strand
acaauuucaugauggauac

SEQ ID NO: 518122 - RNA, 19 nt, Homo sapiens
  misc_RNA (1)...(19): siRNA sense strand
cugcuuacuuacuggaauu

SEQ ID NO: 518123 - RNA, 19 nt, Homo sapiens
  misc_RNA (1)...(19): siRNA sense strand
uagcuguaguggcaaggaa

SEQ ID NO: 518124 - RNA, 19 nt, Homo sapiens
  misc_RNA (1)...(19): siRNA sense strand
ucaggcagcagcagagaga

SEQ ID NO: 518125 - RNA, 19 nt, Homo sapiens
  misc_RNA (1)...(19): siRNA sense strand
uggcaaagacccagaacau

SEQ ID NO: 518126 - RNA, 19 nt, Homo sapiens
  misc_RNA (1)...(19): siRNA sense strand
acaugguaccuaacacaua

SEQ ID NO: 518127 - RNA, 19 nt, Homo sapiens
  misc_RNA (1)...(19): siRNA sense strand
auggugacaugguaccuaa

SEQ ID NO: 518128 - RNA, 19 nt, Homo sapiens
  misc_RNA (1)...(19): siRNA sense strand
gaaaaggagucugcuuacu

SEQ ID NO: 518129 - RNA, 19 nt, Homo sapiens
  misc_RNA (1)...(19): siRNA sense strand
caacuucaucagagaguag

SEQ ID NO: 518130 - RNA, 19 nt, Homo sapiens
  misc_RNA (1)...(19): siRNA sense strand
cgacaagcacgucacuuac

SEQ ID NO: 518131 - RNA, 19 nt, Homo sapiens
  misc_RNA (1)...(19): siRNA sense strand
aaacacgugcacaauuuca

SEQ ID NO: 518132 - RNA, 19 nt, Homo sapiens
  misc_RNA (1)...(19): siRNA sense strand
ggugacaugguaccuaaca

SEQ ID NO: 518133 - RNA, 19 nt, Homo sapiens
  misc_RNA (1)...(19): siRNA sense strand
ugacaugguaccuaacaca

SEQ ID NO: 518134 - RNA, 19 nt, Homo sapiens
  misc_RNA (1)...(19): siRNA sense strand
cuuacuuacuggaauuaug

SEQ ID NO: 518135 - RNA, 19 nt, Homo sapiens
  misc_RNA (1)...(19): siRNA sense strand
ugguuauggugacauggua

SEQ ID NO: 518136 - RNA, 19 nt, Homo sapiens
  misc_RNA (1)...(19): siRNA sense strand
ccaauguacucagggaaac

SEQ ID NO: 518137 - RNA, 19 nt, Homo sapiens
  misc_RNA (1)...(19): siRNA sense strand
auacucagcugacuaaaag

SEQ ID NO: 518138 - RNA, 19 nt, Homo sapiens
  misc_RNA (1)...(19): siRNA sense strand
ggcaaggaagcuagaacuu

SEQ ID NO: 518139 - RNA, 19 nt, Homo sapiens
  misc_RNA (1)...(19): siRNA sense strand
uaaacgaaaggagugaaga

SEQ ID NO: 518140 - RNA, 19 nt, Homo sapiens
  misc_RNA (1)...(19): siRNA sense strand
gcaaaaguaagaaaacauc

SEQ ID NO: 518141 - RNA, 19 nt, Homo sapiens
  misc_RNA (1)...(19): siRNA sense strand
cgugcacaauuucaugaug

SEQ ID NO: 518142 - RNA, 19 nt, Homo sapiens
  misc_RNA (1)...(19): siRNA sense strand
gaggaaacugaaugaccaa

SEQ ID NO: 518143 - RNA, 19 nt, Homo sapiens
  misc_RNA (1)...(19): siRNA sense strand
uaacuuuucucuccauugg

SEQ ID NO: 518144 - RNA, 19 nt, Homo sapiens
  misc_RNA (1)...(19): siRNA sense strand
uucgagaagaggauuguua

SEQ ID NO: 518145 - RNA, 19 nt, Homo sapiens
  misc_RNA (1)...(19): siRNA sense strand
gauacucagcugacuaaaa

SEQ ID NO: 518146 - RNA, 19 nt, Homo sapiens
  misc_RNA (1)...(19): siRNA sense strand
uggaaaaggagucugcuua

SEQ ID NO: 518147 - RNA, 19 nt, Homo sapiens
  misc_RNA (1)...(19): siRNA sense strand
gauggagagcuacgacaag

SEQ ID NO: 518148 - RNA, 19 nt, Homo sapiens
  misc_RNA (1)...(19): siRNA sense strand
gauuucugacuuaaacgaa

SEQ ID NO: 518149 - RNA, 19 nt, Homo sapiens
  misc_RNA (1)...(19): siRNA sense strand
cgaaaauuccugcaagcua

SEQ ID NO: 518150 - RNA, 19 nt, Homo sapiens
  misc_RNA (1)...(19): siRNA sense strand
guaagaaaacaucaacgaa

SEQ ID NO: 518151 - RNA, 19 nt, Homo sapiens
  misc_RNA (1)...(19): siRNA sense strand
uugcacagcccugguggua

SEQ ID NO: 518152 - RNA, 19 nt, Homo sapiens
  misc_RNA (1)...(19): siRNA sense strand
gaaccaagaugaauagcaa

SEQ ID NO: 518153 - RNA, 19 nt, Homo sapiens
  misc_RNA (1)...(19): siRNA sense strand
gaaaggaaaucuguguauu

SEQ ID NO: 518154 - RNA, 19 nt, Homo sapiens
  misc_RNA (1)...(19): siRNA sense strand
ucacuaagcacucguguua

SEQ ID NO: 518155 - RNA, 19 nt, Homo sapiens
  misc_RNA (1)...(19): siRNA sense strand
ggccaucucugacuucuuu

SEQ ID NO: 518156 - RNA, 19 nt, Homo sapiens
  misc_RNA (1)...(19): siRNA sense strand
caaaugcugugucuuauag

SEQ ID NO: 518157 - RNA, 19 nt, Homo sapiens
  misc_RNA (1)...(19): siRNA sense strand
caacaucuguggacacuca

SEQ ID NO: 518158 - RNA, 19 nt, Homo sapiens
  misc_RNA (1)...(19): siRNA sense strand
ggaugaagguagugaaugu

SEQ ID NO: 518159 - RNA, 19 nt, Homo sapiens
  misc_RNA (1)...(19): siRNA sense strand
ggacacucauucagaggua

SEQ ID NO: 518160 - RNA, 19 nt, Homo sapiens
  misc_RNA (1)...(19): siRNA sense strand
gaacauguugaacugcuua

SEQ ID NO: 518161 - RNA, 19 nt, Homo sapiens
  misc_RNA (1)...(19): siRNA sense strand
gaagauuguuacucugaug

SEQ ID NO: 518162 - RNA, 19 nt, Homo sapiens
  misc_RNA (1)...(19): siRNA sense strand
cauauucucuguucacaau

SEQ ID NO: 518163 - RNA, 19 nt, Homo sapiens
  misc_RNA (1)...(19): siRNA sense strand
aaagaguagucucauguuu

SEQ ID NO: 518164 - RNA, 19 nt, Homo sapiens
  misc_RNA (1)...(19): siRNA sense strand
ggaaaggaaaucuguguau

SEQ ID NO: 518165 - RNA, 19 nt, Homo sapiens
  misc_RNA (1)...(19): siRNA sense strand
ucacaauuguccuuucauu

SEQ ID NO: 518166 - RNA, 19 nt, Homo sapiens
  misc_RNA (1)...(19): siRNA sense strand
ucucaaaugcugugucuua

SEQ ID NO: 518167 - RNA, 19 nt, Homo sapiens
  misc_RNA (1)...(19): siRNA sense strand
ggugugaucuccauuccuu

SEQ ID NO: 518168 - RNA, 19 nt, Homo sapiens
  misc_RNA (1)...(19): siRNA sense strand
gugcuggccuucuuaguga

SEQ ID NO: 518169 - RNA, 19 nt, Homo sapiens
  misc_RNA (1)...(19): siRNA sense strand
ucaagaaccaagaugaaua

SEQ ID NO: 518170 - RNA, 19 nt, Homo sapiens
  misc_RNA (1)...(19): siRNA sense strand
gguagacuaucuucaagga

SEQ ID NO: 518171 - RNA, 19 nt, Homo sapiens
  misc_RNA (1)...(19): siRNA sense strand
caacagguccuaaaucagu

SEQ ID NO: 518172 - RNA, 19 nt, Homo sapiens
  misc_RNA (1)...(19): siRNA sense strand
gaaagaguagucucauguu

SEQ ID NO: 518173 - RNA, 19 nt, Homo sapiens
  misc_RNA (1)...(19): siRNA sense strand
ucaaggagaucucuuucug

SEQ ID NO: 518174 - RNA, 19 nt, Homo sapiens
  misc_RNA (1)...(19): siRNA sense strand
agacagaggagaaagagua

SEQ ID NO: 518175 - RNA, 19 nt, Homo sapiens
  misc_RNA (1)...(19): siRNA sense strand
caacacagucggucaguau

SEQ ID NO: 518176 - RNA, 19 nt, Homo sapiens
  misc_RNA (1)...(19): siRNA sense strand
aaagcaaccucuaccauca

SEQ ID NO: 518177 - RNA, 19 nt, Homo sapiens
  misc_RNA (1)...(19): siRNA sense strand
caagaugaauagcaauaca

SEQ ID NO: 518178 - RNA, 19 nt, Homo sapiens
  misc_RNA (1)...(19): siRNA sense strand
gcuuagagccaggagauua

SEQ ID NO: 518179 - RNA, 19 nt, Homo sapiens
  misc_RNA (1)...(19): siRNA sense strand
agaaguuccugcauccuuu

SEQ ID NO: 518180 - RNA, 19 nt, Homo sapiens
  misc_RNA (1)...(19): siRNA sense strand
guacauccuugccaucaca

SEQ ID NO: 518181 - RNA, 19 nt, Homo sapiens
  misc_RNA (1)...(19): siRNA sense strand
cuaaaucaguuugguauag

SEQ ID NO: 518182 - RNA, 19 nt, Homo sapiens
  misc_RNA (1)...(19): siRNA sense strand
ccaagucacuggccauucu

SEQ ID NO: 518183 - RNA, 19 nt, Homo sapiens
  misc_RNA (1)...(19): siRNA sense strand
ucaguuugguauagaauug

SEQ ID NO: 518184 - RNA, 19 nt, Homo sapiens
  misc_RNA (1)...(19): siRNA sense strand
gcaucuguauauaacauug

SEQ ID NO: 518185 - RNA, 19 nt, Homo sapiens
  misc_RNA (1)...(19): siRNA sense strand
gaagcgugaucaucucagu

SEQ ID NO: 518186 - RNA, 19 nt, Homo sapiens
  misc_RNA (1)...(19): siRNA sense strand
ccaaagggaacauguugaa

SEQ ID NO: 518187 - RNA, 19 nt, Homo sapiens
  misc_RNA (1)...(19): siRNA sense strand
gagguagacuaucuucaag

SEQ ID NO: 518188 - RNA, 19 nt, Homo sapiens
  misc_RNA (1)...(19): siRNA sense strand
agacaucgaaguaguuauu

SEQ ID NO: 518189 - RNA, 19 nt, Homo sapiens
  misc_RNA (1)...(19): siRNA sense strand
gccaaugauucuaguuuca

SEQ ID NO: 518190 - RNA, 19 nt, Homo sapiens
  misc_RNA (1)...(19): siRNA sense strand
ucaaaugcugugucuuaua

SEQ ID NO: 518191 - RNA, 19 nt, Homo sapiens
  misc_RNA (1)...(19): siRNA sense strand
caaugauucuaguuucaga

SEQ ID NO: 518192 - RNA, 19 nt, Homo sapiens
  misc_RNA (1)...(19): siRNA sense strand
guucacaauuguccuuuca

SEQ ID NO: 518193 - RNA, 19 nt, Homo sapiens
  misc_RNA (1)...(19): siRNA sense strand
ggaacauguugaacugcuu

SEQ ID NO: 518194 - RNA, 19 nt, Homo sapiens
  misc_RNA (1)...(19): siRNA sense strand
caagaaccaagaugaauag

SEQ ID NO: 518195 - RNA, 19 nt, Homo sapiens
  misc_RNA (1)...(19): siRNA sense strand
cgugaucccagucaucuua

SEQ ID NO: 518196 - RNA, 19 nt, Homo sapiens
  misc_RNA (1)...(19): siRNA sense strand
ggccaaugauucuaguuuc

SEQ ID NO: 518197 - RNA, 19 nt, Homo sapiens
  misc_RNA (1)...(19): siRNA sense strand
caucacaucauucuuggaa

SEQ ID NO: 518198 - RNA, 19 nt, Homo sapiens
  misc_RNA (1)...(19): siRNA sense strand
ugacugcugucucuuccaa

SEQ ID NO: 518199 - RNA, 19 nt, Homo sapiens
  misc_RNA (1)...(19): siRNA sense strand
cagcaucuguauauaacau

SEQ ID NO: 518200 - RNA, 19 nt, Homo sapiens
  misc_RNA (1)...(19): siRNA sense strand
aagcacucguguuacuuua

SEQ ID NO: 518201 - RNA, 19 nt, Homo sapiens
  misc_RNA (1)...(19): siRNA sense strand
uaagcacucguguuacuuu

SEQ ID NO: 518202 - RNA, 19 nt, Homo sapiens
  misc_RNA (1)...(19): siRNA sense strand
caucuuagucgcuuauuuc

SEQ ID NO: 518203 - RNA, 19 nt, Homo sapiens
  misc_RNA (1)...(19): siRNA sense strand
gcuauaaugcuaggaaaug

SEQ ID NO: 518204 - RNA, 19 nt, Homo sapiens
  misc_RNA (1)...(19): siRNA sense strand
gggccaaugauucuaguuu

SEQ ID NO: 518205 - RNA, 19 nt, Homo sapiens
  misc_RNA (1)...(19): siRNA sense strand
gucggucaguaucuucuua

SEQ ID NO: 518206 - RNA, 19 nt, Homo sapiens
  misc_RNA (1)...(19): siRNA sense strand
guuccugcauccuuucauu

SEQ ID NO: 518207 - RNA, 19 nt, Homo sapiens
  misc_RNA (1)...(19): siRNA sense strand
ucagagagacagaggagaa

SEQ ID NO: 518208 - RNA, 19 nt, Homo sapiens
  misc_RNA (1)...(19): siRNA sense strand
uggcuucagugguucaauu

SEQ ID NO: 518209 - RNA, 19 nt, Homo sapiens
  misc_RNA (1)...(19): siRNA sense strand
agcaacagguccuaaauca

SEQ ID NO: 518210 - RNA, 19 nt, Homo sapiens
  misc_RNA (1)...(19): siRNA sense strand
gagagacagaggagaaaga

SEQ ID NO: 518211 - RNA, 19 nt, Homo sapiens
  misc_RNA (1)...(19): siRNA sense strand
gauacuaauagcacaauca

SEQ ID NO: 518212 - RNA, 19 nt, Homo sapiens
  misc_RNA (1)...(19): siRNA sense strand
gguauagaauugcauuuug

SEQ ID NO: 518213 - RNA, 19 nt, Homo sapiens
  misc_RNA (1)...(19): siRNA sense strand
ugaucuccauuccuuugua

SEQ ID NO: 518214 - RNA, 19 nt, Homo sapiens
  misc_RNA (1)...(19): siRNA sense strand
gucacuggccauucucuua

SEQ ID NO: 518215 - RNA, 19 nt, Homo sapiens
  misc_RNA (1)...(19): siRNA sense strand
ucaucuuagucgcuuauuu

SEQ ID NO: 518216 - RNA, 19 nt, Homo sapiens
  misc_RNA (1)...(19): siRNA sense strand
ugaaugugaaccuggauuu

SEQ ID NO: 518217 - RNA, 19 nt, Homo sapiens
  misc_RNA (1)...(19): siRNA sense strand
ugaagguagugaaugugaa

SEQ ID NO: 518218 - RNA, 19 nt, Homo sapiens
  misc_RNA (1)...(19): siRNA sense strand
gaaggaugaagguagugaa

SEQ ID NO: 518219 - RNA, 19 nt, Homo sapiens
  misc_RNA (1)...(19): siRNA sense strand
ggaaggaugaagguaguga

SEQ ID NO: 518220 - RNA, 19 nt, Homo sapiens
  misc_RNA (1)...(19): siRNA sense strand
gauucuaguuucagagucu

SEQ ID NO: 518221 - RNA, 19 nt, Homo sapiens
  misc_RNA (1)...(19): siRNA sense strand
gcacucguguuacuuuagc

SEQ ID NO: 518222 - RNA, 19 nt, Homo sapiens
  misc_RNA (1)...(19): siRNA sense strand
gcucacuacugacuaucug

SEQ ID NO: 518223 - RNA, 19 nt, Homo sapiens
  misc_RNA (1)...(19): siRNA sense strand
agaaagaguagucucaugu

SEQ ID NO: 518224 - RNA, 19 nt, Homo sapiens
  misc_RNA (1)...(19): siRNA sense strand
cuuagucgcuuauuucaac

SEQ ID NO: 518225 - RNA, 19 nt, Homo sapiens
  misc_RNA (1)...(19): siRNA sense strand
aaccuuagacaucgaagua

SEQ ID NO: 518226 - RNA, 19 nt, Homo sapiens
  misc_RNA (1)...(19): siRNA sense strand
gaucuccauuccuuuguac

SEQ ID NO: 518227 - RNA, 19 nt, Homo sapiens
  misc_RNA (1)...(19): siRNA sense strand
guucaauuccuuugucaau

SEQ ID NO: 518228 - RNA, 19 nt, Homo sapiens
  misc_RNA (1)...(19): siRNA sense strand
cacaauuguccuuucauuu

SEQ ID NO: 518229 - RNA, 19 nt, Homo sapiens
  misc_RNA (1)...(19): siRNA sense strand
gccaggagauuagccaagu

SEQ ID NO: 518230 - RNA, 19 nt, Homo sapiens
  misc_RNA (1)...(19): siRNA sense strand
cugacuaucuguuauguac

SEQ ID NO: 518231 - RNA, 19 nt, Homo sapiens
  misc_RNA (1)...(19): siRNA sense strand
ucguguuacuuuagcauuu

SEQ ID NO: 518232 - RNA, 19 nt, Homo sapiens
  misc_RNA (1)...(19): siRNA sense strand
agagguagacuaucuucaa

SEQ ID NO: 518233 - RNA, 19 nt, Homo sapiens
  misc_RNA (1)...(19): siRNA sense strand
caccaaagggaacauguug

SEQ ID NO: 518234 - RNA, 19 nt, Homo sapiens
  misc_RNA (1)...(19): siRNA sense strand
uauucucuguucacaauug

SEQ ID NO: 518235 - RNA, 19 nt, Homo sapiens
  misc_RNA (1)...(19): siRNA sense strand
acauuguccucaucagcua

SEQ ID NO: 518236 - RNA, 19 nt, Homo sapiens
  misc_RNA (1)...(19): siRNA sense strand
aagggaacauguugaacug

SEQ ID NO: 518237 - RNA, 19 nt, Homo sapiens
  misc_RNA (1)...(19): siRNA sense strand
uuagacaucgaaguaguua

SEQ ID NO: 518238 - RNA, 19 nt, Homo sapiens
  misc_RNA (1)...(19): siRNA sense strand
auucagagguagacuaucu

SEQ ID NO: 518239 - RNA, 19 nt, Homo sapiens
  misc_RNA (1)...(19): siRNA sense strand
aaugcugugucuuauagaa

SEQ ID NO: 518240 - RNA, 19 nt, Homo sapiens
  misc_RNA (1)...(19): siRNA sense strand
ggugcuggccuucuuagug

SEQ ID NO: 518241 - RNA, 19 nt, Homo sapiens
  misc_RNA (1)...(19): siRNA sense strand
acaacacagucggucagua

SEQ ID NO: 518242 - RNA, 19 nt, Homo sapiens
  misc_RNA (1)...(19): siRNA sense strand
ccucuaccaucacaacaca

SEQ ID NO: 518243 - RNA, 19 nt, Homo sapiens
  misc_RNA (1)...(19): siRNA sense strand
ugucacaagcgcuuucaaa

SEQ ID NO: 518244 - RNA, 19 nt, Homo sapiens
  misc_RNA (1)...(19): siRNA sense strand
uacaauugcuuccaaaaug

SEQ ID NO: 518245 - RNA, 19 nt, Homo sapiens
  misc_RNA (1)...(19): siRNA sense strand
ccucaagaaccaagaugaa

SEQ ID NO: 518246 - RNA, 19 nt, Homo sapiens
  misc_RNA (1)...(19): siRNA sense strand
cugcauccuuucauucaga

SEQ ID NO: 518247 - RNA, 19 nt, Homo sapiens
  misc_RNA (1)...(19): siRNA sense strand
gaagguagugaaugugaac

SEQ ID NO: 518248 - RNA, 19 nt, Homo sapiens
  misc_RNA (1)...(19): siRNA sense strand
gaucgauaccugucagucu

SEQ ID NO: 518249 - RNA, 19 nt, Homo sapiens
  misc_RNA (1)...(19): siRNA sense strand
gcacaaucaauuuaucacu

SEQ ID NO: 518250 - RNA, 19 nt, Homo sapiens
  misc_RNA (1)...(19): siRNA sense strand
ugaagauuguuacucugau

SEQ ID NO: 518251 - RNA, 19 nt, Homo sapiens
  misc_RNA (1)...(19): siRNA sense strand
gacaucgaaguaguuauuu

SEQ ID NO: 518252 - RNA, 19 nt, Homo sapiens
  misc_RNA (1)...(19): siRNA sense strand
gaaacugucuucagagaga

SEQ ID NO: 518253 - RNA, 19 nt, Homo sapiens
  misc_RNA (1)...(19): siRNA sense strand
gaagaaaaguuccaaauca

SEQ ID NO: 518254 - RNA, 19 nt, Homo sapiens
  misc_RNA (1)...(19): siRNA sense strand
cuccaaggcuguaacauua

SEQ ID NO: 518255 - RNA, 19 nt, Homo sapiens
  misc_RNA (1)...(19): siRNA sense strand
ccaaacugcugugcuauaa

SEQ ID NO: 518256 - RNA, 19 nt, Homo sapiens
  misc_RNA (1)...(19): siRNA sense strand
gaacuucgucucuuucuug

SEQ ID NO: 518257 - RNA, 19 nt, Homo sapiens
  misc_RNA (1)...(19): siRNA sense strand
cggaauacaucacaucaaa

SEQ ID NO: 518258 - RNA, 19 nt, Homo sapiens
  misc_RNA (1)...(19): siRNA sense strand
ggaggcaucuucuucugaa

SEQ ID NO: 518259 - RNA, 19 nt, Homo sapiens
  misc_RNA (1)...(19): siRNA sense strand
uaucuaaccucaacuguca

SEQ ID NO: 518260 - RNA, 19 nt, Homo sapiens
  misc_RNA (1)...(19): siRNA sense strand
aggcagaacuggagaagaa

SEQ ID NO: 518261 - RNA, 19 nt, Homo sapiens
  misc_RNA (1)...(19): siRNA sense strand
gaaaggagcaagugaagag

SEQ ID NO: 518262 - RNA, 19 nt, Homo sapiens
  misc_RNA (1)...(19): siRNA sense strand
gaaggaccaugcucagaag

SEQ ID NO: 518263 - RNA, 19 nt, Homo sapiens
  misc_RNA (1)...(19): siRNA sense strand
ccaggagguugcaguauug

SEQ ID NO: 518264 - RNA, 19 nt, Homo sapiens
  misc_RNA (1)...(19): siRNA sense strand
gccaggagguugcaguauu

SEQ ID NO: 518265 - RNA, 19 nt, Homo sapiens
  misc_RNA (1)...(19): siRNA sense strand
uuacguacaucccgaaaga

SEQ ID NO: 518266 - RNA, 19 nt, Homo sapiens
  misc_RNA (1)...(19): siRNA sense strand
acaccaaacugcugugcua

SEQ ID NO: 518267 - RNA, 19 nt, Homo sapiens
  misc_RNA (1)...(19): siRNA sense strand
cggaggcucugcacuauga

SEQ ID NO: 518268 - RNA, 19 nt, Homo sapiens
  misc_RNA (1)...(19): siRNA sense strand
aaagaggcccugcggaaua

SEQ ID NO: 518269 - RNA, 19 nt, Homo sapiens
  misc_RNA (1)...(19): siRNA sense strand
aaagaagccuacagugguu

SEQ ID NO: 518270 - RNA, 19 nt, Homo sapiens
  misc_RNA (1)...(19): siRNA sense strand
gagcggcuauugaagugaa

SEQ ID NO: 518271 - RNA, 19 nt, Homo sapiens
  misc_RNA (1)...(19): siRNA sense strand
guacaaguauggcaagaac

SEQ ID NO: 518272 - RNA, 19 nt, Homo sapiens
  misc_RNA (1)...(19): siRNA sense strand
gaucaaagaagccuacagu

SEQ ID NO: 518273 - RNA, 19 nt, Homo sapiens
  misc_RNA (1)...(19): siRNA sense strand
gcucuuaugagucguauga

SEQ ID NO: 518274 - RNA, 19 nt, Homo sapiens
  misc_RNA (1)...(19): siRNA sense strand
ggcugaaggugaucaaaga

SEQ ID NO: 518275 - RNA, 19 nt, Homo sapiens
  misc_RNA (1)...(19): siRNA sense strand
caagggcacugugucgaaa

SEQ ID NO: 518276 - RNA, 19 nt, Homo sapiens
  misc_RNA (1)...(19): siRNA sense strand
gaaagaggcccugcggaau

SEQ ID NO: 518277 - RNA, 19 nt, Homo sapiens
  misc_RNA (1)...(19): siRNA sense strand
ucaccaagaucaucagucu

SEQ ID NO: 518278 - RNA, 19 nt, Homo sapiens
  misc_RNA (1)...(19): siRNA sense strand
gcagugauaaccaacauuc

SEQ ID NO: 518279 - RNA, 19 nt, Homo sapiens
  misc_RNA (1)...(19): siRNA sense strand
ucaaggagagccugaagaa

SEQ ID NO: 518280 - RNA, 19 nt, Homo sapiens
  misc_RNA (1)...(19): siRNA sense strand
cuaaacauccucugacguu

SEQ ID NO: 518281 - RNA, 19 nt, Homo sapiens
  misc_RNA (1)...(19): siRNA sense strand
gcgaggugaucccggguuu

SEQ ID NO: 518282 - RNA, 19 nt, Homo sapiens
  misc_RNA (1)...(19): siRNA sense strand
uaaccaacauucugcuaag

SEQ ID NO: 518283 - RNA, 19 nt, Homo sapiens
  misc_RNA (1)...(19): siRNA sense strand
gaccugaagacccauauug

SEQ ID NO: 518284 - RNA, 19 nt, Homo sapiens
  misc_RNA (1)...(19): siRNA sense strand
gaucaucagucugggaaag

SEQ ID NO: 518285 - RNA, 19 nt, Homo sapiens
  misc_RNA (1)...(19): siRNA sense strand
gacaugggcagguggauug

SEQ ID NO: 518286 - RNA, 19 nt, Homo sapiens
  misc_RNA (1)...(19): siRNA sense strand
gccaaggaaugggaauuga

SEQ ID NO: 518287 - RNA, 19 nt, Homo sapiens
  misc_RNA (1)...(19): siRNA sense strand
ccaagcggcuacagaccaa

SEQ ID NO: 518288 - RNA, 19 nt, Homo sapiens
  misc_RNA (1)...(19): siRNA sense strand
gcacuaugacuacauugau

SEQ ID NO: 518289 - RNA, 19 nt, Homo sapiens
  misc_RNA (1)...(19): siRNA sense strand
ugaaggaccaugcucagaa

SEQ ID NO: 518290 - RNA, 19 nt, Homo sapiens
  misc_RNA (1)...(19): siRNA sense strand
gcgggacggcacuucauua

SEQ ID NO: 518291 - RNA, 19 nt, Homo sapiens
  misc_RNA (1)...(19): siRNA sense strand
aaacugcugugcuauaaaa

SEQ ID NO: 518292 - RNA, 19 nt, Homo sapiens
  misc_RNA (1)...(19): siRNA sense strand
agaagguuauuaugaggaa

SEQ ID NO: 518293 - RNA, 19 nt, Homo sapiens
  misc_RNA (1)...(19): siRNA sense strand
guucgaaugcugcccagua

SEQ ID NO: 518294 - RNA, 19 nt, Homo sapiens
  misc_RNA (1)...(19): siRNA sense strand
gaacuggagaagaaacugu

SEQ ID NO: 518295 - RNA, 19 nt, Homo sapiens
  misc_RNA (1)...(19): siRNA sense strand
gaaaagcuccggaauacau

SEQ ID NO: 518296 - RNA, 19 nt, Homo sapiens
  misc_RNA (1)...(19): siRNA sense strand
caucaaagacaccaaacug

SEQ ID NO: 518297 - RNA, 19 nt, Homo sapiens
  misc_RNA (1)...(19): siRNA sense strand
gauaaccaacauucugcua

SEQ ID NO: 518298 - RNA, 19 nt, Homo sapiens
  misc_RNA (1)...(19): siRNA sense strand
gcagguggauugggauuuu

SEQ ID NO: 518299 - RNA, 19 nt, Homo sapiens
  misc_RNA (1)...(19): siRNA sense strand
gaauaucuaaccucaacug

SEQ ID NO: 518300 - RNA, 19 nt, Homo sapiens
  misc_RNA (1)...(19): siRNA sense strand
ggcaguggcugaaggugau

SEQ ID NO: 518301 - RNA, 19 nt, Homo sapiens
  misc_RNA (1)...(19): siRNA sense strand
agaagaagcacgagcugaa

SEQ ID NO: 518302 - RNA, 19 nt, Homo sapiens
  misc_RNA (1)...(19): siRNA sense strand
aggaggagcugcugaagag

SEQ ID NO: 518303 - RNA, 19 nt, Homo sapiens
  misc_RNA (1)...(19): siRNA sense strand
gaaagauaacaagcucauu

SEQ ID NO: 518304 - RNA, 19 nt, Homo sapiens
  misc_RNA (1)...(19): siRNA sense strand
agaauacagucauccaaag

SEQ ID NO: 518305 - RNA, 19 nt, Homo sapiens
  misc_RNA (1)...(19): siRNA sense strand
ggugccgagugaaagauaa

SEQ ID NO: 518306 - RNA, 19 nt, Homo sapiens
  misc_RNA (1)...(19): siRNA sense strand
aagcacgagcugaagauua

SEQ ID NO: 518307 - RNA, 19 nt, Homo sapiens
  misc_RNA (1)...(19): siRNA sense strand
ggaauacaucacaucaaau

SEQ ID NO: 518308 - RNA, 19 nt, Homo sapiens
  misc_RNA (1)...(19): siRNA sense strand
gagagacccagcucagaug

SEQ ID NO: 518309 - RNA, 19 nt, Homo sapiens
  misc_RNA (1)...(19): siRNA sense strand
ggaaaggagcaagugaaga

SEQ ID NO: 518310 - RNA, 19 nt, Homo sapiens
  misc_RNA (1)...(19): siRNA sense strand
gaggaggagcugcugaaga

SEQ ID NO: 518311 - RNA, 19 nt, Homo sapiens
  misc_RNA (1)...(19): siRNA sense strand
gagcagucagccaaagaaa

SEQ ID NO: 518312 - RNA, 19 nt, Homo sapiens
  misc_RNA (1)...(19): siRNA sense strand
gaccuucuguuucaugaac

SEQ ID NO: 518313 - RNA, 19 nt, Homo sapiens
  misc_RNA (1)...(19): siRNA sense strand
ccuggaccaugaauaucua

SEQ ID NO: 518314 - RNA, 19 nt, Homo sapiens
  misc_RNA (1)...(19): siRNA sense strand
gaagcacgagcugaagauu

SEQ ID NO: 518315 - RNA, 19 nt, Homo sapiens
  misc_RNA (1)...(19): siRNA sense strand
gcccagcuccgcaaggaaa

SEQ ID NO: 518316 - RNA, 19 nt, Homo sapiens
  misc_RNA (1)...(19): siRNA sense strand
guggagaugucugcaagug

SEQ ID NO: 518317 - RNA, 19 nt, Homo sapiens
  misc_RNA (1)...(19): siRNA sense strand
ggacacggacccgcuuguu

SEQ ID NO: 518318 - RNA, 19 nt, Homo sapiens
  misc_RNA (1)...(19): siRNA sense strand
auacagucauccaaagguu

SEQ ID NO: 518319 - RNA, 19 nt, Homo sapiens
  misc_RNA (1)...(19): siRNA sense strand
aaggagagccugaagaaag

SEQ ID NO: 518320 - RNA, 19 nt, Homo sapiens
  misc_RNA (1)...(19): siRNA sense strand
aagaauacagucauccaaa

SEQ ID NO: 518321 - RNA, 19 nt, Homo sapiens
  misc_RNA (1)...(19): siRNA sense strand
cgaaugcugcccaguacaa

SEQ ID NO: 518322 - RNA, 19 nt, Homo sapiens
  misc_RNA (1)...(19): siRNA sense strand
gcagucagccaaagaaagc

SEQ ID NO: 518323 - RNA, 19 nt, Homo sapiens
  misc_RNA (1)...(19): siRNA sense strand
cccagaagguuauuaugag

SEQ ID NO: 518324 - RNA, 19 nt, Homo sapiens
  misc_RNA (1)...(19): siRNA sense strand
ccaaggaaugggaauugaa

SEQ ID NO: 518325 - RNA, 19 nt, Homo sapiens
  misc_RNA (1)...(19): siRNA sense strand
cacuaugacuacauugaug

SEQ ID NO: 518326 - RNA, 19 nt, Homo sapiens
  misc_RNA (1)...(19): siRNA sense strand
gaauacagucauccaaagg

SEQ ID NO: 518327 - RNA, 19 nt, Homo sapiens
  misc_RNA (1)...(19): siRNA sense strand
ggaagaguuaauaguugaa

SEQ ID NO: 518328 - RNA, 19 nt, Homo sapiens
  misc_RNA (1)...(19): siRNA sense strand
gaagaagcacgagcugaag

SEQ ID NO: 518329 - RNA, 19 nt, Homo sapiens
  misc_RNA (1)...(19): siRNA sense strand
ucccagaagguuauuauga

SEQ ID NO: 518330 - RNA, 19 nt, Homo sapiens
  misc_RNA (1)...(19): siRNA sense strand
caaggaaugggaauugaag

SEQ ID NO: 518331 - RNA, 19 nt, Homo sapiens
  misc_RNA (1)...(19): siRNA sense strand
gcgcuggugccgagugaaa

SEQ ID NO: 518332 - RNA, 19 nt, Homo sapiens
  misc_RNA (1)...(19): siRNA sense strand
ccaagggcacugugucgaa

SEQ ID NO: 518333 - RNA, 19 nt, Homo sapiens
  misc_RNA (1)...(19): siRNA sense strand
gagcaagugaagaggaaga

SEQ ID NO: 518334 - RNA, 19 nt, Homo sapiens
  misc_RNA (1)...(19): siRNA sense strand
cuuaugagucguaugauga

SEQ ID NO: 518335 - RNA, 19 nt, Homo sapiens
  misc_RNA (1)...(19): siRNA sense strand
uaagaauacagucauccaa

SEQ ID NO: 518336 - RNA, 19 nt, Homo sapiens
  misc_RNA (1)...(19): siRNA sense strand
gaaaaggacggguucgaau

SEQ ID NO: 518337 - RNA, 19 nt, Homo sapiens
  misc_RNA (1)...(19): siRNA sense strand
caaacugcugugcuauaaa

SEQ ID NO: 518338 - RNA, 19 nt, Homo sapiens
  misc_RNA (1)...(19): siRNA sense strand
caaggagagccugaagaaa

SEQ ID NO: 518339 - RNA, 19 nt, Homo sapiens
  misc_RNA (1)...(19): siRNA sense strand
ccucaacugucagggagaa

SEQ ID NO: 518340 - RNA, 19 nt, Homo sapiens
  misc_RNA (1)...(19): siRNA sense strand
gcaagugaagaggaagaaa

SEQ ID NO: 518341 - RNA, 19 nt, Homo sapiens
  misc_RNA (1)...(19): siRNA sense strand
aaauggaauuaccacaugu

SEQ ID NO: 518342 - RNA, 19 nt, Homo sapiens
  misc_RNA (1)...(19): siRNA sense strand
aaaauggaauuaccacaug

SEQ ID NO: 518343 - RNA, 19 nt, Homo sapiens
  misc_RNA (1)...(19): siRNA sense strand
gaaaauggaauuaccacau

SEQ ID NO: 518344 - RNA, 19 nt, Homo sapiens
  misc_RNA (1)...(19): siRNA sense strand
ccagcagccucagauggaa

SEQ ID NO: 518345 - RNA, 19 nt, Homo sapiens
  misc_RNA (1)...(19): siRNA sense strand
gaccaugaauaucuaaccu

SEQ ID NO: 518346 - RNA, 19 nt, Homo sapiens
  misc_RNA (1)...(19): siRNA sense strand
agaagcaggagaccgcuaa

SEQ ID NO: 518347 - RNA, 19 nt, Homo sapiens
  misc_RNA (1)...(19): siRNA sense strand
acggcucgcucaaggguaa

SEQ ID NO: 518348 - RNA, 19 nt, Homo sapiens
  misc_RNA (1)...(19): siRNA sense strand
uuauaucugcuaacccaua

SEQ ID NO: 518349 - RNA, 19 nt, Homo sapiens
  misc_RNA (1)...(19): siRNA sense strand
ggcacugugucgaaaguca

SEQ ID NO: 518350 - RNA, 19 nt, Homo sapiens
  misc_RNA (1)...(19): siRNA sense strand
ucgagcggcuauugaagug

SEQ ID NO: 518351 - RNA, 19 nt, Homo sapiens
  misc_RNA (1)...(19): siRNA sense strand
ggccaaggaaugggaauug

SEQ ID NO: 518352 - RNA, 19 nt, Homo sapiens
  misc_RNA (1)...(19): siRNA sense strand
gcaaagaacugaucauaaa

SEQ ID NO: 518353 - RNA, 19 nt, Homo sapiens
  misc_RNA (1)...(19): siRNA sense strand
ggaaugacauggacaaaug

SEQ ID NO: 518354 - RNA, 19 nt, Homo sapiens
  misc_RNA (1)...(19): siRNA sense strand
gaugagagaugcuaaaugu

SEQ ID NO: 518355 - RNA, 19 nt, Homo sapiens
  misc_RNA (1)...(19): siRNA sense strand
gaacagauuuguggaagaa

SEQ ID NO: 518356 - RNA, 19 nt, Homo sapiens
  misc_RNA (1)...(19): siRNA sense strand
gaucauaaaucuggaaaga

SEQ ID NO: 518357 - RNA, 19 nt, Homo sapiens
  misc_RNA (1)...(19): siRNA sense strand
gaaaggaggcugcaucaug

SEQ ID NO: 518358 - RNA, 19 nt, Homo sapiens
  misc_RNA (1)...(19): siRNA sense strand
ugaaagcuaugucuuagaa

SEQ ID NO: 518359 - RNA, 19 nt, Homo sapiens
  misc_RNA (1)...(19): siRNA sense strand
aggaagagcugaugaaguu

SEQ ID NO: 518360 - RNA, 19 nt, Homo sapiens
  misc_RNA (1)...(19): siRNA sense strand
aaaggaggcugcaucauga

SEQ ID NO: 518361 - RNA, 19 nt, Homo sapiens
  misc_RNA (1)...(19): siRNA sense strand
ggacaaaugcucuguaagu

SEQ ID NO: 518362 - RNA, 19 nt, Homo sapiens
  misc_RNA (1)...(19): siRNA sense strand
caccaaaccucgcugcaaa

SEQ ID NO: 518363 - RNA, 19 nt, Homo sapiens
  misc_RNA (1)...(19): siRNA sense strand
ggcaaagucucgaagaguu

SEQ ID NO: 518364 - RNA, 19 nt, Homo sapiens
  misc_RNA (1)...(19): siRNA sense strand
ggacuuauuguguuugaaa

SEQ ID NO: 518365 - RNA, 19 nt, Homo sapiens
  misc_RNA (1)...(19): siRNA sense strand
aaaccucgcugcaaagaau

SEQ ID NO: 518366 - RNA, 19 nt, Homo sapiens
  misc_RNA (1)...(19): siRNA sense strand
caacagauacaaacucuuc

SEQ ID NO: 518367 - RNA, 19 nt, Homo sapiens
  misc_RNA (1)...(19): siRNA sense strand
gcaccucccuucugugaca

SEQ ID NO: 518368 - RNA, 19 nt, Homo sapiens
  misc_RNA (1)...(19): siRNA sense strand
aagcagcgauuaauagaga

SEQ ID NO: 518369 - RNA, 19 nt, Homo sapiens
  misc_RNA (1)...(19): siRNA sense strand
cuaaucacguugacaaguu

SEQ ID NO: 518370 - RNA, 19 nt, Homo sapiens
  misc_RNA (1)...(19): siRNA sense strand
ucaccagccuccaugaauu

SEQ ID NO: 518371 - RNA, 19 nt, Homo sapiens
  misc_RNA (1)...(19): siRNA sense strand
ccaaugccguuuccauaga

SEQ ID NO: 518372 - RNA, 19 nt, Homo sapiens
  misc_RNA (1)...(19): siRNA sense strand
ggaacagauuuguggaaga

SEQ ID NO: 518373 - RNA, 19 nt, Homo sapiens
  misc_RNA (1)...(19): siRNA sense strand
caagaaucauccagaagug

SEQ ID NO: 518374 - RNA, 19 nt, Homo sapiens
  misc_RNA (1)...(19): siRNA sense strand
gcaagacgguacugauguc

SEQ ID NO: 518375 - RNA, 19 nt, Homo sapiens
  misc_RNA (1)...(19): siRNA sense strand
gcaaaucccaugacaaugc

SEQ ID NO: 518376 - RNA, 19 nt, Homo sapiens
  misc_RNA (1)...(19): siRNA sense strand
ccagaggaauguaugaauc

SEQ ID NO: 518377 - RNA, 19 nt, Homo sapiens
  misc_RNA (1)...(19): siRNA sense strand
uaaucacguugacaaguuu

SEQ ID NO: 518378 - RNA, 19 nt, Homo sapiens
  misc_RNA (1)...(19): siRNA sense strand
gcugaagccugcaggaaca

SEQ ID NO: 518379 - RNA, 19 nt, Homo sapiens
  misc_RNA (1)...(19): siRNA sense strand
gacaaaugcucuguaaguc

SEQ ID NO: 518380 - RNA, 19 nt, Homo sapiens
  misc_RNA (1)...(19): siRNA sense strand
ccugggaucugcuuugaga

SEQ ID NO: 518381 - RNA, 19 nt, Homo sapiens
  misc_RNA (1)...(19): siRNA sense strand
ggcuguagcugucaaaugg

SEQ ID NO: 518382 - RNA, 19 nt, Homo sapiens
  misc_RNA (1)...(19): siRNA sense strand
caaggaggccggauucugu

SEQ ID NO: 518383 - RNA, 19 nt, Homo sapiens
  misc_RNA (1)...(19): siRNA sense strand
ggaaagcaaagaacugauc

SEQ ID NO: 518384 - RNA, 19 nt, Homo sapiens
  misc_RNA (1)...(19): siRNA sense strand
guacuugggcgaugacaug

SEQ ID NO: 518385 - RNA, 19 nt, Homo sapiens
  misc_RNA (1)...(19): siRNA sense strand
gagcuucgacuccaagaau

SEQ ID NO: 518386 - RNA, 19 nt, Homo sapiens
  misc_RNA (1)...(19): siRNA sense strand
gcacucaugucaggaugug

SEQ ID NO: 518387 - RNA, 19 nt, Homo sapiens
  misc_RNA (1)...(19): siRNA sense strand
gaagugugggaacagauuu

SEQ ID NO: 518388 - RNA, 19 nt, Homo sapiens
  misc_RNA (1)...(19): siRNA sense strand
gagaaaggaggcugcauca

SEQ ID NO: 518389 - RNA, 19 nt, Homo sapiens
  misc_RNA (1)...(19): siRNA sense strand
aaagugcaaccaacagaua

SEQ ID NO: 518390 - RNA, 19 nt, Homo sapiens
  misc_RNA (1)...(19): siRNA sense strand
gaaagcaaagaacugauca

SEQ ID NO: 518391 - RNA, 19 nt, Homo sapiens
  misc_RNA (1)...(19): siRNA sense strand
cagaagugcugaauauucg

SEQ ID NO: 518392 - RNA, 19 nt, Homo sapiens
  misc_RNA (1)...(19): siRNA sense strand
caaugccguuuccauagaa

SEQ ID NO: 518393 - RNA, 19 nt, Homo sapiens
  misc_RNA (1)...(19): siRNA sense strand
ccagaagugcugaauauuc

SEQ ID NO: 518394 - RNA, 19 nt, Homo sapiens
  misc_RNA (1)...(19): siRNA sense strand
ccugugaccucccagaguu

SEQ ID NO: 518395 - RNA, 19 nt, Homo sapiens
  misc_RNA (1)...(19): siRNA sense strand
ugacaaguuuggcuuugga

SEQ ID NO: 518396 - RNA, 19 nt, Homo sapiens
  misc_RNA (1)...(19): siRNA sense strand
ggacggcuacugcuacaau

SEQ ID NO: 518397 - RNA, 19 nt, Homo sapiens
  misc_RNA (1)...(19): siRNA sense strand
aagcaaagaacugaucaua

SEQ ID NO: 518398 - RNA, 19 nt, Homo sapiens
  misc_RNA (1)...(19): siRNA sense strand
gaagagcugaugaaguugu

SEQ ID NO: 518399 - RNA, 19 nt, Homo sapiens
  misc_RNA (1)...(19): siRNA sense strand
ggaaacccacuaucugcaa

SEQ ID NO: 518400 - RNA, 19 nt, Homo sapiens
  misc_RNA (1)...(19): siRNA sense strand
ucucagacaugggcaagaa

SEQ ID NO: 518401 - RNA, 19 nt, Homo sapiens
  misc_RNA (1)...(19): siRNA sense strand
gggcaccucccuucuguga

SEQ ID NO: 518402 - RNA, 19 nt, Homo sapiens
  misc_RNA (1)...(19): siRNA sense strand
ccaagaaucauccagaagu

SEQ ID NO: 518403 - RNA, 19 nt, Homo sapiens
  misc_RNA (1)...(19): siRNA sense strand
augaaucgcugcugcaaug

SEQ ID NO: 518404 - RNA, 19 nt, Homo sapiens
  misc_RNA (1)...(19): siRNA sense strand
ggaagaaggagaggagugu

SEQ ID NO: 518405 - RNA, 19 nt, Homo sapiens
  misc_RNA (1)...(19): siRNA sense strand
gcguggaaguguggaauga

SEQ ID NO: 518406 - RNA, 19 nt, Homo sapiens
  misc_RNA (1)...(19): siRNA sense strand
ucgcaaaucccaugacaau

SEQ ID NO: 518407 - RNA, 19 nt, Homo sapiens
  misc_RNA (1)...(19): siRNA sense strand
uaccaaugccguuuccaua

SEQ ID NO: 518408 - RNA, 19 nt, Homo sapiens
  misc_RNA (1)...(19): siRNA sense strand
ccagaagugugggaacaga

SEQ ID NO: 518409 - RNA, 19 nt, Homo sapiens
  misc_RNA (1)...(19): siRNA sense strand
cacaugagcugggccacaa

SEQ ID NO: 518410 - RNA, 19 nt, Homo sapiens
  misc_RNA (1)...(19): siRNA sense strand
ucaaggcaacuaaguaugu

SEQ ID NO: 518411 - RNA, 19 nt, Homo sapiens
  misc_RNA (1)...(19): siRNA sense strand
caaagugugcagauggaaa

SEQ ID NO: 518412 - RNA, 19 nt, Homo sapiens
  misc_RNA (1)...(19): siRNA sense strand
gcaaagucucgaagaguuc

SEQ ID NO: 518413 - RNA, 19 nt, Homo sapiens
  misc_RNA (1)...(19): siRNA sense strand
gcagacaaccgagaguuuc

SEQ ID NO: 518414 - RNA, 19 nt, Homo sapiens
  misc_RNA (1)...(19): siRNA sense strand
caaggcaacuaaguaugug

SEQ ID NO: 518415 - RNA, 19 nt, Homo sapiens
  misc_RNA (1)...(19): siRNA sense strand
guacggggauauucugauu

SEQ ID NO: 518416 - RNA, 19 nt, Homo sapiens
  misc_RNA (1)...(19): siRNA sense strand
gcugaauauucgacuacaa

SEQ ID NO: 518417 - RNA, 19 nt, Homo sapiens
  misc_RNA (1)...(19): siRNA sense strand
ugucuuagaaccaaugaaa

SEQ ID NO: 518418 - RNA, 19 nt, Homo sapiens
  misc_RNA (1)...(19): siRNA sense strand
aaugaaagcuaugucuuag

SEQ ID NO: 518419 - RNA, 19 nt, Homo sapiens
  misc_RNA (1)...(19): siRNA sense strand
uuacagaccacugaacauu

SEQ ID NO: 518420 - RNA, 19 nt, Homo sapiens
  misc_RNA (1)...(19): siRNA sense strand
ucccuucugugacaaguuu

SEQ ID NO: 518421 - RNA, 19 nt, Homo sapiens
  misc_RNA (1)...(19): siRNA sense strand
gcaacaacaggaagaacug

SEQ ID NO: 518422 - RNA, 19 nt, Homo sapiens
  misc_RNA (1)...(19): siRNA sense strand
auccagaagugcugaauau

SEQ ID NO: 518423 - RNA, 19 nt, Homo sapiens
  misc_RNA (1)...(19): siRNA sense strand
gagaugagagaugcuaaau

SEQ ID NO: 518424 - RNA, 19 nt, Homo sapiens
  misc_RNA (1)...(19): siRNA sense strand
ccaaaugcgagaugagaga

SEQ ID NO: 518425 - RNA, 19 nt, Homo sapiens
  misc_RNA (1)...(19): siRNA sense strand
gcaaugccaccaccuguac

SEQ ID NO: 518426 - RNA, 19 nt, Homo sapiens
  misc_RNA (1)...(19): siRNA sense strand
caccagccuccaugaauuu

SEQ ID NO: 518427 - RNA, 19 nt, Homo sapiens
  misc_RNA (1)...(19): siRNA sense strand
gcagcaaggaggccggauu

SEQ ID NO: 518428 - RNA, 19 nt, Homo sapiens
  misc_RNA (1)...(19): siRNA sense strand
ccaccacccucucagacau

SEQ ID NO: 518429 - RNA, 19 nt, Homo sapiens
  misc_RNA (1)...(19): siRNA sense strand
gaaagaaaugaaggucuca

SEQ ID NO: 518430 - RNA, 19 nt, Homo sapiens
  misc_RNA (1)...(19): siRNA sense strand
gcaaggaggccggauucug

SEQ ID NO: 518431 - RNA, 19 nt, Homo sapiens
  misc_RNA (1)...(19): siRNA sense strand
ucacggaaacccacuaucu

SEQ ID NO: 518432 - RNA, 19 nt, Homo sapiens
  misc_RNA (1)...(19): siRNA sense strand
auggacaaaugcucuguaa

SEQ ID NO: 518433 - RNA, 19 nt, Homo sapiens
  misc_RNA (1)...(19): siRNA sense strand
ggaaguguggaaugacaug

SEQ ID NO: 518434 - RNA, 19 nt, Homo sapiens
  misc_RNA (1)...(19): siRNA sense strand
guggaaguguggaaugaca

SEQ ID NO: 518435 - RNA, 19 nt, Homo sapiens
  misc_RNA (1)...(19): siRNA sense strand
ggcagacaaccgagaguuu

SEQ ID NO: 518436 - RNA, 19 nt, Homo sapiens
  misc_RNA (1)...(19): siRNA sense strand
ccucaaggcaacuaaguau

SEQ ID NO: 518437 - RNA, 19 nt, Homo sapiens
  misc_RNA (1)...(19): siRNA sense strand
caagaaggcauaaaagaga

SEQ ID NO: 518438 - RNA, 19 nt, Homo sapiens
  misc_RNA (1)...(19): siRNA sense strand
ggccagaagugugggaaca

SEQ ID NO: 518439 - RNA, 19 nt, Homo sapiens
  misc_RNA (1)...(19): siRNA sense strand
ggccacaauuucgggauga

SEQ ID NO: 518440 - RNA, 19 nt, Homo sapiens
  misc_RNA (1)...(19): siRNA sense strand
uuucuggacuggaggaaga

SEQ ID NO: 518441 - RNA, 19 nt, Homo sapiens
  misc_RNA (1)...(19): siRNA sense strand
gcacgaugggcacucaugu

SEQ ID NO: 518442 - RNA, 19 nt, Homo sapiens
  misc_RNA (1)...(19): siRNA sense strand
aaauggcgguugagaaagg

SEQ ID NO: 518443 - RNA, 19 nt, Homo sapiens
  misc_RNA (1)...(19): siRNA sense strand
gaaaagugcaaccaacaga

SEQ ID NO: 518444 - RNA, 19 nt, Homo sapiens
  misc_RNA (1)...(19): siRNA sense strand
cgagaugagagaugcuaaa

SEQ ID NO: 518445 - RNA, 19 nt, Homo sapiens
  misc_RNA (1)...(19): siRNA sense strand
gcaaccaacagauacaaac

SEQ ID NO: 518446 - RNA, 19 nt, Homo sapiens
  misc_RNA (1)...(19): siRNA sense strand
gcagaggggugugcaacaa

SEQ ID NO: 518447 - RNA, 19 nt, Homo sapiens
  misc_RNA (1)...(19): siRNA sense strand
ccgugacccuggcacauga

SEQ ID NO: 518448 - RNA, 19 nt, Homo sapiens
  misc_RNA (1)...(19): siRNA sense strand
uaauucugggucacuguua

SEQ ID NO: 518449 - RNA, 19 nt, Homo sapiens
  misc_RNA (1)...(19): siRNA sense strand
cauccagaagugcugaaua

SEQ ID NO: 518450 - RNA, 19 nt, Homo sapiens
  misc_RNA (1)...(19): siRNA sense strand
uggcaacuguggcaaaguc

SEQ ID NO: 518451 - RNA, 19 nt, Homo sapiens
  misc_RNA (1)...(19): siRNA sense strand
guaauucugggucacuguu

SEQ ID NO: 518452 - RNA, 19 nt, Homo sapiens
  misc_RNA (1)...(19): siRNA sense strand
gcaaagaacugaucauaaa

SEQ ID NO: 518453 - RNA, 19 nt, Homo sapiens
  misc_RNA (1)...(19): siRNA sense strand
ggaaugacauggacaaaug

SEQ ID NO: 518454 - RNA, 19 nt, Homo sapiens
  misc_RNA (1)...(19): siRNA sense strand
gaugagagaugcuaaaugu

SEQ ID NO: 518455 - RNA, 19 nt, Homo sapiens
  misc_RNA (1)...(19): siRNA sense strand
gaacagauuuguggaagaa

SEQ ID NO: 518456 - RNA, 19 nt, Homo sapiens
  misc_RNA (1)...(19): siRNA sense strand
gaucauaaaucuggaaaga

SEQ ID NO: 518457 - RNA, 19 nt, Homo sapiens
  misc_RNA (1)...(19): siRNA sense strand
gaaaggaggcugcaucaug

SEQ ID NO: 518458 - RNA, 19 nt, Homo sapiens
  misc_RNA (1)...(19): siRNA sense strand
ugaaagcuaugucuuagaa

SEQ ID NO: 518459 - RNA, 19 nt, Homo sapiens
  misc_RNA (1)...(19): siRNA sense strand
aggaagagcugaugaaguu

SEQ ID NO: 518460 - RNA, 19 nt, Homo sapiens
  misc_RNA (1)...(19): siRNA sense strand
aaaggaggcugcaucauga

SEQ ID NO: 518461 - RNA, 19 nt, Homo sapiens
  misc_RNA (1)...(19): siRNA sense strand
ggacaaaugcucuguaagu

SEQ ID NO: 518462 - RNA, 19 nt, Homo sapiens
  misc_RNA (1)...(19): siRNA sense strand
caccaaaccucgcugcaaa

SEQ ID NO: 518463 - RNA, 19 nt, Homo sapiens
  misc_RNA (1)...(19): siRNA sense strand
ggcaaagucucgaagaguu

SEQ ID NO: 518464 - RNA, 19 nt, Homo sapiens
  misc_RNA (1)...(19): siRNA sense strand
ggacuuauuguguuugaaa

SEQ ID NO: 518465 - RNA, 19 nt, Homo sapiens
  misc_RNA (1)...(19): siRNA sense strand
aaaccucgcugcaaagaau

SEQ ID NO: 518466 - RNA, 19 nt, Homo sapiens
  misc_RNA (1)...(19): siRNA sense strand
caacagauacaaacucuuc

SEQ ID NO: 518467 - RNA, 19 nt, Homo sapiens
  misc_RNA (1)...(19): siRNA sense strand
gcaccucccuucugugaca

SEQ ID NO: 518468 - RNA, 19 nt, Homo sapiens
  misc_RNA (1)...(19): siRNA sense strand
aagcagcgauuaauagaga

SEQ ID NO: 518469 - RNA, 19 nt, Homo sapiens
  misc_RNA (1)...(19): siRNA sense strand
cuaaucacguugacaaguu

SEQ ID NO: 518470 - RNA, 19 nt, Homo sapiens
  misc_RNA (1)...(19): siRNA sense strand
ucaccagccuccaugaauu

SEQ ID NO: 518471 - RNA, 19 nt, Homo sapiens
  misc_RNA (1)...(19): siRNA sense strand
ccaaugccguuuccauaga

SEQ ID NO: 518472 - RNA, 19 nt, Homo sapiens
  misc_RNA (1)...(19): siRNA sense strand
ggaacagauuuguggaaga

SEQ ID NO: 518473 - RNA, 19 nt, Homo sapiens
  misc_RNA (1)...(19): siRNA sense strand
caagaaucauccagaagug

SEQ ID NO: 518474 - RNA, 19 nt, Homo sapiens
  misc_RNA (1)...(19): siRNA sense strand
gcaagacgguacugauguc

SEQ ID NO: 518475 - RNA, 19 nt, Homo sapiens
  misc_RNA (1)...(19): siRNA sense strand
gcaaaucccaugacaaugc

SEQ ID NO: 518476 - RNA, 19 nt, Homo sapiens
  misc_RNA (1)...(19): siRNA sense strand
ccagaggaauguaugaauc

SEQ ID NO: 518477 - RNA, 19 nt, Homo sapiens
  misc_RNA (1)...(19): siRNA sense strand
uaaucacguugacaaguuu

SEQ ID NO: 518478 - RNA, 19 nt, Homo sapiens
  misc_RNA (1)...(19): siRNA sense strand
gcugaagccugcaggaaca

SEQ ID NO: 518479 - RNA, 19 nt, Homo sapiens
  misc_RNA (1)...(19): siRNA sense strand
gacaaaugcucuguaaguc

SEQ ID NO: 518480 - RNA, 19 nt, Homo sapiens
  misc_RNA (1)...(19): siRNA sense strand
ccugggaucugcuuugaga

SEQ ID NO: 518481 - RNA, 19 nt, Homo sapiens
  misc_RNA (1)...(19): siRNA sense strand
ggcuguagcugucaaaugg

SEQ ID NO: 518482 - RNA, 19 nt, Homo sapiens
  misc_RNA (1)...(19): siRNA sense strand
caaggaggccggauucugu

SEQ ID NO: 518483 - RNA, 19 nt, Homo sapiens
  misc_RNA (1)...(19): siRNA sense strand
ggaaagcaaagaacugauc

SEQ ID NO: 518484 - RNA, 19 nt, Homo sapiens
  misc_RNA (1)...(19): siRNA sense strand
guacuugggcgaugacaug

SEQ ID NO: 518485 - RNA, 19 nt, Homo sapiens
  misc_RNA (1)...(19): siRNA sense strand
gagcuucgacuccaagaau

SEQ ID NO: 518486 - RNA, 19 nt, Homo sapiens
  misc_RNA (1)...(19): siRNA sense strand
gcacucaugucaggaugug

SEQ ID NO: 518487 - RNA, 19 nt, Homo sapiens
  misc_RNA (1)...(19): siRNA sense strand
gaagugugggaacagauuu

SEQ ID NO: 518488 - RNA, 19 nt, Homo sapiens
  misc_RNA (1)...(19): siRNA sense strand
gagaaaggaggcugcauca

SEQ ID NO: 518489 - RNA, 19 nt, Homo sapiens
  misc_RNA (1)...(19): siRNA sense strand
aaagugcaaccaacagaua

SEQ ID NO: 518490 - RNA, 19 nt, Homo sapiens
  misc_RNA (1)...(19): siRNA sense strand
gaaagcaaagaacugauca

SEQ ID NO: 518491 - RNA, 19 nt, Homo sapiens
  misc_RNA (1)...(19): siRNA sense strand
cagaagugcugaauauucg

SEQ ID NO: 518492 - RNA, 19 nt, Homo sapiens
  misc_RNA (1)...(19): siRNA sense strand
caaugccguuuccauagaa

SEQ ID NO: 518493 - RNA, 19 nt, Homo sapiens
  misc_RNA (1)...(19): siRNA sense strand
ccagaagugcugaauauuc

SEQ ID NO: 518494 - RNA, 19 nt, Homo sapiens
  misc_RNA (1)...(19): siRNA sense strand
ccugugaccucccagaguu

SEQ ID NO: 518495 - RNA, 19 nt, Homo sapiens
  misc_RNA (1)...(19): siRNA sense strand
ugacaaguuuggcuuugga

SEQ ID NO: 518496 - RNA, 19 nt, Homo sapiens
  misc_RNA (1)...(19): siRNA sense strand
ggacggcuacugcuacaau

SEQ ID NO: 518497 - RNA, 19 nt, Homo sapiens
  misc_RNA (1)...(19): siRNA sense strand
aagcaaagaacugaucaua

SEQ ID NO: 518498 - RNA, 19 nt, Homo sapiens
  misc_RNA (1)...(19): siRNA sense strand
gaagagcugaugaaguugu

SEQ ID NO: 518499 - RNA, 19 nt, Homo sapiens
  misc_RNA (1)...(19): siRNA sense strand
ggaaacccacuaucugcaa

SEQ ID NO: 518500 - RNA, 19 nt, Homo sapiens
  misc_RNA (1)...(19): siRNA sense strand
ucucagacaugggcaagaa

SEQ ID NO: 518501 - RNA, 19 nt, Homo sapiens
  misc_RNA (1)...(19): siRNA sense strand
gggcaccucccuucuguga

SEQ ID NO: 518502 - RNA, 19 nt, Homo sapiens
  misc_RNA (1)...(19): siRNA sense strand
ccaagaaucauccagaagu

SEQ ID NO: 518503 - RNA, 19 nt, Homo sapiens
  misc_RNA (1)...(19): siRNA sense strand
augaaucgcugcugcaaug

SEQ ID NO: 518504 - RNA, 19 nt, Homo sapiens
  misc_RNA (1)...(19): siRNA sense strand
ggaagaaggagaggagugu

SEQ ID NO: 518505 - RNA, 19 nt, Homo sapiens
  misc_RNA (1)...(19): siRNA sense strand
gcguggaaguguggaauga

SEQ ID NO: 518506 - RNA, 19 nt, Homo sapiens
  misc_RNA (1)...(19): siRNA sense strand
ucgcaaaucccaugacaau

SEQ ID NO: 518507 - RNA, 19 nt, Homo sapiens
  misc_RNA (1)...(19): siRNA sense strand
uaccaaugccguuuccaua

SEQ ID NO: 518508 - RNA, 19 nt, Homo sapiens
  misc_RNA (1)...(19): siRNA sense strand
ccagaagugugggaacaga

SEQ ID NO: 518509 - RNA, 19 nt, Homo sapiens
  misc_RNA (1)...(19): siRNA sense strand
cacaugagcugggccacaa

SEQ ID NO: 518510 - RNA, 19 nt, Homo sapiens
  misc_RNA (1)...(19): siRNA sense strand
ucaaggcaacuaaguaugu

SEQ ID NO: 518511 - RNA, 19 nt, Homo sapiens
  misc_RNA (1)...(19): siRNA sense strand
caaagugugcagauggaaa

SEQ ID NO: 518512 - RNA, 19 nt, Homo sapiens
  misc_RNA (1)...(19): siRNA sense strand
gcaaagucucgaagaguuc

SEQ ID NO: 518513 - RNA, 19 nt, Homo sapiens
  misc_RNA (1)...(19): siRNA sense strand
gcagacaaccgagaguuuc

SEQ ID NO: 518514 - RNA, 19 nt, Homo sapiens
  misc_RNA (1)...(19): siRNA sense strand
caaggcaacuaaguaugug

SEQ ID NO: 518515 - RNA, 19 nt, Homo sapiens
  misc_RNA (1)...(19): siRNA sense strand
guacggggauauucugauu

SEQ ID NO: 518516 - RNA, 19 nt, Homo sapiens
  misc_RNA (1)...(19): siRNA sense strand
gcugaauauucgacuacaa

SEQ ID NO: 518517 - RNA, 19 nt, Homo sapiens
  misc_RNA (1)...(19): siRNA sense strand
ugucuuagaaccaaugaaa

SEQ ID NO: 518518 - RNA, 19 nt, Homo sapiens
  misc_RNA (1)...(19): siRNA sense strand
aaugaaagcuaugucuuag

SEQ ID NO: 518519 - RNA, 19 nt, Homo sapiens
  misc_RNA (1)...(19): siRNA sense strand
uuacagaccacugaacauu

SEQ ID NO: 518520 - RNA, 19 nt, Homo sapiens
  misc_RNA (1)...(19): siRNA sense strand
ucccuucugugacaaguuu

SEQ ID NO: 518521 - RNA, 19 nt, Homo sapiens
  misc_RNA (1)...(19): siRNA sense strand
gcaacaacaggaagaacug

SEQ ID NO: 518522 - RNA, 19 nt, Homo sapiens
  misc_RNA (1)...(19): siRNA sense strand
auccagaagugcugaauau

SEQ ID NO: 518523 - RNA, 19 nt, Homo sapiens
  misc_RNA (1)...(19): siRNA sense strand
gagaugagagaugcuaaau

SEQ ID NO: 518524 - RNA, 19 nt, Homo sapiens
  misc_RNA (1)...(19): siRNA sense strand
ccaaaugcgagaugagaga

SEQ ID NO: 518525 - RNA, 19 nt, Homo sapiens
  misc_RNA (1)...(19): siRNA sense strand
gcaaugccaccaccuguac

SEQ ID NO: 518526 - RNA, 19 nt, Homo sapiens
  misc_RNA (1)...(19): siRNA sense strand
caccagccuccaugaauuu

SEQ ID NO: 518527 - RNA, 19 nt, Homo sapiens
  misc_RNA (1)...(19): siRNA sense strand
gcagcaaggaggccggauu

SEQ ID NO: 518528 - RNA, 19 nt, Homo sapiens
  misc_RNA (1)...(19): siRNA sense strand
ccaccacccucucagacau

SEQ ID NO: 518529 - RNA, 19 nt, Homo sapiens
  misc_RNA (1)...(19): siRNA sense strand
gaaagaaaugaaggucuca

SEQ ID NO: 518530 - RNA, 19 nt, Homo sapiens
  misc_RNA (1)...(19): siRNA sense strand
gcaaggaggccggauucug

SEQ ID NO: 518531 - RNA, 19 nt, Homo sapiens
  misc_RNA (1)...(19): siRNA sense strand
ucacggaaacccacuaucu

SEQ ID NO: 518532 - RNA, 19 nt, Homo sapiens
  misc_RNA (1)...(19): siRNA sense strand
auggacaaaugcucuguaa

SEQ ID NO: 518533 - RNA, 19 nt, Homo sapiens
  misc_RNA (1)...(19): siRNA sense strand
ggaaguguggaaugacaug

SEQ ID NO: 518534 - RNA, 19 nt, Homo sapiens
  misc_RNA (1)...(19): siRNA sense strand
guggaaguguggaaugaca

SEQ ID NO: 518535 - RNA, 19 nt, Homo sapiens
  misc_RNA (1)...(19): siRNA sense strand
ggcagacaaccgagaguuu

SEQ ID NO: 518536 - RNA, 19 nt, Homo sapiens
  misc_RNA (1)...(19): siRNA sense strand
ccucaaggcaacuaaguau

SEQ ID NO: 518537 - RNA, 19 nt, Homo sapiens
  misc_RNA (1)...(19): siRNA sense strand
caagaaggcauaaaagaga

SEQ ID NO: 518538 - RNA, 19 nt, Homo sapiens
  misc_RNA (1)...(19): siRNA sense strand
ggccagaagugugggaaca

SEQ ID NO: 518539 - RNA, 19 nt, Homo sapiens
  misc_RNA (1)...(19): siRNA sense strand
ggccacaauuucgggauga

SEQ ID NO: 518540 - RNA, 19 nt, Homo sapiens
  misc_RNA (1)...(19): siRNA sense strand
uuucuggacuggaggaaga

SEQ ID NO: 518541 - RNA, 19 nt, Homo sapiens
  misc_RNA (1)...(19): siRNA sense strand
gcacgaugggcacucaugu

SEQ ID NO: 518542 - RNA, 19 nt, Homo sapiens
  misc_RNA (1)...(19): siRNA sense strand
aaauggcgguugagaaagg

SEQ ID NO: 518543 - RNA, 19 nt, Homo sapiens
  misc_RNA (1)...(19): siRNA sense strand
gaaaagugcaaccaacaga

SEQ ID NO: 518544 - RNA, 19 nt, Homo sapiens
  misc_RNA (1)...(19): siRNA sense strand
cgagaugagagaugcuaaa

SEQ ID NO: 518545 - RNA, 19 nt, Homo sapiens
  misc_RNA (1)...(19): siRNA sense strand
gcaaccaacagauacaaac

SEQ ID NO: 518546 - RNA, 19 nt, Homo sapiens
  misc_RNA (1)...(19): siRNA sense strand
gcagaggggugugcaacaa

SEQ ID NO: 518547 - RNA, 19 nt, Homo sapiens
  misc_RNA (1)...(19): siRNA sense strand
ccgugacccuggcacauga

SEQ ID NO: 518548 - RNA, 19 nt, Homo sapiens
  misc_RNA (1)...(19): siRNA sense strand
uaauucugggucacuguua

SEQ ID NO: 518549 - RNA, 19 nt, Homo sapiens
  misc_RNA (1)...(19): siRNA sense strand
cauccagaagugcugaaua

SEQ ID NO: 518550 - RNA, 19 nt, Homo sapiens
  misc_RNA (1)...(19): siRNA sense strand
uggcaacuguggcaaaguc

SEQ ID NO: 518551 - RNA, 19 nt, Homo sapiens
  misc_RNA (1)...(19): siRNA sense strand
guaauucugggucacuguu

SEQ ID NO: 518552 - RNA, 19 nt, Homo sapiens
  misc_RNA (1)...(19): siRNA sense strand
gcacaggaaugucgaagca

SEQ ID NO: 518553 - RNA, 19 nt, Homo sapiens
  misc_RNA (1)...(19): siRNA sense strand
gcccaacccugguguggua

SEQ ID NO: 518554 - RNA, 19 nt, Homo sapiens
  misc_RNA (1)...(19): siRNA sense strand
gaccaagacuguggaguug

SEQ ID NO: 518555 - RNA, 19 nt, Homo sapiens
  misc_RNA (1)...(19): siRNA sense strand
gacggacccuguugucaaa

SEQ ID NO: 518556 - RNA, 19 nt, Homo sapiens
  misc_RNA (1)...(19): siRNA sense strand
ucaggacgaucucccaauu

SEQ ID NO: 518557 - RNA, 19 nt, Homo sapiens
  misc_RNA (1)...(19): siRNA sense strand
gauugugacuugccugaau

SEQ ID NO: 518558 - RNA, 19 nt, Homo sapiens
  misc_RNA (1)...(19): siRNA sense strand
gaucuacucugggagacaa

SEQ ID NO: 518559 - RNA, 19 nt, Homo sapiens
  misc_RNA (1)...(19): siRNA sense strand
gggaaucuguacacacuca

SEQ ID NO: 518560 - RNA, 19 nt, Homo sapiens
  misc_RNA (1)...(19): siRNA sense strand
acaggaaugucgaagcaaa

SEQ ID NO: 518561 - RNA, 19 nt, Homo sapiens
  misc_RNA (1)...(19): siRNA sense strand
gcccuggccugguguguau

SEQ ID NO: 518562 - RNA, 19 nt, Homo sapiens
  misc_RNA (1)...(19): siRNA sense strand
ggacccaccugccaguaca

SEQ ID NO: 518563 - RNA, 19 nt, Homo sapiens
  misc_RNA (1)...(19): siRNA sense strand
gucgaucccugcugugauu

SEQ ID NO: 518564 - RNA, 19 nt, Homo sapiens
  misc_RNA (1)...(19): siRNA sense strand
ucaggguccucccauuauu

SEQ ID NO: 518565 - RNA, 19 nt, Homo sapiens
  misc_RNA (1)...(19): siRNA sense strand
caucuguucuccugacuuc

SEQ ID NO: 518566 - RNA, 19 nt, Homo sapiens
  misc_RNA (1)...(19): siRNA sense strand
gcuggugacugguacuuca

SEQ ID NO: 518567 - RNA, 19 nt, Homo sapiens
  misc_RNA (1)...(19): siRNA sense strand
acucggaggcccagaaaua

SEQ ID NO: 518568 - RNA, 19 nt, Homo sapiens
  misc_RNA (1)...(19): siRNA sense strand
gcgggaaucuguacacacu

SEQ ID NO: 518569 - RNA, 19 nt, Homo sapiens
  misc_RNA (1)...(19): siRNA sense strand
ccuggccgcucccaaauau

SEQ ID NO: 518570 - RNA, 19 nt, Homo sapiens
  misc_RNA (1)...(19): siRNA sense strand
ggcgggaugugguaacaga

SEQ ID NO: 518571 - RNA, 19 nt, Homo sapiens
  misc_RNA (1)...(19): siRNA sense strand
gggagacaauagaugugaa

SEQ ID NO: 518572 - RNA, 19 nt, Homo sapiens
  misc_RNA (1)...(19): siRNA sense strand
gaggccaggugcacagugu

SEQ ID NO: 518573 - RNA, 19 nt, Homo sapiens
  misc_RNA (1)...(19): siRNA sense strand
cuccauagcccaugaguug

SEQ ID NO: 518574 - RNA, 19 nt, Homo sapiens
  misc_RNA (1)...(19): siRNA sense strand
caggacgaucucccaauua

SEQ ID NO: 518575 - RNA, 19 nt, Homo sapiens
  misc_RNA (1)...(19): siRNA sense strand
gaaugggacugagcugaac

SEQ ID NO: 518576 - RNA, 19 nt, Homo sapiens
  misc_RNA (1)...(19): siRNA sense strand
ggacacacuuuggagaacu

SEQ ID NO: 518577 - RNA, 19 nt, Homo sapiens
  misc_RNA (1)...(19): siRNA sense strand
caggaggugugaacaugga

SEQ ID NO: 518578 - RNA, 19 nt, Homo sapiens
  misc_RNA (1)...(19): siRNA sense strand
cuucaggguccucccauua

SEQ ID NO: 518579 - RNA, 19 nt, Homo sapiens
  misc_RNA (1)...(19): siRNA sense strand
gcauggccauucagaacuc

SEQ ID NO: 518580 - RNA, 19 nt, Homo sapiens
  misc_RNA (1)...(19): siRNA sense strand
ggagacaauagaugugaau

SEQ ID NO: 518581 - RNA, 19 nt, Homo sapiens
  misc_RNA (1)...(19): siRNA sense strand
ccaaucuggucccucugaa

SEQ ID NO: 518582 - RNA, 19 nt, Homo sapiens
  misc_RNA (1)...(19): siRNA sense strand
agaccaagacuguggaguu

SEQ ID NO: 518583 - RNA, 19 nt, Homo sapiens
  misc_RNA (1)...(19): siRNA sense strand
ugaaugggacugagcugaa

SEQ ID NO: 518584 - RNA, 19 nt, Homo sapiens
  misc_RNA (1)...(19): siRNA sense strand
cccuagagaugccauuugu

SEQ ID NO: 518585 - RNA, 19 nt, Homo sapiens
  misc_RNA (1)...(19): siRNA sense strand
gggccuggaccaugauuug

SEQ ID NO: 518586 - RNA, 19 nt, Homo sapiens
  misc_RNA (1)...(19): siRNA sense strand
gagcuggcgggaaucugua

SEQ ID NO: 518587 - RNA, 19 nt, Homo sapiens
  misc_RNA (1)...(19): siRNA sense strand
aggacgaucucccaauuag

SEQ ID NO: 518588 - RNA, 19 nt, Homo sapiens
  misc_RNA (1)...(19): siRNA sense strand
uccuggagcugcuacagaa

SEQ ID NO: 518589 - RNA, 19 nt, Homo sapiens
  misc_RNA (1)...(19): siRNA sense strand
gaggcgggaugugguaaca

SEQ ID NO: 518590 - RNA, 19 nt, Homo sapiens
  misc_RNA (1)...(19): siRNA sense strand
ggugacugguacuucauuc

SEQ ID NO: 518591 - RNA, 19 nt, Homo sapiens
  misc_RNA (1)...(19): siRNA sense strand
gcuaaaccgcacacuggaa

SEQ ID NO: 518592 - RNA, 19 nt, Homo sapiens
  misc_RNA (1)...(19): siRNA sense strand
ccagaaauaccgggacuuc

SEQ ID NO: 518593 - RNA, 19 nt, Homo sapiens
  misc_RNA (1)...(19): siRNA sense strand
gcuccuggguguccaucug

SEQ ID NO: 518594 - RNA, 19 nt, Homo sapiens
  misc_RNA (1)...(19): siRNA sense strand
cagaggggauugugacuug

SEQ ID NO: 518595 - RNA, 19 nt, Homo sapiens
  misc_RNA (1)...(19): siRNA sense strand
gggcauggccauucagaac

SEQ ID NO: 518596 - RNA, 19 nt, Homo sapiens
  misc_RNA (1)...(19): siRNA sense strand
gcaggcagagucagagaag

SEQ ID NO: 518597 - RNA, 19 nt, Homo sapiens
  misc_RNA (1)...(19): siRNA sense strand
caggguccucccauuauuu

SEQ ID NO: 518598 - RNA, 19 nt, Homo sapiens
  misc_RNA (1)...(19): siRNA sense strand
gaucccugcugugauucuu

SEQ ID NO: 518599 - RNA, 19 nt, Homo sapiens
  misc_RNA (1)...(19): siRNA sense strand
gcuacagaauagggaguug

SEQ ID NO: 518600 - RNA, 19 nt, Homo sapiens
  misc_RNA (1)...(19): siRNA sense strand
cugcaccacucagcucaaa

SEQ ID NO: 518601 - RNA, 19 nt, Homo sapiens
  misc_RNA (1)...(19): siRNA sense strand
gcaacaggcacugcuacug

SEQ ID NO: 518602 - RNA, 19 nt, Homo sapiens
  misc_RNA (1)...(19): siRNA sense strand
gacacacuuuggagaacug

SEQ ID NO: 518603 - RNA, 19 nt, Homo sapiens
  misc_RNA (1)...(19): siRNA sense strand
ucagccuccuggucuuauu

SEQ ID NO: 518604 - RNA, 19 nt, Homo sapiens
  misc_RNA (1)...(19): siRNA sense strand
ggaccugggcagugaugug

SEQ ID NO: 518605 - RNA, 19 nt, Homo sapiens
  misc_RNA (1)...(19): siRNA sense strand
cuggagcugcuacagaaua

SEQ ID NO: 518606 - RNA, 19 nt, Homo sapiens
  misc_RNA (1)...(19): siRNA sense strand
ggagcuggacggugacagu

SEQ ID NO: 518607 - RNA, 19 nt, Homo sapiens
  misc_RNA (1)...(19): siRNA sense strand
ggacccuguugucaaaauu

SEQ ID NO: 518608 - RNA, 19 nt, Homo sapiens
  misc_RNA (1)...(19): siRNA sense strand
agaaauaccgggacuucca

SEQ ID NO: 518609 - RNA, 19 nt, Homo sapiens
  misc_RNA (1)...(19): siRNA sense strand
gacugguacuucauucucu

SEQ ID NO: 518610 - RNA, 19 nt, Homo sapiens
  misc_RNA (1)...(19): siRNA sense strand
ucacucggaggcccagaaa

SEQ ID NO: 518611 - RNA, 19 nt, Homo sapiens
  misc_RNA (1)...(19): siRNA sense strand
ccucagccuccuggucuua

SEQ ID NO: 518612 - RNA, 19 nt, Homo sapiens
  misc_RNA (1)...(19): siRNA sense strand
caaauauagguggcacuga

SEQ ID NO: 518613 - RNA, 19 nt, Homo sapiens
  misc_RNA (1)...(19): siRNA sense strand
uggagcugcuacagaauag

SEQ ID NO: 518614 - RNA, 19 nt, Homo sapiens
  misc_RNA (1)...(19): siRNA sense strand
caugauuugccugggaaua

SEQ ID NO: 518615 - RNA, 19 nt, Homo sapiens
  misc_RNA (1)...(19): siRNA sense strand
gcaccacucagcucaaagc

SEQ ID NO: 518616 - RNA, 19 nt, Homo sapiens
  misc_RNA (1)...(19): siRNA sense strand
ucccugcugugauucuuug

SEQ ID NO: 518617 - RNA, 19 nt, Homo sapiens
  misc_RNA (1)...(19): siRNA sense strand
ccuccuccauagcccauga

SEQ ID NO: 518618 - RNA, 19 nt, Homo sapiens
  misc_RNA (1)...(19): siRNA sense strand
gggacacacuuuggagaac

SEQ ID NO: 518619 - RNA, 19 nt, Homo sapiens
  misc_RNA (1)...(19): siRNA sense strand
ggcuggcagugucguccua

SEQ ID NO: 518620 - RNA, 19 nt, Homo sapiens
  misc_RNA (1)...(19): siRNA sense strand
caucugacggacccuguug

SEQ ID NO: 518621 - RNA, 19 nt, Homo sapiens
  misc_RNA (1)...(19): siRNA sense strand
gaacaugucugacuggauu

SEQ ID NO: 518622 - RNA, 19 nt, Homo sapiens
  misc_RNA (1)...(19): siRNA sense strand
ggaaggagcugaccauagu

SEQ ID NO: 518623 - RNA, 19 nt, Homo sapiens
  misc_RNA (1)...(19): siRNA sense strand
gaaccugcuuggccacuau

SEQ ID NO: 518624 - RNA, 19 nt, Homo sapiens
  misc_RNA (1)...(19): siRNA sense strand
gcuauaugacccuguagua

SEQ ID NO: 518625 - RNA, 19 nt, Homo sapiens
  misc_RNA (1)...(19): siRNA sense strand
uaauggagaccuugacuug

SEQ ID NO: 518626 - RNA, 19 nt, Homo sapiens
  misc_RNA (1)...(19): siRNA sense strand
ggugcuauaugacccugua

SEQ ID NO: 518627 - RNA, 19 nt, Homo sapiens
  misc_RNA (1)...(19): siRNA sense strand
acucaguggugcuauauga

SEQ ID NO: 518628 - RNA, 19 nt, Homo sapiens
  misc_RNA (1)...(19): siRNA sense strand
acaacucaguggugcuaua

SEQ ID NO: 518629 - RNA, 19 nt, Homo sapiens
  misc_RNA (1)...(19): siRNA sense strand
cugcuuggccacuaucuua

SEQ ID NO: 518630 - RNA, 19 nt, Homo sapiens
  misc_RNA (1)...(19): siRNA sense strand
guguacagcuuggacuuug

SEQ ID NO: 518631 - RNA, 19 nt, Homo sapiens
  misc_RNA (1)...(19): siRNA sense strand
ugauaaagcgagugcagaa

SEQ ID NO: 518632 - RNA, 19 nt, Homo sapiens
  misc_RNA (1)...(19): siRNA sense strand
cgggcaaccucggagcuua

SEQ ID NO: 518633 - RNA, 19 nt, Homo sapiens
  misc_RNA (1)...(19): siRNA sense strand
caugguggcuguguuugga

SEQ ID NO: 518634 - RNA, 19 nt, Homo sapiens
  misc_RNA (1)...(19): siRNA sense strand
caacucaguggugcuauau

SEQ ID NO: 518635 - RNA, 19 nt, Homo sapiens
  misc_RNA (1)...(19): siRNA sense strand
ggacuuuggugggcaucug

SEQ ID NO: 518636 - RNA, 19 nt, Homo sapiens
  misc_RNA (1)...(19): siRNA sense strand
gcucuggccuguggaacau

SEQ ID NO: 518637 - RNA, 19 nt, Homo sapiens
  misc_RNA (1)...(19): siRNA sense strand
cacgcuggcuugagggaaa

SEQ ID NO: 518638 - RNA, 19 nt, Homo sapiens
  misc_RNA (1)...(19): siRNA sense strand
gucccgauguccuggugua

SEQ ID NO: 518639 - RNA, 19 nt, Homo sapiens
  misc_RNA (1)...(19): siRNA sense strand
auggagaccuugacuugga

SEQ ID NO: 518640 - RNA, 19 nt, Homo sapiens
  misc_RNA (1)...(19): siRNA sense strand
cauaguggcaggugcuguu

SEQ ID NO: 518641 - RNA, 19 nt, Homo sapiens
  misc_RNA (1)...(19): siRNA sense strand
ggccacuucugggagcuuu

SEQ ID NO: 518642 - RNA, 19 nt, Homo sapiens
  misc_RNA (1)...(19): siRNA sense strand
cuuauacuccucccaguga

SEQ ID NO: 518643 - RNA, 19 nt, Homo sapiens
  misc_RNA (1)...(19): siRNA sense strand
gguguacagcuuggacuuu

SEQ ID NO: 518644 - RNA, 19 nt, Homo sapiens
  misc_RNA (1)...(19): siRNA sense strand
ggcaaccucggagcuuaua

SEQ ID NO: 518645 - RNA, 19 nt, Homo sapiens
  misc_RNA (1)...(19): siRNA sense strand
ggguacggccagagccuaa

SEQ ID NO: 518646 - RNA, 19 nt, Homo sapiens
  misc_RNA (1)...(19): siRNA sense strand
gggcaaccucggagcuuau

SEQ ID NO: 518647 - RNA, 19 nt, Homo sapiens
  misc_RNA (1)...(19): siRNA sense strand
guacggccagagccuaaug

SEQ ID NO: 518648 - RNA, 19 nt, Homo sapiens
  misc_RNA (1)...(19): siRNA sense strand
gaaggagcugaccauagug

SEQ ID NO: 518649 - RNA, 19 nt, Homo sapiens
  misc_RNA (1)...(19): siRNA sense strand
uaaagcgagugcagaaccu

SEQ ID NO: 518650 - RNA, 19 nt, Homo sapiens
  misc_RNA (1)...(19): siRNA sense strand
ggaacaugucugacuggau

SEQ ID NO: 518651 - RNA, 19 nt, Homo sapiens
  misc_RNA (1)...(19): siRNA sense strand
caggugcuguuuccaacca

SEQ ID NO: 518652 - RNA, 19 nt, Homo sapiens
  misc_RNA (1)...(19): siRNA sense strand
gaacaugucugacuggauu

SEQ ID NO: 518653 - RNA, 19 nt, Homo sapiens
  misc_RNA (1)...(19): siRNA sense strand
ggaaggagcugaccauagu

SEQ ID NO: 518654 - RNA, 19 nt, Homo sapiens
  misc_RNA (1)...(19): siRNA sense strand
gaaccugcuuggccacuau

SEQ ID NO: 518655 - RNA, 19 nt, Homo sapiens
  misc_RNA (1)...(19): siRNA sense strand
gcuauaugacccuguagua

SEQ ID NO: 518656 - RNA, 19 nt, Homo sapiens
  misc_RNA (1)...(19): siRNA sense strand
uaauggagaccuugacuug

SEQ ID NO: 518657 - RNA, 19 nt, Homo sapiens
  misc_RNA (1)...(19): siRNA sense strand
ggugcuauaugacccugua

SEQ ID NO: 518658 - RNA, 19 nt, Homo sapiens
  misc_RNA (1)...(19): siRNA sense strand
acucaguggugcuauauga

SEQ ID NO: 518659 - RNA, 19 nt, Homo sapiens
  misc_RNA (1)...(19): siRNA sense strand
acaacucaguggugcuaua

SEQ ID NO: 518660 - RNA, 19 nt, Homo sapiens
  misc_RNA (1)...(19): siRNA sense strand
cugcuuggccacuaucuua

SEQ ID NO: 518661 - RNA, 19 nt, Homo sapiens
  misc_RNA (1)...(19): siRNA sense strand
guguacagcuuggacuuug

SEQ ID NO: 518662 - RNA, 19 nt, Homo sapiens
  misc_RNA (1)...(19): siRNA sense strand
ugauaaagcgagugcagaa

SEQ ID NO: 518663 - RNA, 19 nt, Homo sapiens
  misc_RNA (1)...(19): siRNA sense strand
cgggcaaccucggagcuua

SEQ ID NO: 518664 - RNA, 19 nt, Homo sapiens
  misc_RNA (1)...(19): siRNA sense strand
caugguggcuguguuugga

SEQ ID NO: 518665 - RNA, 19 nt, Homo sapiens
  misc_RNA (1)...(19): siRNA sense strand
caacucaguggugcuauau

SEQ ID NO: 518666 - RNA, 19 nt, Homo sapiens
  misc_RNA (1)...(19): siRNA sense strand
ggacuuuggugggcaucug

SEQ ID NO: 518667 - RNA, 19 nt, Homo sapiens
  misc_RNA (1)...(19): siRNA sense strand
gcucuggccuguggaacau

SEQ ID NO: 518668 - RNA, 19 nt, Homo sapiens
  misc_RNA (1)...(19): siRNA sense strand
cacgcuggcuugagggaaa

SEQ ID NO: 518669 - RNA, 19 nt, Homo sapiens
  misc_RNA (1)...(19): siRNA sense strand
gucccgauguccuggugua

SEQ ID NO: 518670 - RNA, 19 nt, Homo sapiens
  misc_RNA (1)...(19): siRNA sense strand
auggagaccuugacuugga

SEQ ID NO: 518671 - RNA, 19 nt, Homo sapiens
  misc_RNA (1)...(19): siRNA sense strand
cauaguggcaggugcuguu

SEQ ID NO: 518672 - RNA, 19 nt, Homo sapiens
  misc_RNA (1)...(19): siRNA sense strand
ggccacuucugggagcuuu

SEQ ID NO: 518673 - RNA, 19 nt, Homo sapiens
  misc_RNA (1)...(19): siRNA sense strand
ggauguguacccgguugua

SEQ ID NO: 518674 - RNA, 19 nt, Homo sapiens
  misc_RNA (1)...(19): siRNA sense strand
cuuauacuccucccaguga

SEQ ID NO: 518675 - RNA, 19 nt, Homo sapiens
  misc_RNA (1)...(19): siRNA sense strand
gguguacagcuuggacuuu

SEQ ID NO: 518676 - RNA, 19 nt, Homo sapiens
  misc_RNA (1)...(19): siRNA sense strand
ggcaaccucggagcuuaua

SEQ ID NO: 518677 - RNA, 19 nt, Homo sapiens
  misc_RNA (1)...(19): siRNA sense strand
ggguacggccagagccuaa

SEQ ID NO: 518678 - RNA, 19 nt, Homo sapiens
  misc_RNA (1)...(19): siRNA sense strand
gggcaaccucggagcuuau

SEQ ID NO: 518679 - RNA, 19 nt, Homo sapiens
  misc_RNA (1)...(19): siRNA sense strand
guacggccagagccuaaug

SEQ ID NO: 518680 - RNA, 19 nt, Homo sapiens
  misc_RNA (1)...(19): siRNA sense strand
gaaggagcugaccauagug

SEQ ID NO: 518681 - RNA, 19 nt, Homo sapiens
  misc_RNA (1)...(19): siRNA sense strand
uaaagcgagugcagaaccu

SEQ ID NO: 518682 - RNA, 19 nt, Homo sapiens
  misc_RNA (1)...(19): siRNA sense strand
gcacgucccaccccguuuu

SEQ ID NO: 518683 - RNA, 19 nt, Homo sapiens
  misc_RNA (1)...(19): siRNA sense strand
ggaacaugucugacuggau

SEQ ID NO: 518684 - RNA, 19 nt, Homo sapiens
  misc_RNA (1)...(19): siRNA sense strand
caggugcuguuuccaacca

SEQ ID NO: 518685 - RNA, 19 nt, Homo sapiens
  misc_RNA (1)...(19): siRNA sense strand
aaguugagcugacucgaua

SEQ ID NO: 518686 - RNA, 19 nt, Homo sapiens
  misc_RNA (1)...(19): siRNA sense strand
ggaugauucugccuccaaa

SEQ ID NO: 518687 - RNA, 19 nt, Homo sapiens
  misc_RNA (1)...(19): siRNA sense strand
gcacagagaauugccuuca

SEQ ID NO: 518688 - RNA, 19 nt, Homo sapiens
  misc_RNA (1)...(19): siRNA sense strand
ugugagaacuguggaauca

SEQ ID NO: 518689 - RNA, 19 nt, Homo sapiens
  misc_RNA (1)...(19): siRNA sense strand
gagccgaggguguggagua

SEQ ID NO: 518690 - RNA, 19 nt, Homo sapiens
  misc_RNA (1)...(19): siRNA sense strand
caucuuggcccuaccuuga

SEQ ID NO: 518691 - RNA, 19 nt, Homo sapiens
  misc_RNA (1)...(19): siRNA sense strand
gcuccugggugcugugaga

SEQ ID NO: 518692 - RNA, 19 nt, Homo sapiens
  misc_RNA (1)...(19): siRNA sense strand
caagaggauuguggccauu

SEQ ID NO: 518693 - RNA, 19 nt, Homo sapiens
  misc_RNA (1)...(19): siRNA sense strand
gacaggauccgaagcaaag

SEQ ID NO: 518694 - RNA, 19 nt, Homo sapiens
  misc_RNA (1)...(19): siRNA sense strand
gaggagaacaaggaugauu

SEQ ID NO: 518695 - RNA, 19 nt, Homo sapiens
  misc_RNA (1)...(19): siRNA sense strand
ggagacaggauccgaagca

SEQ ID NO: 518696 - RNA, 19 nt, Homo sapiens
  misc_RNA (1)...(19): siRNA sense strand
agaccaaggcugacacuga

SEQ ID NO: 518697 - RNA, 19 nt, Homo sapiens
  misc_RNA (1)...(19): siRNA sense strand
gagacaggauccgaagcaa

SEQ ID NO: 518698 - RNA, 19 nt, Homo sapiens
  misc_RNA (1)...(19): siRNA sense strand
gcucagacaccuauuacca

SEQ ID NO: 518699 - RNA, 19 nt, Homo sapiens
  misc_RNA (1)...(19): siRNA sense strand
gacgcucagacaccuauua

SEQ ID NO: 518700 - RNA, 19 nt, Homo sapiens
  misc_RNA (1)...(19): siRNA sense strand
acaaggaggagaacaagga

SEQ ID NO: 518701 - RNA, 19 nt, Homo sapiens
  misc_RNA (1)...(19): siRNA sense strand
guggugaggucaggaagga

SEQ ID NO: 518702 - RNA, 19 nt, Homo sapiens
  misc_RNA (1)...(19): siRNA sense strand
ggacaaggaggagaacaag

SEQ ID NO: 518703 - RNA, 19 nt, Homo sapiens
  misc_RNA (1)...(19): siRNA sense strand
uguugcagcuuccacagaa

SEQ ID NO: 518704 - RNA, 19 nt, Homo sapiens
  misc_RNA (1)...(19): siRNA sense strand
caaauuggccccagaggaa

SEQ ID NO: 518705 - RNA, 19 nt, Homo sapiens
  misc_RNA (1)...(19): siRNA sense strand
cacagagaauugccuucaa

SEQ ID NO: 518706 - RNA, 19 nt, Homo sapiens
  misc_RNA (1)...(19): siRNA sense strand
gagauacagcagucugguu

SEQ ID NO: 518707 - RNA, 19 nt, Homo sapiens
  misc_RNA (1)...(19): siRNA sense strand
ccucuucgacuucaaacaa

SEQ ID NO: 518708 - RNA, 19 nt, Homo sapiens
  misc_RNA (1)...(19): siRNA sense strand
acagagaauugccuucaac

SEQ ID NO: 518709 - RNA, 19 nt, Homo sapiens
  misc_RNA (1)...(19): siRNA sense strand
ucaaaacguugugcaaaga

SEQ ID NO: 518710 - RNA, 19 nt, Homo sapiens
  misc_RNA (1)...(19): siRNA sense strand
ugauucugccuccaaauug

SEQ ID NO: 518711 - RNA, 19 nt, Homo sapiens
  misc_RNA (1)...(19): siRNA sense strand
gaccauacccaggcuccaa

SEQ ID NO: 518712 - RNA, 19 nt, Homo sapiens
  misc_RNA (1)...(19): siRNA sense strand
ccaaaggcagcggcucaaa

SEQ ID NO: 518713 - RNA, 19 nt, Homo sapiens
  misc_RNA (1)...(19): siRNA sense strand
aggaggagaacaaggauga

SEQ ID NO: 518714 - RNA, 19 nt, Homo sapiens
  misc_RNA (1)...(19): siRNA sense strand
agacaggauccgaagcaaa

SEQ ID NO: 518715 - RNA, 19 nt, Homo sapiens
  misc_RNA (1)...(19): siRNA sense strand
ccagcaagaagcgaaagaa

SEQ ID NO: 518716 - RNA, 19 nt, Homo sapiens
  misc_RNA (1)...(19): siRNA sense strand
aagcaaaguugagcugacu

SEQ ID NO: 518717 - RNA, 19 nt, Homo sapiens
  misc_RNA (1)...(19): siRNA sense strand
gccuggcacugaccuugug

SEQ ID NO: 518718 - RNA, 19 nt, Homo sapiens
  misc_RNA (1)...(19): siRNA sense strand
gaacccgcuuccgagauac

SEQ ID NO: 518719 - RNA, 19 nt, Homo sapiens
  misc_RNA (1)...(19): siRNA sense strand
uggcacugaccuuguguuu

SEQ ID NO: 518720 - RNA, 19 nt, Homo sapiens
  misc_RNA (1)...(19): siRNA sense strand
aaguugagcugacucgaua

SEQ ID NO: 518721 - RNA, 19 nt, Homo sapiens
  misc_RNA (1)...(19): siRNA sense strand
ggaugauucugccuccaaa

SEQ ID NO: 518722 - RNA, 19 nt, Homo sapiens
  misc_RNA (1)...(19): siRNA sense strand
gcacagagaauugccuuca

SEQ ID NO: 518723 - RNA, 19 nt, Homo sapiens
  misc_RNA (1)...(19): siRNA sense strand
ugugagaacuguggaauca

SEQ ID NO: 518724 - RNA, 19 nt, Homo sapiens
  misc_RNA (1)...(19): siRNA sense strand
gagccgaggguguggagua

SEQ ID NO: 518725 - RNA, 19 nt, Homo sapiens
  misc_RNA (1)...(19): siRNA sense strand
caucuuggcccuaccuuga

SEQ ID NO: 518726 - RNA, 19 nt, Homo sapiens
  misc_RNA (1)...(19): siRNA sense strand
gcuccugggugcugugaga

SEQ ID NO: 518727 - RNA, 19 nt, Homo sapiens
  misc_RNA (1)...(19): siRNA sense strand
caagaggauuguggccauu

SEQ ID NO: 518728 - RNA, 19 nt, Homo sapiens
  misc_RNA (1)...(19): siRNA sense strand
gacaggauccgaagcaaag

SEQ ID NO: 518729 - RNA, 19 nt, Homo sapiens
  misc_RNA (1)...(19): siRNA sense strand
gaggagaacaaggaugauu

SEQ ID NO: 518730 - RNA, 19 nt, Homo sapiens
  misc_RNA (1)...(19): siRNA sense strand
ggagacaggauccgaagca

SEQ ID NO: 518731 - RNA, 19 nt, Homo sapiens
  misc_RNA (1)...(19): siRNA sense strand
agaccaaggcugacacuga

SEQ ID NO: 518732 - RNA, 19 nt, Homo sapiens
  misc_RNA (1)...(19): siRNA sense strand
gagacaggauccgaagcaa

SEQ ID NO: 518733 - RNA, 19 nt, Homo sapiens
  misc_RNA (1)...(19): siRNA sense strand
gcucagacaccuauuacca

SEQ ID NO: 518734 - RNA, 19 nt, Homo sapiens
  misc_RNA (1)...(19): siRNA sense strand
gacgcucagacaccuauua

SEQ ID NO: 518735 - RNA, 19 nt, Homo sapiens
  misc_RNA (1)...(19): siRNA sense strand
acaaggaggagaacaagga

SEQ ID NO: 518736 - RNA, 19 nt, Homo sapiens
  misc_RNA (1)...(19): siRNA sense strand
guggugaggucaggaagga

SEQ ID NO: 518737 - RNA, 19 nt, Homo sapiens
  misc_RNA (1)...(19): siRNA sense strand
ggacaaggaggagaacaag

SEQ ID NO: 518738 - RNA, 19 nt, Homo sapiens
  misc_RNA (1)...(19): siRNA sense strand
uguugcagcuuccacagaa

SEQ ID NO: 518739 - RNA, 19 nt, Homo sapiens
  misc_RNA (1)...(19): siRNA sense strand
caaauuggccccagaggaa

SEQ ID NO: 518740 - RNA, 19 nt, Homo sapiens
  misc_RNA (1)...(19): siRNA sense strand
cacagagaauugccuucaa

SEQ ID NO: 518741 - RNA, 19 nt, Homo sapiens
  misc_RNA (1)...(19): siRNA sense strand
gagauacagcagucugguu

SEQ ID NO: 518742 - RNA, 19 nt, Homo sapiens
  misc_RNA (1)...(19): siRNA sense strand
ccucuucgacuucaaacaa

SEQ ID NO: 518743 - RNA, 19 nt, Homo sapiens
  misc_RNA (1)...(19): siRNA sense strand
acagagaauugccuucaac

SEQ ID NO: 518744 - RNA, 19 nt, Homo sapiens
  misc_RNA (1)...(19): siRNA sense strand
ucaaaacguugugcaaaga

SEQ ID NO: 518745 - RNA, 19 nt, Homo sapiens
  misc_RNA (1)...(19): siRNA sense strand
ugauucugccuccaaauug

SEQ ID NO: 518746 - RNA, 19 nt, Homo sapiens
  misc_RNA (1)...(19): siRNA sense strand
gaccauacccaggcuccaa

SEQ ID NO: 518747 - RNA, 19 nt, Homo sapiens
  misc_RNA (1)...(19): siRNA sense strand
ccaaaggcagcggcucaaa

SEQ ID NO: 518748 - RNA, 19 nt, Homo sapiens
  misc_RNA (1)...(19): siRNA sense strand
aggaggagaacaaggauga

SEQ ID NO: 518749 - RNA, 19 nt, Homo sapiens
  misc_RNA (1)...(19): siRNA sense strand
agacaggauccgaagcaaa

SEQ ID NO: 518750 - RNA, 19 nt, Homo sapiens
  misc_RNA (1)...(19): siRNA sense strand
ccagcaagaagcgaaagaa

SEQ ID NO: 518751 - RNA, 19 nt, Homo sapiens
  misc_RNA (1)...(19): siRNA sense strand
aagcaaaguugagcugacu

SEQ ID NO: 518752 - RNA, 19 nt, Homo sapiens
  misc_RNA (1)...(19): siRNA sense strand
gccuggcacugaccuugug

SEQ ID NO: 518753 - RNA, 19 nt, Homo sapiens
  misc_RNA (1)...(19): siRNA sense strand
gaacccgcuuccgagauac

SEQ ID NO: 518754 - RNA, 19 nt, Homo sapiens
  misc_RNA (1)...(19): siRNA sense strand
uggcacugaccuuguguuu

SEQ ID NO: 518755 - RNA, 19 nt, Homo sapiens
  misc_RNA (1)...(19): siRNA sense strand
gaagauggauguaaagugu

SEQ ID NO: 518756 - RNA, 19 nt, Homo sapiens
  misc_RNA (1)...(19): siRNA sense strand
aaguugagcugacucgaua

SEQ ID NO: 518757 - RNA, 19 nt, Homo sapiens
  misc_RNA (1)...(19): siRNA sense strand
ccacgaggauggccuggaa

SEQ ID NO: 518758 - RNA, 19 nt, Homo sapiens
  misc_RNA (1)...(19): siRNA sense strand
gaagggaagauggauguaa

SEQ ID NO: 518759 - RNA, 19 nt, Homo sapiens
  misc_RNA (1)...(19): siRNA sense strand
ggaugauucugccuccaaa

SEQ ID NO: 518760 - RNA, 19 nt, Homo sapiens
  misc_RNA (1)...(19): siRNA sense strand
aagggaagauggauguaaa

SEQ ID NO: 518761 - RNA, 19 nt, Homo sapiens
  misc_RNA (1)...(19): siRNA sense strand
gcacagagaauugccuuca

SEQ ID NO: 518762 - RNA, 19 nt, Homo sapiens
  misc_RNA (1)...(19): siRNA sense strand
ugugagaacuguggaauca

SEQ ID NO: 518763 - RNA, 19 nt, Homo sapiens
  misc_RNA (1)...(19): siRNA sense strand
gagccgaggguguggagua

SEQ ID NO: 518764 - RNA, 19 nt, Homo sapiens
  misc_RNA (1)...(19): siRNA sense strand
caucuuggcccuaccuuga

SEQ ID NO: 518765 - RNA, 19 nt, Homo sapiens
  misc_RNA (1)...(19): siRNA sense strand
gcuccugggugcugugaga

SEQ ID NO: 518766 - RNA, 19 nt, Homo sapiens
  misc_RNA (1)...(19): siRNA sense strand
ggaagauggauguaaagug

SEQ ID NO: 518767 - RNA, 19 nt, Homo sapiens
  misc_RNA (1)...(19): siRNA sense strand
caagaggauuguggccauu

SEQ ID NO: 518768 - RNA, 19 nt, Homo sapiens
  misc_RNA (1)...(19): siRNA sense strand
gacaggauccgaagcaaag

SEQ ID NO: 518769 - RNA, 19 nt, Homo sapiens
  misc_RNA (1)...(19): siRNA sense strand
gaggagaacaaggaugauu

SEQ ID NO: 518770 - RNA, 19 nt, Homo sapiens
  misc_RNA (1)...(19): siRNA sense strand
agaccaaggcugacacuga

SEQ ID NO: 518771 - RNA, 19 nt, Homo sapiens
  misc_RNA (1)...(19): siRNA sense strand
ggagacaggauccgaagca

SEQ ID NO: 518772 - RNA, 19 nt, Homo sapiens
  misc_RNA (1)...(19): siRNA sense strand
gcucagacaccuauuacca

SEQ ID NO: 518773 - RNA, 19 nt, Homo sapiens
  misc_RNA (1)...(19): siRNA sense strand
gagacaggauccgaagcaa

SEQ ID NO: 518774 - RNA, 19 nt, Homo sapiens
  misc_RNA (1)...(19): siRNA sense strand
gggaagggaagauggaugu

SEQ ID NO: 518775 - RNA, 19 nt, Homo sapiens
  misc_RNA (1)...(19): siRNA sense strand
acaaggaggagaacaagga

SEQ ID NO: 518776 - RNA, 19 nt, Homo sapiens
  misc_RNA (1)...(19): siRNA sense strand
gacgcucagacaccuauua

SEQ ID NO: 518777 - RNA, 19 nt, Homo sapiens
  misc_RNA (1)...(19): siRNA sense strand
guggugaggucaggaagga

SEQ ID NO: 518778 - RNA, 19 nt, Homo sapiens
  misc_RNA (1)...(19): siRNA sense strand
ggacaaggaggagaacaag

SEQ ID NO: 518779 - RNA, 19 nt, Homo sapiens
  misc_RNA (1)...(19): siRNA sense strand
uguugcagcuuccacagaa

SEQ ID NO: 518780 - RNA, 19 nt, Homo sapiens
  misc_RNA (1)...(19): siRNA sense strand
caaauuggccccagaggaa

SEQ ID NO: 518781 - RNA, 19 nt, Homo sapiens
  misc_RNA (1)...(19): siRNA sense strand
cacagagaauugccuucaa

SEQ ID NO: 518782 - RNA, 19 nt, Homo sapiens
  misc_RNA (1)...(19): siRNA sense strand
gagauacagcagucugguu

SEQ ID NO: 518783 - RNA, 19 nt, Homo sapiens
  misc_RNA (1)...(19): siRNA sense strand
ccucuucgacuucaaacaa

SEQ ID NO: 518784 - RNA, 19 nt, Homo sapiens
  misc_RNA (1)...(19): siRNA sense strand
acagagaauugccuucaac

SEQ ID NO: 518785 - RNA, 19 nt, Homo sapiens
  misc_RNA (1)...(19): siRNA sense strand
ggaagggaagauggaugua

SEQ ID NO: 518786 - RNA, 19 nt, Homo sapiens
  misc_RNA (1)...(19): siRNA sense strand
ucaaaacguugugcaaaga

SEQ ID NO: 518787 - RNA, 19 nt, Homo sapiens
  misc_RNA (1)...(19): siRNA sense strand
gcccuuccucacagaguua

SEQ ID NO: 518788 - RNA, 19 nt, Homo sapiens
  misc_RNA (1)...(19): siRNA sense strand
uggguguccugcagaagaa

SEQ ID NO: 518789 - RNA, 19 nt, Homo sapiens
  misc_RNA (1)...(19): siRNA sense strand
ugauucugccuccaaauug

SEQ ID NO: 518790 - RNA, 19 nt, Homo sapiens
  misc_RNA (1)...(19): siRNA sense strand
gaccauacccaggcuccaa

SEQ ID NO: 518791 - RNA, 19 nt, Homo sapiens
  misc_RNA (1)...(19): siRNA sense strand
ccaaaggcagcggcucaaa

SEQ ID NO: 518792 - RNA, 19 nt, Homo sapiens
  misc_RNA (1)...(19): siRNA sense strand
aggaggagaacaaggauga

SEQ ID NO: 518793 - RNA, 19 nt, Homo sapiens
  misc_RNA (1)...(19): siRNA sense strand
agacaggauccgaagcaaa

SEQ ID NO: 518794 - RNA, 19 nt, Homo sapiens
  misc_RNA (1)...(19): siRNA sense strand
ccagcaagaagcgaaagaa

SEQ ID NO: 518795 - RNA, 19 nt, Homo sapiens
  misc_RNA (1)...(19): siRNA sense strand
aagcaaaguugagcugacu

SEQ ID NO: 518796 - RNA, 19 nt, Homo sapiens
  misc_RNA (1)...(19): siRNA sense strand
guggguguccugcagaaga

SEQ ID NO: 518797 - RNA, 19 nt, Homo sapiens
  misc_RNA (1)...(19): siRNA sense strand
ccaccuccagcuucgauga

SEQ ID NO: 518798 - RNA, 19 nt, Homo sapiens
  misc_RNA (1)...(19): siRNA sense strand
gccuggcacugaccuugug

SEQ ID NO: 518799 - RNA, 19 nt, Homo sapiens
  misc_RNA (1)...(19): siRNA sense strand
gcuggugcccuuccucaca

SEQ ID NO: 518800 - RNA, 19 nt, Homo sapiens
  misc_RNA (1)...(19): siRNA sense strand
gaacccgcuuccgagauac

SEQ ID NO: 518801 - RNA, 19 nt, Homo sapiens
  misc_RNA (1)...(19): siRNA sense strand
uggcacugaccuuguguuu

SEQ ID NO: 518802 - RNA, 19 nt, Homo sapiens
  misc_RNA (1)...(19): siRNA sense strand
aaguugagcugacucgaua

SEQ ID NO: 518803 - RNA, 19 nt, Homo sapiens
  misc_RNA (1)...(19): siRNA sense strand
ggaugauucugccuccaaa

SEQ ID NO: 518804 - RNA, 19 nt, Homo sapiens
  misc_RNA (1)...(19): siRNA sense strand
gcacagagaauugccuuca

SEQ ID NO: 518805 - RNA, 19 nt, Homo sapiens
  misc_RNA (1)...(19): siRNA sense strand
ugugagaacuguggaauca

SEQ ID NO: 518806 - RNA, 19 nt, Homo sapiens
  misc_RNA (1)...(19): siRNA sense strand
gagccgaggguguggagua

SEQ ID NO: 518807 - RNA, 19 nt, Homo sapiens
  misc_RNA (1)...(19): siRNA sense strand
caucuuggcccuaccuuga

SEQ ID NO: 518808 - RNA, 19 nt, Homo sapiens
  misc_RNA (1)...(19): siRNA sense strand
gcuccugggugcugugaga

SEQ ID NO: 518809 - RNA, 19 nt, Homo sapiens
  misc_RNA (1)...(19): siRNA sense strand
caagaggauuguggccauu

SEQ ID NO: 518810 - RNA, 19 nt, Homo sapiens
  misc_RNA (1)...(19): siRNA sense strand
gacaggauccgaagcaaag

SEQ ID NO: 518811 - RNA, 19 nt, Homo sapiens
  misc_RNA (1)...(19): siRNA sense strand
gaggagaacaaggaugauu

SEQ ID NO: 518812 - RNA, 19 nt, Homo sapiens
  misc_RNA (1)...(19): siRNA sense strand
ggagacaggauccgaagca

SEQ ID NO: 518813 - RNA, 19 nt, Homo sapiens
  misc_RNA (1)...(19): siRNA sense strand
agaccaaggcugacacuga

SEQ ID NO: 518814 - RNA, 19 nt, Homo sapiens
  misc_RNA (1)...(19): siRNA sense strand
gagacaggauccgaagcaa

SEQ ID NO: 518815 - RNA, 19 nt, Homo sapiens
  misc_RNA (1)...(19): siRNA sense strand
gcucagacaccuauuacca

SEQ ID NO: 518816 - RNA, 19 nt, Homo sapiens
  misc_RNA (1)...(19): siRNA sense strand
gacgcucagacaccuauua

SEQ ID NO: 518817 - RNA, 19 nt, Homo sapiens
  misc_RNA (1)...(19): siRNA sense strand
acaaggaggagaacaagga

SEQ ID NO: 518818 - RNA, 19 nt, Homo sapiens
  misc_RNA (1)...(19): siRNA sense strand
guggugaggucaggaagga

SEQ ID NO: 518819 - RNA, 19 nt, Homo sapiens
  misc_RNA (1)...(19): siRNA sense strand
ggacaaggaggagaacaag

SEQ ID NO: 518820 - RNA, 19 nt, Homo sapiens
  misc_RNA (1)...(19): siRNA sense strand
uguugcagcuuccacagaa

SEQ ID NO: 518821 - RNA, 19 nt, Homo sapiens
  misc_RNA (1)...(19): siRNA sense strand
caaauuggccccagaggaa

SEQ ID NO: 518822 - RNA, 19 nt, Homo sapiens
  misc_RNA (1)...(19): siRNA sense strand
cacagagaauugccuucaa

SEQ ID NO: 518823 - RNA, 19 nt, Homo sapiens
  misc_RNA (1)...(19): siRNA sense strand
gagauacagcagucugguu

SEQ ID NO: 518824 - RNA, 19 nt, Homo sapiens
  misc_RNA (1)...(19): siRNA sense strand
ccucuucgacuucaaacaa

SEQ ID NO: 518825 - RNA, 19 nt, Homo sapiens
  misc_RNA (1)...(19): siRNA sense strand
acagagaauugccuucaac

SEQ ID NO: 518826 - RNA, 19 nt, Homo sapiens
  misc_RNA (1)...(19): siRNA sense strand
ucaaaacguugugcaaaga

SEQ ID NO: 518827 - RNA, 19 nt, Homo sapiens
  misc_RNA (1)...(19): siRNA sense strand
ugauucugccuccaaauug

SEQ ID NO: 518828 - RNA, 19 nt, Homo sapiens
  misc_RNA (1)...(19): siRNA sense strand
gaccauacccaggcuccaa

SEQ ID NO: 518829 - RNA, 19 nt, Homo sapiens
  misc_RNA (1)...(19): siRNA sense strand
ccaaaggcagcggcucaaa

SEQ ID NO: 518830 - RNA, 19 nt, Homo sapiens
  misc_RNA (1)...(19): siRNA sense strand
aggaggagaacaaggauga

SEQ ID NO: 518831 - RNA, 19 nt, Homo sapiens
  misc_RNA (1)...(19): siRNA sense strand
agacaggauccgaagcaaa

SEQ ID NO: 518832 - RNA, 19 nt, Homo sapiens
  misc_RNA (1)...(19): siRNA sense strand
ccagcaagaagcgaaagaa

SEQ ID NO: 518833 - RNA, 19 nt, Homo sapiens
  misc_RNA (1)...(19): siRNA sense strand
aagcaaaguugagcugacu

SEQ ID NO: 518834 - RNA, 19 nt, Homo sapiens
  misc_RNA (1)...(19): siRNA sense strand
gccuggcacugaccuugug

SEQ ID NO: 518835 - RNA, 19 nt, Homo sapiens
  misc_RNA (1)...(19): siRNA sense strand
gaacccgcuuccgagauac

SEQ ID NO: 518836 - RNA, 19 nt, Homo sapiens
  misc_RNA (1)...(19): siRNA sense strand
uggcacugaccuuguguuu

SEQ ID NO: 518837 - RNA, 19 nt, Homo sapiens
  misc_RNA (1)...(19): siRNA sense strand
aaguugagcugacucgaua

SEQ ID NO: 518838 - RNA, 19 nt, Homo sapiens
  misc_RNA (1)...(19): siRNA sense strand
ggaugauucugccuccaaa

SEQ ID NO: 518839 - RNA, 19 nt, Homo sapiens
  misc_RNA (1)...(19): siRNA sense strand
gcacagagaauugccuuca

SEQ ID NO: 518840 - RNA, 19 nt, Homo sapiens
  misc_RNA (1)...(19): siRNA sense strand
ugugagaacuguggaauca

SEQ ID NO: 518841 - RNA, 19 nt, Homo sapiens
  misc_RNA (1)...(19): siRNA sense strand
gagccgaggguguggagua

SEQ ID NO: 518842 - RNA, 19 nt, Homo sapiens
  misc_RNA (1)...(19): siRNA sense strand
caucuuggcccuaccuuga

SEQ ID NO: 518843 - RNA, 19 nt, Homo sapiens
  misc_RNA (1)...(19): siRNA sense strand
gcuccugggugcugugaga

SEQ ID NO: 518844 - RNA, 19 nt, Homo sapiens
  misc_RNA (1)...(19): siRNA sense strand
caagaggauuguggccauu

SEQ ID NO: 518845 - RNA, 19 nt, Homo sapiens
  misc_RNA (1)...(19): siRNA sense strand
gacaggauccgaagcaaag

SEQ ID NO: 518846 - RNA, 19 nt, Homo sapiens
  misc_RNA (1)...(19): siRNA sense strand
gaggagaacaaggaugauu

SEQ ID NO: 518847 - RNA, 19 nt, Homo sapiens
  misc_RNA (1)...(19): siRNA sense strand
ggagacaggauccgaagca

SEQ ID NO: 518848 - RNA, 19 nt, Homo sapiens
  misc_RNA (1)...(19): siRNA sense strand
agaccaaggcugacacuga

SEQ ID NO: 518849 - RNA, 19 nt, Homo sapiens
  misc_RNA (1)...(19): siRNA sense strand
gagacaggauccgaagcaa

SEQ ID NO: 518850 - RNA, 19 nt, Homo sapiens
  misc_RNA (1)...(19): siRNA sense strand
gcucagacaccuauuacca

SEQ ID NO: 518851 - RNA, 19 nt, Homo sapiens
  misc_RNA (1)...(19): siRNA sense strand
gacgcucagacaccuauua

SEQ ID NO: 518852 - RNA, 19 nt, Homo sapiens
  misc_RNA (1)...(19): siRNA sense strand
acaaggaggagaacaagga

SEQ ID NO: 518853 - RNA, 19 nt, Homo sapiens
  misc_RNA (1)...(19): siRNA sense strand
guggugaggucaggaagga

SEQ ID NO: 518854 - RNA, 19 nt, Homo sapiens
  misc_RNA (1)...(19): siRNA sense strand
ggacaaggaggagaacaag

SEQ ID NO: 518855 - RNA, 19 nt, Homo sapiens
  misc_RNA (1)...(19): siRNA sense strand
uguugcagcuuccacagaa

SEQ ID NO: 518856 - RNA, 19 nt, Homo sapiens
  misc_RNA (1)...(19): siRNA sense strand
caaauuggccccagaggaa

SEQ ID NO: 518857 - RNA, 19 nt, Homo sapiens
  misc_RNA (1)...(19): siRNA sense strand
cacagagaauugccuucaa

SEQ ID NO: 518858 - RNA, 19 nt, Homo sapiens
  misc_RNA (1)...(19): siRNA sense strand
gagauacagcagucugguu

SEQ ID NO: 518859 - RNA, 19 nt, Homo sapiens
  misc_RNA (1)...(19): siRNA sense strand
ccucuucgacuucaaacaa

SEQ ID NO: 518860 - RNA, 19 nt, Homo sapiens
  misc_RNA (1)...(19): siRNA sense strand
acagagaauugccuucaac

SEQ ID NO: 518861 - RNA, 19 nt, Homo sapiens
  misc_RNA (1)...(19): siRNA sense strand
ucaaaacguugugcaaaga

SEQ ID NO: 518862 - RNA, 19 nt, Homo sapiens
  misc_RNA (1)...(19): siRNA sense strand
ugauucugccuccaaauug

SEQ ID NO: 518863 - RNA, 19 nt, Homo sapiens
  misc_RNA (1)...(19): siRNA sense strand
gaccauacccaggcuccaa

SEQ ID NO: 518864 - RNA, 19 nt, Homo sapiens
  misc_RNA (1)...(19): siRNA sense strand
ccaaaggcagcggcucaaa

SEQ ID NO: 518865 - RNA, 19 nt, Homo sapiens
  misc_RNA (1)...(19): siRNA sense strand
aggaggagaacaaggauga

SEQ ID NO: 518866 - RNA, 19 nt, Homo sapiens
  misc_RNA (1)...(19): siRNA sense strand
agacaggauccgaagcaaa

SEQ ID NO: 518867 - RNA, 19 nt, Homo sapiens
  misc_RNA (1)...(19): siRNA sense strand
ccagcaagaagcgaaagaa

SEQ ID NO: 518868 - RNA, 19 nt, Homo sapiens
  misc_RNA (1)...(19): siRNA sense strand
aagcaaaguugagcugacu

SEQ ID NO: 518869 - RNA, 19 nt, Homo sapiens
  misc_RNA (1)...(19): siRNA sense strand
gccuggcacugaccuugug

SEQ ID NO: 518870 - RNA, 19 nt, Homo sapiens
  misc_RNA (1)...(19): siRNA sense strand
gaacccgcuuccgagauac

SEQ ID NO: 518871 - RNA, 19 nt, Homo sapiens
  misc_RNA (1)...(19): siRNA sense strand
uggcacugaccuuguguuu

SEQ ID NO: 518872 - RNA, 19 nt, Homo sapiens
  misc_RNA (1)...(19): siRNA sense strand
aaguugagcugacucgaua

SEQ ID NO: 518873 - RNA, 19 nt, Homo sapiens
  misc_RNA (1)...(19): siRNA sense strand
ggaugauucugccuccaaa

SEQ ID NO: 518874 - RNA, 19 nt, Homo sapiens
  misc_RNA (1)...(19): siRNA sense strand
gcacagagaauugccuuca

SEQ ID NO: 518875 - RNA, 19 nt, Homo sapiens
  misc_RNA (1)...(19): siRNA sense strand
ugugagaacuguggaauca

SEQ ID NO: 518876 - RNA, 19 nt, Homo sapiens
  misc_RNA (1)...(19): siRNA sense strand
gagccgaggguguggagua

SEQ ID NO: 518877 - RNA, 19 nt, Homo sapiens
  misc_RNA (1)...(19): siRNA sense strand
caucuuggcccuaccuuga

SEQ ID NO: 518878 - RNA, 19 nt, Homo sapiens
  misc_RNA (1)...(19): siRNA sense strand
gcuccugggugcugugaga

SEQ ID NO: 518879 - RNA, 19 nt, Homo sapiens
  misc_RNA (1)...(19): siRNA sense strand
caagaggauuguggccauu

SEQ ID NO: 518880 - RNA, 19 nt, Homo sapiens
  misc_RNA (1)...(19): siRNA sense strand
gacaggauccgaagcaaag

SEQ ID NO: 518881 - RNA, 19 nt, Homo sapiens
  misc_RNA (1)...(19): siRNA sense strand
gaggagaacaaggaugauu

SEQ ID NO: 518882 - RNA, 19 nt, Homo sapiens
  misc_RNA (1)...(19): siRNA sense strand
ggagacaggauccgaagca

SEQ ID NO: 518883 - RNA, 19 nt, Homo sapiens
  misc_RNA (1)...(19): siRNA sense strand
agaccaaggcugacacuga

SEQ ID NO: 518884 - RNA, 19 nt, Homo sapiens
  misc_RNA (1)...(19): siRNA sense strand
gagacaggauccgaagcaa

SEQ ID NO: 518885 - RNA, 19 nt, Homo sapiens
  misc_RNA (1)...(19): siRNA sense strand
gcucagacaccuauuacca

SEQ ID NO: 518886 - RNA, 19 nt, Homo sapiens
  misc_RNA (1)...(19): siRNA sense strand
gacgcucagacaccuauua

SEQ ID NO: 518887 - RNA, 19 nt, Homo sapiens
  misc_RNA (1)...(19): siRNA sense strand
acaaggaggagaacaagga

SEQ ID NO: 518888 - RNA, 19 nt, Homo sapiens
  misc_RNA (1)...(19): siRNA sense strand
guggugaggucaggaagga

SEQ ID NO: 518889 - RNA, 19 nt, Homo sapiens
  misc_RNA (1)...(19): siRNA sense strand
ggacaaggaggagaacaag

SEQ ID NO: 518890 - RNA, 19 nt, Homo sapiens
  misc_RNA (1)...(19): siRNA sense strand
uguugcagcuuccacagaa

SEQ ID NO: 518891 - RNA, 19 nt, Homo sapiens
  misc_RNA (1)...(19): siRNA sense strand
caaauuggccccagaggaa

SEQ ID NO: 518892 - RNA, 19 nt, Homo sapiens
  misc_RNA (1)...(19): siRNA sense strand
cacagagaauugccuucaa

SEQ ID NO: 518893 - RNA, 19 nt, Homo sapiens
  misc_RNA (1)...(19): siRNA sense strand
gagauacagcagucugguu

SEQ ID NO: 518894 - RNA, 19 nt, Homo sapiens
  misc_RNA (1)...(19): siRNA sense strand
ccucuucgacuucaaacaa

SEQ ID NO: 518895 - RNA, 19 nt, Homo sapiens
  misc_RNA (1)...(19): siRNA sense strand
acagagaauugccuucaac

SEQ ID NO: 518896 - RNA, 19 nt, Homo sapiens
  misc_RNA (1)...(19): siRNA sense strand
ucaaaacguugugcaaaga

SEQ ID NO: 518897 - RNA, 19 nt, Homo sapiens
  misc_RNA (1)...(19): siRNA sense strand
ugauucugccuccaaauug

SEQ ID NO: 518898 - RNA, 19 nt, Homo sapiens
  misc_RNA (1)...(19): siRNA sense strand
gaccauacccaggcuccaa

SEQ ID NO: 518899 - RNA, 19 nt, Homo sapiens
  misc_RNA (1)...(19): siRNA sense strand
ccaaaggcagcggcucaaa

SEQ ID NO: 518900 - RNA, 19 nt, Homo sapiens
  misc_RNA (1)...(19): siRNA sense strand
aggaggagaacaaggauga

SEQ ID NO: 518901 - RNA, 19 nt, Homo sapiens
  misc_RNA (1)...(19): siRNA sense strand
agacaggauccgaagcaaa

SEQ ID NO: 518902 - RNA, 19 nt, Homo sapiens
  misc_RNA (1)...(19): siRNA sense strand
ccagcaagaagcgaaagaa

SEQ ID NO: 518903 - RNA, 19 nt, Homo sapiens
  misc_RNA (1)...(19): siRNA sense strand
aagcaaaguugagcugacu

SEQ ID NO: 518904 - RNA, 19 nt, Homo sapiens
  misc_RNA (1)...(19): siRNA sense strand
gccuggcacugaccuugug

SEQ ID NO: 518905 - RNA, 19 nt, Homo sapiens
  misc_RNA (1)...(19): siRNA sense strand
gaacccgcuuccgagauac

SEQ ID NO: 518906 - RNA, 19 nt, Homo sapiens
  misc_RNA (1)...(19): siRNA sense strand
uggcacugaccuuguguuu

SEQ ID NO: 518907 - RNA, 19 nt, Homo sapiens
  misc_RNA (1)...(19): siRNA sense strand
aaguugagcugacucgaua

SEQ ID NO: 518908 - RNA, 19 nt, Homo sapiens
  misc_RNA (1)...(19): siRNA sense strand
ggaugauucugccuccaaa

SEQ ID NO: 518909 - RNA, 19 nt, Homo sapiens
  misc_RNA (1)...(19): siRNA sense strand
gcacagagaauugccuuca

SEQ ID NO: 518910 - RNA, 19 nt, Homo sapiens
  misc_RNA (1)...(19): siRNA sense strand
ugugagaacuguggaauca

SEQ ID NO: 518911 - RNA, 19 nt, Homo sapiens
  misc_RNA (1)...(19): siRNA sense strand
gagccgaggguguggagua

SEQ ID NO: 518912 - RNA, 19 nt, Homo sapiens
  misc_RNA (1)...(19): siRNA sense strand
caucuuggcccuaccuuga

SEQ ID NO: 518913 - RNA, 19 nt, Homo sapiens
  misc_RNA (1)...(19): siRNA sense strand
gcuccugggugcugugaga

SEQ ID NO: 518914 - RNA, 19 nt, Homo sapiens
  misc_RNA (1)...(19): siRNA sense strand
caagaggauuguggccauu

SEQ ID NO: 518915 - RNA, 19 nt, Homo sapiens
  misc_RNA (1)...(19): siRNA sense strand
gacaggauccgaagcaaag

SEQ ID NO: 518916 - RNA, 19 nt, Homo sapiens
  misc_RNA (1)...(19): siRNA sense strand
gaggagaacaaggaugauu

SEQ ID NO: 518917 - RNA, 19 nt, Homo sapiens
  misc_RNA (1)...(19): siRNA sense strand
ggagacaggauccgaagca

SEQ ID NO: 518918 - RNA, 19 nt, Homo sapiens
  misc_RNA (1)...(19): siRNA sense strand
agaccaaggcugacacuga

SEQ ID NO: 518919 - RNA, 19 nt, Homo sapiens
  misc_RNA (1)...(19): siRNA sense strand
gagacaggauccgaagcaa

SEQ ID NO: 518920 - RNA, 19 nt, Homo sapiens
  misc_RNA (1)...(19): siRNA sense strand
gcucagacaccuauuacca

SEQ ID NO: 518921 - RNA, 19 nt, Homo sapiens
  misc_RNA (1)...(19): siRNA sense strand
gacgcucagacaccuauua

SEQ ID NO: 518922 - RNA, 19 nt, Homo sapiens
  misc_RNA (1)...(19): siRNA sense strand
acaaggaggagaacaagga

SEQ ID NO: 518923 - RNA, 19 nt, Homo sapiens
  misc_RNA (1)...(19): siRNA sense strand
guggugaggucaggaagga

SEQ ID NO: 518924 - RNA, 19 nt, Homo sapiens
  misc_RNA (1)...(19): siRNA sense strand
ggacaaggaggagaacaag

SEQ ID NO: 518925 - RNA, 19 nt, Homo sapiens
  misc_RNA (1)...(19): siRNA sense strand
uguugcagcuuccacagaa

SEQ ID NO: 518926 - RNA, 19 nt, Homo sapiens
  misc_RNA (1)...(19): siRNA sense strand
caaauuggccccagaggaa

SEQ ID NO: 518927 - RNA, 19 nt, Homo sapiens
  misc_RNA (1)...(19): siRNA sense strand
cacagagaauugccuucaa

SEQ ID NO: 518928 - RNA, 19 nt, Homo sapiens
  misc_RNA (1)...(19): siRNA sense strand
gagauacagcagucugguu

SEQ ID NO: 518929 - RNA, 19 nt, Homo sapiens
  misc_RNA (1)...(19): siRNA sense strand
ccucuucgacuucaaacaa

SEQ ID NO: 518930 - RNA, 19 nt, Homo sapiens
  misc_RNA (1)...(19): siRNA sense strand
acagagaauugccuucaac

SEQ ID NO: 518931 - RNA, 19 nt, Homo sapiens
  misc_RNA (1)...(19): siRNA sense strand
ucaaaacguugugcaaaga

SEQ ID NO: 518932 - RNA, 19 nt, Homo sapiens
  misc_RNA (1)...(19): siRNA sense strand
ugauucugccuccaaauug

SEQ ID NO: 518933 - RNA, 19 nt, Homo sapiens
  misc_RNA (1)...(19): siRNA sense strand
gaccauacccaggcuccaa

SEQ ID NO: 518934 - RNA, 19 nt, Homo sapiens
  misc_RNA (1)...(19): siRNA sense strand
ccaaaggcagcggcucaaa

SEQ ID NO: 518935 - RNA, 19 nt, Homo sapiens
  misc_RNA (1)...(19): siRNA sense strand
aggaggagaacaaggauga

SEQ ID NO: 518936 - RNA, 19 nt, Homo sapiens
  misc_RNA (1)...(19): siRNA sense strand
agacaggauccgaagcaaa

SEQ ID NO: 518937 - RNA, 19 nt, Homo sapiens
  misc_RNA (1)...(19): siRNA sense strand
ccagcaagaagcgaaagaa

SEQ ID NO: 518938 - RNA, 19 nt, Homo sapiens
  misc_RNA (1)...(19): siRNA sense strand
aagcaaaguugagcugacu

SEQ ID NO: 518939 - RNA, 19 nt, Homo sapiens
  misc_RNA (1)...(19): siRNA sense strand
gccuggcacugaccuugug

SEQ ID NO: 518940 - RNA, 19 nt, Homo sapiens
  misc_RNA (1)...(19): siRNA sense strand
gaacccgcuuccgagauac

SEQ ID NO: 518941 - RNA, 19 nt, Homo sapiens
  misc_RNA (1)...(19): siRNA sense strand
uggcacugaccuuguguuu

SEQ ID NO: 518942 - RNA, 19 nt, Homo sapiens
  misc_RNA (1)...(19): siRNA sense strand
gaagauggauguaaagugu

SEQ ID NO: 518943 - RNA, 19 nt, Homo sapiens
  misc_RNA (1)...(19): siRNA sense strand
aaguugagcugacucgaua

SEQ ID NO: 518944 - RNA, 19 nt, Homo sapiens
  misc_RNA (1)...(19): siRNA sense strand
ccacgaggauggccuggaa

SEQ ID NO: 518945 - RNA, 19 nt, Homo sapiens
  misc_RNA (1)...(19): siRNA sense strand
gaagggaagauggauguaa

SEQ ID NO: 518946 - RNA, 19 nt, Homo sapiens
  misc_RNA (1)...(19): siRNA sense strand
ggaugauucugccuccaaa

SEQ ID NO: 518947 - RNA, 19 nt, Homo sapiens
  misc_RNA (1)...(19): siRNA sense strand
aagggaagauggauguaaa

SEQ ID NO: 518948 - RNA, 19 nt, Homo sapiens
  misc_RNA (1)...(19): siRNA sense strand
gcacagagaauugccuuca

SEQ ID NO: 518949 - RNA, 19 nt, Homo sapiens
  misc_RNA (1)...(19): siRNA sense strand
ugugagaacuguggaauca

SEQ ID NO: 518950 - RNA, 19 nt, Homo sapiens
  misc_RNA (1)...(19): siRNA sense strand
gagccgaggguguggagua

SEQ ID NO: 518951 - RNA, 19 nt, Homo sapiens
  misc_RNA (1)...(19): siRNA sense strand
caucuuggcccuaccuuga

SEQ ID NO: 518952 - RNA, 19 nt, Homo sapiens
  misc_RNA (1)...(19): siRNA sense strand
gcuccugggugcugugaga

SEQ ID NO: 518953 - RNA, 19 nt, Homo sapiens
  misc_RNA (1)...(19): siRNA sense strand
ggaagauggauguaaagug

SEQ ID NO: 518954 - RNA, 19 nt, Homo sapiens
  misc_RNA (1)...(19): siRNA sense strand
caagaggauuguggccauu

SEQ ID NO: 518955 - RNA, 19 nt, Homo sapiens
  misc_RNA (1)...(19): siRNA sense strand
gacaggauccgaagcaaag

SEQ ID NO: 518956 - RNA, 19 nt, Homo sapiens
  misc_RNA (1)...(19): siRNA sense strand
gaggagaacaaggaugauu

SEQ ID NO: 518957 - RNA, 19 nt, Homo sapiens
  misc_RNA (1)...(19): siRNA sense strand
agaccaaggcugacacuga

SEQ ID NO: 518958 - RNA, 19 nt, Homo sapiens
  misc_RNA (1)...(19): siRNA sense strand
ggagacaggauccgaagca

SEQ ID NO: 518959 - RNA, 19 nt, Homo sapiens
  misc_RNA (1)...(19): siRNA sense strand
gcucagacaccuauuacca

SEQ ID NO: 518960 - RNA, 19 nt, Homo sapiens
  misc_RNA (1)...(19): siRNA sense strand
gagacaggauccgaagcaa

SEQ ID NO: 518961 - RNA, 19 nt, Homo sapiens
  misc_RNA (1)...(19): siRNA sense strand
gggaagggaagauggaugu

SEQ ID NO: 518962 - RNA, 19 nt, Homo sapiens
  misc_RNA (1)...(19): siRNA sense strand
acaaggaggagaacaagga

SEQ ID NO: 518963 - RNA, 19 nt, Homo sapiens
  misc_RNA (1)...(19): siRNA sense strand
gacgcucagacaccuauua

SEQ ID NO: 518964 - RNA, 19 nt, Homo sapiens
  misc_RNA (1)...(19): siRNA sense strand
guggugaggucaggaagga

SEQ ID NO: 518965 - RNA, 19 nt, Homo sapiens
  misc_RNA (1)...(19): siRNA sense strand
ggacaaggaggagaacaag

SEQ ID NO: 518966 - RNA, 19 nt, Homo sapiens
  misc_RNA (1)...(19): siRNA sense strand
uguugcagcuuccacagaa

SEQ ID NO: 518967 - RNA, 19 nt, Homo sapiens
  misc_RNA (1)...(19): siRNA sense strand
caaauuggccccagaggaa

SEQ ID NO: 518968 - RNA, 19 nt, Homo sapiens
  misc_RNA (1)...(19): siRNA sense strand
cacagagaauugccuucaa

SEQ ID NO: 518969 - RNA, 19 nt, Homo sapiens
  misc_RNA (1)...(19): siRNA sense strand
gagauacagcagucugguu

SEQ ID NO: 518970 - RNA, 19 nt, Homo sapiens
  misc_RNA (1)...(19): siRNA sense strand
ccucuucgacuucaaacaa

SEQ ID NO: 518971 - RNA, 19 nt, Homo sapiens
  misc_RNA (1)...(19): siRNA sense strand
acagagaauugccuucaac

SEQ ID NO: 518972 - RNA, 19 nt, Homo sapiens
  misc_RNA (1)...(19): siRNA sense strand
ggaagggaagauggaugua

SEQ ID NO: 518973 - RNA, 19 nt, Homo sapiens
  misc_RNA (1)...(19): siRNA sense strand
ucaaaacguugugcaaaga

SEQ ID NO: 518974 - RNA, 19 nt, Homo sapiens
  misc_RNA (1)...(19): siRNA sense strand
gcccuuccucacagaguua

SEQ ID NO: 518975 - RNA, 19 nt, Homo sapiens
  misc_RNA (1)...(19): siRNA sense strand
uggguguccugcagaagaa

SEQ ID NO: 518976 - RNA, 19 nt, Homo sapiens
  misc_RNA (1)...(19): siRNA sense strand
ugauucugccuccaaauug

SEQ ID NO: 518977 - RNA, 19 nt, Homo sapiens
  misc_RNA (1)...(19): siRNA sense strand
gaccauacccaggcuccaa

SEQ ID NO: 518978 - RNA, 19 nt, Homo sapiens
  misc_RNA (1)...(19): siRNA sense strand
ccaaaggcagcggcucaaa

SEQ ID NO: 518979 - RNA, 19 nt, Homo sapiens
  misc_RNA (1)...(19): siRNA sense strand
aggaggagaacaaggauga

SEQ ID NO: 518980 - RNA, 19 nt, Homo sapiens
  misc_RNA (1)...(19): siRNA sense strand
agacaggauccgaagcaaa

SEQ ID NO: 518981 - RNA, 19 nt, Homo sapiens
  misc_RNA (1)...(19): siRNA sense strand
ccagcaagaagcgaaagaa

SEQ ID NO: 518982 - RNA, 19 nt, Homo sapiens
  misc_RNA (1)...(19): siRNA sense strand
aagcaaaguugagcugacu

SEQ ID NO: 518983 - RNA, 19 nt, Homo sapiens
  misc_RNA (1)...(19): siRNA sense strand
guggguguccugcagaaga

SEQ ID NO: 518984 - RNA, 19 nt, Homo sapiens
  misc_RNA (1)...(19): siRNA sense strand
ccaccuccagcuucgauga

SEQ ID NO: 518985 - RNA, 19 nt, Homo sapiens
  misc_RNA (1)...(19): siRNA sense strand
gccuggcacugaccuugug

SEQ ID NO: 518986 - RNA, 19 nt, Homo sapiens
  misc_RNA (1)...(19): siRNA sense strand
gcuggugcccuuccucaca

SEQ ID NO: 518987 - RNA, 19 nt, Homo sapiens
  misc_RNA (1)...(19): siRNA sense strand
gaacccgcuuccgagauac

SEQ ID NO: 518988 - RNA, 19 nt, Homo sapiens
  misc_RNA (1)...(19): siRNA sense strand
uggcacugaccuuguguuu

SEQ ID NO: 518989 - RNA, 19 nt, Homo sapiens
  misc_RNA (1)...(19): siRNA sense strand
aaguugagcugacucgaua

SEQ ID NO: 518990 - RNA, 19 nt, Homo sapiens
  misc_RNA (1)...(19): siRNA sense strand
ggaugauucugccuccaaa

SEQ ID NO: 518991 - RNA, 19 nt, Homo sapiens
  misc_RNA (1)...(19): siRNA sense strand
gcacagagaauugccuuca

SEQ ID NO: 518992 - RNA, 19 nt, Homo sapiens
  misc_RNA (1)...(19): siRNA sense strand
ugugagaacuguggaauca

SEQ ID NO: 518993 - RNA, 19 nt, Homo sapiens
  misc_RNA (1)...(19): siRNA sense strand
gagccgaggguguggagua

SEQ ID NO: 518994 - RNA, 19 nt, Homo sapiens
  misc_RNA (1)...(19): siRNA sense strand
caucuuggcccuaccuuga

SEQ ID NO: 518995 - RNA, 19 nt, Homo sapiens
  misc_RNA (1)...(19): siRNA sense strand
gcuccugggugcugugaga

SEQ ID NO: 518996 - RNA, 19 nt, Homo sapiens
  misc_RNA (1)...(19): siRNA sense strand
caagaggauuguggccauu

SEQ ID NO: 518997 - RNA, 19 nt, Homo sapiens
  misc_RNA (1)...(19): siRNA sense strand
gacaggauccgaagcaaag

SEQ ID NO: 518998 - RNA, 19 nt, Homo sapiens
  misc_RNA (1)...(19): siRNA sense strand
gaggagaacaaggaugauu

SEQ ID NO: 518999 - RNA, 19 nt, Homo sapiens
  misc_RNA (1)...(19): siRNA sense strand
ggagacaggauccgaagca

SEQ ID NO: 519000 - RNA, 19 nt, Homo sapiens
  misc_RNA (1)...(19): siRNA sense strand
agaccaaggcugacacuga

SEQ ID NO: 519001 - RNA, 19 nt, Homo sapiens
  misc_RNA (1)...(19): siRNA sense strand
gagacaggauccgaagcaa

SEQ ID NO: 519002 - RNA, 19 nt, Homo sapiens
  misc_RNA (1)...(19): siRNA sense strand
gcucagacaccuauuacca

SEQ ID NO: 519003 - RNA, 19 nt, Homo sapiens
  misc_RNA (1)...(19): siRNA sense strand
gacgcucagacaccuauua

SEQ ID NO: 519004 - RNA, 19 nt, Homo sapiens
  misc_RNA (1)...(19): siRNA sense strand
acaaggaggagaacaagga

SEQ ID NO: 519005 - RNA, 19 nt, Homo sapiens
  misc_RNA (1)...(19): siRNA sense strand
guggugaggucaggaagga

SEQ ID NO: 519006 - RNA, 19 nt, Homo sapiens
  misc_RNA (1)...(19): siRNA sense strand
ggacaaggaggagaacaag

SEQ ID NO: 519007 - RNA, 19 nt, Homo sapiens
  misc_RNA (1)...(19): siRNA sense strand
uguugcagcuuccacagaa

SEQ ID NO: 519008 - RNA, 19 nt, Homo sapiens
  misc_RNA (1)...(19): siRNA sense strand
caaauuggccccagaggaa

SEQ ID NO: 519009 - RNA, 19 nt, Homo sapiens
  misc_RNA (1)...(19): siRNA sense strand
cacagagaauugccuucaa

SEQ ID NO: 519010 - RNA, 19 nt, Homo sapiens
  misc_RNA (1)...(19): siRNA sense strand
gagauacagcagucugguu

SEQ ID NO: 519011 - RNA, 19 nt, Homo sapiens
  misc_RNA (1)...(19): siRNA sense strand
ccucuucgacuucaaacaa

SEQ ID NO: 519012 - RNA, 19 nt, Homo sapiens
  misc_RNA (1)...(19): siRNA sense strand
acagagaauugccuucaac

SEQ ID NO: 519013 - RNA, 19 nt, Homo sapiens
  misc_RNA (1)...(19): siRNA sense strand
ucaaaacguugugcaaaga

SEQ ID NO: 519014 - RNA, 19 nt, Homo sapiens
  misc_RNA (1)...(19): siRNA sense strand
ugauucugccuccaaauug

SEQ ID NO: 519015 - RNA, 19 nt, Homo sapiens
  misc_RNA (1)...(19): siRNA sense strand
gaccauacccaggcuccaa

SEQ ID NO: 519016 - RNA, 19 nt, Homo sapiens
  misc_RNA (1)...(19): siRNA sense strand
ccaaaggcagcggcucaaa

SEQ ID NO: 519017 - RNA, 19 nt, Homo sapiens
  misc_RNA (1)...(19): siRNA sense strand
aggaggagaacaaggauga

SEQ ID NO: 519018 - RNA, 19 nt, Homo sapiens
  misc_RNA (1)...(19): siRNA sense strand
agacaggauccgaagcaaa

SEQ ID NO: 519019 - RNA, 19 nt, Homo sapiens
  misc_RNA (1)...(19): siRNA sense strand
ccagcaagaagcgaaagaa

SEQ ID NO: 519020 - RNA, 19 nt, Homo sapiens
  misc_RNA (1)...(19): siRNA sense strand
aagcaaaguugagcugacu

SEQ ID NO: 519021 - RNA, 19 nt, Homo sapiens
  misc_RNA (1)...(19): siRNA sense strand
gccuggcacugaccuugug

SEQ ID NO: 519022 - RNA, 19 nt, Homo sapiens
  misc_RNA (1)...(19): siRNA sense strand
gaacccgcuuccgagauac

SEQ ID NO: 519023 - RNA, 19 nt, Homo sapiens
  misc_RNA (1)...(19): siRNA sense strand
uggcacugaccuuguguuu

SEQ ID NO: 519024 - RNA, 19 nt, Homo sapiens
  misc_RNA (1)...(19): siRNA sense strand
aaguugagcugacucgaua

SEQ ID NO: 519025 - RNA, 19 nt, Homo sapiens
  misc_RNA (1)...(19): siRNA sense strand
ggaugauucugccuccaaa

SEQ ID NO: 519026 - RNA, 19 nt, Homo sapiens
  misc_RNA (1)...(19): siRNA sense strand
gcacagagaauugccuuca

SEQ ID NO: 519027 - RNA, 19 nt, Homo sapiens
  misc_RNA (1)...(19): siRNA sense strand
ugugagaacuguggaauca

SEQ ID NO: 519028 - RNA, 19 nt, Homo sapiens
  misc_RNA (1)...(19): siRNA sense strand
gagccgaggguguggagua

SEQ ID NO: 519029 - RNA, 19 nt, Homo sapiens
  misc_RNA (1)...(19): siRNA sense strand
caucuuggcccuaccuuga

SEQ ID NO: 519030 - RNA, 19 nt, Homo sapiens
  misc_RNA (1)...(19): siRNA sense strand
gcuccugggugcugugaga

SEQ ID NO: 519031 - RNA, 19 nt, Homo sapiens
  misc_RNA (1)...(19): siRNA sense strand
caagaggauuguggccauu

SEQ ID NO: 519032 - RNA, 19 nt, Homo sapiens
  misc_RNA (1)...(19): siRNA sense strand
gacaggauccgaagcaaag

SEQ ID NO: 519033 - RNA, 19 nt, Homo sapiens
  misc_RNA (1)...(19): siRNA sense strand
gaggagaacaaggaugauu

SEQ ID NO: 519034 - RNA, 19 nt, Homo sapiens
  misc_RNA (1)...(19): siRNA sense strand
ggagacaggauccgaagca

SEQ ID NO: 519035 - RNA, 19 nt, Homo sapiens
  misc_RNA (1)...(19): siRNA sense strand
agaccaaggcugacacuga

SEQ ID NO: 519036 - RNA, 19 nt, Homo sapiens
  misc_RNA (1)...(19): siRNA sense strand
gagacaggauccgaagcaa

SEQ ID NO: 519037 - RNA, 19 nt, Homo sapiens
  misc_RNA (1)...(19): siRNA sense strand
gcucagacaccuauuacca

SEQ ID NO: 519038 - RNA, 19 nt, Homo sapiens
  misc_RNA (1)...(19): siRNA sense strand
gacgcucagacaccuauua

SEQ ID NO: 519039 - RNA, 19 nt, Homo sapiens
  misc_RNA (1)...(19): siRNA sense strand
acaaggaggagaacaagga

SEQ ID NO: 519040 - RNA, 19 nt, Homo sapiens
  misc_RNA (1)...(19): siRNA sense strand
guggugaggucaggaagga

SEQ ID NO: 519041 - RNA, 19 nt, Homo sapiens
  misc_RNA (1)...(19): siRNA sense strand
ggacaaggaggagaacaag

SEQ ID NO: 519042 - RNA, 19 nt, Homo sapiens
  misc_RNA (1)...(19): siRNA sense strand
uguugcagcuuccacagaa

SEQ ID NO: 519043 - RNA, 19 nt, Homo sapiens
  misc_RNA (1)...(19): siRNA sense strand
caaauuggccccagaggaa

SEQ ID NO: 519044 - RNA, 19 nt, Homo sapiens
  misc_RNA (1)...(19): siRNA sense strand
cacagagaauugccuucaa

SEQ ID NO: 519045 - RNA, 19 nt, Homo sapiens
  misc_RNA (1)...(19): siRNA sense strand
gagauacagcagucugguu

SEQ ID NO: 519046 - RNA, 19 nt, Homo sapiens
  misc_RNA (1)...(19): siRNA sense strand
ccucuucgacuucaaacaa

SEQ ID NO: 519047 - RNA, 19 nt, Homo sapiens
  misc_RNA (1)...(19): siRNA sense strand
acagagaauugccuucaac

SEQ ID NO: 519048 - RNA, 19 nt, Homo sapiens
  misc_RNA (1)...(19): siRNA sense strand
ucaaaacguugugcaaaga

SEQ ID NO: 519049 - RNA, 19 nt, Homo sapiens
  misc_RNA (1)...(19): siRNA sense strand
ugauucugccuccaaauug

SEQ ID NO: 519050 - RNA, 19 nt, Homo sapiens
  misc_RNA (1)...(19): siRNA sense strand
gaccauacccaggcuccaa

SEQ ID NO: 519051 - RNA, 19 nt, Homo sapiens
  misc_RNA (1)...(19): siRNA sense strand
ccaaaggcagcggcucaaa

SEQ ID NO: 519052 - RNA, 19 nt, Homo sapiens
  misc_RNA (1)...(19): siRNA sense strand
aggaggagaacaaggauga

SEQ ID NO: 519053 - RNA, 19 nt, Homo sapiens
  misc_RNA (1)...(19): siRNA sense strand
agacaggauccgaagcaaa

SEQ ID NO: 519054 - RNA, 19 nt, Homo sapiens
  misc_RNA (1)...(19): siRNA sense strand
ccagcaagaagcgaaagaa

SEQ ID NO: 519055 - RNA, 19 nt, Homo sapiens
  misc_RNA (1)...(19): siRNA sense strand
aagcaaaguugagcugacu

SEQ ID NO: 519056 - RNA, 19 nt, Homo sapiens
  misc_RNA (1)...(19): siRNA sense strand
gccuggcacugaccuugug

SEQ ID NO: 519057 - RNA, 19 nt, Homo sapiens
  misc_RNA (1)...(19): siRNA sense strand
gaacccgcuuccgagauac

SEQ ID NO: 519058 - RNA, 19 nt, Homo sapiens
  misc_RNA (1)...(19): siRNA sense strand
uggcacugaccuuguguuu

SEQ ID NO: 519059 - RNA, 19 nt, Homo sapiens
  misc_RNA (1)...(19): siRNA sense strand
ggacagagauugugcaugu

SEQ ID NO: 519060 - RNA, 19 nt, Homo sapiens
  misc_RNA (1)...(19): siRNA sense strand
gaucgaauguccuaacugu

SEQ ID NO: 519061 - RNA, 19 nt, Homo sapiens
  misc_RNA (1)...(19): siRNA sense strand
cgacguccuuuaaagauaa

SEQ ID NO: 519062 - RNA, 19 nt, Homo sapiens
  misc_RNA (1)...(19): siRNA sense strand
gcgacguccuuuaaagaua

SEQ ID NO: 519063 - RNA, 19 nt, Homo sapiens
  misc_RNA (1)...(19): siRNA sense strand
gcaucaagcucuccaagca

SEQ ID NO: 519064 - RNA, 19 nt, Homo sapiens
  misc_RNA (1)...(19): siRNA sense strand
ggugacagccauugacaua

SEQ ID NO: 519065 - RNA, 19 nt, Homo sapiens
  misc_RNA (1)...(19): siRNA sense strand
ggaaggaguucagcaucaa

SEQ ID NO: 519066 - RNA, 19 nt, Homo sapiens
  misc_RNA (1)...(19): siRNA sense strand
gaacugauggguuucugaa

SEQ ID NO: 519067 - RNA, 19 nt, Homo sapiens
  misc_RNA (1)...(19): siRNA sense strand
ggaugggucucgcaaaaua

SEQ ID NO: 519068 - RNA, 19 nt, Homo sapiens
  misc_RNA (1)...(19): siRNA sense strand
ggaaggagugccucaugaa

SEQ ID NO: 519069 - RNA, 19 nt, Homo sapiens
  misc_RNA (1)...(19): siRNA sense strand
aaacaucugcuuccacuga

SEQ ID NO: 519070 - RNA, 19 nt, Homo sapiens
  misc_RNA (1)...(19): siRNA sense strand
gccuggaacugauggguuu

SEQ ID NO: 519071 - RNA, 19 nt, Homo sapiens
  misc_RNA (1)...(19): siRNA sense strand
ugacagcuguucaucaaag

SEQ ID NO: 519072 - RNA, 19 nt, Homo sapiens
  misc_RNA (1)...(19): siRNA sense strand
ugugacagcuguucaucaa

SEQ ID NO: 519073 - RNA, 19 nt, Homo sapiens
  misc_RNA (1)...(19): siRNA sense strand
gugcauguguggccuggaa

SEQ ID NO: 519074 - RNA, 19 nt, Homo sapiens
  misc_RNA (1)...(19): siRNA sense strand
gaacguccaguuagcuguu

SEQ ID NO: 519075 - RNA, 19 nt, Homo sapiens
  misc_RNA (1)...(19): siRNA sense strand
gccaagagccgcugcagau

SEQ ID NO: 519076 - RNA, 19 nt, Homo sapiens
  misc_RNA (1)...(19): siRNA sense strand
cggcaguacugguuuggaa

SEQ ID NO: 519077 - RNA, 19 nt, Homo sapiens
  misc_RNA (1)...(19): siRNA sense strand
cggaaggaguucagcauca

SEQ ID NO: 519078 - RNA, 19 nt, Homo sapiens
  misc_RNA (1)...(19): siRNA sense strand
ccaccaaggcugugacuuc

SEQ ID NO: 519079 - RNA, 19 nt, Homo sapiens
  misc_RNA (1)...(19): siRNA sense strand
gaaggagugccucaugaag

SEQ ID NO: 519080 - RNA, 19 nt, Homo sapiens
  misc_RNA (1)...(19): siRNA sense strand
gacagcuguucaucaaaga

SEQ ID NO: 519081 - RNA, 19 nt, Homo sapiens
  misc_RNA (1)...(19): siRNA sense strand
aggaaggagugccucauga

SEQ ID NO: 519082 - RNA, 19 nt, Homo sapiens
  misc_RNA (1)...(19): siRNA sense strand
cacuaggucugguaaagga

SEQ ID NO: 519083 - RNA, 19 nt, Homo sapiens
  misc_RNA (1)...(19): siRNA sense strand
aggcacaaguggacgauga

SEQ ID NO: 519084 - RNA, 19 nt, Homo sapiens
  misc_RNA (1)...(19): siRNA sense strand
ugcaaggccugcuaugaga

SEQ ID NO: 519085 - RNA, 19 nt, Homo sapiens
  misc_RNA (1)...(19): siRNA sense strand
ccaagagccgcugcagaua

SEQ ID NO: 519086 - RNA, 19 nt, Homo sapiens
  misc_RNA (1)...(19): siRNA sense strand
auucugagcugcaacaagu

SEQ ID NO: 519087 - RNA, 19 nt, Homo sapiens
  misc_RNA (1)...(19): siRNA sense strand
gggguuggauguaagaaaa

SEQ ID NO: 519088 - RNA, 19 nt, Homo sapiens
  misc_RNA (1)...(19): siRNA sense strand
uaugacaaccgaguguaua

SEQ ID NO: 519089 - RNA, 19 nt, Homo sapiens
  misc_RNA (1)...(19): siRNA sense strand
ggaacugauggguuucuga

SEQ ID NO: 519090 - RNA, 19 nt, Homo sapiens
  misc_RNA (1)...(19): siRNA sense strand
gcggugagauccccgauga

SEQ ID NO: 519091 - RNA, 19 nt, Homo sapiens
  misc_RNA (1)...(19): siRNA sense strand
guagucggcaguacugguu

SEQ ID NO: 519092 - RNA, 19 nt, Homo sapiens
  misc_RNA (1)...(19): siRNA sense strand
gugcgacguccuuuaaaga

SEQ ID NO: 519093 - RNA, 19 nt, Homo sapiens
  misc_RNA (1)...(19): siRNA sense strand
gugaugagugcucccauga

SEQ ID NO: 519094 - RNA, 19 nt, Homo sapiens
  misc_RNA (1)...(19): siRNA sense strand
caagagccgcugcagauac

SEQ ID NO: 519095 - RNA, 19 nt, Homo sapiens
  misc_RNA (1)...(19): siRNA sense strand
cuggguaugugaucgaaug

SEQ ID NO: 519096 - RNA, 19 nt, Homo sapiens
  misc_RNA (1)...(19): siRNA sense strand
gcgaggaagucaguguagu

SEQ ID NO: 519097 - RNA, 19 nt, Homo sapiens
  misc_RNA (1)...(19): siRNA sense strand
guaugacaaccgaguguau

SEQ ID NO: 519098 - RNA, 19 nt, Homo sapiens
  misc_RNA (1)...(19): siRNA sense strand
cugauggguuucugaagga

SEQ ID NO: 519099 - RNA, 19 nt, Homo sapiens
  misc_RNA (1)...(19): siRNA sense strand
ccaggaacguccaguuagc

SEQ ID NO: 519100 - RNA, 19 nt, Homo sapiens
  misc_RNA (1)...(19): siRNA sense strand
gagaggcgaggaagucagu

SEQ ID NO: 519101 - RNA, 19 nt, Homo sapiens
  misc_RNA (1)...(19): siRNA sense strand
guaagaaaagcaugaauca

SEQ ID NO: 519102 - RNA, 19 nt, Homo sapiens
  misc_RNA (1)...(19): siRNA sense strand
cgaggaagucaguguagug

SEQ ID NO: 519103 - RNA, 19 nt, Homo sapiens
  misc_RNA (1)...(19): siRNA sense strand
ggggagggcuucugugaca

SEQ ID NO: 519104 - RNA, 19 nt, Homo sapiens
  misc_RNA (1)...(19): siRNA sense strand
caaggccugcuaugagaga

SEQ ID NO: 519105 - RNA, 19 nt, Homo sapiens
  misc_RNA (1)...(19): siRNA sense strand
agccaggaacguccaguua

SEQ ID NO: 519106 - RNA, 19 nt, Homo sapiens
  misc_RNA (1)...(19): siRNA sense strand
uaugugaucgaauguccua

SEQ ID NO: 519107 - RNA, 19 nt, Homo sapiens
  misc_RNA (1)...(19): siRNA sense strand
uaacuguggcguggucuau

SEQ ID NO: 519108 - RNA, 19 nt, Homo sapiens
  misc_RNA (1)...(19): siRNA sense strand
ugacagccauugacauacc

SEQ ID NO: 519109 - RNA, 19 nt, Homo sapiens
  misc_RNA (1)...(19): siRNA sense strand
aaagauaacgacacuaagc

SEQ ID NO: 519110 - RNA, 19 nt, Homo sapiens
  misc_RNA (1)...(19): siRNA sense strand
ugaaggacaacaacaaugc

SEQ ID NO: 519111 - RNA, 19 nt, Homo sapiens
  misc_RNA (1)...(19): siRNA sense strand
gagagaggcgaggaaguca

SEQ ID NO: 519112 - RNA, 19 nt, Homo sapiens
  misc_RNA (1)...(19): siRNA sense strand
gaaggaguucagcaucaag

SEQ ID NO: 519113 - RNA, 19 nt, Homo sapiens
  misc_RNA (1)...(19): siRNA sense strand
gccauugacauaccacuag

SEQ ID NO: 519114 - RNA, 19 nt, Homo sapiens
  misc_RNA (1)...(19): siRNA sense strand
acaaguggacgaugaaggu

SEQ ID NO: 519115 - RNA, 19 nt, Homo sapiens
  misc_RNA (1)...(19): siRNA sense strand
ggcguggucuaucguaguc

SEQ ID NO: 519116 - RNA, 19 nt, Homo sapiens
  misc_RNA (1)...(19): siRNA sense strand
ugagagaggcgaggaaguc

SEQ ID NO: 519117 - RNA, 19 nt, Homo sapiens
  misc_RNA (1)...(19): siRNA sense strand
gaccaucccguccgagucu

SEQ ID NO: 519118 - RNA, 19 nt, Homo sapiens
  misc_RNA (1)...(19): siRNA sense strand
cugggugccugaccacgaa

SEQ ID NO: 519119 - RNA, 19 nt, Homo sapiens
  misc_RNA (1)...(19): siRNA sense strand
gugaucgaauguccuaacu

SEQ ID NO: 519120 - RNA, 19 nt, Homo sapiens
  misc_RNA (1)...(19): siRNA sense strand
gaaggaaggagugccucau

SEQ ID NO: 519121 - RNA, 19 nt, Homo sapiens
  misc_RNA (1)...(19): siRNA sense strand
guccgagucugcuucaacu

SEQ ID NO: 519122 - RNA, 19 nt, Homo sapiens
  misc_RNA (1)...(19): siRNA sense strand
gcugugggguuggauguaa

SEQ ID NO: 519123 - RNA, 19 nt, Homo sapiens
  misc_RNA (1)...(19): siRNA sense strand
gccaggaacguccaguuag

SEQ ID NO: 519124 - RNA, 19 nt, Homo sapiens
  misc_RNA (1)...(19): siRNA sense strand
gacagagauugugcaugug

SEQ ID NO: 519125 - RNA, 19 nt, Homo sapiens
  misc_RNA (1)...(19): siRNA sense strand
aagagccgcugcagauacu

SEQ ID NO: 519126 - RNA, 19 nt, Homo sapiens
  misc_RNA (1)...(19): siRNA sense strand
cugcuucaacugcaauaaa

SEQ ID NO: 519127 - RNA, 19 nt, Homo sapiens
  misc_RNA (1)...(19): siRNA sense strand
agugugcgacguccuuuaa

SEQ ID NO: 519128 - RNA, 19 nt, Homo sapiens
  misc_RNA (1)...(19): siRNA sense strand
aggcccaacucccagauuc

SEQ ID NO: 519129 - RNA, 19 nt, Homo sapiens
  misc_RNA (1)...(19): siRNA sense strand
ggacagagauugugcaugu

SEQ ID NO: 519130 - RNA, 19 nt, Homo sapiens
  misc_RNA (1)...(19): siRNA sense strand
gaucgaauguccuaacugu

SEQ ID NO: 519131 - RNA, 19 nt, Homo sapiens
  misc_RNA (1)...(19): siRNA sense strand
cgacguccuuuaaagauaa

SEQ ID NO: 519132 - RNA, 19 nt, Homo sapiens
  misc_RNA (1)...(19): siRNA sense strand
gcgacguccuuuaaagaua

SEQ ID NO: 519133 - RNA, 19 nt, Homo sapiens
  misc_RNA (1)...(19): siRNA sense strand
gcaucaagcucuccaagca

SEQ ID NO: 519134 - RNA, 19 nt, Homo sapiens
  misc_RNA (1)...(19): siRNA sense strand
ggugacagccauugacaua

SEQ ID NO: 519135 - RNA, 19 nt, Homo sapiens
  misc_RNA (1)...(19): siRNA sense strand
ggaaggaguucagcaucaa

SEQ ID NO: 519136 - RNA, 19 nt, Homo sapiens
  misc_RNA (1)...(19): siRNA sense strand
gaacugauggguuucugaa

SEQ ID NO: 519137 - RNA, 19 nt, Homo sapiens
  misc_RNA (1)...(19): siRNA sense strand
ggaugggucucgcaaaaua

SEQ ID NO: 519138 - RNA, 19 nt, Homo sapiens
  misc_RNA (1)...(19): siRNA sense strand
ggaaggagugccucaugaa

SEQ ID NO: 519139 - RNA, 19 nt, Homo sapiens
  misc_RNA (1)...(19): siRNA sense strand
aaacaucugcuuccacuga

SEQ ID NO: 519140 - RNA, 19 nt, Homo sapiens
  misc_RNA (1)...(19): siRNA sense strand
gccuggaacugauggguuu

SEQ ID NO: 519141 - RNA, 19 nt, Homo sapiens
  misc_RNA (1)...(19): siRNA sense strand
ugacagcuguucaucaaag

SEQ ID NO: 519142 - RNA, 19 nt, Homo sapiens
  misc_RNA (1)...(19): siRNA sense strand
ugugacagcuguucaucaa

SEQ ID NO: 519143 - RNA, 19 nt, Homo sapiens
  misc_RNA (1)...(19): siRNA sense strand
gugcauguguggccuggaa

SEQ ID NO: 519144 - RNA, 19 nt, Homo sapiens
  misc_RNA (1)...(19): siRNA sense strand
gaacguccaguuagcuguu

SEQ ID NO: 519145 - RNA, 19 nt, Homo sapiens
  misc_RNA (1)...(19): siRNA sense strand
gccaagagccgcugcagau

SEQ ID NO: 519146 - RNA, 19 nt, Homo sapiens
  misc_RNA (1)...(19): siRNA sense strand
cggcaguacugguuuggaa

SEQ ID NO: 519147 - RNA, 19 nt, Homo sapiens
  misc_RNA (1)...(19): siRNA sense strand
cggaaggaguucagcauca

SEQ ID NO: 519148 - RNA, 19 nt, Homo sapiens
  misc_RNA (1)...(19): siRNA sense strand
ccaccaaggcugugacuuc

SEQ ID NO: 519149 - RNA, 19 nt, Homo sapiens
  misc_RNA (1)...(19): siRNA sense strand
gaaggagugccucaugaag

SEQ ID NO: 519150 - RNA, 19 nt, Homo sapiens
  misc_RNA (1)...(19): siRNA sense strand
gacagcuguucaucaaaga

SEQ ID NO: 519151 - RNA, 19 nt, Homo sapiens
  misc_RNA (1)...(19): siRNA sense strand
aggaaggagugccucauga

SEQ ID NO: 519152 - RNA, 19 nt, Homo sapiens
  misc_RNA (1)...(19): siRNA sense strand
cacuaggucugguaaagga

SEQ ID NO: 519153 - RNA, 19 nt, Homo sapiens
  misc_RNA (1)...(19): siRNA sense strand
aggcacaaguggacgauga

SEQ ID NO: 519154 - RNA, 19 nt, Homo sapiens
  misc_RNA (1)...(19): siRNA sense strand
ugcaaggccugcuaugaga

SEQ ID NO: 519155 - RNA, 19 nt, Homo sapiens
  misc_RNA (1)...(19): siRNA sense strand
ccaagagccgcugcagaua

SEQ ID NO: 519156 - RNA, 19 nt, Homo sapiens
  misc_RNA (1)...(19): siRNA sense strand
auucugagcugcaacaagu

SEQ ID NO: 519157 - RNA, 19 nt, Homo sapiens
  misc_RNA (1)...(19): siRNA sense strand
gggguuggauguaagaaaa

SEQ ID NO: 519158 - RNA, 19 nt, Homo sapiens
  misc_RNA (1)...(19): siRNA sense strand
uaugacaaccgaguguaua

SEQ ID NO: 519159 - RNA, 19 nt, Homo sapiens
  misc_RNA (1)...(19): siRNA sense strand
ggaacugauggguuucuga

SEQ ID NO: 519160 - RNA, 19 nt, Homo sapiens
  misc_RNA (1)...(19): siRNA sense strand
guagucggcaguacugguu

SEQ ID NO: 519161 - RNA, 19 nt, Homo sapiens
  misc_RNA (1)...(19): siRNA sense strand
gugcgacguccuuuaaaga

SEQ ID NO: 519162 - RNA, 19 nt, Homo sapiens
  misc_RNA (1)...(19): siRNA sense strand
gugaugagugcucccauga

SEQ ID NO: 519163 - RNA, 19 nt, Homo sapiens
  misc_RNA (1)...(19): siRNA sense strand
guaugacaaccgaguguau

SEQ ID NO: 519164 - RNA, 19 nt, Homo sapiens
  misc_RNA (1)...(19): siRNA sense strand
cuggguaugugaucgaaug

SEQ ID NO: 519165 - RNA, 19 nt, Homo sapiens
  misc_RNA (1)...(19): siRNA sense strand
caagagccgcugcagauac

SEQ ID NO: 519166 - RNA, 19 nt, Homo sapiens
  misc_RNA (1)...(19): siRNA sense strand
gcgaggaagucaguguagu

SEQ ID NO: 519167 - RNA, 19 nt, Homo sapiens
  misc_RNA (1)...(19): siRNA sense strand
cugauggguuucugaagga

SEQ ID NO: 519168 - RNA, 19 nt, Homo sapiens
  misc_RNA (1)...(19): siRNA sense strand
ccaggaacguccaguuagc

SEQ ID NO: 519169 - RNA, 19 nt, Homo sapiens
  misc_RNA (1)...(19): siRNA sense strand
gagaggcgaggaagucagu

SEQ ID NO: 519170 - RNA, 19 nt, Homo sapiens
  misc_RNA (1)...(19): siRNA sense strand
guaagaaaagcaugaauca

SEQ ID NO: 519171 - RNA, 19 nt, Homo sapiens
  misc_RNA (1)...(19): siRNA sense strand
cgaggaagucaguguagug

SEQ ID NO: 519172 - RNA, 19 nt, Homo sapiens
  misc_RNA (1)...(19): siRNA sense strand
ggggagggcuucugugaca

SEQ ID NO: 519173 - RNA, 19 nt, Homo sapiens
  misc_RNA (1)...(19): siRNA sense strand
caaggccugcuaugagaga

SEQ ID NO: 519174 - RNA, 19 nt, Homo sapiens
  misc_RNA (1)...(19): siRNA sense strand
agccaggaacguccaguua

SEQ ID NO: 519175 - RNA, 19 nt, Homo sapiens
  misc_RNA (1)...(19): siRNA sense strand
uaugugaucgaauguccua

SEQ ID NO: 519176 - RNA, 19 nt, Homo sapiens
  misc_RNA (1)...(19): siRNA sense strand
uaacuguggcguggucuau

SEQ ID NO: 519177 - RNA, 19 nt, Homo sapiens
  misc_RNA (1)...(19): siRNA sense strand
ugacagccauugacauacc

SEQ ID NO: 519178 - RNA, 19 nt, Homo sapiens
  misc_RNA (1)...(19): siRNA sense strand
aaagauaacgacacuaagc

SEQ ID NO: 519179 - RNA, 19 nt, Homo sapiens
  misc_RNA (1)...(19): siRNA sense strand
ugaaggacaacaacaaugc

SEQ ID NO: 519180 - RNA, 19 nt, Homo sapiens
  misc_RNA (1)...(19): siRNA sense strand
gagagaggcgaggaaguca

SEQ ID NO: 519181 - RNA, 19 nt, Homo sapiens
  misc_RNA (1)...(19): siRNA sense strand
gaaggaguucagcaucaag

SEQ ID NO: 519182 - RNA, 19 nt, Homo sapiens
  misc_RNA (1)...(19): siRNA sense strand
gccauugacauaccacuag

SEQ ID NO: 519183 - RNA, 19 nt, Homo sapiens
  misc_RNA (1)...(19): siRNA sense strand
acaaguggacgaugaaggu

SEQ ID NO: 519184 - RNA, 19 nt, Homo sapiens
  misc_RNA (1)...(19): siRNA sense strand
ggcguggucuaucguaguc

SEQ ID NO: 519185 - RNA, 19 nt, Homo sapiens
  misc_RNA (1)...(19): siRNA sense strand
gugaucgaauguccuaacu

SEQ ID NO: 519186 - RNA, 19 nt, Homo sapiens
  misc_RNA (1)...(19): siRNA sense strand
gaccaucccguccgagucu

SEQ ID NO: 519187 - RNA, 19 nt, Homo sapiens
  misc_RNA (1)...(19): siRNA sense strand
ugagagaggcgaggaaguc

SEQ ID NO: 519188 - RNA, 19 nt, Homo sapiens
  misc_RNA (1)...(19): siRNA sense strand
cugggugccugaccacgaa

SEQ ID NO: 519189 - RNA, 19 nt, Homo sapiens
  misc_RNA (1)...(19): siRNA sense strand
gacagagauugugcaugug

SEQ ID NO: 519190 - RNA, 19 nt, Homo sapiens
  misc_RNA (1)...(19): siRNA sense strand
guccgagucugcuucaacu

SEQ ID NO: 519191 - RNA, 19 nt, Homo sapiens
  misc_RNA (1)...(19): siRNA sense strand
gccaggaacguccaguuag

SEQ ID NO: 519192 - RNA, 19 nt, Homo sapiens
  misc_RNA (1)...(19): siRNA sense strand
gaaggaaggagugccucau

SEQ ID NO: 519193 - RNA, 19 nt, Homo sapiens
  misc_RNA (1)...(19): siRNA sense strand
gcugugggguuggauguaa

SEQ ID NO: 519194 - RNA, 19 nt, Homo sapiens
  misc_RNA (1)...(19): siRNA sense strand
aagagccgcugcagauacu

SEQ ID NO: 519195 - RNA, 19 nt, Homo sapiens
  misc_RNA (1)...(19): siRNA sense strand
cugcuucaacugcaauaaa

SEQ ID NO: 519196 - RNA, 19 nt, Homo sapiens
  misc_RNA (1)...(19): siRNA sense strand
agugugcgacguccuuuaa

SEQ ID NO: 519197 - RNA, 19 nt, Homo sapiens
  misc_RNA (1)...(19): siRNA sense strand
aggcccaacucccagauuc

SEQ ID NO: 519198 - RNA, 19 nt, Homo sapiens
  misc_RNA (1)...(19): siRNA sense strand
aagaagaacucaauuccaa

SEQ ID NO: 519199 - RNA, 19 nt, Homo sapiens
  misc_RNA (1)...(19): siRNA sense strand
ccaacgagcgagcagcuua

SEQ ID NO: 519200 - RNA, 19 nt, Homo sapiens
  misc_RNA (1)...(19): siRNA sense strand
cgccaaggaugcagagaaa

SEQ ID NO: 519201 - RNA, 19 nt, Homo sapiens
  misc_RNA (1)...(19): siRNA sense strand
cgggcgagcugcugaaguu

SEQ ID NO: 519202 - RNA, 19 nt, Homo sapiens
  misc_RNA (1)...(19): siRNA sense strand
cgagcgagcagcuuacuga

SEQ ID NO: 519203 - RNA, 19 nt, Homo sapiens
  misc_RNA (1)...(19): siRNA sense strand
gagaagcagaaguaccuuu

SEQ ID NO: 519204 - RNA, 19 nt, Homo sapiens
  misc_RNA (1)...(19): siRNA sense strand
gaagacgugguaccagaau

SEQ ID NO: 519205 - RNA, 19 nt, Homo sapiens
  misc_RNA (1)...(19): siRNA sense strand
gcugaugggccuggagaaa

SEQ ID NO: 519206 - RNA, 19 nt, Homo sapiens
  misc_RNA (1)...(19): siRNA sense strand
gaggaugaaguggaagaaa

SEQ ID NO: 519207 - RNA, 19 nt, Homo sapiens
  misc_RNA (1)...(19): siRNA sense strand
ggacagaauagaucuugcu

SEQ ID NO: 519208 - RNA, 19 nt, Homo sapiens
  misc_RNA (1)...(19): siRNA sense strand
gcgccaaggaugcagagaa

SEQ ID NO: 519209 - RNA, 19 nt, Homo sapiens
  misc_RNA (1)...(19): siRNA sense strand
caagaagaacucaauucca

SEQ ID NO: 519210 - RNA, 19 nt, Homo sapiens
  misc_RNA (1)...(19): siRNA sense strand
uaccagaaucggaggauga

SEQ ID NO: 519211 - RNA, 19 nt, Homo sapiens
  misc_RNA (1)...(19): siRNA sense strand
uggagaaacgcuucgagaa

SEQ ID NO: 519212 - RNA, 19 nt, Homo sapiens
  misc_RNA (1)...(19): siRNA sense strand
cagaaucggaggaugaagu

SEQ ID NO: 519213 - RNA, 19 nt, Homo sapiens
  misc_RNA (1)...(19): siRNA sense strand
ggaggaugaaguggaagaa

SEQ ID NO: 519214 - RNA, 19 nt, Homo sapiens
  misc_RNA (1)...(19): siRNA sense strand
ccaagaagaacucaauucc

SEQ ID NO: 519215 - RNA, 19 nt, Homo sapiens
  misc_RNA (1)...(19): siRNA sense strand
ugaagacgugguaccagaa

SEQ ID NO: 519216 - RNA, 19 nt, Homo sapiens
  misc_RNA (1)...(19): siRNA sense strand
gcccaagaagaacucaauu

SEQ ID NO: 519217 - RNA, 19 nt, Homo sapiens
  misc_RNA (1)...(19): siRNA sense strand
aagcagaaguaccuuucca

SEQ ID NO: 519218 - RNA, 19 nt, Homo sapiens
  misc_RNA (1)...(19): siRNA sense strand
ugagccaguugcaggugaa

SEQ ID NO: 519219 - RNA, 19 nt, Homo sapiens
  misc_RNA (1)...(19): siRNA sense strand
agaagcagaaguaccuuuc

SEQ ID NO: 519220 - RNA, 19 nt, Homo sapiens
  misc_RNA (1)...(19): siRNA sense strand
ggcccaagaagaacucaau

SEQ ID NO: 519221 - RNA, 19 nt, Homo sapiens
  misc_RNA (1)...(19): siRNA sense strand
ggucauguggcgccuguuu

SEQ ID NO: 519222 - RNA, 19 nt, Homo sapiens
  misc_RNA (1)...(19): siRNA sense strand
ucuccgugcucuucuuuga

SEQ ID NO: 519223 - RNA, 19 nt, Homo sapiens
  misc_RNA (1)...(19): siRNA sense strand
gcggcuuccuggccaacua

SEQ ID NO: 519224 - RNA, 19 nt, Homo sapiens
  misc_RNA (1)...(19): siRNA sense strand
gaaacaucgugcgccacau

SEQ ID NO: 519225 - RNA, 19 nt, Homo sapiens
  misc_RNA (1)...(19): siRNA sense strand
aaacaucgugcgccacauc

SEQ ID NO: 519226 - RNA, 19 nt, Homo sapiens
  misc_RNA (1)...(19): siRNA sense strand
caucuccgugcucuucuuu

SEQ ID NO: 519227 - RNA, 19 nt, Homo sapiens
  misc_RNA (1)...(19): siRNA sense strand
ugaguggacagucgucuuc

SEQ ID NO: 519228 - RNA, 19 nt, Homo sapiens
  misc_RNA (1)...(19): siRNA sense strand
gcccaucuccgugcucuuc

SEQ ID NO: 519229 - RNA, 19 nt, Homo sapiens
  misc_RNA (1)...(19): siRNA sense strand
uauaauguguuucgacuug

SEQ ID NO: 519230 - RNA, 19 nt, Homo sapiens
  misc_RNA (1)...(19): siRNA sense strand
ccaaguacaaagauaguua

SEQ ID NO: 519231 - RNA, 19 nt, Homo sapiens
  misc_RNA (1)...(19): siRNA sense strand
ggauagagccaaguacaaa

SEQ ID NO: 519232 - RNA, 19 nt, Homo sapiens
  misc_RNA (1)...(19): siRNA sense strand
gaggccagauuccacauug

SEQ ID NO: 519233 - RNA, 19 nt, Homo sapiens
  misc_RNA (1)...(19): siRNA sense strand
gcacugaagccuccggauu

SEQ ID NO: 519234 - RNA, 19 nt, Homo sapiens
  misc_RNA (1)...(19): siRNA sense strand
cggauuugaugcaccauga

SEQ ID NO: 519235 - RNA, 19 nt, Homo sapiens
  misc_RNA (1)...(19): siRNA sense strand
ccacauugacucaguaagu

SEQ ID NO: 519236 - RNA, 19 nt, Homo sapiens
  misc_RNA (1)...(19): siRNA sense strand
gggaggauagagccaagua

SEQ ID NO: 519237 - RNA, 19 nt, Homo sapiens
  misc_RNA (1)...(19): siRNA sense strand
uaucgcugccucuauuaua

SEQ ID NO: 519238 - RNA, 19 nt, Homo sapiens
  misc_RNA (1)...(19): siRNA sense strand
cuuuaucgcugccucuauu

SEQ ID NO: 519239 - RNA, 19 nt, Homo sapiens
  misc_RNA (1)...(19): siRNA sense strand
cacugaagccuccggauuu

SEQ ID NO: 519240 - RNA, 19 nt, Homo sapiens
  misc_RNA (1)...(19): siRNA sense strand
gaggauagagccaaguaca

SEQ ID NO: 519241 - RNA, 19 nt, Homo sapiens
  misc_RNA (1)...(19): siRNA sense strand
agagccaaguacaaagaua

SEQ ID NO: 519242 - RNA, 19 nt, Homo sapiens
  misc_RNA (1)...(19): siRNA sense strand
cacauugacucaguaagug

SEQ ID NO: 519243 - RNA, 19 nt, Homo sapiens
  misc_RNA (1)...(19): siRNA sense strand
ggagccaugugacuuucau

SEQ ID NO: 519244 - RNA, 19 nt, Homo sapiens
  misc_RNA (1)...(19): siRNA sense strand
gagccaaguacaaagauag

SEQ ID NO: 519245 - RNA, 19 nt, Homo sapiens
  misc_RNA (1)...(19): siRNA sense strand
ggucugagcacagugacuu

SEQ ID NO: 519246 - RNA, 19 nt, Homo sapiens
  misc_RNA (1)...(19): siRNA sense strand
gauggucugagcacaguga

SEQ ID NO: 519247 - RNA, 19 nt, Homo sapiens
  misc_RNA (1)...(19): siRNA sense strand
cucaguaagugaaggaaau

SEQ ID NO: 519248 - RNA, 19 nt, Homo sapiens
  misc_RNA (1)...(19): siRNA sense strand
gauagagccaaguacaaag

SEQ ID NO: 519249 - RNA, 19 nt, Homo sapiens
  misc_RNA (1)...(19): siRNA sense strand
gauuccacauugacucagu

SEQ ID NO: 519250 - RNA, 19 nt, Homo sapiens
  misc_RNA (1)...(19): siRNA sense strand
acugaagccuccggauuug

SEQ ID NO: 519251 - RNA, 19 nt, Homo sapiens
  misc_RNA (1)...(19): siRNA sense strand
gcugagccaggcacuguga

SEQ ID NO: 519252 - RNA, 19 nt, Homo sapiens
  misc_RNA (1)...(19): siRNA sense strand
cgacuugguccaucugagu

SEQ ID NO: 519253 - RNA, 19 nt, Homo sapiens
  misc_RNA (1)...(19): siRNA sense strand
aucgcugccucuauuauaa

SEQ ID NO: 519254 - RNA, 19 nt, Homo sapiens
  misc_RNA (1)...(19): siRNA sense strand
uccuggagcugcuggugaa

SEQ ID NO: 519255 - RNA, 19 nt, Homo sapiens
  misc_RNA (1)...(19): siRNA sense strand
ugagucagaggccagauuc

SEQ ID NO: 519256 - RNA, 19 nt, Homo sapiens
  misc_RNA (1)...(19): siRNA sense strand
gaagccuccggauuugaug

SEQ ID NO: 519257 - RNA, 19 nt, Homo sapiens
  misc_RNA (1)...(19): siRNA sense strand
ugaagccuccggauuugau

SEQ ID NO: 519258 - RNA, 19 nt, Homo sapiens
  misc_RNA (1)...(19): siRNA sense strand
uauaauguguuucgacuug

SEQ ID NO: 519259 - RNA, 19 nt, Homo sapiens
  misc_RNA (1)...(19): siRNA sense strand
ccaaguacaaagauaguua

SEQ ID NO: 519260 - RNA, 19 nt, Homo sapiens
  misc_RNA (1)...(19): siRNA sense strand
ggauagagccaaguacaaa

SEQ ID NO: 519261 - RNA, 19 nt, Homo sapiens
  misc_RNA (1)...(19): siRNA sense strand
gaggccagauuccacauug

SEQ ID NO: 519262 - RNA, 19 nt, Homo sapiens
  misc_RNA (1)...(19): siRNA sense strand
gcacugaagccuccggauu

SEQ ID NO: 519263 - RNA, 19 nt, Homo sapiens
  misc_RNA (1)...(19): siRNA sense strand
cggauuugaugcaccauga

SEQ ID NO: 519264 - RNA, 19 nt, Homo sapiens
  misc_RNA (1)...(19): siRNA sense strand
ccacauugacucaguaagu

SEQ ID NO: 519265 - RNA, 19 nt, Homo sapiens
  misc_RNA (1)...(19): siRNA sense strand
gggaggauagagccaagua

SEQ ID NO: 519266 - RNA, 19 nt, Homo sapiens
  misc_RNA (1)...(19): siRNA sense strand
uaucgcugccucuauuaua

SEQ ID NO: 519267 - RNA, 19 nt, Homo sapiens
  misc_RNA (1)...(19): siRNA sense strand
cuuuaucgcugccucuauu

SEQ ID NO: 519268 - RNA, 19 nt, Homo sapiens
  misc_RNA (1)...(19): siRNA sense strand
cacugaagccuccggauuu

SEQ ID NO: 519269 - RNA, 19 nt, Homo sapiens
  misc_RNA (1)...(19): siRNA sense strand
gaggauagagccaaguaca

SEQ ID NO: 519270 - RNA, 19 nt, Homo sapiens
  misc_RNA (1)...(19): siRNA sense strand
agagccaaguacaaagaua

SEQ ID NO: 519271 - RNA, 19 nt, Homo sapiens
  misc_RNA (1)...(19): siRNA sense strand
cacauugacucaguaagug

SEQ ID NO: 519272 - RNA, 19 nt, Homo sapiens
  misc_RNA (1)...(19): siRNA sense strand
ggagccaugugacuuucau

SEQ ID NO: 519273 - RNA, 19 nt, Homo sapiens
  misc_RNA (1)...(19): siRNA sense strand
gagccaaguacaaagauag

SEQ ID NO: 519274 - RNA, 19 nt, Homo sapiens
  misc_RNA (1)...(19): siRNA sense strand
ggucugagcacagugacuu

SEQ ID NO: 519275 - RNA, 19 nt, Homo sapiens
  misc_RNA (1)...(19): siRNA sense strand
gauggucugagcacaguga

SEQ ID NO: 519276 - RNA, 19 nt, Homo sapiens
  misc_RNA (1)...(19): siRNA sense strand
cucaguaagugaaggaaau

SEQ ID NO: 519277 - RNA, 19 nt, Homo sapiens
  misc_RNA (1)...(19): siRNA sense strand
gauagagccaaguacaaag

SEQ ID NO: 519278 - RNA, 19 nt, Homo sapiens
  misc_RNA (1)...(19): siRNA sense strand
gauuccacauugacucagu

SEQ ID NO: 519279 - RNA, 19 nt, Homo sapiens
  misc_RNA (1)...(19): siRNA sense strand
acugaagccuccggauuug

SEQ ID NO: 519280 - RNA, 19 nt, Homo sapiens
  misc_RNA (1)...(19): siRNA sense strand
gcugagccaggcacuguga

SEQ ID NO: 519281 - RNA, 19 nt, Homo sapiens
  misc_RNA (1)...(19): siRNA sense strand
cgacuugguccaucugagu

SEQ ID NO: 519282 - RNA, 19 nt, Homo sapiens
  misc_RNA (1)...(19): siRNA sense strand
aucgcugccucuauuauaa

SEQ ID NO: 519283 - RNA, 19 nt, Homo sapiens
  misc_RNA (1)...(19): siRNA sense strand
uccuggagcugcuggugaa

SEQ ID NO: 519284 - RNA, 19 nt, Homo sapiens
  misc_RNA (1)...(19): siRNA sense strand
ugagucagaggccagauuc

SEQ ID NO: 519285 - RNA, 19 nt, Homo sapiens
  misc_RNA (1)...(19): siRNA sense strand
gaagccuccggauuugaug

SEQ ID NO: 519286 - RNA, 19 nt, Homo sapiens
  misc_RNA (1)...(19): siRNA sense strand
ugaagccuccggauuugau

SEQ ID NO: 519287 - RNA, 19 nt, Homo sapiens
  misc_RNA (1)...(19): siRNA sense strand
ggacgaugcugccacugua

SEQ ID NO: 519288 - RNA, 19 nt, Homo sapiens
  misc_RNA (1)...(19): siRNA sense strand
gcugaugucuuccaaguau

SEQ ID NO: 519289 - RNA, 19 nt, Homo sapiens
  misc_RNA (1)...(19): siRNA sense strand
gccgggaucuuccugauuu

SEQ ID NO: 519290 - RNA, 19 nt, Homo sapiens
  misc_RNA (1)...(19): siRNA sense strand
aagcagagcuccguggaua

SEQ ID NO: 519291 - RNA, 19 nt, Homo sapiens
  misc_RNA (1)...(19): siRNA sense strand
ggagcacgcuggacucguu

SEQ ID NO: 519292 - RNA, 19 nt, Homo sapiens
  misc_RNA (1)...(19): siRNA sense strand
gcacccacgucaucccuaa

SEQ ID NO: 519293 - RNA, 19 nt, Homo sapiens
  misc_RNA (1)...(19): siRNA sense strand
cagagaaggugcugcaguu

SEQ ID NO: 519294 - RNA, 19 nt, Homo sapiens
  misc_RNA (1)...(19): siRNA sense strand
agaaggugcugcaguuuga

SEQ ID NO: 519295 - RNA, 19 nt, Homo sapiens
  misc_RNA (1)...(19): siRNA sense strand
gcaucgaccugcucaucaa

SEQ ID NO: 519296 - RNA, 19 nt, Homo sapiens
  misc_RNA (1)...(19): siRNA sense strand
ccaccagacugaagauugu

SEQ ID NO: 519297 - RNA, 19 nt, Homo sapiens
  misc_RNA (1)...(19): siRNA sense strand
ccacgagaauggcuucaug

SEQ ID NO: 519298 - RNA, 19 nt, Homo sapiens
  misc_RNA (1)...(19): siRNA sense strand
gcaacaagaaggaguggaa

SEQ ID NO: 519299 - RNA, 19 nt, Homo sapiens
  misc_RNA (1)...(19): siRNA sense strand
agagagugcugaugucuuc

SEQ ID NO: 519300 - RNA, 19 nt, Homo sapiens
  misc_RNA (1)...(19): siRNA sense strand
gaacaacagcaacaagaag

SEQ ID NO: 519301 - RNA, 19 nt, Homo sapiens
  misc_RNA (1)...(19): siRNA sense strand
gcacggcuccuggaagauu

SEQ ID NO: 519302 - RNA, 19 nt, Homo sapiens
  misc_RNA (1)...(19): siRNA sense strand
gcaaggaggaguucacagu

SEQ ID NO: 519303 - RNA, 19 nt, Homo sapiens
  misc_RNA (1)...(19): siRNA sense strand
caagugggcaucuacaaug

SEQ ID NO: 519304 - RNA, 19 nt, Homo sapiens
  misc_RNA (1)...(19): siRNA sense strand
gguggcagauggcaaguuc

SEQ ID NO: 519305 - RNA, 19 nt, Homo sapiens
  misc_RNA (1)...(19): siRNA sense strand
ggacaugcaaggaggaguu

SEQ ID NO: 519306 - RNA, 19 nt, Homo sapiens
  misc_RNA (1)...(19): siRNA sense strand
ggucuacgccauccuaguu

SEQ ID NO: 519307 - RNA, 19 nt, Homo sapiens
  misc_RNA (1)...(19): siRNA sense strand
gcaagugggcaucuacaau

SEQ ID NO: 519308 - RNA, 19 nt, Homo sapiens
  misc_RNA (1)...(19): siRNA sense strand
gaacgagucggcccacauc

SEQ ID NO: 519309 - RNA, 19 nt, Homo sapiens
  misc_RNA (1)...(19): siRNA sense strand
gagaaggugcugcaguuug

SEQ ID NO: 519310 - RNA, 19 nt, Homo sapiens
  misc_RNA (1)...(19): siRNA sense strand
ggaguggaaugggaugaug

SEQ ID NO: 519311 - RNA, 19 nt, Homo sapiens
  misc_RNA (1)...(19): siRNA sense strand
ugacggcccugcugaugga

SEQ ID NO: 519312 - RNA, 19 nt, Homo sapiens
  misc_RNA (1)...(19): siRNA sense strand
gacugaagauugugacgau

SEQ ID NO: 519313 - RNA, 19 nt, Homo sapiens
  misc_RNA (1)...(19): siRNA sense strand
ucaucgagauugccuacaa

SEQ ID NO: 519314 - RNA, 19 nt, Homo sapiens
  misc_RNA (1)...(19): siRNA sense strand
cuaguuagccauccaccua

SEQ ID NO: 519315 - RNA, 19 nt, Homo sapiens
  misc_RNA (1)...(19): siRNA sense strand
gugcugaugucuuccaagu

SEQ ID NO: 519316 - RNA, 19 nt, Homo sapiens
  misc_RNA (1)...(19): siRNA sense strand
uuuccaagcccuucaagua

SEQ ID NO: 519317 - RNA, 19 nt, Homo sapiens
  misc_RNA (1)...(19): siRNA sense strand
uggaagaccuggacaagac

SEQ ID NO: 519318 - RNA, 19 nt, Homo sapiens
  misc_RNA (1)...(19): siRNA sense strand
agacguggguucgguauca

SEQ ID NO: 519319 - RNA, 19 nt, Homo sapiens
  misc_RNA (1)...(19): siRNA sense strand
ggaagcacgagcagauguu

SEQ ID NO: 519320 - RNA, 19 nt, Homo sapiens
  misc_RNA (1)...(19): siRNA sense strand
cuacacagccggcuucuac

SEQ ID NO: 519321 - RNA, 19 nt, Homo sapiens
  misc_RNA (1)...(19): siRNA sense strand
guuaacguguggcggaaga

SEQ ID NO: 519322 - RNA, 19 nt, Homo sapiens
  misc_RNA (1)...(19): siRNA sense strand
cccaagaucgucaacauug

SEQ ID NO: 519323 - RNA, 19 nt, Homo sapiens
  misc_RNA (1)...(19): siRNA sense strand
gugaacaacagcaacaaga

SEQ ID NO: 519324 - RNA, 19 nt, Homo sapiens
  misc_RNA (1)...(19): siRNA sense strand
ccuggaagauucagcucaa

SEQ ID NO: 519325 - RNA, 19 nt, Homo sapiens
  misc_RNA (1)...(19): siRNA sense strand
caagcugcaugccuucauc

SEQ ID NO: 519326 - RNA, 19 nt, Homo sapiens
  misc_RNA (1)...(19): siRNA sense strand
ucaagagagugcugauguc

SEQ ID NO: 519327 - RNA, 19 nt, Homo sapiens
  misc_RNA (1)...(19): siRNA sense strand
cgagaauggcuucauggaa

SEQ ID NO: 519328 - RNA, 19 nt, Homo sapiens
  misc_RNA (1)...(19): siRNA sense strand
gcagagcuccguggauauc

SEQ ID NO: 519329 - RNA, 19 nt, Homo sapiens
  misc_RNA (1)...(19): siRNA sense strand
ugaacaacagcaacaagaa

SEQ ID NO: 519330 - RNA, 19 nt, Homo sapiens
  misc_RNA (1)...(19): siRNA sense strand
caacggcgacccagucaag

SEQ ID NO: 519331 - RNA, 19 nt, Homo sapiens
  misc_RNA (1)...(19): siRNA sense strand
gcaacaccaacaucuggaa

SEQ ID NO: 519332 - RNA, 19 nt, Homo sapiens
  misc_RNA (1)...(19): siRNA sense strand
ccacccgcauguccaucua

SEQ ID NO: 519333 - RNA, 19 nt, Homo sapiens
  misc_RNA (1)...(19): siRNA sense strand
cacaggagcgggugaacaa

SEQ ID NO: 519334 - RNA, 19 nt, Homo sapiens
  misc_RNA (1)...(19): siRNA sense strand
ccaacuacagcaucaugaa

SEQ ID NO: 519335 - RNA, 19 nt, Homo sapiens
  misc_RNA (1)...(19): siRNA sense strand
ggaagauucagcucaaugc

SEQ ID NO: 519336 - RNA, 19 nt, Homo sapiens
  misc_RNA (1)...(19): siRNA sense strand
gaagcacaacuacgagagu

SEQ ID NO: 519337 - RNA, 19 nt, Homo sapiens
  misc_RNA (1)...(19): siRNA sense strand
aaggaggaguucacaguca

SEQ ID NO: 519338 - RNA, 19 nt, Homo sapiens
  misc_RNA (1)...(19): siRNA sense strand
ccaccuccgucacgcacaa

SEQ ID NO: 519339 - RNA, 19 nt, Homo sapiens
  misc_RNA (1)...(19): siRNA sense strand
gcagaugcagcuggccuuu

SEQ ID NO: 519340 - RNA, 19 nt, Homo sapiens
  misc_RNA (1)...(19): siRNA sense strand
ccucaagucccacgagaau

SEQ ID NO: 519341 - RNA, 19 nt, Homo sapiens
  misc_RNA (1)...(19): siRNA sense strand
gcacacaggagcgggugaa

SEQ ID NO: 519342 - RNA, 19 nt, Homo sapiens
  misc_RNA (1)...(19): siRNA sense strand
ccuaaugacaggaagauca

SEQ ID NO: 519343 - RNA, 19 nt, Homo sapiens
  misc_RNA (1)...(19): siRNA sense strand
ccucgaggguaccagaugu

SEQ ID NO: 519344 - RNA, 19 nt, Homo sapiens
  misc_RNA (1)...(19): siRNA sense strand
agagcuccguggauaucua

SEQ ID NO: 519345 - RNA, 19 nt, Homo sapiens
  misc_RNA (1)...(19): siRNA sense strand
ugacuggucgcguggaguu

SEQ ID NO: 519346 - RNA, 19 nt, Homo sapiens
  misc_RNA (1)...(19): siRNA sense strand
caucgagauugccuacaag

SEQ ID NO: 519347 - RNA, 19 nt, Homo sapiens
  misc_RNA (1)...(19): siRNA sense strand
gcaaagacagccccuggaa

SEQ ID NO: 519348 - RNA, 19 nt, Homo sapiens
  misc_RNA (1)...(19): siRNA sense strand
uggagaagcacaacuacga

SEQ ID NO: 519349 - RNA, 19 nt, Homo sapiens
  misc_RNA (1)...(19): siRNA sense strand
ccaggucuacgccauccua

SEQ ID NO: 519350 - RNA, 19 nt, Homo sapiens
  misc_RNA (1)...(19): siRNA sense strand
gaagcacgagcagauguuc

SEQ ID NO: 519351 - RNA, 19 nt, Homo sapiens
  misc_RNA (1)...(19): siRNA sense strand
ccuacaagcggcacaagga

SEQ ID NO: 519352 - RNA, 19 nt, Homo sapiens
  misc_RNA (1)...(19): siRNA sense strand
ucaagucccacgagaaugg

SEQ ID NO: 519353 - RNA, 19 nt, Homo sapiens
  misc_RNA (1)...(19): siRNA sense strand
gaagcagagcuccguggau

SEQ ID NO: 519354 - RNA, 19 nt, Homo sapiens
  misc_RNA (1)...(19): siRNA sense strand
ccucggacaaguuuaucua

SEQ ID NO: 519355 - RNA, 19 nt, Homo sapiens
  misc_RNA (1)...(19): siRNA sense strand
caauggcacccacgucauc

SEQ ID NO: 519356 - RNA, 19 nt, Homo sapiens
  misc_RNA (1)...(19): siRNA sense strand
gcgugugguuugagaugau

SEQ ID NO: 519357 - RNA, 19 nt, Homo sapiens
  misc_RNA (1)...(19): siRNA sense strand
caacaagaaggaguggaau

SEQ ID NO: 519358 - RNA, 19 nt, Homo sapiens
  misc_RNA (1)...(19): siRNA sense strand
accaggagcccuucgugua

SEQ ID NO: 519359 - RNA, 19 nt, Homo sapiens
  misc_RNA (1)...(19): siRNA sense strand
gagugcugaugucuuccaa

SEQ ID NO: 519360 - RNA, 19 nt, Homo sapiens
  misc_RNA (1)...(19): siRNA sense strand
gaaccccucggacaaguuu

SEQ ID NO: 519361 - RNA, 19 nt, Homo sapiens
  misc_RNA (1)...(19): siRNA sense strand
gcucaucaacggcaagaac

SEQ ID NO: 519362 - RNA, 19 nt, Homo sapiens
  misc_RNA (1)...(19): siRNA sense strand
agaugcagcuggccuuugc

SEQ ID NO: 519363 - RNA, 19 nt, Homo sapiens
  misc_RNA (1)...(19): siRNA sense strand
aggaggaguucacagucaa

SEQ ID NO: 519364 - RNA, 19 nt, Homo sapiens
  misc_RNA (1)...(19): siRNA sense strand
ucaagcccacgcugaguga

SEQ ID NO: 519365 - RNA, 19 nt, Homo sapiens
  misc_RNA (1)...(19): siRNA sense strand
cagauguccaccagacuga

SEQ ID NO: 519366 - RNA, 19 nt, Homo sapiens
  misc_RNA (1)...(19): siRNA sense strand
caagagagugcugaugucu

SEQ ID NO: 519367 - RNA, 19 nt, Homo sapiens
  misc_RNA (1)...(19): siRNA sense strand
caagacguggguucgguau

SEQ ID NO: 519368 - RNA, 19 nt, Homo sapiens
  misc_RNA (1)...(19): siRNA sense strand
auauggagaagcacaacua

SEQ ID NO: 519369 - RNA, 19 nt, Homo sapiens
  misc_RNA (1)...(19): siRNA sense strand
ccaggagcccuucguguac

SEQ ID NO: 519370 - RNA, 19 nt, Homo sapiens
  misc_RNA (1)...(19): siRNA sense strand
caacuacagcaucaugaac

SEQ ID NO: 519371 - RNA, 19 nt, Homo sapiens
  misc_RNA (1)...(19): siRNA sense strand
gccaacuacagcaucauga

SEQ ID NO: 519372 - RNA, 19 nt, Homo sapiens
  misc_RNA (1)...(19): siRNA sense strand
gagcgcaucacgggcauca

SEQ ID NO: 519373 - RNA, 19 nt, Homo sapiens
  misc_RNA (1)...(19): siRNA sense strand
ggacgaugcugccacugua

SEQ ID NO: 519374 - RNA, 19 nt, Homo sapiens
  misc_RNA (1)...(19): siRNA sense strand
gcugaugucuuccaaguau

SEQ ID NO: 519375 - RNA, 19 nt, Homo sapiens
  misc_RNA (1)...(19): siRNA sense strand
gccgggaucuuccugauuu

SEQ ID NO: 519376 - RNA, 19 nt, Homo sapiens
  misc_RNA (1)...(19): siRNA sense strand
aagcagagcuccguggaua

SEQ ID NO: 519377 - RNA, 19 nt, Homo sapiens
  misc_RNA (1)...(19): siRNA sense strand
ggagcacgcuggacucguu

SEQ ID NO: 519378 - RNA, 19 nt, Homo sapiens
  misc_RNA (1)...(19): siRNA sense strand
gcacccacgucaucccuaa

SEQ ID NO: 519379 - RNA, 19 nt, Homo sapiens
  misc_RNA (1)...(19): siRNA sense strand
cagagaaggugcugcaguu

SEQ ID NO: 519380 - RNA, 19 nt, Homo sapiens
  misc_RNA (1)...(19): siRNA sense strand
agaaggugcugcaguuuga

SEQ ID NO: 519381 - RNA, 19 nt, Homo sapiens
  misc_RNA (1)...(19): siRNA sense strand
gcaucgaccugcucaucaa

SEQ ID NO: 519382 - RNA, 19 nt, Homo sapiens
  misc_RNA (1)...(19): siRNA sense strand
ccaccagacugaagauugu

SEQ ID NO: 519383 - RNA, 19 nt, Homo sapiens
  misc_RNA (1)...(19): siRNA sense strand
ccacgagaauggcuucaug

SEQ ID NO: 519384 - RNA, 19 nt, Homo sapiens
  misc_RNA (1)...(19): siRNA sense strand
gcaacaagaaggaguggaa

SEQ ID NO: 519385 - RNA, 19 nt, Homo sapiens
  misc_RNA (1)...(19): siRNA sense strand
agagagugcugaugucuuc

SEQ ID NO: 519386 - RNA, 19 nt, Homo sapiens
  misc_RNA (1)...(19): siRNA sense strand
gaacaacagcaacaagaag

SEQ ID NO: 519387 - RNA, 19 nt, Homo sapiens
  misc_RNA (1)...(19): siRNA sense strand
gcacggcuccuggaagauu

SEQ ID NO: 519388 - RNA, 19 nt, Homo sapiens
  misc_RNA (1)...(19): siRNA sense strand
gcaaggaggaguucacagu

SEQ ID NO: 519389 - RNA, 19 nt, Homo sapiens
  misc_RNA (1)...(19): siRNA sense strand
caagugggcaucuacaaug

SEQ ID NO: 519390 - RNA, 19 nt, Homo sapiens
  misc_RNA (1)...(19): siRNA sense strand
gguggcagauggcaaguuc

SEQ ID NO: 519391 - RNA, 19 nt, Homo sapiens
  misc_RNA (1)...(19): siRNA sense strand
ggacaugcaaggaggaguu

SEQ ID NO: 519392 - RNA, 19 nt, Homo sapiens
  misc_RNA (1)...(19): siRNA sense strand
ggucuacgccauccuaguu

SEQ ID NO: 519393 - RNA, 19 nt, Homo sapiens
  misc_RNA (1)...(19): siRNA sense strand
gcaagugggcaucuacaau

SEQ ID NO: 519394 - RNA, 19 nt, Homo sapiens
  misc_RNA (1)...(19): siRNA sense strand
gaacgagucggcccacauc

SEQ ID NO: 519395 - RNA, 19 nt, Homo sapiens
  misc_RNA (1)...(19): siRNA sense strand
gagaaggugcugcaguuug

SEQ ID NO: 519396 - RNA, 19 nt, Homo sapiens
  misc_RNA (1)...(19): siRNA sense strand
ggaguggaaugggaugaug

SEQ ID NO: 519397 - RNA, 19 nt, Homo sapiens
  misc_RNA (1)...(19): siRNA sense strand
ugacggcccugcugaugga

SEQ ID NO: 519398 - RNA, 19 nt, Homo sapiens
  misc_RNA (1)...(19): siRNA sense strand
gacugaagauugugacgau

SEQ ID NO: 519399 - RNA, 19 nt, Homo sapiens
  misc_RNA (1)...(19): siRNA sense strand
ucaucgagauugccuacaa

SEQ ID NO: 519400 - RNA, 19 nt, Homo sapiens
  misc_RNA (1)...(19): siRNA sense strand
cuaguuagccauccaccua

SEQ ID NO: 519401 - RNA, 19 nt, Homo sapiens
  misc_RNA (1)...(19): siRNA sense strand
gugcugaugucuuccaagu

SEQ ID NO: 519402 - RNA, 19 nt, Homo sapiens
  misc_RNA (1)...(19): siRNA sense strand
uuuccaagcccuucaagua

SEQ ID NO: 519403 - RNA, 19 nt, Homo sapiens
  misc_RNA (1)...(19): siRNA sense strand
uggaagaccuggacaagac

SEQ ID NO: 519404 - RNA, 19 nt, Homo sapiens
  misc_RNA (1)...(19): siRNA sense strand
agacguggguucgguauca

SEQ ID NO: 519405 - RNA, 19 nt, Homo sapiens
  misc_RNA (1)...(19): siRNA sense strand
ggaagcacgagcagauguu

SEQ ID NO: 519406 - RNA, 19 nt, Homo sapiens
  misc_RNA (1)...(19): siRNA sense strand
cuacacagccggcuucuac

SEQ ID NO: 519407 - RNA, 19 nt, Homo sapiens
  misc_RNA (1)...(19): siRNA sense strand
guuaacguguggcggaaga

SEQ ID NO: 519408 - RNA, 19 nt, Homo sapiens
  misc_RNA (1)...(19): siRNA sense strand
cccaagaucgucaacauug

SEQ ID NO: 519409 - RNA, 19 nt, Homo sapiens
  misc_RNA (1)...(19): siRNA sense strand
gugaacaacagcaacaaga

SEQ ID NO: 519410 - RNA, 19 nt, Homo sapiens
  misc_RNA (1)...(19): siRNA sense strand
ccuggaagauucagcucaa

SEQ ID NO: 519411 - RNA, 19 nt, Homo sapiens
  misc_RNA (1)...(19): siRNA sense strand
caagcugcaugccuucauc

SEQ ID NO: 519412 - RNA, 19 nt, Homo sapiens
  misc_RNA (1)...(19): siRNA sense strand
ucaagagagugcugauguc

SEQ ID NO: 519413 - RNA, 19 nt, Homo sapiens
  misc_RNA (1)...(19): siRNA sense strand
cgagaauggcuucauggaa

SEQ ID NO: 519414 - RNA, 19 nt, Homo sapiens
  misc_RNA (1)...(19): siRNA sense strand
gcagagcuccguggauauc

SEQ ID NO: 519415 - RNA, 19 nt, Homo sapiens
  misc_RNA (1)...(19): siRNA sense strand
ugaacaacagcaacaagaa

SEQ ID NO: 519416 - RNA, 19 nt, Homo sapiens
  misc_RNA (1)...(19): siRNA sense strand
caacggcgacccagucaag

SEQ ID NO: 519417 - RNA, 19 nt, Homo sapiens
  misc_RNA (1)...(19): siRNA sense strand
gcaacaccaacaucuggaa

SEQ ID NO: 519418 - RNA, 19 nt, Homo sapiens
  misc_RNA (1)...(19): siRNA sense strand
ccacccgcauguccaucua

SEQ ID NO: 519419 - RNA, 19 nt, Homo sapiens
  misc_RNA (1)...(19): siRNA sense strand
cacaggagcgggugaacaa

SEQ ID NO: 519420 - RNA, 19 nt, Homo sapiens
  misc_RNA (1)...(19): siRNA sense strand
ccaacuacagcaucaugaa

SEQ ID NO: 519421 - RNA, 19 nt, Homo sapiens
  misc_RNA (1)...(19): siRNA sense strand
ggaagauucagcucaaugc

SEQ ID NO: 519422 - RNA, 19 nt, Homo sapiens
  misc_RNA (1)...(19): siRNA sense strand
gaagcacaacuacgagagu

SEQ ID NO: 519423 - RNA, 19 nt, Homo sapiens
  misc_RNA (1)...(19): siRNA sense strand
aaggaggaguucacaguca

SEQ ID NO: 519424 - RNA, 19 nt, Homo sapiens
  misc_RNA (1)...(19): siRNA sense strand
ccaccuccgucacgcacaa

SEQ ID NO: 519425 - RNA, 19 nt, Homo sapiens
  misc_RNA (1)...(19): siRNA sense strand
gcagaugcagcuggccuuu

SEQ ID NO: 519426 - RNA, 19 nt, Homo sapiens
  misc_RNA (1)...(19): siRNA sense strand
ccucaagucccacgagaau

SEQ ID NO: 519427 - RNA, 19 nt, Homo sapiens
  misc_RNA (1)...(19): siRNA sense strand
gcacacaggagcgggugaa

SEQ ID NO: 519428 - RNA, 19 nt, Homo sapiens
  misc_RNA (1)...(19): siRNA sense strand
ccuaaugacaggaagauca

SEQ ID NO: 519429 - RNA, 19 nt, Homo sapiens
  misc_RNA (1)...(19): siRNA sense strand
ccucgaggguaccagaugu

SEQ ID NO: 519430 - RNA, 19 nt, Homo sapiens
  misc_RNA (1)...(19): siRNA sense strand
agagcuccguggauaucua

SEQ ID NO: 519431 - RNA, 19 nt, Homo sapiens
  misc_RNA (1)...(19): siRNA sense strand
ugacuggucgcguggaguu

SEQ ID NO: 519432 - RNA, 19 nt, Homo sapiens
  misc_RNA (1)...(19): siRNA sense strand
caucgagauugccuacaag

SEQ ID NO: 519433 - RNA, 19 nt, Homo sapiens
  misc_RNA (1)...(19): siRNA sense strand
gcaaagacagccccuggaa

SEQ ID NO: 519434 - RNA, 19 nt, Homo sapiens
  misc_RNA (1)...(19): siRNA sense strand
uggagaagcacaacuacga

SEQ ID NO: 519435 - RNA, 19 nt, Homo sapiens
  misc_RNA (1)...(19): siRNA sense strand
ccaggucuacgccauccua

SEQ ID NO: 519436 - RNA, 19 nt, Homo sapiens
  misc_RNA (1)...(19): siRNA sense strand
gaagcacgagcagauguuc

SEQ ID NO: 519437 - RNA, 19 nt, Homo sapiens
  misc_RNA (1)...(19): siRNA sense strand
ccuacaagcggcacaagga

SEQ ID NO: 519438 - RNA, 19 nt, Homo sapiens
  misc_RNA (1)...(19): siRNA sense strand
ucaagucccacgagaaugg

SEQ ID NO: 519439 - RNA, 19 nt, Homo sapiens
  misc_RNA (1)...(19): siRNA sense strand
gaagcagagcuccguggau

SEQ ID NO: 519440 - RNA, 19 nt, Homo sapiens
  misc_RNA (1)...(19): siRNA sense strand
ccucggacaaguuuaucua

SEQ ID NO: 519441 - RNA, 19 nt, Homo sapiens
  misc_RNA (1)...(19): siRNA sense strand
caauggcacccacgucauc

SEQ ID NO: 519442 - RNA, 19 nt, Homo sapiens
  misc_RNA (1)...(19): siRNA sense strand
gcgugugguuugagaugau

SEQ ID NO: 519443 - RNA, 19 nt, Homo sapiens
  misc_RNA (1)...(19): siRNA sense strand
caacaagaaggaguggaau

SEQ ID NO: 519444 - RNA, 19 nt, Homo sapiens
  misc_RNA (1)...(19): siRNA sense strand
accaggagcccuucgugua

SEQ ID NO: 519445 - RNA, 19 nt, Homo sapiens
  misc_RNA (1)...(19): siRNA sense strand
gagugcugaugucuuccaa

SEQ ID NO: 519446 - RNA, 19 nt, Homo sapiens
  misc_RNA (1)...(19): siRNA sense strand
gaaccccucggacaaguuu

SEQ ID NO: 519447 - RNA, 19 nt, Homo sapiens
  misc_RNA (1)...(19): siRNA sense strand
gcucaucaacggcaagaac

SEQ ID NO: 519448 - RNA, 19 nt, Homo sapiens
  misc_RNA (1)...(19): siRNA sense strand
agaugcagcuggccuuugc

SEQ ID NO: 519449 - RNA, 19 nt, Homo sapiens
  misc_RNA (1)...(19): siRNA sense strand
aggaggaguucacagucaa

SEQ ID NO: 519450 - RNA, 19 nt, Homo sapiens
  misc_RNA (1)...(19): siRNA sense strand
ucaagcccacgcugaguga

SEQ ID NO: 519451 - RNA, 19 nt, Homo sapiens
  misc_RNA (1)...(19): siRNA sense strand
cagauguccaccagacuga

SEQ ID NO: 519452 - RNA, 19 nt, Homo sapiens
  misc_RNA (1)...(19): siRNA sense strand
caagagagugcugaugucu

SEQ ID NO: 519453 - RNA, 19 nt, Homo sapiens
  misc_RNA (1)...(19): siRNA sense strand
caagacguggguucgguau

SEQ ID NO: 519454 - RNA, 19 nt, Homo sapiens
  misc_RNA (1)...(19): siRNA sense strand
auauggagaagcacaacua

SEQ ID NO: 519455 - RNA, 19 nt, Homo sapiens
  misc_RNA (1)...(19): siRNA sense strand
ccaggagcccuucguguac

SEQ ID NO: 519456 - RNA, 19 nt, Homo sapiens
  misc_RNA (1)...(19): siRNA sense strand
caacuacagcaucaugaac

SEQ ID NO: 519457 - RNA, 19 nt, Homo sapiens
  misc_RNA (1)...(19): siRNA sense strand
gccaacuacagcaucauga

SEQ ID NO: 519458 - RNA, 19 nt, Homo sapiens
  misc_RNA (1)...(19): siRNA sense strand
gagcgcaucacgggcauca

SEQ ID NO: 519459 - RNA, 19 nt, Homo sapiens
  misc_RNA (1)...(19): siRNA sense strand
ggacgaugcugccacugua

SEQ ID NO: 519460 - RNA, 19 nt, Homo sapiens
  misc_RNA (1)...(19): siRNA sense strand
gcugaugucuuccaaguau

SEQ ID NO: 519461 - RNA, 19 nt, Homo sapiens
  misc_RNA (1)...(19): siRNA sense strand
gccgggaucuuccugauuu

SEQ ID NO: 519462 - RNA, 19 nt, Homo sapiens
  misc_RNA (1)...(19): siRNA sense strand
aagcagagcuccguggaua

SEQ ID NO: 519463 - RNA, 19 nt, Homo sapiens
  misc_RNA (1)...(19): siRNA sense strand
ggagcacgcuggacucguu

SEQ ID NO: 519464 - RNA, 19 nt, Homo sapiens
  misc_RNA (1)...(19): siRNA sense strand
gcacccacgucaucccuaa

SEQ ID NO: 519465 - RNA, 19 nt, Homo sapiens
  misc_RNA (1)...(19): siRNA sense strand
cagagaaggugcugcaguu

SEQ ID NO: 519466 - RNA, 19 nt, Homo sapiens
  misc_RNA (1)...(19): siRNA sense strand
agaaggugcugcaguuuga

SEQ ID NO: 519467 - RNA, 19 nt, Homo sapiens
  misc_RNA (1)...(19): siRNA sense strand
gcaucgaccugcucaucaa

SEQ ID NO: 519468 - RNA, 19 nt, Homo sapiens
  misc_RNA (1)...(19): siRNA sense strand
ccaccagacugaagauugu

SEQ ID NO: 519469 - RNA, 19 nt, Homo sapiens
  misc_RNA (1)...(19): siRNA sense strand
ccacgagaauggcuucaug

SEQ ID NO: 519470 - RNA, 19 nt, Homo sapiens
  misc_RNA (1)...(19): siRNA sense strand
gcaacaagaaggaguggaa

SEQ ID NO: 519471 - RNA, 19 nt, Homo sapiens
  misc_RNA (1)...(19): siRNA sense strand
agagagugcugaugucuuc

SEQ ID NO: 519472 - RNA, 19 nt, Homo sapiens
  misc_RNA (1)...(19): siRNA sense strand
gaacaacagcaacaagaag

SEQ ID NO: 519473 - RNA, 19 nt, Homo sapiens
  misc_RNA (1)...(19): siRNA sense strand
gcacggcuccuggaagauu

SEQ ID NO: 519474 - RNA, 19 nt, Homo sapiens
  misc_RNA (1)...(19): siRNA sense strand
gcaaggaggaguucacagu

SEQ ID NO: 519475 - RNA, 19 nt, Homo sapiens
  misc_RNA (1)...(19): siRNA sense strand
caagugggcaucuacaaug

SEQ ID NO: 519476 - RNA, 19 nt, Homo sapiens
  misc_RNA (1)...(19): siRNA sense strand
gguggcagauggcaaguuc

SEQ ID NO: 519477 - RNA, 19 nt, Homo sapiens
  misc_RNA (1)...(19): siRNA sense strand
ggacaugcaaggaggaguu

SEQ ID NO: 519478 - RNA, 19 nt, Homo sapiens
  misc_RNA (1)...(19): siRNA sense strand
ggucuacgccauccuaguu

SEQ ID NO: 519479 - RNA, 19 nt, Homo sapiens
  misc_RNA (1)...(19): siRNA sense strand
gcaagugggcaucuacaau

SEQ ID NO: 519480 - RNA, 19 nt, Homo sapiens
  misc_RNA (1)...(19): siRNA sense strand
gaacgagucggcccacauc

SEQ ID NO: 519481 - RNA, 19 nt, Homo sapiens
  misc_RNA (1)...(19): siRNA sense strand
gagaaggugcugcaguuug

SEQ ID NO: 519482 - RNA, 19 nt, Homo sapiens
  misc_RNA (1)...(19): siRNA sense strand
ggaguggaaugggaugaug

SEQ ID NO: 519483 - RNA, 19 nt, Homo sapiens
  misc_RNA (1)...(19): siRNA sense strand
ugacggcccugcugaugga

SEQ ID NO: 519484 - RNA, 19 nt, Homo sapiens
  misc_RNA (1)...(19): siRNA sense strand
gacugaagauugugacgau

SEQ ID NO: 519485 - RNA, 19 nt, Homo sapiens
  misc_RNA (1)...(19): siRNA sense strand
ucaucgagauugccuacaa

SEQ ID NO: 519486 - RNA, 19 nt, Homo sapiens
  misc_RNA (1)...(19): siRNA sense strand
cuaguuagccauccaccua

SEQ ID NO: 519487 - RNA, 19 nt, Homo sapiens
  misc_RNA (1)...(19): siRNA sense strand
gugcugaugucuuccaagu

SEQ ID NO: 519488 - RNA, 19 nt, Homo sapiens
  misc_RNA (1)...(19): siRNA sense strand
uuuccaagcccuucaagua

SEQ ID NO: 519489 - RNA, 19 nt, Homo sapiens
  misc_RNA (1)...(19): siRNA sense strand
uggaagaccuggacaagac

SEQ ID NO: 519490 - RNA, 19 nt, Homo sapiens
  misc_RNA (1)...(19): siRNA sense strand
agacguggguucgguauca

SEQ ID NO: 519491 - RNA, 19 nt, Homo sapiens
  misc_RNA (1)...(19): siRNA sense strand
ggaagcacgagcagauguu

SEQ ID NO: 519492 - RNA, 19 nt, Homo sapiens
  misc_RNA (1)...(19): siRNA sense strand
cuacacagccggcuucuac

SEQ ID NO: 519493 - RNA, 19 nt, Homo sapiens
  misc_RNA (1)...(19): siRNA sense strand
guuaacguguggcggaaga

SEQ ID NO: 519494 - RNA, 19 nt, Homo sapiens
  misc_RNA (1)...(19): siRNA sense strand
cccaagaucgucaacauug

SEQ ID NO: 519495 - RNA, 19 nt, Homo sapiens
  misc_RNA (1)...(19): siRNA sense strand
gugaacaacagcaacaaga

SEQ ID NO: 519496 - RNA, 19 nt, Homo sapiens
  misc_RNA (1)...(19): siRNA sense strand
ccuggaagauucagcucaa

SEQ ID NO: 519497 - RNA, 19 nt, Homo sapiens
  misc_RNA (1)...(19): siRNA sense strand
caagcugcaugccuucauc

SEQ ID NO: 519498 - RNA, 19 nt, Homo sapiens
  misc_RNA (1)...(19): siRNA sense strand
ucaagagagugcugauguc

SEQ ID NO: 519499 - RNA, 19 nt, Homo sapiens
  misc_RNA (1)...(19): siRNA sense strand
cgagaauggcuucauggaa

SEQ ID NO: 519500 - RNA, 19 nt, Homo sapiens
  misc_RNA (1)...(19): siRNA sense strand
gcagagcuccguggauauc

SEQ ID NO: 519501 - RNA, 19 nt, Homo sapiens
  misc_RNA (1)...(19): siRNA sense strand
ugaacaacagcaacaagaa

SEQ ID NO: 519502 - RNA, 19 nt, Homo sapiens
  misc_RNA (1)...(19): siRNA sense strand
caacggcgacccagucaag

SEQ ID NO: 519503 - RNA, 19 nt, Homo sapiens
  misc_RNA (1)...(19): siRNA sense strand
gcaacaccaacaucuggaa

SEQ ID NO: 519504 - RNA, 19 nt, Homo sapiens
  misc_RNA (1)...(19): siRNA sense strand
ccacccgcauguccaucua

SEQ ID NO: 519505 - RNA, 19 nt, Homo sapiens
  misc_RNA (1)...(19): siRNA sense strand
cacaggagcgggugaacaa

SEQ ID NO: 519506 - RNA, 19 nt, Homo sapiens
  misc_RNA (1)...(19): siRNA sense strand
ccaacuacagcaucaugaa

SEQ ID NO: 519507 - RNA, 19 nt, Homo sapiens
  misc_RNA (1)...(19): siRNA sense strand
ggaagauucagcucaaugc

SEQ ID NO: 519508 - RNA, 19 nt, Homo sapiens
  misc_RNA (1)...(19): siRNA sense strand
gaagcacaacuacgagagu

SEQ ID NO: 519509 - RNA, 19 nt, Homo sapiens
  misc_RNA (1)...(19): siRNA sense strand
aaggaggaguucacaguca

SEQ ID NO: 519510 - RNA, 19 nt, Homo sapiens
  misc_RNA (1)...(19): siRNA sense strand
ccaccuccgucacgcacaa

SEQ ID NO: 519511 - RNA, 19 nt, Homo sapiens
  misc_RNA (1)...(19): siRNA sense strand
gcagaugcagcuggccuuu

SEQ ID NO: 519512 - RNA, 19 nt, Homo sapiens
  misc_RNA (1)...(19): siRNA sense strand
ccucaagucccacgagaau

SEQ ID NO: 519513 - RNA, 19 nt, Homo sapiens
  misc_RNA (1)...(19): siRNA sense strand
gcacacaggagcgggugaa

SEQ ID NO: 519514 - RNA, 19 nt, Homo sapiens
  misc_RNA (1)...(19): siRNA sense strand
ccuaaugacaggaagauca

SEQ ID NO: 519515 - RNA, 19 nt, Homo sapiens
  misc_RNA (1)...(19): siRNA sense strand
ccucgaggguaccagaugu

SEQ ID NO: 519516 - RNA, 19 nt, Homo sapiens
  misc_RNA (1)...(19): siRNA sense strand
agagcuccguggauaucua

SEQ ID NO: 519517 - RNA, 19 nt, Homo sapiens
  misc_RNA (1)...(19): siRNA sense strand
ugacuggucgcguggaguu

SEQ ID NO: 519518 - RNA, 19 nt, Homo sapiens
  misc_RNA (1)...(19): siRNA sense strand
caucgagauugccuacaag

SEQ ID NO: 519519 - RNA, 19 nt, Homo sapiens
  misc_RNA (1)...(19): siRNA sense strand
gcaaagacagccccuggaa

SEQ ID NO: 519520 - RNA, 19 nt, Homo sapiens
  misc_RNA (1)...(19): siRNA sense strand
uggagaagcacaacuacga

SEQ ID NO: 519521 - RNA, 19 nt, Homo sapiens
  misc_RNA (1)...(19): siRNA sense strand
ccaggucuacgccauccua

SEQ ID NO: 519522 - RNA, 19 nt, Homo sapiens
  misc_RNA (1)...(19): siRNA sense strand
gaagcacgagcagauguuc

SEQ ID NO: 519523 - RNA, 19 nt, Homo sapiens
  misc_RNA (1)...(19): siRNA sense strand
ccuacaagcggcacaagga

SEQ ID NO: 519524 - RNA, 19 nt, Homo sapiens
  misc_RNA (1)...(19): siRNA sense strand
ucaagucccacgagaaugg

SEQ ID NO: 519525 - RNA, 19 nt, Homo sapiens
  misc_RNA (1)...(19): siRNA sense strand
gaagcagagcuccguggau

SEQ ID NO: 519526 - RNA, 19 nt, Homo sapiens
  misc_RNA (1)...(19): siRNA sense strand
ccucggacaaguuuaucua

SEQ ID NO: 519527 - RNA, 19 nt, Homo sapiens
  misc_RNA (1)...(19): siRNA sense strand
caauggcacccacgucauc

SEQ ID NO: 519528 - RNA, 19 nt, Homo sapiens
  misc_RNA (1)...(19): siRNA sense strand
gcgugugguuugagaugau

SEQ ID NO: 519529 - RNA, 19 nt, Homo sapiens
  misc_RNA (1)...(19): siRNA sense strand
caacaagaaggaguggaau

SEQ ID NO: 519530 - RNA, 19 nt, Homo sapiens
  misc_RNA (1)...(19): siRNA sense strand
accaggagcccuucgugua

SEQ ID NO: 519531 - RNA, 19 nt, Homo sapiens
  misc_RNA (1)...(19): siRNA sense strand
gagugcugaugucuuccaa

SEQ ID NO: 519532 - RNA, 19 nt, Homo sapiens
  misc_RNA (1)...(19): siRNA sense strand
gaaccccucggacaaguuu

SEQ ID NO: 519533 - RNA, 19 nt, Homo sapiens
  misc_RNA (1)...(19): siRNA sense strand
gcucaucaacggcaagaac

SEQ ID NO: 519534 - RNA, 19 nt, Homo sapiens
  misc_RNA (1)...(19): siRNA sense strand
agaugcagcuggccuuugc

SEQ ID NO: 519535 - RNA, 19 nt, Homo sapiens
  misc_RNA (1)...(19): siRNA sense strand
aggaggaguucacagucaa

SEQ ID NO: 519536 - RNA, 19 nt, Homo sapiens
  misc_RNA (1)...(19): siRNA sense strand
ucaagcccacgcugaguga

SEQ ID NO: 519537 - RNA, 19 nt, Homo sapiens
  misc_RNA (1)...(19): siRNA sense strand
cagauguccaccagacuga

SEQ ID NO: 519538 - RNA, 19 nt, Homo sapiens
  misc_RNA (1)...(19): siRNA sense strand
caagagagugcugaugucu

SEQ ID NO: 519539 - RNA, 19 nt, Homo sapiens
  misc_RNA (1)...(19): siRNA sense strand
caagacguggguucgguau

SEQ ID NO: 519540 - RNA, 19 nt, Homo sapiens
  misc_RNA (1)...(19): siRNA sense strand
auauggagaagcacaacua

SEQ ID NO: 519541 - RNA, 19 nt, Homo sapiens
  misc_RNA (1)...(19): siRNA sense strand
ccaggagcccuucguguac

SEQ ID NO: 519542 - RNA, 19 nt, Homo sapiens
  misc_RNA (1)...(19): siRNA sense strand
caacuacagcaucaugaac

SEQ ID NO: 519543 - RNA, 19 nt, Homo sapiens
  misc_RNA (1)...(19): siRNA sense strand
gccaacuacagcaucauga

SEQ ID NO: 519544 - RNA, 19 nt, Homo sapiens
  misc_RNA (1)...(19): siRNA sense strand
gagcgcaucacgggcauca

SEQ ID NO: 519545 - RNA, 19 nt, Homo sapiens
  misc_RNA (1)...(19): siRNA sense strand
ggaaauggaucuacuugua

SEQ ID NO: 519546 - RNA, 19 nt, Homo sapiens
  misc_RNA (1)...(19): siRNA sense strand
gcacauauauucuuaaugg

SEQ ID NO: 519547 - RNA, 19 nt, Homo sapiens
  misc_RNA (1)...(19): siRNA sense strand
gcaguggucuaaagcauua

SEQ ID NO: 519548 - RNA, 19 nt, Homo sapiens
  misc_RNA (1)...(19): siRNA sense strand
cauagaagaugaugguuua

SEQ ID NO: 519549 - RNA, 19 nt, Homo sapiens
  misc_RNA (1)...(19): siRNA sense strand
gaagggaaaugguguauca

SEQ ID NO: 519550 - RNA, 19 nt, Homo sapiens
  misc_RNA (1)...(19): siRNA sense strand
gauggcacauauauucuua

SEQ ID NO: 519551 - RNA, 19 nt, Homo sapiens
  misc_RNA (1)...(19): siRNA sense strand
caccacagcccaugaauua

SEQ ID NO: 519552 - RNA, 19 nt, Homo sapiens
  misc_RNA (1)...(19): siRNA sense strand
gaaguacugugaaggcaaa

SEQ ID NO: 519553 - RNA, 19 nt, Homo sapiens
  misc_RNA (1)...(19): siRNA sense strand
gaaccaggauucccacaug

SEQ ID NO: 519554 - RNA, 19 nt, Homo sapiens
  misc_RNA (1)...(19): siRNA sense strand
gaaauggaucuacuuguaa

SEQ ID NO: 519555 - RNA, 19 nt, Homo sapiens
  misc_RNA (1)...(19): siRNA sense strand
gcaaugcccuucgaccuaa

SEQ ID NO: 519556 - RNA, 19 nt, Homo sapiens
  misc_RNA (1)...(19): siRNA sense strand
gaaggaaucuuucaaugcu

SEQ ID NO: 519557 - RNA, 19 nt, Homo sapiens
  misc_RNA (1)...(19): siRNA sense strand
uaaauacaccuacuucgua

SEQ ID NO: 519558 - RNA, 19 nt, Homo sapiens
  misc_RNA (1)...(19): siRNA sense strand
ugagagcugugauccuuua

SEQ ID NO: 519559 - RNA, 19 nt, Homo sapiens
  misc_RNA (1)...(19): siRNA sense strand
cacaggaacuggaagcaua

SEQ ID NO: 519560 - RNA, 19 nt, Homo sapiens
  misc_RNA (1)...(19): siRNA sense strand
ugaagugucugucccauga

SEQ ID NO: 519561 - RNA, 19 nt, Homo sapiens
  misc_RNA (1)...(19): siRNA sense strand
gaacuggaagcauaagaaa

SEQ ID NO: 519562 - RNA, 19 nt, Homo sapiens
  misc_RNA (1)...(19): siRNA sense strand
ugaauuaggccacguguuu

SEQ ID NO: 519563 - RNA, 19 nt, Homo sapiens
  misc_RNA (1)...(19): siRNA sense strand
cagcaugggucauugaaga

SEQ ID NO: 519564 - RNA, 19 nt, Homo sapiens
  misc_RNA (1)...(19): siRNA sense strand
gggcgaauguucuaaguca

SEQ ID NO: 519565 - RNA, 19 nt, Homo sapiens
  misc_RNA (1)...(19): siRNA sense strand
gaauuggguuggcagagaa

SEQ ID NO: 519566 - RNA, 19 nt, Homo sapiens
  misc_RNA (1)...(19): siRNA sense strand
gcugugauccuuuaaagaa

SEQ ID NO: 519567 - RNA, 19 nt, Homo sapiens
  misc_RNA (1)...(19): siRNA sense strand
aaauacaccuacuucguaa

SEQ ID NO: 519568 - RNA, 19 nt, Homo sapiens
  misc_RNA (1)...(19): siRNA sense strand
gaauuaggccacguguuua

SEQ ID NO: 519569 - RNA, 19 nt, Homo sapiens
  misc_RNA (1)...(19): siRNA sense strand
agagaagacugguagaaug

SEQ ID NO: 519570 - RNA, 19 nt, Homo sapiens
  misc_RNA (1)...(19): siRNA sense strand
gagcugugauccuuuaaag

SEQ ID NO: 519571 - RNA, 19 nt, Homo sapiens
  misc_RNA (1)...(19): siRNA sense strand
caaaggcauuggcuacuuc

SEQ ID NO: 519572 - RNA, 19 nt, Homo sapiens
  misc_RNA (1)...(19): siRNA sense strand
ggaaagcggagaccgaaga

SEQ ID NO: 519573 - RNA, 19 nt, Homo sapiens
  misc_RNA (1)...(19): siRNA sense strand
caugagagcugugauccuu

SEQ ID NO: 519574 - RNA, 19 nt, Homo sapiens
  misc_RNA (1)...(19): siRNA sense strand
gcugauggcacauauauuc

SEQ ID NO: 519575 - RNA, 19 nt, Homo sapiens
  misc_RNA (1)...(19): siRNA sense strand
caggaacaauggcagcuuu

SEQ ID NO: 519576 - RNA, 19 nt, Homo sapiens
  misc_RNA (1)...(19): siRNA sense strand
ggaacuggaagcauaagaa

SEQ ID NO: 519577 - RNA, 19 nt, Homo sapiens
  misc_RNA (1)...(19): siRNA sense strand
gaacaaaaccgacagaaag

SEQ ID NO: 519578 - RNA, 19 nt, Homo sapiens
  misc_RNA (1)...(19): siRNA sense strand
gcagugccaguuuacauuu

SEQ ID NO: 519579 - RNA, 19 nt, Homo sapiens
  misc_RNA (1)...(19): siRNA sense strand
ggagggaaguacugugaag

SEQ ID NO: 519580 - RNA, 19 nt, Homo sapiens
  misc_RNA (1)...(19): siRNA sense strand
uaaagaagaagaaggaauc

SEQ ID NO: 519581 - RNA, 19 nt, Homo sapiens
  misc_RNA (1)...(19): siRNA sense strand
gaacaauggcagcuuucuu

SEQ ID NO: 519582 - RNA, 19 nt, Homo sapiens
  misc_RNA (1)...(19): siRNA sense strand
ccaccaacaucgaagugaa

SEQ ID NO: 519583 - RNA, 19 nt, Homo sapiens
  misc_RNA (1)...(19): siRNA sense strand
cagaagcugcuccgucaua

SEQ ID NO: 519584 - RNA, 19 nt, Homo sapiens
  misc_RNA (1)...(19): siRNA sense strand
gggaauguuugauggacaa

SEQ ID NO: 519585 - RNA, 19 nt, Homo sapiens
  misc_RNA (1)...(19): siRNA sense strand
ugcagugccuacaugauua

SEQ ID NO: 519586 - RNA, 19 nt, Homo sapiens
  misc_RNA (1)...(19): siRNA sense strand
agaagaugaugguuuacaa

SEQ ID NO: 519587 - RNA, 19 nt, Homo sapiens
  misc_RNA (1)...(19): siRNA sense strand
gcacuaugacacagcaauu

SEQ ID NO: 519588 - RNA, 19 nt, Homo sapiens
  misc_RNA (1)...(19): siRNA sense strand
ggaguccaguacacgauga

SEQ ID NO: 519589 - RNA, 19 nt, Homo sapiens
  misc_RNA (1)...(19): siRNA sense strand
gauaucaucacaauuccaa

SEQ ID NO: 519590 - RNA, 19 nt, Homo sapiens
  misc_RNA (1)...(19): siRNA sense strand
acaccuacuucguaaagaa

SEQ ID NO: 519591 - RNA, 19 nt, Homo sapiens
  misc_RNA (1)...(19): siRNA sense strand
ggagaagggaaauggugua

SEQ ID NO: 519592 - RNA, 19 nt, Homo sapiens
  misc_RNA (1)...(19): siRNA sense strand
gcagagaagacugguagaa

SEQ ID NO: 519593 - RNA, 19 nt, Homo sapiens
  misc_RNA (1)...(19): siRNA sense strand
gcagccagauuguacaaac

SEQ ID NO: 519594 - RNA, 19 nt, Homo sapiens
  misc_RNA (1)...(19): siRNA sense strand
ugaauuggguuggcagaga

SEQ ID NO: 519595 - RNA, 19 nt, Homo sapiens
  misc_RNA (1)...(19): siRNA sense strand
gcagcuuucuugccaucaa

SEQ ID NO: 519596 - RNA, 19 nt, Homo sapiens
  misc_RNA (1)...(19): siRNA sense strand
agaaagaagcgauuugugu

SEQ ID NO: 519597 - RNA, 19 nt, Homo sapiens
  misc_RNA (1)...(19): siRNA sense strand
ccagacaugugauacucuu

SEQ ID NO: 519598 - RNA, 19 nt, Homo sapiens
  misc_RNA (1)...(19): siRNA sense strand
gugcaaggacaguguguaa

SEQ ID NO: 519599 - RNA, 19 nt, Homo sapiens
  misc_RNA (1)...(19): siRNA sense strand
caaagaauggagggaagua

SEQ ID NO: 519600 - RNA, 19 nt, Homo sapiens
  misc_RNA (1)...(19): siRNA sense strand
ugggauggcugauguugga

SEQ ID NO: 519601 - RNA, 19 nt, Homo sapiens
  misc_RNA (1)...(19): siRNA sense strand
gguguugucuugagguaca

SEQ ID NO: 519602 - RNA, 19 nt, Homo sapiens
  misc_RNA (1)...(19): siRNA sense strand
gcucaucugccaagccaaa

SEQ ID NO: 519603 - RNA, 19 nt, Homo sapiens
  misc_RNA (1)...(19): siRNA sense strand
gcaaggacaguguguaaaa

SEQ ID NO: 519604 - RNA, 19 nt, Homo sapiens
  misc_RNA (1)...(19): siRNA sense strand
cuaaagcauuaccuucuca

SEQ ID NO: 519605 - RNA, 19 nt, Homo sapiens
  misc_RNA (1)...(19): siRNA sense strand
guaaagaagaagaaggaau

SEQ ID NO: 519606 - RNA, 19 nt, Homo sapiens
  misc_RNA (1)...(19): siRNA sense strand
gcauaagaaagaagcgauu

SEQ ID NO: 519607 - RNA, 19 nt, Homo sapiens
  misc_RNA (1)...(19): siRNA sense strand
cggcaagugugugaacaaa

SEQ ID NO: 519608 - RNA, 19 nt, Homo sapiens
  misc_RNA (1)...(19): siRNA sense strand
uaagaaagaagcgauuugu

SEQ ID NO: 519609 - RNA, 19 nt, Homo sapiens
  misc_RNA (1)...(19): siRNA sense strand
gaagaugaugguuuacaag

SEQ ID NO: 519610 - RNA, 19 nt, Homo sapiens
  misc_RNA (1)...(19): siRNA sense strand
agcauuaccuucucacguu

SEQ ID NO: 519611 - RNA, 19 nt, Homo sapiens
  misc_RNA (1)...(19): siRNA sense strand
cagcauucguaauucaguu

SEQ ID NO: 519612 - RNA, 19 nt, Homo sapiens
  misc_RNA (1)...(19): siRNA sense strand
ugauaaaugugguguuugc

SEQ ID NO: 519613 - RNA, 19 nt, Homo sapiens
  misc_RNA (1)...(19): siRNA sense strand
gugccuacaugauuacauc

SEQ ID NO: 519614 - RNA, 19 nt, Homo sapiens
  misc_RNA (1)...(19): siRNA sense strand
ggccggaagugaccuccaa

SEQ ID NO: 519615 - RNA, 19 nt, Homo sapiens
  misc_RNA (1)...(19): siRNA sense strand
caccuuagagcaagacauu

SEQ ID NO: 519616 - RNA, 19 nt, Homo sapiens
  misc_RNA (1)...(19): siRNA sense strand
gaguggucaucauguucua

SEQ ID NO: 519617 - RNA, 19 nt, Homo sapiens
  misc_RNA (1)...(19): siRNA sense strand
gggaugcagagcacuauga

SEQ ID NO: 519618 - RNA, 19 nt, Homo sapiens
  misc_RNA (1)...(19): siRNA sense strand
aaagaagcuugaagugucu

SEQ ID NO: 519619 - RNA, 19 nt, Homo sapiens
  misc_RNA (1)...(19): siRNA sense strand
gcgaauguucuaagucaug

SEQ ID NO: 519620 - RNA, 19 nt, Homo sapiens
  misc_RNA (1)...(19): siRNA sense strand
gcccuucgaccuaaaauua

SEQ ID NO: 519621 - RNA, 19 nt, Homo sapiens
  misc_RNA (1)...(19): siRNA sense strand
ugaagcacacaacgaguuu

SEQ ID NO: 519622 - RNA, 19 nt, Homo sapiens
  misc_RNA (1)...(19): siRNA sense strand
caaacgagugcgcuacaga

SEQ ID NO: 519623 - RNA, 19 nt, Homo sapiens
  misc_RNA (1)...(19): siRNA sense strand
ucaaugcuauccccacuuu

SEQ ID NO: 519624 - RNA, 19 nt, Homo sapiens
  misc_RNA (1)...(19): siRNA sense strand
cagcuuucuugccaucaaa

SEQ ID NO: 519625 - RNA, 19 nt, Homo sapiens
  misc_RNA (1)...(19): siRNA sense strand
cauaagaaagaagcgauuu

SEQ ID NO: 519626 - RNA, 19 nt, Homo sapiens
  misc_RNA (1)...(19): siRNA sense strand
ggaagugaccuccaaugcu

SEQ ID NO: 519627 - RNA, 19 nt, Homo sapiens
  misc_RNA (1)...(19): siRNA sense strand
cgaauguucuaagucaugu

SEQ ID NO: 519628 - RNA, 19 nt, Homo sapiens
  misc_RNA (1)...(19): siRNA sense strand
ccauccagguucuuacugu

SEQ ID NO: 519629 - RNA, 19 nt, Homo sapiens
  misc_RNA (1)...(19): siRNA sense strand
gcagugugccagccuuaau

SEQ ID NO: 519630 - RNA, 19 nt, Homo sapiens
  misc_RNA (1)...(19): siRNA sense strand
uaugacacagcaauucuuu

SEQ ID NO: 519631 - RNA, 19 nt, Homo sapiens
  misc_RNA (1)...(19): siRNA sense strand
gcugcuccgucauagaaga

SEQ ID NO: 519632 - RNA, 19 nt, Homo sapiens
  misc_RNA (1)...(19): siRNA sense strand
gagaagacugguagaaugc

SEQ ID NO: 519633 - RNA, 19 nt, Homo sapiens
  misc_RNA (1)...(19): siRNA sense strand
aacaauggcagcuuucuug

SEQ ID NO: 519634 - RNA, 19 nt, Homo sapiens
  misc_RNA (1)...(19): siRNA sense strand
ggccugcgguggaauggau

SEQ ID NO: 519635 - RNA, 19 nt, Homo sapiens
  misc_RNA (1)...(19): siRNA sense strand
gugaagcacacaacgaguu

SEQ ID NO: 519636 - RNA, 19 nt, Homo sapiens
  misc_RNA (1)...(19): siRNA sense strand
uuagagaggaacaauguga

SEQ ID NO: 519637 - RNA, 19 nt, Homo sapiens
  misc_RNA (1)...(19): siRNA sense strand
aaaccgacagaaagcauuu

SEQ ID NO: 519638 - RNA, 19 nt, Homo sapiens
  misc_RNA (1)...(19): siRNA sense strand
gcaagugugugaacaaaac

SEQ ID NO: 519639 - RNA, 19 nt, Homo sapiens
  misc_RNA (1)...(19): siRNA sense strand
gaugcagccagcacaugua

SEQ ID NO: 519640 - RNA, 19 nt, Homo sapiens
  misc_RNA (1)...(19): siRNA sense strand
gauuacaucauuucuggau

SEQ ID NO: 519641 - RNA, 19 nt, Homo sapiens
  misc_RNA (1)...(19): siRNA sense strand
gagaagggaaaugguguau

SEQ ID NO: 519642 - RNA, 19 nt, Homo sapiens
  misc_RNA (1)...(19): siRNA sense strand
uuaauggugacuacacuuu

SEQ ID NO: 519643 - RNA, 19 nt, Homo sapiens
  misc_RNA (1)...(19): siRNA sense strand
ggacagcccacaggaacug

SEQ ID NO: 519644 - RNA, 19 nt, Homo sapiens
  misc_RNA (1)...(19): siRNA sense strand
gcaaacgagugcgcuacag

SEQ ID NO: 519645 - RNA, 19 nt, Homo sapiens
  misc_RNA (1)...(19): siRNA sense strand
caacaaagaugccaaggau

SEQ ID NO: 519646 - RNA, 19 nt, Homo sapiens
  misc_RNA (1)...(19): siRNA sense strand
gcaccaagcucaagaagca

SEQ ID NO: 519647 - RNA, 19 nt, Homo sapiens
  misc_RNA (1)...(19): siRNA sense strand
gaaaagggcuuggagauga

SEQ ID NO: 519648 - RNA, 19 nt, Homo sapiens
  misc_RNA (1)...(19): siRNA sense strand
cagaagaaguguuucagaa

SEQ ID NO: 519649 - RNA, 19 nt, Homo sapiens
  misc_RNA (1)...(19): siRNA sense strand
cgagugagcuggacuugga

SEQ ID NO: 519650 - RNA, 19 nt, Homo sapiens
  misc_RNA (1)...(19): siRNA sense strand
caggagcgcuuccgcauga

SEQ ID NO: 519651 - RNA, 19 nt, Homo sapiens
  misc_RNA (1)...(19): siRNA sense strand
ugaaugggaucgaaguaaa

SEQ ID NO: 519652 - RNA, 19 nt, Homo sapiens
  misc_RNA (1)...(19): siRNA sense strand
cggagaggcugaagaagaa

SEQ ID NO: 519653 - RNA, 19 nt, Homo sapiens
  misc_RNA (1)...(19): siRNA sense strand
ggacacagcugagccaaac

SEQ ID NO: 519654 - RNA, 19 nt, Homo sapiens
  misc_RNA (1)...(19): siRNA sense strand
gcacgcugguccuccauga

SEQ ID NO: 519655 - RNA, 19 nt, Homo sapiens
  misc_RNA (1)...(19): siRNA sense strand
ccacucagccacuggauuu

SEQ ID NO: 519656 - RNA, 19 nt, Homo sapiens
  misc_RNA (1)...(19): siRNA sense strand
agaaggaggcagucaauaa

SEQ ID NO: 519657 - RNA, 19 nt, Homo sapiens
  misc_RNA (1)...(19): siRNA sense strand
gagaccaucuucuucaaag

SEQ ID NO: 519658 - RNA, 19 nt, Homo sapiens
  misc_RNA (1)...(19): siRNA sense strand
guaaagcucucggucaagu

SEQ ID NO: 519659 - RNA, 19 nt, Homo sapiens
  misc_RNA (1)...(19): siRNA sense strand
gcaaaacgcagcaguauga

SEQ ID NO: 519660 - RNA, 19 nt, Homo sapiens
  misc_RNA (1)...(19): siRNA sense strand
cuacggaguugccauggaa

SEQ ID NO: 519661 - RNA, 19 nt, Homo sapiens
  misc_RNA (1)...(19): siRNA sense strand
gcauuccgcugaccaucaa

SEQ ID NO: 519662 - RNA, 19 nt, Homo sapiens
  misc_RNA (1)...(19): siRNA sense strand
uggaaacucugcucuacaa

SEQ ID NO: 519663 - RNA, 19 nt, Homo sapiens
  misc_RNA (1)...(19): siRNA sense strand
gaaggaggcagucaauaag

SEQ ID NO: 519664 - RNA, 19 nt, Homo sapiens
  misc_RNA (1)...(19): siRNA sense strand
gacugcagcuccaaugaga

SEQ ID NO: 519665 - RNA, 19 nt, Homo sapiens
  misc_RNA (1)...(19): siRNA sense strand
caagaacucucuggaaacu

SEQ ID NO: 519666 - RNA, 19 nt, Homo sapiens
  misc_RNA (1)...(19): siRNA sense strand
gcacugcugcugcccauga

SEQ ID NO: 519667 - RNA, 19 nt, Homo sapiens
  misc_RNA (1)...(19): siRNA sense strand
gagagaagagggcgaacaa

SEQ ID NO: 519668 - RNA, 19 nt, Homo sapiens
  misc_RNA (1)...(19): siRNA sense strand
gaccaacucgugugugaaa

SEQ ID NO: 519669 - RNA, 19 nt, Homo sapiens
  misc_RNA (1)...(19): siRNA sense strand
caaagugccugagcucuac

SEQ ID NO: 519670 - RNA, 19 nt, Homo sapiens
  misc_RNA (1)...(19): siRNA sense strand
gcagaagaaguguuucaga

SEQ ID NO: 519671 - RNA, 19 nt, Homo sapiens
  misc_RNA (1)...(19): siRNA sense strand
augaggagcuggacgcuuu

SEQ ID NO: 519672 - RNA, 19 nt, Homo sapiens
  misc_RNA (1)...(19): siRNA sense strand
accaagaacucucuggaaa

SEQ ID NO: 519673 - RNA, 19 nt, Homo sapiens
  misc_RNA (1)...(19): siRNA sense strand
ucgcagaacucgcaacagu

SEQ ID NO: 519674 - RNA, 19 nt, Homo sapiens
  misc_RNA (1)...(19): siRNA sense strand
gauuuaagcagaguucaaa

SEQ ID NO: 519675 - RNA, 19 nt, Homo sapiens
  misc_RNA (1)...(19): siRNA sense strand
agacguugcuggccaagga

SEQ ID NO: 519676 - RNA, 19 nt, Homo sapiens
  misc_RNA (1)...(19): siRNA sense strand
ccucuucacugacgaguuc

SEQ ID NO: 519677 - RNA, 19 nt, Homo sapiens
  misc_RNA (1)...(19): siRNA sense strand
caggcacgcugaagcugua

SEQ ID NO: 519678 - RNA, 19 nt, Homo sapiens
  misc_RNA (1)...(19): siRNA sense strand
agagugacauccagagaga

SEQ ID NO: 519679 - RNA, 19 nt, Homo sapiens
  misc_RNA (1)...(19): siRNA sense strand
gaucuccucugacuaugag

SEQ ID NO: 519680 - RNA, 19 nt, Homo sapiens
  misc_RNA (1)...(19): siRNA sense strand
gagaaggaggcagucaaua

SEQ ID NO: 519681 - RNA, 19 nt, Homo sapiens
  misc_RNA (1)...(19): siRNA sense strand
gguccaaggugcccuacau

SEQ ID NO: 519682 - RNA, 19 nt, Homo sapiens
  misc_RNA (1)...(19): siRNA sense strand
cagcugagccaaacuggaa

SEQ ID NO: 519683 - RNA, 19 nt, Homo sapiens
  misc_RNA (1)...(19): siRNA sense strand
gaagugcugucaggccaau

SEQ ID NO: 519684 - RNA, 19 nt, Homo sapiens
  misc_RNA (1)...(19): siRNA sense strand
gcaacaaagaugccaagga

SEQ ID NO: 519685 - RNA, 19 nt, Homo sapiens
  misc_RNA (1)...(19): siRNA sense strand
ucaggccaaugcucaguuu

SEQ ID NO: 519686 - RNA, 19 nt, Homo sapiens
  misc_RNA (1)...(19): siRNA sense strand
gagcaggagaagcgccuua

SEQ ID NO: 519687 - RNA, 19 nt, Homo sapiens
  misc_RNA (1)...(19): siRNA sense strand
aaguaaagcucucggucaa

SEQ ID NO: 519688 - RNA, 19 nt, Homo sapiens
  misc_RNA (1)...(19): siRNA sense strand
gagcuggacgcuuugaaga

SEQ ID NO: 519689 - RNA, 19 nt, Homo sapiens
  misc_RNA (1)...(19): siRNA sense strand
ucaaagugccugagcucua

SEQ ID NO: 519690 - RNA, 19 nt, Homo sapiens
  misc_RNA (1)...(19): siRNA sense strand
gaucgagaccaucuucuuc

SEQ ID NO: 519691 - RNA, 19 nt, Homo sapiens
  misc_RNA (1)...(19): siRNA sense strand
gaaggucaacgacaaagag

SEQ ID NO: 519692 - RNA, 19 nt, Homo sapiens
  misc_RNA (1)...(19): siRNA sense strand
gugugaaacuccagacugu

SEQ ID NO: 519693 - RNA, 19 nt, Homo sapiens
  misc_RNA (1)...(19): siRNA sense strand
ugaucuaccugcagacguu

SEQ ID NO: 519694 - RNA, 19 nt, Homo sapiens
  misc_RNA (1)...(19): siRNA sense strand
ucuacgagauccacaagga

SEQ ID NO: 519695 - RNA, 19 nt, Homo sapiens
  misc_RNA (1)...(19): siRNA sense strand
ugagcgagauggacgugaa

SEQ ID NO: 519696 - RNA, 19 nt, Homo sapiens
  misc_RNA (1)...(19): siRNA sense strand
cuacggagaggcugaagaa

SEQ ID NO: 519697 - RNA, 19 nt, Homo sapiens
  misc_RNA (1)...(19): siRNA sense strand
gcuggacgcuuugaagauc

SEQ ID NO: 519698 - RNA, 19 nt, Homo sapiens
  misc_RNA (1)...(19): siRNA sense strand
gaccaagaacucucuggaa

SEQ ID NO: 519699 - RNA, 19 nt, Homo sapiens
  misc_RNA (1)...(19): siRNA sense strand
ucuauggguuucugaaugu

SEQ ID NO: 519700 - RNA, 19 nt, Homo sapiens
  misc_RNA (1)...(19): siRNA sense strand
ccaaggauccaacgaccaa

SEQ ID NO: 519701 - RNA, 19 nt, Homo sapiens
  misc_RNA (1)...(19): siRNA sense strand
gggagcagcagaagaagug

SEQ ID NO: 519702 - RNA, 19 nt, Homo sapiens
  misc_RNA (1)...(19): siRNA sense strand
ugccugagcucuacgagau

SEQ ID NO: 519703 - RNA, 19 nt, Homo sapiens
  misc_RNA (1)...(19): siRNA sense strand
guucuccaccgaagucuaa

SEQ ID NO: 519704 - RNA, 19 nt, Homo sapiens
  misc_RNA (1)...(19): siRNA sense strand
caaccucgccacggucuuu

SEQ ID NO: 519705 - RNA, 19 nt, Homo sapiens
  misc_RNA (1)...(19): siRNA sense strand
ucucccagaucaagaguga

SEQ ID NO: 519706 - RNA, 19 nt, Homo sapiens
  misc_RNA (1)...(19): siRNA sense strand
gaagcagagcggaggcaaa

SEQ ID NO: 519707 - RNA, 19 nt, Homo sapiens
  misc_RNA (1)...(19): siRNA sense strand
ugaaaaggguggcagagaa

SEQ ID NO: 519708 - RNA, 19 nt, Homo sapiens
  misc_RNA (1)...(19): siRNA sense strand
ggacauccaggcacugaag

SEQ ID NO: 519709 - RNA, 19 nt, Homo sapiens
  misc_RNA (1)...(19): siRNA sense strand
gggccuucguggacaacua

SEQ ID NO: 519710 - RNA, 19 nt, Homo sapiens
  misc_RNA (1)...(19): siRNA sense strand
agaacucucuggaaacucu

SEQ ID NO: 519711 - RNA, 19 nt, Homo sapiens
  misc_RNA (1)...(19): siRNA sense strand
gccagaagcaacaaagaug

SEQ ID NO: 519712 - RNA, 19 nt, Homo sapiens
  misc_RNA (1)...(19): siRNA sense strand
gaccaucuucuucaaagug

SEQ ID NO: 519713 - RNA, 19 nt, Homo sapiens
  misc_RNA (1)...(19): siRNA sense strand
ggaggcagucaauaagaug

SEQ ID NO: 519714 - RNA, 19 nt, Homo sapiens
  misc_RNA (1)...(19): siRNA sense strand
cagcaucaaugaggagauc

SEQ ID NO: 519715 - RNA, 19 nt, Homo sapiens
  misc_RNA (1)...(19): siRNA sense strand
uggaggaggugggcaucua

SEQ ID NO: 519716 - RNA, 19 nt, Homo sapiens
  misc_RNA (1)...(19): siRNA sense strand
uggauuccuuuggguauuu

SEQ ID NO: 519717 - RNA, 19 nt, Homo sapiens
  misc_RNA (1)...(19): siRNA sense strand
ggauuuaagcagaguucaa

SEQ ID NO: 519718 - RNA, 19 nt, Homo sapiens
  misc_RNA (1)...(19): siRNA sense strand
cugaccaacucguguguga

SEQ ID NO: 519719 - RNA, 19 nt, Homo sapiens
  misc_RNA (1)...(19): siRNA sense strand
cuacgaggacgccgaguug

SEQ ID NO: 519720 - RNA, 19 nt, Homo sapiens
  misc_RNA (1)...(19): siRNA sense strand
ccugaucuccucugacuau

SEQ ID NO: 519721 - RNA, 19 nt, Homo sapiens
  misc_RNA (1)...(19): siRNA sense strand
ucacugcugcugcuuaugu

SEQ ID NO: 519722 - RNA, 19 nt, Homo sapiens
  misc_RNA (1)...(19): siRNA sense strand
caagagugacauccagaga

SEQ ID NO: 519723 - RNA, 19 nt, Homo sapiens
  misc_RNA (1)...(19): siRNA sense strand
gaaugucaucguccacuca

SEQ ID NO: 519724 - RNA, 19 nt, Homo sapiens
  misc_RNA (1)...(19): siRNA sense strand
gaaugggaucgaaguaaag

SEQ ID NO: 519725 - RNA, 19 nt, Homo sapiens
  misc_RNA (1)...(19): siRNA sense strand
gcccaugaagccuuugaaa

SEQ ID NO: 519726 - RNA, 19 nt, Homo sapiens
  misc_RNA (1)...(19): siRNA sense strand
uuucagacccgguugcaaa

SEQ ID NO: 519727 - RNA, 19 nt, Homo sapiens
  misc_RNA (1)...(19): siRNA sense strand
ucacggaucucagcuucca

SEQ ID NO: 519728 - RNA, 19 nt, Homo sapiens
  misc_RNA (1)...(19): siRNA sense strand
ggcaguccaugacggugaa

SEQ ID NO: 519729 - RNA, 19 nt, Homo sapiens
  misc_RNA (1)...(19): siRNA sense strand
gagccagaagcaacaaaga

SEQ ID NO: 519730 - RNA, 19 nt, Homo sapiens
  misc_RNA (1)...(19): siRNA sense strand
ggugaaggucaacgacaaa

SEQ ID NO: 519731 - RNA, 19 nt, Homo sapiens
  misc_RNA (1)...(19): siRNA sense strand
cagacccgguugcaaagga

SEQ ID NO: 519732 - RNA, 19 nt, Homo sapiens
  misc_RNA (1)...(19): siRNA sense strand
ccacgccgcagugccauaa

SEQ ID NO: 519733 - RNA, 19 nt, Homo sapiens
  misc_RNA (1)...(19): siRNA sense strand
ggacugcagcuccaaugag

SEQ ID NO: 519734 - RNA, 19 nt, Homo sapiens
  misc_RNA (1)...(19): siRNA sense strand
guggauuccuuuggguauu

SEQ ID NO: 519735 - RNA, 19 nt, Homo sapiens
  misc_RNA (1)...(19): siRNA sense strand
gagucacugcugcugcuua

SEQ ID NO: 519736 - RNA, 19 nt, Homo sapiens
  misc_RNA (1)...(19): siRNA sense strand
ugggcgaccucuuccagaa

SEQ ID NO: 519737 - RNA, 19 nt, Homo sapiens
  misc_RNA (1)...(19): siRNA sense strand
gcagaucuggcccaacgau

SEQ ID NO: 519738 - RNA, 19 nt, Homo sapiens
  misc_RNA (1)...(19): siRNA sense strand
gcaccucugagcaggagaa

SEQ ID NO: 519739 - RNA, 19 nt, Homo sapiens
  misc_RNA (1)...(19): siRNA sense strand
cgagaccaucuucuucaaa

SEQ ID NO: 519740 - RNA, 19 nt, Homo sapiens
  misc_RNA (1)...(19): siRNA sense strand
ucgagaccaucuucuucaa

SEQ ID NO: 519741 - RNA, 19 nt, Homo sapiens
  misc_RNA (1)...(19): siRNA sense strand
cagcagaagaaguguuuca

SEQ ID NO: 519742 - RNA, 19 nt, Homo sapiens
  misc_RNA (1)...(19): siRNA sense strand
agucacugcugcugcuuau

SEQ ID NO: 519743 - RNA, 19 nt, Homo sapiens
  misc_RNA (1)...(19): siRNA sense strand
ggagcuggacgcuuugaag

SEQ ID NO: 519744 - RNA, 19 nt, Homo sapiens
  misc_RNA (1)...(19): siRNA sense strand
ggccaaugcucaguuugca

SEQ ID NO: 519745 - RNA, 19 nt, Homo sapiens
  misc_RNA (1)...(19): siRNA sense strand
caacaaagaugccaaggau

SEQ ID NO: 519746 - RNA, 19 nt, Homo sapiens
  misc_RNA (1)...(19): siRNA sense strand
gcaccaagcucaagaagca

SEQ ID NO: 519747 - RNA, 19 nt, Homo sapiens
  misc_RNA (1)...(19): siRNA sense strand
gaaaagggcuuggagauga

SEQ ID NO: 519748 - RNA, 19 nt, Homo sapiens
  misc_RNA (1)...(19): siRNA sense strand
cagaagaaguguuucagaa

SEQ ID NO: 519749 - RNA, 19 nt, Homo sapiens
  misc_RNA (1)...(19): siRNA sense strand
cgagugagcuggacuugga

SEQ ID NO: 519750 - RNA, 19 nt, Homo sapiens
  misc_RNA (1)...(19): siRNA sense strand
caggagcgcuuccgcauga

SEQ ID NO: 519751 - RNA, 19 nt, Homo sapiens
  misc_RNA (1)...(19): siRNA sense strand
ugaaugggaucgaaguaaa

SEQ ID NO: 519752 - RNA, 19 nt, Homo sapiens
  misc_RNA (1)...(19): siRNA sense strand
cggagaggcugaagaagaa

SEQ ID NO: 519753 - RNA, 19 nt, Homo sapiens
  misc_RNA (1)...(19): siRNA sense strand
ggacacagcugagccaaac

SEQ ID NO: 519754 - RNA, 19 nt, Homo sapiens
  misc_RNA (1)...(19): siRNA sense strand
gcacgcugguccuccauga

SEQ ID NO: 519755 - RNA, 19 nt, Homo sapiens
  misc_RNA (1)...(19): siRNA sense strand
ccacucagccacuggauuu

SEQ ID NO: 519756 - RNA, 19 nt, Homo sapiens
  misc_RNA (1)...(19): siRNA sense strand
agaaggaggcagucaauaa

SEQ ID NO: 519757 - RNA, 19 nt, Homo sapiens
  misc_RNA (1)...(19): siRNA sense strand
gagaccaucuucuucaaag

SEQ ID NO: 519758 - RNA, 19 nt, Homo sapiens
  misc_RNA (1)...(19): siRNA sense strand
guaaagcucucggucaagu

SEQ ID NO: 519759 - RNA, 19 nt, Homo sapiens
  misc_RNA (1)...(19): siRNA sense strand
gcaaaacgcagcaguauga

SEQ ID NO: 519760 - RNA, 19 nt, Homo sapiens
  misc_RNA (1)...(19): siRNA sense strand
cuacggaguugccauggaa

SEQ ID NO: 519761 - RNA, 19 nt, Homo sapiens
  misc_RNA (1)...(19): siRNA sense strand
gcauuccgcugaccaucaa

SEQ ID NO: 519762 - RNA, 19 nt, Homo sapiens
  misc_RNA (1)...(19): siRNA sense strand
uggaaacucugcucuacaa

SEQ ID NO: 519763 - RNA, 19 nt, Homo sapiens
  misc_RNA (1)...(19): siRNA sense strand
gaaggaggcagucaauaag

SEQ ID NO: 519764 - RNA, 19 nt, Homo sapiens
  misc_RNA (1)...(19): siRNA sense strand
gacugcagcuccaaugaga

SEQ ID NO: 519765 - RNA, 19 nt, Homo sapiens
  misc_RNA (1)...(19): siRNA sense strand
caagaacucucuggaaacu

SEQ ID NO: 519766 - RNA, 19 nt, Homo sapiens
  misc_RNA (1)...(19): siRNA sense strand
gcacugcugcugcccauga

SEQ ID NO: 519767 - RNA, 19 nt, Homo sapiens
  misc_RNA (1)...(19): siRNA sense strand
gagagaagagggcgaacaa

SEQ ID NO: 519768 - RNA, 19 nt, Homo sapiens
  misc_RNA (1)...(19): siRNA sense strand
gaccaacucgugugugaaa

SEQ ID NO: 519769 - RNA, 19 nt, Homo sapiens
  misc_RNA (1)...(19): siRNA sense strand
caaagugccugagcucuac

SEQ ID NO: 519770 - RNA, 19 nt, Homo sapiens
  misc_RNA (1)...(19): siRNA sense strand
gcagaagaaguguuucaga

SEQ ID NO: 519771 - RNA, 19 nt, Homo sapiens
  misc_RNA (1)...(19): siRNA sense strand
augaggagcuggacgcuuu

SEQ ID NO: 519772 - RNA, 19 nt, Homo sapiens
  misc_RNA (1)...(19): siRNA sense strand
accaagaacucucuggaaa

SEQ ID NO: 519773 - RNA, 19 nt, Homo sapiens
  misc_RNA (1)...(19): siRNA sense strand
ucgcagaacucgcaacagu

SEQ ID NO: 519774 - RNA, 19 nt, Homo sapiens
  misc_RNA (1)...(19): siRNA sense strand
gauuuaagcagaguucaaa

SEQ ID NO: 519775 - RNA, 19 nt, Homo sapiens
  misc_RNA (1)...(19): siRNA sense strand
agacguugcuggccaagga

SEQ ID NO: 519776 - RNA, 19 nt, Homo sapiens
  misc_RNA (1)...(19): siRNA sense strand
ccucuucacugacgaguuc

SEQ ID NO: 519777 - RNA, 19 nt, Homo sapiens
  misc_RNA (1)...(19): siRNA sense strand
caggcacgcugaagcugua

SEQ ID NO: 519778 - RNA, 19 nt, Homo sapiens
  misc_RNA (1)...(19): siRNA sense strand
agagugacauccagagaga

SEQ ID NO: 519779 - RNA, 19 nt, Homo sapiens
  misc_RNA (1)...(19): siRNA sense strand
gaucuccucugacuaugag

SEQ ID NO: 519780 - RNA, 19 nt, Homo sapiens
  misc_RNA (1)...(19): siRNA sense strand
gagaaggaggcagucaaua

SEQ ID NO: 519781 - RNA, 19 nt, Homo sapiens
  misc_RNA (1)...(19): siRNA sense strand
gguccaaggugcccuacau

SEQ ID NO: 519782 - RNA, 19 nt, Homo sapiens
  misc_RNA (1)...(19): siRNA sense strand
cagcugagccaaacuggaa

SEQ ID NO: 519783 - RNA, 19 nt, Homo sapiens
  misc_RNA (1)...(19): siRNA sense strand
gaagugcugucaggccaau

SEQ ID NO: 519784 - RNA, 19 nt, Homo sapiens
  misc_RNA (1)...(19): siRNA sense strand
gcaacaaagaugccaagga

SEQ ID NO: 519785 - RNA, 19 nt, Homo sapiens
  misc_RNA (1)...(19): siRNA sense strand
ucaggccaaugcucaguuu

SEQ ID NO: 519786 - RNA, 19 nt, Homo sapiens
  misc_RNA (1)...(19): siRNA sense strand
gagcaggagaagcgccuua

SEQ ID NO: 519787 - RNA, 19 nt, Homo sapiens
  misc_RNA (1)...(19): siRNA sense strand
aaguaaagcucucggucaa

SEQ ID NO: 519788 - RNA, 19 nt, Homo sapiens
  misc_RNA (1)...(19): siRNA sense strand
gagcuggacgcuuugaaga

SEQ ID NO: 519789 - RNA, 19 nt, Homo sapiens
  misc_RNA (1)...(19): siRNA sense strand
ucaaagugccugagcucua

SEQ ID NO: 519790 - RNA, 19 nt, Homo sapiens
  misc_RNA (1)...(19): siRNA sense strand
gaucgagaccaucuucuuc

SEQ ID NO: 519791 - RNA, 19 nt, Homo sapiens
  misc_RNA (1)...(19): siRNA sense strand
gaaggucaacgacaaagag

SEQ ID NO: 519792 - RNA, 19 nt, Homo sapiens
  misc_RNA (1)...(19): siRNA sense strand
gugugaaacuccagacugu

SEQ ID NO: 519793 - RNA, 19 nt, Homo sapiens
  misc_RNA (1)...(19): siRNA sense strand
ugaucuaccugcagacguu

SEQ ID NO: 519794 - RNA, 19 nt, Homo sapiens
  misc_RNA (1)...(19): siRNA sense strand
ucuacgagauccacaagga

SEQ ID NO: 519795 - RNA, 19 nt, Homo sapiens
  misc_RNA (1)...(19): siRNA sense strand
ugagcgagauggacgugaa

SEQ ID NO: 519796 - RNA, 19 nt, Homo sapiens
  misc_RNA (1)...(19): siRNA sense strand
cuacggagaggcugaagaa

SEQ ID NO: 519797 - RNA, 19 nt, Homo sapiens
  misc_RNA (1)...(19): siRNA sense strand
gcuggacgcuuugaagauc

SEQ ID NO: 519798 - RNA, 19 nt, Homo sapiens
  misc_RNA (1)...(19): siRNA sense strand
gaccaagaacucucuggaa

SEQ ID NO: 519799 - RNA, 19 nt, Homo sapiens
  misc_RNA (1)...(19): siRNA sense strand
ucuauggguuucugaaugu

SEQ ID NO: 519800 - RNA, 19 nt, Homo sapiens
  misc_RNA (1)...(19): siRNA sense strand
ccaaggauccaacgaccaa

SEQ ID NO: 519801 - RNA, 19 nt, Homo sapiens
  misc_RNA (1)...(19): siRNA sense strand
gggagcagcagaagaagug

SEQ ID NO: 519802 - RNA, 19 nt, Homo sapiens
  misc_RNA (1)...(19): siRNA sense strand
ugccugagcucuacgagau

SEQ ID NO: 519803 - RNA, 19 nt, Homo sapiens
  misc_RNA (1)...(19): siRNA sense strand
guucuccaccgaagucuaa

SEQ ID NO: 519804 - RNA, 19 nt, Homo sapiens
  misc_RNA (1)...(19): siRNA sense strand
caaccucgccacggucuuu

SEQ ID NO: 519805 - RNA, 19 nt, Homo sapiens
  misc_RNA (1)...(19): siRNA sense strand
ucucccagaucaagaguga

SEQ ID NO: 519806 - RNA, 19 nt, Homo sapiens
  misc_RNA (1)...(19): siRNA sense strand
gaagcagagcggaggcaaa

SEQ ID NO: 519807 - RNA, 19 nt, Homo sapiens
  misc_RNA (1)...(19): siRNA sense strand
ugaaaaggguggcagagaa

SEQ ID NO: 519808 - RNA, 19 nt, Homo sapiens
  misc_RNA (1)...(19): siRNA sense strand
ggacauccaggcacugaag

SEQ ID NO: 519809 - RNA, 19 nt, Homo sapiens
  misc_RNA (1)...(19): siRNA sense strand
gggccuucguggacaacua

SEQ ID NO: 519810 - RNA, 19 nt, Homo sapiens
  misc_RNA (1)...(19): siRNA sense strand
agaacucucuggaaacucu

SEQ ID NO: 519811 - RNA, 19 nt, Homo sapiens
  misc_RNA (1)...(19): siRNA sense strand
gccagaagcaacaaagaug

SEQ ID NO: 519812 - RNA, 19 nt, Homo sapiens
  misc_RNA (1)...(19): siRNA sense strand
gaccaucuucuucaaagug

SEQ ID NO: 519813 - RNA, 19 nt, Homo sapiens
  misc_RNA (1)...(19): siRNA sense strand
ggaggcagucaauaagaug

SEQ ID NO: 519814 - RNA, 19 nt, Homo sapiens
  misc_RNA (1)...(19): siRNA sense strand
cagcaucaaugaggagauc

SEQ ID NO: 519815 - RNA, 19 nt, Homo sapiens
  misc_RNA (1)...(19): siRNA sense strand
uggaggaggugggcaucua

SEQ ID NO: 519816 - RNA, 19 nt, Homo sapiens
  misc_RNA (1)...(19): siRNA sense strand
uggauuccuuuggguauuu

SEQ ID NO: 519817 - RNA, 19 nt, Homo sapiens
  misc_RNA (1)...(19): siRNA sense strand
ggauuuaagcagaguucaa

SEQ ID NO: 519818 - RNA, 19 nt, Homo sapiens
  misc_RNA (1)...(19): siRNA sense strand
cugaccaacucguguguga

SEQ ID NO: 519819 - RNA, 19 nt, Homo sapiens
  misc_RNA (1)...(19): siRNA sense strand
cuacgaggacgccgaguug

SEQ ID NO: 519820 - RNA, 19 nt, Homo sapiens
  misc_RNA (1)...(19): siRNA sense strand
ccugaucuccucugacuau

SEQ ID NO: 519821 - RNA, 19 nt, Homo sapiens
  misc_RNA (1)...(19): siRNA sense strand
ucacugcugcugcuuaugu

SEQ ID NO: 519822 - RNA, 19 nt, Homo sapiens
  misc_RNA (1)...(19): siRNA sense strand
caagagugacauccagaga

SEQ ID NO: 519823 - RNA, 19 nt, Homo sapiens
  misc_RNA (1)...(19): siRNA sense strand
gaaugucaucguccacuca

SEQ ID NO: 519824 - RNA, 19 nt, Homo sapiens
  misc_RNA (1)...(19): siRNA sense strand
gaaugggaucgaaguaaag

SEQ ID NO: 519825 - RNA, 19 nt, Homo sapiens
  misc_RNA (1)...(19): siRNA sense strand
gcccaugaagccuuugaaa

SEQ ID NO: 519826 - RNA, 19 nt, Homo sapiens
  misc_RNA (1)...(19): siRNA sense strand
uuucagacccgguugcaaa

SEQ ID NO: 519827 - RNA, 19 nt, Homo sapiens
  misc_RNA (1)...(19): siRNA sense strand
ucacggaucucagcuucca

SEQ ID NO: 519828 - RNA, 19 nt, Homo sapiens
  misc_RNA (1)...(19): siRNA sense strand
ggcaguccaugacggugaa

SEQ ID NO: 519829 - RNA, 19 nt, Homo sapiens
  misc_RNA (1)...(19): siRNA sense strand
gagccagaagcaacaaaga

SEQ ID NO: 519830 - RNA, 19 nt, Homo sapiens
  misc_RNA (1)...(19): siRNA sense strand
ggugaaggucaacgacaaa

SEQ ID NO: 519831 - RNA, 19 nt, Homo sapiens
  misc_RNA (1)...(19): siRNA sense strand
cagacccgguugcaaagga

SEQ ID NO: 519832 - RNA, 19 nt, Homo sapiens
  misc_RNA (1)...(19): siRNA sense strand
ccacgccgcagugccauaa

SEQ ID NO: 519833 - RNA, 19 nt, Homo sapiens
  misc_RNA (1)...(19): siRNA sense strand
ggacugcagcuccaaugag

SEQ ID NO: 519834 - RNA, 19 nt, Homo sapiens
  misc_RNA (1)...(19): siRNA sense strand
guggauuccuuuggguauu

SEQ ID NO: 519835 - RNA, 19 nt, Homo sapiens
  misc_RNA (1)...(19): siRNA sense strand
gagucacugcugcugcuua

SEQ ID NO: 519836 - RNA, 19 nt, Homo sapiens
  misc_RNA (1)...(19): siRNA sense strand
ugggcgaccucuuccagaa

SEQ ID NO: 519837 - RNA, 19 nt, Homo sapiens
  misc_RNA (1)...(19): siRNA sense strand
gcagaucuggcccaacgau

SEQ ID NO: 519838 - RNA, 19 nt, Homo sapiens
  misc_RNA (1)...(19): siRNA sense strand
gcaccucugagcaggagaa

SEQ ID NO: 519839 - RNA, 19 nt, Homo sapiens
  misc_RNA (1)...(19): siRNA sense strand
cgagaccaucuucuucaaa

SEQ ID NO: 519840 - RNA, 19 nt, Homo sapiens
  misc_RNA (1)...(19): siRNA sense strand
ucgagaccaucuucuucaa

SEQ ID NO: 519841 - RNA, 19 nt, Homo sapiens
  misc_RNA (1)...(19): siRNA sense strand
cagcagaagaaguguuuca

SEQ ID NO: 519842 - RNA, 19 nt, Homo sapiens
  misc_RNA (1)...(19): siRNA sense strand
agucacugcugcugcuuau

SEQ ID NO: 519843 - RNA, 19 nt, Homo sapiens
  misc_RNA (1)...(19): siRNA sense strand
ggagcuggacgcuuugaag

SEQ ID NO: 519844 - RNA, 19 nt, Homo sapiens
  misc_RNA (1)...(19): siRNA sense strand
ggccaaugcucaguuugca

SEQ ID NO: 519845 - RNA, 19 nt, Homo sapiens
  misc_RNA (1)...(19): siRNA sense strand
caacaaagaugccaaggau

SEQ ID NO: 519846 - RNA, 19 nt, Homo sapiens
  misc_RNA (1)...(19): siRNA sense strand
gcaccaagcucaagaagca

SEQ ID NO: 519847 - RNA, 19 nt, Homo sapiens
  misc_RNA (1)...(19): siRNA sense strand
gaaaagggcuuggagauga

SEQ ID NO: 519848 - RNA, 19 nt, Homo sapiens
  misc_RNA (1)...(19): siRNA sense strand
cagaagaaguguuucagaa

SEQ ID NO: 519849 - RNA, 19 nt, Homo sapiens
  misc_RNA (1)...(19): siRNA sense strand
cgagugagcuggacuugga

SEQ ID NO: 519850 - RNA, 19 nt, Homo sapiens
  misc_RNA (1)...(19): siRNA sense strand
caggagcgcuuccgcauga

SEQ ID NO: 519851 - RNA, 19 nt, Homo sapiens
  misc_RNA (1)...(19): siRNA sense strand
ugaaugggaucgaaguaaa

SEQ ID NO: 519852 - RNA, 19 nt, Homo sapiens
  misc_RNA (1)...(19): siRNA sense strand
cggagaggcugaagaagaa

SEQ ID NO: 519853 - RNA, 19 nt, Homo sapiens
  misc_RNA (1)...(19): siRNA sense strand
ggacacagcugagccaaac

SEQ ID NO: 519854 - RNA, 19 nt, Homo sapiens
  misc_RNA (1)...(19): siRNA sense strand
gcacgcugguccuccauga

SEQ ID NO: 519855 - RNA, 19 nt, Homo sapiens
  misc_RNA (1)...(19): siRNA sense strand
ccacucagccacuggauuu

SEQ ID NO: 519856 - RNA, 19 nt, Homo sapiens
  misc_RNA (1)...(19): siRNA sense strand
agaaggaggcagucaauaa

SEQ ID NO: 519857 - RNA, 19 nt, Homo sapiens
  misc_RNA (1)...(19): siRNA sense strand
gagaccaucuucuucaaag

SEQ ID NO: 519858 - RNA, 19 nt, Homo sapiens
  misc_RNA (1)...(19): siRNA sense strand
guaaagcucucggucaagu

SEQ ID NO: 519859 - RNA, 19 nt, Homo sapiens
  misc_RNA (1)...(19): siRNA sense strand
gcaaaacgcagcaguauga

SEQ ID NO: 519860 - RNA, 19 nt, Homo sapiens
  misc_RNA (1)...(19): siRNA sense strand
cuacggaguugccauggaa

SEQ ID NO: 519861 - RNA, 19 nt, Homo sapiens
  misc_RNA (1)...(19): siRNA sense strand
gcauuccgcugaccaucaa

SEQ ID NO: 519862 - RNA, 19 nt, Homo sapiens
  misc_RNA (1)...(19): siRNA sense strand
uggaaacucugcucuacaa

SEQ ID NO: 519863 - RNA, 19 nt, Homo sapiens
  misc_RNA (1)...(19): siRNA sense strand
gaaggaggcagucaauaag

SEQ ID NO: 519864 - RNA, 19 nt, Homo sapiens
  misc_RNA (1)...(19): siRNA sense strand
gacugcagcuccaaugaga

SEQ ID NO: 519865 - RNA, 19 nt, Homo sapiens
  misc_RNA (1)...(19): siRNA sense strand
caagaacucucuggaaacu

SEQ ID NO: 519866 - RNA, 19 nt, Homo sapiens
  misc_RNA (1)...(19): siRNA sense strand
gcacugcugcugcccauga

SEQ ID NO: 519867 - RNA, 19 nt, Homo sapiens
  misc_RNA (1)...(19): siRNA sense strand
gagagaagagggcgaacaa

SEQ ID NO: 519868 - RNA, 19 nt, Homo sapiens
  misc_RNA (1)...(19): siRNA sense strand
gaccaacucgugugugaaa

SEQ ID NO: 519869 - RNA, 19 nt, Homo sapiens
  misc_RNA (1)...(19): siRNA sense strand
caaagugccugagcucuac

SEQ ID NO: 519870 - RNA, 19 nt, Homo sapiens
  misc_RNA (1)...(19): siRNA sense strand
gcagaagaaguguuucaga

SEQ ID NO: 519871 - RNA, 19 nt, Homo sapiens
  misc_RNA (1)...(19): siRNA sense strand
augaggagcuggacgcuuu

SEQ ID NO: 519872 - RNA, 19 nt, Homo sapiens
  misc_RNA (1)...(19): siRNA sense strand
accaagaacucucuggaaa

SEQ ID NO: 519873 - RNA, 19 nt, Homo sapiens
  misc_RNA (1)...(19): siRNA sense strand
ucgcagaacucgcaacagu

SEQ ID NO: 519874 - RNA, 19 nt, Homo sapiens
  misc_RNA (1)...(19): siRNA sense strand
gauuuaagcagaguucaaa

SEQ ID NO: 519875 - RNA, 19 nt, Homo sapiens
  misc_RNA (1)...(19): siRNA sense strand
agacguugcuggccaagga

SEQ ID NO: 519876 - RNA, 19 nt, Homo sapiens
  misc_RNA (1)...(19): siRNA sense strand
ccucuucacugacgaguuc

SEQ ID NO: 519877 - RNA, 19 nt, Homo sapiens
  misc_RNA (1)...(19): siRNA sense strand
caggcacgcugaagcugua

SEQ ID NO: 519878 - RNA, 19 nt, Homo sapiens
  misc_RNA (1)...(19): siRNA sense strand
agagugacauccagagaga

SEQ ID NO: 519879 - RNA, 19 nt, Homo sapiens
  misc_RNA (1)...(19): siRNA sense strand
gaucuccucugacuaugag

SEQ ID NO: 519880 - RNA, 19 nt, Homo sapiens
  misc_RNA (1)...(19): siRNA sense strand
gagaaggaggcagucaaua

SEQ ID NO: 519881 - RNA, 19 nt, Homo sapiens
  misc_RNA (1)...(19): siRNA sense strand
gguccaaggugcccuacau

SEQ ID NO: 519882 - RNA, 19 nt, Homo sapiens
  misc_RNA (1)...(19): siRNA sense strand
cagcugagccaaacuggaa

SEQ ID NO: 519883 - RNA, 19 nt, Homo sapiens
  misc_RNA (1)...(19): siRNA sense strand
gaagugcugucaggccaau

SEQ ID NO: 519884 - RNA, 19 nt, Homo sapiens
  misc_RNA (1)...(19): siRNA sense strand
gcaacaaagaugccaagga

SEQ ID NO: 519885 - RNA, 19 nt, Homo sapiens
  misc_RNA (1)...(19): siRNA sense strand
ucaggccaaugcucaguuu

SEQ ID NO: 519886 - RNA, 19 nt, Homo sapiens
  misc_RNA (1)...(19): siRNA sense strand
gagcaggagaagcgccuua

SEQ ID NO: 519887 - RNA, 19 nt, Homo sapiens
  misc_RNA (1)...(19): siRNA sense strand
aaguaaagcucucggucaa

SEQ ID NO: 519888 - RNA, 19 nt, Homo sapiens
  misc_RNA (1)...(19): siRNA sense strand
gagcuggacgcuuugaaga

SEQ ID NO: 519889 - RNA, 19 nt, Homo sapiens
  misc_RNA (1)...(19): siRNA sense strand
ucaaagugccugagcucua

SEQ ID NO: 519890 - RNA, 19 nt, Homo sapiens
  misc_RNA (1)...(19): siRNA sense strand
gaucgagaccaucuucuuc

SEQ ID NO: 519891 - RNA, 19 nt, Homo sapiens
  misc_RNA (1)...(19): siRNA sense strand
gaaggucaacgacaaagag

SEQ ID NO: 519892 - RNA, 19 nt, Homo sapiens
  misc_RNA (1)...(19): siRNA sense strand
gugugaaacuccagacugu

SEQ ID NO: 519893 - RNA, 19 nt, Homo sapiens
  misc_RNA (1)...(19): siRNA sense strand
ugaucuaccugcagacguu

SEQ ID NO: 519894 - RNA, 19 nt, Homo sapiens
  misc_RNA (1)...(19): siRNA sense strand
ucuacgagauccacaagga

SEQ ID NO: 519895 - RNA, 19 nt, Homo sapiens
  misc_RNA (1)...(19): siRNA sense strand
ugagcgagauggacgugaa

SEQ ID NO: 519896 - RNA, 19 nt, Homo sapiens
  misc_RNA (1)...(19): siRNA sense strand
cuacggagaggcugaagaa

SEQ ID NO: 519897 - RNA, 19 nt, Homo sapiens
  misc_RNA (1)...(19): siRNA sense strand
gcuggacgcuuugaagauc

SEQ ID NO: 519898 - RNA, 19 nt, Homo sapiens
  misc_RNA (1)...(19): siRNA sense strand
gaccaagaacucucuggaa

SEQ ID NO: 519899 - RNA, 19 nt, Homo sapiens
  misc_RNA (1)...(19): siRNA sense strand
ucuauggguuucugaaugu

SEQ ID NO: 519900 - RNA, 19 nt, Homo sapiens
  misc_RNA (1)...(19): siRNA sense strand
ccaaggauccaacgaccaa

SEQ ID NO: 519901 - RNA, 19 nt, Homo sapiens
  misc_RNA (1)...(19): siRNA sense strand
gggagcagcagaagaagug

SEQ ID NO: 519902 - RNA, 19 nt, Homo sapiens
  misc_RNA (1)...(19): siRNA sense strand
ugccugagcucuacgagau

SEQ ID NO: 519903 - RNA, 19 nt, Homo sapiens
  misc_RNA (1)...(19): siRNA sense strand
guucuccaccgaagucuaa

SEQ ID NO: 519904 - RNA, 19 nt, Homo sapiens
  misc_RNA (1)...(19): siRNA sense strand
caaccucgccacggucuuu

SEQ ID NO: 519905 - RNA, 19 nt, Homo sapiens
  misc_RNA (1)...(19): siRNA sense strand
ucucccagaucaagaguga

SEQ ID NO: 519906 - RNA, 19 nt, Homo sapiens
  misc_RNA (1)...(19): siRNA sense strand
gaagcagagcggaggcaaa

SEQ ID NO: 519907 - RNA, 19 nt, Homo sapiens
  misc_RNA (1)...(19): siRNA sense strand
ugaaaaggguggcagagaa

SEQ ID NO: 519908 - RNA, 19 nt, Homo sapiens
  misc_RNA (1)...(19): siRNA sense strand
ggacauccaggcacugaag

SEQ ID NO: 519909 - RNA, 19 nt, Homo sapiens
  misc_RNA (1)...(19): siRNA sense strand
gggccuucguggacaacua

SEQ ID NO: 519910 - RNA, 19 nt, Homo sapiens
  misc_RNA (1)...(19): siRNA sense strand
agaacucucuggaaacucu

SEQ ID NO: 519911 - RNA, 19 nt, Homo sapiens
  misc_RNA (1)...(19): siRNA sense strand
gccagaagcaacaaagaug

SEQ ID NO: 519912 - RNA, 19 nt, Homo sapiens
  misc_RNA (1)...(19): siRNA sense strand
gaccaucuucuucaaagug

SEQ ID NO: 519913 - RNA, 19 nt, Homo sapiens
  misc_RNA (1)...(19): siRNA sense strand
ggaggcagucaauaagaug

SEQ ID NO: 519914 - RNA, 19 nt, Homo sapiens
  misc_RNA (1)...(19): siRNA sense strand
cagcaucaaugaggagauc

SEQ ID NO: 519915 - RNA, 19 nt, Homo sapiens
  misc_RNA (1)...(19): siRNA sense strand
uggaggaggugggcaucua

SEQ ID NO: 519916 - RNA, 19 nt, Homo sapiens
  misc_RNA (1)...(19): siRNA sense strand
uggauuccuuuggguauuu

SEQ ID NO: 519917 - RNA, 19 nt, Homo sapiens
  misc_RNA (1)...(19): siRNA sense strand
ggauuuaagcagaguucaa

SEQ ID NO: 519918 - RNA, 19 nt, Homo sapiens
  misc_RNA (1)...(19): siRNA sense strand
cugaccaacucguguguga

SEQ ID NO: 519919 - RNA, 19 nt, Homo sapiens
  misc_RNA (1)...(19): siRNA sense strand
cuacgaggacgccgaguug

SEQ ID NO: 519920 - RNA, 19 nt, Homo sapiens
  misc_RNA (1)...(19): siRNA sense strand
ccugaucuccucugacuau

SEQ ID NO: 519921 - RNA, 19 nt, Homo sapiens
  misc_RNA (1)...(19): siRNA sense strand
ucacugcugcugcuuaugu

SEQ ID NO: 519922 - RNA, 19 nt, Homo sapiens
  misc_RNA (1)...(19): siRNA sense strand
caagagugacauccagaga

SEQ ID NO: 519923 - RNA, 19 nt, Homo sapiens
  misc_RNA (1)...(19): siRNA sense strand
gaaugucaucguccacuca

SEQ ID NO: 519924 - RNA, 19 nt, Homo sapiens
  misc_RNA (1)...(19): siRNA sense strand
gaaugggaucgaaguaaag

SEQ ID NO: 519925 - RNA, 19 nt, Homo sapiens
  misc_RNA (1)...(19): siRNA sense strand
gcccaugaagccuuugaaa

SEQ ID NO: 519926 - RNA, 19 nt, Homo sapiens
  misc_RNA (1)...(19): siRNA sense strand
uuucagacccgguugcaaa

SEQ ID NO: 519927 - RNA, 19 nt, Homo sapiens
  misc_RNA (1)...(19): siRNA sense strand
ucacggaucucagcuucca

SEQ ID NO: 519928 - RNA, 19 nt, Homo sapiens
  misc_RNA (1)...(19): siRNA sense strand
ggcaguccaugacggugaa

SEQ ID NO: 519929 - RNA, 19 nt, Homo sapiens
  misc_RNA (1)...(19): siRNA sense strand
gagccagaagcaacaaaga

SEQ ID NO: 519930 - RNA, 19 nt, Homo sapiens
  misc_RNA (1)...(19): siRNA sense strand
ggugaaggucaacgacaaa

SEQ ID NO: 519931 - RNA, 19 nt, Homo sapiens
  misc_RNA (1)...(19): siRNA sense strand
cagacccgguugcaaagga

SEQ ID NO: 519932 - RNA, 19 nt, Homo sapiens
  misc_RNA (1)...(19): siRNA sense strand
ccacgccgcagugccauaa

SEQ ID NO: 519933 - RNA, 19 nt, Homo sapiens
  misc_RNA (1)...(19): siRNA sense strand
ggacugcagcuccaaugag

SEQ ID NO: 519934 - RNA, 19 nt, Homo sapiens
  misc_RNA (1)...(19): siRNA sense strand
guggauuccuuuggguauu

SEQ ID NO: 519935 - RNA, 19 nt, Homo sapiens
  misc_RNA (1)...(19): siRNA sense strand
gagucacugcugcugcuua

SEQ ID NO: 519936 - RNA, 19 nt, Homo sapiens
  misc_RNA (1)...(19): siRNA sense strand
ugggcgaccucuuccagaa

SEQ ID NO: 519937 - RNA, 19 nt, Homo sapiens
  misc_RNA (1)...(19): siRNA sense strand
gcagaucuggcccaacgau

SEQ ID NO: 519938 - RNA, 19 nt, Homo sapiens
  misc_RNA (1)...(19): siRNA sense strand
gcaccucugagcaggagaa

SEQ ID NO: 519939 - RNA, 19 nt, Homo sapiens
  misc_RNA (1)...(19): siRNA sense strand
cgagaccaucuucuucaaa

SEQ ID NO: 519940 - RNA, 19 nt, Homo sapiens
  misc_RNA (1)...(19): siRNA sense strand
ucgagaccaucuucuucaa

SEQ ID NO: 519941 - RNA, 19 nt, Homo sapiens
  misc_RNA (1)...(19): siRNA sense strand
cagcagaagaaguguuuca

SEQ ID NO: 519942 - RNA, 19 nt, Homo sapiens
  misc_RNA (1)...(19): siRNA sense strand
agucacugcugcugcuuau

SEQ ID NO: 519943 - RNA, 19 nt, Homo sapiens
  misc_RNA (1)...(19): siRNA sense strand
ggagcuggacgcuuugaag

SEQ ID NO: 519944 - RNA, 19 nt, Homo sapiens
  misc_RNA (1)...(19): siRNA sense strand
ggccaaugcucaguuugca

SEQ ID NO: 519945 - RNA, 19 nt, Homo sapiens
  misc_RNA (1)...(19): siRNA sense strand
caacaaagaugccaaggau

SEQ ID NO: 519946 - RNA, 19 nt, Homo sapiens
  misc_RNA (1)...(19): siRNA sense strand
gcaccaagcucaagaagca

SEQ ID NO: 519947 - RNA, 19 nt, Homo sapiens
  misc_RNA (1)...(19): siRNA sense strand
gaaaagggcuuggagauga

SEQ ID NO: 519948 - RNA, 19 nt, Homo sapiens
  misc_RNA (1)...(19): siRNA sense strand
cagaagaaguguuucagaa

SEQ ID NO: 519949 - RNA, 19 nt, Homo sapiens
  misc_RNA (1)...(19): siRNA sense strand
cgagugagcuggacuugga

SEQ ID NO: 519950 - RNA, 19 nt, Homo sapiens
  misc_RNA (1)...(19): siRNA sense strand
caggagcgcuuccgcauga

SEQ ID NO: 519951 - RNA, 19 nt, Homo sapiens
  misc_RNA (1)...(19): siRNA sense strand
ugaaugggaucgaaguaaa

SEQ ID NO: 519952 - RNA, 19 nt, Homo sapiens
  misc_RNA (1)...(19): siRNA sense strand
cggagaggcugaagaagaa

SEQ ID NO: 519953 - RNA, 19 nt, Homo sapiens
  misc_RNA (1)...(19): siRNA sense strand
ggacacagcugagccaaac

SEQ ID NO: 519954 - RNA, 19 nt, Homo sapiens
  misc_RNA (1)...(19): siRNA sense strand
gcacgcugguccuccauga

SEQ ID NO: 519955 - RNA, 19 nt, Homo sapiens
  misc_RNA (1)...(19): siRNA sense strand
ccacucagccacuggauuu

SEQ ID NO: 519956 - RNA, 19 nt, Homo sapiens
  misc_RNA (1)...(19): siRNA sense strand
agaaggaggcagucaauaa

SEQ ID NO: 519957 - RNA, 19 nt, Homo sapiens
  misc_RNA (1)...(19): siRNA sense strand
gagaccaucuucuucaaag

SEQ ID NO: 519958 - RNA, 19 nt, Homo sapiens
  misc_RNA (1)...(19): siRNA sense strand
guaaagcucucggucaagu

SEQ ID NO: 519959 - RNA, 19 nt, Homo sapiens
  misc_RNA (1)...(19): siRNA sense strand
gcaaaacgcagcaguauga

SEQ ID NO: 519960 - RNA, 19 nt, Homo sapiens
  misc_RNA (1)...(19): siRNA sense strand
cuacggaguugccauggaa

SEQ ID NO: 519961 - RNA, 19 nt, Homo sapiens
  misc_RNA (1)...(19): siRNA sense strand
gcauuccgcugaccaucaa

SEQ ID NO: 519962 - RNA, 19 nt, Homo sapiens
  misc_RNA (1)...(19): siRNA sense strand
uggaaacucugcucuacaa

SEQ ID NO: 519963 - RNA, 19 nt, Homo sapiens
  misc_RNA (1)...(19): siRNA sense strand
gaaggaggcagucaauaag

SEQ ID NO: 519964 - RNA, 19 nt, Homo sapiens
  misc_RNA (1)...(19): siRNA sense strand
gacugcagcuccaaugaga

SEQ ID NO: 519965 - RNA, 19 nt, Homo sapiens
  misc_RNA (1)...(19): siRNA sense strand
caagaacucucuggaaacu

SEQ ID NO: 519966 - RNA, 19 nt, Homo sapiens
  misc_RNA (1)...(19): siRNA sense strand
gcacugcugcugcccauga

SEQ ID NO: 519967 - RNA, 19 nt, Homo sapiens
  misc_RNA (1)...(19): siRNA sense strand
gagagaagagggcgaacaa

SEQ ID NO: 519968 - RNA, 19 nt, Homo sapiens
  misc_RNA (1)...(19): siRNA sense strand
gaccaacucgugugugaaa

SEQ ID NO: 519969 - RNA, 19 nt, Homo sapiens
  misc_RNA (1)...(19): siRNA sense strand
caaagugccugagcucuac

SEQ ID NO: 519970 - RNA, 19 nt, Homo sapiens
  misc_RNA (1)...(19): siRNA sense strand
gcagaagaaguguuucaga

SEQ ID NO: 519971 - RNA, 19 nt, Homo sapiens
  misc_RNA (1)...(19): siRNA sense strand
augaggagcuggacgcuuu

SEQ ID NO: 519972 - RNA, 19 nt, Homo sapiens
  misc_RNA (1)...(19): siRNA sense strand
accaagaacucucuggaaa

SEQ ID NO: 519973 - RNA, 19 nt, Homo sapiens
  misc_RNA (1)...(19): siRNA sense strand
ucgcagaacucgcaacagu

SEQ ID NO: 519974 - RNA, 19 nt, Homo sapiens
  misc_RNA (1)...(19): siRNA sense strand
gauuuaagcagaguucaaa

SEQ ID NO: 519975 - RNA, 19 nt, Homo sapiens
  misc_RNA (1)...(19): siRNA sense strand
agacguugcuggccaagga

SEQ ID NO: 519976 - RNA, 19 nt, Homo sapiens
  misc_RNA (1)...(19): siRNA sense strand
ccucuucacugacgaguuc

SEQ ID NO: 519977 - RNA, 19 nt, Homo sapiens
  misc_RNA (1)...(19): siRNA sense strand
caggcacgcugaagcugua

SEQ ID NO: 519978 - RNA, 19 nt, Homo sapiens
  misc_RNA (1)...(19): siRNA sense strand
agagugacauccagagaga

SEQ ID NO: 519979 - RNA, 19 nt, Homo sapiens
  misc_RNA (1)...(19): siRNA sense strand
gaucuccucugacuaugag

SEQ ID NO: 519980 - RNA, 19 nt, Homo sapiens
  misc_RNA (1)...(19): siRNA sense strand
gagaaggaggcagucaaua

SEQ ID NO: 519981 - RNA, 19 nt, Homo sapiens
  misc_RNA (1)...(19): siRNA sense strand
gguccaaggugcccuacau

SEQ ID NO: 519982 - RNA, 19 nt, Homo sapiens
  misc_RNA (1)...(19): siRNA sense strand
cagcugagccaaacuggaa

SEQ ID NO: 519983 - RNA, 19 nt, Homo sapiens
  misc_RNA (1)...(19): siRNA sense strand
gaagugcugucaggccaau

SEQ ID NO: 519984 - RNA, 19 nt, Homo sapiens
  misc_RNA (1)...(19): siRNA sense strand
gcaacaaagaugccaagga

SEQ ID NO: 519985 - RNA, 19 nt, Homo sapiens
  misc_RNA (1)...(19): siRNA sense strand
ucaggccaaugcucaguuu

SEQ ID NO: 519986 - RNA, 19 nt, Homo sapiens
  misc_RNA (1)...(19): siRNA sense strand
gagcaggagaagcgccuua

SEQ ID NO: 519987 - RNA, 19 nt, Homo sapiens
  misc_RNA (1)...(19): siRNA sense strand
aaguaaagcucucggucaa

SEQ ID NO: 519988 - RNA, 19 nt, Homo sapiens
  misc_RNA (1)...(19): siRNA sense strand
gagcuggacgcuuugaaga

SEQ ID NO: 519989 - RNA, 19 nt, Homo sapiens
  misc_RNA (1)...(19): siRNA sense strand
ucaaagugccugagcucua

SEQ ID NO: 519990 - RNA, 19 nt, Homo sapiens
  misc_RNA (1)...(19): siRNA sense strand
gaucgagaccaucuucuuc

SEQ ID NO: 519991 - RNA, 19 nt, Homo sapiens
  misc_RNA (1)...(19): siRNA sense strand
gaaggucaacgacaaagag

SEQ ID NO: 519992 - RNA, 19 nt, Homo sapiens
  misc_RNA (1)...(19): siRNA sense strand
gugugaaacuccagacugu

SEQ ID NO: 519993 - RNA, 19 nt, Homo sapiens
  misc_RNA (1)...(19): siRNA sense strand
ugaucuaccugcagacguu

SEQ ID NO: 519994 - RNA, 19 nt, Homo sapiens
  misc_RNA (1)...(19): siRNA sense strand
ucuacgagauccacaagga

SEQ ID NO: 519995 - RNA, 19 nt, Homo sapiens
  misc_RNA (1)...(19): siRNA sense strand
ugagcgagauggacgugaa

SEQ ID NO: 519996 - RNA, 19 nt, Homo sapiens
  misc_RNA (1)...(19): siRNA sense strand
cuacggagaggcugaagaa

SEQ ID NO: 519997 - RNA, 19 nt, Homo sapiens
  misc_RNA (1)...(19): siRNA sense strand
gcuggacgcuuugaagauc

SEQ ID NO: 519998 - RNA, 19 nt, Homo sapiens
  misc_RNA (1)...(19): siRNA sense strand
gaccaagaacucucuggaa

SEQ ID NO: 519999 - RNA, 19 nt, Homo sapiens
  misc_RNA (1)...(19): siRNA sense strand
ucuauggguuucugaaugu

SEQ ID NO: 520000 - RNA, 19 nt, Homo sapiens
  misc_RNA (1)...(19): siRNA sense strand
ccaaggauccaacgaccaa

SEQ ID NO: 520001 - RNA, 19 nt, Homo sapiens
  misc_RNA (1)...(19): siRNA sense strand
gggagcagcagaagaagug

SEQ ID NO: 520002 - RNA, 19 nt, Homo sapiens
  misc_RNA (1)...(19): siRNA sense strand
ugccugagcucuacgagau

SEQ ID NO: 520003 - RNA, 19 nt, Homo sapiens
  misc_RNA (1)...(19): siRNA sense strand
guucuccaccgaagucuaa

SEQ ID NO: 520004 - RNA, 19 nt, Homo sapiens
  misc_RNA (1)...(19): siRNA sense strand
caaccucgccacggucuuu

SEQ ID NO: 520005 - RNA, 19 nt, Homo sapiens
  misc_RNA (1)...(19): siRNA sense strand
ucucccagaucaagaguga

SEQ ID NO: 520006 - RNA, 19 nt, Homo sapiens
  misc_RNA (1)...(19): siRNA sense strand
gaagcagagcggaggcaaa

SEQ ID NO: 520007 - RNA, 19 nt, Homo sapiens
  misc_RNA (1)...(19): siRNA sense strand
ugaaaaggguggcagagaa

SEQ ID NO: 520008 - RNA, 19 nt, Homo sapiens
  misc_RNA (1)...(19): siRNA sense strand
ggacauccaggcacugaag

SEQ ID NO: 520009 - RNA, 19 nt, Homo sapiens
  misc_RNA (1)...(19): siRNA sense strand
gggccuucguggacaacua

SEQ ID NO: 520010 - RNA, 19 nt, Homo sapiens
  misc_RNA (1)...(19): siRNA sense strand
agaacucucuggaaacucu

SEQ ID NO: 520011 - RNA, 19 nt, Homo sapiens
  misc_RNA (1)...(19): siRNA sense strand
gccagaagcaacaaagaug

SEQ ID NO: 520012 - RNA, 19 nt, Homo sapiens
  misc_RNA (1)...(19): siRNA sense strand
gaccaucuucuucaaagug

SEQ ID NO: 520013 - RNA, 19 nt, Homo sapiens
  misc_RNA (1)...(19): siRNA sense strand
ggaggcagucaauaagaug

SEQ ID NO: 520014 - RNA, 19 nt, Homo sapiens
  misc_RNA (1)...(19): siRNA sense strand
cagcaucaaugaggagauc

SEQ ID NO: 520015 - RNA, 19 nt, Homo sapiens
  misc_RNA (1)...(19): siRNA sense strand
uggaggaggugggcaucua

SEQ ID NO: 520016 - RNA, 19 nt, Homo sapiens
  misc_RNA (1)...(19): siRNA sense strand
uggauuccuuuggguauuu

SEQ ID NO: 520017 - RNA, 19 nt, Homo sapiens
  misc_RNA (1)...(19): siRNA sense strand
ggauuuaagcagaguucaa

SEQ ID NO: 520018 - RNA, 19 nt, Homo sapiens
  misc_RNA (1)...(19): siRNA sense strand
cugaccaacucguguguga

SEQ ID NO: 520019 - RNA, 19 nt, Homo sapiens
  misc_RNA (1)...(19): siRNA sense strand
cuacgaggacgccgaguug

SEQ ID NO: 520020 - RNA, 19 nt, Homo sapiens
  misc_RNA (1)...(19): siRNA sense strand
ccugaucuccucugacuau

SEQ ID NO: 520021 - RNA, 19 nt, Homo sapiens
  misc_RNA (1)...(19): siRNA sense strand
ucacugcugcugcuuaugu

SEQ ID NO: 520022 - RNA, 19 nt, Homo sapiens
  misc_RNA (1)...(19): siRNA sense strand
caagagugacauccagaga

SEQ ID NO: 520023 - RNA, 19 nt, Homo sapiens
  misc_RNA (1)...(19): siRNA sense strand
gaaugucaucguccacuca

SEQ ID NO: 520024 - RNA, 19 nt, Homo sapiens
  misc_RNA (1)...(19): siRNA sense strand
gaaugggaucgaaguaaag

SEQ ID NO: 520025 - RNA, 19 nt, Homo sapiens
  misc_RNA (1)...(19): siRNA sense strand
gcccaugaagccuuugaaa

SEQ ID NO: 520026 - RNA, 19 nt, Homo sapiens
  misc_RNA (1)...(19): siRNA sense strand
uuucagacccgguugcaaa

SEQ ID NO: 520027 - RNA, 19 nt, Homo sapiens
  misc_RNA (1)...(19): siRNA sense strand
ucacggaucucagcuucca

SEQ ID NO: 520028 - RNA, 19 nt, Homo sapiens
  misc_RNA (1)...(19): siRNA sense strand
ggcaguccaugacggugaa

SEQ ID NO: 520029 - RNA, 19 nt, Homo sapiens
  misc_RNA (1)...(19): siRNA sense strand
gagccagaagcaacaaaga

SEQ ID NO: 520030 - RNA, 19 nt, Homo sapiens
  misc_RNA (1)...(19): siRNA sense strand
ggugaaggucaacgacaaa

SEQ ID NO: 520031 - RNA, 19 nt, Homo sapiens
  misc_RNA (1)...(19): siRNA sense strand
cagacccgguugcaaagga

SEQ ID NO: 520032 - RNA, 19 nt, Homo sapiens
  misc_RNA (1)...(19): siRNA sense strand
ccacgccgcagugccauaa

SEQ ID NO: 520033 - RNA, 19 nt, Homo sapiens
  misc_RNA (1)...(19): siRNA sense strand
ggacugcagcuccaaugag

SEQ ID NO: 520034 - RNA, 19 nt, Homo sapiens
  misc_RNA (1)...(19): siRNA sense strand
guggauuccuuuggguauu

SEQ ID NO: 520035 - RNA, 19 nt, Homo sapiens
  misc_RNA (1)...(19): siRNA sense strand
gagucacugcugcugcuua

SEQ ID NO: 520036 - RNA, 19 nt, Homo sapiens
  misc_RNA (1)...(19): siRNA sense strand
ugggcgaccucuuccagaa

SEQ ID NO: 520037 - RNA, 19 nt, Homo sapiens
  misc_RNA (1)...(19): siRNA sense strand
gcagaucuggcccaacgau

SEQ ID NO: 520038 - RNA, 19 nt, Homo sapiens
  misc_RNA (1)...(19): siRNA sense strand
gcaccucugagcaggagaa

SEQ ID NO: 520039 - RNA, 19 nt, Homo sapiens
  misc_RNA (1)...(19): siRNA sense strand
cgagaccaucuucuucaaa

SEQ ID NO: 520040 - RNA, 19 nt, Homo sapiens
  misc_RNA (1)...(19): siRNA sense strand
ucgagaccaucuucuucaa

SEQ ID NO: 520041 - RNA, 19 nt, Homo sapiens
  misc_RNA (1)...(19): siRNA sense strand
cagcagaagaaguguuuca

SEQ ID NO: 520042 - RNA, 19 nt, Homo sapiens
  misc_RNA (1)...(19): siRNA sense strand
agucacugcugcugcuuau

SEQ ID NO: 520043 - RNA, 19 nt, Homo sapiens
  misc_RNA (1)...(19): siRNA sense strand
ggagcuggacgcuuugaag

SEQ ID NO: 520044 - RNA, 19 nt, Homo sapiens
  misc_RNA (1)...(19): siRNA sense strand
ggccaaugcucaguuugca

SEQ ID NO: 520045 - RNA, 19 nt, Homo sapiens
  misc_RNA (1)...(19): siRNA sense strand
agacgaaggugcugaaaca

SEQ ID NO: 520046 - RNA, 19 nt, Homo sapiens
  misc_RNA (1)...(19): siRNA sense strand
ggucuuaaacgaauauuuc

SEQ ID NO: 520047 - RNA, 19 nt, Homo sapiens
  misc_RNA (1)...(19): siRNA sense strand
gcaguuugaugaugaugag

SEQ ID NO: 520048 - RNA, 19 nt, Homo sapiens
  misc_RNA (1)...(19): siRNA sense strand
acgaauauuuccacaaugu

SEQ ID NO: 520049 - RNA, 19 nt, Homo sapiens
  misc_RNA (1)...(19): siRNA sense strand
guggaggucuuaaacgaau

SEQ ID NO: 520050 - RNA, 19 nt, Homo sapiens
  misc_RNA (1)...(19): siRNA sense strand
guuccuggcuggcgaaauc

SEQ ID NO: 520051 - RNA, 19 nt, Homo sapiens
  misc_RNA (1)...(19): siRNA sense strand
acaugcaguuugaugauga

SEQ ID NO: 520052 - RNA, 19 nt, Homo sapiens
  misc_RNA (1)...(19): siRNA sense strand
gcuuuauccucauccagaa

SEQ ID NO: 520053 - RNA, 19 nt, Homo sapiens
  misc_RNA (1)...(19): siRNA sense strand
agugguacaugcaguuuga

SEQ ID NO: 520054 - RNA, 19 nt, Homo sapiens
  misc_RNA (1)...(19): siRNA sense strand
guuugaugaugaugagaaa

SEQ ID NO: 520055 - RNA, 19 nt, Homo sapiens
  misc_RNA (1)...(19): siRNA sense strand
guacaugcaguuugaugau

SEQ ID NO: 520056 - RNA, 19 nt, Homo sapiens
  misc_RNA (1)...(19): siRNA sense strand
gaauauuuccacaaugucu

SEQ ID NO: 520057 - RNA, 19 nt, Homo sapiens
  misc_RNA (1)...(19): siRNA sense strand
gguacaugcaguuugauga

SEQ ID NO: 520058 - RNA, 19 nt, Homo sapiens
  misc_RNA (1)...(19): siRNA sense strand
gaccugguguucaacuucu

SEQ ID NO: 520059 - RNA, 19 nt, Homo sapiens
  misc_RNA (1)...(19): siRNA sense strand
ggaggucuuaaacgaauau

SEQ ID NO: 520060 - RNA, 19 nt, Homo sapiens
  misc_RNA (1)...(19): siRNA sense strand
ggaccugguguucaacuuc

SEQ ID NO: 520061 - RNA, 19 nt, Homo sapiens
  misc_RNA (1)...(19): siRNA sense strand
cgccaaacacaccaacuuu

SEQ ID NO: 520062 - RNA, 19 nt, Homo sapiens
  misc_RNA (1)...(19): siRNA sense strand
caagugguacaugcaguuu

SEQ ID NO: 520063 - RNA, 19 nt, Homo sapiens
  misc_RNA (1)...(19): siRNA sense strand
gagagaccagccagacgaa

SEQ ID NO: 520064 - RNA, 19 nt, Homo sapiens
  misc_RNA (1)...(19): siRNA sense strand
guucaacuucuacaagguu

SEQ ID NO: 520065 - RNA, 19 nt, Homo sapiens
  misc_RNA (1)...(19): siRNA sense strand
ccaagugguacaugcaguu

SEQ ID NO: 520066 - RNA, 19 nt, Homo sapiens
  misc_RNA (1)...(19): siRNA sense strand
gauccgcuuuauccucauc

SEQ ID NO: 520067 - RNA, 19 nt, Homo sapiens
  misc_RNA (1)...(19): siRNA sense strand
uggaggucuuaaacgaaua

SEQ ID NO: 520068 - RNA, 19 nt, Homo sapiens
  misc_RNA (1)...(19): siRNA sense strand
gcuacagucccuggaguga

SEQ ID NO: 520069 - RNA, 19 nt, Homo sapiens
  misc_RNA (1)...(19): siRNA sense strand
gaugaugaugagaaacaga

SEQ ID NO: 520070 - RNA, 19 nt, Homo sapiens
  misc_RNA (1)...(19): siRNA sense strand
agaaacagaagcugaucga

SEQ ID NO: 520071 - RNA, 19 nt, Homo sapiens
  misc_RNA (1)...(19): siRNA sense strand
uacaugcaguuugaugaug

SEQ ID NO: 520072 - RNA, 19 nt, Homo sapiens
  misc_RNA (1)...(19): siRNA sense strand
agacgaaggugcugaaaca

SEQ ID NO: 520073 - RNA, 19 nt, Homo sapiens
  misc_RNA (1)...(19): siRNA sense strand
ggucuuaaacgaauauuuc

SEQ ID NO: 520074 - RNA, 19 nt, Homo sapiens
  misc_RNA (1)...(19): siRNA sense strand
gcaguuugaugaugaugag

SEQ ID NO: 520075 - RNA, 19 nt, Homo sapiens
  misc_RNA (1)...(19): siRNA sense strand
acgaauauuuccacaaugu

SEQ ID NO: 520076 - RNA, 19 nt, Homo sapiens
  misc_RNA (1)...(19): siRNA sense strand
guggaggucuuaaacgaau

SEQ ID NO: 520077 - RNA, 19 nt, Homo sapiens
  misc_RNA (1)...(19): siRNA sense strand
guuccuggcuggcgaaauc

SEQ ID NO: 520078 - RNA, 19 nt, Homo sapiens
  misc_RNA (1)...(19): siRNA sense strand
acaugcaguuugaugauga

SEQ ID NO: 520079 - RNA, 19 nt, Homo sapiens
  misc_RNA (1)...(19): siRNA sense strand
gcuuuauccucauccagaa

SEQ ID NO: 520080 - RNA, 19 nt, Homo sapiens
  misc_RNA (1)...(19): siRNA sense strand
agugguacaugcaguuuga

SEQ ID NO: 520081 - RNA, 19 nt, Homo sapiens
  misc_RNA (1)...(19): siRNA sense strand
guuugaugaugaugagaaa

SEQ ID NO: 520082 - RNA, 19 nt, Homo sapiens
  misc_RNA (1)...(19): siRNA sense strand
guacaugcaguuugaugau

SEQ ID NO: 520083 - RNA, 19 nt, Homo sapiens
  misc_RNA (1)...(19): siRNA sense strand
gaauauuuccacaaugucu

SEQ ID NO: 520084 - RNA, 19 nt, Homo sapiens
  misc_RNA (1)...(19): siRNA sense strand
gguacaugcaguuugauga

SEQ ID NO: 520085 - RNA, 19 nt, Homo sapiens
  misc_RNA (1)...(19): siRNA sense strand
gaccugguguucaacuucu

SEQ ID NO: 520086 - RNA, 19 nt, Homo sapiens
  misc_RNA (1)...(19): siRNA sense strand
ggaggucuuaaacgaauau

SEQ ID NO: 520087 - RNA, 19 nt, Homo sapiens
  misc_RNA (1)...(19): siRNA sense strand
ggaccugguguucaacuuc

SEQ ID NO: 520088 - RNA, 19 nt, Homo sapiens
  misc_RNA (1)...(19): siRNA sense strand
cgccaaacacaccaacuuu

SEQ ID NO: 520089 - RNA, 19 nt, Homo sapiens
  misc_RNA (1)...(19): siRNA sense strand
caagugguacaugcaguuu

SEQ ID NO: 520090 - RNA, 19 nt, Homo sapiens
  misc_RNA (1)...(19): siRNA sense strand
gagagaccagccagacgaa

SEQ ID NO: 520091 - RNA, 19 nt, Homo sapiens
  misc_RNA (1)...(19): siRNA sense strand
guucaacuucuacaagguu

SEQ ID NO: 520092 - RNA, 19 nt, Homo sapiens
  misc_RNA (1)...(19): siRNA sense strand
ccaagugguacaugcaguu

SEQ ID NO: 520093 - RNA, 19 nt, Homo sapiens
  misc_RNA (1)...(19): siRNA sense strand
gauccgcuuuauccucauc

SEQ ID NO: 520094 - RNA, 19 nt, Homo sapiens
  misc_RNA (1)...(19): siRNA sense strand
uggaggucuuaaacgaaua

SEQ ID NO: 520095 - RNA, 19 nt, Homo sapiens
  misc_RNA (1)...(19): siRNA sense strand
gcuacagucccuggaguga

SEQ ID NO: 520096 - RNA, 19 nt, Homo sapiens
  misc_RNA (1)...(19): siRNA sense strand
gaugaugaugagaaacaga

SEQ ID NO: 520097 - RNA, 19 nt, Homo sapiens
  misc_RNA (1)...(19): siRNA sense strand
agaaacagaagcugaucga

SEQ ID NO: 520098 - RNA, 19 nt, Homo sapiens
  misc_RNA (1)...(19): siRNA sense strand
uacaugcaguuugaugaug

SEQ ID NO: 520099 - RNA, 19 nt, Homo sapiens
  misc_RNA (1)...(19): siRNA sense strand
aaguugagcugacucgaua

SEQ ID NO: 520100 - RNA, 19 nt, Homo sapiens
  misc_RNA (1)...(19): siRNA sense strand
ggaugauucugccuccaaa

SEQ ID NO: 520101 - RNA, 19 nt, Homo sapiens
  misc_RNA (1)...(19): siRNA sense strand
gcacagagaauugccuuca

SEQ ID NO: 520102 - RNA, 19 nt, Homo sapiens
  misc_RNA (1)...(19): siRNA sense strand
ugugagaacuguggaauca

SEQ ID NO: 520103 - RNA, 19 nt, Homo sapiens
  misc_RNA (1)...(19): siRNA sense strand
gagccgaggguguggagua

SEQ ID NO: 520104 - RNA, 19 nt, Homo sapiens
  misc_RNA (1)...(19): siRNA sense strand
caucuuggcccuaccuuga

SEQ ID NO: 520105 - RNA, 19 nt, Homo sapiens
  misc_RNA (1)...(19): siRNA sense strand
gcuccugggugcugugaga

SEQ ID NO: 520106 - RNA, 19 nt, Homo sapiens
  misc_RNA (1)...(19): siRNA sense strand
caagaggauuguggccauu

SEQ ID NO: 520107 - RNA, 19 nt, Homo sapiens
  misc_RNA (1)...(19): siRNA sense strand
gacaggauccgaagcaaag

SEQ ID NO: 520108 - RNA, 19 nt, Homo sapiens
  misc_RNA (1)...(19): siRNA sense strand
gaggagaacaaggaugauu

SEQ ID NO: 520109 - RNA, 19 nt, Homo sapiens
  misc_RNA (1)...(19): siRNA sense strand
ggagacaggauccgaagca

SEQ ID NO: 520110 - RNA, 19 nt, Homo sapiens
  misc_RNA (1)...(19): siRNA sense strand
agaccaaggcugacacuga

SEQ ID NO: 520111 - RNA, 19 nt, Homo sapiens
  misc_RNA (1)...(19): siRNA sense strand
gagacaggauccgaagcaa

SEQ ID NO: 520112 - RNA, 19 nt, Homo sapiens
  misc_RNA (1)...(19): siRNA sense strand
gcucagacaccuauuacca

SEQ ID NO: 520113 - RNA, 19 nt, Homo sapiens
  misc_RNA (1)...(19): siRNA sense strand
gacgcucagacaccuauua

SEQ ID NO: 520114 - RNA, 19 nt, Homo sapiens
  misc_RNA (1)...(19): siRNA sense strand
acaaggaggagaacaagga

SEQ ID NO: 520115 - RNA, 19 nt, Homo sapiens
  misc_RNA (1)...(19): siRNA sense strand
guggugaggucaggaagga

SEQ ID NO: 520116 - RNA, 19 nt, Homo sapiens
  misc_RNA (1)...(19): siRNA sense strand
ggacaaggaggagaacaag

SEQ ID NO: 520117 - RNA, 19 nt, Homo sapiens
  misc_RNA (1)...(19): siRNA sense strand
uguugcagcuuccacagaa

SEQ ID NO: 520118 - RNA, 19 nt, Homo sapiens
  misc_RNA (1)...(19): siRNA sense strand
caaauuggccccagaggaa

SEQ ID NO: 520119 - RNA, 19 nt, Homo sapiens
  misc_RNA (1)...(19): siRNA sense strand
cacagagaauugccuucaa

SEQ ID NO: 520120 - RNA, 19 nt, Homo sapiens
  misc_RNA (1)...(19): siRNA sense strand
gagauacagcagucugguu

SEQ ID NO: 520121 - RNA, 19 nt, Homo sapiens
  misc_RNA (1)...(19): siRNA sense strand
ccucuucgacuucaaacaa

SEQ ID NO: 520122 - RNA, 19 nt, Homo sapiens
  misc_RNA (1)...(19): siRNA sense strand
acagagaauugccuucaac

SEQ ID NO: 520123 - RNA, 19 nt, Homo sapiens
  misc_RNA (1)...(19): siRNA sense strand
ucaaaacguugugcaaaga

SEQ ID NO: 520124 - RNA, 19 nt, Homo sapiens
  misc_RNA (1)...(19): siRNA sense strand
ugauucugccuccaaauug

SEQ ID NO: 520125 - RNA, 19 nt, Homo sapiens
  misc_RNA (1)...(19): siRNA sense strand
gaccauacccaggcuccaa

SEQ ID NO: 520126 - RNA, 19 nt, Homo sapiens
  misc_RNA (1)...(19): siRNA sense strand
ccaaaggcagcggcucaaa

SEQ ID NO: 520127 - RNA, 19 nt, Homo sapiens
  misc_RNA (1)...(19): siRNA sense strand
aggaggagaacaaggauga

SEQ ID NO: 520128 - RNA, 19 nt, Homo sapiens
  misc_RNA (1)...(19): siRNA sense strand
agacaggauccgaagcaaa

SEQ ID NO: 520129 - RNA, 19 nt, Homo sapiens
  misc_RNA (1)...(19): siRNA sense strand
ccagcaagaagcgaaagaa

SEQ ID NO: 520130 - RNA, 19 nt, Homo sapiens
  misc_RNA (1)...(19): siRNA sense strand
aagcaaaguugagcugacu

SEQ ID NO: 520131 - RNA, 19 nt, Homo sapiens
  misc_RNA (1)...(19): siRNA sense strand
gccuggcacugaccuugug

SEQ ID NO: 520132 - RNA, 19 nt, Homo sapiens
  misc_RNA (1)...(19): siRNA sense strand
gaacccgcuuccgagauac

SEQ ID NO: 520133 - RNA, 19 nt, Homo sapiens
  misc_RNA (1)...(19): siRNA sense strand
uggcacugaccuuguguuu

SEQ ID NO: 520134 - RNA, 19 nt, Homo sapiens
  misc_RNA (1)...(19): siRNA sense strand
aaguugagcugacucgaua

SEQ ID NO: 520135 - RNA, 19 nt, Homo sapiens
  misc_RNA (1)...(19): siRNA sense strand
ggaugauucugccuccaaa

SEQ ID NO: 520136 - RNA, 19 nt, Homo sapiens
  misc_RNA (1)...(19): siRNA sense strand
gcacagagaauugccuuca

SEQ ID NO: 520137 - RNA, 19 nt, Homo sapiens
  misc_RNA (1)...(19): siRNA sense strand
ugugagaacuguggaauca

SEQ ID NO: 520138 - RNA, 19 nt, Homo sapiens
  misc_RNA (1)...(19): siRNA sense strand
gagccgaggguguggagua

SEQ ID NO: 520139 - RNA, 19 nt, Homo sapiens
  misc_RNA (1)...(19): siRNA sense strand
caucuuggcccuaccuuga

SEQ ID NO: 520140 - RNA, 19 nt, Homo sapiens
  misc_RNA (1)...(19): siRNA sense strand
gcuccugggugcugugaga

SEQ ID NO: 520141 - RNA, 19 nt, Homo sapiens
  misc_RNA (1)...(19): siRNA sense strand
caagaggauuguggccauu

SEQ ID NO: 520142 - RNA, 19 nt, Homo sapiens
  misc_RNA (1)...(19): siRNA sense strand
gacaggauccgaagcaaag

SEQ ID NO: 520143 - RNA, 19 nt, Homo sapiens
  misc_RNA (1)...(19): siRNA sense strand
gaggagaacaaggaugauu

SEQ ID NO: 520144 - RNA, 19 nt, Homo sapiens
  misc_RNA (1)...(19): siRNA sense strand
ggagacaggauccgaagca

SEQ ID NO: 520145 - RNA, 19 nt, Homo sapiens
  misc_RNA (1)...(19): siRNA sense strand
agaccaaggcugacacuga

SEQ ID NO: 520146 - RNA, 19 nt, Homo sapiens
  misc_RNA (1)...(19): siRNA sense strand
gagacaggauccgaagcaa

SEQ ID NO: 520147 - RNA, 19 nt, Homo sapiens
  misc_RNA (1)...(19): siRNA sense strand
gcucagacaccuauuacca

SEQ ID NO: 520148 - RNA, 19 nt, Homo sapiens
  misc_RNA (1)...(19): siRNA sense strand
gacgcucagacaccuauua

SEQ ID NO: 520149 - RNA, 19 nt, Homo sapiens
  misc_RNA (1)...(19): siRNA sense strand
acaaggaggagaacaagga

SEQ ID NO: 520150 - RNA, 19 nt, Homo sapiens
  misc_RNA (1)...(19): siRNA sense strand
guggugaggucaggaagga

SEQ ID NO: 520151 - RNA, 19 nt, Homo sapiens
  misc_RNA (1)...(19): siRNA sense strand
ggacaaggaggagaacaag

SEQ ID NO: 520152 - RNA, 19 nt, Homo sapiens
  misc_RNA (1)...(19): siRNA sense strand
uguugcagcuuccacagaa

SEQ ID NO: 520153 - RNA, 19 nt, Homo sapiens
  misc_RNA (1)...(19): siRNA sense strand
caaauuggccccagaggaa

SEQ ID NO: 520154 - RNA, 19 nt, Homo sapiens
  misc_RNA (1)...(19): siRNA sense strand
cacagagaauugccuucaa

SEQ ID NO: 520155 - RNA, 19 nt, Homo sapiens
  misc_RNA (1)...(19): siRNA sense strand
gagauacagcagucugguu

SEQ ID NO: 520156 - RNA, 19 nt, Homo sapiens
  misc_RNA (1)...(19): siRNA sense strand
ccucuucgacuucaaacaa

SEQ ID NO: 520157 - RNA, 19 nt, Homo sapiens
  misc_RNA (1)...(19): siRNA sense strand
acagagaauugccuucaac

SEQ ID NO: 520158 - RNA, 19 nt, Homo sapiens
  misc_RNA (1)...(19): siRNA sense strand
ucaaaacguugugcaaaga

SEQ ID NO: 520159 - RNA, 19 nt, Homo sapiens
  misc_RNA (1)...(19): siRNA sense strand
ugauucugccuccaaauug

SEQ ID NO: 520160 - RNA, 19 nt, Homo sapiens
  misc_RNA (1)...(19): siRNA sense strand
gaccauacccaggcuccaa

SEQ ID NO: 520161 - RNA, 19 nt, Homo sapiens
  misc_RNA (1)...(19): siRNA sense strand
ccaaaggcagcggcucaaa

SEQ ID NO: 520162 - RNA, 19 nt, Homo sapiens
  misc_RNA (1)...(19): siRNA sense strand
aggaggagaacaaggauga

SEQ ID NO: 520163 - RNA, 19 nt, Homo sapiens
  misc_RNA (1)...(19): siRNA sense strand
agacaggauccgaagcaaa

SEQ ID NO: 520164 - RNA, 19 nt, Homo sapiens
  misc_RNA (1)...(19): siRNA sense strand
ccagcaagaagcgaaagaa

SEQ ID NO: 520165 - RNA, 19 nt, Homo sapiens
  misc_RNA (1)...(19): siRNA sense strand
aagcaaaguugagcugacu

SEQ ID NO: 520166 - RNA, 19 nt, Homo sapiens
  misc_RNA (1)...(19): siRNA sense strand
gccuggcacugaccuugug

SEQ ID NO: 520167 - RNA, 19 nt, Homo sapiens
  misc_RNA (1)...(19): siRNA sense strand
gaacccgcuuccgagauac

SEQ ID NO: 520168 - RNA, 19 nt, Homo sapiens
  misc_RNA (1)...(19): siRNA sense strand
uggcacugaccuuguguuu

SEQ ID NO: 520169 - RNA, 19 nt, Homo sapiens
  misc_RNA (1)...(19): siRNA sense strand
gaagauggauguaaagugu

SEQ ID NO: 520170 - RNA, 19 nt, Homo sapiens
  misc_RNA (1)...(19): siRNA sense strand
aaguugagcugacucgaua

SEQ ID NO: 520171 - RNA, 19 nt, Homo sapiens
  misc_RNA (1)...(19): siRNA sense strand
ccacgaggauggccuggaa

SEQ ID NO: 520172 - RNA, 19 nt, Homo sapiens
  misc_RNA (1)...(19): siRNA sense strand
gaagggaagauggauguaa

SEQ ID NO: 520173 - RNA, 19 nt, Homo sapiens
  misc_RNA (1)...(19): siRNA sense strand
ggaugauucugccuccaaa

SEQ ID NO: 520174 - RNA, 19 nt, Homo sapiens
  misc_RNA (1)...(19): siRNA sense strand
aagggaagauggauguaaa

SEQ ID NO: 520175 - RNA, 19 nt, Homo sapiens
  misc_RNA (1)...(19): siRNA sense strand
gcacagagaauugccuuca

SEQ ID NO: 520176 - RNA, 19 nt, Homo sapiens
  misc_RNA (1)...(19): siRNA sense strand
ugugagaacuguggaauca

SEQ ID NO: 520177 - RNA, 19 nt, Homo sapiens
  misc_RNA (1)...(19): siRNA sense strand
gagccgaggguguggagua

SEQ ID NO: 520178 - RNA, 19 nt, Homo sapiens
  misc_RNA (1)...(19): siRNA sense strand
caucuuggcccuaccuuga

SEQ ID NO: 520179 - RNA, 19 nt, Homo sapiens
  misc_RNA (1)...(19): siRNA sense strand
gcuccugggugcugugaga

SEQ ID NO: 520180 - RNA, 19 nt, Homo sapiens
  misc_RNA (1)...(19): siRNA sense strand
ggaagauggauguaaagug

SEQ ID NO: 520181 - RNA, 19 nt, Homo sapiens
  misc_RNA (1)...(19): siRNA sense strand
caagaggauuguggccauu

SEQ ID NO: 520182 - RNA, 19 nt, Homo sapiens
  misc_RNA (1)...(19): siRNA sense strand
gacaggauccgaagcaaag

SEQ ID NO: 520183 - RNA, 19 nt, Homo sapiens
  misc_RNA (1)...(19): siRNA sense strand
gaggagaacaaggaugauu

SEQ ID NO: 520184 - RNA, 19 nt, Homo sapiens
  misc_RNA (1)...(19): siRNA sense strand
agaccaaggcugacacuga

SEQ ID NO: 520185 - RNA, 19 nt, Homo sapiens
  misc_RNA (1)...(19): siRNA sense strand
ggagacaggauccgaagca

SEQ ID NO: 520186 - RNA, 19 nt, Homo sapiens
  misc_RNA (1)...(19): siRNA sense strand
gcucagacaccuauuacca

SEQ ID NO: 520187 - RNA, 19 nt, Homo sapiens
  misc_RNA (1)...(19): siRNA sense strand
gagacaggauccgaagcaa

SEQ ID NO: 520188 - RNA, 19 nt, Homo sapiens
  misc_RNA (1)...(19): siRNA sense strand
gggaagggaagauggaugu

SEQ ID NO: 520189 - RNA, 19 nt, Homo sapiens
  misc_RNA (1)...(19): siRNA sense strand
acaaggaggagaacaagga

SEQ ID NO: 520190 - RNA, 19 nt, Homo sapiens
  misc_RNA (1)...(19): siRNA sense strand
gacgcucagacaccuauua

SEQ ID NO: 520191 - RNA, 19 nt, Homo sapiens
  misc_RNA (1)...(19): siRNA sense strand
guggugaggucaggaagga

SEQ ID NO: 520192 - RNA, 19 nt, Homo sapiens
  misc_RNA (1)...(19): siRNA sense strand
ggacaaggaggagaacaag

SEQ ID NO: 520193 - RNA, 19 nt, Homo sapiens
  misc_RNA (1)...(19): siRNA sense strand
uguugcagcuuccacagaa

SEQ ID NO: 520194 - RNA, 19 nt, Homo sapiens
  misc_RNA (1)...(19): siRNA sense strand
caaauuggccccagaggaa

SEQ ID NO: 520195 - RNA, 19 nt, Homo sapiens
  misc_RNA (1)...(19): siRNA sense strand
cacagagaauugccuucaa

SEQ ID NO: 520196 - RNA, 19 nt, Homo sapiens
  misc_RNA (1)...(19): siRNA sense strand
gagauacagcagucugguu

SEQ ID NO: 520197 - RNA, 19 nt, Homo sapiens
  misc_RNA (1)...(19): siRNA sense strand
ccucuucgacuucaaacaa

SEQ ID NO: 520198 - RNA, 19 nt, Homo sapiens
  misc_RNA (1)...(19): siRNA sense strand
acagagaauugccuucaac

SEQ ID NO: 520199 - RNA, 19 nt, Homo sapiens
  misc_RNA (1)...(19): siRNA sense strand
ggaagggaagauggaugua

SEQ ID NO: 520200 - RNA, 19 nt, Homo sapiens
  misc_RNA (1)...(19): siRNA sense strand
ucaaaacguugugcaaaga

SEQ ID NO: 520201 - RNA, 19 nt, Homo sapiens
  misc_RNA (1)...(19): siRNA sense strand
gcccuuccucacagaguua

SEQ ID NO: 520202 - RNA, 19 nt, Homo sapiens
  misc_RNA (1)...(19): siRNA sense strand
uggguguccugcagaagaa

SEQ ID NO: 520203 - RNA, 19 nt, Homo sapiens
  misc_RNA (1)...(19): siRNA sense strand
ugauucugccuccaaauug

SEQ ID NO: 520204 - RNA, 19 nt, Homo sapiens
  misc_RNA (1)...(19): siRNA sense strand
gaccauacccaggcuccaa

SEQ ID NO: 520205 - RNA, 19 nt, Homo sapiens
  misc_RNA (1)...(19): siRNA sense strand
ccaaaggcagcggcucaaa

SEQ ID NO: 520206 - RNA, 19 nt, Homo sapiens
  misc_RNA (1)...(19): siRNA sense strand
aggaggagaacaaggauga

SEQ ID NO: 520207 - RNA, 19 nt, Homo sapiens
  misc_RNA (1)...(19): siRNA sense strand
agacaggauccgaagcaaa

SEQ ID NO: 520208 - RNA, 19 nt, Homo sapiens
  misc_RNA (1)...(19): siRNA sense strand
ccagcaagaagcgaaagaa

SEQ ID NO: 520209 - RNA, 19 nt, Homo sapiens
  misc_RNA (1)...(19): siRNA sense strand
aagcaaaguugagcugacu

SEQ ID NO: 520210 - RNA, 19 nt, Homo sapiens
  misc_RNA (1)...(19): siRNA sense strand
guggguguccugcagaaga

SEQ ID NO: 520211 - RNA, 19 nt, Homo sapiens
  misc_RNA (1)...(19): siRNA sense strand
ccaccuccagcuucgauga

SEQ ID NO: 520212 - RNA, 19 nt, Homo sapiens
  misc_RNA (1)...(19): siRNA sense strand
gccuggcacugaccuugug

SEQ ID NO: 520213 - RNA, 19 nt, Homo sapiens
  misc_RNA (1)...(19): siRNA sense strand
gcuggugcccuuccucaca

SEQ ID NO: 520214 - RNA, 19 nt, Homo sapiens
  misc_RNA (1)...(19): siRNA sense strand
gaacccgcuuccgagauac

SEQ ID NO: 520215 - RNA, 19 nt, Homo sapiens
  misc_RNA (1)...(19): siRNA sense strand
uggcacugaccuuguguuu

SEQ ID NO: 520216 - RNA, 19 nt, Homo sapiens
  misc_RNA (1)...(19): siRNA sense strand
aaguugagcugacucgaua

SEQ ID NO: 520217 - RNA, 19 nt, Homo sapiens
  misc_RNA (1)...(19): siRNA sense strand
ggaugauucugccuccaaa

SEQ ID NO: 520218 - RNA, 19 nt, Homo sapiens
  misc_RNA (1)...(19): siRNA sense strand
gcacagagaauugccuuca

SEQ ID NO: 520219 - RNA, 19 nt, Homo sapiens
  misc_RNA (1)...(19): siRNA sense strand
ugugagaacuguggaauca

SEQ ID NO: 520220 - RNA, 19 nt, Homo sapiens
  misc_RNA (1)...(19): siRNA sense strand
gagccgaggguguggagua

SEQ ID NO: 520221 - RNA, 19 nt, Homo sapiens
  misc_RNA (1)...(19): siRNA sense strand
caucuuggcccuaccuuga

SEQ ID NO: 520222 - RNA, 19 nt, Homo sapiens
  misc_RNA (1)...(19): siRNA sense strand
gcuccugggugcugugaga

SEQ ID NO: 520223 - RNA, 19 nt, Homo sapiens
  misc_RNA (1)...(19): siRNA sense strand
caagaggauuguggccauu

SEQ ID NO: 520224 - RNA, 19 nt, Homo sapiens
  misc_RNA (1)...(19): siRNA sense strand
gacaggauccgaagcaaag

SEQ ID NO: 520225 - RNA, 19 nt, Homo sapiens
  misc_RNA (1)...(19): siRNA sense strand
gaggagaacaaggaugauu

SEQ ID NO: 520226 - RNA, 19 nt, Homo sapiens
  misc_RNA (1)...(19): siRNA sense strand
ggagacaggauccgaagca

SEQ ID NO: 520227 - RNA, 19 nt, Homo sapiens
  misc_RNA (1)...(19): siRNA sense strand
agaccaaggcugacacuga

SEQ ID NO: 520228 - RNA, 19 nt, Homo sapiens
  misc_RNA (1)...(19): siRNA sense strand
gagacaggauccgaagcaa

SEQ ID NO: 520229 - RNA, 19 nt, Homo sapiens
  misc_RNA (1)...(19): siRNA sense strand
gcucagacaccuauuacca

SEQ ID NO: 520230 - RNA, 19 nt, Homo sapiens
  misc_RNA (1)...(19): siRNA sense strand
gacgcucagacaccuauua

SEQ ID NO: 520231 - RNA, 19 nt, Homo sapiens
  misc_RNA (1)...(19): siRNA sense strand
acaaggaggagaacaagga

SEQ ID NO: 520232 - RNA, 19 nt, Homo sapiens
  misc_RNA (1)...(19): siRNA sense strand
guggugaggucaggaagga

SEQ ID NO: 520233 - RNA, 19 nt, Homo sapiens
  misc_RNA (1)...(19): siRNA sense strand
ggacaaggaggagaacaag

SEQ ID NO: 520234 - RNA, 19 nt, Homo sapiens
  misc_RNA (1)...(19): siRNA sense strand
uguugcagcuuccacagaa

SEQ ID NO: 520235 - RNA, 19 nt, Homo sapiens
  misc_RNA (1)...(19): siRNA sense strand
caaauuggccccagaggaa

SEQ ID NO: 520236 - RNA, 19 nt, Homo sapiens
  misc_RNA (1)...(19): siRNA sense strand
cacagagaauugccuucaa

SEQ ID NO: 520237 - RNA, 19 nt, Homo sapiens
  misc_RNA (1)...(19): siRNA sense strand
gagauacagcagucugguu

SEQ ID NO: 520238 - RNA, 19 nt, Homo sapiens
  misc_RNA (1)...(19): siRNA sense strand
ccucuucgacuucaaacaa

SEQ ID NO: 520239 - RNA, 19 nt, Homo sapiens
  misc_RNA (1)...(19): siRNA sense strand
acagagaauugccuucaac

SEQ ID NO: 520240 - RNA, 19 nt, Homo sapiens
  misc_RNA (1)...(19): siRNA sense strand
ucaaaacguugugcaaaga

SEQ ID NO: 520241 - RNA, 19 nt, Homo sapiens
  misc_RNA (1)...(19): siRNA sense strand
ugauucugccuccaaauug

SEQ ID NO: 520242 - RNA, 19 nt, Homo sapiens
  misc_RNA (1)...(19): siRNA sense strand
gaccauacccaggcuccaa

SEQ ID NO: 520243 - RNA, 19 nt, Homo sapiens
  misc_RNA (1)...(19): siRNA sense strand
ccaaaggcagcggcucaaa

SEQ ID NO: 520244 - RNA, 19 nt, Homo sapiens
  misc_RNA (1)...(19): siRNA sense strand
aggaggagaacaaggauga

SEQ ID NO: 520245 - RNA, 19 nt, Homo sapiens
  misc_RNA (1)...(19): siRNA sense strand
agacaggauccgaagcaaa

SEQ ID NO: 520246 - RNA, 19 nt, Homo sapiens
  misc_RNA (1)...(19): siRNA sense strand
ccagcaagaagcgaaagaa

SEQ ID NO: 520247 - RNA, 19 nt, Homo sapiens
  misc_RNA (1)...(19): siRNA sense strand
aagcaaaguugagcugacu

SEQ ID NO: 520248 - RNA, 19 nt, Homo sapiens
  misc_RNA (1)...(19): siRNA sense strand
gccuggcacugaccuugug

SEQ ID NO: 520249 - RNA, 19 nt, Homo sapiens
  misc_RNA (1)...(19): siRNA sense strand
gaacccgcuuccgagauac

SEQ ID NO: 520250 - RNA, 19 nt, Homo sapiens
  misc_RNA (1)...(19): siRNA sense strand
uggcacugaccuuguguuu

SEQ ID NO: 520251 - RNA, 19 nt, Homo sapiens
  misc_RNA (1)...(19): siRNA sense strand
aaguugagcugacucgaua

SEQ ID NO: 520252 - RNA, 19 nt, Homo sapiens
  misc_RNA (1)...(19): siRNA sense strand
ggaugauucugccuccaaa

SEQ ID NO: 520253 - RNA, 19 nt, Homo sapiens
  misc_RNA (1)...(19): siRNA sense strand
gcacagagaauugccuuca

SEQ ID NO: 520254 - RNA, 19 nt, Homo sapiens
  misc_RNA (1)...(19): siRNA sense strand
ugugagaacuguggaauca

SEQ ID NO: 520255 - RNA, 19 nt, Homo sapiens
  misc_RNA (1)...(19): siRNA sense strand
gagccgaggguguggagua

SEQ ID NO: 520256 - RNA, 19 nt, Homo sapiens
  misc_RNA (1)...(19): siRNA sense strand
caucuuggcccuaccuuga

SEQ ID NO: 520257 - RNA, 19 nt, Homo sapiens
  misc_RNA (1)...(19): siRNA sense strand
gcuccugggugcugugaga

SEQ ID NO: 520258 - RNA, 19 nt, Homo sapiens
  misc_RNA (1)...(19): siRNA sense strand
caagaggauuguggccauu

SEQ ID NO: 520259 - RNA, 19 nt, Homo sapiens
  misc_RNA (1)...(19): siRNA sense strand
gacaggauccgaagcaaag

SEQ ID NO: 520260 - RNA, 19 nt, Homo sapiens
  misc_RNA (1)...(19): siRNA sense strand
gaggagaacaaggaugauu

SEQ ID NO: 520261 - RNA, 19 nt, Homo sapiens
  misc_RNA (1)...(19): siRNA sense strand
ggagacaggauccgaagca

SEQ ID NO: 520262 - RNA, 19 nt, Homo sapiens
  misc_RNA (1)...(19): siRNA sense strand
agaccaaggcugacacuga

SEQ ID NO: 520263 - RNA, 19 nt, Homo sapiens
  misc_RNA (1)...(19): siRNA sense strand
gagacaggauccgaagcaa

SEQ ID NO: 520264 - RNA, 19 nt, Homo sapiens
  misc_RNA (1)...(19): siRNA sense strand
gcucagacaccuauuacca

SEQ ID NO: 520265 - RNA, 19 nt, Homo sapiens
  misc_RNA (1)...(19): siRNA sense strand
gacgcucagacaccuauua

SEQ ID NO: 520266 - RNA, 19 nt, Homo sapiens
  misc_RNA (1)...(19): siRNA sense strand
acaaggaggagaacaagga

SEQ ID NO: 520267 - RNA, 19 nt, Homo sapiens
  misc_RNA (1)...(19): siRNA sense strand
guggugaggucaggaagga

SEQ ID NO: 520268 - RNA, 19 nt, Homo sapiens
  misc_RNA (1)...(19): siRNA sense strand
ggacaaggaggagaacaag

SEQ ID NO: 520269 - RNA, 19 nt, Homo sapiens
  misc_RNA (1)...(19): siRNA sense strand
uguugcagcuuccacagaa

SEQ ID NO: 520270 - RNA, 19 nt, Homo sapiens
  misc_RNA (1)...(19): siRNA sense strand
caaauuggccccagaggaa

SEQ ID NO: 520271 - RNA, 19 nt, Homo sapiens
  misc_RNA (1)...(19): siRNA sense strand
cacagagaauugccuucaa

SEQ ID NO: 520272 - RNA, 19 nt, Homo sapiens
  misc_RNA (1)...(19): siRNA sense strand
gagauacagcagucugguu

SEQ ID NO: 520273 - RNA, 19 nt, Homo sapiens
  misc_RNA (1)...(19): siRNA sense strand
ccucuucgacuucaaacaa

SEQ ID NO: 520274 - RNA, 19 nt, Homo sapiens
  misc_RNA (1)...(19): siRNA sense strand
acagagaauugccuucaac

SEQ ID NO: 520275 - RNA, 19 nt, Homo sapiens
  misc_RNA (1)...(19): siRNA sense strand
ucaaaacguugugcaaaga

SEQ ID NO: 520276 - RNA, 19 nt, Homo sapiens
  misc_RNA (1)...(19): siRNA sense strand
ugauucugccuccaaauug

SEQ ID NO: 520277 - RNA, 19 nt, Homo sapiens
  misc_RNA (1)...(19): siRNA sense strand
gaccauacccaggcuccaa

SEQ ID NO: 520278 - RNA, 19 nt, Homo sapiens
  misc_RNA (1)...(19): siRNA sense strand
ccaaaggcagcggcucaaa

SEQ ID NO: 520279 - RNA, 19 nt, Homo sapiens
  misc_RNA (1)...(19): siRNA sense strand
aggaggagaacaaggauga

SEQ ID NO: 520280 - RNA, 19 nt, Homo sapiens
  misc_RNA (1)...(19): siRNA sense strand
agacaggauccgaagcaaa

SEQ ID NO: 520281 - RNA, 19 nt, Homo sapiens
  misc_RNA (1)...(19): siRNA sense strand
ccagcaagaagcgaaagaa

SEQ ID NO: 520282 - RNA, 19 nt, Homo sapiens
  misc_RNA (1)...(19): siRNA sense strand
aagcaaaguugagcugacu

SEQ ID NO: 520283 - RNA, 19 nt, Homo sapiens
  misc_RNA (1)...(19): siRNA sense strand
gccuggcacugaccuugug

SEQ ID NO: 520284 - RNA, 19 nt, Homo sapiens
  misc_RNA (1)...(19): siRNA sense strand
gaacccgcuuccgagauac

SEQ ID NO: 520285 - RNA, 19 nt, Homo sapiens
  misc_RNA (1)...(19): siRNA sense strand
uggcacugaccuuguguuu

SEQ ID NO: 520286 - RNA, 19 nt, Homo sapiens
  misc_RNA (1)...(19): siRNA sense strand
ugaauucccucaugagcua

SEQ ID NO: 520287 - RNA, 19 nt, Homo sapiens
  misc_RNA (1)...(19): siRNA sense strand
uaacuugccuggcuccuau

SEQ ID NO: 520288 - RNA, 19 nt, Homo sapiens
  misc_RNA (1)...(19): siRNA sense strand
gcaccugcccugaugguua

SEQ ID NO: 520289 - RNA, 19 nt, Homo sapiens
  misc_RNA (1)...(19): siRNA sense strand
gagcagccuucauccauug

SEQ ID NO: 520290 - RNA, 19 nt, Homo sapiens
  misc_RNA (1)...(19): siRNA sense strand
gcuaugagcccgacgauca

SEQ ID NO: 520291 - RNA, 19 nt, Homo sapiens
  misc_RNA (1)...(19): siRNA sense strand
ccaaaccugugucaacuuc

SEQ ID NO: 520292 - RNA, 19 nt, Homo sapiens
  misc_RNA (1)...(19): siRNA sense strand
ccagcuaccucugucagua

SEQ ID NO: 520293 - RNA, 19 nt, Homo sapiens
  misc_RNA (1)...(19): siRNA sense strand
ggacagcuguguggaugug

SEQ ID NO: 520294 - RNA, 19 nt, Homo sapiens
  misc_RNA (1)...(19): siRNA sense strand
ggaaugcacagauggcuau

SEQ ID NO: 520295 - RNA, 19 nt, Homo sapiens
  misc_RNA (1)...(19): siRNA sense strand
ccaagacauugaugagugu

SEQ ID NO: 520296 - RNA, 19 nt, Homo sapiens
  misc_RNA (1)...(19): siRNA sense strand
cugaagagcccgacagcua

SEQ ID NO: 520297 - RNA, 19 nt, Homo sapiens
  misc_RNA (1)...(19): siRNA sense strand
ccacacgccucugccaaga

SEQ ID NO: 520298 - RNA, 19 nt, Homo sapiens
  misc_RNA (1)...(19): siRNA sense strand
gagagcagccuucauccau

SEQ ID NO: 520299 - RNA, 19 nt, Homo sapiens
  misc_RNA (1)...(19): siRNA sense strand
gaggcucaccgucuuugua

SEQ ID NO: 520300 - RNA, 19 nt, Homo sapiens
  misc_RNA (1)...(19): siRNA sense strand
gcccgaguguguggacaua

SEQ ID NO: 520301 - RNA, 19 nt, Homo sapiens
  misc_RNA (1)...(19): siRNA sense strand
ggaaaugaagugcaucaac

SEQ ID NO: 520302 - RNA, 19 nt, Homo sapiens
  misc_RNA (1)...(19): siRNA sense strand
cuacaaugccuuucagauc

SEQ ID NO: 520303 - RNA, 19 nt, Homo sapiens
  misc_RNA (1)...(19): siRNA sense strand
gcuccuguguugaugugaa

SEQ ID NO: 520304 - RNA, 19 nt, Homo sapiens
  misc_RNA (1)...(19): siRNA sense strand
gcccaaaccugugucaacu

SEQ ID NO: 520305 - RNA, 19 nt, Homo sapiens
  misc_RNA (1)...(19): siRNA sense strand
agagcagccuucauccauu

SEQ ID NO: 520306 - RNA, 19 nt, Homo sapiens
  misc_RNA (1)...(19): siRNA sense strand
gaugucaacgagugucuga

SEQ ID NO: 520307 - RNA, 19 nt, Homo sapiens
  misc_RNA (1)...(19): siRNA sense strand
ccgaguguguggacauaga

SEQ ID NO: 520308 - RNA, 19 nt, Homo sapiens
  misc_RNA (1)...(19): siRNA sense strand
ccaggacugccauaacuug

SEQ ID NO: 520309 - RNA, 19 nt, Homo sapiens
  misc_RNA (1)...(19): siRNA sense strand
gaagagcccgacagcuaca

SEQ ID NO: 520310 - RNA, 19 nt, Homo sapiens
  misc_RNA (1)...(19): siRNA sense strand
ccgcugacguguuccagau

SEQ ID NO: 520311 - RNA, 19 nt, Homo sapiens
  misc_RNA (1)...(19): siRNA sense strand
ucugggcgcugcuacuguu

SEQ ID NO: 520312 - RNA, 19 nt, Homo sapiens
  misc_RNA (1)...(19): siRNA sense strand
acacgccucugccaagaca

SEQ ID NO: 520313 - RNA, 19 nt, Homo sapiens
  misc_RNA (1)...(19): siRNA sense strand
cagugcaccugcccugaug

SEQ ID NO: 520314 - RNA, 19 nt, Homo sapiens
  misc_RNA (1)...(19): siRNA sense strand
gaugugaacgagugugaca

SEQ ID NO: 520315 - RNA, 19 nt, Homo sapiens
  misc_RNA (1)...(19): siRNA sense strand
ucagauccgugcuggaaac

SEQ ID NO: 520316 - RNA, 19 nt, Homo sapiens
  misc_RNA (1)...(19): siRNA sense strand
ggcuucuccugcagugaua

SEQ ID NO: 520317 - RNA, 19 nt, Homo sapiens
  misc_RNA (1)...(19): siRNA sense strand
ccugaugguuaccgcaaga

SEQ ID NO: 520318 - RNA, 19 nt, Homo sapiens
  misc_RNA (1)...(19): siRNA sense strand
cgggccagcucuguacuga

SEQ ID NO: 520319 - RNA, 19 nt, Homo sapiens
  misc_RNA (1)...(19): siRNA sense strand
caccugcccugaugguuac

SEQ ID NO: 520320 - RNA, 19 nt, Homo sapiens
  misc_RNA (1)...(19): siRNA sense strand
gccacugcccacaggguua

SEQ ID NO: 520321 - RNA, 19 nt, Homo sapiens
  misc_RNA (1)...(19): siRNA sense strand
ccgcugccgucaucaacga

SEQ ID NO: 520322 - RNA, 19 nt, Homo sapiens
  misc_RNA (1)...(19): siRNA sense strand
cuaacaaccgcuccugugu

SEQ ID NO: 520323 - RNA, 19 nt, Homo sapiens
  misc_RNA (1)...(19): siRNA sense strand
cccgacagcuacacggaau

SEQ ID NO: 520324 - RNA, 19 nt, Homo sapiens
  misc_RNA (1)...(19): siRNA sense strand
aaaccugugucaacuucca

SEQ ID NO: 520325 - RNA, 19 nt, Homo sapiens
  misc_RNA (1)...(19): siRNA sense strand
gucgagagcagccuucauc

SEQ ID NO: 520326 - RNA, 19 nt, Homo sapiens
  misc_RNA (1)...(19): siRNA sense strand
uacauuaggcaaaucaaca

SEQ ID NO: 520327 - RNA, 19 nt, Homo sapiens
  misc_RNA (1)...(19): siRNA sense strand
aaagugagaucgauucaga

SEQ ID NO: 520328 - RNA, 19 nt, Homo sapiens
  misc_RNA (1)...(19): siRNA sense strand
ucacggagcucuacuaugc

SEQ ID NO: 520329 - RNA, 19 nt, Homo sapiens
  misc_RNA (1)...(19): siRNA sense strand
gcagagagaauaugaguuc

SEQ ID NO: 520330 - RNA, 19 nt, Homo sapiens
  misc_RNA (1)...(19): siRNA sense strand
gcuggaagcugcauguuag

SEQ ID NO: 520331 - RNA, 19 nt, Homo sapiens
  misc_RNA (1)...(19): siRNA sense strand
ggaagcagagagaauauga

SEQ ID NO: 520332 - RNA, 19 nt, Homo sapiens
  misc_RNA (1)...(19): siRNA sense strand
ggacauggaccuacuccuu

SEQ ID NO: 520333 - RNA, 19 nt, Homo sapiens
  misc_RNA (1)...(19): siRNA sense strand
gagggaagcagagagaaua

SEQ ID NO: 520334 - RNA, 19 nt, Homo sapiens
  misc_RNA (1)...(19): siRNA sense strand
cauggaagguucuggcaaa

SEQ ID NO: 520335 - RNA, 19 nt, Homo sapiens
  misc_RNA (1)...(19): siRNA sense strand
ggacgcugcugaccaucuu

SEQ ID NO: 520336 - RNA, 19 nt, Homo sapiens
  misc_RNA (1)...(19): siRNA sense strand
aaggucagcuucagaaaga

SEQ ID NO: 520337 - RNA, 19 nt, Homo sapiens
  misc_RNA (1)...(19): siRNA sense strand
ggaggaaucccaagaagca

SEQ ID NO: 520338 - RNA, 19 nt, Homo sapiens
  misc_RNA (1)...(19): siRNA sense strand
gggacuggguggcaaagaa

SEQ ID NO: 520339 - RNA, 19 nt, Homo sapiens
  misc_RNA (1)...(19): siRNA sense strand
ugagaucgauucagaugau

SEQ ID NO: 520340 - RNA, 19 nt, Homo sapiens
  misc_RNA (1)...(19): siRNA sense strand
ggacaccacaguaccuaaa

SEQ ID NO: 520341 - RNA, 19 nt, Homo sapiens
  misc_RNA (1)...(19): siRNA sense strand
uaccugagcuacagauaug

SEQ ID NO: 520342 - RNA, 19 nt, Homo sapiens
  misc_RNA (1)...(19): siRNA sense strand
gaagcucaauucccauucu

SEQ ID NO: 520343 - RNA, 19 nt, Homo sapiens
  misc_RNA (1)...(19): siRNA sense strand
ggaagguucuggcaaagac

SEQ ID NO: 520344 - RNA, 19 nt, Homo sapiens
  misc_RNA (1)...(19): siRNA sense strand
caccugaugugaccuguau

SEQ ID NO: 520345 - RNA, 19 nt, Homo sapiens
  misc_RNA (1)...(19): siRNA sense strand
caaccgcaccuaccaaaug

SEQ ID NO: 520346 - RNA, 19 nt, Homo sapiens
  misc_RNA (1)...(19): siRNA sense strand
ucuacagcaucgaguauaa

SEQ ID NO: 520347 - RNA, 19 nt, Homo sapiens
  misc_RNA (1)...(19): siRNA sense strand
caucuuccaugaccuguuc

SEQ ID NO: 520348 - RNA, 19 nt, Homo sapiens
  misc_RNA (1)...(19): siRNA sense strand
cgauucagaugauuguuca

SEQ ID NO: 520349 - RNA, 19 nt, Homo sapiens
  misc_RNA (1)...(19): siRNA sense strand
cagcuggccucccuccuau

SEQ ID NO: 520350 - RNA, 19 nt, Homo sapiens
  misc_RNA (1)...(19): siRNA sense strand
gguccagccuuccuccuau

SEQ ID NO: 520351 - RNA, 19 nt, Homo sapiens
  misc_RNA (1)...(19): siRNA sense strand
cauguuagguggccuuucu

SEQ ID NO: 520352 - RNA, 19 nt, Homo sapiens
  misc_RNA (1)...(19): siRNA sense strand
gaacuggauucucuuuuca

SEQ ID NO: 520353 - RNA, 19 nt, Homo sapiens
  misc_RNA (1)...(19): siRNA sense strand
gagaucgauucagaugauu

SEQ ID NO: 520354 - RNA, 19 nt, Homo sapiens
  misc_RNA (1)...(19): siRNA sense strand
cuaaaggucagcuucagaa

SEQ ID NO: 520355 - RNA, 19 nt, Homo sapiens
  misc_RNA (1)...(19): siRNA sense strand
gcaucgaguauaagacgua

SEQ ID NO: 520356 - RNA, 19 nt, Homo sapiens
  misc_RNA (1)...(19): siRNA sense strand
uguccgagaucaccuacuu

SEQ ID NO: 520357 - RNA, 19 nt, Homo sapiens
  misc_RNA (1)...(19): siRNA sense strand
gcagcacacuacccucaag

SEQ ID NO: 520358 - RNA, 19 nt, Homo sapiens
  misc_RNA (1)...(19): siRNA sense strand
ggaagggacaccacaguac

SEQ ID NO: 520359 - RNA, 19 nt, Homo sapiens
  misc_RNA (1)...(19): siRNA sense strand
ggcauagccuguccgagau

SEQ ID NO: 520360 - RNA, 19 nt, Homo sapiens
  misc_RNA (1)...(19): siRNA sense strand
ugaccuguucuaccacuua

SEQ ID NO: 520361 - RNA, 19 nt, Homo sapiens
  misc_RNA (1)...(19): siRNA sense strand
ugaccuguaucuccaaagu

SEQ ID NO: 520362 - RNA, 19 nt, Homo sapiens
  misc_RNA (1)...(19): siRNA sense strand
uauaagacguacggagaga

SEQ ID NO: 520363 - RNA, 19 nt, Homo sapiens
  misc_RNA (1)...(19): siRNA sense strand
ggagggaagcagagagaau

SEQ ID NO: 520364 - RNA, 19 nt, Homo sapiens
  misc_RNA (1)...(19): siRNA sense strand
gacacuuucuaguccuaaa

SEQ ID NO: 520365 - RNA, 19 nt, Homo sapiens
  misc_RNA (1)...(19): siRNA sense strand
guccaguacucccagauca

SEQ ID NO: 520366 - RNA, 19 nt, Homo sapiens
  misc_RNA (1)...(19): siRNA sense strand
ccaagaugacugacagguu

SEQ ID NO: 520367 - RNA, 19 nt, Homo sapiens
  misc_RNA (1)...(19): siRNA sense strand
gaucgauucagaugauugu

SEQ ID NO: 520368 - RNA, 19 nt, Homo sapiens
  misc_RNA (1)...(19): siRNA sense strand
aagcucaauucccauucua

SEQ ID NO: 520369 - RNA, 19 nt, Homo sapiens
  misc_RNA (1)...(19): siRNA sense strand
acuuagagcuccaggucaa

SEQ ID NO: 520370 - RNA, 19 nt, Homo sapiens
  misc_RNA (1)...(19): siRNA sense strand
ccacaggccaucucuaagg

SEQ ID NO: 520371 - RNA, 19 nt, Homo sapiens
  misc_RNA (1)...(19): siRNA sense strand
ccaagaagcaaaaucauug

SEQ ID NO: 520372 - RNA, 19 nt, Homo sapiens
  misc_RNA (1)...(19): siRNA sense strand
uaaaggucagcuucagaaa

SEQ ID NO: 520373 - RNA, 19 nt, Homo sapiens
  misc_RNA (1)...(19): siRNA sense strand
gaccuguucuaccacuuag

SEQ ID NO: 520374 - RNA, 19 nt, Homo sapiens
  misc_RNA (1)...(19): siRNA sense strand
ccacugggacacuuucuag

SEQ ID NO: 520375 - RNA, 19 nt, Homo sapiens
  misc_RNA (1)...(19): siRNA sense strand
gagccuuccuguucuccau

SEQ ID NO: 520376 - RNA, 19 nt, Homo sapiens
  misc_RNA (1)...(19): siRNA sense strand
accuguaucuccaaaguga

SEQ ID NO: 520377 - RNA, 19 nt, Homo sapiens
  misc_RNA (1)...(19): siRNA sense strand
gaccggacauggaccuacu

SEQ ID NO: 520378 - RNA, 19 nt, Homo sapiens
  misc_RNA (1)...(19): siRNA sense strand
ggacuggguggcaaagaag

SEQ ID NO: 520379 - RNA, 19 nt, Homo sapiens
  misc_RNA (1)...(19): siRNA sense strand
gcuggagucccuugugugu

SEQ ID NO: 520380 - RNA, 19 nt, Homo sapiens
  misc_RNA (1)...(19): siRNA sense strand
ccaugucccucccuuugca

SEQ ID NO: 520381 - RNA, 19 nt, Homo sapiens
  misc_RNA (1)...(19): siRNA sense strand
uccaugaccuguucuacca

SEQ ID NO: 520382 - RNA, 19 nt, Homo sapiens
  misc_RNA (1)...(19): siRNA sense strand
ggucuacagcaucgaguau

SEQ ID NO: 520383 - RNA, 19 nt, Homo sapiens
  misc_RNA (1)...(19): siRNA sense strand
gggcuuccucgucgcagua

SEQ ID NO: 520384 - RNA, 19 nt, Homo sapiens
  misc_RNA (1)...(19): siRNA sense strand
ggagcuccacagcggcaua

SEQ ID NO: 520385 - RNA, 19 nt, Homo sapiens
  misc_RNA (1)...(19): siRNA sense strand
gaggaagggacaccacagu

SEQ ID NO: 520386 - RNA, 19 nt, Homo sapiens
  misc_RNA (1)...(19): siRNA sense strand
ccaaagugagaucgauuca

SEQ ID NO: 520387 - RNA, 19 nt, Homo sapiens
  misc_RNA (1)...(19): siRNA sense strand
ugaaauuccaguccagcaa

SEQ ID NO: 520388 - RNA, 19 nt, Homo sapiens
  misc_RNA (1)...(19): siRNA sense strand
ggcuaacccuggaagacau

SEQ ID NO: 520389 - RNA, 19 nt, Homo sapiens
  misc_RNA (1)...(19): siRNA sense strand
uggcccagccuguccagua

SEQ ID NO: 520390 - RNA, 19 nt, Homo sapiens
  misc_RNA (1)...(19): siRNA sense strand
cacaggccaucucuaaggu

SEQ ID NO: 520391 - RNA, 19 nt, Homo sapiens
  misc_RNA (1)...(19): siRNA sense strand
cuaccugagcuacagauau

SEQ ID NO: 520392 - RNA, 19 nt, Homo sapiens
  misc_RNA (1)...(19): siRNA sense strand
uauggaggaaucccaagaa

SEQ ID NO: 520393 - RNA, 19 nt, Homo sapiens
  misc_RNA (1)...(19): siRNA sense strand
ccugaucccugucuuugac

SEQ ID NO: 520394 - RNA, 19 nt, Homo sapiens
  misc_RNA (1)...(19): siRNA sense strand
cuacaugugccgagugaag

SEQ ID NO: 520395 - RNA, 19 nt, Homo sapiens
  misc_RNA (1)...(19): siRNA sense strand
aggaagggacaccacagua

SEQ ID NO: 520396 - RNA, 19 nt, Homo sapiens
  misc_RNA (1)...(19): siRNA sense strand
gauuugcacagacagaaca

SEQ ID NO: 520397 - RNA, 19 nt, Homo sapiens
  misc_RNA (1)...(19): siRNA sense strand
ugaccuccuuggcuaugga

SEQ ID NO: 520398 - RNA, 19 nt, Homo sapiens
  misc_RNA (1)...(19): siRNA sense strand
acagcuggccucccuccua

SEQ ID NO: 520399 - RNA, 19 nt, Homo sapiens
  misc_RNA (1)...(19): siRNA sense strand
ggucaaccgcaccuaccaa

SEQ ID NO: 520400 - RNA, 19 nt, Homo sapiens
  misc_RNA (1)...(19): siRNA sense strand
cagcggaucacccggaagu

SEQ ID NO: 520401 - RNA, 19 nt, Homo sapiens
  misc_RNA (1)...(19): siRNA sense strand
gggauuugcacagacagaa

SEQ ID NO: 520402 - RNA, 19 nt, Homo sapiens
  misc_RNA (1)...(19): siRNA sense strand
gcuaccugagcuacagaua

SEQ ID NO: 520403 - RNA, 19 nt, Homo sapiens
  misc_RNA (1)...(19): siRNA sense strand
cccuacaugugccgaguga

SEQ ID NO: 520404 - RNA, 19 nt, Homo sapiens
  misc_RNA (1)...(19): siRNA sense strand
gucaaccgcaccuaccaaa

SEQ ID NO: 520405 - RNA, 19 nt, Homo sapiens
  misc_RNA (1)...(19): siRNA sense strand
ucaccaagcucaacauuua

SEQ ID NO: 520406 - RNA, 19 nt, Homo sapiens
  misc_RNA (1)...(19): siRNA sense strand
cgagagcgcuuggaaguuu

SEQ ID NO: 520407 - RNA, 19 nt, Homo sapiens
  misc_RNA (1)...(19): siRNA sense strand
ugaaggaccugcgggagua

SEQ ID NO: 520408 - RNA, 19 nt, Homo sapiens
  misc_RNA (1)...(19): siRNA sense strand
ucagugacgugcagcuuga

SEQ ID NO: 520409 - RNA, 19 nt, Homo sapiens
  misc_RNA (1)...(19): siRNA sense strand
gcucaacauuuacuucaag

SEQ ID NO: 520410 - RNA, 19 nt, Homo sapiens
  misc_RNA (1)...(19): siRNA sense strand
caccaucugucuucuacga

SEQ ID NO: 520411 - RNA, 19 nt, Homo sapiens
  misc_RNA (1)...(19): siRNA sense strand
caucuacgcuacgcuauac

SEQ ID NO: 520412 - RNA, 19 nt, Homo sapiens
  misc_RNA (1)...(19): siRNA sense strand
gugccuaccugcuguuugg

SEQ ID NO: 520413 - RNA, 19 nt, Homo sapiens
  misc_RNA (1)...(19): siRNA sense strand
ccagagaugccgccaagau

SEQ ID NO: 520414 - RNA, 19 nt, Homo sapiens
  misc_RNA (1)...(19): siRNA sense strand
gagagcgcuuggaaguuuc

SEQ ID NO: 520415 - RNA, 19 nt, Homo sapiens
  misc_RNA (1)...(19): siRNA sense strand
gggcauccuugugcucuuc

SEQ ID NO: 520416 - RNA, 19 nt, Homo sapiens
  misc_RNA (1)...(19): siRNA sense strand
ccaucuacgcuacgcuaua

SEQ ID NO: 520417 - RNA, 19 nt, Homo sapiens
  misc_RNA (1)...(19): siRNA sense strand
cagagaugccgccaagaug

SEQ ID NO: 520418 - RNA, 19 nt, Homo sapiens
  misc_RNA (1)...(19): siRNA sense strand
acgcuacgcuauacaugga

SEQ ID NO: 520419 - RNA, 19 nt, Homo sapiens
  misc_RNA (1)...(19): siRNA sense strand
gcagugccacgggacauug

SEQ ID NO: 520420 - RNA, 19 nt, Homo sapiens
  misc_RNA (1)...(19): siRNA sense strand
gcaaggacucgguggucau

SEQ ID NO: 520421 - RNA, 19 nt, Homo sapiens
  misc_RNA (1)...(19): siRNA sense strand
caagcucaacauuuacuuc

SEQ ID NO: 520422 - RNA, 19 nt, Homo sapiens
  misc_RNA (1)...(19): siRNA sense strand
guucaccaagcucaacauu

SEQ ID NO: 520423 - RNA, 19 nt, Homo sapiens
  misc_RNA (1)...(19): siRNA sense strand
cugcugcucacccuuauga

SEQ ID NO: 520424 - RNA, 19 nt, Homo sapiens
  misc_RNA (1)...(19): siRNA sense strand
gcgcuuggaaguuucucuu

SEQ ID NO: 520425 - RNA, 19 nt, Homo sapiens
  misc_RNA (1)...(19): siRNA sense strand
cugcugcugcucacccuua

SEQ ID NO: 520426 - RNA, 19 nt, Homo sapiens
  misc_RNA (1)...(19): siRNA sense strand
gguuccgccucuacugguu

SEQ ID NO: 520427 - RNA, 19 nt, Homo sapiens
  misc_RNA (1)...(19): siRNA sense strand
caaggacucgguggucaug

SEQ ID NO: 520428 - RNA, 19 nt, Homo sapiens
  misc_RNA (1)...(19): siRNA sense strand
ucaccaagcucaacauuua

SEQ ID NO: 520429 - RNA, 19 nt, Homo sapiens
  misc_RNA (1)...(19): siRNA sense strand
cgagagcgcuuggaaguuu

SEQ ID NO: 520430 - RNA, 19 nt, Homo sapiens
  misc_RNA (1)...(19): siRNA sense strand
ugaaggaccugcgggagua

SEQ ID NO: 520431 - RNA, 19 nt, Homo sapiens
  misc_RNA (1)...(19): siRNA sense strand
ucagugacgugcagcuuga

SEQ ID NO: 520432 - RNA, 19 nt, Homo sapiens
  misc_RNA (1)...(19): siRNA sense strand
gcucaacauuuacuucaag

SEQ ID NO: 520433 - RNA, 19 nt, Homo sapiens
  misc_RNA (1)...(19): siRNA sense strand
caccaucugucuucuacga

SEQ ID NO: 520434 - RNA, 19 nt, Homo sapiens
  misc_RNA (1)...(19): siRNA sense strand
caucuacgcuacgcuauac

SEQ ID NO: 520435 - RNA, 19 nt, Homo sapiens
  misc_RNA (1)...(19): siRNA sense strand
gugccuaccugcuguuugg

SEQ ID NO: 520436 - RNA, 19 nt, Homo sapiens
  misc_RNA (1)...(19): siRNA sense strand
ccagagaugccgccaagau

SEQ ID NO: 520437 - RNA, 19 nt, Homo sapiens
  misc_RNA (1)...(19): siRNA sense strand
gagagcgcuuggaaguuuc

SEQ ID NO: 520438 - RNA, 19 nt, Homo sapiens
  misc_RNA (1)...(19): siRNA sense strand
gggcauccuugugcucuuc

SEQ ID NO: 520439 - RNA, 19 nt, Homo sapiens
  misc_RNA (1)...(19): siRNA sense strand
ccaucuacgcuacgcuaua

SEQ ID NO: 520440 - RNA, 19 nt, Homo sapiens
  misc_RNA (1)...(19): siRNA sense strand
cagagaugccgccaagaug

SEQ ID NO: 520441 - RNA, 19 nt, Homo sapiens
  misc_RNA (1)...(19): siRNA sense strand
acgcuacgcuauacaugga

SEQ ID NO: 520442 - RNA, 19 nt, Homo sapiens
  misc_RNA (1)...(19): siRNA sense strand
gcagugccacgggacauug

SEQ ID NO: 520443 - RNA, 19 nt, Homo sapiens
  misc_RNA (1)...(19): siRNA sense strand
gcaaggacucgguggucau

SEQ ID NO: 520444 - RNA, 19 nt, Homo sapiens
  misc_RNA (1)...(19): siRNA sense strand
caagcucaacauuuacuuc

SEQ ID NO: 520445 - RNA, 19 nt, Homo sapiens
  misc_RNA (1)...(19): siRNA sense strand
guucaccaagcucaacauu

SEQ ID NO: 520446 - RNA, 19 nt, Homo sapiens
  misc_RNA (1)...(19): siRNA sense strand
cugcugcucacccuuauga

SEQ ID NO: 520447 - RNA, 19 nt, Homo sapiens
  misc_RNA (1)...(19): siRNA sense strand
gcgcuuggaaguuucucuu

SEQ ID NO: 520448 - RNA, 19 nt, Homo sapiens
  misc_RNA (1)...(19): siRNA sense strand
cugcugcugcucacccuua

SEQ ID NO: 520449 - RNA, 19 nt, Homo sapiens
  misc_RNA (1)...(19): siRNA sense strand
gguuccgccucuacugguu

SEQ ID NO: 520450 - RNA, 19 nt, Homo sapiens
  misc_RNA (1)...(19): siRNA sense strand
caaggacucgguggucaug

SEQ ID NO: 520451 - RNA, 19 nt, Homo sapiens
  misc_RNA (1)...(19): siRNA sense strand
caauccaucuggcaguuca

SEQ ID NO: 520452 - RNA, 19 nt, Homo sapiens
  misc_RNA (1)...(19): siRNA sense strand
guaccaguccaguccauga

SEQ ID NO: 520453 - RNA, 19 nt, Homo sapiens
  misc_RNA (1)...(19): siRNA sense strand
gcacggggcugaugucaac

SEQ ID NO: 520454 - RNA, 19 nt, Homo sapiens
  misc_RNA (1)...(19): siRNA sense strand
gaugucaacgugccugaug

SEQ ID NO: 520455 - RNA, 19 nt, Homo sapiens
  misc_RNA (1)...(19): siRNA sense strand
agacggcgcugcaggucau

SEQ ID NO: 520456 - RNA, 19 nt, Homo sapiens
  misc_RNA (1)...(19): siRNA sense strand
ucuggcagcugaaucugau

SEQ ID NO: 520457 - RNA, 19 nt, Homo sapiens
  misc_RNA (1)...(19): siRNA sense strand
ggagcuggcacugcagaga

SEQ ID NO: 520458 - RNA, 19 nt, Homo sapiens
  misc_RNA (1)...(19): siRNA sense strand
caauccaucuggcaguuca

SEQ ID NO: 520459 - RNA, 19 nt, Homo sapiens
  misc_RNA (1)...(19): siRNA sense strand
guaccaguccaguccauga

SEQ ID NO: 520460 - RNA, 19 nt, Homo sapiens
  misc_RNA (1)...(19): siRNA sense strand
gcacggggcugaugucaac

SEQ ID NO: 520461 - RNA, 19 nt, Homo sapiens
  misc_RNA (1)...(19): siRNA sense strand
gaugucaacgugccugaug

SEQ ID NO: 520462 - RNA, 19 nt, Homo sapiens
  misc_RNA (1)...(19): siRNA sense strand
agacggcgcugcaggucau

SEQ ID NO: 520463 - RNA, 19 nt, Homo sapiens
  misc_RNA (1)...(19): siRNA sense strand
ucuggcagcugaaucugau

SEQ ID NO: 520464 - RNA, 19 nt, Homo sapiens
  misc_RNA (1)...(19): siRNA sense strand
ggagcuggcacugcagaga

SEQ ID NO: 520465 - RNA, 19 nt, Homo sapiens
  misc_RNA (1)...(19): siRNA sense strand
gcacaaaucccaccaaugc

SEQ ID NO: 520466 - RNA, 19 nt, Homo sapiens
  misc_RNA (1)...(19): siRNA sense strand
gaacaauuucugccuauga

SEQ ID NO: 520467 - RNA, 19 nt, Homo sapiens
  misc_RNA (1)...(19): siRNA sense strand
gaaagaggaagaaguggaa

SEQ ID NO: 520468 - RNA, 19 nt, Homo sapiens
  misc_RNA (1)...(19): siRNA sense strand
gaacaggugauuccaagau

SEQ ID NO: 520469 - RNA, 19 nt, Homo sapiens
  misc_RNA (1)...(19): siRNA sense strand
gaugaaagaggaagaagug

SEQ ID NO: 520470 - RNA, 19 nt, Homo sapiens
  misc_RNA (1)...(19): siRNA sense strand
ucaggaaaguucugggaaa

SEQ ID NO: 520471 - RNA, 19 nt, Homo sapiens
  misc_RNA (1)...(19): siRNA sense strand
ggccaccuaugaagacuuu

SEQ ID NO: 520472 - RNA, 19 nt, Homo sapiens
  misc_RNA (1)...(19): siRNA sense strand
ccaagaaaauugaguuuga

SEQ ID NO: 520473 - RNA, 19 nt, Homo sapiens
  misc_RNA (1)...(19): siRNA sense strand
gcagaggucaggaaaguuc

SEQ ID NO: 520474 - RNA, 19 nt, Homo sapiens
  misc_RNA (1)...(19): siRNA sense strand
gggcacaaaucccaccaau

SEQ ID NO: 520475 - RNA, 19 nt, Homo sapiens
  misc_RNA (1)...(19): siRNA sense strand
ggaccaggccaccuaugaa

SEQ ID NO: 520476 - RNA, 19 nt, Homo sapiens
  misc_RNA (1)...(19): siRNA sense strand
ccaggucggugauguccuu

SEQ ID NO: 520477 - RNA, 19 nt, Homo sapiens
  misc_RNA (1)...(19): siRNA sense strand
gcaaugaagagcugaaugc

SEQ ID NO: 520478 - RNA, 19 nt, Homo sapiens
  misc_RNA (1)...(19): siRNA sense strand
gauggcaggucaagaagac

SEQ ID NO: 520479 - RNA, 19 nt, Homo sapiens
  misc_RNA (1)...(19): siRNA sense strand
gugcugaacuccgccaugu

SEQ ID NO: 520480 - RNA, 19 nt, Homo sapiens
  misc_RNA (1)...(19): siRNA sense strand
cuacgaagcuuuugucaag

SEQ ID NO: 520481 - RNA, 19 nt, Homo sapiens
  misc_RNA (1)...(19): siRNA sense strand
agagcugaaugccaagaaa

SEQ ID NO: 520482 - RNA, 19 nt, Homo sapiens
  misc_RNA (1)...(19): siRNA sense strand
gcaagccauuuccaacaac

SEQ ID NO: 520483 - RNA, 19 nt, Homo sapiens
  misc_RNA (1)...(19): siRNA sense strand
acaaggaccaggccaccua

SEQ ID NO: 520484 - RNA, 19 nt, Homo sapiens
  misc_RNA (1)...(19): siRNA sense strand
ugcaagccauuuccaacaa

SEQ ID NO: 520485 - RNA, 19 nt, Homo sapiens
  misc_RNA (1)...(19): siRNA sense strand
caagccauuuccaacaaca

SEQ ID NO: 520486 - RNA, 19 nt, Homo sapiens
  misc_RNA (1)...(19): siRNA sense strand
ggucggugauguccuucga

SEQ ID NO: 520487 - RNA, 19 nt, Homo sapiens
  misc_RNA (1)...(19): siRNA sense strand
gaaggcaauggcacaguca

SEQ ID NO: 520488 - RNA, 19 nt, Homo sapiens
  misc_RNA (1)...(19): siRNA sense strand
uccaauggcugcaucaacu

SEQ ID NO: 520489 - RNA, 19 nt, Homo sapiens
  misc_RNA (1)...(19): siRNA sense strand
ccaauggcugcaucaacua

SEQ ID NO: 520490 - RNA, 19 nt, Homo sapiens
  misc_RNA (1)...(19): siRNA sense strand
caaugcagaggucaggaaa

SEQ ID NO: 520491 - RNA, 19 nt, Homo sapiens
  misc_RNA (1)...(19): siRNA sense strand
gaagagcugaaugccaaga

SEQ ID NO: 520492 - RNA, 19 nt, Homo sapiens
  misc_RNA (1)...(19): siRNA sense strand
aacaauuucugccuaugau

SEQ ID NO: 520493 - RNA, 19 nt, Homo sapiens
  misc_RNA (1)...(19): siRNA sense strand
uaagccaggucggugaugu

SEQ ID NO: 520494 - RNA, 19 nt, Homo sapiens
  misc_RNA (1)...(19): siRNA sense strand
ccuaugaagacuuuguuga

SEQ ID NO: 520495 - RNA, 19 nt, Homo sapiens
  misc_RNA (1)...(19): siRNA sense strand
ugaauucaaggaggcauuu

SEQ ID NO: 520496 - RNA, 19 nt, Homo sapiens
  misc_RNA (1)...(19): siRNA sense strand
ccaaugcagaggucaggaa

SEQ ID NO: 520497 - RNA, 19 nt, Homo sapiens
  misc_RNA (1)...(19): siRNA sense strand
gcaucaacuacgaagcuuu

SEQ ID NO: 520498 - RNA, 19 nt, Homo sapiens
  misc_RNA (1)...(19): siRNA sense strand
gaccaggccaccuaugaag

SEQ ID NO: 520499 - RNA, 19 nt, Homo sapiens
  misc_RNA (1)...(19): siRNA sense strand
uugaacaauuucugccuau

SEQ ID NO: 520500 - RNA, 19 nt, Homo sapiens
  misc_RNA (1)...(19): siRNA sense strand
aaagaugaaagaggaagaa

SEQ ID NO: 520501 - RNA, 19 nt, Homo sapiens
  misc_RNA (1)...(19): siRNA sense strand
caggaaaguucugggaaac

SEQ ID NO: 520502 - RNA, 19 nt, Homo sapiens
  misc_RNA (1)...(19): siRNA sense strand
agucaugggugcugaacuc

SEQ ID NO: 520503 - RNA, 19 nt, Homo sapiens
  misc_RNA (1)...(19): siRNA sense strand
ugaacaauuucugccuaug

SEQ ID NO: 520504 - RNA, 19 nt, Homo sapiens
  misc_RNA (1)...(19): siRNA sense strand
ugacagaacaggugauucc

SEQ ID NO: 520505 - RNA, 19 nt, Homo sapiens
  misc_RNA (1)...(19): siRNA sense strand
ggucaagaagacuccaaug

SEQ ID NO: 520506 - RNA, 19 nt, Homo sapiens
  misc_RNA (1)...(19): siRNA sense strand
augcagaggucaggaaagu

SEQ ID NO: 520507 - RNA, 19 nt, Homo sapiens
  misc_RNA (1)...(19): siRNA sense strand
ccuaugaugcaagccauuu

SEQ ID NO: 520508 - RNA, 19 nt, Homo sapiens
  misc_RNA (1)...(19): siRNA sense strand
agaaguggaagcccugaug

SEQ ID NO: 520509 - RNA, 19 nt, Homo sapiens
  misc_RNA (1)...(19): siRNA sense strand
caaggaccaggccaccuau

SEQ ID NO: 520510 - RNA, 19 nt, Homo sapiens
  misc_RNA (1)...(19): siRNA sense strand
gcacaaaucccaccaaugc

SEQ ID NO: 520511 - RNA, 19 nt, Homo sapiens
  misc_RNA (1)...(19): siRNA sense strand
gaacaauuucugccuauga

SEQ ID NO: 520512 - RNA, 19 nt, Homo sapiens
  misc_RNA (1)...(19): siRNA sense strand
gaaagaggaagaaguggaa

SEQ ID NO: 520513 - RNA, 19 nt, Homo sapiens
  misc_RNA (1)...(19): siRNA sense strand
gaacaggugauuccaagau

SEQ ID NO: 520514 - RNA, 19 nt, Homo sapiens
  misc_RNA (1)...(19): siRNA sense strand
gaugaaagaggaagaagug

SEQ ID NO: 520515 - RNA, 19 nt, Homo sapiens
  misc_RNA (1)...(19): siRNA sense strand
ucaggaaaguucugggaaa

SEQ ID NO: 520516 - RNA, 19 nt, Homo sapiens
  misc_RNA (1)...(19): siRNA sense strand
ggccaccuaugaagacuuu

SEQ ID NO: 520517 - RNA, 19 nt, Homo sapiens
  misc_RNA (1)...(19): siRNA sense strand
ccaagaaaauugaguuuga

SEQ ID NO: 520518 - RNA, 19 nt, Homo sapiens
  misc_RNA (1)...(19): siRNA sense strand
gcagaggucaggaaaguuc

SEQ ID NO: 520519 - RNA, 19 nt, Homo sapiens
  misc_RNA (1)...(19): siRNA sense strand
gggcacaaaucccaccaau

SEQ ID NO: 520520 - RNA, 19 nt, Homo sapiens
  misc_RNA (1)...(19): siRNA sense strand
ggaccaggccaccuaugaa

SEQ ID NO: 520521 - RNA, 19 nt, Homo sapiens
  misc_RNA (1)...(19): siRNA sense strand
ccaggucggugauguccuu

SEQ ID NO: 520522 - RNA, 19 nt, Homo sapiens
  misc_RNA (1)...(19): siRNA sense strand
gcaaugaagagcugaaugc

SEQ ID NO: 520523 - RNA, 19 nt, Homo sapiens
  misc_RNA (1)...(19): siRNA sense strand
aggcauuucuccuguuuga

SEQ ID NO: 520524 - RNA, 19 nt, Homo sapiens
  misc_RNA (1)...(19): siRNA sense strand
gauggcaggucaagaagac

SEQ ID NO: 520525 - RNA, 19 nt, Homo sapiens
  misc_RNA (1)...(19): siRNA sense strand
gcauuucuccuguuugaca

SEQ ID NO: 520526 - RNA, 19 nt, Homo sapiens
  misc_RNA (1)...(19): siRNA sense strand
gugcugaacuccgccaugu

SEQ ID NO: 520527 - RNA, 19 nt, Homo sapiens
  misc_RNA (1)...(19): siRNA sense strand
cuacgaagcuuuugucaag

SEQ ID NO: 520528 - RNA, 19 nt, Homo sapiens
  misc_RNA (1)...(19): siRNA sense strand
agagcugaaugccaagaaa

SEQ ID NO: 520529 - RNA, 19 nt, Homo sapiens
  misc_RNA (1)...(19): siRNA sense strand
gcaagccauuuccaacaac

SEQ ID NO: 520530 - RNA, 19 nt, Homo sapiens
  misc_RNA (1)...(19): siRNA sense strand
acaaggaccaggccaccua

SEQ ID NO: 520531 - RNA, 19 nt, Homo sapiens
  misc_RNA (1)...(19): siRNA sense strand
ugcaagccauuuccaacaa

SEQ ID NO: 520532 - RNA, 19 nt, Homo sapiens
  misc_RNA (1)...(19): siRNA sense strand
caagccauuuccaacaaca

SEQ ID NO: 520533 - RNA, 19 nt, Homo sapiens
  misc_RNA (1)...(19): siRNA sense strand
ggucggugauguccuucga

SEQ ID NO: 520534 - RNA, 19 nt, Homo sapiens
  misc_RNA (1)...(19): siRNA sense strand
gaaggcaauggcacaguca

SEQ ID NO: 520535 - RNA, 19 nt, Homo sapiens
  misc_RNA (1)...(19): siRNA sense strand
uccaauggcugcaucaacu

SEQ ID NO: 520536 - RNA, 19 nt, Homo sapiens
  misc_RNA (1)...(19): siRNA sense strand
ccaauggcugcaucaacua

SEQ ID NO: 520537 - RNA, 19 nt, Homo sapiens
  misc_RNA (1)...(19): siRNA sense strand
caaugcagaggucaggaaa

SEQ ID NO: 520538 - RNA, 19 nt, Homo sapiens
  misc_RNA (1)...(19): siRNA sense strand
gaagagcugaaugccaaga

SEQ ID NO: 520539 - RNA, 19 nt, Homo sapiens
  misc_RNA (1)...(19): siRNA sense strand
uaagccaggucggugaugu

SEQ ID NO: 520540 - RNA, 19 nt, Homo sapiens
  misc_RNA (1)...(19): siRNA sense strand
aacaauuucugccuaugau

SEQ ID NO: 520541 - RNA, 19 nt, Homo sapiens
  misc_RNA (1)...(19): siRNA sense strand
ugaauucaaggaggcauuu

SEQ ID NO: 520542 - RNA, 19 nt, Homo sapiens
  misc_RNA (1)...(19): siRNA sense strand
ccuaugaagacuuuguuga

SEQ ID NO: 520543 - RNA, 19 nt, Homo sapiens
  misc_RNA (1)...(19): siRNA sense strand
ccaaugcagaggucaggaa

SEQ ID NO: 520544 - RNA, 19 nt, Homo sapiens
  misc_RNA (1)...(19): siRNA sense strand
gcaucaacuacgaagcuuu

SEQ ID NO: 520545 - RNA, 19 nt, Homo sapiens
  misc_RNA (1)...(19): siRNA sense strand
gaccaggccaccuaugaag

SEQ ID NO: 520546 - RNA, 19 nt, Homo sapiens
  misc_RNA (1)...(19): siRNA sense strand
caggaaaguucugggaaac

SEQ ID NO: 520547 - RNA, 19 nt, Homo sapiens
  misc_RNA (1)...(19): siRNA sense strand
aaagaugaaagaggaagaa

SEQ ID NO: 520548 - RNA, 19 nt, Homo sapiens
  misc_RNA (1)...(19): siRNA sense strand
agucaugggugcugaacuc

SEQ ID NO: 520549 - RNA, 19 nt, Homo sapiens
  misc_RNA (1)...(19): siRNA sense strand
ugaacaauuucugccuaug

SEQ ID NO: 520550 - RNA, 19 nt, Homo sapiens
  misc_RNA (1)...(19): siRNA sense strand
uugaacaauuucugccuau

SEQ ID NO: 520551 - RNA, 19 nt, Homo sapiens
  misc_RNA (1)...(19): siRNA sense strand
ggucaagaagacuccaaug

SEQ ID NO: 520552 - RNA, 19 nt, Homo sapiens
  misc_RNA (1)...(19): siRNA sense strand
ugacagaacaggugauucc

SEQ ID NO: 520553 - RNA, 19 nt, Homo sapiens
  misc_RNA (1)...(19): siRNA sense strand
augcagaggucaggaaagu

SEQ ID NO: 520554 - RNA, 19 nt, Homo sapiens
  misc_RNA (1)...(19): siRNA sense strand
ccuaugaugcaagccauuu

SEQ ID NO: 520555 - RNA, 19 nt, Homo sapiens
  misc_RNA (1)...(19): siRNA sense strand
agaaguggaagcccugaug

SEQ ID NO: 520556 - RNA, 19 nt, Homo sapiens
  misc_RNA (1)...(19): siRNA sense strand
caaggaccaggccaccuau

SEQ ID NO: 520557 - RNA, 19 nt, Homo sapiens
  misc_RNA (1)...(19): siRNA sense strand
gcacauaugaggacuacuu

SEQ ID NO: 520558 - RNA, 19 nt, Homo sapiens
  misc_RNA (1)...(19): siRNA sense strand
ccaaaguggugaucgaguu

SEQ ID NO: 520559 - RNA, 19 nt, Homo sapiens
  misc_RNA (1)...(19): siRNA sense strand
cuacgaggccuucuugaaa

SEQ ID NO: 520560 - RNA, 19 nt, Homo sapiens
  misc_RNA (1)...(19): siRNA sense strand
gcagagcucagacauguuc

SEQ ID NO: 520561 - RNA, 19 nt, Homo sapiens
  misc_RNA (1)...(19): siRNA sense strand
caacuacgaggccuucuug

SEQ ID NO: 520562 - RNA, 19 nt, Homo sapiens
  misc_RNA (1)...(19): siRNA sense strand
agaaggauguucccgugaa

SEQ ID NO: 520563 - RNA, 19 nt, Homo sapiens
  misc_RNA (1)...(19): siRNA sense strand
gaaggauguucccgugaag

SEQ ID NO: 520564 - RNA, 19 nt, Homo sapiens
  misc_RNA (1)...(19): siRNA sense strand
caaaguggugaucgaguuu

SEQ ID NO: 520565 - RNA, 19 nt, Homo sapiens
  misc_RNA (1)...(19): siRNA sense strand
guguggacuuugagacuuu

SEQ ID NO: 520566 - RNA, 19 nt, Homo sapiens
  misc_RNA (1)...(19): siRNA sense strand
ugaucgaguuuaacaagga

SEQ ID NO: 520567 - RNA, 19 nt, Homo sapiens
  misc_RNA (1)...(19): siRNA sense strand
caagagugaugagcugaag

SEQ ID NO: 520568 - RNA, 19 nt, Homo sapiens
  misc_RNA (1)...(19): siRNA sense strand
cagucgaucucuccaaagu

SEQ ID NO: 520569 - RNA, 19 nt, Homo sapiens
  misc_RNA (1)...(19): siRNA sense strand
cauaugaggacuacuugga

SEQ ID NO: 520570 - RNA, 19 nt, Homo sapiens
  misc_RNA (1)...(19): siRNA sense strand
ucaccacccuuggagagaa

SEQ ID NO: 520571 - RNA, 19 nt, Homo sapiens
  misc_RNA (1)...(19): siRNA sense strand
ggagggguuucguguguuu

SEQ ID NO: 520572 - RNA, 19 nt, Homo sapiens
  misc_RNA (1)...(19): siRNA sense strand
gcaacggcugcaucaacua

SEQ ID NO: 520573 - RNA, 19 nt, Homo sapiens
  misc_RNA (1)...(19): siRNA sense strand
ucuccaaaccugcugcuaa

SEQ ID NO: 520574 - RNA, 19 nt, Homo sapiens
  misc_RNA (1)...(19): siRNA sense strand
aaguggugaucgaguuuaa

SEQ ID NO: 520575 - RNA, 19 nt, Homo sapiens
  misc_RNA (1)...(19): siRNA sense strand
uccagucgaucucuccaaa

SEQ ID NO: 520576 - RNA, 19 nt, Homo sapiens
  misc_RNA (1)...(19): siRNA sense strand
aggaccagcuggaggaguu

SEQ ID NO: 520577 - RNA, 19 nt, Homo sapiens
  misc_RNA (1)...(19): siRNA sense strand
ggugaucgaguuuaacaag

SEQ ID NO: 520578 - RNA, 19 nt, Homo sapiens
  misc_RNA (1)...(19): siRNA sense strand
gaggccaaggcacauauga

SEQ ID NO: 520579 - RNA, 19 nt, Homo sapiens
  misc_RNA (1)...(19): siRNA sense strand
cuccaaaccugcugcuaag

SEQ ID NO: 520580 - RNA, 19 nt, Homo sapiens
  misc_RNA (1)...(19): siRNA sense strand
gagcucagacauguucuca

SEQ ID NO: 520581 - RNA, 19 nt, Homo sapiens
  misc_RNA (1)...(19): siRNA sense strand
ggauguucccgugaagaaa

SEQ ID NO: 520582 - RNA, 19 nt, Homo sapiens
  misc_RNA (1)...(19): siRNA sense strand
aaaguggugaucgaguuua

SEQ ID NO: 520583 - RNA, 19 nt, Homo sapiens
  misc_RNA (1)...(19): siRNA sense strand
gaggccuucuugaaacaca

SEQ ID NO: 520584 - RNA, 19 nt, Homo sapiens
  misc_RNA (1)...(19): siRNA sense strand
uacgaggccuucuugaaac

SEQ ID NO: 520585 - RNA, 19 nt, Homo sapiens
  misc_RNA (1)...(19): siRNA sense strand
ccaagagugaugagcugaa

SEQ ID NO: 520586 - RNA, 19 nt, Homo sapiens
  misc_RNA (1)...(19): siRNA sense strand
caacggcugcaucaacuac

SEQ ID NO: 520587 - RNA, 19 nt, Homo sapiens
  misc_RNA (1)...(19): siRNA sense strand
uuggagagaagaugacuga

SEQ ID NO: 520588 - RNA, 19 nt, Homo sapiens
  misc_RNA (1)...(19): siRNA sense strand
gguuucguguguuugacaa

SEQ ID NO: 520589 - RNA, 19 nt, Homo sapiens
  misc_RNA (1)...(19): siRNA sense strand
uccaggcaguggccaagaa

SEQ ID NO: 520590 - RNA, 19 nt, Homo sapiens
  misc_RNA (1)...(19): siRNA sense strand
gauguucccgugaagaaac

SEQ ID NO: 520591 - RNA, 19 nt, Homo sapiens
  misc_RNA (1)...(19): siRNA sense strand
cguguggacuuugagacuu

SEQ ID NO: 520592 - RNA, 19 nt, Homo sapiens
  misc_RNA (1)...(19): siRNA sense strand
ggacagcaaugguuguauc

SEQ ID NO: 520593 - RNA, 19 nt, Homo sapiens
  misc_RNA (1)...(19): siRNA sense strand
ugaaggugcuggacuuuga

SEQ ID NO: 520594 - RNA, 19 nt, Homo sapiens
  misc_RNA (1)...(19): siRNA sense strand
gugaugagaugaaugugaa

SEQ ID NO: 520595 - RNA, 19 nt, Homo sapiens
  misc_RNA (1)...(19): siRNA sense strand
cgucaugggugcugaaauc

SEQ ID NO: 520596 - RNA, 19 nt, Homo sapiens
  misc_RNA (1)...(19): siRNA sense strand
caagagugaugagaugaau

SEQ ID NO: 520597 - RNA, 19 nt, Homo sapiens
  misc_RNA (1)...(19): siRNA sense strand
ggacuucggguguuugaca

SEQ ID NO: 520598 - RNA, 19 nt, Homo sapiens
  misc_RNA (1)...(19): siRNA sense strand
gaacaggugauggcaagau

SEQ ID NO: 520599 - RNA, 19 nt, Homo sapiens
  misc_RNA (1)...(19): siRNA sense strand
gaggacagcaaugguugua

SEQ ID NO: 520600 - RNA, 19 nt, Homo sapiens
  misc_RNA (1)...(19): siRNA sense strand
gcuggacuuugagcacuuu

SEQ ID NO: 520601 - RNA, 19 nt, Homo sapiens
  misc_RNA (1)...(19): siRNA sense strand
ccaagagugaugagaugaa

SEQ ID NO: 520602 - RNA, 19 nt, Homo sapiens
  misc_RNA (1)...(19): siRNA sense strand
agacaguggccaagaacaa

SEQ ID NO: 520603 - RNA, 19 nt, Homo sapiens
  misc_RNA (1)...(19): siRNA sense strand
caugaggacagcaaugguu

SEQ ID NO: 520604 - RNA, 19 nt, Homo sapiens
  misc_RNA (1)...(19): siRNA sense strand
ggacuuugagcacuuucug

SEQ ID NO: 520605 - RNA, 19 nt, Homo sapiens
  misc_RNA (1)...(19): siRNA sense strand
agagugaugagaugaaugu

SEQ ID NO: 520606 - RNA, 19 nt, Homo sapiens
  misc_RNA (1)...(19): siRNA sense strand
gacuucggguguuugacaa

SEQ ID NO: 520607 - RNA, 19 nt, Homo sapiens
  misc_RNA (1)...(19): siRNA sense strand
ugcagacaguggccaagaa

SEQ ID NO: 520608 - RNA, 19 nt, Homo sapiens
  misc_RNA (1)...(19): siRNA sense strand
ccagggcaccuaugaggau

SEQ ID NO: 520609 - RNA, 19 nt, Homo sapiens
  misc_RNA (1)...(19): siRNA sense strand
gacagcaaugguuguauca

SEQ ID NO: 520610 - RNA, 19 nt, Homo sapiens
  misc_RNA (1)...(19): siRNA sense strand
gcagacaguggccaagaac

SEQ ID NO: 520611 - RNA, 19 nt, Homo sapiens
  misc_RNA (1)...(19): siRNA sense strand
acaaggaccagggcaccua

SEQ ID NO: 520612 - RNA, 19 nt, Homo sapiens
  misc_RNA (1)...(19): siRNA sense strand
caaggaccagggcaccuau

SEQ ID NO: 520613 - RNA, 19 nt, Homo sapiens
  misc_RNA (1)...(19): siRNA sense strand
ggacagcaaugguuguauc

SEQ ID NO: 520614 - RNA, 19 nt, Homo sapiens
  misc_RNA (1)...(19): siRNA sense strand
ugaaggugcuggacuuuga

SEQ ID NO: 520615 - RNA, 19 nt, Homo sapiens
  misc_RNA (1)...(19): siRNA sense strand
gugaugagaugaaugugaa

SEQ ID NO: 520616 - RNA, 19 nt, Homo sapiens
  misc_RNA (1)...(19): siRNA sense strand
cgucaugggugcugaaauc

SEQ ID NO: 520617 - RNA, 19 nt, Homo sapiens
  misc_RNA (1)...(19): siRNA sense strand
caagagugaugagaugaau

SEQ ID NO: 520618 - RNA, 19 nt, Homo sapiens
  misc_RNA (1)...(19): siRNA sense strand
ggacuucggguguuugaca

SEQ ID NO: 520619 - RNA, 19 nt, Homo sapiens
  misc_RNA (1)...(19): siRNA sense strand
gaggacagcaaugguugua

SEQ ID NO: 520620 - RNA, 19 nt, Homo sapiens
  misc_RNA (1)...(19): siRNA sense strand
gcuggacuuugagcacuuu

SEQ ID NO: 520621 - RNA, 19 nt, Homo sapiens
  misc_RNA (1)...(19): siRNA sense strand
ccaagagugaugagaugaa

SEQ ID NO: 520622 - RNA, 19 nt, Homo sapiens
  misc_RNA (1)...(19): siRNA sense strand
agacaguggccaagaacaa

SEQ ID NO: 520623 - RNA, 19 nt, Homo sapiens
  misc_RNA (1)...(19): siRNA sense strand
caugaggacagcaaugguu

SEQ ID NO: 520624 - RNA, 19 nt, Homo sapiens
  misc_RNA (1)...(19): siRNA sense strand
ggacuuugagcacuuucug

SEQ ID NO: 520625 - RNA, 19 nt, Homo sapiens
  misc_RNA (1)...(19): siRNA sense strand
agagugaugagaugaaugu

SEQ ID NO: 520626 - RNA, 19 nt, Homo sapiens
  misc_RNA (1)...(19): siRNA sense strand
gacuucggguguuugacaa

SEQ ID NO: 520627 - RNA, 19 nt, Homo sapiens
  misc_RNA (1)...(19): siRNA sense strand
ugcagacaguggccaagaa

SEQ ID NO: 520628 - RNA, 19 nt, Homo sapiens
  misc_RNA (1)...(19): siRNA sense strand
ccagggcaccuaugaggau

SEQ ID NO: 520629 - RNA, 19 nt, Homo sapiens
  misc_RNA (1)...(19): siRNA sense strand
gacagcaaugguuguauca

SEQ ID NO: 520630 - RNA, 19 nt, Homo sapiens
  misc_RNA (1)...(19): siRNA sense strand
gcagacaguggccaagaac

SEQ ID NO: 520631 - RNA, 19 nt, Homo sapiens
  misc_RNA (1)...(19): siRNA sense strand
acaaggaccagggcaccua

SEQ ID NO: 520632 - RNA, 19 nt, Homo sapiens
  misc_RNA (1)...(19): siRNA sense strand
caaggaccagggcaccuau

SEQ ID NO: 520633 - RNA, 19 nt, Homo sapiens
  misc_RNA (1)...(19): siRNA sense strand
ggacagcaaugguuguauc

SEQ ID NO: 520634 - RNA, 19 nt, Homo sapiens
  misc_RNA (1)...(19): siRNA sense strand
ugaaggugcuggacuuuga

SEQ ID NO: 520635 - RNA, 19 nt, Homo sapiens
  misc_RNA (1)...(19): siRNA sense strand
gugaugagaugaaugugaa

SEQ ID NO: 520636 - RNA, 19 nt, Homo sapiens
  misc_RNA (1)...(19): siRNA sense strand
cgucaugggugcugaaauc

SEQ ID NO: 520637 - RNA, 19 nt, Homo sapiens
  misc_RNA (1)...(19): siRNA sense strand
caagagugaugagaugaau

SEQ ID NO: 520638 - RNA, 19 nt, Homo sapiens
  misc_RNA (1)...(19): siRNA sense strand
ggacuucggguguuugaca

SEQ ID NO: 520639 - RNA, 19 nt, Homo sapiens
  misc_RNA (1)...(19): siRNA sense strand
gaggacagcaaugguugua

SEQ ID NO: 520640 - RNA, 19 nt, Homo sapiens
  misc_RNA (1)...(19): siRNA sense strand
gcuggacuuugagcacuuu

SEQ ID NO: 520641 - RNA, 19 nt, Homo sapiens
  misc_RNA (1)...(19): siRNA sense strand
ccaagagugaugagaugaa

SEQ ID NO: 520642 - RNA, 19 nt, Homo sapiens
  misc_RNA (1)...(19): siRNA sense strand
agacaguggccaagaacaa

SEQ ID NO: 520643 - RNA, 19 nt, Homo sapiens
  misc_RNA (1)...(19): siRNA sense strand
caugaggacagcaaugguu

SEQ ID NO: 520644 - RNA, 19 nt, Homo sapiens
  misc_RNA (1)...(19): siRNA sense strand
ggacuuugagcacuuucug

SEQ ID NO: 520645 - RNA, 19 nt, Homo sapiens
  misc_RNA (1)...(19): siRNA sense strand
agagugaugagaugaaugu

SEQ ID NO: 520646 - RNA, 19 nt, Homo sapiens
  misc_RNA (1)...(19): siRNA sense strand
gacuucggguguuugacaa

SEQ ID NO: 520647 - RNA, 19 nt, Homo sapiens
  misc_RNA (1)...(19): siRNA sense strand
ugcagacaguggccaagaa

SEQ ID NO: 520648 - RNA, 19 nt, Homo sapiens
  misc_RNA (1)...(19): siRNA sense strand
ccagggcaccuaugaggau

SEQ ID NO: 520649 - RNA, 19 nt, Homo sapiens
  misc_RNA (1)...(19): siRNA sense strand
gacagcaaugguuguauca

SEQ ID NO: 520650 - RNA, 19 nt, Homo sapiens
  misc_RNA (1)...(19): siRNA sense strand
gcagacaguggccaagaac

SEQ ID NO: 520651 - RNA, 19 nt, Homo sapiens
  misc_RNA (1)...(19): siRNA sense strand
acaaggaccagggcaccua

SEQ ID NO: 520652 - RNA, 19 nt, Homo sapiens
  misc_RNA (1)...(19): siRNA sense strand
caaggaccagggcaccuau

SEQ ID NO: 520653 - RNA, 19 nt, Homo sapiens
  misc_RNA (1)...(19): siRNA sense strand
ggacagcaaugguuguauc

SEQ ID NO: 520654 - RNA, 19 nt, Homo sapiens
  misc_RNA (1)...(19): siRNA sense strand
ugaaggugcuggacuuuga

SEQ ID NO: 520655 - RNA, 19 nt, Homo sapiens
  misc_RNA (1)...(19): siRNA sense strand
gugaugagaugaaugugaa

SEQ ID NO: 520656 - RNA, 19 nt, Homo sapiens
  misc_RNA (1)...(19): siRNA sense strand
cgucaugggugcugaaauc

SEQ ID NO: 520657 - RNA, 19 nt, Homo sapiens
  misc_RNA (1)...(19): siRNA sense strand
caagagugaugagaugaau

SEQ ID NO: 520658 - RNA, 19 nt, Homo sapiens
  misc_RNA (1)...(19): siRNA sense strand
ggacuucggguguuugaca

SEQ ID NO: 520659 - RNA, 19 nt, Homo sapiens
  misc_RNA (1)...(19): siRNA sense strand
gaacaggugauggcaagau

SEQ ID NO: 520660 - RNA, 19 nt, Homo sapiens
  misc_RNA (1)...(19): siRNA sense strand
gaggacagcaaugguugua

SEQ ID NO: 520661 - RNA, 19 nt, Homo sapiens
  misc_RNA (1)...(19): siRNA sense strand
gcuggacuuugagcacuuu

SEQ ID NO: 520662 - RNA, 19 nt, Homo sapiens
  misc_RNA (1)...(19): siRNA sense strand
ccaagagugaugagaugaa

SEQ ID NO: 520663 - RNA, 19 nt, Homo sapiens
  misc_RNA (1)...(19): siRNA sense strand
agacaguggccaagaacaa

SEQ ID NO: 520664 - RNA, 19 nt, Homo sapiens
  misc_RNA (1)...(19): siRNA sense strand
caugaggacagcaaugguu

SEQ ID NO: 520665 - RNA, 19 nt, Homo sapiens
  misc_RNA (1)...(19): siRNA sense strand
ggacuuugagcacuuucug

SEQ ID NO: 520666 - RNA, 19 nt, Homo sapiens
  misc_RNA (1)...(19): siRNA sense strand
agagugaugagaugaaugu

SEQ ID NO: 520667 - RNA, 19 nt, Homo sapiens
  misc_RNA (1)...(19): siRNA sense strand
gacuucggguguuugacaa

SEQ ID NO: 520668 - RNA, 19 nt, Homo sapiens
  misc_RNA (1)...(19): siRNA sense strand
ugcagacaguggccaagaa

SEQ ID NO: 520669 - RNA, 19 nt, Homo sapiens
  misc_RNA (1)...(19): siRNA sense strand
ccagggcaccuaugaggau

SEQ ID NO: 520670 - RNA, 19 nt, Homo sapiens
  misc_RNA (1)...(19): siRNA sense strand
gacagcaaugguuguauca

SEQ ID NO: 520671 - RNA, 19 nt, Homo sapiens
  misc_RNA (1)...(19): siRNA sense strand
gcagacaguggccaagaac

SEQ ID NO: 520672 - RNA, 19 nt, Homo sapiens
  misc_RNA (1)...(19): siRNA sense strand
acaaggaccagggcaccua

SEQ ID NO: 520673 - RNA, 19 nt, Homo sapiens
  misc_RNA (1)...(19): siRNA sense strand
caaggaccagggcaccuau

SEQ ID NO: 520674 - RNA, 19 nt, Homo sapiens
  misc_RNA (1)...(19): siRNA sense strand
ggacagcaaugguuguauc

SEQ ID NO: 520675 - RNA, 19 nt, Homo sapiens
  misc_RNA (1)...(19): siRNA sense strand
ugaaggugcuggacuuuga

SEQ ID NO: 520676 - RNA, 19 nt, Homo sapiens
  misc_RNA (1)...(19): siRNA sense strand
gugaugagaugaaugugaa

SEQ ID NO: 520677 - RNA, 19 nt, Homo sapiens
  misc_RNA (1)...(19): siRNA sense strand
cgucaugggugcugaaauc

SEQ ID NO: 520678 - RNA, 19 nt, Homo sapiens
  misc_RNA (1)...(19): siRNA sense strand
caagagugaugagaugaau

SEQ ID NO: 520679 - RNA, 19 nt, Homo sapiens
  misc_RNA (1)...(19): siRNA sense strand
ggacuucggguguuugaca

SEQ ID NO: 520680 - RNA, 19 nt, Homo sapiens
  misc_RNA (1)...(19): siRNA sense strand
gaacaggugauggcaagau

SEQ ID NO: 520681 - RNA, 19 nt, Homo sapiens
  misc_RNA (1)...(19): siRNA sense strand
gaggacagcaaugguugua

SEQ ID NO: 520682 - RNA, 19 nt, Homo sapiens
  misc_RNA (1)...(19): siRNA sense strand
gcuggacuuugagcacuuu

SEQ ID NO: 520683 - RNA, 19 nt, Homo sapiens
  misc_RNA (1)...(19): siRNA sense strand
ccaagagugaugagaugaa

SEQ ID NO: 520684 - RNA, 19 nt, Homo sapiens
  misc_RNA (1)...(19): siRNA sense strand
agacaguggccaagaacaa

SEQ ID NO: 520685 - RNA, 19 nt, Homo sapiens
  misc_RNA (1)...(19): siRNA sense strand
caugaggacagcaaugguu

SEQ ID NO: 520686 - RNA, 19 nt, Homo sapiens
  misc_RNA (1)...(19): siRNA sense strand
ggacuuugagcacuuucug

SEQ ID NO: 520687 - RNA, 19 nt, Homo sapiens
  misc_RNA (1)...(19): siRNA sense strand
agagugaugagaugaaugu

SEQ ID NO: 520688 - RNA, 19 nt, Homo sapiens
  misc_RNA (1)...(19): siRNA sense strand
gacuucggguguuugacaa

SEQ ID NO: 520689 - RNA, 19 nt, Homo sapiens
  misc_RNA (1)...(19): siRNA sense strand
ugcagacaguggccaagaa

SEQ ID NO: 520690 - RNA, 19 nt, Homo sapiens
  misc_RNA (1)...(19): siRNA sense strand
ccagggcaccuaugaggau

SEQ ID NO: 520691 - RNA, 19 nt, Homo sapiens
  misc_RNA (1)...(19): siRNA sense strand
gacagcaaugguuguauca

SEQ ID NO: 520692 - RNA, 19 nt, Homo sapiens
  misc_RNA (1)...(19): siRNA sense strand
gcagacaguggccaagaac

SEQ ID NO: 520693 - RNA, 19 nt, Homo sapiens
  misc_RNA (1)...(19): siRNA sense strand
acaaggaccagggcaccua

SEQ ID NO: 520694 - RNA, 19 nt, Homo sapiens
  misc_RNA (1)...(19): siRNA sense strand
caaggaccagggcaccuau

SEQ ID NO: 520695 - RNA, 19 nt, Homo sapiens
  misc_RNA (1)...(19): siRNA sense strand
ggacagcaaugguuguauc

SEQ ID NO: 520696 - RNA, 19 nt, Homo sapiens
  misc_RNA (1)...(19): siRNA sense strand
ugaaggugcuggacuuuga

SEQ ID NO: 520697 - RNA, 19 nt, Homo sapiens
  misc_RNA (1)...(19): siRNA sense strand
gugaugagaugaaugugaa

SEQ ID NO: 520698 - RNA, 19 nt, Homo sapiens
  misc_RNA (1)...(19): siRNA sense strand
cgucaugggugcugaaauc

SEQ ID NO: 520699 - RNA, 19 nt, Homo sapiens
  misc_RNA (1)...(19): siRNA sense strand
caagagugaugagaugaau

SEQ ID NO: 520700 - RNA, 19 nt, Homo sapiens
  misc_RNA (1)...(19): siRNA sense strand
ggacuucggguguuugaca

SEQ ID NO: 520701 - RNA, 19 nt, Homo sapiens
  misc_RNA (1)...(19): siRNA sense strand
gaggacagcaaugguugua

SEQ ID NO: 520702 - RNA, 19 nt, Homo sapiens
  misc_RNA (1)...(19): siRNA sense strand
gcuggacuuugagcacuuu

SEQ ID NO: 520703 - RNA, 19 nt, Homo sapiens
  misc_RNA (1)...(19): siRNA sense strand
ccaagagugaugagaugaa

SEQ ID NO: 520704 - RNA, 19 nt, Homo sapiens
  misc_RNA (1)...(19): siRNA sense strand
agacaguggccaagaacaa

SEQ ID NO: 520705 - RNA, 19 nt, Homo sapiens
  misc_RNA (1)...(19): siRNA sense strand
caugaggacagcaaugguu

SEQ ID NO: 520706 - RNA, 19 nt, Homo sapiens
  misc_RNA (1)...(19): siRNA sense strand
ggacuuugagcacuuucug

SEQ ID NO: 520707 - RNA, 19 nt, Homo sapiens
  misc_RNA (1)...(19): siRNA sense strand
agagugaugagaugaaugu

SEQ ID NO: 520708 - RNA, 19 nt, Homo sapiens
  misc_RNA (1)...(19): siRNA sense strand
gacuucggguguuugacaa

SEQ ID NO: 520709 - RNA, 19 nt, Homo sapiens
  misc_RNA (1)...(19): siRNA sense strand
ugcagacaguggccaagaa

SEQ ID NO: 520710 - RNA, 19 nt, Homo sapiens
  misc_RNA (1)...(19): siRNA sense strand
ccagggcaccuaugaggau

SEQ ID NO: 520711 - RNA, 19 nt, Homo sapiens
  misc_RNA (1)...(19): siRNA sense strand
gacagcaaugguuguauca

SEQ ID NO: 520712 - RNA, 19 nt, Homo sapiens
  misc_RNA (1)...(19): siRNA sense strand
gcagacaguggccaagaac

SEQ ID NO: 520713 - RNA, 19 nt, Homo sapiens
  misc_RNA (1)...(19): siRNA sense strand
acaaggaccagggcaccua

SEQ ID NO: 520714 - RNA, 19 nt, Homo sapiens
  misc_RNA (1)...(19): siRNA sense strand
caaggaccagggcaccuau

SEQ ID NO: 520715 - RNA, 19 nt, Homo sapiens
  misc_RNA (1)...(19): siRNA sense strand
ggacagcaaugguuguauc

SEQ ID NO: 520716 - RNA, 19 nt, Homo sapiens
  misc_RNA (1)...(19): siRNA sense strand
ugaaggugcuggacuuuga

SEQ ID NO: 520717 - RNA, 19 nt, Homo sapiens
  misc_RNA (1)...(19): siRNA sense strand
gugaugagaugaaugugaa

SEQ ID NO: 520718 - RNA, 19 nt, Homo sapiens
  misc_RNA (1)...(19): siRNA sense strand
cgucaugggugcugaaauc

SEQ ID NO: 520719 - RNA, 19 nt, Homo sapiens
  misc_RNA (1)...(19): siRNA sense strand
caagagugaugagaugaau

SEQ ID NO: 520720 - RNA, 19 nt, Homo sapiens
  misc_RNA (1)...(19): siRNA sense strand
ggacuucggguguuugaca

SEQ ID NO: 520721 - RNA, 19 nt, Homo sapiens
  misc_RNA (1)...(19): siRNA sense strand
gaggacagcaaugguugua

SEQ ID NO: 520722 - RNA, 19 nt, Homo sapiens
  misc_RNA (1)...(19): siRNA sense strand
gcuggacuuugagcacuuu

SEQ ID NO: 520723 - RNA, 19 nt, Homo sapiens
  misc_RNA (1)...(19): siRNA sense strand
ccaagagugaugagaugaa

SEQ ID NO: 520724 - RNA, 19 nt, Homo sapiens
  misc_RNA (1)...(19): siRNA sense strand
agacaguggccaagaacaa

SEQ ID NO: 520725 - RNA, 19 nt, Homo sapiens
  misc_RNA (1)...(19): siRNA sense strand
caugaggacagcaaugguu

SEQ ID NO: 520726 - RNA, 19 nt, Homo sapiens
  misc_RNA (1)...(19): siRNA sense strand
ggacuuugagcacuuucug

SEQ ID NO: 520727 - RNA, 19 nt, Homo sapiens
  misc_RNA (1)...(19): siRNA sense strand
agagugaugagaugaaugu

SEQ ID NO: 520728 - RNA, 19 nt, Homo sapiens
  misc_RNA (1)...(19): siRNA sense strand
gacuucggguguuugacaa

SEQ ID NO: 520729 - RNA, 19 nt, Homo sapiens
  misc_RNA (1)...(19): siRNA sense strand
ugcagacaguggccaagaa

SEQ ID NO: 520730 - RNA, 19 nt, Homo sapiens
  misc_RNA (1)...(19): siRNA sense strand
ccagggcaccuaugaggau

SEQ ID NO: 520731 - RNA, 19 nt, Homo sapiens
  misc_RNA (1)...(19): siRNA sense strand
gacagcaaugguuguauca

SEQ ID NO: 520732 - RNA, 19 nt, Homo sapiens
  misc_RNA (1)...(19): siRNA sense strand
gcagacaguggccaagaac

SEQ ID NO: 520733 - RNA, 19 nt, Homo sapiens
  misc_RNA (1)...(19): siRNA sense strand
acaaggaccagggcaccua

SEQ ID NO: 520734 - RNA, 19 nt, Homo sapiens
  misc_RNA (1)...(19): siRNA sense strand
caaggaccagggcaccuau

SEQ ID NO: 520735 - RNA, 19 nt, Homo sapiens
  misc_RNA (1)...(19): siRNA sense strand
ggacagcaaugguuguauc

SEQ ID NO: 520736 - RNA, 19 nt, Homo sapiens
  misc_RNA (1)...(19): siRNA sense strand
ugaaggugcuggacuuuga

SEQ ID NO: 520737 - RNA, 19 nt, Homo sapiens
  misc_RNA (1)...(19): siRNA sense strand
gugaugagaugaaugugaa

SEQ ID NO: 520738 - RNA, 19 nt, Homo sapiens
  misc_RNA (1)...(19): siRNA sense strand
cgucaugggugcugaaauc

SEQ ID NO: 520739 - RNA, 19 nt, Homo sapiens
  misc_RNA (1)...(19): siRNA sense strand
caagagugaugagaugaau

SEQ ID NO: 520740 - RNA, 19 nt, Homo sapiens
  misc_RNA (1)...(19): siRNA sense strand
ggacuucggguguuugaca

SEQ ID NO: 520741 - RNA, 19 nt, Homo sapiens
  misc_RNA (1)...(19): siRNA sense strand
gaacaggugauggcaagau

SEQ ID NO: 520742 - RNA, 19 nt, Homo sapiens
  misc_RNA (1)...(19): siRNA sense strand
gaggacagcaaugguugua

SEQ ID NO: 520743 - RNA, 19 nt, Homo sapiens
  misc_RNA (1)...(19): siRNA sense strand
gcuggacuuugagcacuuu

SEQ ID NO: 520744 - RNA, 19 nt, Homo sapiens
  misc_RNA (1)...(19): siRNA sense strand
ccaagagugaugagaugaa

SEQ ID NO: 520745 - RNA, 19 nt, Homo sapiens
  misc_RNA (1)...(19): siRNA sense strand
agacaguggccaagaacaa

SEQ ID NO: 520746 - RNA, 19 nt, Homo sapiens
  misc_RNA (1)...(19): siRNA sense strand
caugaggacagcaaugguu

SEQ ID NO: 520747 - RNA, 19 nt, Homo sapiens
  misc_RNA (1)...(19): siRNA sense strand
ggacuuugagcacuuucug

SEQ ID NO: 520748 - RNA, 19 nt, Homo sapiens
  misc_RNA (1)...(19): siRNA sense strand
agagugaugagaugaaugu

SEQ ID NO: 520749 - RNA, 19 nt, Homo sapiens
  misc_RNA (1)...(19): siRNA sense strand
gacuucggguguuugacaa

SEQ ID NO: 520750 - RNA, 19 nt, Homo sapiens
  misc_RNA (1)...(19): siRNA sense strand
ugcagacaguggccaagaa

SEQ ID NO: 520751 - RNA, 19 nt, Homo sapiens
  misc_RNA (1)...(19): siRNA sense strand
ccagggcaccuaugaggau

SEQ ID NO: 520752 - RNA, 19 nt, Homo sapiens
  misc_RNA (1)...(19): siRNA sense strand
gacagcaaugguuguauca

SEQ ID NO: 520753 - RNA, 19 nt, Homo sapiens
  misc_RNA (1)...(19): siRNA sense strand
gcagacaguggccaagaac

SEQ ID NO: 520754 - RNA, 19 nt, Homo sapiens
  misc_RNA (1)...(19): siRNA sense strand
acaaggaccagggcaccua

SEQ ID NO: 520755 - RNA, 19 nt, Homo sapiens
  misc_RNA (1)...(19): siRNA sense strand
caaggaccagggcaccuau

SEQ ID NO: 520756 - RNA, 19 nt, Homo sapiens
  misc_RNA (1)...(19): siRNA sense strand
ggacagcaaugguuguauc

SEQ ID NO: 520757 - RNA, 19 nt, Homo sapiens
  misc_RNA (1)...(19): siRNA sense strand
ugaaggugcuggacuuuga

SEQ ID NO: 520758 - RNA, 19 nt, Homo sapiens
  misc_RNA (1)...(19): siRNA sense strand
gugaugagaugaaugugaa

SEQ ID NO: 520759 - RNA, 19 nt, Homo sapiens
  misc_RNA (1)...(19): siRNA sense strand
cgucaugggugcugaaauc

SEQ ID NO: 520760 - RNA, 19 nt, Homo sapiens
  misc_RNA (1)...(19): siRNA sense strand
caagagugaugagaugaau

SEQ ID NO: 520761 - RNA, 19 nt, Homo sapiens
  misc_RNA (1)...(19): siRNA sense strand
ggacuucggguguuugaca

SEQ ID NO: 520762 - RNA, 19 nt, Homo sapiens
  misc_RNA (1)...(19): siRNA sense strand
gaacaggugauggcaagau

SEQ ID NO: 520763 - RNA, 19 nt, Homo sapiens
  misc_RNA (1)...(19): siRNA sense strand
gaggacagcaaugguugua

SEQ ID NO: 520764 - RNA, 19 nt, Homo sapiens
  misc_RNA (1)...(19): siRNA sense strand
gcuggacuuugagcacuuu

SEQ ID NO: 520765 - RNA, 19 nt, Homo sapiens
  misc_RNA (1)...(19): siRNA sense strand
ccaagagugaugagaugaa

SEQ ID NO: 520766 - RNA, 19 nt, Homo sapiens
  misc_RNA (1)...(19): siRNA sense strand
agacaguggccaagaacaa

SEQ ID NO: 520767 - RNA, 19 nt, Homo sapiens
  misc_RNA (1)...(19): siRNA sense strand
caugaggacagcaaugguu

SEQ ID NO: 520768 - RNA, 19 nt, Homo sapiens
  misc_RNA (1)...(19): siRNA sense strand
ggacuuugagcacuuucug

SEQ ID NO: 520769 - RNA, 19 nt, Homo sapiens
  misc_RNA (1)...(19): siRNA sense strand
agagugaugagaugaaugu

SEQ ID NO: 520770 - RNA, 19 nt, Homo sapiens
  misc_RNA (1)...(19): siRNA sense strand
gacuucggguguuugacaa

SEQ ID NO: 520771 - RNA, 19 nt, Homo sapiens
  misc_RNA (1)...(19): siRNA sense strand
ugcagacaguggccaagaa

SEQ ID NO: 520772 - RNA, 19 nt, Homo sapiens
  misc_RNA (1)...(19): siRNA sense strand
ccagggcaccuaugaggau

SEQ ID NO: 520773 - RNA, 19 nt, Homo sapiens
  misc_RNA (1)...(19): siRNA sense strand
gacagcaaugguuguauca

SEQ ID NO: 520774 - RNA, 19 nt, Homo sapiens
  misc_RNA (1)...(19): siRNA sense strand
gcagacaguggccaagaac

SEQ ID NO: 520775 - RNA, 19 nt, Homo sapiens
  misc_RNA (1)...(19): siRNA sense strand
acaaggaccagggcaccua

SEQ ID NO: 520776 - RNA, 19 nt, Homo sapiens
  misc_RNA (1)...(19): siRNA sense strand
caaggaccagggcaccuau

SEQ ID NO: 520777 - RNA, 19 nt, Homo sapiens
  misc_RNA (1)...(19): siRNA sense strand
ggacagcaaugguuguauc

SEQ ID NO: 520778 - RNA, 19 nt, Homo sapiens
  misc_RNA (1)...(19): siRNA sense strand
ugaaggugcuggacuuuga

SEQ ID NO: 520779 - RNA, 19 nt, Homo sapiens
  misc_RNA (1)...(19): siRNA sense strand
gugaugagaugaaugugaa

SEQ ID NO: 520780 - RNA, 19 nt, Homo sapiens
  misc_RNA (1)...(19): siRNA sense strand
cgucaugggugcugaaauc

SEQ ID NO: 520781 - RNA, 19 nt, Homo sapiens
  misc_RNA (1)...(19): siRNA sense strand
caagagugaugagaugaau

SEQ ID NO: 520782 - RNA, 19 nt, Homo sapiens
  misc_RNA (1)...(19): siRNA sense strand
ggacuucggguguuugaca

SEQ ID NO: 520783 - RNA, 19 nt, Homo sapiens
  misc_RNA (1)...(19): siRNA sense strand
gaggacagcaaugguugua

SEQ ID NO: 520784 - RNA, 19 nt, Homo sapiens
  misc_RNA (1)...(19): siRNA sense strand
gcuggacuuugagcacuuu

SEQ ID NO: 520785 - RNA, 19 nt, Homo sapiens
  misc_RNA (1)...(19): siRNA sense strand
ccaagagugaugagaugaa

SEQ ID NO: 520786 - RNA, 19 nt, Homo sapiens
  misc_RNA (1)...(19): siRNA sense strand
agacaguggccaagaacaa

SEQ ID NO: 520787 - RNA, 19 nt, Homo sapiens
  misc_RNA (1)...(19): siRNA sense strand
caugaggacagcaaugguu

SEQ ID NO: 520788 - RNA, 19 nt, Homo sapiens
  misc_RNA (1)...(19): siRNA sense strand
ggacuuugagcacuuucug

SEQ ID NO: 520789 - RNA, 19 nt, Homo sapiens
  misc_RNA (1)...(19): siRNA sense strand
agagugaugagaugaaugu

SEQ ID NO: 520790 - RNA, 19 nt, Homo sapiens
  misc_RNA (1)...(19): siRNA sense strand
gacuucggguguuugacaa

SEQ ID NO: 520791 - RNA, 19 nt, Homo sapiens
  misc_RNA (1)...(19): siRNA sense strand
ugcagacaguggccaagaa

SEQ ID NO: 520792 - RNA, 19 nt, Homo sapiens
  misc_RNA (1)...(19): siRNA sense strand
ccagggcaccuaugaggau

SEQ ID NO: 520793 - RNA, 19 nt, Homo sapiens
  misc_RNA (1)...(19): siRNA sense strand
gacagcaaugguuguauca

SEQ ID NO: 520794 - RNA, 19 nt, Homo sapiens
  misc_RNA (1)...(19): siRNA sense strand
gcagacaguggccaagaac

SEQ ID NO: 520795 - RNA, 19 nt, Homo sapiens
  misc_RNA (1)...(19): siRNA sense strand
acaaggaccagggcaccua

SEQ ID NO: 520796 - RNA, 19 nt, Homo sapiens
  misc_RNA (1)...(19): siRNA sense strand
caaggaccagggcaccuau

SEQ ID NO: 520797 - RNA, 19 nt, Homo sapiens
  misc_RNA (1)...(19): siRNA sense strand
ggacagcaaugguuguauc

SEQ ID NO: 520798 - RNA, 19 nt, Homo sapiens
  misc_RNA (1)...(19): siRNA sense strand
ugaaggugcuggacuuuga

SEQ ID NO: 520799 - RNA, 19 nt, Homo sapiens
  misc_RNA (1)...(19): siRNA sense strand
gugaugagaugaaugugaa

SEQ ID NO: 520800 - RNA, 19 nt, Homo sapiens
  misc_RNA (1)...(19): siRNA sense strand
cgucaugggugcugaaauc

SEQ ID NO: 520801 - RNA, 19 nt, Homo sapiens
  misc_RNA (1)...(19): siRNA sense strand
caagagugaugagaugaau

SEQ ID NO: 520802 - RNA, 19 nt, Homo sapiens
  misc_RNA (1)...(19): siRNA sense strand
ggacuucggguguuugaca

SEQ ID NO: 520803 - RNA, 19 nt, Homo sapiens
  misc_RNA (1)...(19): siRNA sense strand
gaggacagcaaugguugua

SEQ ID NO: 520804 - RNA, 19 nt, Homo sapiens
  misc_RNA (1)...(19): siRNA sense strand
gcuggacuuugagcacuuu

SEQ ID NO: 520805 - RNA, 19 nt, Homo sapiens
  misc_RNA (1)...(19): siRNA sense strand
ccaagagugaugagaugaa

SEQ ID NO: 520806 - RNA, 19 nt, Homo sapiens
  misc_RNA (1)...(19): siRNA sense strand
agacaguggccaagaacaa

SEQ ID NO: 520807 - RNA, 19 nt, Homo sapiens
  misc_RNA (1)...(19): siRNA sense strand
caugaggacagcaaugguu

SEQ ID NO: 520808 - RNA, 19 nt, Homo sapiens
  misc_RNA (1)...(19): siRNA sense strand
ggacuuugagcacuuucug

SEQ ID NO: 520809 - RNA, 19 nt, Homo sapiens
  misc_RNA (1)...(19): siRNA sense strand
agagugaugagaugaaugu

SEQ ID NO: 520810 - RNA, 19 nt, Homo sapiens
  misc_RNA (1)...(19): siRNA sense strand
gacuucggguguuugacaa

SEQ ID NO: 520811 - RNA, 19 nt, Homo sapiens
  misc_RNA (1)...(19): siRNA sense strand
ugcagacaguggccaagaa

SEQ ID NO: 520812 - RNA, 19 nt, Homo sapiens
  misc_RNA (1)...(19): siRNA sense strand
ccagggcaccuaugaggau

SEQ ID NO: 520813 - RNA, 19 nt, Homo sapiens
  misc_RNA (1)...(19): siRNA sense strand
gacagcaaugguuguauca

SEQ ID NO: 520814 - RNA, 19 nt, Homo sapiens
  misc_RNA (1)...(19): siRNA sense strand
gcagacaguggccaagaac

SEQ ID NO: 520815 - RNA, 19 nt, Homo sapiens
  misc_RNA (1)...(19): siRNA sense strand
acaaggaccagggcaccua

SEQ ID NO: 520816 - RNA, 19 nt, Homo sapiens
  misc_RNA (1)...(19): siRNA sense strand
caaggaccagggcaccuau

SEQ ID NO: 520817 - RNA, 19 nt, Homo sapiens
  misc_RNA (1)...(19): siRNA sense strand
ggacagcaaugguuguauc

SEQ ID NO: 520818 - RNA, 19 nt, Homo sapiens
  misc_RNA (1)...(19): siRNA sense strand
ugaaggugcuggacuuuga

SEQ ID NO: 520819 - RNA, 19 nt, Homo sapiens
  misc_RNA (1)...(19): siRNA sense strand
gugaugagaugaaugugaa

SEQ ID NO: 520820 - RNA, 19 nt, Homo sapiens
  misc_RNA (1)...(19): siRNA sense strand
cgucaugggugcugaaauc

SEQ ID NO: 520821 - RNA, 19 nt, Homo sapiens
  misc_RNA (1)...(19): siRNA sense strand
caagagugaugagaugaau

SEQ ID NO: 520822 - RNA, 19 nt, Homo sapiens
  misc_RNA (1)...(19): siRNA sense strand
ggacuucggguguuugaca

SEQ ID NO: 520823 - RNA, 19 nt, Homo sapiens
  misc_RNA (1)...(19): siRNA sense strand
gaacaggugauggcaagau

SEQ ID NO: 520824 - RNA, 19 nt, Homo sapiens
  misc_RNA (1)...(19): siRNA sense strand
gaggacagcaaugguugua

SEQ ID NO: 520825 - RNA, 19 nt, Homo sapiens
  misc_RNA (1)...(19): siRNA sense strand
gcuggacuuugagcacuuu

SEQ ID NO: 520826 - RNA, 19 nt, Homo sapiens
  misc_RNA (1)...(19): siRNA sense strand
ccaagagugaugagaugaa

SEQ ID NO: 520827 - RNA, 19 nt, Homo sapiens
  misc_RNA (1)...(19): siRNA sense strand
agacaguggccaagaacaa

SEQ ID NO: 520828 - RNA, 19 nt, Homo sapiens
  misc_RNA (1)...(19): siRNA sense strand
caugaggacagcaaugguu

SEQ ID NO: 520829 - RNA, 19 nt, Homo sapiens
  misc_RNA (1)...(19): siRNA sense strand
ggacuuugagcacuuucug

SEQ ID NO: 520830 - RNA, 19 nt, Homo sapiens
  misc_RNA (1)...(19): siRNA sense strand
agagugaugagaugaaugu

SEQ ID NO: 520831 - RNA, 19 nt, Homo sapiens
  misc_RNA (1)...(19): siRNA sense strand
gacuucggguguuugacaa

SEQ ID NO: 520832 - RNA, 19 nt, Homo sapiens
  misc_RNA (1)...(19): siRNA sense strand
ugcagacaguggccaagaa

SEQ ID NO: 520833 - RNA, 19 nt, Homo sapiens
  misc_RNA (1)...(19): siRNA sense strand
ccagggcaccuaugaggau

SEQ ID NO: 520834 - RNA, 19 nt, Homo sapiens
  misc_RNA (1)...(19): siRNA sense strand
gacagcaaugguuguauca

SEQ ID NO: 520835 - RNA, 19 nt, Homo sapiens
  misc_RNA (1)...(19): siRNA sense strand
gcagacaguggccaagaac

SEQ ID NO: 520836 - RNA, 19 nt, Homo sapiens
  misc_RNA (1)...(19): siRNA sense strand
acaaggaccagggcaccua

SEQ ID NO: 520837 - RNA, 19 nt, Homo sapiens
  misc_RNA (1)...(19): siRNA sense strand
caaggaccagggcaccuau

SEQ ID NO: 520838 - RNA, 19 nt, Homo sapiens
  misc_RNA (1)...(19): siRNA sense strand
ggucagaugccaagugaua

SEQ ID NO: 520839 - RNA, 19 nt, Homo sapiens
  misc_RNA (1)...(19): siRNA sense strand
gaagaugcggccaauaauu

SEQ ID NO: 520840 - RNA, 19 nt, Homo sapiens
  misc_RNA (1)...(19): siRNA sense strand
ccaaucagauggucaagug

SEQ ID NO: 520841 - RNA, 19 nt, Homo sapiens
  misc_RNA (1)...(19): siRNA sense strand
gaaggaagaugcggccaau

SEQ ID NO: 520842 - RNA, 19 nt, Homo sapiens
  misc_RNA (1)...(19): siRNA sense strand
aagaugcggccaauaauua

SEQ ID NO: 520843 - RNA, 19 nt, Homo sapiens
  misc_RNA (1)...(19): siRNA sense strand
gcaagaaguccaagcuaga

SEQ ID NO: 520844 - RNA, 19 nt, Homo sapiens
  misc_RNA (1)...(19): siRNA sense strand
acaaugaagccaucuauga

SEQ ID NO: 520845 - RNA, 19 nt, Homo sapiens
  misc_RNA (1)...(19): siRNA sense strand
ucaacacguucuucaguga

SEQ ID NO: 520846 - RNA, 19 nt, Homo sapiens
  misc_RNA (1)...(19): siRNA sense strand
ggauuuaaggugggcauua

SEQ ID NO: 520847 - RNA, 19 nt, Homo sapiens
  misc_RNA (1)...(19): siRNA sense strand
ggaagaugcggccaauaau

SEQ ID NO: 520848 - RNA, 19 nt, Homo sapiens
  misc_RNA (1)...(19): siRNA sense strand
aggaagaugcggccaauaa

SEQ ID NO: 520849 - RNA, 19 nt, Homo sapiens
  misc_RNA (1)...(19): siRNA sense strand
ugacggaauuccagaccaa

SEQ ID NO: 520850 - RNA, 19 nt, Homo sapiens
  misc_RNA (1)...(19): siRNA sense strand
ucgcaucucugcucaugga

SEQ ID NO: 520851 - RNA, 19 nt, Homo sapiens
  misc_RNA (1)...(19): siRNA sense strand
ggaacuguacugccuggaa

SEQ ID NO: 520852 - RNA, 19 nt, Homo sapiens
  misc_RNA (1)...(19): siRNA sense strand
gaugaagugcgcacaggaa

SEQ ID NO: 520853 - RNA, 19 nt, Homo sapiens
  misc_RNA (1)...(19): siRNA sense strand
cgacaaugaagccaucuau

SEQ ID NO: 520854 - RNA, 19 nt, Homo sapiens
  misc_RNA (1)...(19): siRNA sense strand
gaaccuauaggcagcucuu

SEQ ID NO: 520855 - RNA, 19 nt, Homo sapiens
  misc_RNA (1)...(19): siRNA sense strand
cugcagggcuuccucaucu

SEQ ID NO: 520856 - RNA, 19 nt, Homo sapiens
  misc_RNA (1)...(19): siRNA sense strand
guucgcaucucugcucaug

SEQ ID NO: 520857 - RNA, 19 nt, Homo sapiens
  misc_RNA (1)...(19): siRNA sense strand
gcucuggguucgcaucucu

SEQ ID NO: 520858 - RNA, 19 nt, Homo sapiens
  misc_RNA (1)...(19): siRNA sense strand
ucagaugccaagugauaaa

SEQ ID NO: 520859 - RNA, 19 nt, Homo sapiens
  misc_RNA (1)...(19): siRNA sense strand
cagaucguguccuccauca

SEQ ID NO: 520860 - RNA, 19 nt, Homo sapiens
  misc_RNA (1)...(19): siRNA sense strand
gaagaggugggcguggauu

SEQ ID NO: 520861 - RNA, 19 nt, Homo sapiens
  misc_RNA (1)...(19): siRNA sense strand
ccacguacaccaaccucaa

SEQ ID NO: 520862 - RNA, 19 nt, Homo sapiens
  misc_RNA (1)...(19): siRNA sense strand
gcagggcuuccucaucuuc

SEQ ID NO: 520863 - RNA, 19 nt, Homo sapiens
  misc_RNA (1)...(19): siRNA sense strand
aauguggacuugacggaau

SEQ ID NO: 520864 - RNA, 19 nt, Homo sapiens
  misc_RNA (1)...(19): siRNA sense strand
gcaggcaggaguccagauc

SEQ ID NO: 520865 - RNA, 19 nt, Homo sapiens
  misc_RNA (1)...(19): siRNA sense strand
gacaaugaagccaucuaug

SEQ ID NO: 520866 - RNA, 19 nt, Homo sapiens
  misc_RNA (1)...(19): siRNA sense strand
gcccagagcaguguuugug

SEQ ID NO: 520867 - RNA, 19 nt, Homo sapiens
  misc_RNA (1)...(19): siRNA sense strand
caaugaagccaucuaugac

SEQ ID NO: 520868 - RNA, 19 nt, Homo sapiens
  misc_RNA (1)...(19): siRNA sense strand
gcugaucaccgggaaggaa

SEQ ID NO: 520869 - RNA, 19 nt, Homo sapiens
  misc_RNA (1)...(19): siRNA sense strand
gcuucgagccagccaauca

SEQ ID NO: 520870 - RNA, 19 nt, Homo sapiens
  misc_RNA (1)...(19): siRNA sense strand
ucagcccgauggucagaug

SEQ ID NO: 520871 - RNA, 19 nt, Homo sapiens
  misc_RNA (1)...(19): siRNA sense strand
ggcgcaaccuggacaucga

SEQ ID NO: 520872 - RNA, 19 nt, Homo sapiens
  misc_RNA (1)...(19): siRNA sense strand
uuccucaucuuccacaguu

SEQ ID NO: 520873 - RNA, 19 nt, Homo sapiens
  misc_RNA (1)...(19): siRNA sense strand
auggucagaugccaaguga

SEQ ID NO: 520874 - RNA, 19 nt, Homo sapiens
  misc_RNA (1)...(19): siRNA sense strand
gugaguguaucucuaucca

SEQ ID NO: 520875 - RNA, 19 nt, Homo sapiens
  misc_RNA (1)...(19): siRNA sense strand
cgagccagccaaucagaug

SEQ ID NO: 520876 - RNA, 19 nt, Homo sapiens
  misc_RNA (1)...(19): siRNA sense strand
acaucgagcgucccacgua

SEQ ID NO: 520877 - RNA, 19 nt, Homo sapiens
  misc_RNA (1)...(19): siRNA sense strand
gugcgcacaggaaccuaua

SEQ ID NO: 520878 - RNA, 19 nt, Homo sapiens
  misc_RNA (1)...(19): siRNA sense strand
uaaggugggcauuaacuac

SEQ ID NO: 520879 - RNA, 19 nt, Homo sapiens
  misc_RNA (1)...(19): siRNA sense strand
gauggucagaugccaagug

SEQ ID NO: 520880 - RNA, 19 nt, Homo sapiens
  misc_RNA (1)...(19): siRNA sense strand
cggcaagaaguccaagcua

SEQ ID NO: 520881 - RNA, 19 nt, Homo sapiens
  misc_RNA (1)...(19): siRNA sense strand
ggcccugaauguggacuug

SEQ ID NO: 520882 - RNA, 19 nt, Homo sapiens
  misc_RNA (1)...(19): siRNA sense strand
ggagaaggauuaugaagag

SEQ ID NO: 520883 - RNA, 19 nt, Homo sapiens
  misc_RNA (1)...(19): siRNA sense strand
ggucagaugccaagugaua

SEQ ID NO: 520884 - RNA, 19 nt, Homo sapiens
  misc_RNA (1)...(19): siRNA sense strand
gaagaugcggccaauaauu

SEQ ID NO: 520885 - RNA, 19 nt, Homo sapiens
  misc_RNA (1)...(19): siRNA sense strand
ccaaucagauggucaagug

SEQ ID NO: 520886 - RNA, 19 nt, Homo sapiens
  misc_RNA (1)...(19): siRNA sense strand
gaaggaagaugcggccaau

SEQ ID NO: 520887 - RNA, 19 nt, Homo sapiens
  misc_RNA (1)...(19): siRNA sense strand
aagaugcggccaauaauua

SEQ ID NO: 520888 - RNA, 19 nt, Homo sapiens
  misc_RNA (1)...(19): siRNA sense strand
gcaagaaguccaagcuaga

SEQ ID NO: 520889 - RNA, 19 nt, Homo sapiens
  misc_RNA (1)...(19): siRNA sense strand
acaaugaagccaucuauga

SEQ ID NO: 520890 - RNA, 19 nt, Homo sapiens
  misc_RNA (1)...(19): siRNA sense strand
ucaacacguucuucaguga

SEQ ID NO: 520891 - RNA, 19 nt, Homo sapiens
  misc_RNA (1)...(19): siRNA sense strand
ggauuuaaggugggcauua

SEQ ID NO: 520892 - RNA, 19 nt, Homo sapiens
  misc_RNA (1)...(19): siRNA sense strand
ggaagaugcggccaauaau

SEQ ID NO: 520893 - RNA, 19 nt, Homo sapiens
  misc_RNA (1)...(19): siRNA sense strand
uggcagcucuggagaagga

SEQ ID NO: 520894 - RNA, 19 nt, Homo sapiens
  misc_RNA (1)...(19): siRNA sense strand
aggaagaugcggccaauaa

SEQ ID NO: 520895 - RNA, 19 nt, Homo sapiens
  misc_RNA (1)...(19): siRNA sense strand
ugacggaauuccagaccaa

SEQ ID NO: 520896 - RNA, 19 nt, Homo sapiens
  misc_RNA (1)...(19): siRNA sense strand
ucgcaucucugcucaugga

SEQ ID NO: 520897 - RNA, 19 nt, Homo sapiens
  misc_RNA (1)...(19): siRNA sense strand
ggaacuguacugccuggaa

SEQ ID NO: 520898 - RNA, 19 nt, Homo sapiens
  misc_RNA (1)...(19): siRNA sense strand
gaugaagugcgcacaggaa

SEQ ID NO: 520899 - RNA, 19 nt, Homo sapiens
  misc_RNA (1)...(19): siRNA sense strand
cgacaaugaagccaucuau

SEQ ID NO: 520900 - RNA, 19 nt, Homo sapiens
  misc_RNA (1)...(19): siRNA sense strand
gaaccuauaggcagcucuu

SEQ ID NO: 520901 - RNA, 19 nt, Homo sapiens
  misc_RNA (1)...(19): siRNA sense strand
cugcagggcuuccucaucu

SEQ ID NO: 520902 - RNA, 19 nt, Homo sapiens
  misc_RNA (1)...(19): siRNA sense strand
guucgcaucucugcucaug

SEQ ID NO: 520903 - RNA, 19 nt, Homo sapiens
  misc_RNA (1)...(19): siRNA sense strand
gcucuggguucgcaucucu

SEQ ID NO: 520904 - RNA, 19 nt, Homo sapiens
  misc_RNA (1)...(19): siRNA sense strand
ucagaugccaagugauaaa

SEQ ID NO: 520905 - RNA, 19 nt, Homo sapiens
  misc_RNA (1)...(19): siRNA sense strand
cagaucguguccuccauca

SEQ ID NO: 520906 - RNA, 19 nt, Homo sapiens
  misc_RNA (1)...(19): siRNA sense strand
gaagaggugggcguggauu

SEQ ID NO: 520907 - RNA, 19 nt, Homo sapiens
  misc_RNA (1)...(19): siRNA sense strand
ccacguacaccaaccucaa

SEQ ID NO: 520908 - RNA, 19 nt, Homo sapiens
  misc_RNA (1)...(19): siRNA sense strand
gcagggcuuccucaucuuc

SEQ ID NO: 520909 - RNA, 19 nt, Homo sapiens
  misc_RNA (1)...(19): siRNA sense strand
uggagaaggauuaugaaga

SEQ ID NO: 520910 - RNA, 19 nt, Homo sapiens
  misc_RNA (1)...(19): siRNA sense strand
cagcucuggagaaggauua

SEQ ID NO: 520911 - RNA, 19 nt, Homo sapiens
  misc_RNA (1)...(19): siRNA sense strand
aauguggacuugacggaau

SEQ ID NO: 520912 - RNA, 19 nt, Homo sapiens
  misc_RNA (1)...(19): siRNA sense strand
gcaggcaggaguccagauc

SEQ ID NO: 520913 - RNA, 19 nt, Homo sapiens
  misc_RNA (1)...(19): siRNA sense strand
gacaaugaagccaucuaug

SEQ ID NO: 520914 - RNA, 19 nt, Homo sapiens
  misc_RNA (1)...(19): siRNA sense strand
gcccagagcaguguuugug

SEQ ID NO: 520915 - RNA, 19 nt, Homo sapiens
  misc_RNA (1)...(19): siRNA sense strand
caaugaagccaucuaugac

SEQ ID NO: 520916 - RNA, 19 nt, Homo sapiens
  misc_RNA (1)...(19): siRNA sense strand
gcugaucaccgggaaggaa

SEQ ID NO: 520917 - RNA, 19 nt, Homo sapiens
  misc_RNA (1)...(19): siRNA sense strand
gcuucgagccagccaauca

SEQ ID NO: 520918 - RNA, 19 nt, Homo sapiens
  misc_RNA (1)...(19): siRNA sense strand
ucagcccgauggucagaug

SEQ ID NO: 520919 - RNA, 19 nt, Homo sapiens
  misc_RNA (1)...(19): siRNA sense strand
ggcgcaaccuggacaucga

SEQ ID NO: 520920 - RNA, 19 nt, Homo sapiens
  misc_RNA (1)...(19): siRNA sense strand
uuccucaucuuccacaguu

SEQ ID NO: 520921 - RNA, 19 nt, Homo sapiens
  misc_RNA (1)...(19): siRNA sense strand
gugaguguaucucuaucca

SEQ ID NO: 520922 - RNA, 19 nt, Homo sapiens
  misc_RNA (1)...(19): siRNA sense strand
cgagccagccaaucagaug

SEQ ID NO: 520923 - RNA, 19 nt, Homo sapiens
  misc_RNA (1)...(19): siRNA sense strand
acaucgagcgucccacgua

SEQ ID NO: 520924 - RNA, 19 nt, Homo sapiens
  misc_RNA (1)...(19): siRNA sense strand
auggucagaugccaaguga

SEQ ID NO: 520925 - RNA, 19 nt, Homo sapiens
  misc_RNA (1)...(19): siRNA sense strand
gugcgcacaggaaccuaua

SEQ ID NO: 520926 - RNA, 19 nt, Homo sapiens
  misc_RNA (1)...(19): siRNA sense strand
uaaggugggcauuaacuac

SEQ ID NO: 520927 - RNA, 19 nt, Homo sapiens
  misc_RNA (1)...(19): siRNA sense strand
gauggucagaugccaagug

SEQ ID NO: 520928 - RNA, 19 nt, Homo sapiens
  misc_RNA (1)...(19): siRNA sense strand
cggcaagaaguccaagcua

SEQ ID NO: 520929 - RNA, 19 nt, Homo sapiens
  misc_RNA (1)...(19): siRNA sense strand
ggcccugaauguggacuug

SEQ ID NO: 520930 - RNA, 19 nt, Homo sapiens
  misc_RNA (1)...(19): siRNA sense strand
gaagaaagccacucagaug

SEQ ID NO: 520931 - RNA, 19 nt, Homo sapiens
  misc_RNA (1)...(19): siRNA sense strand
guaggugaguggaaauuca

SEQ ID NO: 520932 - RNA, 19 nt, Homo sapiens
  misc_RNA (1)...(19): siRNA sense strand
gagaagaaagccacucaga

SEQ ID NO: 520933 - RNA, 19 nt, Homo sapiens
  misc_RNA (1)...(19): siRNA sense strand
gcaagcgagucaacaccaa

SEQ ID NO: 520934 - RNA, 19 nt, Homo sapiens
  misc_RNA (1)...(19): siRNA sense strand
ucacguggcugggcuaugu

SEQ ID NO: 520935 - RNA, 19 nt, Homo sapiens
  misc_RNA (1)...(19): siRNA sense strand
cagaacgagugcaucauug

SEQ ID NO: 520936 - RNA, 19 nt, Homo sapiens
  misc_RNA (1)...(19): siRNA sense strand
gaagaaugggcaugccaaa

SEQ ID NO: 520937 - RNA, 19 nt, Homo sapiens
  misc_RNA (1)...(19): siRNA sense strand
cacugaaucuguccuggua

SEQ ID NO: 520938 - RNA, 19 nt, Homo sapiens
  misc_RNA (1)...(19): siRNA sense strand
ggaccucccucaagaccau

SEQ ID NO: 520939 - RNA, 19 nt, Homo sapiens
  misc_RNA (1)...(19): siRNA sense strand
ucacacacauccugaacau

SEQ ID NO: 520940 - RNA, 19 nt, Homo sapiens
  misc_RNA (1)...(19): siRNA sense strand
ggugguaggugaguggaaa

SEQ ID NO: 520941 - RNA, 19 nt, Homo sapiens
  misc_RNA (1)...(19): siRNA sense strand
ccugagggcuccacuaaag

SEQ ID NO: 520942 - RNA, 19 nt, Homo sapiens
  misc_RNA (1)...(19): siRNA sense strand
gcaacgugcuggugugcau

SEQ ID NO: 520943 - RNA, 19 nt, Homo sapiens
  misc_RNA (1)...(19): siRNA sense strand
ccagaacgagugcaucauu

SEQ ID NO: 520944 - RNA, 19 nt, Homo sapiens
  misc_RNA (1)...(19): siRNA sense strand
cuacaccaccuucaacauu

SEQ ID NO: 520945 - RNA, 19 nt, Homo sapiens
  misc_RNA (1)...(19): siRNA sense strand
agaaugggcaugccaaaga

SEQ ID NO: 520946 - RNA, 19 nt, Homo sapiens
  misc_RNA (1)...(19): siRNA sense strand
gaaugggcaugccaaagac

SEQ ID NO: 520947 - RNA, 19 nt, Homo sapiens
  misc_RNA (1)...(19): siRNA sense strand
uacaccaccuucaacauug

SEQ ID NO: 520948 - RNA, 19 nt, Homo sapiens
  misc_RNA (1)...(19): siRNA sense strand
gaccagaacgagugcauca

SEQ ID NO: 520949 - RNA, 19 nt, Homo sapiens
  misc_RNA (1)...(19): siRNA sense strand
acaucaagaucuacauugu

SEQ ID NO: 520950 - RNA, 19 nt, Homo sapiens
  misc_RNA (1)...(19): siRNA sense strand
gcacggcgagcauccugaa

SEQ ID NO: 520951 - RNA, 19 nt, Homo sapiens
  misc_RNA (1)...(19): siRNA sense strand
uggcugcccuucuucauca

SEQ ID NO: 520952 - RNA, 19 nt, Homo sapiens
  misc_RNA (1)...(19): siRNA sense strand
ccaucagcaucgacaggua

SEQ ID NO: 520953 - RNA, 19 nt, Homo sapiens
  misc_RNA (1)...(19): siRNA sense strand
acacacauccugaacauac

SEQ ID NO: 520954 - RNA, 19 nt, Homo sapiens
  misc_RNA (1)...(19): siRNA sense strand
caccugagggcuccacuaa

SEQ ID NO: 520955 - RNA, 19 nt, Homo sapiens
  misc_RNA (1)...(19): siRNA sense strand
ccacuccucuucggacuca

SEQ ID NO: 520956 - RNA, 19 nt, Homo sapiens
  misc_RNA (1)...(19): siRNA sense strand
aaucuguccugguaugaug

SEQ ID NO: 520957 - RNA, 19 nt, Homo sapiens
  misc_RNA (1)...(19): siRNA sense strand
ucaauaacgcagaccagaa

SEQ ID NO: 520958 - RNA, 19 nt, Homo sapiens
  misc_RNA (1)...(19): siRNA sense strand
gcgagcauccugaacuugu

SEQ ID NO: 520959 - RNA, 19 nt, Homo sapiens
  misc_RNA (1)...(19): siRNA sense strand
cggcgagcauccugaacuu

SEQ ID NO: 520960 - RNA, 19 nt, Homo sapiens
  misc_RNA (1)...(19): siRNA sense strand
cuacaucaagaucuacauu

SEQ ID NO: 520961 - RNA, 19 nt, Homo sapiens
  misc_RNA (1)...(19): siRNA sense strand
uacgugcccuucauuguca

SEQ ID NO: 520962 - RNA, 19 nt, Homo sapiens
  misc_RNA (1)...(19): siRNA sense strand
aaacgcagcagccgagcuu

SEQ ID NO: 520963 - RNA, 19 nt, Homo sapiens
  misc_RNA (1)...(19): siRNA sense strand
caauaacgcagaccagaac

SEQ ID NO: 520964 - RNA, 19 nt, Homo sapiens
  misc_RNA (1)...(19): siRNA sense strand
cugcuggucuacaucaaga

SEQ ID NO: 520965 - RNA, 19 nt, Homo sapiens
  misc_RNA (1)...(19): siRNA sense strand
cugaaucuguccugguaug

SEQ ID NO: 520966 - RNA, 19 nt, Homo sapiens
  misc_RNA (1)...(19): siRNA sense strand
acccggaccucccucaaga

SEQ ID NO: 520967 - RNA, 19 nt, Homo sapiens
  misc_RNA (1)...(19): siRNA sense strand
caagcgagucaacaccaaa

SEQ ID NO: 520968 - RNA, 19 nt, Homo sapiens
  misc_RNA (1)...(19): siRNA sense strand
ggacagaccccacuacaac

SEQ ID NO: 520969 - RNA, 19 nt, Homo sapiens
  misc_RNA (1)...(19): siRNA sense strand
ggaaauucagcaggauuca

SEQ ID NO: 520970 - RNA, 19 nt, Homo sapiens
  misc_RNA (1)...(19): siRNA sense strand
cagaugcucgccauuguuc

SEQ ID NO: 520971 - RNA, 19 nt, Homo sapiens
  misc_RNA (1)...(19): siRNA sense strand
agaagaaagccacucagau

SEQ ID NO: 520972 - RNA, 19 nt, Homo sapiens
  misc_RNA (1)...(19): siRNA sense strand
gcagaccaccaccaacuac

SEQ ID NO: 520973 - RNA, 19 nt, Homo sapiens
  misc_RNA (1)...(19): siRNA sense strand
cgagcauccugaacuugug

SEQ ID NO: 520974 - RNA, 19 nt, Homo sapiens
  misc_RNA (1)...(19): siRNA sense strand
guccugguaugaugaugau

SEQ ID NO: 520975 - RNA, 19 nt, Homo sapiens
  misc_RNA (1)...(19): siRNA sense strand
ccgccaaaccagagaagaa

SEQ ID NO: 520976 - RNA, 19 nt, Homo sapiens
  misc_RNA (1)...(19): siRNA sense strand
ucacccugcuggucuacau

SEQ ID NO: 520977 - RNA, 19 nt, Homo sapiens
  misc_RNA (1)...(19): siRNA sense strand
gaagcucucccagcagaag

SEQ ID NO: 520978 - RNA, 19 nt, Homo sapiens
  misc_RNA (1)...(19): siRNA sense strand
ccaaaccagagaagaaugg

SEQ ID NO: 520979 - RNA, 19 nt, Homo sapiens
  misc_RNA (1)...(19): siRNA sense strand
uggucuacaucaagaucua

SEQ ID NO: 520980 - RNA, 19 nt, Homo sapiens
  misc_RNA (1)...(19): siRNA sense strand
gaaucuguccugguaugau

SEQ ID NO: 520981 - RNA, 19 nt, Homo sapiens
  misc_RNA (1)...(19): siRNA sense strand
guucucggcguguucauca

SEQ ID NO: 520982 - RNA, 19 nt, Homo sapiens
  misc_RNA (1)...(19): siRNA sense strand
caaagaccaccccaagauu

SEQ ID NO: 520983 - RNA, 19 nt, Homo sapiens
  misc_RNA (1)...(19): siRNA sense strand
gagcauccugaacuugugu

SEQ ID NO: 520984 - RNA, 19 nt, Homo sapiens
  misc_RNA (1)...(19): siRNA sense strand
ucagaugcucgccauuguu

SEQ ID NO: 520985 - RNA, 19 nt, Homo sapiens
  misc_RNA (1)...(19): siRNA sense strand
ccaaagaccaccccaagau

SEQ ID NO: 520986 - RNA, 19 nt, Homo sapiens
  misc_RNA (1)...(19): siRNA sense strand
cuacgugcccuucauuguc

SEQ ID NO: 520987 - RNA, 19 nt, Homo sapiens
  misc_RNA (1)...(19): siRNA sense strand
gaagaaagccacucagaug

SEQ ID NO: 520988 - RNA, 19 nt, Homo sapiens
  misc_RNA (1)...(19): siRNA sense strand
guaggugaguggaaauuca

SEQ ID NO: 520989 - RNA, 19 nt, Homo sapiens
  misc_RNA (1)...(19): siRNA sense strand
gagaagaaagccacucaga

SEQ ID NO: 520990 - RNA, 19 nt, Homo sapiens
  misc_RNA (1)...(19): siRNA sense strand
gcaagcgagucaacaccaa

SEQ ID NO: 520991 - RNA, 19 nt, Homo sapiens
  misc_RNA (1)...(19): siRNA sense strand
ucacguggcugggcuaugu

SEQ ID NO: 520992 - RNA, 19 nt, Homo sapiens
  misc_RNA (1)...(19): siRNA sense strand
cagaacgagugcaucauug

SEQ ID NO: 520993 - RNA, 19 nt, Homo sapiens
  misc_RNA (1)...(19): siRNA sense strand
gaagaaugggcaugccaaa

SEQ ID NO: 520994 - RNA, 19 nt, Homo sapiens
  misc_RNA (1)...(19): siRNA sense strand
cacugaaucuguccuggua

SEQ ID NO: 520995 - RNA, 19 nt, Homo sapiens
  misc_RNA (1)...(19): siRNA sense strand
ggaccucccucaagaccau

SEQ ID NO: 520996 - RNA, 19 nt, Homo sapiens
  misc_RNA (1)...(19): siRNA sense strand
ucacacacauccugaacau

SEQ ID NO: 520997 - RNA, 19 nt, Homo sapiens
  misc_RNA (1)...(19): siRNA sense strand
ggugguaggugaguggaaa

SEQ ID NO: 520998 - RNA, 19 nt, Homo sapiens
  misc_RNA (1)...(19): siRNA sense strand
ccugagggcuccacuaaag

SEQ ID NO: 520999 - RNA, 19 nt, Homo sapiens
  misc_RNA (1)...(19): siRNA sense strand
gcaacgugcuggugugcau

SEQ ID NO: 521000 - RNA, 19 nt, Homo sapiens
  misc_RNA (1)...(19): siRNA sense strand
ccagaacgagugcaucauu

SEQ ID NO: 521001 - RNA, 19 nt, Homo sapiens
  misc_RNA (1)...(19): siRNA sense strand
cuacaccaccuucaacauu

SEQ ID NO: 521002 - RNA, 19 nt, Homo sapiens
  misc_RNA (1)...(19): siRNA sense strand
agaaugggcaugccaaaga

SEQ ID NO: 521003 - RNA, 19 nt, Homo sapiens
  misc_RNA (1)...(19): siRNA sense strand
gaaugggcaugccaaagac

SEQ ID NO: 521004 - RNA, 19 nt, Homo sapiens
  misc_RNA (1)...(19): siRNA sense strand
uacaccaccuucaacauug

SEQ ID NO: 521005 - RNA, 19 nt, Homo sapiens
  misc_RNA (1)...(19): siRNA sense strand
gaccagaacgagugcauca

SEQ ID NO: 521006 - RNA, 19 nt, Homo sapiens
  misc_RNA (1)...(19): siRNA sense strand
acaucaagaucuacauugu

SEQ ID NO: 521007 - RNA, 19 nt, Homo sapiens
  misc_RNA (1)...(19): siRNA sense strand
gcacggcgagcauccugaa

SEQ ID NO: 521008 - RNA, 19 nt, Homo sapiens
  misc_RNA (1)...(19): siRNA sense strand
uggcugcccuucuucauca

SEQ ID NO: 521009 - RNA, 19 nt, Homo sapiens
  misc_RNA (1)...(19): siRNA sense strand
ccaucagcaucgacaggua

SEQ ID NO: 521010 - RNA, 19 nt, Homo sapiens
  misc_RNA (1)...(19): siRNA sense strand
acacacauccugaacauac

SEQ ID NO: 521011 - RNA, 19 nt, Homo sapiens
  misc_RNA (1)...(19): siRNA sense strand
caccugagggcuccacuaa

SEQ ID NO: 521012 - RNA, 19 nt, Homo sapiens
  misc_RNA (1)...(19): siRNA sense strand
ccacuccucuucggacuca

SEQ ID NO: 521013 - RNA, 19 nt, Homo sapiens
  misc_RNA (1)...(19): siRNA sense strand
aaucuguccugguaugaug

SEQ ID NO: 521014 - RNA, 19 nt, Homo sapiens
  misc_RNA (1)...(19): siRNA sense strand
ucaauaacgcagaccagaa

SEQ ID NO: 521015 - RNA, 19 nt, Homo sapiens
  misc_RNA (1)...(19): siRNA sense strand
gcgagcauccugaacuugu

SEQ ID NO: 521016 - RNA, 19 nt, Homo sapiens
  misc_RNA (1)...(19): siRNA sense strand
cggcgagcauccugaacuu

SEQ ID NO: 521017 - RNA, 19 nt, Homo sapiens
  misc_RNA (1)...(19): siRNA sense strand
cuacaucaagaucuacauu

SEQ ID NO: 521018 - RNA, 19 nt, Homo sapiens
  misc_RNA (1)...(19): siRNA sense strand
uacgugcccuucauuguca

SEQ ID NO: 521019 - RNA, 19 nt, Homo sapiens
  misc_RNA (1)...(19): siRNA sense strand
aaacgcagcagccgagcuu

SEQ ID NO: 521020 - RNA, 19 nt, Homo sapiens
  misc_RNA (1)...(19): siRNA sense strand
caauaacgcagaccagaac

SEQ ID NO: 521021 - RNA, 19 nt, Homo sapiens
  misc_RNA (1)...(19): siRNA sense strand
cugcuggucuacaucaaga

SEQ ID NO: 521022 - RNA, 19 nt, Homo sapiens
  misc_RNA (1)...(19): siRNA sense strand
cugaaucuguccugguaug

SEQ ID NO: 521023 - RNA, 19 nt, Homo sapiens
  misc_RNA (1)...(19): siRNA sense strand
acccggaccucccucaaga

SEQ ID NO: 521024 - RNA, 19 nt, Homo sapiens
  misc_RNA (1)...(19): siRNA sense strand
caagcgagucaacaccaaa

SEQ ID NO: 521025 - RNA, 19 nt, Homo sapiens
  misc_RNA (1)...(19): siRNA sense strand
ggacagaccccacuacaac

SEQ ID NO: 521026 - RNA, 19 nt, Homo sapiens
  misc_RNA (1)...(19): siRNA sense strand
ggaaauucagcaggauuca

SEQ ID NO: 521027 - RNA, 19 nt, Homo sapiens
  misc_RNA (1)...(19): siRNA sense strand
cagaugcucgccauuguuc

SEQ ID NO: 521028 - RNA, 19 nt, Homo sapiens
  misc_RNA (1)...(19): siRNA sense strand
agaagaaagccacucagau

SEQ ID NO: 521029 - RNA, 19 nt, Homo sapiens
  misc_RNA (1)...(19): siRNA sense strand
gcagaccaccaccaacuac

SEQ ID NO: 521030 - RNA, 19 nt, Homo sapiens
  misc_RNA (1)...(19): siRNA sense strand
cgagcauccugaacuugug

SEQ ID NO: 521031 - RNA, 19 nt, Homo sapiens
  misc_RNA (1)...(19): siRNA sense strand
guccugguaugaugaugau

SEQ ID NO: 521032 - RNA, 19 nt, Homo sapiens
  misc_RNA (1)...(19): siRNA sense strand
ccgccaaaccagagaagaa

SEQ ID NO: 521033 - RNA, 19 nt, Homo sapiens
  misc_RNA (1)...(19): siRNA sense strand
ucacccugcuggucuacau

SEQ ID NO: 521034 - RNA, 19 nt, Homo sapiens
  misc_RNA (1)...(19): siRNA sense strand
gaagcucucccagcagaag

SEQ ID NO: 521035 - RNA, 19 nt, Homo sapiens
  misc_RNA (1)...(19): siRNA sense strand
ccaaaccagagaagaaugg

SEQ ID NO: 521036 - RNA, 19 nt, Homo sapiens
  misc_RNA (1)...(19): siRNA sense strand
uggucuacaucaagaucua

SEQ ID NO: 521037 - RNA, 19 nt, Homo sapiens
  misc_RNA (1)...(19): siRNA sense strand
gaaucuguccugguaugau

SEQ ID NO: 521038 - RNA, 19 nt, Homo sapiens
  misc_RNA (1)...(19): siRNA sense strand
guucucggcguguucauca

SEQ ID NO: 521039 - RNA, 19 nt, Homo sapiens
  misc_RNA (1)...(19): siRNA sense strand
caaagaccaccccaagauu

SEQ ID NO: 521040 - RNA, 19 nt, Homo sapiens
  misc_RNA (1)...(19): siRNA sense strand
gagcauccugaacuugugu

SEQ ID NO: 521041 - RNA, 19 nt, Homo sapiens
  misc_RNA (1)...(19): siRNA sense strand
ucagaugcucgccauuguu

SEQ ID NO: 521042 - RNA, 19 nt, Homo sapiens
  misc_RNA (1)...(19): siRNA sense strand
ccaaagaccaccccaagau

SEQ ID NO: 521043 - RNA, 19 nt, Homo sapiens
  misc_RNA (1)...(19): siRNA sense strand
cuacgugcccuucauuguc

SEQ ID NO: 521044 - RNA, 19 nt, Homo sapiens
  misc_RNA (1)...(19): siRNA sense strand
ccgagaagcugaaggauua

SEQ ID NO: 521045 - RNA, 19 nt, Homo sapiens
  misc_RNA (1)...(19): siRNA sense strand
gcaagaagccagucaaaga

SEQ ID NO: 521046 - RNA, 19 nt, Homo sapiens
  misc_RNA (1)...(19): siRNA sense strand
gaaauucucagaggacuuu

SEQ ID NO: 521047 - RNA, 19 nt, Homo sapiens
  misc_RNA (1)...(19): siRNA sense strand
gaagcugaaggauuauuua

SEQ ID NO: 521048 - RNA, 19 nt, Homo sapiens
  misc_RNA (1)...(19): siRNA sense strand
gcugaaggauuauuuacga

SEQ ID NO: 521049 - RNA, 19 nt, Homo sapiens
  misc_RNA (1)...(19): siRNA sense strand
ccauugaucuggugacgaa

SEQ ID NO: 521050 - RNA, 19 nt, Homo sapiens
  misc_RNA (1)...(19): siRNA sense strand
gugaaaagcuggucaagaa

SEQ ID NO: 521051 - RNA, 19 nt, Homo sapiens
  misc_RNA (1)...(19): siRNA sense strand
ucaaagagaaccagaguga

SEQ ID NO: 521052 - RNA, 19 nt, Homo sapiens
  misc_RNA (1)...(19): siRNA sense strand
ccaaagccguggcaacaga

SEQ ID NO: 521053 - RNA, 19 nt, Homo sapiens
  misc_RNA (1)...(19): siRNA sense strand
gcacaagcccuccaucauc

SEQ ID NO: 521054 - RNA, 19 nt, Homo sapiens
  misc_RNA (1)...(19): siRNA sense strand
ggagaugacuuggauggau

SEQ ID NO: 521055 - RNA, 19 nt, Homo sapiens
  misc_RNA (1)...(19): siRNA sense strand
ggacaaagccaagaacuac

SEQ ID NO: 521056 - RNA, 19 nt, Homo sapiens
  misc_RNA (1)...(19): siRNA sense strand
caacagaggccaacaacuc

SEQ ID NO: 521057 - RNA, 19 nt, Homo sapiens
  misc_RNA (1)...(19): siRNA sense strand
caacaacuccaccuucuuc

SEQ ID NO: 521058 - RNA, 19 nt, Homo sapiens
  misc_RNA (1)...(19): siRNA sense strand
gcagugacagugacaguga

SEQ ID NO: 521059 - RNA, 19 nt, Homo sapiens
  misc_RNA (1)...(19): siRNA sense strand
caaauucccacacuuguuc

SEQ ID NO: 521060 - RNA, 19 nt, Homo sapiens
  misc_RNA (1)...(19): siRNA sense strand
cagacgaccuccugaaagu

SEQ ID NO: 521061 - RNA, 19 nt, Homo sapiens
  misc_RNA (1)...(19): siRNA sense strand
gaaaugaaaaugagaguga

SEQ ID NO: 521062 - RNA, 19 nt, Homo sapiens
  misc_RNA (1)...(19): siRNA sense strand
ccauggagaugacuuggau

SEQ ID NO: 521063 - RNA, 19 nt, Homo sapiens
  misc_RNA (1)...(19): siRNA sense strand
gcaagggcagugacaguga

SEQ ID NO: 521064 - RNA, 19 nt, Homo sapiens
  misc_RNA (1)...(19): siRNA sense strand
ccagcaugaugauugauga

SEQ ID NO: 521065 - RNA, 19 nt, Homo sapiens
  misc_RNA (1)...(19): siRNA sense strand
ccucaaagaagcugucauu

SEQ ID NO: 521066 - RNA, 19 nt, Homo sapiens
  misc_RNA (1)...(19): siRNA sense strand
caacgucaacccuccagaa

SEQ ID NO: 521067 - RNA, 19 nt, Homo sapiens
  misc_RNA (1)...(19): siRNA sense strand
gauggagaagcccaacaua

SEQ ID NO: 521068 - RNA, 19 nt, Homo sapiens
  misc_RNA (1)...(19): siRNA sense strand
aaaagaaacugcaagaaca

SEQ ID NO: 521069 - RNA, 19 nt, Homo sapiens
  misc_RNA (1)...(19): siRNA sense strand
ccuccacgcuaucaaguau

SEQ ID NO: 521070 - RNA, 19 nt, Homo sapiens
  misc_RNA (1)...(19): siRNA sense strand
ccaaucaaauucccacacu

SEQ ID NO: 521071 - RNA, 19 nt, Homo sapiens
  misc_RNA (1)...(19): siRNA sense strand
cacaagcccuccaucaucu

SEQ ID NO: 521072 - RNA, 19 nt, Homo sapiens
  misc_RNA (1)...(19): siRNA sense strand
gccaacaacuccaccuucu

SEQ ID NO: 521073 - RNA, 19 nt, Homo sapiens
  misc_RNA (1)...(19): siRNA sense strand
gagccaagugcgugcagua

SEQ ID NO: 521074 - RNA, 19 nt, Homo sapiens
  misc_RNA (1)...(19): siRNA sense strand
ucaaagaagcugucauuuu

SEQ ID NO: 521075 - RNA, 19 nt, Homo sapiens
  misc_RNA (1)...(19): siRNA sense strand
gacgaccuccugaaaguga

SEQ ID NO: 521076 - RNA, 19 nt, Homo sapiens
  misc_RNA (1)...(19): siRNA sense strand
caagaagccagucaaagag

SEQ ID NO: 521077 - RNA, 19 nt, Homo sapiens
  misc_RNA (1)...(19): siRNA sense strand
gcagacgaccuccugaaag

SEQ ID NO: 521078 - RNA, 19 nt, Homo sapiens
  misc_RNA (1)...(19): siRNA sense strand
gaaauccuaccuggccaaa

SEQ ID NO: 521079 - RNA, 19 nt, Homo sapiens
  misc_RNA (1)...(19): siRNA sense strand
agaagccagucaaagagaa

SEQ ID NO: 521080 - RNA, 19 nt, Homo sapiens
  misc_RNA (1)...(19): siRNA sense strand
caaucaaauucccacacuu

SEQ ID NO: 521081 - RNA, 19 nt, Homo sapiens
  misc_RNA (1)...(19): siRNA sense strand
aaucaaauucccacacuug

SEQ ID NO: 521082 - RNA, 19 nt, Homo sapiens
  misc_RNA (1)...(19): siRNA sense strand
ucccauggguguuggauuc

SEQ ID NO: 521083 - RNA, 19 nt, Homo sapiens
  misc_RNA (1)...(19): siRNA sense strand
cgucaacccuccagaaagc

SEQ ID NO: 521084 - RNA, 19 nt, Homo sapiens
  misc_RNA (1)...(19): siRNA sense strand
uccugaaagugaagaaauu

SEQ ID NO: 521085 - RNA, 19 nt, Homo sapiens
  misc_RNA (1)...(19): siRNA sense strand
caacuccaccuucuucucu

SEQ ID NO: 521086 - RNA, 19 nt, Homo sapiens
  misc_RNA (1)...(19): siRNA sense strand
gaugggugccgucgugaug

SEQ ID NO: 521087 - RNA, 19 nt, Homo sapiens
  misc_RNA (1)...(19): siRNA sense strand
cagaucugauguccaagug

SEQ ID NO: 521088 - RNA, 19 nt, Homo sapiens
  misc_RNA (1)...(19): siRNA sense strand
ucaaauucccacacuuguu

SEQ ID NO: 521089 - RNA, 19 nt, Homo sapiens
  misc_RNA (1)...(19): siRNA sense strand
ucuuagagccugugguuug

SEQ ID NO: 521090 - RNA, 19 nt, Homo sapiens
  misc_RNA (1)...(19): siRNA sense strand
ccacagaggaggacaaagc

SEQ ID NO: 521091 - RNA, 19 nt, Homo sapiens
  misc_RNA (1)...(19): siRNA sense strand
gccgagaagcugaaggauu

SEQ ID NO: 521092 - RNA, 19 nt, Homo sapiens
  misc_RNA (1)...(19): siRNA sense strand
cagaggacuuugggcaaga

SEQ ID NO: 521093 - RNA, 19 nt, Homo sapiens
  misc_RNA (1)...(19): siRNA sense strand
agaagcugaaggauuauuu

SEQ ID NO: 521094 - RNA, 19 nt, Homo sapiens
  misc_RNA (1)...(19): siRNA sense strand
gaucaaaacggaguucuug

SEQ ID NO: 521095 - RNA, 19 nt, Homo sapiens
  misc_RNA (1)...(19): siRNA sense strand
gagaagcugaaggauuauu

SEQ ID NO: 521096 - RNA, 19 nt, Homo sapiens
  misc_RNA (1)...(19): siRNA sense strand
ggacuuugggcaagagagu

SEQ ID NO: 521097 - RNA, 19 nt, Homo sapiens
  misc_RNA (1)...(19): siRNA sense strand
cagcacaagcccuccauca

SEQ ID NO: 521098 - RNA, 19 nt, Homo sapiens
  misc_RNA (1)...(19): siRNA sense strand
uccacgcuaucaaguauga

SEQ ID NO: 521099 - RNA, 19 nt, Homo sapiens
  misc_RNA (1)...(19): siRNA sense strand
ucaugcagcccgugaggaa

SEQ ID NO: 521100 - RNA, 19 nt, Homo sapiens
  misc_RNA (1)...(19): siRNA sense strand
gggccgagaagcugaagga

SEQ ID NO: 521101 - RNA, 19 nt, Homo sapiens
  misc_RNA (1)...(19): siRNA sense strand
cugaaggauuauuuacgaa

SEQ ID NO: 521102 - RNA, 19 nt, Homo sapiens
  misc_RNA (1)...(19): siRNA sense strand
gaugggacucugguucuug

SEQ ID NO: 521103 - RNA, 19 nt, Homo sapiens
  misc_RNA (1)...(19): siRNA sense strand
gcgcggacaucagcaucau

SEQ ID NO: 521104 - RNA, 19 nt, Homo sapiens
  misc_RNA (1)...(19): siRNA sense strand
agagaaacacggcaagaag

SEQ ID NO: 521105 - RNA, 19 nt, Homo sapiens
  misc_RNA (1)...(19): siRNA sense strand
gagccauggagaugacuug

SEQ ID NO: 521106 - RNA, 19 nt, Homo sapiens
  misc_RNA (1)...(19): siRNA sense strand
ccaagugcgugcaguaccu

SEQ ID NO: 521107 - RNA, 19 nt, Homo sapiens
  misc_RNA (1)...(19): siRNA sense strand
ggaguucuugguccagaug

SEQ ID NO: 521108 - RNA, 19 nt, Homo sapiens
  misc_RNA (1)...(19): siRNA sense strand
aauccuaccuggccaaagc

SEQ ID NO: 521109 - RNA, 19 nt, Homo sapiens
  misc_RNA (1)...(19): siRNA sense strand
cggcaagaagccagucaaa

SEQ ID NO: 521110 - RNA, 19 nt, Homo sapiens
  misc_RNA (1)...(19): siRNA sense strand
gaugaccuccugacuccau

SEQ ID NO: 521111 - RNA, 19 nt, Homo sapiens
  misc_RNA (1)...(19): siRNA sense strand
aaagagaaacacggcaaga

SEQ ID NO: 521112 - RNA, 19 nt, Homo sapiens
  misc_RNA (1)...(19): siRNA sense strand
guucuuggagccacaaaca

SEQ ID NO: 521113 - RNA, 19 nt, Homo sapiens
  misc_RNA (1)...(19): siRNA sense strand
cagugacagugacagugaa

SEQ ID NO: 521114 - RNA, 19 nt, Homo sapiens
  misc_RNA (1)...(19): siRNA sense strand
gggcaagggcagugacagu

SEQ ID NO: 521115 - RNA, 19 nt, Homo sapiens
  misc_RNA (1)...(19): siRNA sense strand
aagagaaacacggcaagaa

SEQ ID NO: 521116 - RNA, 19 nt, Homo sapiens
  misc_RNA (1)...(19): siRNA sense strand
gcacagggaaauccuaccu

SEQ ID NO: 521117 - RNA, 19 nt, Homo sapiens
  misc_RNA (1)...(19): siRNA sense strand
gcuggucaagaaccuguuu

SEQ ID NO: 521118 - RNA, 19 nt, Homo sapiens
  misc_RNA (1)...(19): siRNA sense strand
agcaugcgguggaguacuu

SEQ ID NO: 521119 - RNA, 19 nt, Homo sapiens
  misc_RNA (1)...(19): siRNA sense strand
acaaagccaagaacuacga

SEQ ID NO: 521120 - RNA, 19 nt, Homo sapiens
  misc_RNA (1)...(19): siRNA sense strand
ugaugggacucugguucuu

SEQ ID NO: 521121 - RNA, 19 nt, Homo sapiens
  misc_RNA (1)...(19): siRNA sense strand
ccaacaacuccaccuucuu

SEQ ID NO: 521122 - RNA, 19 nt, Homo sapiens
  misc_RNA (1)...(19): siRNA sense strand
gcaagcaacuucuguauuu

SEQ ID NO: 521123 - RNA, 19 nt, Homo sapiens
  misc_RNA (1)...(19): siRNA sense strand
gaaagaagguauccauguu

SEQ ID NO: 521124 - RNA, 19 nt, Homo sapiens
  misc_RNA (1)...(19): siRNA sense strand
gaaauacgaagaugcagua

SEQ ID NO: 521125 - RNA, 19 nt, Homo sapiens
  misc_RNA (1)...(19): siRNA sense strand
ggagaaguaucguccuaaa

SEQ ID NO: 521126 - RNA, 19 nt, Homo sapiens
  misc_RNA (1)...(19): siRNA sense strand
guauggaguuaccacaaua

SEQ ID NO: 521127 - RNA, 19 nt, Homo sapiens
  misc_RNA (1)...(19): siRNA sense strand
gauuguugaugacugguua

SEQ ID NO: 521128 - RNA, 19 nt, Homo sapiens
  misc_RNA (1)...(19): siRNA sense strand
ggaaugaaauacgaagaug

SEQ ID NO: 521129 - RNA, 19 nt, Homo sapiens
  misc_RNA (1)...(19): siRNA sense strand
gaagguauccauguucuug

SEQ ID NO: 521130 - RNA, 19 nt, Homo sapiens
  misc_RNA (1)...(19): siRNA sense strand
gaagucacauacaagaaca

SEQ ID NO: 521131 - RNA, 19 nt, Homo sapiens
  misc_RNA (1)...(19): siRNA sense strand
acacuacucuuguggagaa

SEQ ID NO: 521132 - RNA, 19 nt, Homo sapiens
  misc_RNA (1)...(19): siRNA sense strand
auacgaagaugcaguacaa

SEQ ID NO: 521133 - RNA, 19 nt, Homo sapiens
  misc_RNA (1)...(19): siRNA sense strand
gaagaugcaguacaauuca

SEQ ID NO: 521134 - RNA, 19 nt, Homo sapiens
  misc_RNA (1)...(19): siRNA sense strand
caaccaaugcgaccuuaaa

SEQ ID NO: 521135 - RNA, 19 nt, Homo sapiens
  misc_RNA (1)...(19): siRNA sense strand
cuuaagaaguauggaguua

SEQ ID NO: 521136 - RNA, 19 nt, Homo sapiens
  misc_RNA (1)...(19): siRNA sense strand
gcaguacaauucauaagac

SEQ ID NO: 521137 - RNA, 19 nt, Homo sapiens
  misc_RNA (1)...(19): siRNA sense strand
aauugaagguggaaugaaa

SEQ ID NO: 521138 - RNA, 19 nt, Homo sapiens
  misc_RNA (1)...(19): siRNA sense strand
ccaaugcgaccuuaaacaa

SEQ ID NO: 521139 - RNA, 19 nt, Homo sapiens
  misc_RNA (1)...(19): siRNA sense strand
gaagcaacuuaugacacua

SEQ ID NO: 521140 - RNA, 19 nt, Homo sapiens
  misc_RNA (1)...(19): siRNA sense strand
ggagaaagaagguauccau

SEQ ID NO: 521141 - RNA, 19 nt, Homo sapiens
  misc_RNA (1)...(19): siRNA sense strand
ugaagcaacuuaugacacu

SEQ ID NO: 521142 - RNA, 19 nt, Homo sapiens
  misc_RNA (1)...(19): siRNA sense strand
guaagaguaugugaagcaa

SEQ ID NO: 521143 - RNA, 19 nt, Homo sapiens
  misc_RNA (1)...(19): siRNA sense strand
guauccauguucuugauug

SEQ ID NO: 521144 - RNA, 19 nt, Homo sapiens
  misc_RNA (1)...(19): siRNA sense strand
caagcaacuucuguauuug

SEQ ID NO: 521145 - RNA, 19 nt, Homo sapiens
  misc_RNA (1)...(19): siRNA sense strand
cgaagaugcaguacaauuc

SEQ ID NO: 521146 - RNA, 19 nt, Homo sapiens
  misc_RNA (1)...(19): siRNA sense strand
cggcugcguuucaaagauu

SEQ ID NO: 521147 - RNA, 19 nt, Homo sapiens
  misc_RNA (1)...(19): siRNA sense strand
gaguaugugaagcaacuua

SEQ ID NO: 521148 - RNA, 19 nt, Homo sapiens
  misc_RNA (1)...(19): siRNA sense strand
cauacaagaacaugagauu

SEQ ID NO: 521149 - RNA, 19 nt, Homo sapiens
  misc_RNA (1)...(19): siRNA sense strand
cugguuaagucuugugaaa

SEQ ID NO: 521150 - RNA, 19 nt, Homo sapiens
  misc_RNA (1)...(19): siRNA sense strand
caaugcgaccuuaaacaaa

SEQ ID NO: 521151 - RNA, 19 nt, Homo sapiens
  misc_RNA (1)...(19): siRNA sense strand
gaaguaucguccuaaaaug

SEQ ID NO: 521152 - RNA, 19 nt, Homo sapiens
  misc_RNA (1)...(19): siRNA sense strand
aaugcgaccuuaaacaaau

SEQ ID NO: 521153 - RNA, 19 nt, Homo sapiens
  misc_RNA (1)...(19): siRNA sense strand
caacuuaugacacuacucu

SEQ ID NO: 521154 - RNA, 19 nt, Homo sapiens
  misc_RNA (1)...(19): siRNA sense strand
ggaagucacauacaagaac

SEQ ID NO: 521155 - RNA, 19 nt, Homo sapiens
  misc_RNA (1)...(19): siRNA sense strand
uacaagaacaugagauuuc

SEQ ID NO: 521156 - RNA, 19 nt, Homo sapiens
  misc_RNA (1)...(19): siRNA sense strand
agaaagaagguauccaugu

SEQ ID NO: 521157 - RNA, 19 nt, Homo sapiens
  misc_RNA (1)...(19): siRNA sense strand
gaugcaguacaauucauaa

SEQ ID NO: 521158 - RNA, 19 nt, Homo sapiens
  misc_RNA (1)...(19): siRNA sense strand
gcccuagcauuaauugaag

SEQ ID NO: 521159 - RNA, 19 nt, Homo sapiens
  misc_RNA (1)...(19): siRNA sense strand
uaugugaagcaacuuauga

SEQ ID NO: 521160 - RNA, 19 nt, Homo sapiens
  misc_RNA (1)...(19): siRNA sense strand
gguuaagucuugugaaaau

SEQ ID NO: 521161 - RNA, 19 nt, Homo sapiens
  misc_RNA (1)...(19): siRNA sense strand
guuguuguauugcuguuca

SEQ ID NO: 521162 - RNA, 19 nt, Homo sapiens
  misc_RNA (1)...(19): siRNA sense strand
cagcaagcaacuucuguau

SEQ ID NO: 521163 - RNA, 19 nt, Homo sapiens
  misc_RNA (1)...(19): siRNA sense strand
aagaguaugugaagcaacu

SEQ ID NO: 521164 - RNA, 19 nt, Homo sapiens
  misc_RNA (1)...(19): siRNA sense strand
uaagaaguauggaguuacc

SEQ ID NO: 521165 - RNA, 19 nt, Homo sapiens
  misc_RNA (1)...(19): siRNA sense strand
aaagaagguauccauguuc

SEQ ID NO: 521166 - RNA, 19 nt, Homo sapiens
  misc_RNA (1)...(19): siRNA sense strand
guggaagucacauacaaga

SEQ ID NO: 521167 - RNA, 19 nt, Homo sapiens
  misc_RNA (1)...(19): siRNA sense strand
gaagguggaaugaaauacg

SEQ ID NO: 521168 - RNA, 19 nt, Homo sapiens
  misc_RNA (1)...(19): siRNA sense strand
ucacauacaagaacaugag

SEQ ID NO: 521169 - RNA, 19 nt, Homo sapiens
  misc_RNA (1)...(19): siRNA sense strand
caacggucauagaaacaac

SEQ ID NO: 521170 - RNA, 19 nt, Homo sapiens
  misc_RNA (1)...(19): siRNA sense strand
gcggcugcguuucaaagau

SEQ ID NO: 521171 - RNA, 19 nt, Homo sapiens
  misc_RNA (1)...(19): siRNA sense strand
caguacaauucauaagaca

SEQ ID NO: 521172 - RNA, 19 nt, Homo sapiens
  misc_RNA (1)...(19): siRNA sense strand
cacaauaguaagaguaugu

SEQ ID NO: 521173 - RNA, 19 nt, Homo sapiens
  misc_RNA (1)...(19): siRNA sense strand
aguauggaguuaccacaau

SEQ ID NO: 521174 - RNA, 19 nt, Homo sapiens
  misc_RNA (1)...(19): siRNA sense strand
gauuccaacggucauagaa

SEQ ID NO: 521175 - RNA, 19 nt, Homo sapiens
  misc_RNA (1)...(19): siRNA sense strand
ccacaauaguaagaguaug

SEQ ID NO: 521176 - RNA, 19 nt, Homo sapiens
  misc_RNA (1)...(19): siRNA sense strand
uuggagaaguaucguccua

SEQ ID NO: 521177 - RNA, 19 nt, Homo sapiens
  misc_RNA (1)...(19): siRNA sense strand
uaacagcaagcaacuucug

SEQ ID NO: 521178 - RNA, 19 nt, Homo sapiens
  misc_RNA (1)...(19): siRNA sense strand
acgaagaugcaguacaauu

SEQ ID NO: 521179 - RNA, 19 nt, Homo sapiens
  misc_RNA (1)...(19): siRNA sense strand
acacacaauccaaccaaug

SEQ ID NO: 521180 - RNA, 19 nt, Homo sapiens
  misc_RNA (1)...(19): siRNA sense strand
aagguggaaugaaauacga

SEQ ID NO: 521181 - RNA, 19 nt, Homo sapiens
  misc_RNA (1)...(19): siRNA sense strand
uggaguuaccacaauagua

SEQ ID NO: 521182 - RNA, 19 nt, Homo sapiens
  misc_RNA (1)...(19): siRNA sense strand
gcccagcuccuguggaagu

SEQ ID NO: 521183 - RNA, 19 nt, Homo sapiens
  misc_RNA (1)...(19): siRNA sense strand
acuuguugcccuagcauua

SEQ ID NO: 521184 - RNA, 19 nt, Homo sapiens
  misc_RNA (1)...(19): siRNA sense strand
uccaaccaaugcgaccuua

SEQ ID NO: 521185 - RNA, 19 nt, Homo sapiens
  misc_RNA (1)...(19): siRNA sense strand
agaugcaguacaauucaua

SEQ ID NO: 521186 - RNA, 19 nt, Homo sapiens
  misc_RNA (1)...(19): siRNA sense strand
uugaagguggaaugaaaua

SEQ ID NO: 521187 - RNA, 19 nt, Homo sapiens
  misc_RNA (1)...(19): siRNA sense strand
caauaguaagaguauguga

SEQ ID NO: 521188 - RNA, 19 nt, Homo sapiens
  misc_RNA (1)...(19): siRNA sense strand
aaaugcggcugcguuucaa

SEQ ID NO: 521189 - RNA, 19 nt, Homo sapiens
  misc_RNA (1)...(19): siRNA sense strand
gagagcuccaguacuuguu

SEQ ID NO: 521190 - RNA, 19 nt, Homo sapiens
  misc_RNA (1)...(19): siRNA sense strand
aaagauuccaacggucaua

SEQ ID NO: 521191 - RNA, 19 nt, Homo sapiens
  misc_RNA (1)...(19): siRNA sense strand
uuaugacacuacucuugug

SEQ ID NO: 521192 - RNA, 19 nt, Homo sapiens
  misc_RNA (1)...(19): siRNA sense strand
guaugugaagcaacuuaug

SEQ ID NO: 521193 - RNA, 19 nt, Homo sapiens
  misc_RNA (1)...(19): siRNA sense strand
uuaauugaagguggaauga

SEQ ID NO: 521194 - RNA, 19 nt, Homo sapiens
  misc_RNA (1)...(19): siRNA sense strand
uaccacaauaguaagagua

SEQ ID NO: 521195 - RNA, 19 nt, Homo sapiens
  misc_RNA (1)...(19): siRNA sense strand
agacgaaccugcuuugaaa

SEQ ID NO: 521196 - RNA, 19 nt, Homo sapiens
  misc_RNA (1)...(19): siRNA sense strand
uaaagucauuccuguauuc

SEQ ID NO: 521197 - RNA, 19 nt, Homo sapiens
  misc_RNA (1)...(19): siRNA sense strand
ggauagcauugaagccaaa

SEQ ID NO: 521198 - RNA, 19 nt, Homo sapiens
  misc_RNA (1)...(19): siRNA sense strand
ggagaaucauguagugaca

SEQ ID NO: 521199 - RNA, 19 nt, Homo sapiens
  misc_RNA (1)...(19): siRNA sense strand
ucacagaauccgacuggua

SEQ ID NO: 521200 - RNA, 19 nt, Homo sapiens
  misc_RNA (1)...(19): siRNA sense strand
ggauccaucuauaaaguca

SEQ ID NO: 521201 - RNA, 19 nt, Homo sapiens
  misc_RNA (1)...(19): siRNA sense strand
gcagcgacauccagguuca

SEQ ID NO: 521202 - RNA, 19 nt, Homo sapiens
  misc_RNA (1)...(19): siRNA sense strand
caggauccaucuauaaagu

SEQ ID NO: 521203 - RNA, 19 nt, Homo sapiens
  misc_RNA (1)...(19): siRNA sense strand
agaaaucaauugccaggau

SEQ ID NO: 521204 - RNA, 19 nt, Homo sapiens
  misc_RNA (1)...(19): siRNA sense strand
gaagaggacuaccccaaug

SEQ ID NO: 521205 - RNA, 19 nt, Homo sapiens
  misc_RNA (1)...(19): siRNA sense strand
gaaacgccagcgacuagaa

SEQ ID NO: 521206 - RNA, 19 nt, Homo sapiens
  misc_RNA (1)...(19): siRNA sense strand
gccaggauccaucuauaaa

SEQ ID NO: 521207 - RNA, 19 nt, Homo sapiens
  misc_RNA (1)...(19): siRNA sense strand
gcgguuggauagcauugaa

SEQ ID NO: 521208 - RNA, 19 nt, Homo sapiens
  misc_RNA (1)...(19): siRNA sense strand
gaagacgaaccugcuuuga

SEQ ID NO: 521209 - RNA, 19 nt, Homo sapiens
  misc_RNA (1)...(19): siRNA sense strand
agaaucauguagugacaga

SEQ ID NO: 521210 - RNA, 19 nt, Homo sapiens
  misc_RNA (1)...(19): siRNA sense strand
ccuggaggcuacuuguaaa

SEQ ID NO: 521211 - RNA, 19 nt, Homo sapiens
  misc_RNA (1)...(19): siRNA sense strand
agugacagaugaagacgaa

SEQ ID NO: 521212 - RNA, 19 nt, Homo sapiens
  misc_RNA (1)...(19): siRNA sense strand
cgaccuggccgaugugguu

SEQ ID NO: 521213 - RNA, 19 nt, Homo sapiens
  misc_RNA (1)...(19): siRNA sense strand
cuauaaauuuggcaucaca

SEQ ID NO: 521214 - RNA, 19 nt, Homo sapiens
  misc_RNA (1)...(19): siRNA sense strand
cgcuaacgcugcuggacua

SEQ ID NO: 521215 - RNA, 19 nt, Homo sapiens
  misc_RNA (1)...(19): siRNA sense strand
uagcauugaagccaaauug

SEQ ID NO: 521216 - RNA, 19 nt, Homo sapiens
  misc_RNA (1)...(19): siRNA sense strand
uaaauuuggcaucacagaa

SEQ ID NO: 521217 - RNA, 19 nt, Homo sapiens
  misc_RNA (1)...(19): siRNA sense strand
ggaggcuacuuguaaaucc

SEQ ID NO: 521218 - RNA, 19 nt, Homo sapiens
  misc_RNA (1)...(19): siRNA sense strand
uugccaggauccaucuaua

SEQ ID NO: 521219 - RNA, 19 nt, Homo sapiens
  misc_RNA (1)...(19): siRNA sense strand
gggcagcgacauccagguu

SEQ ID NO: 521220 - RNA, 19 nt, Homo sapiens
  misc_RNA (1)...(19): siRNA sense strand
gcauugaagccaaauugca

SEQ ID NO: 521221 - RNA, 19 nt, Homo sapiens
  misc_RNA (1)...(19): siRNA sense strand
ugaagacgaaccugcuuug

SEQ ID NO: 521222 - RNA, 19 nt, Homo sapiens
  misc_RNA (1)...(19): siRNA sense strand
aaauuuggcaucacagaau

SEQ ID NO: 521223 - RNA, 19 nt, Homo sapiens
  misc_RNA (1)...(19): siRNA sense strand
gcaagcacgggaagaagca

SEQ ID NO: 521224 - RNA, 19 nt, Homo sapiens
  misc_RNA (1)...(19): siRNA sense strand
aaacgccagcgacuagaaa

SEQ ID NO: 521225 - RNA, 19 nt, Homo sapiens
  misc_RNA (1)...(19): siRNA sense strand
gggcaacccagacgugcaa

SEQ ID NO: 521226 - RNA, 19 nt, Homo sapiens
  misc_RNA (1)...(19): siRNA sense strand
cauugaagccaaauugcaa

SEQ ID NO: 521227 - RNA, 19 nt, Homo sapiens
  misc_RNA (1)...(19): siRNA sense strand
cuauaaagucauuccugua

SEQ ID NO: 521228 - RNA, 19 nt, Homo sapiens
  misc_RNA (1)...(19): siRNA sense strand
gaugaagacgaaccugcuu

SEQ ID NO: 521229 - RNA, 19 nt, Homo sapiens
  misc_RNA (1)...(19): siRNA sense strand
uggacccgcucaccaucua

SEQ ID NO: 521230 - RNA, 19 nt, Homo sapiens
  misc_RNA (1)...(19): siRNA sense strand
aagacgaaccugcuuugaa

SEQ ID NO: 521231 - RNA, 19 nt, Homo sapiens
  misc_RNA (1)...(19): siRNA sense strand
gccagcgacuagaaaucaa

SEQ ID NO: 521232 - RNA, 19 nt, Homo sapiens
  misc_RNA (1)...(19): siRNA sense strand
ccgagaagauggcgcuaac

SEQ ID NO: 521233 - RNA, 19 nt, Homo sapiens
  misc_RNA (1)...(19): siRNA sense strand
caacccagacgugcaacaa

SEQ ID NO: 521234 - RNA, 19 nt, Homo sapiens
  misc_RNA (1)...(19): siRNA sense strand
uaacgcugcuggacuaccu

SEQ ID NO: 521235 - RNA, 19 nt, Homo sapiens
  misc_RNA (1)...(19): siRNA sense strand
agacggacaggugcaagua

SEQ ID NO: 521236 - RNA, 19 nt, Homo sapiens
  misc_RNA (1)...(19): siRNA sense strand
cuucagagccgaugaugag

SEQ ID NO: 521237 - RNA, 19 nt, Homo sapiens
  misc_RNA (1)...(19): siRNA sense strand
gaaucaagcagagcaucga

SEQ ID NO: 521238 - RNA, 19 nt, Homo sapiens
  misc_RNA (1)...(19): siRNA sense strand
aacacgaccuggccgaugu

SEQ ID NO: 521239 - RNA, 19 nt, Homo sapiens
  misc_RNA (1)...(19): siRNA sense strand
ggcuacuuguaaauccuua

SEQ ID NO: 521240 - RNA, 19 nt, Homo sapiens
  misc_RNA (1)...(19): siRNA sense strand
ugccaggauccaucuauaa

SEQ ID NO: 521241 - RNA, 19 nt, Homo sapiens
  misc_RNA (1)...(19): siRNA sense strand
cgacauccagguucaguac

SEQ ID NO: 521242 - RNA, 19 nt, Homo sapiens
  misc_RNA (1)...(19): siRNA sense strand
cgacugguaccgaaucaag

SEQ ID NO: 521243 - RNA, 19 nt, Homo sapiens
  misc_RNA (1)...(19): siRNA sense strand
gaacucggaagaggacuac

SEQ ID NO: 521244 - RNA, 19 nt, Homo sapiens
  misc_RNA (1)...(19): siRNA sense strand
gcgacauccagguucagua

SEQ ID NO: 521245 - RNA, 19 nt, Homo sapiens
  misc_RNA (1)...(19): siRNA sense strand
cagcgacuagaaaucaauu

SEQ ID NO: 521246 - RNA, 19 nt, Homo sapiens
  misc_RNA (1)...(19): siRNA sense strand
cccuggaggcuacuuguaa

SEQ ID NO: 521247 - RNA, 19 nt, Homo sapiens
  misc_RNA (1)...(19): siRNA sense strand
agucauuccuguauuccau

SEQ ID NO: 521248 - RNA, 19 nt, Homo sapiens
  misc_RNA (1)...(19): siRNA sense strand
aaucauguagugacagaug

SEQ ID NO: 521249 - RNA, 19 nt, Homo sapiens
  misc_RNA (1)...(19): siRNA sense strand
gccgaugugguucagauug

SEQ ID NO: 521250 - RNA, 19 nt, Homo sapiens
  misc_RNA (1)...(19): siRNA sense strand
acccagacgugcaacaaag

SEQ ID NO: 521251 - RNA, 19 nt, Homo sapiens
  misc_RNA (1)...(19): siRNA sense strand
gcccuggaggcuacuugua

SEQ ID NO: 521252 - RNA, 19 nt, Homo sapiens
  misc_RNA (1)...(19): siRNA sense strand
agacgaaccugcuuugaaa

SEQ ID NO: 521253 - RNA, 19 nt, Homo sapiens
  misc_RNA (1)...(19): siRNA sense strand
uaaagucauuccuguauuc

SEQ ID NO: 521254 - RNA, 19 nt, Homo sapiens
  misc_RNA (1)...(19): siRNA sense strand
ggauagcauugaagccaaa

SEQ ID NO: 521255 - RNA, 19 nt, Homo sapiens
  misc_RNA (1)...(19): siRNA sense strand
ggagaaucauguagugaca

SEQ ID NO: 521256 - RNA, 19 nt, Homo sapiens
  misc_RNA (1)...(19): siRNA sense strand
ucacagaauccgacuggua

SEQ ID NO: 521257 - RNA, 19 nt, Homo sapiens
  misc_RNA (1)...(19): siRNA sense strand
ggauccaucuauaaaguca

SEQ ID NO: 521258 - RNA, 19 nt, Homo sapiens
  misc_RNA (1)...(19): siRNA sense strand
gcagcgacauccagguuca

SEQ ID NO: 521259 - RNA, 19 nt, Homo sapiens
  misc_RNA (1)...(19): siRNA sense strand
caggauccaucuauaaagu

SEQ ID NO: 521260 - RNA, 19 nt, Homo sapiens
  misc_RNA (1)...(19): siRNA sense strand
agaaaucaauugccaggau

SEQ ID NO: 521261 - RNA, 19 nt, Homo sapiens
  misc_RNA (1)...(19): siRNA sense strand
gaagaggacuaccccaaug

SEQ ID NO: 521262 - RNA, 19 nt, Homo sapiens
  misc_RNA (1)...(19): siRNA sense strand
gaaacgccagcgacuagaa

SEQ ID NO: 521263 - RNA, 19 nt, Homo sapiens
  misc_RNA (1)...(19): siRNA sense strand
gccaggauccaucuauaaa

SEQ ID NO: 521264 - RNA, 19 nt, Homo sapiens
  misc_RNA (1)...(19): siRNA sense strand
gcgguuggauagcauugaa

SEQ ID NO: 521265 - RNA, 19 nt, Homo sapiens
  misc_RNA (1)...(19): siRNA sense strand
gaagacgaaccugcuuuga

SEQ ID NO: 521266 - RNA, 19 nt, Homo sapiens
  misc_RNA (1)...(19): siRNA sense strand
agaaucauguagugacaga

SEQ ID NO: 521267 - RNA, 19 nt, Homo sapiens
  misc_RNA (1)...(19): siRNA sense strand
ccuggaggcuacuuguaaa

SEQ ID NO: 521268 - RNA, 19 nt, Homo sapiens
  misc_RNA (1)...(19): siRNA sense strand
agugacagaugaagacgaa

SEQ ID NO: 521269 - RNA, 19 nt, Homo sapiens
  misc_RNA (1)...(19): siRNA sense strand
cgaccuggccgaugugguu

SEQ ID NO: 521270 - RNA, 19 nt, Homo sapiens
  misc_RNA (1)...(19): siRNA sense strand
cuauaaauuuggcaucaca

SEQ ID NO: 521271 - RNA, 19 nt, Homo sapiens
  misc_RNA (1)...(19): siRNA sense strand
cgcuaacgcugcuggacua

SEQ ID NO: 521272 - RNA, 19 nt, Homo sapiens
  misc_RNA (1)...(19): siRNA sense strand
uagcauugaagccaaauug

SEQ ID NO: 521273 - RNA, 19 nt, Homo sapiens
  misc_RNA (1)...(19): siRNA sense strand
uaaauuuggcaucacagaa

SEQ ID NO: 521274 - RNA, 19 nt, Homo sapiens
  misc_RNA (1)...(19): siRNA sense strand
ggaggcuacuuguaaaucc

SEQ ID NO: 521275 - RNA, 19 nt, Homo sapiens
  misc_RNA (1)...(19): siRNA sense strand
uugccaggauccaucuaua

SEQ ID NO: 521276 - RNA, 19 nt, Homo sapiens
  misc_RNA (1)...(19): siRNA sense strand
gggcagcgacauccagguu

SEQ ID NO: 521277 - RNA, 19 nt, Homo sapiens
  misc_RNA (1)...(19): siRNA sense strand
gcauugaagccaaauugca

SEQ ID NO: 521278 - RNA, 19 nt, Homo sapiens
  misc_RNA (1)...(19): siRNA sense strand
ugaagacgaaccugcuuug

SEQ ID NO: 521279 - RNA, 19 nt, Homo sapiens
  misc_RNA (1)...(19): siRNA sense strand
aaauuuggcaucacagaau

SEQ ID NO: 521280 - RNA, 19 nt, Homo sapiens
  misc_RNA (1)...(19): siRNA sense strand
gcaagcacgggaagaagca

SEQ ID NO: 521281 - RNA, 19 nt, Homo sapiens
  misc_RNA (1)...(19): siRNA sense strand
aaacgccagcgacuagaaa

SEQ ID NO: 521282 - RNA, 19 nt, Homo sapiens
  misc_RNA (1)...(19): siRNA sense strand
gggcaacccagacgugcaa

SEQ ID NO: 521283 - RNA, 19 nt, Homo sapiens
  misc_RNA (1)...(19): siRNA sense strand
cauugaagccaaauugcaa

SEQ ID NO: 521284 - RNA, 19 nt, Homo sapiens
  misc_RNA (1)...(19): siRNA sense strand
cuauaaagucauuccugua

SEQ ID NO: 521285 - RNA, 19 nt, Homo sapiens
  misc_RNA (1)...(19): siRNA sense strand
gaugaagacgaaccugcuu

SEQ ID NO: 521286 - RNA, 19 nt, Homo sapiens
  misc_RNA (1)...(19): siRNA sense strand
uggacccgcucaccaucua

SEQ ID NO: 521287 - RNA, 19 nt, Homo sapiens
  misc_RNA (1)...(19): siRNA sense strand
aagacgaaccugcuuugaa

SEQ ID NO: 521288 - RNA, 19 nt, Homo sapiens
  misc_RNA (1)...(19): siRNA sense strand
gccagcgacuagaaaucaa

SEQ ID NO: 521289 - RNA, 19 nt, Homo sapiens
  misc_RNA (1)...(19): siRNA sense strand
ccgagaagauggcgcuaac

SEQ ID NO: 521290 - RNA, 19 nt, Homo sapiens
  misc_RNA (1)...(19): siRNA sense strand
caacccagacgugcaacaa

SEQ ID NO: 521291 - RNA, 19 nt, Homo sapiens
  misc_RNA (1)...(19): siRNA sense strand
uaacgcugcuggacuaccu

SEQ ID NO: 521292 - RNA, 19 nt, Homo sapiens
  misc_RNA (1)...(19): siRNA sense strand
agacggacaggugcaagua

SEQ ID NO: 521293 - RNA, 19 nt, Homo sapiens
  misc_RNA (1)...(19): siRNA sense strand
cuucagagccgaugaugag

SEQ ID NO: 521294 - RNA, 19 nt, Homo sapiens
  misc_RNA (1)...(19): siRNA sense strand
gaaucaagcagagcaucga

SEQ ID NO: 521295 - RNA, 19 nt, Homo sapiens
  misc_RNA (1)...(19): siRNA sense strand
aacacgaccuggccgaugu

SEQ ID NO: 521296 - RNA, 19 nt, Homo sapiens
  misc_RNA (1)...(19): siRNA sense strand
ggcuacuuguaaauccuua

SEQ ID NO: 521297 - RNA, 19 nt, Homo sapiens
  misc_RNA (1)...(19): siRNA sense strand
ugccaggauccaucuauaa

SEQ ID NO: 521298 - RNA, 19 nt, Homo sapiens
  misc_RNA (1)...(19): siRNA sense strand
cgacauccagguucaguac

SEQ ID NO: 521299 - RNA, 19 nt, Homo sapiens
  misc_RNA (1)...(19): siRNA sense strand
cgacugguaccgaaucaag

SEQ ID NO: 521300 - RNA, 19 nt, Homo sapiens
  misc_RNA (1)...(19): siRNA sense strand
gaacucggaagaggacuac

SEQ ID NO: 521301 - RNA, 19 nt, Homo sapiens
  misc_RNA (1)...(19): siRNA sense strand
gcgacauccagguucagua

SEQ ID NO: 521302 - RNA, 19 nt, Homo sapiens
  misc_RNA (1)...(19): siRNA sense strand
cagcgacuagaaaucaauu

SEQ ID NO: 521303 - RNA, 19 nt, Homo sapiens
  misc_RNA (1)...(19): siRNA sense strand
cccuggaggcuacuuguaa

SEQ ID NO: 521304 - RNA, 19 nt, Homo sapiens
  misc_RNA (1)...(19): siRNA sense strand
agucauuccuguauuccau

SEQ ID NO: 521305 - RNA, 19 nt, Homo sapiens
  misc_RNA (1)...(19): siRNA sense strand
aaucauguagugacagaug

SEQ ID NO: 521306 - RNA, 19 nt, Homo sapiens
  misc_RNA (1)...(19): siRNA sense strand
gccgaugugguucagauug

SEQ ID NO: 521307 - RNA, 19 nt, Homo sapiens
  misc_RNA (1)...(19): siRNA sense strand
acccagacgugcaacaaag

SEQ ID NO: 521308 - RNA, 19 nt, Homo sapiens
  misc_RNA (1)...(19): siRNA sense strand
gcccuggaggcuacuugua

SEQ ID NO: 521309 - RNA, 19 nt, Homo sapiens
  misc_RNA (1)...(19): siRNA sense strand
gcaaagacauuguuucauc

SEQ ID NO: 521310 - RNA, 19 nt, Homo sapiens
  misc_RNA (1)...(19): siRNA sense strand
ggaaguaugauguguauuu

SEQ ID NO: 521311 - RNA, 19 nt, Homo sapiens
  misc_RNA (1)...(19): siRNA sense strand
gaaguaugauguguauuug

SEQ ID NO: 521312 - RNA, 19 nt, Homo sapiens
  misc_RNA (1)...(19): siRNA sense strand
acacaucccuggacccuaa

SEQ ID NO: 521313 - RNA, 19 nt, Homo sapiens
  misc_RNA (1)...(19): siRNA sense strand
gagcagaaaccaccuaaga

SEQ ID NO: 521314 - RNA, 19 nt, Homo sapiens
  misc_RNA (1)...(19): siRNA sense strand
ggacugaagaccuguaaga

SEQ ID NO: 521315 - RNA, 19 nt, Homo sapiens
  misc_RNA (1)...(19): siRNA sense strand
gcucuaaaguggaguugau

SEQ ID NO: 521316 - RNA, 19 nt, Homo sapiens
  misc_RNA (1)...(19): siRNA sense strand
gcagaaaccaccuaagaag

SEQ ID NO: 521317 - RNA, 19 nt, Homo sapiens
  misc_RNA (1)...(19): siRNA sense strand
gcaaagcagagacaucaga

SEQ ID NO: 521318 - RNA, 19 nt, Homo sapiens
  misc_RNA (1)...(19): siRNA sense strand
gcgcaaagacauuguuuca

SEQ ID NO: 521319 - RNA, 19 nt, Homo sapiens
  misc_RNA (1)...(19): siRNA sense strand
agaaagagggcaagcauga

SEQ ID NO: 521320 - RNA, 19 nt, Homo sapiens
  misc_RNA (1)...(19): siRNA sense strand
gcccaaaucucccaaagcu

SEQ ID NO: 521321 - RNA, 19 nt, Homo sapiens
  misc_RNA (1)...(19): siRNA sense strand
gcaucgaggucaaggaagu

SEQ ID NO: 521322 - RNA, 19 nt, Homo sapiens
  misc_RNA (1)...(19): siRNA sense strand
cacggaagcuuaagcaaag

SEQ ID NO: 521323 - RNA, 19 nt, Homo sapiens
  misc_RNA (1)...(19): siRNA sense strand
ggagagcgcaaagacauug

SEQ ID NO: 521324 - RNA, 19 nt, Homo sapiens
  misc_RNA (1)...(19): siRNA sense strand
ggugaagaaagauaagaaa

SEQ ID NO: 521325 - RNA, 19 nt, Homo sapiens
  misc_RNA (1)...(19): siRNA sense strand
caaagcagagacaucagaa

SEQ ID NO: 521326 - RNA, 19 nt, Homo sapiens
  misc_RNA (1)...(19): siRNA sense strand
gagcgcaaagacauuguuu

SEQ ID NO: 521327 - RNA, 19 nt, Homo sapiens
  misc_RNA (1)...(19): siRNA sense strand
gagagcagaaaccaccuaa

SEQ ID NO: 521328 - RNA, 19 nt, Homo sapiens
  misc_RNA (1)...(19): siRNA sense strand
ggaguugauugcguacuuc

SEQ ID NO: 521329 - RNA, 19 nt, Homo sapiens
  misc_RNA (1)...(19): siRNA sense strand
ugggaaguaugauguguau

SEQ ID NO: 521330 - RNA, 19 nt, Homo sapiens
  misc_RNA (1)...(19): siRNA sense strand
ggacacggaagcuuaagca

SEQ ID NO: 521331 - RNA, 19 nt, Homo sapiens
  misc_RNA (1)...(19): siRNA sense strand
acacggaagcuuaagcaaa

SEQ ID NO: 521332 - RNA, 19 nt, Homo sapiens
  misc_RNA (1)...(19): siRNA sense strand
caagaugccuuuucaaacu

SEQ ID NO: 521333 - RNA, 19 nt, Homo sapiens
  misc_RNA (1)...(19): siRNA sense strand
gauuuugacuucacgguaa

SEQ ID NO: 521334 - RNA, 19 nt, Homo sapiens
  misc_RNA (1)...(19): siRNA sense strand
gcucugcugggaaguauga

SEQ ID NO: 521335 - RNA, 19 nt, Homo sapiens
  misc_RNA (1)...(19): siRNA sense strand
ugaaaaggguccuggagaa

SEQ ID NO: 521336 - RNA, 19 nt, Homo sapiens
  misc_RNA (1)...(19): siRNA sense strand
ucccaaagcuccaggaacu

SEQ ID NO: 521337 - RNA, 19 nt, Homo sapiens
  misc_RNA (1)...(19): siRNA sense strand
gauguguauuugaucaauc

SEQ ID NO: 521338 - RNA, 19 nt, Homo sapiens
  misc_RNA (1)...(19): siRNA sense strand
ccaaggagccagcuaagac

SEQ ID NO: 521339 - RNA, 19 nt, Homo sapiens
  misc_RNA (1)...(19): siRNA sense strand
cagcaucgaggucaaggaa

SEQ ID NO: 521340 - RNA, 19 nt, Homo sapiens
  misc_RNA (1)...(19): siRNA sense strand
cagagggugugcaggugaa

SEQ ID NO: 521341 - RNA, 19 nt, Homo sapiens
  misc_RNA (1)...(19): siRNA sense strand
gcuggacacggaagcuuaa

SEQ ID NO: 521342 - RNA, 19 nt, Homo sapiens
  misc_RNA (1)...(19): siRNA sense strand
cugggaagcuccuugucaa

SEQ ID NO: 521343 - RNA, 19 nt, Homo sapiens
  misc_RNA (1)...(19): siRNA sense strand
uaagaaagaagagaaagag

SEQ ID NO: 521344 - RNA, 19 nt, Homo sapiens
  misc_RNA (1)...(19): siRNA sense strand
gaaaaggguccuggagaaa

SEQ ID NO: 521345 - RNA, 19 nt, Homo sapiens
  misc_RNA (1)...(19): siRNA sense strand
uggaguugauugcguacuu

SEQ ID NO: 521346 - RNA, 19 nt, Homo sapiens
  misc_RNA (1)...(19): siRNA sense strand
ggagucuucuauccgaucu

SEQ ID NO: 521347 - RNA, 19 nt, Homo sapiens
  misc_RNA (1)...(19): siRNA sense strand
gaagcuuaagcaaaggaaa

SEQ ID NO: 521348 - RNA, 19 nt, Homo sapiens
  misc_RNA (1)...(19): siRNA sense strand
ggagggagagcgcaaagac

SEQ ID NO: 521349 - RNA, 19 nt, Homo sapiens
  misc_RNA (1)...(19): siRNA sense strand
gaaagauaagaaagaagag

SEQ ID NO: 521350 - RNA, 19 nt, Homo sapiens
  misc_RNA (1)...(19): siRNA sense strand
gaaggagcaccaccaccau

SEQ ID NO: 521351 - RNA, 19 nt, Homo sapiens
  misc_RNA (1)...(19): siRNA sense strand
ucaggccauucccaagaaa

SEQ ID NO: 521352 - RNA, 19 nt, Homo sapiens
  misc_RNA (1)...(19): siRNA sense strand
ggcuggacacggaagcuua

SEQ ID NO: 521353 - RNA, 19 nt, Homo sapiens
  misc_RNA (1)...(19): siRNA sense strand
gcugggaaguaugaugugu

SEQ ID NO: 521354 - RNA, 19 nt, Homo sapiens
  misc_RNA (1)...(19): siRNA sense strand
guugauugcguacuucgaa

SEQ ID NO: 521355 - RNA, 19 nt, Homo sapiens
  misc_RNA (1)...(19): siRNA sense strand
gggagagcgcaaagacauu

SEQ ID NO: 521356 - RNA, 19 nt, Homo sapiens
  misc_RNA (1)...(19): siRNA sense strand
gauaagaaagaagagaaag

SEQ ID NO: 521357 - RNA, 19 nt, Homo sapiens
  misc_RNA (1)...(19): siRNA sense strand
caccuaagaagcccaaauc

SEQ ID NO: 521358 - RNA, 19 nt, Homo sapiens
  misc_RNA (1)...(19): siRNA sense strand
gggagacggucagcaucga

SEQ ID NO: 521359 - RNA, 19 nt, Homo sapiens
  misc_RNA (1)...(19): siRNA sense strand
gaaagagggcaagcaugag

SEQ ID NO: 521360 - RNA, 19 nt, Homo sapiens
  misc_RNA (1)...(19): siRNA sense strand
uguuagggcucagggaaga

SEQ ID NO: 521361 - RNA, 19 nt, Homo sapiens
  misc_RNA (1)...(19): siRNA sense strand
cccuggacccuaaugauuu

SEQ ID NO: 521362 - RNA, 19 nt, Homo sapiens
  misc_RNA (1)...(19): siRNA sense strand
ggaagcuuaagcaaaggaa

SEQ ID NO: 521363 - RNA, 19 nt, Homo sapiens
  misc_RNA (1)...(19): siRNA sense strand
gaagcccaaaucucccaaa

SEQ ID NO: 521364 - RNA, 19 nt, Homo sapiens
  misc_RNA (1)...(19): siRNA sense strand
ccucaggccauucccaaga

SEQ ID NO: 521365 - RNA, 19 nt, Homo sapiens
  misc_RNA (1)...(19): siRNA sense strand
gccaucagcccaccacucu

SEQ ID NO: 521366 - RNA, 19 nt, Homo sapiens
  misc_RNA (1)...(19): siRNA sense strand
gugaagaaagauaagaaag

SEQ ID NO: 521367 - RNA, 19 nt, Homo sapiens
  misc_RNA (1)...(19): siRNA sense strand
cccgugaccgagagaguua

SEQ ID NO: 521368 - RNA, 19 nt, Homo sapiens
  misc_RNA (1)...(19): siRNA sense strand
cucaggccauucccaagaa

SEQ ID NO: 521369 - RNA, 19 nt, Homo sapiens
  misc_RNA (1)...(19): siRNA sense strand
aggcaaagcagagacauca

SEQ ID NO: 521370 - RNA, 19 nt, Homo sapiens
  misc_RNA (1)...(19): siRNA sense strand
gagggagagcgcaaagaca

SEQ ID NO: 521371 - RNA, 19 nt, Homo sapiens
  misc_RNA (1)...(19): siRNA sense strand
uccagggccucaaggacaa

SEQ ID NO: 521372 - RNA, 19 nt, Homo sapiens
  misc_RNA (1)...(19): siRNA sense strand
ggaggcagcuguagugaga

SEQ ID NO: 521373 - RNA, 19 nt, Homo sapiens
  misc_RNA (1)...(19): siRNA sense strand
gaaucgcccugaagaugua

SEQ ID NO: 521374 - RNA, 19 nt, Homo sapiens
  misc_RNA (1)...(19): siRNA sense strand
gagcauggcuucugugaac

SEQ ID NO: 521375 - RNA, 19 nt, Homo sapiens
  misc_RNA (1)...(19): siRNA sense strand
ggaguuaggagaccagauu

SEQ ID NO: 521376 - RNA, 19 nt, Homo sapiens
  misc_RNA (1)...(19): siRNA sense strand
caucuacgcucgggaggua

SEQ ID NO: 521377 - RNA, 19 nt, Homo sapiens
  misc_RNA (1)...(19): siRNA sense strand
gaacccgugugccaaugga

SEQ ID NO: 521378 - RNA, 19 nt, Homo sapiens
  misc_RNA (1)...(19): siRNA sense strand
ggaaucgcccugaagaugu

SEQ ID NO: 521379 - RNA, 19 nt, Homo sapiens
  misc_RNA (1)...(19): siRNA sense strand
gcacucaacaaccuaagga

SEQ ID NO: 521380 - RNA, 19 nt, Homo sapiens
  misc_RNA (1)...(19): siRNA sense strand
ggugacaugugcagaugga

SEQ ID NO: 521381 - RNA, 19 nt, Homo sapiens
  misc_RNA (1)...(19): siRNA sense strand
caccuucucuuucaucauc

SEQ ID NO: 521382 - RNA, 19 nt, Homo sapiens
  misc_RNA (1)...(19): siRNA sense strand
gcucguccguagauuggaa

SEQ ID NO: 521383 - RNA, 19 nt, Homo sapiens
  misc_RNA (1)...(19): siRNA sense strand
acacccagguccuuugaau

SEQ ID NO: 521384 - RNA, 19 nt, Homo sapiens
  misc_RNA (1)...(19): siRNA sense strand
uaucugcuccuuccaucua

SEQ ID NO: 521385 - RNA, 19 nt, Homo sapiens
  misc_RNA (1)...(19): siRNA sense strand
ccuggcaccuucucuuuca

SEQ ID NO: 521386 - RNA, 19 nt, Homo sapiens
  misc_RNA (1)...(19): siRNA sense strand
gaagauguagacccucaag

SEQ ID NO: 521387 - RNA, 19 nt, Homo sapiens
  misc_RNA (1)...(19): siRNA sense strand
ggccuggcaccuucucuuu

SEQ ID NO: 521388 - RNA, 19 nt, Homo sapiens
  misc_RNA (1)...(19): siRNA sense strand
gccaauggaggcagcugua

SEQ ID NO: 521389 - RNA, 19 nt, Homo sapiens
  misc_RNA (1)...(19): siRNA sense strand
gugaacagcccggugaaug

SEQ ID NO: 521390 - RNA, 19 nt, Homo sapiens
  misc_RNA (1)...(19): siRNA sense strand
ccucaagggauuuauguca

SEQ ID NO: 521391 - RNA, 19 nt, Homo sapiens
  misc_RNA (1)...(19): siRNA sense strand
ucccuacccuuccucgauu

SEQ ID NO: 521392 - RNA, 19 nt, Homo sapiens
  misc_RNA (1)...(19): siRNA sense strand
gggaacccgugugccaaug

SEQ ID NO: 521393 - RNA, 19 nt, Homo sapiens
  misc_RNA (1)...(19): siRNA sense strand
gauucuguccgugaaauga

SEQ ID NO: 521394 - RNA, 19 nt, Homo sapiens
  misc_RNA (1)...(19): siRNA sense strand
ccucgauucuguccgugaa

SEQ ID NO: 521395 - RNA, 19 nt, Homo sapiens
  misc_RNA (1)...(19): siRNA sense strand
gagacacccagguccuuug

SEQ ID NO: 521396 - RNA, 19 nt, Homo sapiens
  misc_RNA (1)...(19): siRNA sense strand
gaugcacucaacaaccuaa

SEQ ID NO: 521397 - RNA, 19 nt, Homo sapiens
  misc_RNA (1)...(19): siRNA sense strand
gagcucguccguagauugg

SEQ ID NO: 521398 - RNA, 19 nt, Homo sapiens
  misc_RNA (1)...(19): siRNA sense strand
gggagcugcgcuucucgua

SEQ ID NO: 521399 - RNA, 19 nt, Homo sapiens
  misc_RNA (1)...(19): siRNA sense strand
cugcagccaugccgcaaug

SEQ ID NO: 521400 - RNA, 19 nt, Homo sapiens
  misc_RNA (1)...(19): siRNA sense strand
ucuacgggcugcgguguga

SEQ ID NO: 521401 - RNA, 19 nt, Homo sapiens
  misc_RNA (1)...(19): siRNA sense strand
ccacugcccaccugguuuc

SEQ ID NO: 521402 - RNA, 19 nt, Homo sapiens
  misc_RNA (1)...(19): siRNA sense strand
uggaaucgcccugaagaug

SEQ ID NO: 521403 - RNA, 19 nt, Homo sapiens
  misc_RNA (1)...(19): siRNA sense strand
gauccuagcgcucauuuuc

SEQ ID NO: 521404 - RNA, 19 nt, Homo sapiens
  misc_RNA (1)...(19): siRNA sense strand
gacccucagcgcuaccuuu

SEQ ID NO: 521405 - RNA, 19 nt, Homo sapiens
  misc_RNA (1)...(19): siRNA sense strand
gaguuaggagaccagauug

SEQ ID NO: 521406 - RNA, 19 nt, Homo sapiens
  misc_RNA (1)...(19): siRNA sense strand
guuaggagaccagauugga

SEQ ID NO: 521407 - RNA, 19 nt, Homo sapiens
  misc_RNA (1)...(19): siRNA sense strand
ugagacacccagguccuuu

SEQ ID NO: 521408 - RNA, 19 nt, Homo sapiens
  misc_RNA (1)...(19): siRNA sense strand
ggcaccuucucuuucauca

SEQ ID NO: 521409 - RNA, 19 nt, Homo sapiens
  misc_RNA (1)...(19): siRNA sense strand
cggaugcacucaacaaccu

SEQ ID NO: 521410 - RNA, 19 nt, Homo sapiens
  misc_RNA (1)...(19): siRNA sense strand
cgagcucguccguagauug

SEQ ID NO: 521411 - RNA, 19 nt, Homo sapiens
  misc_RNA (1)...(19): siRNA sense strand
gcauuaaucucuuaccaua

SEQ ID NO: 521412 - RNA, 19 nt, Homo sapiens
  misc_RNA (1)...(19): siRNA sense strand
ugacagcauuaaucucuua

SEQ ID NO: 521413 - RNA, 19 nt, Homo sapiens
  misc_RNA (1)...(19): siRNA sense strand
ccaauguccucuugucuuu

SEQ ID NO: 521414 - RNA, 19 nt, Homo sapiens
  misc_RNA (1)...(19): siRNA sense strand
ggagacacaucaccuacuu

SEQ ID NO: 521415 - RNA, 19 nt, Homo sapiens
  misc_RNA (1)...(19): siRNA sense strand
ucaccaggcucaucaagaa

SEQ ID NO: 521416 - RNA, 19 nt, Homo sapiens
  misc_RNA (1)...(19): siRNA sense strand
ggauuacccuuccaacgaa

SEQ ID NO: 521417 - RNA, 19 nt, Homo sapiens
  misc_RNA (1)...(19): siRNA sense strand
caagaucgccguccuguau

SEQ ID NO: 521418 - RNA, 19 nt, Homo sapiens
  misc_RNA (1)...(19): siRNA sense strand
cgaacgaggugguguccua

SEQ ID NO: 521419 - RNA, 19 nt, Homo sapiens
  misc_RNA (1)...(19): siRNA sense strand
gcaaggaugguucagauga

SEQ ID NO: 521420 - RNA, 19 nt, Homo sapiens
  misc_RNA (1)...(19): siRNA sense strand
aaagggauguggccgcaua

SEQ ID NO: 521421 - RNA, 19 nt, Homo sapiens
  misc_RNA (1)...(19): siRNA sense strand
gcuauaaagugcucaucuu

SEQ ID NO: 521422 - RNA, 19 nt, Homo sapiens
  misc_RNA (1)...(19): siRNA sense strand
gaacugagcauggaaugug

SEQ ID NO: 521423 - RNA, 19 nt, Homo sapiens
  misc_RNA (1)...(19): siRNA sense strand
gaaggagaaguuuaagauu

SEQ ID NO: 521424 - RNA, 19 nt, Homo sapiens
  misc_RNA (1)...(19): siRNA sense strand
uuaaggucaucaaggauua

SEQ ID NO: 521425 - RNA, 19 nt, Homo sapiens
  misc_RNA (1)...(19): siRNA sense strand
ggagagauacuuugaacug

SEQ ID NO: 521426 - RNA, 19 nt, Homo sapiens
  misc_RNA (1)...(19): siRNA sense strand
ccaacacaguggccucuuu

SEQ ID NO: 521427 - RNA, 19 nt, Homo sapiens
  misc_RNA (1)...(19): siRNA sense strand
gaauguggccucaacaauc

SEQ ID NO: 521428 - RNA, 19 nt, Homo sapiens
  misc_RNA (1)...(19): siRNA sense strand
ccuccaaguuuaaucagua

SEQ ID NO: 521429 - RNA, 19 nt, Homo sapiens
  misc_RNA (1)...(19): siRNA sense strand
gcucucugcuccaugcuuu

SEQ ID NO: 521430 - RNA, 19 nt, Homo sapiens
  misc_RNA (1)...(19): siRNA sense strand
gaacuuggucaaauucaau

SEQ ID NO: 521431 - RNA, 19 nt, Homo sapiens
  misc_RNA (1)...(19): siRNA sense strand
aggaagagcuggcugacuu

SEQ ID NO: 521432 - RNA, 19 nt, Homo sapiens
  misc_RNA (1)...(19): siRNA sense strand
ggaacucgccgacaucugu

SEQ ID NO: 521433 - RNA, 19 nt, Homo sapiens
  misc_RNA (1)...(19): siRNA sense strand
aaggagaaguuuaagauuc

SEQ ID NO: 521434 - RNA, 19 nt, Homo sapiens
  misc_RNA (1)...(19): siRNA sense strand
ccaaggacguggacaagca

SEQ ID NO: 521435 - RNA, 19 nt, Homo sapiens
  misc_RNA (1)...(19): siRNA sense strand
uaucaucaccgcggaaaua

SEQ ID NO: 521436 - RNA, 19 nt, Homo sapiens
  misc_RNA (1)...(19): siRNA sense strand
gaggugguguccuaugaga

SEQ ID NO: 521437 - RNA, 19 nt, Homo sapiens
  misc_RNA (1)...(19): siRNA sense strand
gcugagaggagccguguuu

SEQ ID NO: 521438 - RNA, 19 nt, Homo sapiens
  misc_RNA (1)...(19): siRNA sense strand
ucaaggcccucacagacaa

SEQ ID NO: 521439 - RNA, 19 nt, Homo sapiens
  misc_RNA (1)...(19): siRNA sense strand
gaaauacugagagaacuga

SEQ ID NO: 521440 - RNA, 19 nt, Homo sapiens
  misc_RNA (1)...(19): siRNA sense strand
ugagagaacugagcaugga

SEQ ID NO: 521441 - RNA, 19 nt, Homo sapiens
  misc_RNA (1)...(19): siRNA sense strand
caucguccaugaccuguug

SEQ ID NO: 521442 - RNA, 19 nt, Homo sapiens
  misc_RNA (1)...(19): siRNA sense strand
gagagggacgccuuaaaga

SEQ ID NO: 521443 - RNA, 19 nt, Homo sapiens
  misc_RNA (1)...(19): siRNA sense strand
ccucacaggugcaucauag

SEQ ID NO: 521444 - RNA, 19 nt, Homo sapiens
  misc_RNA (1)...(19): siRNA sense strand
ucaacaggcaguucuauga

SEQ ID NO: 521445 - RNA, 19 nt, Homo sapiens
  misc_RNA (1)...(19): siRNA sense strand
ggagaaggccagagcaaca

SEQ ID NO: 521446 - RNA, 19 nt, Homo sapiens
  misc_RNA (1)...(19): siRNA sense strand
acauucagcuccacuacaa

SEQ ID NO: 521447 - RNA, 19 nt, Homo sapiens
  misc_RNA (1)...(19): siRNA sense strand
ucgaccagaucccaucaua

SEQ ID NO: 521448 - RNA, 19 nt, Homo sapiens
  misc_RNA (1)...(19): siRNA sense strand
caaauucaauagcuguuac

SEQ ID NO: 521449 - RNA, 19 nt, Homo sapiens
  misc_RNA (1)...(19): siRNA sense strand
ggaauguggccucaacaau

SEQ ID NO: 521450 - RNA, 19 nt, Homo sapiens
  misc_RNA (1)...(19): siRNA sense strand
uggccaagaucgugucuga

SEQ ID NO: 521451 - RNA, 19 nt, Homo sapiens
  misc_RNA (1)...(19): siRNA sense strand
gcaacgacuuuguguccau

SEQ ID NO: 521452 - RNA, 19 nt, Homo sapiens
  misc_RNA (1)...(19): siRNA sense strand
caauccugcugcccaauga

SEQ ID NO: 521453 - RNA, 19 nt, Homo sapiens
  misc_RNA (1)...(19): siRNA sense strand
ugaaggagaaguuuaagau

SEQ ID NO: 521454 - RNA, 19 nt, Homo sapiens
  misc_RNA (1)...(19): siRNA sense strand
gcuugaaggagaaguuuaa

SEQ ID NO: 521455 - RNA, 19 nt, Homo sapiens
  misc_RNA (1)...(19): siRNA sense strand
caaggaugguucagaugau

SEQ ID NO: 521456 - RNA, 19 nt, Homo sapiens
  misc_RNA (1)...(19): siRNA sense strand
ggaagagcuggcugacuuu

SEQ ID NO: 521457 - RNA, 19 nt, Homo sapiens
  misc_RNA (1)...(19): siRNA sense strand
gaaccugaucuccuauaga

SEQ ID NO: 521458 - RNA, 19 nt, Homo sapiens
  misc_RNA (1)...(19): siRNA sense strand
caacgacuuuguguccauu

SEQ ID NO: 521459 - RNA, 19 nt, Homo sapiens
  misc_RNA (1)...(19): siRNA sense strand
gaucggguccguuccaugu

SEQ ID NO: 521460 - RNA, 19 nt, Homo sapiens
  misc_RNA (1)...(19): siRNA sense strand
ccaggcucaucaagaagua

SEQ ID NO: 521461 - RNA, 19 nt, Homo sapiens
  misc_RNA (1)...(19): siRNA sense strand
ugauagggcagauuuguga

SEQ ID NO: 521462 - RNA, 19 nt, Homo sapiens
  misc_RNA (1)...(19): siRNA sense strand
ucaccuacuuggaggaaga

SEQ ID NO: 521463 - RNA, 19 nt, Homo sapiens
  misc_RNA (1)...(19): siRNA sense strand
gaagcucacgcacaucuca

SEQ ID NO: 521464 - RNA, 19 nt, Homo sapiens
  misc_RNA (1)...(19): siRNA sense strand
cugagucccugcgcuauaa

SEQ ID NO: 521465 - RNA, 19 nt, Homo sapiens
  misc_RNA (1)...(19): siRNA sense strand
aggaggagcugauuaacuc

SEQ ID NO: 521466 - RNA, 19 nt, Homo sapiens
  misc_RNA (1)...(19): siRNA sense strand
aaggacggcuggauucaga

SEQ ID NO: 521467 - RNA, 19 nt, Homo sapiens
  misc_RNA (1)...(19): siRNA sense strand
caggagagauacuuugaac

SEQ ID NO: 521468 - RNA, 19 nt, Homo sapiens
  misc_RNA (1)...(19): siRNA sense strand
ucuuuaaggucaucaagga

SEQ ID NO: 521469 - RNA, 19 nt, Homo sapiens
  misc_RNA (1)...(19): siRNA sense strand
ggacuucaccgaguuugug

SEQ ID NO: 521470 - RNA, 19 nt, Homo sapiens
  misc_RNA (1)...(19): siRNA sense strand
ggaaauacugagagaacug

SEQ ID NO: 521471 - RNA, 19 nt, Homo sapiens
  misc_RNA (1)...(19): siRNA sense strand
gcaguaugccaguguguuc

SEQ ID NO: 521472 - RNA, 19 nt, Homo sapiens
  misc_RNA (1)...(19): siRNA sense strand
gagaucguccuguccauca

SEQ ID NO: 521473 - RNA, 19 nt, Homo sapiens
  misc_RNA (1)...(19): siRNA sense strand
gacaaugggagacacauca

SEQ ID NO: 521474 - RNA, 19 nt, Homo sapiens
  misc_RNA (1)...(19): siRNA sense strand
gaugauagggcagauuugu

SEQ ID NO: 521475 - RNA, 19 nt, Homo sapiens
  misc_RNA (1)...(19): siRNA sense strand
cagacggaguuuaucauca

SEQ ID NO: 521476 - RNA, 19 nt, Homo sapiens
  misc_RNA (1)...(19): siRNA sense strand
aaaccaacaagcaaagauu

SEQ ID NO: 521477 - RNA, 19 nt, Homo sapiens
  misc_RNA (1)...(19): siRNA sense strand
gaaguuuaagauucuguug

SEQ ID NO: 521478 - RNA, 19 nt, Homo sapiens
  misc_RNA (1)...(19): siRNA sense strand
ucgcaaggaugguucagau

SEQ ID NO: 521479 - RNA, 19 nt, Homo sapiens
  misc_RNA (1)...(19): siRNA sense strand
guucaucguuacccucugu

SEQ ID NO: 521480 - RNA, 19 nt, Homo sapiens
  misc_RNA (1)...(19): siRNA sense strand
ccucggacaucaacaacau

SEQ ID NO: 521481 - RNA, 19 nt, Homo sapiens
  misc_RNA (1)...(19): siRNA sense strand
aaccugaucuccuauagag

SEQ ID NO: 521482 - RNA, 19 nt, Homo sapiens
  misc_RNA (1)...(19): siRNA sense strand
ccgcggaaauacugagaga

SEQ ID NO: 521483 - RNA, 19 nt, Homo sapiens
  misc_RNA (1)...(19): siRNA sense strand
gcccacaccuggcuaugag

SEQ ID NO: 521484 - RNA, 19 nt, Homo sapiens
  misc_RNA (1)...(19): siRNA sense strand
gguccaauguccucuuguc

SEQ ID NO: 521485 - RNA, 19 nt, Homo sapiens
  misc_RNA (1)...(19): siRNA sense strand
gcgguccaauguccucuug

SEQ ID NO: 521486 - RNA, 19 nt, Homo sapiens
  misc_RNA (1)...(19): siRNA sense strand
gaagagcuggcugacuuug

SEQ ID NO: 521487 - RNA, 19 nt, Homo sapiens
  misc_RNA (1)...(19): siRNA sense strand
ggaggacuucaccgaguuu

SEQ ID NO: 521488 - RNA, 19 nt, Homo sapiens
  misc_RNA (1)...(19): siRNA sense strand
acgcaaauauggccucaca

SEQ ID NO: 521489 - RNA, 19 nt, Homo sapiens
  misc_RNA (1)...(19): siRNA sense strand
caacacaguggccucuuuc

SEQ ID NO: 521490 - RNA, 19 nt, Homo sapiens
  misc_RNA (1)...(19): siRNA sense strand
ggccaaaccaacaagcaaa

SEQ ID NO: 521491 - RNA, 19 nt, Homo sapiens
  misc_RNA (1)...(19): siRNA sense strand
gaacaccgaggccaaaucc

SEQ ID NO: 521492 - RNA, 19 nt, Homo sapiens
  misc_RNA (1)...(19): siRNA sense strand
gggccauggucuucgaguu

SEQ ID NO: 521493 - RNA, 19 nt, Homo sapiens
  misc_RNA (1)...(19): siRNA sense strand
ccaaacagcgcgagauggu

SEQ ID NO: 521494 - RNA, 19 nt, Homo sapiens
  misc_RNA (1)...(19): siRNA sense strand
gacauucugcugaacauca

SEQ ID NO: 521495 - RNA, 19 nt, Homo sapiens
  misc_RNA (1)...(19): siRNA sense strand
cggaugauagggcagauuu

SEQ ID NO: 521496 - RNA, 19 nt, Homo sapiens
  misc_RNA (1)...(19): siRNA sense strand
caccggcucuauucucuca

SEQ ID NO: 521497 - RNA, 19 nt, Homo sapiens
  misc_RNA (1)...(19): siRNA sense strand
ccaccugggcaacgacuuu

SEQ ID NO: 521498 - RNA, 19 nt, Homo sapiens
  misc_RNA (1)...(19): siRNA sense strand
gcugagcccugagguuaag

SEQ ID NO: 521499 - RNA, 19 nt, Homo sapiens
  misc_RNA (1)...(19): siRNA sense strand
cggcugagcgcuucaagga

SEQ ID NO: 521500 - RNA, 19 nt, Homo sapiens
  misc_RNA (1)...(19): siRNA sense strand
ggccauggucuucgaguug

SEQ ID NO: 521501 - RNA, 19 nt, Homo sapiens
  misc_RNA (1)...(19): siRNA sense strand
cagcauuaaucucuuacca

SEQ ID NO: 521502 - RNA, 19 nt, Homo sapiens
  misc_RNA (1)...(19): siRNA sense strand
cuacauggagccagagaga

SEQ ID NO: 521503 - RNA, 19 nt, Homo sapiens
  misc_RNA (1)...(19): siRNA sense strand
ccacgcguguguaugagau

SEQ ID NO: 521504 - RNA, 19 nt, Homo sapiens
  misc_RNA (1)...(19): siRNA sense strand
acgaggugguguccuauga

SEQ ID NO: 521505 - RNA, 19 nt, Homo sapiens
  misc_RNA (1)...(19): siRNA sense strand
ggccaaggacggcuggauu

SEQ ID NO: 521506 - RNA, 19 nt, Homo sapiens
  misc_RNA (1)...(19): siRNA sense strand
aagcaccgcugcgacaaga

SEQ ID NO: 521507 - RNA, 19 nt, Homo sapiens
  misc_RNA (1)...(19): siRNA sense strand
gaccagaucccaucauacg

SEQ ID NO: 521508 - RNA, 19 nt, Homo sapiens
  misc_RNA (1)...(19): siRNA sense strand
guagagagggacgccuuaa

SEQ ID NO: 521509 - RNA, 19 nt, Homo sapiens
  misc_RNA (1)...(19): siRNA sense strand
gauacgucuucuccaacuu

SEQ ID NO: 521510 - RNA, 19 nt, Homo sapiens
  misc_RNA (1)...(19): siRNA sense strand
caaguuuaaucaguacauc

SEQ ID NO: 521511 - RNA, 19 nt, Homo sapiens
  misc_RNA (1)...(19): siRNA sense strand
gcauuaaucucuuaccaua

SEQ ID NO: 521512 - RNA, 19 nt, Homo sapiens
  misc_RNA (1)...(19): siRNA sense strand
ugacagcauuaaucucuua

SEQ ID NO: 521513 - RNA, 19 nt, Homo sapiens
  misc_RNA (1)...(19): siRNA sense strand
ccaauguccucuugucuuu

SEQ ID NO: 521514 - RNA, 19 nt, Homo sapiens
  misc_RNA (1)...(19): siRNA sense strand
ggagacacaucaccuacuu

SEQ ID NO: 521515 - RNA, 19 nt, Homo sapiens
  misc_RNA (1)...(19): siRNA sense strand
ucaccaggcucaucaagaa

SEQ ID NO: 521516 - RNA, 19 nt, Homo sapiens
  misc_RNA (1)...(19): siRNA sense strand
ggauuacccuuccaacgaa

SEQ ID NO: 521517 - RNA, 19 nt, Homo sapiens
  misc_RNA (1)...(19): siRNA sense strand
caagaucgccguccuguau

SEQ ID NO: 521518 - RNA, 19 nt, Homo sapiens
  misc_RNA (1)...(19): siRNA sense strand
cgaacgaggugguguccua

SEQ ID NO: 521519 - RNA, 19 nt, Homo sapiens
  misc_RNA (1)...(19): siRNA sense strand
gcaaggaugguucagauga

SEQ ID NO: 521520 - RNA, 19 nt, Homo sapiens
  misc_RNA (1)...(19): siRNA sense strand
aaagggauguggccgcaua

SEQ ID NO: 521521 - RNA, 19 nt, Homo sapiens
  misc_RNA (1)...(19): siRNA sense strand
gcuauaaagugcucaucuu

SEQ ID NO: 521522 - RNA, 19 nt, Homo sapiens
  misc_RNA (1)...(19): siRNA sense strand
gaacugagcauggaaugug

SEQ ID NO: 521523 - RNA, 19 nt, Homo sapiens
  misc_RNA (1)...(19): siRNA sense strand
gaaggagaaguuuaagauu

SEQ ID NO: 521524 - RNA, 19 nt, Homo sapiens
  misc_RNA (1)...(19): siRNA sense strand
uuaaggucaucaaggauua

SEQ ID NO: 521525 - RNA, 19 nt, Homo sapiens
  misc_RNA (1)...(19): siRNA sense strand
ggagagauacuuugaacug

SEQ ID NO: 521526 - RNA, 19 nt, Homo sapiens
  misc_RNA (1)...(19): siRNA sense strand
ccaacacaguggccucuuu

SEQ ID NO: 521527 - RNA, 19 nt, Homo sapiens
  misc_RNA (1)...(19): siRNA sense strand
gaauguggccucaacaauc

SEQ ID NO: 521528 - RNA, 19 nt, Homo sapiens
  misc_RNA (1)...(19): siRNA sense strand
ccuccaaguuuaaucagua

SEQ ID NO: 521529 - RNA, 19 nt, Homo sapiens
  misc_RNA (1)...(19): siRNA sense strand
gcucucugcuccaugcuuu

SEQ ID NO: 521530 - RNA, 19 nt, Homo sapiens
  misc_RNA (1)...(19): siRNA sense strand
gaacuuggucaaauucaau

SEQ ID NO: 521531 - RNA, 19 nt, Homo sapiens
  misc_RNA (1)...(19): siRNA sense strand
aggaagagcuggcugacuu

SEQ ID NO: 521532 - RNA, 19 nt, Homo sapiens
  misc_RNA (1)...(19): siRNA sense strand
ggaacucgccgacaucugu

SEQ ID NO: 521533 - RNA, 19 nt, Homo sapiens
  misc_RNA (1)...(19): siRNA sense strand
aaggagaaguuuaagauuc

SEQ ID NO: 521534 - RNA, 19 nt, Homo sapiens
  misc_RNA (1)...(19): siRNA sense strand
ccaaggacguggacaagca

SEQ ID NO: 521535 - RNA, 19 nt, Homo sapiens
  misc_RNA (1)...(19): siRNA sense strand
uaucaucaccgcggaaaua

SEQ ID NO: 521536 - RNA, 19 nt, Homo sapiens
  misc_RNA (1)...(19): siRNA sense strand
gaggugguguccuaugaga

SEQ ID NO: 521537 - RNA, 19 nt, Homo sapiens
  misc_RNA (1)...(19): siRNA sense strand
gcugagaggagccguguuu

SEQ ID NO: 521538 - RNA, 19 nt, Homo sapiens
  misc_RNA (1)...(19): siRNA sense strand
ucaaggcccucacagacaa

SEQ ID NO: 521539 - RNA, 19 nt, Homo sapiens
  misc_RNA (1)...(19): siRNA sense strand
gaaauacugagagaacuga

SEQ ID NO: 521540 - RNA, 19 nt, Homo sapiens
  misc_RNA (1)...(19): siRNA sense strand
ugagagaacugagcaugga

SEQ ID NO: 521541 - RNA, 19 nt, Homo sapiens
  misc_RNA (1)...(19): siRNA sense strand
caucguccaugaccuguug

SEQ ID NO: 521542 - RNA, 19 nt, Homo sapiens
  misc_RNA (1)...(19): siRNA sense strand
gagagggacgccuuaaaga

SEQ ID NO: 521543 - RNA, 19 nt, Homo sapiens
  misc_RNA (1)...(19): siRNA sense strand
ccucacaggugcaucauag

SEQ ID NO: 521544 - RNA, 19 nt, Homo sapiens
  misc_RNA (1)...(19): siRNA sense strand
ucaacaggcaguucuauga

SEQ ID NO: 521545 - RNA, 19 nt, Homo sapiens
  misc_RNA (1)...(19): siRNA sense strand
ggagaaggccagagcaaca

SEQ ID NO: 521546 - RNA, 19 nt, Homo sapiens
  misc_RNA (1)...(19): siRNA sense strand
acauucagcuccacuacaa

SEQ ID NO: 521547 - RNA, 19 nt, Homo sapiens
  misc_RNA (1)...(19): siRNA sense strand
ucgaccagaucccaucaua

SEQ ID NO: 521548 - RNA, 19 nt, Homo sapiens
  misc_RNA (1)...(19): siRNA sense strand
caaauucaauagcuguuac

SEQ ID NO: 521549 - RNA, 19 nt, Homo sapiens
  misc_RNA (1)...(19): siRNA sense strand
ggaauguggccucaacaau

SEQ ID NO: 521550 - RNA, 19 nt, Homo sapiens
  misc_RNA (1)...(19): siRNA sense strand
uggccaagaucgugucuga

SEQ ID NO: 521551 - RNA, 19 nt, Homo sapiens
  misc_RNA (1)...(19): siRNA sense strand
gcaacgacuuuguguccau

SEQ ID NO: 521552 - RNA, 19 nt, Homo sapiens
  misc_RNA (1)...(19): siRNA sense strand
caauccugcugcccaauga

SEQ ID NO: 521553 - RNA, 19 nt, Homo sapiens
  misc_RNA (1)...(19): siRNA sense strand
ugaaggagaaguuuaagau

SEQ ID NO: 521554 - RNA, 19 nt, Homo sapiens
  misc_RNA (1)...(19): siRNA sense strand
gcuugaaggagaaguuuaa

SEQ ID NO: 521555 - RNA, 19 nt, Homo sapiens
  misc_RNA (1)...(19): siRNA sense strand
caaggaugguucagaugau

SEQ ID NO: 521556 - RNA, 19 nt, Homo sapiens
  misc_RNA (1)...(19): siRNA sense strand
ggaagagcuggcugacuuu

SEQ ID NO: 521557 - RNA, 19 nt, Homo sapiens
  misc_RNA (1)...(19): siRNA sense strand
gaaccugaucuccuauaga

SEQ ID NO: 521558 - RNA, 19 nt, Homo sapiens
  misc_RNA (1)...(19): siRNA sense strand
caacgacuuuguguccauu

SEQ ID NO: 521559 - RNA, 19 nt, Homo sapiens
  misc_RNA (1)...(19): siRNA sense strand
gaucggguccguuccaugu

SEQ ID NO: 521560 - RNA, 19 nt, Homo sapiens
  misc_RNA (1)...(19): siRNA sense strand
ccaggcucaucaagaagua

SEQ ID NO: 521561 - RNA, 19 nt, Homo sapiens
  misc_RNA (1)...(19): siRNA sense strand
ugauagggcagauuuguga

SEQ ID NO: 521562 - RNA, 19 nt, Homo sapiens
  misc_RNA (1)...(19): siRNA sense strand
ucaccuacuuggaggaaga

SEQ ID NO: 521563 - RNA, 19 nt, Homo sapiens
  misc_RNA (1)...(19): siRNA sense strand
gaagcucacgcacaucuca

SEQ ID NO: 521564 - RNA, 19 nt, Homo sapiens
  misc_RNA (1)...(19): siRNA sense strand
cugagucccugcgcuauaa

SEQ ID NO: 521565 - RNA, 19 nt, Homo sapiens
  misc_RNA (1)...(19): siRNA sense strand
aggaggagcugauuaacuc

SEQ ID NO: 521566 - RNA, 19 nt, Homo sapiens
  misc_RNA (1)...(19): siRNA sense strand
aaggacggcuggauucaga

SEQ ID NO: 521567 - RNA, 19 nt, Homo sapiens
  misc_RNA (1)...(19): siRNA sense strand
caggagagauacuuugaac

SEQ ID NO: 521568 - RNA, 19 nt, Homo sapiens
  misc_RNA (1)...(19): siRNA sense strand
ucuuuaaggucaucaagga

SEQ ID NO: 521569 - RNA, 19 nt, Homo sapiens
  misc_RNA (1)...(19): siRNA sense strand
ggacuucaccgaguuugug

SEQ ID NO: 521570 - RNA, 19 nt, Homo sapiens
  misc_RNA (1)...(19): siRNA sense strand
ggaaauacugagagaacug

SEQ ID NO: 521571 - RNA, 19 nt, Homo sapiens
  misc_RNA (1)...(19): siRNA sense strand
gcaguaugccaguguguuc

SEQ ID NO: 521572 - RNA, 19 nt, Homo sapiens
  misc_RNA (1)...(19): siRNA sense strand
gagaucguccuguccauca

SEQ ID NO: 521573 - RNA, 19 nt, Homo sapiens
  misc_RNA (1)...(19): siRNA sense strand
gacaaugggagacacauca

SEQ ID NO: 521574 - RNA, 19 nt, Homo sapiens
  misc_RNA (1)...(19): siRNA sense strand
gaugauagggcagauuugu

SEQ ID NO: 521575 - RNA, 19 nt, Homo sapiens
  misc_RNA (1)...(19): siRNA sense strand
cagacggaguuuaucauca

SEQ ID NO: 521576 - RNA, 19 nt, Homo sapiens
  misc_RNA (1)...(19): siRNA sense strand
aaaccaacaagcaaagauu

SEQ ID NO: 521577 - RNA, 19 nt, Homo sapiens
  misc_RNA (1)...(19): siRNA sense strand
gaaguuuaagauucuguug

SEQ ID NO: 521578 - RNA, 19 nt, Homo sapiens
  misc_RNA (1)...(19): siRNA sense strand
ucgcaaggaugguucagau

SEQ ID NO: 521579 - RNA, 19 nt, Homo sapiens
  misc_RNA (1)...(19): siRNA sense strand
guucaucguuacccucugu

SEQ ID NO: 521580 - RNA, 19 nt, Homo sapiens
  misc_RNA (1)...(19): siRNA sense strand
ccucggacaucaacaacau

SEQ ID NO: 521581 - RNA, 19 nt, Homo sapiens
  misc_RNA (1)...(19): siRNA sense strand
aaccugaucuccuauagag

SEQ ID NO: 521582 - RNA, 19 nt, Homo sapiens
  misc_RNA (1)...(19): siRNA sense strand
ccgcggaaauacugagaga

SEQ ID NO: 521583 - RNA, 19 nt, Homo sapiens
  misc_RNA (1)...(19): siRNA sense strand
gcccacaccuggcuaugag

SEQ ID NO: 521584 - RNA, 19 nt, Homo sapiens
  misc_RNA (1)...(19): siRNA sense strand
gguccaauguccucuuguc

SEQ ID NO: 521585 - RNA, 19 nt, Homo sapiens
  misc_RNA (1)...(19): siRNA sense strand
gcgguccaauguccucuug

SEQ ID NO: 521586 - RNA, 19 nt, Homo sapiens
  misc_RNA (1)...(19): siRNA sense strand
gaagagcuggcugacuuug

SEQ ID NO: 521587 - RNA, 19 nt, Homo sapiens
  misc_RNA (1)...(19): siRNA sense strand
ggaggacuucaccgaguuu

SEQ ID NO: 521588 - RNA, 19 nt, Homo sapiens
  misc_RNA (1)...(19): siRNA sense strand
acgcaaauauggccucaca

SEQ ID NO: 521589 - RNA, 19 nt, Homo sapiens
  misc_RNA (1)...(19): siRNA sense strand
caacacaguggccucuuuc

SEQ ID NO: 521590 - RNA, 19 nt, Homo sapiens
  misc_RNA (1)...(19): siRNA sense strand
ggccaaaccaacaagcaaa

SEQ ID NO: 521591 - RNA, 19 nt, Homo sapiens
  misc_RNA (1)...(19): siRNA sense strand
gaacaccgaggccaaaucc

SEQ ID NO: 521592 - RNA, 19 nt, Homo sapiens
  misc_RNA (1)...(19): siRNA sense strand
gggccauggucuucgaguu

SEQ ID NO: 521593 - RNA, 19 nt, Homo sapiens
  misc_RNA (1)...(19): siRNA sense strand
ccaaacagcgcgagauggu

SEQ ID NO: 521594 - RNA, 19 nt, Homo sapiens
  misc_RNA (1)...(19): siRNA sense strand
gacauucugcugaacauca

SEQ ID NO: 521595 - RNA, 19 nt, Homo sapiens
  misc_RNA (1)...(19): siRNA sense strand
cggaugauagggcagauuu

SEQ ID NO: 521596 - RNA, 19 nt, Homo sapiens
  misc_RNA (1)...(19): siRNA sense strand
caccggcucuauucucuca

SEQ ID NO: 521597 - RNA, 19 nt, Homo sapiens
  misc_RNA (1)...(19): siRNA sense strand
ccaccugggcaacgacuuu

SEQ ID NO: 521598 - RNA, 19 nt, Homo sapiens
  misc_RNA (1)...(19): siRNA sense strand
gcugagcccugagguuaag

SEQ ID NO: 521599 - RNA, 19 nt, Homo sapiens
  misc_RNA (1)...(19): siRNA sense strand
cggcugagcgcuucaagga

SEQ ID NO: 521600 - RNA, 19 nt, Homo sapiens
  misc_RNA (1)...(19): siRNA sense strand
ggccauggucuucgaguug

SEQ ID NO: 521601 - RNA, 19 nt, Homo sapiens
  misc_RNA (1)...(19): siRNA sense strand
cagcauuaaucucuuacca

SEQ ID NO: 521602 - RNA, 19 nt, Homo sapiens
  misc_RNA (1)...(19): siRNA sense strand
cuacauggagccagagaga

SEQ ID NO: 521603 - RNA, 19 nt, Homo sapiens
  misc_RNA (1)...(19): siRNA sense strand
ccacgcguguguaugagau

SEQ ID NO: 521604 - RNA, 19 nt, Homo sapiens
  misc_RNA (1)...(19): siRNA sense strand
acgaggugguguccuauga

SEQ ID NO: 521605 - RNA, 19 nt, Homo sapiens
  misc_RNA (1)...(19): siRNA sense strand
ggccaaggacggcuggauu

SEQ ID NO: 521606 - RNA, 19 nt, Homo sapiens
  misc_RNA (1)...(19): siRNA sense strand
aagcaccgcugcgacaaga

SEQ ID NO: 521607 - RNA, 19 nt, Homo sapiens
  misc_RNA (1)...(19): siRNA sense strand
gaccagaucccaucauacg

SEQ ID NO: 521608 - RNA, 19 nt, Homo sapiens
  misc_RNA (1)...(19): siRNA sense strand
guagagagggacgccuuaa

SEQ ID NO: 521609 - RNA, 19 nt, Homo sapiens
  misc_RNA (1)...(19): siRNA sense strand
gauacgucuucuccaacuu

SEQ ID NO: 521610 - RNA, 19 nt, Homo sapiens
  misc_RNA (1)...(19): siRNA sense strand
caaguuuaaucaguacauc

SEQ ID NO: 521611 - RNA, 19 nt, Homo sapiens
  misc_RNA (1)...(19): siRNA sense strand
gcauuaaucucuuaccaua

SEQ ID NO: 521612 - RNA, 19 nt, Homo sapiens
  misc_RNA (1)...(19): siRNA sense strand
ugacagcauuaaucucuua

SEQ ID NO: 521613 - RNA, 19 nt, Homo sapiens
  misc_RNA (1)...(19): siRNA sense strand
ccaauguccucuugucuuu

SEQ ID NO: 521614 - RNA, 19 nt, Homo sapiens
  misc_RNA (1)...(19): siRNA sense strand
ggagacacaucaccuacuu

SEQ ID NO: 521615 - RNA, 19 nt, Homo sapiens
  misc_RNA (1)...(19): siRNA sense strand
ucaccaggcucaucaagaa

SEQ ID NO: 521616 - RNA, 19 nt, Homo sapiens
  misc_RNA (1)...(19): siRNA sense strand
ggauuacccuuccaacgaa

SEQ ID NO: 521617 - RNA, 19 nt, Homo sapiens
  misc_RNA (1)...(19): siRNA sense strand
caagaucgccguccuguau

SEQ ID NO: 521618 - RNA, 19 nt, Homo sapiens
  misc_RNA (1)...(19): siRNA sense strand
cgaacgaggugguguccua

SEQ ID NO: 521619 - RNA, 19 nt, Homo sapiens
  misc_RNA (1)...(19): siRNA sense strand
gcaaggaugguucagauga

SEQ ID NO: 521620 - RNA, 19 nt, Homo sapiens
  misc_RNA (1)...(19): siRNA sense strand
aaagggauguggccgcaua

SEQ ID NO: 521621 - RNA, 19 nt, Homo sapiens
  misc_RNA (1)...(19): siRNA sense strand
gcuauaaagugcucaucuu

SEQ ID NO: 521622 - RNA, 19 nt, Homo sapiens
  misc_RNA (1)...(19): siRNA sense strand
gaacugagcauggaaugug

SEQ ID NO: 521623 - RNA, 19 nt, Homo sapiens
  misc_RNA (1)...(19): siRNA sense strand
gaaggagaaguuuaagauu

SEQ ID NO: 521624 - RNA, 19 nt, Homo sapiens
  misc_RNA (1)...(19): siRNA sense strand
uuaaggucaucaaggauua

SEQ ID NO: 521625 - RNA, 19 nt, Homo sapiens
  misc_RNA (1)...(19): siRNA sense strand
ggagagauacuuugaacug

SEQ ID NO: 521626 - RNA, 19 nt, Homo sapiens
  misc_RNA (1)...(19): siRNA sense strand
ccaacacaguggccucuuu

SEQ ID NO: 521627 - RNA, 19 nt, Homo sapiens
  misc_RNA (1)...(19): siRNA sense strand
gaauguggccucaacaauc

SEQ ID NO: 521628 - RNA, 19 nt, Homo sapiens
  misc_RNA (1)...(19): siRNA sense strand
ccuccaaguuuaaucagua

SEQ ID NO: 521629 - RNA, 19 nt, Homo sapiens
  misc_RNA (1)...(19): siRNA sense strand
gcucucugcuccaugcuuu

SEQ ID NO: 521630 - RNA, 19 nt, Homo sapiens
  misc_RNA (1)...(19): siRNA sense strand
gaacuuggucaaauucaau

SEQ ID NO: 521631 - RNA, 19 nt, Homo sapiens
  misc_RNA (1)...(19): siRNA sense strand
aggaagagcuggcugacuu

SEQ ID NO: 521632 - RNA, 19 nt, Homo sapiens
  misc_RNA (1)...(19): siRNA sense strand
ggaacucgccgacaucugu

SEQ ID NO: 521633 - RNA, 19 nt, Homo sapiens
  misc_RNA (1)...(19): siRNA sense strand
aaggagaaguuuaagauuc

SEQ ID NO: 521634 - RNA, 19 nt, Homo sapiens
  misc_RNA (1)...(19): siRNA sense strand
ccaaggacguggacaagca

SEQ ID NO: 521635 - RNA, 19 nt, Homo sapiens
  misc_RNA (1)...(19): siRNA sense strand
uaucaucaccgcggaaaua

SEQ ID NO: 521636 - RNA, 19 nt, Homo sapiens
  misc_RNA (1)...(19): siRNA sense strand
gaggugguguccuaugaga

SEQ ID NO: 521637 - RNA, 19 nt, Homo sapiens
  misc_RNA (1)...(19): siRNA sense strand
gcugagaggagccguguuu

SEQ ID NO: 521638 - RNA, 19 nt, Homo sapiens
  misc_RNA (1)...(19): siRNA sense strand
ucaaggcccucacagacaa

SEQ ID NO: 521639 - RNA, 19 nt, Homo sapiens
  misc_RNA (1)...(19): siRNA sense strand
gaaauacugagagaacuga

SEQ ID NO: 521640 - RNA, 19 nt, Homo sapiens
  misc_RNA (1)...(19): siRNA sense strand
ugagagaacugagcaugga

SEQ ID NO: 521641 - RNA, 19 nt, Homo sapiens
  misc_RNA (1)...(19): siRNA sense strand
caucguccaugaccuguug

SEQ ID NO: 521642 - RNA, 19 nt, Homo sapiens
  misc_RNA (1)...(19): siRNA sense strand
gagagggacgccuuaaaga

SEQ ID NO: 521643 - RNA, 19 nt, Homo sapiens
  misc_RNA (1)...(19): siRNA sense strand
ccucacaggugcaucauag

SEQ ID NO: 521644 - RNA, 19 nt, Homo sapiens
  misc_RNA (1)...(19): siRNA sense strand
ucaacaggcaguucuauga

SEQ ID NO: 521645 - RNA, 19 nt, Homo sapiens
  misc_RNA (1)...(19): siRNA sense strand
ggagaaggccagagcaaca

SEQ ID NO: 521646 - RNA, 19 nt, Homo sapiens
  misc_RNA (1)...(19): siRNA sense strand
acauucagcuccacuacaa

SEQ ID NO: 521647 - RNA, 19 nt, Homo sapiens
  misc_RNA (1)...(19): siRNA sense strand
ucgaccagaucccaucaua

SEQ ID NO: 521648 - RNA, 19 nt, Homo sapiens
  misc_RNA (1)...(19): siRNA sense strand
caaauucaauagcuguuac

SEQ ID NO: 521649 - RNA, 19 nt, Homo sapiens
  misc_RNA (1)...(19): siRNA sense strand
ggaauguggccucaacaau

SEQ ID NO: 521650 - RNA, 19 nt, Homo sapiens
  misc_RNA (1)...(19): siRNA sense strand
uggccaagaucgugucuga

SEQ ID NO: 521651 - RNA, 19 nt, Homo sapiens
  misc_RNA (1)...(19): siRNA sense strand
gcaacgacuuuguguccau

SEQ ID NO: 521652 - RNA, 19 nt, Homo sapiens
  misc_RNA (1)...(19): siRNA sense strand
caauccugcugcccaauga

SEQ ID NO: 521653 - RNA, 19 nt, Homo sapiens
  misc_RNA (1)...(19): siRNA sense strand
ugaaggagaaguuuaagau

SEQ ID NO: 521654 - RNA, 19 nt, Homo sapiens
  misc_RNA (1)...(19): siRNA sense strand
gcuugaaggagaaguuuaa

SEQ ID NO: 521655 - RNA, 19 nt, Homo sapiens
  misc_RNA (1)...(19): siRNA sense strand
caaggaugguucagaugau

SEQ ID NO: 521656 - RNA, 19 nt, Homo sapiens
  misc_RNA (1)...(19): siRNA sense strand
ggaagagcuggcugacuuu

SEQ ID NO: 521657 - RNA, 19 nt, Homo sapiens
  misc_RNA (1)...(19): siRNA sense strand
gaaccugaucuccuauaga

SEQ ID NO: 521658 - RNA, 19 nt, Homo sapiens
  misc_RNA (1)...(19): siRNA sense strand
caacgacuuuguguccauu

SEQ ID NO: 521659 - RNA, 19 nt, Homo sapiens
  misc_RNA (1)...(19): siRNA sense strand
gaucggguccguuccaugu

SEQ ID NO: 521660 - RNA, 19 nt, Homo sapiens
  misc_RNA (1)...(19): siRNA sense strand
ccaggcucaucaagaagua

SEQ ID NO: 521661 - RNA, 19 nt, Homo sapiens
  misc_RNA (1)...(19): siRNA sense strand
ugauagggcagauuuguga

SEQ ID NO: 521662 - RNA, 19 nt, Homo sapiens
  misc_RNA (1)...(19): siRNA sense strand
ucaccuacuuggaggaaga

SEQ ID NO: 521663 - RNA, 19 nt, Homo sapiens
  misc_RNA (1)...(19): siRNA sense strand
gaagcucacgcacaucuca

SEQ ID NO: 521664 - RNA, 19 nt, Homo sapiens
  misc_RNA (1)...(19): siRNA sense strand
cugagucccugcgcuauaa

SEQ ID NO: 521665 - RNA, 19 nt, Homo sapiens
  misc_RNA (1)...(19): siRNA sense strand
aggaggagcugauuaacuc

SEQ ID NO: 521666 - RNA, 19 nt, Homo sapiens
  misc_RNA (1)...(19): siRNA sense strand
aaggacggcuggauucaga

SEQ ID NO: 521667 - RNA, 19 nt, Homo sapiens
  misc_RNA (1)...(19): siRNA sense strand
caggagagauacuuugaac

SEQ ID NO: 521668 - RNA, 19 nt, Homo sapiens
  misc_RNA (1)...(19): siRNA sense strand
ucuuuaaggucaucaagga

SEQ ID NO: 521669 - RNA, 19 nt, Homo sapiens
  misc_RNA (1)...(19): siRNA sense strand
ggacuucaccgaguuugug

SEQ ID NO: 521670 - RNA, 19 nt, Homo sapiens
  misc_RNA (1)...(19): siRNA sense strand
ggaaauacugagagaacug

SEQ ID NO: 521671 - RNA, 19 nt, Homo sapiens
  misc_RNA (1)...(19): siRNA sense strand
gcaguaugccaguguguuc

SEQ ID NO: 521672 - RNA, 19 nt, Homo sapiens
  misc_RNA (1)...(19): siRNA sense strand
gagaucguccuguccauca

SEQ ID NO: 521673 - RNA, 19 nt, Homo sapiens
  misc_RNA (1)...(19): siRNA sense strand
gacaaugggagacacauca

SEQ ID NO: 521674 - RNA, 19 nt, Homo sapiens
  misc_RNA (1)...(19): siRNA sense strand
gaugauagggcagauuugu

SEQ ID NO: 521675 - RNA, 19 nt, Homo sapiens
  misc_RNA (1)...(19): siRNA sense strand
cagacggaguuuaucauca

SEQ ID NO: 521676 - RNA, 19 nt, Homo sapiens
  misc_RNA (1)...(19): siRNA sense strand
aaaccaacaagcaaagauu

SEQ ID NO: 521677 - RNA, 19 nt, Homo sapiens
  misc_RNA (1)...(19): siRNA sense strand
gaaguuuaagauucuguug

SEQ ID NO: 521678 - RNA, 19 nt, Homo sapiens
  misc_RNA (1)...(19): siRNA sense strand
ucgcaaggaugguucagau

SEQ ID NO: 521679 - RNA, 19 nt, Homo sapiens
  misc_RNA (1)...(19): siRNA sense strand
guucaucguuacccucugu

SEQ ID NO: 521680 - RNA, 19 nt, Homo sapiens
  misc_RNA (1)...(19): siRNA sense strand
ccucggacaucaacaacau

SEQ ID NO: 521681 - RNA, 19 nt, Homo sapiens
  misc_RNA (1)...(19): siRNA sense strand
aaccugaucuccuauagag

SEQ ID NO: 521682 - RNA, 19 nt, Homo sapiens
  misc_RNA (1)...(19): siRNA sense strand
ccgcggaaauacugagaga

SEQ ID NO: 521683 - RNA, 19 nt, Homo sapiens
  misc_RNA (1)...(19): siRNA sense strand
gcccacaccuggcuaugag

SEQ ID NO: 521684 - RNA, 19 nt, Homo sapiens
  misc_RNA (1)...(19): siRNA sense strand
gguccaauguccucuuguc

SEQ ID NO: 521685 - RNA, 19 nt, Homo sapiens
  misc_RNA (1)...(19): siRNA sense strand
gcgguccaauguccucuug

SEQ ID NO: 521686 - RNA, 19 nt, Homo sapiens
  misc_RNA (1)...(19): siRNA sense strand
gaagagcuggcugacuuug

SEQ ID NO: 521687 - RNA, 19 nt, Homo sapiens
  misc_RNA (1)...(19): siRNA sense strand
ggaggacuucaccgaguuu

SEQ ID NO: 521688 - RNA, 19 nt, Homo sapiens
  misc_RNA (1)...(19): siRNA sense strand
acgcaaauauggccucaca

SEQ ID NO: 521689 - RNA, 19 nt, Homo sapiens
  misc_RNA (1)...(19): siRNA sense strand
caacacaguggccucuuuc

SEQ ID NO: 521690 - RNA, 19 nt, Homo sapiens
  misc_RNA (1)...(19): siRNA sense strand
ggccaaaccaacaagcaaa

SEQ ID NO: 521691 - RNA, 19 nt, Homo sapiens
  misc_RNA (1)...(19): siRNA sense strand
gaacaccgaggccaaaucc

SEQ ID NO: 521692 - RNA, 19 nt, Homo sapiens
  misc_RNA (1)...(19): siRNA sense strand
gggccauggucuucgaguu

SEQ ID NO: 521693 - RNA, 19 nt, Homo sapiens
  misc_RNA (1)...(19): siRNA sense strand
ccaaacagcgcgagauggu

SEQ ID NO: 521694 - RNA, 19 nt, Homo sapiens
  misc_RNA (1)...(19): siRNA sense strand
gacauucugcugaacauca

SEQ ID NO: 521695 - RNA, 19 nt, Homo sapiens
  misc_RNA (1)...(19): siRNA sense strand
cggaugauagggcagauuu

SEQ ID NO: 521696 - RNA, 19 nt, Homo sapiens
  misc_RNA (1)...(19): siRNA sense strand
caccggcucuauucucuca

SEQ ID NO: 521697 - RNA, 19 nt, Homo sapiens
  misc_RNA (1)...(19): siRNA sense strand
ccaccugggcaacgacuuu

SEQ ID NO: 521698 - RNA, 19 nt, Homo sapiens
  misc_RNA (1)...(19): siRNA sense strand
gcugagcccugagguuaag

SEQ ID NO: 521699 - RNA, 19 nt, Homo sapiens
  misc_RNA (1)...(19): siRNA sense strand
cggcugagcgcuucaagga

SEQ ID NO: 521700 - RNA, 19 nt, Homo sapiens
  misc_RNA (1)...(19): siRNA sense strand
ggccauggucuucgaguug

SEQ ID NO: 521701 - RNA, 19 nt, Homo sapiens
  misc_RNA (1)...(19): siRNA sense strand
cagcauuaaucucuuacca

SEQ ID NO: 521702 - RNA, 19 nt, Homo sapiens
  misc_RNA (1)...(19): siRNA sense strand
cuacauggagccagagaga

SEQ ID NO: 521703 - RNA, 19 nt, Homo sapiens
  misc_RNA (1)...(19): siRNA sense strand
ccacgcguguguaugagau

SEQ ID NO: 521704 - RNA, 19 nt, Homo sapiens
  misc_RNA (1)...(19): siRNA sense strand
acgaggugguguccuauga

SEQ ID NO: 521705 - RNA, 19 nt, Homo sapiens
  misc_RNA (1)...(19): siRNA sense strand
ggccaaggacggcuggauu

SEQ ID NO: 521706 - RNA, 19 nt, Homo sapiens
  misc_RNA (1)...(19): siRNA sense strand
aagcaccgcugcgacaaga

SEQ ID NO: 521707 - RNA, 19 nt, Homo sapiens
  misc_RNA (1)...(19): siRNA sense strand
gaccagaucccaucauacg

SEQ ID NO: 521708 - RNA, 19 nt, Homo sapiens
  misc_RNA (1)...(19): siRNA sense strand
guagagagggacgccuuaa

SEQ ID NO: 521709 - RNA, 19 nt, Homo sapiens
  misc_RNA (1)...(19): siRNA sense strand
gauacgucuucuccaacuu

SEQ ID NO: 521710 - RNA, 19 nt, Homo sapiens
  misc_RNA (1)...(19): siRNA sense strand
caaguuuaaucaguacauc

SEQ ID NO: 521711 - RNA, 19 nt, Homo sapiens
  misc_RNA (1)...(19): siRNA sense strand
gggcuacgcucccuacuac

SEQ ID NO: 521712 - RNA, 19 nt, Homo sapiens
  misc_RNA (1)...(19): siRNA sense strand
gaaaagacuucaacucucu

SEQ ID NO: 521713 - RNA, 19 nt, Homo sapiens
  misc_RNA (1)...(19): siRNA sense strand
aaaagaaacugaacagaga

SEQ ID NO: 521714 - RNA, 19 nt, Homo sapiens
  misc_RNA (1)...(19): siRNA sense strand
gaagagcagcagcgcaguu

SEQ ID NO: 521715 - RNA, 19 nt, Homo sapiens
  misc_RNA (1)...(19): siRNA sense strand
gggcugcgccuacuaugug

SEQ ID NO: 521716 - RNA, 19 nt, Homo sapiens
  misc_RNA (1)...(19): siRNA sense strand
uagcaagccuucguuccuu

SEQ ID NO: 521717 - RNA, 19 nt, Homo sapiens
  misc_RNA (1)...(19): siRNA sense strand
ggccggacgugcucuucaa

SEQ ID NO: 521718 - RNA, 19 nt, Homo sapiens
  misc_RNA (1)...(19): siRNA sense strand
cagaaucgcaggaugaaag

SEQ ID NO: 521719 - RNA, 19 nt, Homo sapiens
  misc_RNA (1)...(19): siRNA sense strand
gagaaaagacuucaacucu

SEQ ID NO: 521720 - RNA, 19 nt, Homo sapiens
  misc_RNA (1)...(19): siRNA sense strand
gagcgcagccagcauguac

SEQ ID NO: 521721 - RNA, 19 nt, Homo sapiens
  misc_RNA (1)...(19): siRNA sense strand
cgucugacuucgcuagcaa

SEQ ID NO: 521722 - RNA, 19 nt, Homo sapiens
  misc_RNA (1)...(19): siRNA sense strand
aaucgcaggaugaaagaaa

SEQ ID NO: 521723 - RNA, 19 nt, Homo sapiens
  misc_RNA (1)...(19): siRNA sense strand
gcaagccuucguuccuuuc

SEQ ID NO: 521724 - RNA, 19 nt, Homo sapiens
  misc_RNA (1)...(19): siRNA sense strand
acguguacauaaacaaaga

SEQ ID NO: 521725 - RNA, 19 nt, Homo sapiens
  misc_RNA (1)...(19): siRNA sense strand
cguccugccagaugacuuu

SEQ ID NO: 521726 - RNA, 19 nt, Homo sapiens
  misc_RNA (1)...(19): siRNA sense strand
agcaagccuucguuccuuu

SEQ ID NO: 521727 - RNA, 19 nt, Homo sapiens
  misc_RNA (1)...(19): siRNA sense strand
cacagggcuucgaccaguu

SEQ ID NO: 521728 - RNA, 19 nt, Homo sapiens
  misc_RNA (1)...(19): siRNA sense strand
gaccgucugcaguauuuca

SEQ ID NO: 521729 - RNA, 19 nt, Homo sapiens
  misc_RNA (1)...(19): siRNA sense strand
ucaaagcggccaaguauga

SEQ ID NO: 521730 - RNA, 19 nt, Homo sapiens
  misc_RNA (1)...(19): siRNA sense strand
uaugugggcucgcuucuga

SEQ ID NO: 521731 - RNA, 19 nt, Homo sapiens
  misc_RNA (1)...(19): siRNA sense strand
gccagacucuuucuacuuc

SEQ ID NO: 521732 - RNA, 19 nt, Homo sapiens
  misc_RNA (1)...(19): siRNA sense strand
gaacaggcguaugaagaag

SEQ ID NO: 521733 - RNA, 19 nt, Homo sapiens
  misc_RNA (1)...(19): siRNA sense strand
ccgaagagcaggcuaaguu

SEQ ID NO: 521734 - RNA, 19 nt, Homo sapiens
  misc_RNA (1)...(19): siRNA sense strand
gcagaaacgcaaggaauug

SEQ ID NO: 521735 - RNA, 19 nt, Homo sapiens
  misc_RNA (1)...(19): siRNA sense strand
ucucaaagcggccaaguau

SEQ ID NO: 521736 - RNA, 19 nt, Homo sapiens
  misc_RNA (1)...(19): siRNA sense strand
cagaacaggcguaugaaga

SEQ ID NO: 521737 - RNA, 19 nt, Homo sapiens
  misc_RNA (1)...(19): siRNA sense strand
cuacagagcgggcuaugug

SEQ ID NO: 521738 - RNA, 19 nt, Homo sapiens
  misc_RNA (1)...(19): siRNA sense strand
ggcagaaacgcaaggaauu

SEQ ID NO: 521739 - RNA, 19 nt, Homo sapiens
  misc_RNA (1)...(19): siRNA sense strand
ggaguuggagaacgaauuc

SEQ ID NO: 521740 - RNA, 19 nt, Homo sapiens
  misc_RNA (1)...(19): siRNA sense strand
gguaaacggugcccaugcu

SEQ ID NO: 521741 - RNA, 19 nt, Homo sapiens
  misc_RNA (1)...(19): siRNA sense strand
gaaccucagcgaccagcaa

SEQ ID NO: 521742 - RNA, 19 nt, Homo sapiens
  misc_RNA (1)...(19): siRNA sense strand
agaacaggcguaugaagaa

SEQ ID NO: 521743 - RNA, 19 nt, Homo sapiens
  misc_RNA (1)...(19): siRNA sense strand
acaggcguaugaagaagaa

SEQ ID NO: 521744 - RNA, 19 nt, Homo sapiens
  misc_RNA (1)...(19): siRNA sense strand
gaagagcaggcuaaguucu

SEQ ID NO: 521745 - RNA, 19 nt, Homo sapiens
  misc_RNA (1)...(19): siRNA sense strand
ccaaagacggacccgaaga

SEQ ID NO: 521746 - RNA, 19 nt, Homo sapiens
  misc_RNA (1)...(19): siRNA sense strand
gcagcagauugcggaguug

SEQ ID NO: 521747 - RNA, 19 nt, Homo sapiens
  misc_RNA (1)...(19): siRNA sense strand
caaagacggacccgaagag

SEQ ID NO: 521748 - RNA, 19 nt, Homo sapiens
  misc_RNA (1)...(19): siRNA sense strand
ugagcgcagucucuacaga

SEQ ID NO: 521749 - RNA, 19 nt, Homo sapiens
  misc_RNA (1)...(19): siRNA sense strand
ucaacgaauucaucaacag

SEQ ID NO: 521750 - RNA, 19 nt, Homo sapiens
  misc_RNA (1)...(19): siRNA sense strand
aagagcaggcuaaguucua

SEQ ID NO: 521751 - RNA, 19 nt, Homo sapiens
  misc_RNA (1)...(19): siRNA sense strand
gucaacgaauucaucaaca

SEQ ID NO: 521752 - RNA, 19 nt, Homo sapiens
  misc_RNA (1)...(19): siRNA sense strand
agagcaggcuaaguucuau

SEQ ID NO: 521753 - RNA, 19 nt, Homo sapiens
  misc_RNA (1)...(19): siRNA sense strand
cgaagagcaggcuaaguuc

SEQ ID NO: 521754 - RNA, 19 nt, Homo sapiens
  misc_RNA (1)...(19): siRNA sense strand
gacccgaagagcaggcuaa

SEQ ID NO: 521755 - RNA, 19 nt, Homo sapiens
  misc_RNA (1)...(19): siRNA sense strand
uuccagaacaggcguauga

SEQ ID NO: 521756 - RNA, 19 nt, Homo sapiens
  misc_RNA (1)...(19): siRNA sense strand
acacgaagcagcagauugc

SEQ ID NO: 521757 - RNA, 19 nt, Homo sapiens
  misc_RNA (1)...(19): siRNA sense strand
ugggcucgcuucugaaucu

SEQ ID NO: 521758 - RNA, 19 nt, Homo sapiens
  misc_RNA (1)...(19): siRNA sense strand
cagcgaccagcaagucaaa

SEQ ID NO: 521759 - RNA, 19 nt, Homo sapiens
  misc_RNA (1)...(19): siRNA sense strand
ggaaacccuacacgaagca

SEQ ID NO: 521760 - RNA, 19 nt, Homo sapiens
  misc_RNA (1)...(19): siRNA sense strand
cagaaacgcaaggaauugu

SEQ ID NO: 521761 - RNA, 19 nt, Homo sapiens
  misc_RNA (1)...(19): siRNA sense strand
uugcggaguuggagaacga

SEQ ID NO: 521762 - RNA, 19 nt, Homo sapiens
  misc_RNA (1)...(19): siRNA sense strand
agcagcagauugcggaguu

SEQ ID NO: 521763 - RNA, 19 nt, Homo sapiens
  misc_RNA (1)...(19): siRNA sense strand
gaaggugacucaaagaaug

SEQ ID NO: 521764 - RNA, 19 nt, Homo sapiens
  misc_RNA (1)...(19): siRNA sense strand
caaagaauauccagaaggu

SEQ ID NO: 521765 - RNA, 19 nt, Homo sapiens
  misc_RNA (1)...(19): siRNA sense strand
gcaagcagaugggcgaauc

SEQ ID NO: 521766 - RNA, 19 nt, Homo sapiens
  misc_RNA (1)...(19): siRNA sense strand
caacagaagcacuuucagu

SEQ ID NO: 521767 - RNA, 19 nt, Homo sapiens
  misc_RNA (1)...(19): siRNA sense strand
acagaagcacuuucaguaa

SEQ ID NO: 521768 - RNA, 19 nt, Homo sapiens
  misc_RNA (1)...(19): siRNA sense strand
aacagaagcacuuucagua

SEQ ID NO: 521769 - RNA, 19 nt, Homo sapiens
  misc_RNA (1)...(19): siRNA sense strand
gggcgaauccuacgacaca

SEQ ID NO: 521770 - RNA, 19 nt, Homo sapiens
  misc_RNA (1)...(19): siRNA sense strand
gacaacagaagcacuuuca

SEQ ID NO: 521771 - RNA, 19 nt, Homo sapiens
  misc_RNA (1)...(19): siRNA sense strand
ccaagaauaucuggaaacg

SEQ ID NO: 521772 - RNA, 19 nt, Homo sapiens
  misc_RNA (1)...(19): siRNA sense strand
cagaaggugacucaaagaa

SEQ ID NO: 521773 - RNA, 19 nt, Homo sapiens
  misc_RNA (1)...(19): siRNA sense strand
ggacaacagaagcacuuuc

SEQ ID NO: 521774 - RNA, 19 nt, Homo sapiens
  misc_RNA (1)...(19): siRNA sense strand
gcgaauccuacgacacaaa

SEQ ID NO: 521775 - RNA, 19 nt, Homo sapiens
  misc_RNA (1)...(19): siRNA sense strand
ugacguggccgaagguauc

SEQ ID NO: 521776 - RNA, 19 nt, Homo sapiens
  misc_RNA (1)...(19): siRNA sense strand
uccagaaggugacucaaag

SEQ ID NO: 521777 - RNA, 19 nt, Homo sapiens
  misc_RNA (1)...(19): siRNA sense strand
cgccuacgccugccuagaa

SEQ ID NO: 521778 - RNA, 19 nt, Homo sapiens
  misc_RNA (1)...(19): siRNA sense strand
ugccaagaauaucuggaaa

SEQ ID NO: 521779 - RNA, 19 nt, Homo sapiens
  misc_RNA (1)...(19): siRNA sense strand
ccagaaggugacucaaaga

SEQ ID NO: 521780 - RNA, 19 nt, Homo sapiens
  misc_RNA (1)...(19): siRNA sense strand
uacaaagaauauccagaag

SEQ ID NO: 521781 - RNA, 19 nt, Homo sapiens
  misc_RNA (1)...(19): siRNA sense strand
agaaggugacucaaagaau

SEQ ID NO: 521782 - RNA, 19 nt, Homo sapiens
  misc_RNA (1)...(19): siRNA sense strand
gugcauaucuggacaagga

SEQ ID NO: 521783 - RNA, 19 nt, Homo sapiens
  misc_RNA (1)...(19): siRNA sense strand
caauaacacuacagcguuu

SEQ ID NO: 521784 - RNA, 19 nt, Homo sapiens
  misc_RNA (1)...(19): siRNA sense strand
guacucggcucuguaagga

SEQ ID NO: 521785 - RNA, 19 nt, Homo sapiens
  misc_RNA (1)...(19): siRNA sense strand
ggaugggacugucuguuuc

SEQ ID NO: 521786 - RNA, 19 nt, Homo sapiens
  misc_RNA (1)...(19): siRNA sense strand
ugacggcgcugaccaguac

SEQ ID NO: 521787 - RNA, 19 nt, Homo sapiens
  misc_RNA (1)...(19): siRNA sense strand
gaggcuggcugaagcuaug

SEQ ID NO: 521788 - RNA, 19 nt, Homo sapiens
  misc_RNA (1)...(19): siRNA sense strand
gguacgaggugcauaucug

SEQ ID NO: 521789 - RNA, 19 nt, Homo sapiens
  misc_RNA (1)...(19): siRNA sense strand
aggaagcaauugccacaaa

SEQ ID NO: 521790 - RNA, 19 nt, Homo sapiens
  misc_RNA (1)...(19): siRNA sense strand
ccggcuauguaguguauaa

SEQ ID NO: 521791 - RNA, 19 nt, Homo sapiens
  misc_RNA (1)...(19): siRNA sense strand
ccaguacucggcucuguaa

SEQ ID NO: 521792 - RNA, 19 nt, Homo sapiens
  misc_RNA (1)...(19): siRNA sense strand
ggaagcaauugccacaaaa

SEQ ID NO: 521793 - RNA, 19 nt, Homo sapiens
  misc_RNA (1)...(19): siRNA sense strand
cuacagcguuuccaauuuu

SEQ ID NO: 521794 - RNA, 19 nt, Homo sapiens
  misc_RNA (1)...(19): siRNA sense strand
ggcagucccugagcuuuga

SEQ ID NO: 521795 - RNA, 19 nt, Homo sapiens
  misc_RNA (1)...(19): siRNA sense strand
acuacagcguuuccaauuu

SEQ ID NO: 521796 - RNA, 19 nt, Homo sapiens
  misc_RNA (1)...(19): siRNA sense strand
gcuauguaguguauaaguc

SEQ ID NO: 521797 - RNA, 19 nt, Homo sapiens
  misc_RNA (1)...(19): siRNA sense strand
gccaggaugccgaaggaua

SEQ ID NO: 521798 - RNA, 19 nt, Homo sapiens
  misc_RNA (1)...(19): siRNA sense strand
aaacgugagaaccguauuu

SEQ ID NO: 521799 - RNA, 19 nt, Homo sapiens
  misc_RNA (1)...(19): siRNA sense strand
ccuguuacgugcucuguuc

SEQ ID NO: 521800 - RNA, 19 nt, Homo sapiens
  misc_RNA (1)...(19): siRNA sense strand
gaccaguacucggcucugu

SEQ ID NO: 521801 - RNA, 19 nt, Homo sapiens
  misc_RNA (1)...(19): siRNA sense strand
guauaaguccauucccuau

SEQ ID NO: 521802 - RNA, 19 nt, Homo sapiens
  misc_RNA (1)...(19): siRNA sense strand
uaccaggccugucuaaagg

SEQ ID NO: 521803 - RNA, 19 nt, Homo sapiens
  misc_RNA (1)...(19): siRNA sense strand
ggaguacaccucacugaac

SEQ ID NO: 521804 - RNA, 19 nt, Homo sapiens
  misc_RNA (1)...(19): siRNA sense strand
caaaguguugggauuacaa

SEQ ID NO: 521805 - RNA, 19 nt, Homo sapiens
  misc_RNA (1)...(19): siRNA sense strand
uggaugggacugucuguuu

SEQ ID NO: 521806 - RNA, 19 nt, Homo sapiens
  misc_RNA (1)...(19): siRNA sense strand
ggaugcuccggaccuguua

SEQ ID NO: 521807 - RNA, 19 nt, Homo sapiens
  misc_RNA (1)...(19): siRNA sense strand
guuuguggcuggugagaca

SEQ ID NO: 521808 - RNA, 19 nt, Homo sapiens
  misc_RNA (1)...(19): siRNA sense strand
ggacaacuucugggcaugu

SEQ ID NO: 521809 - RNA, 19 nt, Homo sapiens
  misc_RNA (1)...(19): siRNA sense strand
ccacaaugaggaaucuguu

SEQ ID NO: 521810 - RNA, 19 nt, Homo sapiens
  misc_RNA (1)...(19): siRNA sense strand
cuaccaggccugucuaaag

SEQ ID NO: 521811 - RNA, 19 nt, Homo sapiens
  misc_RNA (1)...(19): siRNA sense strand
cacuacagcguuuccaauu

SEQ ID NO: 521812 - RNA, 19 nt, Homo sapiens
  misc_RNA (1)...(19): siRNA sense strand
guggugaggcgugguauga

SEQ ID NO: 521813 - RNA, 19 nt, Homo sapiens
  misc_RNA (1)...(19): siRNA sense strand
gugcuaugcugcggugugu

SEQ ID NO: 521814 - RNA, 19 nt, Homo sapiens
  misc_RNA (1)...(19): siRNA sense strand
gcugguacgaggugcauau

SEQ ID NO: 521815 - RNA, 19 nt, Homo sapiens
  misc_RNA (1)...(19): siRNA sense strand
gcggaguacaccucacuga

SEQ ID NO: 521816 - RNA, 19 nt, Homo sapiens
  misc_RNA (1)...(19): siRNA sense strand
ugagaaccguauuuucaaa

SEQ ID NO: 521817 - RNA, 19 nt, Homo sapiens
  misc_RNA (1)...(19): siRNA sense strand
ugcaucggguggcacagua

SEQ ID NO: 521818 - RNA, 19 nt, Homo sapiens
  misc_RNA (1)...(19): siRNA sense strand
gacaacuucugggcaugug

SEQ ID NO: 521819 - RNA, 19 nt, Homo sapiens
  misc_RNA (1)...(19): siRNA sense strand
ucuccgagcauccgucuau

SEQ ID NO: 521820 - RNA, 19 nt, Homo sapiens
  misc_RNA (1)...(19): siRNA sense strand
gcaaggggcaguuggugaa

SEQ ID NO: 521821 - RNA, 19 nt, Homo sapiens
  misc_RNA (1)...(19): siRNA sense strand
ccaggaugccgaaggauac

SEQ ID NO: 521822 - RNA, 19 nt, Homo sapiens
  misc_RNA (1)...(19): siRNA sense strand
acuaugaggccaccaguca

SEQ ID NO: 521823 - RNA, 19 nt, Homo sapiens
  misc_RNA (1)...(19): siRNA sense strand
cggaguacaccucacugaa

SEQ ID NO: 521824 - RNA, 19 nt, Homo sapiens
  misc_RNA (1)...(19): siRNA sense strand
gcugggcauuccucuggau

SEQ ID NO: 521825 - RNA, 19 nt, Homo sapiens
  misc_RNA (1)...(19): siRNA sense strand
gaggccaccagucagaguu

SEQ ID NO: 521826 - RNA, 19 nt, Homo sapiens
  misc_RNA (1)...(19): siRNA sense strand
uaugaggccaccagucaga

SEQ ID NO: 521827 - RNA, 19 nt, Homo sapiens
  misc_RNA (1)...(19): siRNA sense strand
aaaguguugggauuacaaa

SEQ ID NO: 521828 - RNA, 19 nt, Homo sapiens
  misc_RNA (1)...(19): siRNA sense strand
caacacagccuaucuaaua

SEQ ID NO: 521829 - RNA, 19 nt, Homo sapiens
  misc_RNA (1)...(19): siRNA sense strand
gacaagagcuuccuucaaa

SEQ ID NO: 521830 - RNA, 19 nt, Homo sapiens
  misc_RNA (1)...(19): siRNA sense strand
ggaagaaggcuaugauuau

SEQ ID NO: 521831 - RNA, 19 nt, Homo sapiens
  misc_RNA (1)...(19): siRNA sense strand
ccaagcauuucaaggauua

SEQ ID NO: 521832 - RNA, 19 nt, Homo sapiens
  misc_RNA (1)...(19): siRNA sense strand
gaagaaggcuaugauuauc

SEQ ID NO: 521833 - RNA, 19 nt, Homo sapiens
  misc_RNA (1)...(19): siRNA sense strand
caaaguggcaucugcauaa

SEQ ID NO: 521834 - RNA, 19 nt, Homo sapiens
  misc_RNA (1)...(19): siRNA sense strand
ucacgacacucuuauuuca

SEQ ID NO: 521835 - RNA, 19 nt, Homo sapiens
  misc_RNA (1)...(19): siRNA sense strand
gcugaagacacacuuguua

SEQ ID NO: 521836 - RNA, 19 nt, Homo sapiens
  misc_RNA (1)...(19): siRNA sense strand
gagacgaaauggacaaagu

SEQ ID NO: 521837 - RNA, 19 nt, Homo sapiens
  misc_RNA (1)...(19): siRNA sense strand
caaccaguaugaggcaaua

SEQ ID NO: 521838 - RNA, 19 nt, Homo sapiens
  misc_RNA (1)...(19): siRNA sense strand
ucccuaaaccugugaauua

SEQ ID NO: 521839 - RNA, 19 nt, Homo sapiens
  misc_RNA (1)...(19): siRNA sense strand
uaacaacacagccuaucua

SEQ ID NO: 521840 - RNA, 19 nt, Homo sapiens
  misc_RNA (1)...(19): siRNA sense strand
cggaagaaggcuaugauua

SEQ ID NO: 521841 - RNA, 19 nt, Homo sapiens
  misc_RNA (1)...(19): siRNA sense strand
cagccuaucuaauauacaa

SEQ ID NO: 521842 - RNA, 19 nt, Homo sapiens
  misc_RNA (1)...(19): siRNA sense strand
caaggguucuggcugauuc

SEQ ID NO: 521843 - RNA, 19 nt, Homo sapiens
  misc_RNA (1)...(19): siRNA sense strand
ucaaguacaaccaguauga

SEQ ID NO: 521844 - RNA, 19 nt, Homo sapiens
  misc_RNA (1)...(19): siRNA sense strand
gaagacacacuuguuaaca

SEQ ID NO: 521845 - RNA, 19 nt, Homo sapiens
  misc_RNA (1)...(19): siRNA sense strand
caugccaagugguguauuu

SEQ ID NO: 521846 - RNA, 19 nt, Homo sapiens
  misc_RNA (1)...(19): siRNA sense strand
gaaaguauggacacaccaa

SEQ ID NO: 521847 - RNA, 19 nt, Homo sapiens
  misc_RNA (1)...(19): siRNA sense strand
agacacacuuguuaacaga

SEQ ID NO: 521848 - RNA, 19 nt, Homo sapiens
  misc_RNA (1)...(19): siRNA sense strand
ucaaacugcucccuuccuu

SEQ ID NO: 521849 - RNA, 19 nt, Homo sapiens
  misc_RNA (1)...(19): siRNA sense strand
uaucacgacacucuuauuu

SEQ ID NO: 521850 - RNA, 19 nt, Homo sapiens
  misc_RNA (1)...(19): siRNA sense strand
uaaauuaucacgacacucu

SEQ ID NO: 521851 - RNA, 19 nt, Homo sapiens
  misc_RNA (1)...(19): siRNA sense strand
gaucaugccaaguggugua

SEQ ID NO: 521852 - RNA, 19 nt, Homo sapiens
  misc_RNA (1)...(19): siRNA sense strand
gguucuggcugauucauuc

SEQ ID NO: 521853 - RNA, 19 nt, Homo sapiens
  misc_RNA (1)...(19): siRNA sense strand
acacacuuguuaacagaaa

SEQ ID NO: 521854 - RNA, 19 nt, Homo sapiens
  misc_RNA (1)...(19): siRNA sense strand
gaauuacagcagaaaguau

SEQ ID NO: 521855 - RNA, 19 nt, Homo sapiens
  misc_RNA (1)...(19): siRNA sense strand
agaaguggaggauucauuu

SEQ ID NO: 521856 - RNA, 19 nt, Homo sapiens
  misc_RNA (1)...(19): siRNA sense strand
caaacugcucccuuccuua

SEQ ID NO: 521857 - RNA, 19 nt, Homo sapiens
  misc_RNA (1)...(19): siRNA sense strand
ugaauuacagcagaaagua

SEQ ID NO: 521858 - RNA, 19 nt, Homo sapiens
  misc_RNA (1)...(19): siRNA sense strand
gaaguggaggauucauuug

SEQ ID NO: 521859 - RNA, 19 nt, Homo sapiens
  misc_RNA (1)...(19): siRNA sense strand
aguggaggauucauuugua

SEQ ID NO: 521860 - RNA, 19 nt, Homo sapiens
  misc_RNA (1)...(19): siRNA sense strand
cuaugaaagcuguaaguaa

SEQ ID NO: 521861 - RNA, 19 nt, Homo sapiens
  misc_RNA (1)...(19): siRNA sense strand
acacagccuaucuaauaua

SEQ ID NO: 521862 - RNA, 19 nt, Homo sapiens
  misc_RNA (1)...(19): siRNA sense strand
gcauuucaaggauuaguau

SEQ ID NO: 521863 - RNA, 19 nt, Homo sapiens
  misc_RNA (1)...(19): siRNA sense strand
ggccagcucaucagagauu

SEQ ID NO: 521864 - RNA, 19 nt, Homo sapiens
  misc_RNA (1)...(19): siRNA sense strand
uuaccaagcauuucaagga

SEQ ID NO: 521865 - RNA, 19 nt, Homo sapiens
  misc_RNA (1)...(19): siRNA sense strand
gacauguauuggagaccua

SEQ ID NO: 521866 - RNA, 19 nt, Homo sapiens
  misc_RNA (1)...(19): siRNA sense strand
cuuaccaugucuacaauau

SEQ ID NO: 521867 - RNA, 19 nt, Homo sapiens
  misc_RNA (1)...(19): siRNA sense strand
acaaaguggcaucugcaua

SEQ ID NO: 521868 - RNA, 19 nt, Homo sapiens
  misc_RNA (1)...(19): siRNA sense strand
uaccaagcauuucaaggau

SEQ ID NO: 521869 - RNA, 19 nt, Homo sapiens
  misc_RNA (1)...(19): siRNA sense strand
gcaucugcauaacuuucaa

SEQ ID NO: 521870 - RNA, 19 nt, Homo sapiens
  misc_RNA (1)...(19): siRNA sense strand
cagaaguggaggauucauu

SEQ ID NO: 521871 - RNA, 19 nt, Homo sapiens
  misc_RNA (1)...(19): siRNA sense strand
aacacagccuaucuaauau

SEQ ID NO: 521872 - RNA, 19 nt, Homo sapiens
  misc_RNA (1)...(19): siRNA sense strand
aauagauucucagcucuug

SEQ ID NO: 521873 - RNA, 19 nt, Homo sapiens
  misc_RNA (1)...(19): siRNA sense strand
ucauuuguacccagaauug

SEQ ID NO: 521874 - RNA, 19 nt, Homo sapiens
  misc_RNA (1)...(19): siRNA sense strand
aguggcaucugcauaacuu

SEQ ID NO: 521875 - RNA, 19 nt, Homo sapiens
  misc_RNA (1)...(19): siRNA sense strand
aauuaucacgacacucuua

SEQ ID NO: 521876 - RNA, 19 nt, Homo sapiens
  misc_RNA (1)...(19): siRNA sense strand
cugaagacacacuuguuaa

SEQ ID NO: 521877 - RNA, 19 nt, Homo sapiens
  misc_RNA (1)...(19): siRNA sense strand
cgacacucuuauuucaguu

SEQ ID NO: 521878 - RNA, 19 nt, Homo sapiens
  misc_RNA (1)...(19): siRNA sense strand
guaacaacacagccuaucu

SEQ ID NO: 521879 - RNA, 19 nt, Homo sapiens
  misc_RNA (1)...(19): siRNA sense strand
aagguuuacugcuguggaa

SEQ ID NO: 521880 - RNA, 19 nt, Homo sapiens
  misc_RNA (1)...(19): siRNA sense strand
agacaagagcuuccuucaa

SEQ ID NO: 521881 - RNA, 19 nt, Homo sapiens
  misc_RNA (1)...(19): siRNA sense strand
accaggagcucauucacau

SEQ ID NO: 521882 - RNA, 19 nt, Homo sapiens
  misc_RNA (1)...(19): siRNA sense strand
caauagauucucagcucuu

SEQ ID NO: 521883 - RNA, 19 nt, Homo sapiens
  misc_RNA (1)...(19): siRNA sense strand
cacagccuaucuaauauac

SEQ ID NO: 521884 - RNA, 19 nt, Homo sapiens
  misc_RNA (1)...(19): siRNA sense strand
acaaugauggagucccuaa

SEQ ID NO: 521885 - RNA, 19 nt, Homo sapiens
  misc_RNA (1)...(19): siRNA sense strand
ggacacaccaaagguuuac

SEQ ID NO: 521886 - RNA, 19 nt, Homo sapiens
  misc_RNA (1)...(19): siRNA sense strand
agaaggcuaugauuaucca

SEQ ID NO: 521887 - RNA, 19 nt, Homo sapiens
  misc_RNA (1)...(19): siRNA sense strand
caagagcuuccuucaaacu

SEQ ID NO: 521888 - RNA, 19 nt, Homo sapiens
  misc_RNA (1)...(19): siRNA sense strand
guggaggauucauuuguac

SEQ ID NO: 521889 - RNA, 19 nt, Homo sapiens
  misc_RNA (1)...(19): siRNA sense strand
aaacugcucccuuccuuac

SEQ ID NO: 521890 - RNA, 19 nt, Homo sapiens
  misc_RNA (1)...(19): siRNA sense strand
caccagggccagcucauca

SEQ ID NO: 521891 - RNA, 19 nt, Homo sapiens
  misc_RNA (1)...(19): siRNA sense strand
ccacaccaagccuucagaa

SEQ ID NO: 521892 - RNA, 19 nt, Homo sapiens
  misc_RNA (1)...(19): siRNA sense strand
aacaacacagccuaucuaa

SEQ ID NO: 521893 - RNA, 19 nt, Homo sapiens
  misc_RNA (1)...(19): siRNA sense strand
cucaacggcugaagacaca

SEQ ID NO: 521894 - RNA, 19 nt, Homo sapiens
  misc_RNA (1)...(19): siRNA sense strand
gcaggcuccucaccacacu

SEQ ID NO: 521895 - RNA, 19 nt, Homo sapiens
  misc_RNA (1)...(19): siRNA sense strand
uggacacaccaaagguuua

SEQ ID NO: 521896 - RNA, 19 nt, Homo sapiens
  misc_RNA (1)...(19): siRNA sense strand
gugaauuacagcagaaagu

SEQ ID NO: 521897 - RNA, 19 nt, Homo sapiens
  misc_RNA (1)...(19): siRNA sense strand
aagacacacuuguuaacag

SEQ ID NO: 521898 - RNA, 19 nt, Homo sapiens
  misc_RNA (1)...(19): siRNA sense strand
agggccagcucaucagaga

SEQ ID NO: 521899 - RNA, 19 nt, Homo sapiens
  misc_RNA (1)...(19): siRNA sense strand
acgacacucuuauuucagu

SEQ ID NO: 521900 - RNA, 19 nt, Homo sapiens
  misc_RNA (1)...(19): siRNA sense strand
gaguaacaacacagccuau

SEQ ID NO: 521901 - RNA, 19 nt, Homo sapiens
  misc_RNA (1)...(19): siRNA sense strand
caguaugaggcaauagauu

SEQ ID NO: 521902 - RNA, 19 nt, Homo sapiens
  misc_RNA (1)...(19): siRNA sense strand
aguaugaggcaauagauuc

SEQ ID NO: 521903 - RNA, 19 nt, Homo sapiens
  misc_RNA (1)...(19): siRNA sense strand
agacgaaauggacaaagug

SEQ ID NO: 521904 - RNA, 19 nt, Homo sapiens
  misc_RNA (1)...(19): siRNA sense strand
acuaugaaagcuguaagua

SEQ ID NO: 521905 - RNA, 19 nt, Homo sapiens
  misc_RNA (1)...(19): siRNA sense strand
accaagcauuucaaggauu

SEQ ID NO: 521906 - RNA, 19 nt, Homo sapiens
  misc_RNA (1)...(19): siRNA sense strand
acaagagcuuccuucaaac

SEQ ID NO: 521907 - RNA, 19 nt, Homo sapiens
  misc_RNA (1)...(19): siRNA sense strand
ugaagacacacuuguuaac

SEQ ID NO: 521908 - RNA, 19 nt, Homo sapiens
  misc_RNA (1)...(19): siRNA sense strand
gacaagagcuuccuucaaa

SEQ ID NO: 521909 - RNA, 19 nt, Homo sapiens
  misc_RNA (1)...(19): siRNA sense strand
ccaagcauuucaaggauua

SEQ ID NO: 521910 - RNA, 19 nt, Homo sapiens
  misc_RNA (1)...(19): siRNA sense strand
ucacgacacucuuauuuca

SEQ ID NO: 521911 - RNA, 19 nt, Homo sapiens
  misc_RNA (1)...(19): siRNA sense strand
gcugaagacacacuuguua

SEQ ID NO: 521912 - RNA, 19 nt, Homo sapiens
  misc_RNA (1)...(19): siRNA sense strand
gaagacacacuuguuaaca

SEQ ID NO: 521913 - RNA, 19 nt, Homo sapiens
  misc_RNA (1)...(19): siRNA sense strand
caugccaagugguguauuu

SEQ ID NO: 521914 - RNA, 19 nt, Homo sapiens
  misc_RNA (1)...(19): siRNA sense strand
agacacacuuguuaacaga

SEQ ID NO: 521915 - RNA, 19 nt, Homo sapiens
  misc_RNA (1)...(19): siRNA sense strand
ucaaacugcucccuuccuu

SEQ ID NO: 521916 - RNA, 19 nt, Homo sapiens
  misc_RNA (1)...(19): siRNA sense strand
uaucacgacacucuuauuu

SEQ ID NO: 521917 - RNA, 19 nt, Homo sapiens
  misc_RNA (1)...(19): siRNA sense strand
uaaauuaucacgacacucu

SEQ ID NO: 521918 - RNA, 19 nt, Homo sapiens
  misc_RNA (1)...(19): siRNA sense strand
gaucaugccaaguggugua

SEQ ID NO: 521919 - RNA, 19 nt, Homo sapiens
  misc_RNA (1)...(19): siRNA sense strand
acacacuuguuaacagaaa

SEQ ID NO: 521920 - RNA, 19 nt, Homo sapiens
  misc_RNA (1)...(19): siRNA sense strand
caaacugcucccuuccuua

SEQ ID NO: 521921 - RNA, 19 nt, Homo sapiens
  misc_RNA (1)...(19): siRNA sense strand
agaaguggaggauucauuu

SEQ ID NO: 521922 - RNA, 19 nt, Homo sapiens
  misc_RNA (1)...(19): siRNA sense strand
gaaguggaggauucauuug

SEQ ID NO: 521923 - RNA, 19 nt, Homo sapiens
  misc_RNA (1)...(19): siRNA sense strand
aguggaggauucauuugua

SEQ ID NO: 521924 - RNA, 19 nt, Homo sapiens
  misc_RNA (1)...(19): siRNA sense strand
cuaugaaagcuguaaguaa

SEQ ID NO: 521925 - RNA, 19 nt, Homo sapiens
  misc_RNA (1)...(19): siRNA sense strand
gcauuucaaggauuaguau

SEQ ID NO: 521926 - RNA, 19 nt, Homo sapiens
  misc_RNA (1)...(19): siRNA sense strand
ggccagcucaucagagauu

SEQ ID NO: 521927 - RNA, 19 nt, Homo sapiens
  misc_RNA (1)...(19): siRNA sense strand
uuaccaagcauuucaagga

SEQ ID NO: 521928 - RNA, 19 nt, Homo sapiens
  misc_RNA (1)...(19): siRNA sense strand
gacauguauuggagaccua

SEQ ID NO: 521929 - RNA, 19 nt, Homo sapiens
  misc_RNA (1)...(19): siRNA sense strand
cuuaccaugucuacaauau

SEQ ID NO: 521930 - RNA, 19 nt, Homo sapiens
  misc_RNA (1)...(19): siRNA sense strand
uaccaagcauuucaaggau

SEQ ID NO: 521931 - RNA, 19 nt, Homo sapiens
  misc_RNA (1)...(19): siRNA sense strand
cagaaguggaggauucauu

SEQ ID NO: 521932 - RNA, 19 nt, Homo sapiens
  misc_RNA (1)...(19): siRNA sense strand
ucauuuguacccagaauug

SEQ ID NO: 521933 - RNA, 19 nt, Homo sapiens
  misc_RNA (1)...(19): siRNA sense strand
aauuaucacgacacucuua

SEQ ID NO: 521934 - RNA, 19 nt, Homo sapiens
  misc_RNA (1)...(19): siRNA sense strand
cugaagacacacuuguuaa

SEQ ID NO: 521935 - RNA, 19 nt, Homo sapiens
  misc_RNA (1)...(19): siRNA sense strand
cgacacucuuauuucaguu

SEQ ID NO: 521936 - RNA, 19 nt, Homo sapiens
  misc_RNA (1)...(19): siRNA sense strand
agacaagagcuuccuucaa

SEQ ID NO: 521937 - RNA, 19 nt, Homo sapiens
  misc_RNA (1)...(19): siRNA sense strand
caagagcuuccuucaaacu

SEQ ID NO: 521938 - RNA, 19 nt, Homo sapiens
  misc_RNA (1)...(19): siRNA sense strand
guggaggauucauuuguac

SEQ ID NO: 521939 - RNA, 19 nt, Homo sapiens
  misc_RNA (1)...(19): siRNA sense strand
aaacugcucccuuccuuac

SEQ ID NO: 521940 - RNA, 19 nt, Homo sapiens
  misc_RNA (1)...(19): siRNA sense strand
ccacaccaagccuucagaa

SEQ ID NO: 521941 - RNA, 19 nt, Homo sapiens
  misc_RNA (1)...(19): siRNA sense strand
caccagggccagcucauca

SEQ ID NO: 521942 - RNA, 19 nt, Homo sapiens
  misc_RNA (1)...(19): siRNA sense strand
cucaacggcugaagacaca

SEQ ID NO: 521943 - RNA, 19 nt, Homo sapiens
  misc_RNA (1)...(19): siRNA sense strand
gcaggcuccucaccacacu

SEQ ID NO: 521944 - RNA, 19 nt, Homo sapiens
  misc_RNA (1)...(19): siRNA sense strand
aagacacacuuguuaacag

SEQ ID NO: 521945 - RNA, 19 nt, Homo sapiens
  misc_RNA (1)...(19): siRNA sense strand
acgacacucuuauuucagu

SEQ ID NO: 521946 - RNA, 19 nt, Homo sapiens
  misc_RNA (1)...(19): siRNA sense strand
agggccagcucaucagaga

SEQ ID NO: 521947 - RNA, 19 nt, Homo sapiens
  misc_RNA (1)...(19): siRNA sense strand
ugaagacacacuuguuaac

SEQ ID NO: 521948 - RNA, 19 nt, Homo sapiens
  misc_RNA (1)...(19): siRNA sense strand
acuaugaaagcuguaagua

SEQ ID NO: 521949 - RNA, 19 nt, Homo sapiens
  misc_RNA (1)...(19): siRNA sense strand
accaagcauuucaaggauu

SEQ ID NO: 521950 - RNA, 19 nt, Homo sapiens
  misc_RNA (1)...(19): siRNA sense strand
acaagagcuuccuucaaac

SEQ ID NO: 521951 - RNA, 19 nt, Homo sapiens
  misc_RNA (1)...(19): siRNA sense strand
gggacaacgucaucaaaua

SEQ ID NO: 521952 - RNA, 19 nt, Homo sapiens
  misc_RNA (1)...(19): siRNA sense strand
ggacgaggaugaagacaug

SEQ ID NO: 521953 - RNA, 19 nt, Homo sapiens
  misc_RNA (1)...(19): siRNA sense strand
ggacaaucaugcacagcua

SEQ ID NO: 521954 - RNA, 19 nt, Homo sapiens
  misc_RNA (1)...(19): siRNA sense strand
gacaugacuuaccaccuua

SEQ ID NO: 521955 - RNA, 19 nt, Homo sapiens
  misc_RNA (1)...(19): siRNA sense strand
ggagagaacacagacauga

SEQ ID NO: 521956 - RNA, 19 nt, Homo sapiens
  misc_RNA (1)...(19): siRNA sense strand
agacaugacuuaccaccuu

SEQ ID NO: 521957 - RNA, 19 nt, Homo sapiens
  misc_RNA (1)...(19): siRNA sense strand
gagccagacuucucagugu

SEQ ID NO: 521958 - RNA, 19 nt, Homo sapiens
  misc_RNA (1)...(19): siRNA sense strand
gaccagaucuucgauaucg

SEQ ID NO: 521959 - RNA, 19 nt, Homo sapiens
  misc_RNA (1)...(19): siRNA sense strand
ucacagugcuggccaugga

SEQ ID NO: 521960 - RNA, 19 nt, Homo sapiens
  misc_RNA (1)...(19): siRNA sense strand
cagcaacccucauuucucu

SEQ ID NO: 521961 - RNA, 19 nt, Homo sapiens
  misc_RNA (1)...(19): siRNA sense strand
cagaagauguaccaguuca

SEQ ID NO: 521962 - RNA, 19 nt, Homo sapiens
  misc_RNA (1)...(19): siRNA sense strand
ggacaacgucaucaaauac

SEQ ID NO: 521963 - RNA, 19 nt, Homo sapiens
  misc_RNA (1)...(19): siRNA sense strand
acacagacaugacuuacca

SEQ ID NO: 521964 - RNA, 19 nt, Homo sapiens
  misc_RNA (1)...(19): siRNA sense strand
cgcagaagauguaccaguu

SEQ ID NO: 521965 - RNA, 19 nt, Homo sapiens
  misc_RNA (1)...(19): siRNA sense strand
gcacggagccccuguaugu

SEQ ID NO: 521966 - RNA, 19 nt, Homo sapiens
  misc_RNA (1)...(19): siRNA sense strand
gagcaggacuucgccuauc

SEQ ID NO: 521967 - RNA, 19 nt, Homo sapiens
  misc_RNA (1)...(19): siRNA sense strand
caucaaauacaacgacgaa

SEQ ID NO: 521968 - RNA, 19 nt, Homo sapiens
  misc_RNA (1)...(19): siRNA sense strand
caagauccacuccgacuca

SEQ ID NO: 521969 - RNA, 19 nt, Homo sapiens
  misc_RNA (1)...(19): siRNA sense strand
caccgaagccuacgacaug

SEQ ID NO: 521970 - RNA, 19 nt, Homo sapiens
  misc_RNA (1)...(19): siRNA sense strand
ccacagacagcgacacuca

SEQ ID NO: 521971 - RNA, 19 nt, Homo sapiens
  misc_RNA (1)...(19): siRNA sense strand
ucaggaggccaucaucgua

SEQ ID NO: 521972 - RNA, 19 nt, Homo sapiens
  misc_RNA (1)...(19): siRNA sense strand
gaacacagacaugacuuac

SEQ ID NO: 521973 - RNA, 19 nt, Homo sapiens
  misc_RNA (1)...(19): siRNA sense strand
gggcaccgcuucuauuucc

SEQ ID NO: 521974 - RNA, 19 nt, Homo sapiens
  misc_RNA (1)...(19): siRNA sense strand
ccauggaggcggacaauca

SEQ ID NO: 521975 - RNA, 19 nt, Homo sapiens
  misc_RNA (1)...(19): siRNA sense strand
gauccaggccacagacaug

SEQ ID NO: 521976 - RNA, 19 nt, Homo sapiens
  misc_RNA (1)...(19): siRNA sense strand
uggaccagaucuucgauau

SEQ ID NO: 521977 - RNA, 19 nt, Homo sapiens
  misc_RNA (1)...(19): siRNA sense strand
gcagaagauguaccaguuc

SEQ ID NO: 521978 - RNA, 19 nt, Homo sapiens
  misc_RNA (1)...(19): siRNA sense strand
agaacacagacaugacuua

SEQ ID NO: 521979 - RNA, 19 nt, Homo sapiens
  misc_RNA (1)...(19): siRNA sense strand
gcuacgagguggugaucca

SEQ ID NO: 521980 - RNA, 19 nt, Homo sapiens
  misc_RNA (1)...(19): siRNA sense strand
gcacaggcacgcucaccau

SEQ ID NO: 521981 - RNA, 19 nt, Homo sapiens
  misc_RNA (1)...(19): siRNA sense strand
gagucggaguucaucauca

SEQ ID NO: 521982 - RNA, 19 nt, Homo sapiens
  misc_RNA (1)...(19): siRNA sense strand
gcaacaccacggccuuugu

SEQ ID NO: 521983 - RNA, 19 nt, Homo sapiens
  misc_RNA (1)...(19): siRNA sense strand
agucggaguucaucaucaa

SEQ ID NO: 521984 - RNA, 19 nt, Homo sapiens
  misc_RNA (1)...(19): siRNA sense strand
ccauugaccgcgaaucaga

SEQ ID NO: 521985 - RNA, 19 nt, Homo sapiens
  misc_RNA (1)...(19): siRNA sense strand
acaacgucaucaaauacaa

SEQ ID NO: 521986 - RNA, 19 nt, Homo sapiens
  misc_RNA (1)...(19): siRNA sense strand
gcgggacaacgucaucaaa

SEQ ID NO: 521987 - RNA, 19 nt, Homo sapiens
  misc_RNA (1)...(19): siRNA sense strand
cgauaucgaugcggacaca

SEQ ID NO: 521988 - RNA, 19 nt, Homo sapiens
  misc_RNA (1)...(19): siRNA sense strand
gcggcgauguguucaaggu

SEQ ID NO: 521989 - RNA, 19 nt, Homo sapiens
  misc_RNA (1)...(19): siRNA sense strand
gacaacgucaucaaauaca

SEQ ID NO: 521990 - RNA, 19 nt, Homo sapiens
  misc_RNA (1)...(19): siRNA sense strand
caccacggccuuugucaug

SEQ ID NO: 521991 - RNA, 19 nt, Homo sapiens
  misc_RNA (1)...(19): siRNA sense strand
ggcaggagcaggacguguu

SEQ ID NO: 521992 - RNA, 19 nt, Homo sapiens
  misc_RNA (1)...(19): siRNA sense strand
gccgagcucucaccuacag

SEQ ID NO: 521993 - RNA, 19 nt, Homo sapiens
  misc_RNA (1)...(19): siRNA sense strand
gagaacacagacaugacuu

SEQ ID NO: 521994 - RNA, 19 nt, Homo sapiens
  misc_RNA (1)...(19): siRNA sense strand
acucagacgugggagagaa

SEQ ID NO: 521995 - RNA, 19 nt, Homo sapiens
  misc_RNA (1)...(19): siRNA sense strand
caucaaguacaccaucuca

SEQ ID NO: 521996 - RNA, 19 nt, Homo sapiens
  misc_RNA (1)...(19): siRNA sense strand
gcaggagcaggacguguuc

SEQ ID NO: 521997 - RNA, 19 nt, Homo sapiens
  misc_RNA (1)...(19): siRNA sense strand
ccacuaccgucaccaucgu

SEQ ID NO: 521998 - RNA, 19 nt, Homo sapiens
  misc_RNA (1)...(19): siRNA sense strand
caacaccacggccuuuguc

SEQ ID NO: 521999 - RNA, 19 nt, Homo sapiens
  misc_RNA (1)...(19): siRNA sense strand
gugcaggacaucaaugaca

SEQ ID NO: 522000 - RNA, 19 nt, Homo sapiens
  misc_RNA (1)...(19): siRNA sense strand
gcucccagcaacccucauu

SEQ ID NO: 522001 - RNA, 19 nt, Homo sapiens
  misc_RNA (1)...(19): siRNA sense strand
ggaccagaucuucgauauc

SEQ ID NO: 522002 - RNA, 19 nt, Homo sapiens
  misc_RNA (1)...(19): siRNA sense strand
caaggugcaggacaucaau

SEQ ID NO: 522003 - RNA, 19 nt, Homo sapiens
  misc_RNA (1)...(19): siRNA sense strand
ggaccaucuuccugaucga

SEQ ID NO: 522004 - RNA, 19 nt, Homo sapiens
  misc_RNA (1)...(19): siRNA sense strand
gagcugacaggcgacauuc

SEQ ID NO: 522005 - RNA, 19 nt, Homo sapiens
  misc_RNA (1)...(19): siRNA sense strand
cagcucauccagaccauca

SEQ ID NO: 522006 - RNA, 19 nt, Homo sapiens
  misc_RNA (1)...(19): siRNA sense strand
cguagucaccgacgucaau

SEQ ID NO: 522007 - RNA, 19 nt, Homo sapiens
  misc_RNA (1)...(19): siRNA sense strand
ccagacuucucaguguuca

SEQ ID NO: 522008 - RNA, 19 nt, Homo sapiens
  misc_RNA (1)...(19): siRNA sense strand
ucaucaaggugcaggacau

SEQ ID NO: 522009 - RNA, 19 nt, Homo sapiens
  misc_RNA (1)...(19): siRNA sense strand
ggagcaggacguguucuuc

SEQ ID NO: 522010 - RNA, 19 nt, Homo sapiens
  misc_RNA (1)...(19): siRNA sense strand
ucagcgugguggacagaga

SEQ ID NO: 522011 - RNA, 19 nt, Homo sapiens
  misc_RNA (1)...(19): siRNA sense strand
gacaaucaugcacagcuau

SEQ ID NO: 522012 - RNA, 19 nt, Homo sapiens
  misc_RNA (1)...(19): siRNA sense strand
uguucaaggucaccacaga

SEQ ID NO: 522013 - RNA, 19 nt, Homo sapiens
  misc_RNA (1)...(19): siRNA sense strand
gcaacccucauuucucucu

SEQ ID NO: 522014 - RNA, 19 nt, Homo sapiens
  misc_RNA (1)...(19): siRNA sense strand
ucaaggugcaggacaucaa

SEQ ID NO: 522015 - RNA, 19 nt, Homo sapiens
  misc_RNA (1)...(19): siRNA sense strand
gcugacaggcgacauucau

SEQ ID NO: 522016 - RNA, 19 nt, Homo sapiens
  misc_RNA (1)...(19): siRNA sense strand
cgagcugacaggcgacauu

SEQ ID NO: 522017 - RNA, 19 nt, Homo sapiens
  misc_RNA (1)...(19): siRNA sense strand
gccaucaaguacaccaucu

SEQ ID NO: 522018 - RNA, 19 nt, Homo sapiens
  misc_RNA (1)...(19): siRNA sense strand
cuacgaggcagcuguaugc

SEQ ID NO: 522019 - RNA, 19 nt, Homo sapiens
  misc_RNA (1)...(19): siRNA sense strand
gggagagaacacagacaug

SEQ ID NO: 522020 - RNA, 19 nt, Homo sapiens
  misc_RNA (1)...(19): siRNA sense strand
gcaccauccaguccugcaa

SEQ ID NO: 522021 - RNA, 19 nt, Homo sapiens
  misc_RNA (1)...(19): siRNA sense strand
ggaauaccgucugguuaaa

SEQ ID NO: 522022 - RNA, 19 nt, Homo sapiens
  misc_RNA (1)...(19): siRNA sense strand
gaacgugacccuccagugu

SEQ ID NO: 522023 - RNA, 19 nt, Homo sapiens
  misc_RNA (1)...(19): siRNA sense strand
ggagauaccgcuguuacua

SEQ ID NO: 522024 - RNA, 19 nt, Homo sapiens
  misc_RNA (1)...(19): siRNA sense strand
caacaaacccacccucuca

SEQ ID NO: 522025 - RNA, 19 nt, Homo sapiens
  misc_RNA (1)...(19): siRNA sense strand
caggaauaccgucugguua

SEQ ID NO: 522026 - RNA, 19 nt, Homo sapiens
  misc_RNA (1)...(19): siRNA sense strand
ccaagaacaaggccagauu

SEQ ID NO: 522027 - RNA, 19 nt, Homo sapiens
  misc_RNA (1)...(19): siRNA sense strand
acagguggaugcucagaug

SEQ ID NO: 522028 - RNA, 19 nt, Homo sapiens
  misc_RNA (1)...(19): siRNA sense strand
gguggaugcucagaugcua

SEQ ID NO: 522029 - RNA, 19 nt, Homo sapiens
  misc_RNA (1)...(19): siRNA sense strand
aggaauaccgucugguuaa

SEQ ID NO: 522030 - RNA, 19 nt, Homo sapiens
  misc_RNA (1)...(19): siRNA sense strand
caagaacaaggccagauuc

SEQ ID NO: 522031 - RNA, 19 nt, Homo sapiens
  misc_RNA (1)...(19): siRNA sense strand
aauaccgucugguuaaaga

SEQ ID NO: 522032 - RNA, 19 nt, Homo sapiens
  misc_RNA (1)...(19): siRNA sense strand
guggugaccucaggagaga

SEQ ID NO: 522033 - RNA, 19 nt, Homo sapiens
  misc_RNA (1)...(19): siRNA sense strand
gagauucgacagguucauu

SEQ ID NO: 522034 - RNA, 19 nt, Homo sapiens
  misc_RNA (1)...(19): siRNA sense strand
acagguucauucugacuga

SEQ ID NO: 522035 - RNA, 19 nt, Homo sapiens
  misc_RNA (1)...(19): siRNA sense strand
gagauaccgcuguuacuac

SEQ ID NO: 522036 - RNA, 19 nt, Homo sapiens
  misc_RNA (1)...(19): siRNA sense strand
aggcauauccugcagguau

SEQ ID NO: 522037 - RNA, 19 nt, Homo sapiens
  misc_RNA (1)...(19): siRNA sense strand
uucgacagguucauucuga

SEQ ID NO: 522038 - RNA, 19 nt, Homo sapiens
  misc_RNA (1)...(19): siRNA sense strand
uaaagagggaagcccagaa

SEQ ID NO: 522039 - RNA, 19 nt, Homo sapiens
  misc_RNA (1)...(19): siRNA sense strand
cacuggagcccaagaacaa

SEQ ID NO: 522040 - RNA, 19 nt, Homo sapiens
  misc_RNA (1)...(19): siRNA sense strand
gcccugcccucaugguucu

SEQ ID NO: 522041 - RNA, 19 nt, Homo sapiens
  misc_RNA (1)...(19): siRNA sense strand
gaauaccgucugguuaaag

SEQ ID NO: 522042 - RNA, 19 nt, Homo sapiens
  misc_RNA (1)...(19): siRNA sense strand
ccacuggagcccaagaaca

SEQ ID NO: 522043 - RNA, 19 nt, Homo sapiens
  misc_RNA (1)...(19): siRNA sense strand
gagcccugcccucaugguu

SEQ ID NO: 522044 - RNA, 19 nt, Homo sapiens
  misc_RNA (1)...(19): siRNA sense strand
agauaccgcuguuacuacu

SEQ ID NO: 522045 - RNA, 19 nt, Homo sapiens
  misc_RNA (1)...(19): siRNA sense strand
ggaauaccgucugguuaaa

SEQ ID NO: 522046 - RNA, 19 nt, Homo sapiens
  misc_RNA (1)...(19): siRNA sense strand
gaacgugacccuccagugu

SEQ ID NO: 522047 - RNA, 19 nt, Homo sapiens
  misc_RNA (1)...(19): siRNA sense strand
ggagauaccgcuguuacua

SEQ ID NO: 522048 - RNA, 19 nt, Homo sapiens
  misc_RNA (1)...(19): siRNA sense strand
caacaaacccacccucuca

SEQ ID NO: 522049 - RNA, 19 nt, Homo sapiens
  misc_RNA (1)...(19): siRNA sense strand
caggaauaccgucugguua

SEQ ID NO: 522050 - RNA, 19 nt, Homo sapiens
  misc_RNA (1)...(19): siRNA sense strand
ccaagaacaaggccagauu

SEQ ID NO: 522051 - RNA, 19 nt, Homo sapiens
  misc_RNA (1)...(19): siRNA sense strand
acagguggaugcucagaug

SEQ ID NO: 522052 - RNA, 19 nt, Homo sapiens
  misc_RNA (1)...(19): siRNA sense strand
gguggaugcucagaugcua

SEQ ID NO: 522053 - RNA, 19 nt, Homo sapiens
  misc_RNA (1)...(19): siRNA sense strand
aggaauaccgucugguuaa

SEQ ID NO: 522054 - RNA, 19 nt, Homo sapiens
  misc_RNA (1)...(19): siRNA sense strand
caagaacaaggccagauuc

SEQ ID NO: 522055 - RNA, 19 nt, Homo sapiens
  misc_RNA (1)...(19): siRNA sense strand
aauaccgucugguuaaaga

SEQ ID NO: 522056 - RNA, 19 nt, Homo sapiens
  misc_RNA (1)...(19): siRNA sense strand
guggugaccucaggagaga

SEQ ID NO: 522057 - RNA, 19 nt, Homo sapiens
  misc_RNA (1)...(19): siRNA sense strand
gagauucgacagguucauu

SEQ ID NO: 522058 - RNA, 19 nt, Homo sapiens
  misc_RNA (1)...(19): siRNA sense strand
acagguucauucugacuga

SEQ ID NO: 522059 - RNA, 19 nt, Homo sapiens
  misc_RNA (1)...(19): siRNA sense strand
gagauaccgcuguuacuac

SEQ ID NO: 522060 - RNA, 19 nt, Homo sapiens
  misc_RNA (1)...(19): siRNA sense strand
aggcauauccugcagguau

SEQ ID NO: 522061 - RNA, 19 nt, Homo sapiens
  misc_RNA (1)...(19): siRNA sense strand
uucgacagguucauucuga

SEQ ID NO: 522062 - RNA, 19 nt, Homo sapiens
  misc_RNA (1)...(19): siRNA sense strand
uaaagagggaagcccagaa

SEQ ID NO: 522063 - RNA, 19 nt, Homo sapiens
  misc_RNA (1)...(19): siRNA sense strand
cacuggagcccaagaacaa

SEQ ID NO: 522064 - RNA, 19 nt, Homo sapiens
  misc_RNA (1)...(19): siRNA sense strand
gcccugcccucaugguucu

SEQ ID NO: 522065 - RNA, 19 nt, Homo sapiens
  misc_RNA (1)...(19): siRNA sense strand
gaauaccgucugguuaaag

SEQ ID NO: 522066 - RNA, 19 nt, Homo sapiens
  misc_RNA (1)...(19): siRNA sense strand
ccacuggagcccaagaaca

SEQ ID NO: 522067 - RNA, 19 nt, Homo sapiens
  misc_RNA (1)...(19): siRNA sense strand
gagcccugcccucaugguu

SEQ ID NO: 522068 - RNA, 19 nt, Homo sapiens
  misc_RNA (1)...(19): siRNA sense strand
agauaccgcuguuacuacu

SEQ ID NO: 522069 - RNA, 19 nt, Homo sapiens
  misc_RNA (1)...(19): siRNA sense strand
ggaauaccgucugguuaaa

SEQ ID NO: 522070 - RNA, 19 nt, Homo sapiens
  misc_RNA (1)...(19): siRNA sense strand
gaacgugacccuccagugu

SEQ ID NO: 522071 - RNA, 19 nt, Homo sapiens
  misc_RNA (1)...(19): siRNA sense strand
ggagauaccgcuguuacua

SEQ ID NO: 522072 - RNA, 19 nt, Homo sapiens
  misc_RNA (1)...(19): siRNA sense strand
caacaaacccacccucuca

SEQ ID NO: 522073 - RNA, 19 nt, Homo sapiens
  misc_RNA (1)...(19): siRNA sense strand
caggaauaccgucugguua

SEQ ID NO: 522074 - RNA, 19 nt, Homo sapiens
  misc_RNA (1)...(19): siRNA sense strand
ccaagaacaaggccagauu

SEQ ID NO: 522075 - RNA, 19 nt, Homo sapiens
  misc_RNA (1)...(19): siRNA sense strand
acagguggaugcucagaug

SEQ ID NO: 522076 - RNA, 19 nt, Homo sapiens
  misc_RNA (1)...(19): siRNA sense strand
gguggaugcucagaugcua

SEQ ID NO: 522077 - RNA, 19 nt, Homo sapiens
  misc_RNA (1)...(19): siRNA sense strand
aggaauaccgucugguuaa

SEQ ID NO: 522078 - RNA, 19 nt, Homo sapiens
  misc_RNA (1)...(19): siRNA sense strand
caagaacaaggccagauuc

SEQ ID NO: 522079 - RNA, 19 nt, Homo sapiens
  misc_RNA (1)...(19): siRNA sense strand
aauaccgucugguuaaaga

SEQ ID NO: 522080 - RNA, 19 nt, Homo sapiens
  misc_RNA (1)...(19): siRNA sense strand
guggugaccucaggagaga

SEQ ID NO: 522081 - RNA, 19 nt, Homo sapiens
  misc_RNA (1)...(19): siRNA sense strand
gagauucgacagguucauu

SEQ ID NO: 522082 - RNA, 19 nt, Homo sapiens
  misc_RNA (1)...(19): siRNA sense strand
acagguucauucugacuga

SEQ ID NO: 522083 - RNA, 19 nt, Homo sapiens
  misc_RNA (1)...(19): siRNA sense strand
gagauaccgcuguuacuac

SEQ ID NO: 522084 - RNA, 19 nt, Homo sapiens
  misc_RNA (1)...(19): siRNA sense strand
aggcauauccugcagguau

SEQ ID NO: 522085 - RNA, 19 nt, Homo sapiens
  misc_RNA (1)...(19): siRNA sense strand
uucgacagguucauucuga

SEQ ID NO: 522086 - RNA, 19 nt, Homo sapiens
  misc_RNA (1)...(19): siRNA sense strand
uaaagagggaagcccagaa

SEQ ID NO: 522087 - RNA, 19 nt, Homo sapiens
  misc_RNA (1)...(19): siRNA sense strand
cacuggagcccaagaacaa

SEQ ID NO: 522088 - RNA, 19 nt, Homo sapiens
  misc_RNA (1)...(19): siRNA sense strand
gcccugcccucaugguucu

SEQ ID NO: 522089 - RNA, 19 nt, Homo sapiens
  misc_RNA (1)...(19): siRNA sense strand
gaauaccgucugguuaaag

SEQ ID NO: 522090 - RNA, 19 nt, Homo sapiens
  misc_RNA (1)...(19): siRNA sense strand
ccacuggagcccaagaaca

SEQ ID NO: 522091 - RNA, 19 nt, Homo sapiens
  misc_RNA (1)...(19): siRNA sense strand
gagcccugcccucaugguu

SEQ ID NO: 522092 - RNA, 19 nt, Homo sapiens
  misc_RNA (1)...(19): siRNA sense strand
agauaccgcuguuacuacu

SEQ ID NO: 522093 - RNA, 19 nt, Homo sapiens
  misc_RNA (1)...(19): siRNA sense strand
ggaauaccgucugguuaaa

SEQ ID NO: 522094 - RNA, 19 nt, Homo sapiens
  misc_RNA (1)...(19): siRNA sense strand
gaacgugacccuccagugu

SEQ ID NO: 522095 - RNA, 19 nt, Homo sapiens
  misc_RNA (1)...(19): siRNA sense strand
ggagauaccgcuguuacua

SEQ ID NO: 522096 - RNA, 19 nt, Homo sapiens
  misc_RNA (1)...(19): siRNA sense strand
caacaaacccacccucuca

SEQ ID NO: 522097 - RNA, 19 nt, Homo sapiens
  misc_RNA (1)...(19): siRNA sense strand
caggaauaccgucugguua

SEQ ID NO: 522098 - RNA, 19 nt, Homo sapiens
  misc_RNA (1)...(19): siRNA sense strand
ccaagaacaaggccagauu

SEQ ID NO: 522099 - RNA, 19 nt, Homo sapiens
  misc_RNA (1)...(19): siRNA sense strand
acagguggaugcucagaug

SEQ ID NO: 522100 - RNA, 19 nt, Homo sapiens
  misc_RNA (1)...(19): siRNA sense strand
gguggaugcucagaugcua

SEQ ID NO: 522101 - RNA, 19 nt, Homo sapiens
  misc_RNA (1)...(19): siRNA sense strand
aggaauaccgucugguuaa

SEQ ID NO: 522102 - RNA, 19 nt, Homo sapiens
  misc_RNA (1)...(19): siRNA sense strand
caagaacaaggccagauuc

SEQ ID NO: 522103 - RNA, 19 nt, Homo sapiens
  misc_RNA (1)...(19): siRNA sense strand
aauaccgucugguuaaaga

SEQ ID NO: 522104 - RNA, 19 nt, Homo sapiens
  misc_RNA (1)...(19): siRNA sense strand
guggugaccucaggagaga

SEQ ID NO: 522105 - RNA, 19 nt, Homo sapiens
  misc_RNA (1)...(19): siRNA sense strand
gagauucgacagguucauu

SEQ ID NO: 522106 - RNA, 19 nt, Homo sapiens
  misc_RNA (1)...(19): siRNA sense strand
acagguucauucugacuga

SEQ ID NO: 522107 - RNA, 19 nt, Homo sapiens
  misc_RNA (1)...(19): siRNA sense strand
gagauaccgcuguuacuac

SEQ ID NO: 522108 - RNA, 19 nt, Homo sapiens
  misc_RNA (1)...(19): siRNA sense strand
aggcauauccugcagguau

SEQ ID NO: 522109 - RNA, 19 nt, Homo sapiens
  misc_RNA (1)...(19): siRNA sense strand
uucgacagguucauucuga

SEQ ID NO: 522110 - RNA, 19 nt, Homo sapiens
  misc_RNA (1)...(19): siRNA sense strand
uaaagagggaagcccagaa

SEQ ID NO: 522111 - RNA, 19 nt, Homo sapiens
  misc_RNA (1)...(19): siRNA sense strand
cacuggagcccaagaacaa

SEQ ID NO: 522112 - RNA, 19 nt, Homo sapiens
  misc_RNA (1)...(19): siRNA sense strand
gcccugcccucaugguucu

SEQ ID NO: 522113 - RNA, 19 nt, Homo sapiens
  misc_RNA (1)...(19): siRNA sense strand
gaauaccgucugguuaaag

SEQ ID NO: 522114 - RNA, 19 nt, Homo sapiens
  misc_RNA (1)...(19): siRNA sense strand
ccacuggagcccaagaaca

SEQ ID NO: 522115 - RNA, 19 nt, Homo sapiens
  misc_RNA (1)...(19): siRNA sense strand
gagcccugcccucaugguu

SEQ ID NO: 522116 - RNA, 19 nt, Homo sapiens
  misc_RNA (1)...(19): siRNA sense strand
agauaccgcuguuacuacu

SEQ ID NO: 522117 - RNA, 19 nt, Homo sapiens
  misc_RNA (1)...(19): siRNA sense strand
ucaaggcccuggaggauuu

SEQ ID NO: 522118 - RNA, 19 nt, Homo sapiens
  misc_RNA (1)...(19): siRNA sense strand
ugaagacccucaagaguca

SEQ ID NO: 522119 - RNA, 19 nt, Homo sapiens
  misc_RNA (1)...(19): siRNA sense strand
gcagcaugaugaagaagga

SEQ ID NO: 522120 - RNA, 19 nt, Homo sapiens
  misc_RNA (1)...(19): siRNA sense strand
uggcgcagcucaagcagaa

SEQ ID NO: 522121 - RNA, 19 nt, Homo sapiens
  misc_RNA (1)...(19): siRNA sense strand
gaaagugaagacccucaag

SEQ ID NO: 522122 - RNA, 19 nt, Homo sapiens
  misc_RNA (1)...(19): siRNA sense strand
acgcgaaccugagcagcua

SEQ ID NO: 522123 - RNA, 19 nt, Homo sapiens
  misc_RNA (1)...(19): siRNA sense strand
ccuggaggauuuacacaag

SEQ ID NO: 522124 - RNA, 19 nt, Homo sapiens
  misc_RNA (1)...(19): siRNA sense strand
aaagugaagacccucaaga

SEQ ID NO: 522125 - RNA, 19 nt, Homo sapiens
  misc_RNA (1)...(19): siRNA sense strand
gcaucucgcgccuggaaga

SEQ ID NO: 522126 - RNA, 19 nt, Homo sapiens
  misc_RNA (1)...(19): siRNA sense strand
ccggcagcaugaugaagaa

SEQ ID NO: 522127 - RNA, 19 nt, Homo sapiens
  misc_RNA (1)...(19): siRNA sense strand
gccggcagcaugaugaaga

SEQ ID NO: 522128 - RNA, 19 nt, Homo sapiens
  misc_RNA (1)...(19): siRNA sense strand
gagcucgagcgccucauca

SEQ ID NO: 522129 - RNA, 19 nt, Homo sapiens
  misc_RNA (1)...(19): siRNA sense strand
gagcucacaguuccucuac

SEQ ID NO: 522130 - RNA, 19 nt, Homo sapiens
  misc_RNA (1)...(19): siRNA sense strand
ccagcgaggagcaggaguu

SEQ ID NO: 522131 - RNA, 19 nt, Homo sapiens
  misc_RNA (1)...(19): siRNA sense strand
gaccaaaccuacaagauaa

SEQ ID NO: 522132 - RNA, 19 nt, Homo sapiens
  misc_RNA (1)...(19): siRNA sense strand
gagaagcuauagccaaaua

SEQ ID NO: 522133 - RNA, 19 nt, Homo sapiens
  misc_RNA (1)...(19): siRNA sense strand
gaaaggagauacugucuac

SEQ ID NO: 522134 - RNA, 19 nt, Homo sapiens
  misc_RNA (1)...(19): siRNA sense strand
caaggcaucuucccuguuu

SEQ ID NO: 522135 - RNA, 19 nt, Homo sapiens
  misc_RNA (1)...(19): siRNA sense strand
cuacagaccucuuuccaaa

SEQ ID NO: 522136 - RNA, 19 nt, Homo sapiens
  misc_RNA (1)...(19): siRNA sense strand
cuaaggaguugucauuuaa

SEQ ID NO: 522137 - RNA, 19 nt, Homo sapiens
  misc_RNA (1)...(19): siRNA sense strand
ucuaaggaguugucauuua

SEQ ID NO: 522138 - RNA, 19 nt, Homo sapiens
  misc_RNA (1)...(19): siRNA sense strand
ggaucaagcaccacucuua

SEQ ID NO: 522139 - RNA, 19 nt, Homo sapiens
  misc_RNA (1)...(19): siRNA sense strand
ggagauagaguuauucuuc

SEQ ID NO: 522140 - RNA, 19 nt, Homo sapiens
  misc_RNA (1)...(19): siRNA sense strand
cgaccaaaccuacaagaua

SEQ ID NO: 522141 - RNA, 19 nt, Homo sapiens
  misc_RNA (1)...(19): siRNA sense strand
cagagaaagugaugucauu

SEQ ID NO: 522142 - RNA, 19 nt, Homo sapiens
  misc_RNA (1)...(19): siRNA sense strand
ucacucaacuccagcauug

SEQ ID NO: 522143 - RNA, 19 nt, Homo sapiens
  misc_RNA (1)...(19): siRNA sense strand
caucaauucuucagcauga

SEQ ID NO: 522144 - RNA, 19 nt, Homo sapiens
  misc_RNA (1)...(19): siRNA sense strand
aaagggagauagaguuauu

SEQ ID NO: 522145 - RNA, 19 nt, Homo sapiens
  misc_RNA (1)...(19): siRNA sense strand
gcaccacucuuacaaaguc

SEQ ID NO: 522146 - RNA, 19 nt, Homo sapiens
  misc_RNA (1)...(19): siRNA sense strand
gguacaagacgauguuuaa

SEQ ID NO: 522147 - RNA, 19 nt, Homo sapiens
  misc_RNA (1)...(19): siRNA sense strand
ggaguugucauuuaagaaa

SEQ ID NO: 522148 - RNA, 19 nt, Homo sapiens
  misc_RNA (1)...(19): siRNA sense strand
aaacugguaugaagguaaa

SEQ ID NO: 522149 - RNA, 19 nt, Homo sapiens
  misc_RNA (1)...(19): siRNA sense strand
cggagaagcuauagccaaa

SEQ ID NO: 522150 - RNA, 19 nt, Homo sapiens
  misc_RNA (1)...(19): siRNA sense strand
aaagugaugucauugaugu

SEQ ID NO: 522151 - RNA, 19 nt, Homo sapiens
  misc_RNA (1)...(19): siRNA sense strand
caucuucccuguuuccuau

SEQ ID NO: 522152 - RNA, 19 nt, Homo sapiens
  misc_RNA (1)...(19): siRNA sense strand
gacacagacauguauaaua

SEQ ID NO: 522153 - RNA, 19 nt, Homo sapiens
  misc_RNA (1)...(19): siRNA sense strand
gaucaaaacugguaugaag

SEQ ID NO: 522154 - RNA, 19 nt, Homo sapiens
  misc_RNA (1)...(19): siRNA sense strand
gcaaagacccaaaccuaca

SEQ ID NO: 522155 - RNA, 19 nt, Homo sapiens
  misc_RNA (1)...(19): siRNA sense strand
ggagaaaucggagaagcua

SEQ ID NO: 522156 - RNA, 19 nt, Homo sapiens
  misc_RNA (1)...(19): siRNA sense strand
caacagacaaggcaucuuc

SEQ ID NO: 522157 - RNA, 19 nt, Homo sapiens
  misc_RNA (1)...(19): siRNA sense strand
gagaaagugaugucauuga

SEQ ID NO: 522158 - RNA, 19 nt, Homo sapiens
  misc_RNA (1)...(19): siRNA sense strand
gagaaagggagauagaguu

SEQ ID NO: 522159 - RNA, 19 nt, Homo sapiens
  misc_RNA (1)...(19): siRNA sense strand
agaaagggagauagaguua

SEQ ID NO: 522160 - RNA, 19 nt, Homo sapiens
  misc_RNA (1)...(19): siRNA sense strand
uaacuauacucccaggaau

SEQ ID NO: 522161 - RNA, 19 nt, Homo sapiens
  misc_RNA (1)...(19): siRNA sense strand
gagauagaguuauucuucu

SEQ ID NO: 522162 - RNA, 19 nt, Homo sapiens
  misc_RNA (1)...(19): siRNA sense strand
acaagacgauguuuaagca

SEQ ID NO: 522163 - RNA, 19 nt, Homo sapiens
  misc_RNA (1)...(19): siRNA sense strand
ccacagcuauucuagugau

SEQ ID NO: 522164 - RNA, 19 nt, Homo sapiens
  misc_RNA (1)...(19): siRNA sense strand
gaaagcacagccugcaaga

SEQ ID NO: 522165 - RNA, 19 nt, Homo sapiens
  misc_RNA (1)...(19): siRNA sense strand
gaucggucuucaacagaaa

SEQ ID NO: 522166 - RNA, 19 nt, Homo sapiens
  misc_RNA (1)...(19): siRNA sense strand
gauaaaagaucaccaacuc

SEQ ID NO: 522167 - RNA, 19 nt, Homo sapiens
  misc_RNA (1)...(19): siRNA sense strand
caucuaaggaguugucauu

SEQ ID NO: 522168 - RNA, 19 nt, Homo sapiens
  misc_RNA (1)...(19): siRNA sense strand
gaaagugaugucauugaug

SEQ ID NO: 522169 - RNA, 19 nt, Homo sapiens
  misc_RNA (1)...(19): siRNA sense strand
gaaagacccaugaguucug

SEQ ID NO: 522170 - RNA, 19 nt, Homo sapiens
  misc_RNA (1)...(19): siRNA sense strand
agaaaucggagaagcuaua

SEQ ID NO: 522171 - RNA, 19 nt, Homo sapiens
  misc_RNA (1)...(19): siRNA sense strand
ucagacaucuaaggaguug

SEQ ID NO: 522172 - RNA, 19 nt, Homo sapiens
  misc_RNA (1)...(19): siRNA sense strand
agaaagugaugucauugau

SEQ ID NO: 522173 - RNA, 19 nt, Homo sapiens
  misc_RNA (1)...(19): siRNA sense strand
cccaaggacugguacaaga

SEQ ID NO: 522174 - RNA, 19 nt, Homo sapiens
  misc_RNA (1)...(19): siRNA sense strand
gaaccuggcaagucaucaa

SEQ ID NO: 522175 - RNA, 19 nt, Homo sapiens
  misc_RNA (1)...(19): siRNA sense strand
uaucaguccucuauagaca

SEQ ID NO: 522176 - RNA, 19 nt, Homo sapiens
  misc_RNA (1)...(19): siRNA sense strand
aagacgauguuuaagcaaa

SEQ ID NO: 522177 - RNA, 19 nt, Homo sapiens
  misc_RNA (1)...(19): siRNA sense strand
ugucauugaugucauggaa

SEQ ID NO: 522178 - RNA, 19 nt, Homo sapiens
  misc_RNA (1)...(19): siRNA sense strand
agauaacagugaauggaaa

SEQ ID NO: 522179 - RNA, 19 nt, Homo sapiens
  misc_RNA (1)...(19): siRNA sense strand
ggcaagucaucaauucuuc

SEQ ID NO: 522180 - RNA, 19 nt, Homo sapiens
  misc_RNA (1)...(19): siRNA sense strand
uuaaggcucagacaucuaa

SEQ ID NO: 522181 - RNA, 19 nt, Homo sapiens
  misc_RNA (1)...(19): siRNA sense strand
gaagcuauagccaaauaca

SEQ ID NO: 522182 - RNA, 19 nt, Homo sapiens
  misc_RNA (1)...(19): siRNA sense strand
gaugacacagacauguaua

SEQ ID NO: 522183 - RNA, 19 nt, Homo sapiens
  misc_RNA (1)...(19): siRNA sense strand
guggagcugucacugagaa

SEQ ID NO: 522184 - RNA, 19 nt, Homo sapiens
  misc_RNA (1)...(19): siRNA sense strand
gcaucuucccgaucucaua

SEQ ID NO: 522185 - RNA, 19 nt, Homo sapiens
  misc_RNA (1)...(19): siRNA sense strand
gaagaggaacuccagaaaa

SEQ ID NO: 522186 - RNA, 19 nt, Homo sapiens
  misc_RNA (1)...(19): siRNA sense strand
ggucugagccaaggaguau

SEQ ID NO: 522187 - RNA, 19 nt, Homo sapiens
  misc_RNA (1)...(19): siRNA sense strand
gacgauguuuaagcaaauu

SEQ ID NO: 522188 - RNA, 19 nt, Homo sapiens
  misc_RNA (1)...(19): siRNA sense strand
gaaagggagauagaguuau

SEQ ID NO: 522189 - RNA, 19 nt, Homo sapiens
  misc_RNA (1)...(19): siRNA sense strand
gaaaaguggacacaagaaa

SEQ ID NO: 522190 - RNA, 19 nt, Homo sapiens
  misc_RNA (1)...(19): siRNA sense strand
cugcaaagacccaaaccua

SEQ ID NO: 522191 - RNA, 19 nt, Homo sapiens
  misc_RNA (1)...(19): siRNA sense strand
guacaacccacccuacagu

SEQ ID NO: 522192 - RNA, 19 nt, Homo sapiens
  misc_RNA (1)...(19): siRNA sense strand
ggaaagacccaugaguucu

SEQ ID NO: 522193 - RNA, 19 nt, Homo sapiens
  misc_RNA (1)...(19): siRNA sense strand
auaugaaccuggcaaguca

SEQ ID NO: 522194 - RNA, 19 nt, Homo sapiens
  misc_RNA (1)...(19): siRNA sense strand
uucaggcucuguauaacua

SEQ ID NO: 522195 - RNA, 19 nt, Homo sapiens
  misc_RNA (1)...(19): siRNA sense strand
gauaggauucacagcuuga

SEQ ID NO: 522196 - RNA, 19 nt, Homo sapiens
  misc_RNA (1)...(19): siRNA sense strand
caacuucaacgcagacaca

SEQ ID NO: 522197 - RNA, 19 nt, Homo sapiens
  misc_RNA (1)...(19): siRNA sense strand
aaggaguugucauuuaaga

SEQ ID NO: 522198 - RNA, 19 nt, Homo sapiens
  misc_RNA (1)...(19): siRNA sense strand
caagcaccacucuuacaaa

SEQ ID NO: 522199 - RNA, 19 nt, Homo sapiens
  misc_RNA (1)...(19): siRNA sense strand
caaagugcgagcaggacua

SEQ ID NO: 522200 - RNA, 19 nt, Homo sapiens
  misc_RNA (1)...(19): siRNA sense strand
cugcaagcauggccaguga

SEQ ID NO: 522201 - RNA, 19 nt, Homo sapiens
  misc_RNA (1)...(19): siRNA sense strand
agacgauguuuaagcaaau

SEQ ID NO: 522202 - RNA, 19 nt, Homo sapiens
  misc_RNA (1)...(19): siRNA sense strand
ucacugagaaagggagaua

SEQ ID NO: 522203 - RNA, 19 nt, Homo sapiens
  misc_RNA (1)...(19): siRNA sense strand
cagauaacagugaauggaa

SEQ ID NO: 522204 - RNA, 19 nt, Homo sapiens
  misc_RNA (1)...(19): siRNA sense strand
ucaguccucuauagacaga

SEQ ID NO: 522205 - RNA, 19 nt, Homo sapiens
  misc_RNA (1)...(19): siRNA sense strand
ccuggcaagucaucaauuc

SEQ ID NO: 522206 - RNA, 19 nt, Homo sapiens
  misc_RNA (1)...(19): siRNA sense strand
gcacggcacaucccucgau

SEQ ID NO: 522207 - RNA, 19 nt, Homo sapiens
  misc_RNA (1)...(19): siRNA sense strand
aagcaccacucuuacaaag

SEQ ID NO: 522208 - RNA, 19 nt, Homo sapiens
  misc_RNA (1)...(19): siRNA sense strand
ucaagcaccacucuuacaa

SEQ ID NO: 522209 - RNA, 19 nt, Homo sapiens
  misc_RNA (1)...(19): siRNA sense strand
agacagaagccuggaaaga

SEQ ID NO: 522210 - RNA, 19 nt, Homo sapiens
  misc_RNA (1)...(19): siRNA sense strand
agagaucggucuucaacag

SEQ ID NO: 522211 - RNA, 19 nt, Homo sapiens
  misc_RNA (1)...(19): siRNA sense strand
caagccggaugaugacaca

SEQ ID NO: 522212 - RNA, 19 nt, Homo sapiens
  misc_RNA (1)...(19): siRNA sense strand
agaagaggaacuccagaaa

SEQ ID NO: 522213 - RNA, 19 nt, Homo sapiens
  misc_RNA (1)...(19): siRNA sense strand
aaauucacauggugcacaa

SEQ ID NO: 522214 - RNA, 19 nt, Homo sapiens
  misc_RNA (1)...(19): siRNA sense strand
gagcucagagaaagugaug

SEQ ID NO: 522215 - RNA, 19 nt, Homo sapiens
  misc_RNA (1)...(19): siRNA sense strand
cguuucaggcucuguauaa

SEQ ID NO: 522216 - RNA, 19 nt, Homo sapiens
  misc_RNA (1)...(19): siRNA sense strand
ccgugagucccaugaguua

SEQ ID NO: 522217 - RNA, 19 nt, Homo sapiens
  misc_RNA (1)...(19): siRNA sense strand
gaaaucggagaagcuauag

SEQ ID NO: 522218 - RNA, 19 nt, Homo sapiens
  misc_RNA (1)...(19): siRNA sense strand
gaucaagcaccacucuuac

SEQ ID NO: 522219 - RNA, 19 nt, Homo sapiens
  misc_RNA (1)...(19): siRNA sense strand
gagaucggucuucaacaga

SEQ ID NO: 522220 - RNA, 19 nt, Homo sapiens
  misc_RNA (1)...(19): siRNA sense strand
gcacaagccggaugaugac

SEQ ID NO: 522221 - RNA, 19 nt, Homo sapiens
  misc_RNA (1)...(19): siRNA sense strand
cccaugaguuacuaucaga

SEQ ID NO: 522222 - RNA, 19 nt, Homo sapiens
  misc_RNA (1)...(19): siRNA sense strand
ccaacucagagccagauaa

SEQ ID NO: 522223 - RNA, 19 nt, Homo sapiens
  misc_RNA (1)...(19): siRNA sense strand
ccagauaacagugaaugga

SEQ ID NO: 522224 - RNA, 19 nt, Homo sapiens
  misc_RNA (1)...(19): siRNA sense strand
gaggaagagaagagaguga

SEQ ID NO: 522225 - RNA, 19 nt, Homo sapiens
  misc_RNA (1)...(19): siRNA sense strand
guccuguguuuacucauga

SEQ ID NO: 522226 - RNA, 19 nt, Homo sapiens
  misc_RNA (1)...(19): siRNA sense strand
gagaaagcacagccugcaa

SEQ ID NO: 522227 - RNA, 19 nt, Homo sapiens
  misc_RNA (1)...(19): siRNA sense strand
gagauacugucuacauccu

SEQ ID NO: 522228 - RNA, 19 nt, Homo sapiens
  misc_RNA (1)...(19): siRNA sense strand
uggaaagacccaugaguuc

SEQ ID NO: 522229 - RNA, 19 nt, Homo sapiens
  misc_RNA (1)...(19): siRNA sense strand
gcaagucaucaauucuuca

SEQ ID NO: 522230 - RNA, 19 nt, Homo sapiens
  misc_RNA (1)...(19): siRNA sense strand
caaaccuacagaccucuuu

SEQ ID NO: 522231 - RNA, 19 nt, Homo sapiens
  misc_RNA (1)...(19): siRNA sense strand
gagaagcuauagccaaaua

SEQ ID NO: 522232 - RNA, 19 nt, Homo sapiens
  misc_RNA (1)...(19): siRNA sense strand
gaaaggagauacugucuac

SEQ ID NO: 522233 - RNA, 19 nt, Homo sapiens
  misc_RNA (1)...(19): siRNA sense strand
caaggcaucuucccuguuu

SEQ ID NO: 522234 - RNA, 19 nt, Homo sapiens
  misc_RNA (1)...(19): siRNA sense strand
cuacagaccucuuuccaaa

SEQ ID NO: 522235 - RNA, 19 nt, Homo sapiens
  misc_RNA (1)...(19): siRNA sense strand
cuaaggaguugucauuuaa

SEQ ID NO: 522236 - RNA, 19 nt, Homo sapiens
  misc_RNA (1)...(19): siRNA sense strand
ucuaaggaguugucauuua

SEQ ID NO: 522237 - RNA, 19 nt, Homo sapiens
  misc_RNA (1)...(19): siRNA sense strand
ggaucaagcaccacucuua

SEQ ID NO: 522238 - RNA, 19 nt, Homo sapiens
  misc_RNA (1)...(19): siRNA sense strand
ggagauagaguuauucuuc

SEQ ID NO: 522239 - RNA, 19 nt, Homo sapiens
  misc_RNA (1)...(19): siRNA sense strand
cagagaaagugaugucauu

SEQ ID NO: 522240 - RNA, 19 nt, Homo sapiens
  misc_RNA (1)...(19): siRNA sense strand
ucacucaacuccagcauug

SEQ ID NO: 522241 - RNA, 19 nt, Homo sapiens
  misc_RNA (1)...(19): siRNA sense strand
caucaauucuucagcauga

SEQ ID NO: 522242 - RNA, 19 nt, Homo sapiens
  misc_RNA (1)...(19): siRNA sense strand
aaagggagauagaguuauu

SEQ ID NO: 522243 - RNA, 19 nt, Homo sapiens
  misc_RNA (1)...(19): siRNA sense strand
gcaccacucuuacaaaguc

SEQ ID NO: 522244 - RNA, 19 nt, Homo sapiens
  misc_RNA (1)...(19): siRNA sense strand
gguacaagacgauguuuaa

SEQ ID NO: 522245 - RNA, 19 nt, Homo sapiens
  misc_RNA (1)...(19): siRNA sense strand
ggaguugucauuuaagaaa

SEQ ID NO: 522246 - RNA, 19 nt, Homo sapiens
  misc_RNA (1)...(19): siRNA sense strand
aaacugguaugaagguaaa

SEQ ID NO: 522247 - RNA, 19 nt, Homo sapiens
  misc_RNA (1)...(19): siRNA sense strand
cggagaagcuauagccaaa

SEQ ID NO: 522248 - RNA, 19 nt, Homo sapiens
  misc_RNA (1)...(19): siRNA sense strand
aaagugaugucauugaugu

SEQ ID NO: 522249 - RNA, 19 nt, Homo sapiens
  misc_RNA (1)...(19): siRNA sense strand
caucuucccuguuuccuau

SEQ ID NO: 522250 - RNA, 19 nt, Homo sapiens
  misc_RNA (1)...(19): siRNA sense strand
gacacagacauguauaaua

SEQ ID NO: 522251 - RNA, 19 nt, Homo sapiens
  misc_RNA (1)...(19): siRNA sense strand
gaucaaaacugguaugaag

SEQ ID NO: 522252 - RNA, 19 nt, Homo sapiens
  misc_RNA (1)...(19): siRNA sense strand
gcaaagacccaaaccuaca

SEQ ID NO: 522253 - RNA, 19 nt, Homo sapiens
  misc_RNA (1)...(19): siRNA sense strand
ggagaaaucggagaagcua

SEQ ID NO: 522254 - RNA, 19 nt, Homo sapiens
  misc_RNA (1)...(19): siRNA sense strand
caacagacaaggcaucuuc

SEQ ID NO: 522255 - RNA, 19 nt, Homo sapiens
  misc_RNA (1)...(19): siRNA sense strand
gagaaagugaugucauuga

SEQ ID NO: 522256 - RNA, 19 nt, Homo sapiens
  misc_RNA (1)...(19): siRNA sense strand
gagaaagggagauagaguu

SEQ ID NO: 522257 - RNA, 19 nt, Homo sapiens
  misc_RNA (1)...(19): siRNA sense strand
agaaagggagauagaguua

SEQ ID NO: 522258 - RNA, 19 nt, Homo sapiens
  misc_RNA (1)...(19): siRNA sense strand
uaacuauacucccaggaau

SEQ ID NO: 522259 - RNA, 19 nt, Homo sapiens
  misc_RNA (1)...(19): siRNA sense strand
gagauagaguuauucuucu

SEQ ID NO: 522260 - RNA, 19 nt, Homo sapiens
  misc_RNA (1)...(19): siRNA sense strand
acaagacgauguuuaagca

SEQ ID NO: 522261 - RNA, 19 nt, Homo sapiens
  misc_RNA (1)...(19): siRNA sense strand
ccacagcuauucuagugau

SEQ ID NO: 522262 - RNA, 19 nt, Homo sapiens
  misc_RNA (1)...(19): siRNA sense strand
gaaagcacagccugcaaga

SEQ ID NO: 522263 - RNA, 19 nt, Homo sapiens
  misc_RNA (1)...(19): siRNA sense strand
gaucggucuucaacagaaa

SEQ ID NO: 522264 - RNA, 19 nt, Homo sapiens
  misc_RNA (1)...(19): siRNA sense strand
caucuaaggaguugucauu

SEQ ID NO: 522265 - RNA, 19 nt, Homo sapiens
  misc_RNA (1)...(19): siRNA sense strand
gaaagugaugucauugaug

SEQ ID NO: 522266 - RNA, 19 nt, Homo sapiens
  misc_RNA (1)...(19): siRNA sense strand
gaaagacccaugaguucug

SEQ ID NO: 522267 - RNA, 19 nt, Homo sapiens
  misc_RNA (1)...(19): siRNA sense strand
agaaaucggagaagcuaua

SEQ ID NO: 522268 - RNA, 19 nt, Homo sapiens
  misc_RNA (1)...(19): siRNA sense strand
ucagacaucuaaggaguug

SEQ ID NO: 522269 - RNA, 19 nt, Homo sapiens
  misc_RNA (1)...(19): siRNA sense strand
agaaagugaugucauugau

SEQ ID NO: 522270 - RNA, 19 nt, Homo sapiens
  misc_RNA (1)...(19): siRNA sense strand
cccaaggacugguacaaga

SEQ ID NO: 522271 - RNA, 19 nt, Homo sapiens
  misc_RNA (1)...(19): siRNA sense strand
gaaccuggcaagucaucaa

SEQ ID NO: 522272 - RNA, 19 nt, Homo sapiens
  misc_RNA (1)...(19): siRNA sense strand
uaucaguccucuauagaca

SEQ ID NO: 522273 - RNA, 19 nt, Homo sapiens
  misc_RNA (1)...(19): siRNA sense strand
aagacgauguuuaagcaaa

SEQ ID NO: 522274 - RNA, 19 nt, Homo sapiens
  misc_RNA (1)...(19): siRNA sense strand
ugucauugaugucauggaa

SEQ ID NO: 522275 - RNA, 19 nt, Homo sapiens
  misc_RNA (1)...(19): siRNA sense strand
ggcaagucaucaauucuuc

SEQ ID NO: 522276 - RNA, 19 nt, Homo sapiens
  misc_RNA (1)...(19): siRNA sense strand
uuaaggcucagacaucuaa

SEQ ID NO: 522277 - RNA, 19 nt, Homo sapiens
  misc_RNA (1)...(19): siRNA sense strand
gaagcuauagccaaauaca

SEQ ID NO: 522278 - RNA, 19 nt, Homo sapiens
  misc_RNA (1)...(19): siRNA sense strand
gaugacacagacauguaua

SEQ ID NO: 522279 - RNA, 19 nt, Homo sapiens
  misc_RNA (1)...(19): siRNA sense strand
guggagcugucacugagaa

SEQ ID NO: 522280 - RNA, 19 nt, Homo sapiens
  misc_RNA (1)...(19): siRNA sense strand
gcaucuucccgaucucaua

SEQ ID NO: 522281 - RNA, 19 nt, Homo sapiens
  misc_RNA (1)...(19): siRNA sense strand
gaagaggaacuccagaaaa

SEQ ID NO: 522282 - RNA, 19 nt, Homo sapiens
  misc_RNA (1)...(19): siRNA sense strand
ggucugagccaaggaguau

SEQ ID NO: 522283 - RNA, 19 nt, Homo sapiens
  misc_RNA (1)...(19): siRNA sense strand
gacgauguuuaagcaaauu

SEQ ID NO: 522284 - RNA, 19 nt, Homo sapiens
  misc_RNA (1)...(19): siRNA sense strand
gaaagggagauagaguuau

SEQ ID NO: 522285 - RNA, 19 nt, Homo sapiens
  misc_RNA (1)...(19): siRNA sense strand
gaaaaguggacacaagaaa

SEQ ID NO: 522286 - RNA, 19 nt, Homo sapiens
  misc_RNA (1)...(19): siRNA sense strand
cugcaaagacccaaaccua

SEQ ID NO: 522287 - RNA, 19 nt, Homo sapiens
  misc_RNA (1)...(19): siRNA sense strand
guacaacccacccuacagu

SEQ ID NO: 522288 - RNA, 19 nt, Homo sapiens
  misc_RNA (1)...(19): siRNA sense strand
ggaaagacccaugaguucu

SEQ ID NO: 522289 - RNA, 19 nt, Homo sapiens
  misc_RNA (1)...(19): siRNA sense strand
auaugaaccuggcaaguca

SEQ ID NO: 522290 - RNA, 19 nt, Homo sapiens
  misc_RNA (1)...(19): siRNA sense strand
uucaggcucuguauaacua

SEQ ID NO: 522291 - RNA, 19 nt, Homo sapiens
  misc_RNA (1)...(19): siRNA sense strand
gauaggauucacagcuuga

SEQ ID NO: 522292 - RNA, 19 nt, Homo sapiens
  misc_RNA (1)...(19): siRNA sense strand
caacuucaacgcagacaca

SEQ ID NO: 522293 - RNA, 19 nt, Homo sapiens
  misc_RNA (1)...(19): siRNA sense strand
aaggaguugucauuuaaga

SEQ ID NO: 522294 - RNA, 19 nt, Homo sapiens
  misc_RNA (1)...(19): siRNA sense strand
caagcaccacucuuacaaa

SEQ ID NO: 522295 - RNA, 19 nt, Homo sapiens
  misc_RNA (1)...(19): siRNA sense strand
caaagugcgagcaggacua

SEQ ID NO: 522296 - RNA, 19 nt, Homo sapiens
  misc_RNA (1)...(19): siRNA sense strand
cugcaagcauggccaguga

SEQ ID NO: 522297 - RNA, 19 nt, Homo sapiens
  misc_RNA (1)...(19): siRNA sense strand
agacgauguuuaagcaaau

SEQ ID NO: 522298 - RNA, 19 nt, Homo sapiens
  misc_RNA (1)...(19): siRNA sense strand
ucacugagaaagggagaua

SEQ ID NO: 522299 - RNA, 19 nt, Homo sapiens
  misc_RNA (1)...(19): siRNA sense strand
ucaguccucuauagacaga

SEQ ID NO: 522300 - RNA, 19 nt, Homo sapiens
  misc_RNA (1)...(19): siRNA sense strand
ccuggcaagucaucaauuc

SEQ ID NO: 522301 - RNA, 19 nt, Homo sapiens
  misc_RNA (1)...(19): siRNA sense strand
gcacggcacaucccucgau

SEQ ID NO: 522302 - RNA, 19 nt, Homo sapiens
  misc_RNA (1)...(19): siRNA sense strand
aagcaccacucuuacaaag

SEQ ID NO: 522303 - RNA, 19 nt, Homo sapiens
  misc_RNA (1)...(19): siRNA sense strand
ucaagcaccacucuuacaa

SEQ ID NO: 522304 - RNA, 19 nt, Homo sapiens
  misc_RNA (1)...(19): siRNA sense strand
agacagaagccuggaaaga

SEQ ID NO: 522305 - RNA, 19 nt, Homo sapiens
  misc_RNA (1)...(19): siRNA sense strand
agagaucggucuucaacag

SEQ ID NO: 522306 - RNA, 19 nt, Homo sapiens
  misc_RNA (1)...(19): siRNA sense strand
caagccggaugaugacaca

SEQ ID NO: 522307 - RNA, 19 nt, Homo sapiens
  misc_RNA (1)...(19): siRNA sense strand
agaagaggaacuccagaaa

SEQ ID NO: 522308 - RNA, 19 nt, Homo sapiens
  misc_RNA (1)...(19): siRNA sense strand
gcacaagccggaugaugac

SEQ ID NO: 522309 - RNA, 19 nt, Homo sapiens
  misc_RNA (1)...(19): siRNA sense strand
gagcucagagaaagugaug

SEQ ID NO: 522310 - RNA, 19 nt, Homo sapiens
  misc_RNA (1)...(19): siRNA sense strand
cguuucaggcucuguauaa

SEQ ID NO: 522311 - RNA, 19 nt, Homo sapiens
  misc_RNA (1)...(19): siRNA sense strand
gaaaucggagaagcuauag

SEQ ID NO: 522312 - RNA, 19 nt, Homo sapiens
  misc_RNA (1)...(19): siRNA sense strand
gaucaagcaccacucuuac

SEQ ID NO: 522313 - RNA, 19 nt, Homo sapiens
  misc_RNA (1)...(19): siRNA sense strand
aaauucacauggugcacaa

SEQ ID NO: 522314 - RNA, 19 nt, Homo sapiens
  misc_RNA (1)...(19): siRNA sense strand
gagaucggucuucaacaga

SEQ ID NO: 522315 - RNA, 19 nt, Homo sapiens
  misc_RNA (1)...(19): siRNA sense strand
caaaccuacagaccucuuu

SEQ ID NO: 522316 - RNA, 19 nt, Homo sapiens
  misc_RNA (1)...(19): siRNA sense strand
guccuguguuuacucauga

SEQ ID NO: 522317 - RNA, 19 nt, Homo sapiens
  misc_RNA (1)...(19): siRNA sense strand
gagaaagcacagccugcaa

SEQ ID NO: 522318 - RNA, 19 nt, Homo sapiens
  misc_RNA (1)...(19): siRNA sense strand
gagauacugucuacauccu

SEQ ID NO: 522319 - RNA, 19 nt, Homo sapiens
  misc_RNA (1)...(19): siRNA sense strand
uggaaagacccaugaguuc

SEQ ID NO: 522320 - RNA, 19 nt, Homo sapiens
  misc_RNA (1)...(19): siRNA sense strand
gcaagucaucaauucuuca

SEQ ID NO: 522321 - RNA, 19 nt, Homo sapiens
  misc_RNA (1)...(19): siRNA sense strand
gaggaagagaagagaguga

SEQ ID NO: 522322 - RNA, 19 nt, Homo sapiens
  misc_RNA (1)...(19): siRNA sense strand
agaucggucuucaacagaa

SEQ ID NO: 522323 - RNA, 19 nt, Homo sapiens
  misc_RNA (1)...(19): siRNA sense strand
uuaagcaaauucacauggu

SEQ ID NO: 522324 - RNA, 19 nt, Homo sapiens
  misc_RNA (1)...(19): siRNA sense strand
gaguugucauuuaagaaag

SEQ ID NO: 522325 - RNA, 19 nt, Homo sapiens
  misc_RNA (1)...(19): siRNA sense strand
gcaccaagggaaagaagag

SEQ ID NO: 522326 - RNA, 19 nt, Homo sapiens
  misc_RNA (1)...(19): siRNA sense strand
gaugaugacacagacaugu

SEQ ID NO: 522327 - RNA, 19 nt, Homo sapiens
  misc_RNA (1)...(19): siRNA sense strand
ggaauccccacagcaauua

SEQ ID NO: 522328 - RNA, 19 nt, Homo sapiens
  misc_RNA (1)...(19): siRNA sense strand
aagcauggccagugacuuc

SEQ ID NO: 522329 - RNA, 19 nt, Homo sapiens
  misc_RNA (1)...(19): siRNA sense strand
guggggaccucaagaagaa

SEQ ID NO: 522330 - RNA, 19 nt, Homo sapiens
  misc_RNA (1)...(19): siRNA sense strand
ccaagggaaagaagaggaa

SEQ ID NO: 522331 - RNA, 19 nt, Homo sapiens
  misc_RNA (1)...(19): siRNA sense strand
caacaggucuucacacaac

SEQ ID NO: 522332 - RNA, 19 nt, Homo sapiens
  misc_RNA (1)...(19): siRNA sense strand
gggccaaggugcacaucaa

SEQ ID NO: 522333 - RNA, 19 nt, Homo sapiens
  misc_RNA (1)...(19): siRNA sense strand
ggacgacucagagcaagaa

SEQ ID NO: 522334 - RNA, 19 nt, Homo sapiens
  misc_RNA (1)...(19): siRNA sense strand
gcaagaaguggacauagag

SEQ ID NO: 522335 - RNA, 19 nt, Homo sapiens
  misc_RNA (1)...(19): siRNA sense strand
ccaaggugcacaucaagaa

SEQ ID NO: 522336 - RNA, 19 nt, Homo sapiens
  misc_RNA (1)...(19): siRNA sense strand
ucacacaacgagcuagaaa

SEQ ID NO: 522337 - RNA, 19 nt, Homo sapiens
  misc_RNA (1)...(19): siRNA sense strand
gcacagacgagccaaacuc

SEQ ID NO: 522338 - RNA, 19 nt, Homo sapiens
  misc_RNA (1)...(19): siRNA sense strand
cuggugagcuggacagugu

SEQ ID NO: 522339 - RNA, 19 nt, Homo sapiens
  misc_RNA (1)...(19): siRNA sense strand
caaggugcacaucaagaaa

SEQ ID NO: 522340 - RNA, 19 nt, Homo sapiens
  misc_RNA (1)...(19): siRNA sense strand
agcaagaaguggacauaga

SEQ ID NO: 522341 - RNA, 19 nt, Homo sapiens
  misc_RNA (1)...(19): siRNA sense strand
aacaacaggucuucacaca

SEQ ID NO: 522342 - RNA, 19 nt, Homo sapiens
  misc_RNA (1)...(19): siRNA sense strand
cgacucagagcaagaagug

SEQ ID NO: 522343 - RNA, 19 nt, Homo sapiens
  misc_RNA (1)...(19): siRNA sense strand
cgacuucgccagggagaaa

SEQ ID NO: 522344 - RNA, 19 nt, Homo sapiens
  misc_RNA (1)...(19): siRNA sense strand
ggagcaucguuuccugaag

SEQ ID NO: 522345 - RNA, 19 nt, Homo sapiens
  misc_RNA (1)...(19): siRNA sense strand
uagagggcauggaguuugg

SEQ ID NO: 522346 - RNA, 19 nt, Homo sapiens
  misc_RNA (1)...(19): siRNA sense strand
gagcaagaaguggacauag

SEQ ID NO: 522347 - RNA, 19 nt, Homo sapiens
  misc_RNA (1)...(19): siRNA sense strand
cauagagggcauggaguuu

SEQ ID NO: 522348 - RNA, 19 nt, Homo sapiens
  misc_RNA (1)...(19): siRNA sense strand
acauagagggcauggaguu

SEQ ID NO: 522349 - RNA, 19 nt, Homo sapiens
  misc_RNA (1)...(19): siRNA sense strand
gcagcaggagcaucguuuc

SEQ ID NO: 522350 - RNA, 19 nt, Homo sapiens
  misc_RNA (1)...(19): siRNA sense strand
agagcaagaaguggacaua

SEQ ID NO: 522351 - RNA, 19 nt, Homo sapiens
  misc_RNA (1)...(19): siRNA sense strand
cgaacaacaggucuucaca

SEQ ID NO: 522352 - RNA, 19 nt, Homo sapiens
  misc_RNA (1)...(19): siRNA sense strand
gccaaggugcacaucaaga

SEQ ID NO: 522353 - RNA, 19 nt, Homo sapiens
  misc_RNA (1)...(19): siRNA sense strand
caacugcccuuauggcuuu

SEQ ID NO: 522354 - RNA, 19 nt, Homo sapiens
  misc_RNA (1)...(19): siRNA sense strand
caacuaugcuugugaaugu

SEQ ID NO: 522355 - RNA, 19 nt, Homo sapiens
  misc_RNA (1)...(19): siRNA sense strand
caacugcccuucaauuuca

SEQ ID NO: 522356 - RNA, 19 nt, Homo sapiens
  misc_RNA (1)...(19): siRNA sense strand
gacaagagcuuaggagaga

SEQ ID NO: 522357 - RNA, 19 nt, Homo sapiens
  misc_RNA (1)...(19): siRNA sense strand
ggucagaacugguuauugg

SEQ ID NO: 522358 - RNA, 19 nt, Homo sapiens
  misc_RNA (1)...(19): siRNA sense strand
gggaagccaugaacaacuu

SEQ ID NO: 522359 - RNA, 19 nt, Homo sapiens
  misc_RNA (1)...(19): siRNA sense strand
gcgcaacccucuccaacug

SEQ ID NO: 522360 - RNA, 19 nt, Homo sapiens
  misc_RNA (1)...(19): siRNA sense strand
gcaauguacuugugaugag

SEQ ID NO: 522361 - RNA, 19 nt, Homo sapiens
  misc_RNA (1)...(19): siRNA sense strand
gaccaugccaggaaaguuu

SEQ ID NO: 522362 - RNA, 19 nt, Homo sapiens
  misc_RNA (1)...(19): siRNA sense strand
ugaccaagaucucaacuac

SEQ ID NO: 522363 - RNA, 19 nt, Homo sapiens
  misc_RNA (1)...(19): siRNA sense strand
gcagggaagccaugaacaa

SEQ ID NO: 522364 - RNA, 19 nt, Homo sapiens
  misc_RNA (1)...(19): siRNA sense strand
caacuacuauggagacaac

SEQ ID NO: 522365 - RNA, 19 nt, Homo sapiens
  misc_RNA (1)...(19): siRNA sense strand
acaccgaccucuccacaga

SEQ ID NO: 522366 - RNA, 19 nt, Homo sapiens
  misc_RNA (1)...(19): siRNA sense strand
caaggcugcgcuacucuua

SEQ ID NO: 522367 - RNA, 19 nt, Homo sapiens
  misc_RNA (1)...(19): siRNA sense strand
acacaaaccagaagaagga

SEQ ID NO: 522368 - RNA, 19 nt, Homo sapiens
  misc_RNA (1)...(19): siRNA sense strand
guaccagucuguguguuug

SEQ ID NO: 522369 - RNA, 19 nt, Homo sapiens
  misc_RNA (1)...(19): siRNA sense strand
ggccaacuaugcuugugaa

SEQ ID NO: 522370 - RNA, 19 nt, Homo sapiens
  misc_RNA (1)...(19): siRNA sense strand
acuauggccugcauuguga

SEQ ID NO: 522371 - RNA, 19 nt, Homo sapiens
  misc_RNA (1)...(19): siRNA sense strand
gaagaaggagcuggaagug

SEQ ID NO: 522372 - RNA, 19 nt, Homo sapiens
  misc_RNA (1)...(19): siRNA sense strand
ucacaaggcugcgcuacuc

SEQ ID NO: 522373 - RNA, 19 nt, Homo sapiens
  misc_RNA (1)...(19): siRNA sense strand
gcagugacaacuacuaugg

SEQ ID NO: 522374 - RNA, 19 nt, Homo sapiens
  misc_RNA (1)...(19): siRNA sense strand
ccagaaggacaaccugauu

SEQ ID NO: 522375 - RNA, 19 nt, Homo sapiens
  misc_RNA (1)...(19): siRNA sense strand
gcaauggaggcagcuguaa

SEQ ID NO: 522376 - RNA, 19 nt, Homo sapiens
  misc_RNA (1)...(19): siRNA sense strand
uaucagaggagaggaauga

SEQ ID NO: 522377 - RNA, 19 nt, Homo sapiens
  misc_RNA (1)...(19): siRNA sense strand
accaagaucucaacuacug

SEQ ID NO: 522378 - RNA, 19 nt, Homo sapiens
  misc_RNA (1)...(19): siRNA sense strand
gaaggcgccacugcgguua

SEQ ID NO: 522379 - RNA, 19 nt, Homo sapiens
  misc_RNA (1)...(19): siRNA sense strand
cagaggagaggaaugaaug

SEQ ID NO: 522380 - RNA, 19 nt, Homo sapiens
  misc_RNA (1)...(19): siRNA sense strand
agaacugguuauuggauga

SEQ ID NO: 522381 - RNA, 19 nt, Homo sapiens
  misc_RNA (1)...(19): siRNA sense strand
caaaccagcacccucacaa

SEQ ID NO: 522382 - RNA, 19 nt, Homo sapiens
  misc_RNA (1)...(19): siRNA sense strand
ccaacugcccuucaauuuc

SEQ ID NO: 522383 - RNA, 19 nt, Homo sapiens
  misc_RNA (1)...(19): siRNA sense strand
caucugcagugacaacuac

SEQ ID NO: 522384 - RNA, 19 nt, Homo sapiens
  misc_RNA (1)...(19): siRNA sense strand
ccacagugacaagagcuua

SEQ ID NO: 522385 - RNA, 19 nt, Homo sapiens
  misc_RNA (1)...(19): siRNA sense strand
ggggaggccuguuuuguga

SEQ ID NO: 522386 - RNA, 19 nt, Homo sapiens
  misc_RNA (1)...(19): siRNA sense strand
gcugugaggugcggacauc

SEQ ID NO: 522387 - RNA, 19 nt, Homo sapiens
  misc_RNA (1)...(19): siRNA sense strand
ccacuucggccacuaugug

SEQ ID NO: 522388 - RNA, 19 nt, Homo sapiens
  misc_RNA (1)...(19): siRNA sense strand
aaccacacauuggacuaua

SEQ ID NO: 522389 - RNA, 19 nt, Homo sapiens
  misc_RNA (1)...(19): siRNA sense strand
ucgagucccugcuucaaca

SEQ ID NO: 522390 - RNA, 19 nt, Homo sapiens
  misc_RNA (1)...(19): siRNA sense strand
gccagagugucggauauca

SEQ ID NO: 522391 - RNA, 19 nt, Homo sapiens
  misc_RNA (1)...(19): siRNA sense strand
gugugcaacugcccuuaug

SEQ ID NO: 522392 - RNA, 19 nt, Homo sapiens
  misc_RNA (1)...(19): siRNA sense strand
gagcucagcgagugugaca

SEQ ID NO: 522393 - RNA, 19 nt, Homo sapiens
  misc_RNA (1)...(19): siRNA sense strand
uccaacugcccuucaauuu

SEQ ID NO: 522394 - RNA, 19 nt, Homo sapiens
  misc_RNA (1)...(19): siRNA sense strand
gcuacuauggccugcauug

SEQ ID NO: 522395 - RNA, 19 nt, Homo sapiens
  misc_RNA (1)...(19): siRNA sense strand
gggcuacuauggccugcau

SEQ ID NO: 522396 - RNA, 19 nt, Homo sapiens
  misc_RNA (1)...(19): siRNA sense strand
ggcaauguacuugugauga

SEQ ID NO: 522397 - RNA, 19 nt, Homo sapiens
  misc_RNA (1)...(19): siRNA sense strand
ggaccaugccaggaaaguu

SEQ ID NO: 522398 - RNA, 19 nt, Homo sapiens
  misc_RNA (1)...(19): siRNA sense strand
ccacacauuggacuauaau

SEQ ID NO: 522399 - RNA, 19 nt, Homo sapiens
  misc_RNA (1)...(19): siRNA sense strand
gguaccuucucgcucauca

SEQ ID NO: 522400 - RNA, 19 nt, Homo sapiens
  misc_RNA (1)...(19): siRNA sense strand
caaguccaacuguggcaaa

SEQ ID NO: 522401 - RNA, 19 nt, Homo sapiens
  misc_RNA (1)...(19): siRNA sense strand
gcucccgccugugcaagaa

SEQ ID NO: 522402 - RNA, 19 nt, Homo sapiens
  misc_RNA (1)...(19): siRNA sense strand
cagaaggacaaccugauuc

SEQ ID NO: 522403 - RNA, 19 nt, Homo sapiens
  misc_RNA (1)...(19): siRNA sense strand
gagaggaaugaauguguca

SEQ ID NO: 522404 - RNA, 19 nt, Homo sapiens
  misc_RNA (1)...(19): siRNA sense strand
cagucuguguguuugauau

SEQ ID NO: 522405 - RNA, 19 nt, Homo sapiens
  misc_RNA (1)...(19): siRNA sense strand
gcaaaccagcacccucaca

SEQ ID NO: 522406 - RNA, 19 nt, Homo sapiens
  misc_RNA (1)...(19): siRNA sense strand
aagccagagugucggauau

SEQ ID NO: 522407 - RNA, 19 nt, Homo sapiens
  misc_RNA (1)...(19): siRNA sense strand
aaagccagagugucggaua

SEQ ID NO: 522408 - RNA, 19 nt, Homo sapiens
  misc_RNA (1)...(19): siRNA sense strand
ccaacuaugcuugugaaug

SEQ ID NO: 522409 - RNA, 19 nt, Homo sapiens
  misc_RNA (1)...(19): siRNA sense strand
gcgucugccuuaagcacuu

SEQ ID NO: 522410 - RNA, 19 nt, Homo sapiens
  misc_RNA (1)...(19): siRNA sense strand
ucagcaagaucgccaucca

SEQ ID NO: 522411 - RNA, 19 nt, Homo sapiens
  misc_RNA (1)...(19): siRNA sense strand
ugcaggaguucaucaacga

SEQ ID NO: 522412 - RNA, 19 nt, Homo sapiens
  misc_RNA (1)...(19): siRNA sense strand
agaagaaggagcuggaagu

SEQ ID NO: 522413 - RNA, 19 nt, Homo sapiens
  misc_RNA (1)...(19): siRNA sense strand
agcacucccuggcaaugua

SEQ ID NO: 522414 - RNA, 19 nt, Homo sapiens
  misc_RNA (1)...(19): siRNA sense strand
acacauuggacuauaaucu

SEQ ID NO: 522415 - RNA, 19 nt, Homo sapiens
  misc_RNA (1)...(19): siRNA sense strand
gcagcacucccuggcaaug

SEQ ID NO: 522416 - RNA, 19 nt, Homo sapiens
  misc_RNA (1)...(19): siRNA sense strand
ucauugccacggagguaua

SEQ ID NO: 522417 - RNA, 19 nt, Homo sapiens
  misc_RNA (1)...(19): siRNA sense strand
gauaucagaggagaggaau

SEQ ID NO: 522418 - RNA, 19 nt, Homo sapiens
  misc_RNA (1)...(19): siRNA sense strand
accacacauuggacuauaa

SEQ ID NO: 522419 - RNA, 19 nt, Homo sapiens
  misc_RNA (1)...(19): siRNA sense strand
aaacacaaaccagaagaag

SEQ ID NO: 522420 - RNA, 19 nt, Homo sapiens
  misc_RNA (1)...(19): siRNA sense strand
ggaagccaugaacaacuug

SEQ ID NO: 522421 - RNA, 19 nt, Homo sapiens
  misc_RNA (1)...(19): siRNA sense strand
caacugcgagaagaaagug

SEQ ID NO: 522422 - RNA, 19 nt, Homo sapiens
  misc_RNA (1)...(19): siRNA sense strand
gggccaacuaugcuuguga

SEQ ID NO: 522423 - RNA, 19 nt, Homo sapiens
  misc_RNA (1)...(19): siRNA sense strand
gaggagaggaaugaaugug

SEQ ID NO: 522424 - RNA, 19 nt, Homo sapiens
  misc_RNA (1)...(19): siRNA sense strand
gcuccaacugcgagaagaa

SEQ ID NO: 522425 - RNA, 19 nt, Homo sapiens
  misc_RNA (1)...(19): siRNA sense strand
ucagaggagaggaaugaau

SEQ ID NO: 522426 - RNA, 19 nt, Homo sapiens
  misc_RNA (1)...(19): siRNA sense strand
gaaggaaccugucaucauu

SEQ ID NO: 522427 - RNA, 19 nt, Homo sapiens
  misc_RNA (1)...(19): siRNA sense strand
gaaaagaacuucagcaauu

SEQ ID NO: 522428 - RNA, 19 nt, Homo sapiens
  misc_RNA (1)...(19): siRNA sense strand
gaagaaugcugcaccacuu

SEQ ID NO: 522429 - RNA, 19 nt, Homo sapiens
  misc_RNA (1)...(19): siRNA sense strand
gggcacaacuucugcaaag

SEQ ID NO: 522430 - RNA, 19 nt, Homo sapiens
  misc_RNA (1)...(19): siRNA sense strand
cgacaguacuuugcccuaa

SEQ ID NO: 522431 - RNA, 19 nt, Homo sapiens
  misc_RNA (1)...(19): siRNA sense strand
ccauagagcuggaaaagaa

SEQ ID NO: 522432 - RNA, 19 nt, Homo sapiens
  misc_RNA (1)...(19): siRNA sense strand
ucacagaccgcucucauau

SEQ ID NO: 522433 - RNA, 19 nt, Homo sapiens
  misc_RNA (1)...(19): siRNA sense strand
guacuuugcccuaaggaaa

SEQ ID NO: 522434 - RNA, 19 nt, Homo sapiens
  misc_RNA (1)...(19): siRNA sense strand
ggaggugacuucaguaucc

SEQ ID NO: 522435 - RNA, 19 nt, Homo sapiens
  misc_RNA (1)...(19): siRNA sense strand
gaaaauccuuaaacagcua

SEQ ID NO: 522436 - RNA, 19 nt, Homo sapiens
  misc_RNA (1)...(19): siRNA sense strand
gaggcuguaugcuugauau

SEQ ID NO: 522437 - RNA, 19 nt, Homo sapiens
  misc_RNA (1)...(19): siRNA sense strand
gcucucauaucuacaccuu

SEQ ID NO: 522438 - RNA, 19 nt, Homo sapiens
  misc_RNA (1)...(19): siRNA sense strand
gcuguaugcuugauaugug

SEQ ID NO: 522439 - RNA, 19 nt, Homo sapiens
  misc_RNA (1)...(19): siRNA sense strand
ucucauaucuacaccuuca

SEQ ID NO: 522440 - RNA, 19 nt, Homo sapiens
  misc_RNA (1)...(19): siRNA sense strand
acagaccgcucucauaucu

SEQ ID NO: 522441 - RNA, 19 nt, Homo sapiens
  misc_RNA (1)...(19): siRNA sense strand
gaaccugucaucauugagu

SEQ ID NO: 522442 - RNA, 19 nt, Homo sapiens
  misc_RNA (1)...(19): siRNA sense strand
ugacuucaguauccauaga

SEQ ID NO: 522443 - RNA, 19 nt, Homo sapiens
  misc_RNA (1)...(19): siRNA sense strand
gcuucgagaugcuuaagga

SEQ ID NO: 522444 - RNA, 19 nt, Homo sapiens
  misc_RNA (1)...(19): siRNA sense strand
acacaggaguacaaggaaa

SEQ ID NO: 522445 - RNA, 19 nt, Homo sapiens
  misc_RNA (1)...(19): siRNA sense strand
ccauggaggugacuucagu

SEQ ID NO: 522446 - RNA, 19 nt, Homo sapiens
  misc_RNA (1)...(19): siRNA sense strand
gcaguaugguggaaauugc

SEQ ID NO: 522447 - RNA, 19 nt, Homo sapiens
  misc_RNA (1)...(19): siRNA sense strand
ucaagagacuaguggaaag

SEQ ID NO: 522448 - RNA, 19 nt, Homo sapiens
  misc_RNA (1)...(19): siRNA sense strand
aacagaagcugcaggagau

SEQ ID NO: 522449 - RNA, 19 nt, Homo sapiens
  misc_RNA (1)...(19): siRNA sense strand
gcacacugucuuucuacaa

SEQ ID NO: 522450 - RNA, 19 nt, Homo sapiens
  misc_RNA (1)...(19): siRNA sense strand
gagggcaagugcuuacagu

SEQ ID NO: 522451 - RNA, 19 nt, Homo sapiens
  misc_RNA (1)...(19): siRNA sense strand
uguccugucugucgaaaga

SEQ ID NO: 522452 - RNA, 19 nt, Homo sapiens
  misc_RNA (1)...(19): siRNA sense strand
cacacugucuuucuacaau

SEQ ID NO: 522453 - RNA, 19 nt, Homo sapiens
  misc_RNA (1)...(19): siRNA sense strand
ucgagaugcuuaaggaugu

SEQ ID NO: 522454 - RNA, 19 nt, Homo sapiens
  misc_RNA (1)...(19): siRNA sense strand
gggcaagugcuuacaguca

SEQ ID NO: 522455 - RNA, 19 nt, Homo sapiens
  misc_RNA (1)...(19): siRNA sense strand
gagggaguuugaagagcuu

SEQ ID NO: 522456 - RNA, 19 nt, Homo sapiens
  misc_RNA (1)...(19): siRNA sense strand
ugaaggaaccugucaucau

SEQ ID NO: 522457 - RNA, 19 nt, Homo sapiens
  misc_RNA (1)...(19): siRNA sense strand
guaagagcgucaaguucgu

SEQ ID NO: 522458 - RNA, 19 nt, Homo sapiens
  misc_RNA (1)...(19): siRNA sense strand
gaagaggaacaggacauuc

SEQ ID NO: 522459 - RNA, 19 nt, Homo sapiens
  misc_RNA (1)...(19): siRNA sense strand
cuacacaggaguacaagga

SEQ ID NO: 522460 - RNA, 19 nt, Homo sapiens
  misc_RNA (1)...(19): siRNA sense strand
gacaguacuuugcccuaag

SEQ ID NO: 522461 - RNA, 19 nt, Homo sapiens
  misc_RNA (1)...(19): siRNA sense strand
gcucaagagacuaguggaa

SEQ ID NO: 522462 - RNA, 19 nt, Homo sapiens
  misc_RNA (1)...(19): siRNA sense strand
agaccgcucucauaucuac

SEQ ID NO: 522463 - RNA, 19 nt, Homo sapiens
  misc_RNA (1)...(19): siRNA sense strand
aggaaccugucaucauuga

SEQ ID NO: 522464 - RNA, 19 nt, Homo sapiens
  misc_RNA (1)...(19): siRNA sense strand
ccaagcggguaggcauauu

SEQ ID NO: 522465 - RNA, 19 nt, Homo sapiens
  misc_RNA (1)...(19): siRNA sense strand
agacaagacuccgggaucu

SEQ ID NO: 522466 - RNA, 19 nt, Homo sapiens
  misc_RNA (1)...(19): siRNA sense strand
gacagcucauccuaaccua

SEQ ID NO: 522467 - RNA, 19 nt, Homo sapiens
  misc_RNA (1)...(19): siRNA sense strand
uuucacgacuggaagaaga

SEQ ID NO: 522468 - RNA, 19 nt, Homo sapiens
  misc_RNA (1)...(19): siRNA sense strand
auaggcggcuggaugaaga

SEQ ID NO: 522469 - RNA, 19 nt, Homo sapiens
  misc_RNA (1)...(19): siRNA sense strand
aagaaugcugcaccacuua

SEQ ID NO: 522470 - RNA, 19 nt, Homo sapiens
  misc_RNA (1)...(19): siRNA sense strand
gagccgaaagggcgaguug

SEQ ID NO: 522471 - RNA, 19 nt, Homo sapiens
  misc_RNA (1)...(19): siRNA sense strand
gcacaacuucugcaaagcu

SEQ ID NO: 522472 - RNA, 19 nt, Homo sapiens
  misc_RNA (1)...(19): siRNA sense strand
ccggcacacugucuuucua

SEQ ID NO: 522473 - RNA, 19 nt, Homo sapiens
  misc_RNA (1)...(19): siRNA sense strand
cagcugcggcuuuggagaa

SEQ ID NO: 522474 - RNA, 19 nt, Homo sapiens
  misc_RNA (1)...(19): siRNA sense strand
ggaggcuguaugcuugaua

SEQ ID NO: 522475 - RNA, 19 nt, Homo sapiens
  misc_RNA (1)...(19): siRNA sense strand
cacaacuucugcaaagcuu

SEQ ID NO: 522476 - RNA, 19 nt, Homo sapiens
  misc_RNA (1)...(19): siRNA sense strand
caccuucacugauacuuuu

SEQ ID NO: 522477 - RNA, 19 nt, Homo sapiens
  misc_RNA (1)...(19): siRNA sense strand
ggugacuucaguauccaua

SEQ ID NO: 522478 - RNA, 19 nt, Homo sapiens
  misc_RNA (1)...(19): siRNA sense strand
aucuacaccuucacugaua

SEQ ID NO: 522479 - RNA, 19 nt, Homo sapiens
  misc_RNA (1)...(19): siRNA sense strand
gucacagaccgcucucaua

SEQ ID NO: 522480 - RNA, 19 nt, Homo sapiens
  misc_RNA (1)...(19): siRNA sense strand
acacugucuuucuacaaug

SEQ ID NO: 522481 - RNA, 19 nt, Homo sapiens
  misc_RNA (1)...(19): siRNA sense strand
ugcuugauaugugcaauuu

SEQ ID NO: 522482 - RNA, 19 nt, Homo sapiens
  misc_RNA (1)...(19): siRNA sense strand
ucacugauacuuuuacuga

SEQ ID NO: 522483 - RNA, 19 nt, Homo sapiens
  misc_RNA (1)...(19): siRNA sense strand
ucaaguucguggagacaag

SEQ ID NO: 522484 - RNA, 19 nt, Homo sapiens
  misc_RNA (1)...(19): siRNA sense strand
cuggugagcucaagagacu

SEQ ID NO: 522485 - RNA, 19 nt, Homo sapiens
  misc_RNA (1)...(19): siRNA sense strand
cugcagcgacuccgagaaa

SEQ ID NO: 522486 - RNA, 19 nt, Homo sapiens
  misc_RNA (1)...(19): siRNA sense strand
ggaaaagaacuucagcaau

SEQ ID NO: 522487 - RNA, 19 nt, Homo sapiens
  misc_RNA (1)...(19): siRNA sense strand
ggcaguaugguggaaauug

SEQ ID NO: 522488 - RNA, 19 nt, Homo sapiens
  misc_RNA (1)...(19): siRNA sense strand
gugaaaaggugaagaccau

SEQ ID NO: 522489 - RNA, 19 nt, Homo sapiens
  misc_RNA (1)...(19): siRNA sense strand
agaaaaugcugcucaccuu

SEQ ID NO: 522490 - RNA, 19 nt, Homo sapiens
  misc_RNA (1)...(19): siRNA sense strand
ggaccaggaggcuguaugc

SEQ ID NO: 522491 - RNA, 19 nt, Homo sapiens
  misc_RNA (1)...(19): siRNA sense strand
aggcauauuccuagacuau

SEQ ID NO: 522492 - RNA, 19 nt, Homo sapiens
  misc_RNA (1)...(19): siRNA sense strand
gcuuaaggaugucaaaagu

SEQ ID NO: 522493 - RNA, 19 nt, Homo sapiens
  misc_RNA (1)...(19): siRNA sense strand
gcagaucuugagggaguuu

SEQ ID NO: 522494 - RNA, 19 nt, Homo sapiens
  misc_RNA (1)...(19): siRNA sense strand
gaucuugagggaguuugaa

SEQ ID NO: 522495 - RNA, 19 nt, Homo sapiens
  misc_RNA (1)...(19): siRNA sense strand
ggaccuagagagggacuuc

SEQ ID NO: 522496 - RNA, 19 nt, Homo sapiens
  misc_RNA (1)...(19): siRNA sense strand
gguggagggcaagugcuua

SEQ ID NO: 522497 - RNA, 19 nt, Homo sapiens
  misc_RNA (1)...(19): siRNA sense strand
caagagacuaguggaaagu

SEQ ID NO: 522498 - RNA, 19 nt, Homo sapiens
  misc_RNA (1)...(19): siRNA sense strand
ccacaccuuuuaccccuuu

SEQ ID NO: 522499 - RNA, 19 nt, Homo sapiens
  misc_RNA (1)...(19): siRNA sense strand
cgaccuaaucggcaacuag

SEQ ID NO: 522500 - RNA, 19 nt, Homo sapiens
  misc_RNA (1)...(19): siRNA sense strand
cuacagcugcggcuuugga

SEQ ID NO: 522501 - RNA, 19 nt, Homo sapiens
  misc_RNA (1)...(19): siRNA sense strand
acagucaggcuucgagaug

SEQ ID NO: 522502 - RNA, 19 nt, Homo sapiens
  misc_RNA (1)...(19): siRNA sense strand
ucaaaaguacccuggaaaa

SEQ ID NO: 522503 - RNA, 19 nt, Homo sapiens
  misc_RNA (1)...(19): siRNA sense strand
acaccuucacugauacuuu

SEQ ID NO: 522504 - RNA, 19 nt, Homo sapiens
  misc_RNA (1)...(19): siRNA sense strand
caagcggguaggcauauuc

SEQ ID NO: 522505 - RNA, 19 nt, Homo sapiens
  misc_RNA (1)...(19): siRNA sense strand
gggacuccgugagccgaaa

SEQ ID NO: 522506 - RNA, 19 nt, Homo sapiens
  misc_RNA (1)...(19): siRNA sense strand
cagcucauccuaaccuagu

SEQ ID NO: 522507 - RNA, 19 nt, Homo sapiens
  misc_RNA (1)...(19): siRNA sense strand
uaggcaguaugguggaaau

SEQ ID NO: 522508 - RNA, 19 nt, Homo sapiens
  misc_RNA (1)...(19): siRNA sense strand
ccucuacagcugcggcuuu

SEQ ID NO: 522509 - RNA, 19 nt, Homo sapiens
  misc_RNA (1)...(19): siRNA sense strand
uaucuacaccuucacugau

SEQ ID NO: 522510 - RNA, 19 nt, Homo sapiens
  misc_RNA (1)...(19): siRNA sense strand
gcagccaccaccacaccuu

SEQ ID NO: 522511 - RNA, 19 nt, Homo sapiens
  misc_RNA (1)...(19): siRNA sense strand
ggugagcucaagagacuag

SEQ ID NO: 522512 - RNA, 19 nt, Homo sapiens
  misc_RNA (1)...(19): siRNA sense strand
gagaucacucgcugcaagu

SEQ ID NO: 522513 - RNA, 19 nt, Homo sapiens
  misc_RNA (1)...(19): siRNA sense strand
gaaggaaccugucaucauu

SEQ ID NO: 522514 - RNA, 19 nt, Homo sapiens
  misc_RNA (1)...(19): siRNA sense strand
gaaaagaacuucagcaauu

SEQ ID NO: 522515 - RNA, 19 nt, Homo sapiens
  misc_RNA (1)...(19): siRNA sense strand
gaagaaugcugcaccacuu

SEQ ID NO: 522516 - RNA, 19 nt, Homo sapiens
  misc_RNA (1)...(19): siRNA sense strand
gggcacaacuucugcaaag

SEQ ID NO: 522517 - RNA, 19 nt, Homo sapiens
  misc_RNA (1)...(19): siRNA sense strand
cgacaguacuuugcccuaa

SEQ ID NO: 522518 - RNA, 19 nt, Homo sapiens
  misc_RNA (1)...(19): siRNA sense strand
ccauagagcuggaaaagaa

SEQ ID NO: 522519 - RNA, 19 nt, Homo sapiens
  misc_RNA (1)...(19): siRNA sense strand
ucacagaccgcucucauau

SEQ ID NO: 522520 - RNA, 19 nt, Homo sapiens
  misc_RNA (1)...(19): siRNA sense strand
guacuuugcccuaaggaaa

SEQ ID NO: 522521 - RNA, 19 nt, Homo sapiens
  misc_RNA (1)...(19): siRNA sense strand
ggaggugacuucaguaucc

SEQ ID NO: 522522 - RNA, 19 nt, Homo sapiens
  misc_RNA (1)...(19): siRNA sense strand
gaaaauccuuaaacagcua

SEQ ID NO: 522523 - RNA, 19 nt, Homo sapiens
  misc_RNA (1)...(19): siRNA sense strand
gaggcuguaugcuugauau

SEQ ID NO: 522524 - RNA, 19 nt, Homo sapiens
  misc_RNA (1)...(19): siRNA sense strand
gcucucauaucuacaccuu

SEQ ID NO: 522525 - RNA, 19 nt, Homo sapiens
  misc_RNA (1)...(19): siRNA sense strand
gcuguaugcuugauaugug

SEQ ID NO: 522526 - RNA, 19 nt, Homo sapiens
  misc_RNA (1)...(19): siRNA sense strand
ucucauaucuacaccuuca

SEQ ID NO: 522527 - RNA, 19 nt, Homo sapiens
  misc_RNA (1)...(19): siRNA sense strand
acagaccgcucucauaucu

SEQ ID NO: 522528 - RNA, 19 nt, Homo sapiens
  misc_RNA (1)...(19): siRNA sense strand
gaaccugucaucauugagu

SEQ ID NO: 522529 - RNA, 19 nt, Homo sapiens
  misc_RNA (1)...(19): siRNA sense strand
ugacuucaguauccauaga

SEQ ID NO: 522530 - RNA, 19 nt, Homo sapiens
  misc_RNA (1)...(19): siRNA sense strand
gcuucgagaugcuuaagga

SEQ ID NO: 522531 - RNA, 19 nt, Homo sapiens
  misc_RNA (1)...(19): siRNA sense strand
acacaggaguacaaggaaa

SEQ ID NO: 522532 - RNA, 19 nt, Homo sapiens
  misc_RNA (1)...(19): siRNA sense strand
ccauggaggugacuucagu

SEQ ID NO: 522533 - RNA, 19 nt, Homo sapiens
  misc_RNA (1)...(19): siRNA sense strand
gcaguaugguggaaauugc

SEQ ID NO: 522534 - RNA, 19 nt, Homo sapiens
  misc_RNA (1)...(19): siRNA sense strand
ucaagagacuaguggaaag

SEQ ID NO: 522535 - RNA, 19 nt, Homo sapiens
  misc_RNA (1)...(19): siRNA sense strand
aacagaagcugcaggagau

SEQ ID NO: 522536 - RNA, 19 nt, Homo sapiens
  misc_RNA (1)...(19): siRNA sense strand
gcacacugucuuucuacaa

SEQ ID NO: 522537 - RNA, 19 nt, Homo sapiens
  misc_RNA (1)...(19): siRNA sense strand
gagggcaagugcuuacagu

SEQ ID NO: 522538 - RNA, 19 nt, Homo sapiens
  misc_RNA (1)...(19): siRNA sense strand
uguccugucugucgaaaga

SEQ ID NO: 522539 - RNA, 19 nt, Homo sapiens
  misc_RNA (1)...(19): siRNA sense strand
cacacugucuuucuacaau

SEQ ID NO: 522540 - RNA, 19 nt, Homo sapiens
  misc_RNA (1)...(19): siRNA sense strand
ucgagaugcuuaaggaugu

SEQ ID NO: 522541 - RNA, 19 nt, Homo sapiens
  misc_RNA (1)...(19): siRNA sense strand
gggcaagugcuuacaguca

SEQ ID NO: 522542 - RNA, 19 nt, Homo sapiens
  misc_RNA (1)...(19): siRNA sense strand
gagggaguuugaagagcuu

SEQ ID NO: 522543 - RNA, 19 nt, Homo sapiens
  misc_RNA (1)...(19): siRNA sense strand
ugaaggaaccugucaucau

SEQ ID NO: 522544 - RNA, 19 nt, Homo sapiens
  misc_RNA (1)...(19): siRNA sense strand
guaagagcgucaaguucgu

SEQ ID NO: 522545 - RNA, 19 nt, Homo sapiens
  misc_RNA (1)...(19): siRNA sense strand
gaagaggaacaggacauuc

SEQ ID NO: 522546 - RNA, 19 nt, Homo sapiens
  misc_RNA (1)...(19): siRNA sense strand
cuacacaggaguacaagga

SEQ ID NO: 522547 - RNA, 19 nt, Homo sapiens
  misc_RNA (1)...(19): siRNA sense strand
gacaguacuuugcccuaag

SEQ ID NO: 522548 - RNA, 19 nt, Homo sapiens
  misc_RNA (1)...(19): siRNA sense strand
gcucaagagacuaguggaa

SEQ ID NO: 522549 - RNA, 19 nt, Homo sapiens
  misc_RNA (1)...(19): siRNA sense strand
agaccgcucucauaucuac

SEQ ID NO: 522550 - RNA, 19 nt, Homo sapiens
  misc_RNA (1)...(19): siRNA sense strand
aggaaccugucaucauuga

SEQ ID NO: 522551 - RNA, 19 nt, Homo sapiens
  misc_RNA (1)...(19): siRNA sense strand
ccaagcggguaggcauauu

SEQ ID NO: 522552 - RNA, 19 nt, Homo sapiens
  misc_RNA (1)...(19): siRNA sense strand
agacaagacuccgggaucu

SEQ ID NO: 522553 - RNA, 19 nt, Homo sapiens
  misc_RNA (1)...(19): siRNA sense strand
gacagcucauccuaaccua

SEQ ID NO: 522554 - RNA, 19 nt, Homo sapiens
  misc_RNA (1)...(19): siRNA sense strand
uuucacgacuggaagaaga

SEQ ID NO: 522555 - RNA, 19 nt, Homo sapiens
  misc_RNA (1)...(19): siRNA sense strand
auaggcggcuggaugaaga

SEQ ID NO: 522556 - RNA, 19 nt, Homo sapiens
  misc_RNA (1)...(19): siRNA sense strand
aagaaugcugcaccacuua

SEQ ID NO: 522557 - RNA, 19 nt, Homo sapiens
  misc_RNA (1)...(19): siRNA sense strand
gagccgaaagggcgaguug

SEQ ID NO: 522558 - RNA, 19 nt, Homo sapiens
  misc_RNA (1)...(19): siRNA sense strand
gcacaacuucugcaaagcu

SEQ ID NO: 522559 - RNA, 19 nt, Homo sapiens
  misc_RNA (1)...(19): siRNA sense strand
ccggcacacugucuuucua

SEQ ID NO: 522560 - RNA, 19 nt, Homo sapiens
  misc_RNA (1)...(19): siRNA sense strand
cagcugcggcuuuggagaa

SEQ ID NO: 522561 - RNA, 19 nt, Homo sapiens
  misc_RNA (1)...(19): siRNA sense strand
ggaggcuguaugcuugaua

SEQ ID NO: 522562 - RNA, 19 nt, Homo sapiens
  misc_RNA (1)...(19): siRNA sense strand
cacaacuucugcaaagcuu

SEQ ID NO: 522563 - RNA, 19 nt, Homo sapiens
  misc_RNA (1)...(19): siRNA sense strand
caccuucacugauacuuuu

SEQ ID NO: 522564 - RNA, 19 nt, Homo sapiens
  misc_RNA (1)...(19): siRNA sense strand
ggugacuucaguauccaua

SEQ ID NO: 522565 - RNA, 19 nt, Homo sapiens
  misc_RNA (1)...(19): siRNA sense strand
aucuacaccuucacugaua

SEQ ID NO: 522566 - RNA, 19 nt, Homo sapiens
  misc_RNA (1)...(19): siRNA sense strand
gucacagaccgcucucaua

SEQ ID NO: 522567 - RNA, 19 nt, Homo sapiens
  misc_RNA (1)...(19): siRNA sense strand
acacugucuuucuacaaug

SEQ ID NO: 522568 - RNA, 19 nt, Homo sapiens
  misc_RNA (1)...(19): siRNA sense strand
ugcuugauaugugcaauuu

SEQ ID NO: 522569 - RNA, 19 nt, Homo sapiens
  misc_RNA (1)...(19): siRNA sense strand
ucacugauacuuuuacuga

SEQ ID NO: 522570 - RNA, 19 nt, Homo sapiens
  misc_RNA (1)...(19): siRNA sense strand
ucaaguucguggagacaag

SEQ ID NO: 522571 - RNA, 19 nt, Homo sapiens
  misc_RNA (1)...(19): siRNA sense strand
cuggugagcucaagagacu

SEQ ID NO: 522572 - RNA, 19 nt, Homo sapiens
  misc_RNA (1)...(19): siRNA sense strand
cugcagcgacuccgagaaa

SEQ ID NO: 522573 - RNA, 19 nt, Homo sapiens
  misc_RNA (1)...(19): siRNA sense strand
ggaaaagaacuucagcaau

SEQ ID NO: 522574 - RNA, 19 nt, Homo sapiens
  misc_RNA (1)...(19): siRNA sense strand
ggcaguaugguggaaauug

SEQ ID NO: 522575 - RNA, 19 nt, Homo sapiens
  misc_RNA (1)...(19): siRNA sense strand
gugaaaaggugaagaccau

SEQ ID NO: 522576 - RNA, 19 nt, Homo sapiens
  misc_RNA (1)...(19): siRNA sense strand
agaaaaugcugcucaccuu

SEQ ID NO: 522577 - RNA, 19 nt, Homo sapiens
  misc_RNA (1)...(19): siRNA sense strand
ggaccaggaggcuguaugc

SEQ ID NO: 522578 - RNA, 19 nt, Homo sapiens
  misc_RNA (1)...(19): siRNA sense strand
aggcauauuccuagacuau

SEQ ID NO: 522579 - RNA, 19 nt, Homo sapiens
  misc_RNA (1)...(19): siRNA sense strand
gcuuaaggaugucaaaagu

SEQ ID NO: 522580 - RNA, 19 nt, Homo sapiens
  misc_RNA (1)...(19): siRNA sense strand
gcagaucuugagggaguuu

SEQ ID NO: 522581 - RNA, 19 nt, Homo sapiens
  misc_RNA (1)...(19): siRNA sense strand
gaucuugagggaguuugaa

SEQ ID NO: 522582 - RNA, 19 nt, Homo sapiens
  misc_RNA (1)...(19): siRNA sense strand
ggaccuagagagggacuuc

SEQ ID NO: 522583 - RNA, 19 nt, Homo sapiens
  misc_RNA (1)...(19): siRNA sense strand
gguggagggcaagugcuua

SEQ ID NO: 522584 - RNA, 19 nt, Homo sapiens
  misc_RNA (1)...(19): siRNA sense strand
caagagacuaguggaaagu

SEQ ID NO: 522585 - RNA, 19 nt, Homo sapiens
  misc_RNA (1)...(19): siRNA sense strand
ccacaccuuuuaccccuuu

SEQ ID NO: 522586 - RNA, 19 nt, Homo sapiens
  misc_RNA (1)...(19): siRNA sense strand
cgaccuaaucggcaacuag

SEQ ID NO: 522587 - RNA, 19 nt, Homo sapiens
  misc_RNA (1)...(19): siRNA sense strand
cuacagcugcggcuuugga

SEQ ID NO: 522588 - RNA, 19 nt, Homo sapiens
  misc_RNA (1)...(19): siRNA sense strand
acagucaggcuucgagaug

SEQ ID NO: 522589 - RNA, 19 nt, Homo sapiens
  misc_RNA (1)...(19): siRNA sense strand
ucaaaaguacccuggaaaa

SEQ ID NO: 522590 - RNA, 19 nt, Homo sapiens
  misc_RNA (1)...(19): siRNA sense strand
acaccuucacugauacuuu

SEQ ID NO: 522591 - RNA, 19 nt, Homo sapiens
  misc_RNA (1)...(19): siRNA sense strand
caagcggguaggcauauuc

SEQ ID NO: 522592 - RNA, 19 nt, Homo sapiens
  misc_RNA (1)...(19): siRNA sense strand
gggacuccgugagccgaaa

SEQ ID NO: 522593 - RNA, 19 nt, Homo sapiens
  misc_RNA (1)...(19): siRNA sense strand
cagcucauccuaaccuagu

SEQ ID NO: 522594 - RNA, 19 nt, Homo sapiens
  misc_RNA (1)...(19): siRNA sense strand
uaggcaguaugguggaaau

SEQ ID NO: 522595 - RNA, 19 nt, Homo sapiens
  misc_RNA (1)...(19): siRNA sense strand
ccucuacagcugcggcuuu

SEQ ID NO: 522596 - RNA, 19 nt, Homo sapiens
  misc_RNA (1)...(19): siRNA sense strand
uaucuacaccuucacugau

SEQ ID NO: 522597 - RNA, 19 nt, Homo sapiens
  misc_RNA (1)...(19): siRNA sense strand
gcagccaccaccacaccuu

SEQ ID NO: 522598 - RNA, 19 nt, Homo sapiens
  misc_RNA (1)...(19): siRNA sense strand
ggugagcucaagagacuag

SEQ ID NO: 522599 - RNA, 19 nt, Homo sapiens
  misc_RNA (1)...(19): siRNA sense strand
gagaucacucgcugcaagu

SEQ ID NO: 522600 - RNA, 19 nt, Homo sapiens
  misc_RNA (1)...(19): siRNA sense strand
gagcugggccuccucauca

SEQ ID NO: 522601 - RNA, 19 nt, Homo sapiens
  misc_RNA (1)...(19): siRNA sense strand
ggccaucuacuuugucaua

SEQ ID NO: 522602 - RNA, 19 nt, Homo sapiens
  misc_RNA (1)...(19): siRNA sense strand
gcgagaaccuggccuucau

SEQ ID NO: 522603 - RNA, 19 nt, Homo sapiens
  misc_RNA (1)...(19): siRNA sense strand
acaaaggcgugccggugua

SEQ ID NO: 522604 - RNA, 19 nt, Homo sapiens
  misc_RNA (1)...(19): siRNA sense strand
uggcaucggucacauugaa

SEQ ID NO: 522605 - RNA, 19 nt, Homo sapiens
  misc_RNA (1)...(19): siRNA sense strand
gcuggaggccaucuacuuu

SEQ ID NO: 522606 - RNA, 19 nt, Homo sapiens
  misc_RNA (1)...(19): siRNA sense strand
ggaacuggcugcgaguagu

SEQ ID NO: 522607 - RNA, 19 nt, Homo sapiens
  misc_RNA (1)...(19): siRNA sense strand
caccggagcuaguaagagu

SEQ ID NO: 522608 - RNA, 19 nt, Homo sapiens
  misc_RNA (1)...(19): siRNA sense strand
caucuacuuugucauagug

SEQ ID NO: 522609 - RNA, 19 nt, Homo sapiens
  misc_RNA (1)...(19): siRNA sense strand
gaggccaucuacuuuguca

SEQ ID NO: 522610 - RNA, 19 nt, Homo sapiens
  misc_RNA (1)...(19): siRNA sense strand
gcgcuggucuugcuuuacu

SEQ ID NO: 522611 - RNA, 19 nt, Homo sapiens
  misc_RNA (1)...(19): siRNA sense strand
gaacuggcugcgaguagug

SEQ ID NO: 522612 - RNA, 19 nt, Homo sapiens
  misc_RNA (1)...(19): siRNA sense strand
caucggcuauggcaaugug

SEQ ID NO: 522613 - RNA, 19 nt, Homo sapiens
  misc_RNA (1)...(19): siRNA sense strand
gaucggcugccugcucuuu

SEQ ID NO: 522614 - RNA, 19 nt, Homo sapiens
  misc_RNA (1)...(19): siRNA sense strand
uggcgcuggucuugcuuua

SEQ ID NO: 522615 - RNA, 19 nt, Homo sapiens
  misc_RNA (1)...(19): siRNA sense strand
ccucagugcucaccaccau

SEQ ID NO: 522616 - RNA, 19 nt, Homo sapiens
  misc_RNA (1)...(19): siRNA sense strand
ggaccaucaucaccaccau

SEQ ID NO: 522617 - RNA, 19 nt, Homo sapiens
  misc_RNA (1)...(19): siRNA sense strand
gcaagcuggaggccaucua

SEQ ID NO: 522618 - RNA, 19 nt, Homo sapiens
  misc_RNA (1)...(19): siRNA sense strand
uggaggccaucuacuuugu

SEQ ID NO: 522619 - RNA, 19 nt, Homo sapiens
  misc_RNA (1)...(19): siRNA sense strand
cauggcaucggucacauug

SEQ ID NO: 522620 - RNA, 19 nt, Homo sapiens
  misc_RNA (1)...(19): siRNA sense strand
gcgccucuucugcaucuuu

SEQ ID NO: 522621 - RNA, 19 nt, Homo sapiens
  misc_RNA (1)...(19): siRNA sense strand
ccaucuacuuugucauagu

SEQ ID NO: 522622 - RNA, 19 nt, Homo sapiens
  misc_RNA (1)...(19): siRNA sense strand
gugcggacccagaaaccaa

SEQ ID NO: 522623 - RNA, 19 nt, Homo sapiens
  misc_RNA (1)...(19): siRNA sense strand
caucaccaccaucggcuau

SEQ ID NO: 522624 - RNA, 19 nt, Homo sapiens
  misc_RNA (1)...(19): siRNA sense strand
gagcugggccuccucauca

SEQ ID NO: 522625 - RNA, 19 nt, Homo sapiens
  misc_RNA (1)...(19): siRNA sense strand
ggccaucuacuuugucaua

SEQ ID NO: 522626 - RNA, 19 nt, Homo sapiens
  misc_RNA (1)...(19): siRNA sense strand
gcgagaaccuggccuucau

SEQ ID NO: 522627 - RNA, 19 nt, Homo sapiens
  misc_RNA (1)...(19): siRNA sense strand
acaaaggcgugccggugua

SEQ ID NO: 522628 - RNA, 19 nt, Homo sapiens
  misc_RNA (1)...(19): siRNA sense strand
uggcaucggucacauugaa

SEQ ID NO: 522629 - RNA, 19 nt, Homo sapiens
  misc_RNA (1)...(19): siRNA sense strand
gcuggaggccaucuacuuu

SEQ ID NO: 522630 - RNA, 19 nt, Homo sapiens
  misc_RNA (1)...(19): siRNA sense strand
ggaacuggcugcgaguagu

SEQ ID NO: 522631 - RNA, 19 nt, Homo sapiens
  misc_RNA (1)...(19): siRNA sense strand
caccggagcuaguaagagu

SEQ ID NO: 522632 - RNA, 19 nt, Homo sapiens
  misc_RNA (1)...(19): siRNA sense strand
caucuacuuugucauagug

SEQ ID NO: 522633 - RNA, 19 nt, Homo sapiens
  misc_RNA (1)...(19): siRNA sense strand
gaggccaucuacuuuguca

SEQ ID NO: 522634 - RNA, 19 nt, Homo sapiens
  misc_RNA (1)...(19): siRNA sense strand
gcgcuggucuugcuuuacu

SEQ ID NO: 522635 - RNA, 19 nt, Homo sapiens
  misc_RNA (1)...(19): siRNA sense strand
gaacuggcugcgaguagug

SEQ ID NO: 522636 - RNA, 19 nt, Homo sapiens
  misc_RNA (1)...(19): siRNA sense strand
caucggcuauggcaaugug

SEQ ID NO: 522637 - RNA, 19 nt, Homo sapiens
  misc_RNA (1)...(19): siRNA sense strand
gaucggcugccugcucuuu

SEQ ID NO: 522638 - RNA, 19 nt, Homo sapiens
  misc_RNA (1)...(19): siRNA sense strand
uggcgcuggucuugcuuua

SEQ ID NO: 522639 - RNA, 19 nt, Homo sapiens
  misc_RNA (1)...(19): siRNA sense strand
ccucagugcucaccaccau

SEQ ID NO: 522640 - RNA, 19 nt, Homo sapiens
  misc_RNA (1)...(19): siRNA sense strand
ggaccaucaucaccaccau

SEQ ID NO: 522641 - RNA, 19 nt, Homo sapiens
  misc_RNA (1)...(19): siRNA sense strand
gcaagcuggaggccaucua

SEQ ID NO: 522642 - RNA, 19 nt, Homo sapiens
  misc_RNA (1)...(19): siRNA sense strand
uggaggccaucuacuuugu

SEQ ID NO: 522643 - RNA, 19 nt, Homo sapiens
  misc_RNA (1)...(19): siRNA sense strand
cauggcaucggucacauug

SEQ ID NO: 522644 - RNA, 19 nt, Homo sapiens
  misc_RNA (1)...(19): siRNA sense strand
gcgccucuucugcaucuuu

SEQ ID NO: 522645 - RNA, 19 nt, Homo sapiens
  misc_RNA (1)...(19): siRNA sense strand
ccaucuacuuugucauagu

SEQ ID NO: 522646 - RNA, 19 nt, Homo sapiens
  misc_RNA (1)...(19): siRNA sense strand
gugcggacccagaaaccaa

SEQ ID NO: 522647 - RNA, 19 nt, Homo sapiens
  misc_RNA (1)...(19): siRNA sense strand
caucaccaccaucggcuau

SEQ ID NO: 522648 - RNA, 19 nt, Homo sapiens
  misc_RNA (1)...(19): siRNA sense strand
gagcugggccuccucauca

SEQ ID NO: 522649 - RNA, 19 nt, Homo sapiens
  misc_RNA (1)...(19): siRNA sense strand
ggccaucuacuuugucaua

SEQ ID NO: 522650 - RNA, 19 nt, Homo sapiens
  misc_RNA (1)...(19): siRNA sense strand
gcgagaaccuggccuucau

SEQ ID NO: 522651 - RNA, 19 nt, Homo sapiens
  misc_RNA (1)...(19): siRNA sense strand
acaaaggcgugccggugua

SEQ ID NO: 522652 - RNA, 19 nt, Homo sapiens
  misc_RNA (1)...(19): siRNA sense strand
uggcaucggucacauugaa

SEQ ID NO: 522653 - RNA, 19 nt, Homo sapiens
  misc_RNA (1)...(19): siRNA sense strand
gcuggaggccaucuacuuu

SEQ ID NO: 522654 - RNA, 19 nt, Homo sapiens
  misc_RNA (1)...(19): siRNA sense strand
ggaacuggcugcgaguagu

SEQ ID NO: 522655 - RNA, 19 nt, Homo sapiens
  misc_RNA (1)...(19): siRNA sense strand
caccggagcuaguaagagu

SEQ ID NO: 522656 - RNA, 19 nt, Homo sapiens
  misc_RNA (1)...(19): siRNA sense strand
caucuacuuugucauagug

SEQ ID NO: 522657 - RNA, 19 nt, Homo sapiens
  misc_RNA (1)...(19): siRNA sense strand
gaggccaucuacuuuguca

SEQ ID NO: 522658 - RNA, 19 nt, Homo sapiens
  misc_RNA (1)...(19): siRNA sense strand
gcgcuggucuugcuuuacu

SEQ ID NO: 522659 - RNA, 19 nt, Homo sapiens
  misc_RNA (1)...(19): siRNA sense strand
gaacuggcugcgaguagug

SEQ ID NO: 522660 - RNA, 19 nt, Homo sapiens
  misc_RNA (1)...(19): siRNA sense strand
caucggcuauggcaaugug

SEQ ID NO: 522661 - RNA, 19 nt, Homo sapiens
  misc_RNA (1)...(19): siRNA sense strand
gaucggcugccugcucuuu

SEQ ID NO: 522662 - RNA, 19 nt, Homo sapiens
  misc_RNA (1)...(19): siRNA sense strand
uggcgcuggucuugcuuua

SEQ ID NO: 522663 - RNA, 19 nt, Homo sapiens
  misc_RNA (1)...(19): siRNA sense strand
ccucagugcucaccaccau

SEQ ID NO: 522664 - RNA, 19 nt, Homo sapiens
  misc_RNA (1)...(19): siRNA sense strand
ggaccaucaucaccaccau

SEQ ID NO: 522665 - RNA, 19 nt, Homo sapiens
  misc_RNA (1)...(19): siRNA sense strand
gcaagcuggaggccaucua

SEQ ID NO: 522666 - RNA, 19 nt, Homo sapiens
  misc_RNA (1)...(19): siRNA sense strand
uggaggccaucuacuuugu

SEQ ID NO: 522667 - RNA, 19 nt, Homo sapiens
  misc_RNA (1)...(19): siRNA sense strand
cauggcaucggucacauug

SEQ ID NO: 522668 - RNA, 19 nt, Homo sapiens
  misc_RNA (1)...(19): siRNA sense strand
gcgccucuucugcaucuuu

SEQ ID NO: 522669 - RNA, 19 nt, Homo sapiens
  misc_RNA (1)...(19): siRNA sense strand
ccaucuacuuugucauagu

SEQ ID NO: 522670 - RNA, 19 nt, Homo sapiens
  misc_RNA (1)...(19): siRNA sense strand
gugcggacccagaaaccaa

SEQ ID NO: 522671 - RNA, 19 nt, Homo sapiens
  misc_RNA (1)...(19): siRNA sense strand
caucaccaccaucggcuau

SEQ ID NO: 522672 - RNA, 19 nt, Homo sapiens
  misc_RNA (1)...(19): siRNA sense strand
gaaugugacugaacacuuc

SEQ ID NO: 522673 - RNA, 19 nt, Homo sapiens
  misc_RNA (1)...(19): siRNA sense strand
gaagaggagugaguauuau

SEQ ID NO: 522674 - RNA, 19 nt, Homo sapiens
  misc_RNA (1)...(19): siRNA sense strand
guaccugccucccuuaauu

SEQ ID NO: 522675 - RNA, 19 nt, Homo sapiens
  misc_RNA (1)...(19): siRNA sense strand
caagauggcuaagaugauu

SEQ ID NO: 522676 - RNA, 19 nt, Homo sapiens
  misc_RNA (1)...(19): siRNA sense strand
gguagcagcugguucaaga

SEQ ID NO: 522677 - RNA, 19 nt, Homo sapiens
  misc_RNA (1)...(19): siRNA sense strand
gaaagaagaggagugagua

SEQ ID NO: 522678 - RNA, 19 nt, Homo sapiens
  misc_RNA (1)...(19): siRNA sense strand
ccgcaucucugaucaauga

SEQ ID NO: 522679 - RNA, 19 nt, Homo sapiens
  misc_RNA (1)...(19): siRNA sense strand
ucaaugaguuuaagcucua

SEQ ID NO: 522680 - RNA, 19 nt, Homo sapiens
  misc_RNA (1)...(19): siRNA sense strand
gcagacauuuguagugaug

SEQ ID NO: 522681 - RNA, 19 nt, Homo sapiens
  misc_RNA (1)...(19): siRNA sense strand
aaaccaagauggcuaagau

SEQ ID NO: 522682 - RNA, 19 nt, Homo sapiens
  misc_RNA (1)...(19): siRNA sense strand
uaagcucuauucugucuuu

SEQ ID NO: 522683 - RNA, 19 nt, Homo sapiens
  misc_RNA (1)...(19): siRNA sense strand
agaagaggagugaguauua

SEQ ID NO: 522684 - RNA, 19 nt, Homo sapiens
  misc_RNA (1)...(19): siRNA sense strand
gggacaagcuccagagauc

SEQ ID NO: 522685 - RNA, 19 nt, Homo sapiens
  misc_RNA (1)...(19): siRNA sense strand
gaauugaggccaccaggaa

SEQ ID NO: 522686 - RNA, 19 nt, Homo sapiens
  misc_RNA (1)...(19): siRNA sense strand
ccagagauccaaccacuga

SEQ ID NO: 522687 - RNA, 19 nt, Homo sapiens
  misc_RNA (1)...(19): siRNA sense strand
aguauuaucugauccaugu

SEQ ID NO: 522688 - RNA, 19 nt, Homo sapiens
  misc_RNA (1)...(19): siRNA sense strand
ccacucauuuauucucauu

SEQ ID NO: 522689 - RNA, 19 nt, Homo sapiens
  misc_RNA (1)...(19): siRNA sense strand
gcuggccacucauuuauuc

SEQ ID NO: 522690 - RNA, 19 nt, Homo sapiens
  misc_RNA (1)...(19): siRNA sense strand
gaaugucuuugucugacuu

SEQ ID NO: 522691 - RNA, 19 nt, Homo sapiens
  misc_RNA (1)...(19): siRNA sense strand
aagcagacauuuguaguga

SEQ ID NO: 522692 - RNA, 19 nt, Homo sapiens
  misc_RNA (1)...(19): siRNA sense strand
cuucuucuuucucuucuua

SEQ ID NO: 522693 - RNA, 19 nt, Homo sapiens
  misc_RNA (1)...(19): siRNA sense strand
ccaggaaugugacugaaca

SEQ ID NO: 522694 - RNA, 19 nt, Homo sapiens
  misc_RNA (1)...(19): siRNA sense strand
agaauucucucccaacaca

SEQ ID NO: 522695 - RNA, 19 nt, Homo sapiens
  misc_RNA (1)...(19): siRNA sense strand
ggaucauucugcuguguau

SEQ ID NO: 522696 - RNA, 19 nt, Homo sapiens
  misc_RNA (1)...(19): siRNA sense strand
gaaucauccuuuccuucuu

SEQ ID NO: 522697 - RNA, 19 nt, Homo sapiens
  misc_RNA (1)...(19): siRNA sense strand
acacaugauucagggauaa

SEQ ID NO: 522698 - RNA, 19 nt, Homo sapiens
  misc_RNA (1)...(19): siRNA sense strand
gaagcagacauuuguagug

SEQ ID NO: 522699 - RNA, 19 nt, Homo sapiens
  misc_RNA (1)...(19): siRNA sense strand
ggaaugugacugaacacuu

SEQ ID NO: 522700 - RNA, 19 nt, Homo sapiens
  misc_RNA (1)...(19): siRNA sense strand
caagagggccaucagaauc

SEQ ID NO: 522701 - RNA, 19 nt, Homo sapiens
  misc_RNA (1)...(19): siRNA sense strand
uggcucaaguggagaguuu

SEQ ID NO: 522702 - RNA, 19 nt, Homo sapiens
  misc_RNA (1)...(19): siRNA sense strand
aguuuaagcucuauucugu

SEQ ID NO: 522703 - RNA, 19 nt, Homo sapiens
  misc_RNA (1)...(19): siRNA sense strand
gagugaguauuaucugauc

SEQ ID NO: 522704 - RNA, 19 nt, Homo sapiens
  misc_RNA (1)...(19): siRNA sense strand
gcaaauuauugauguuucc

SEQ ID NO: 522705 - RNA, 19 nt, Homo sapiens
  misc_RNA (1)...(19): siRNA sense strand
caucucugaucaaugaguu

SEQ ID NO: 522706 - RNA, 19 nt, Homo sapiens
  misc_RNA (1)...(19): siRNA sense strand
gcucuuauccugugguagu

SEQ ID NO: 522707 - RNA, 19 nt, Homo sapiens
  misc_RNA (1)...(19): siRNA sense strand
ucuggucaauuguuucauu

SEQ ID NO: 522708 - RNA, 19 nt, Homo sapiens
  misc_RNA (1)...(19): siRNA sense strand
aaucauccuuuccuucuuc

SEQ ID NO: 522709 - RNA, 19 nt, Homo sapiens
  misc_RNA (1)...(19): siRNA sense strand
gcucuauucugucuuuagg

SEQ ID NO: 522710 - RNA, 19 nt, Homo sapiens
  misc_RNA (1)...(19): siRNA sense strand
cacacaugauucagggaua

SEQ ID NO: 522711 - RNA, 19 nt, Homo sapiens
  misc_RNA (1)...(19): siRNA sense strand
ccacugaggcccacaagag

SEQ ID NO: 522712 - RNA, 19 nt, Homo sapiens
  misc_RNA (1)...(19): siRNA sense strand
ucagaaagaagaggaguga

SEQ ID NO: 522713 - RNA, 19 nt, Homo sapiens
  misc_RNA (1)...(19): siRNA sense strand
caugauucagggauaauaa

SEQ ID NO: 522714 - RNA, 19 nt, Homo sapiens
  misc_RNA (1)...(19): siRNA sense strand
ucagaaucauccuuuccuu

SEQ ID NO: 522715 - RNA, 19 nt, Homo sapiens
  misc_RNA (1)...(19): siRNA sense strand
gagaguuucuagggugaug

SEQ ID NO: 522716 - RNA, 19 nt, Homo sapiens
  misc_RNA (1)...(19): siRNA sense strand
gaggaucauucugcugugu

SEQ ID NO: 522717 - RNA, 19 nt, Homo sapiens
  misc_RNA (1)...(19): siRNA sense strand
cauccuuuccuucuucuuu

SEQ ID NO: 522718 - RNA, 19 nt, Homo sapiens
  misc_RNA (1)...(19): siRNA sense strand
ggagugaguauuaucugau

SEQ ID NO: 522719 - RNA, 19 nt, Homo sapiens
  misc_RNA (1)...(19): siRNA sense strand
gccaucagaaucauccuuu

SEQ ID NO: 522720 - RNA, 19 nt, Homo sapiens
  misc_RNA (1)...(19): siRNA sense strand
cacaagagggccaucagaa

SEQ ID NO: 522721 - RNA, 19 nt, Homo sapiens
  misc_RNA (1)...(19): siRNA sense strand
ucagggauaauaaugcaaa

SEQ ID NO: 522722 - RNA, 19 nt, Homo sapiens
  misc_RNA (1)...(19): siRNA sense strand
ccacauuccucuggcucaa

SEQ ID NO: 522723 - RNA, 19 nt, Homo sapiens
  misc_RNA (1)...(19): siRNA sense strand
ggacauuuacaaaccaucu

SEQ ID NO: 522724 - RNA, 19 nt, Homo sapiens
  misc_RNA (1)...(19): siRNA sense strand
ccacaagagggccaucaga

SEQ ID NO: 522725 - RNA, 19 nt, Homo sapiens
  misc_RNA (1)...(19): siRNA sense strand
ccaccaggaaugugacuga

SEQ ID NO: 522726 - RNA, 19 nt, Homo sapiens
  misc_RNA (1)...(19): siRNA sense strand
acaaaccaucugagcauuu

SEQ ID NO: 522727 - RNA, 19 nt, Homo sapiens
  misc_RNA (1)...(19): siRNA sense strand
ccugcuggccacucauuua

SEQ ID NO: 522728 - RNA, 19 nt, Homo sapiens
  misc_RNA (1)...(19): siRNA sense strand
ggccacucauuuauucuca

SEQ ID NO: 522729 - RNA, 19 nt, Homo sapiens
  misc_RNA (1)...(19): siRNA sense strand
ucaccacccuggcacucuu

SEQ ID NO: 522730 - RNA, 19 nt, Homo sapiens
  misc_RNA (1)...(19): siRNA sense strand
uaucugauccauguucuug

SEQ ID NO: 522731 - RNA, 19 nt, Homo sapiens
  misc_RNA (1)...(19): siRNA sense strand
auagaauucucucccaaca

SEQ ID NO: 522732 - RNA, 19 nt, Homo sapiens
  misc_RNA (1)...(19): siRNA sense strand
gcugaagcagacauuugua

SEQ ID NO: 522733 - RNA, 19 nt, Homo sapiens
  misc_RNA (1)...(19): siRNA sense strand
acaagagggccaucagaau

SEQ ID NO: 522734 - RNA, 19 nt, Homo sapiens
  misc_RNA (1)...(19): siRNA sense strand
aggagugaguauuaucuga

SEQ ID NO: 522735 - RNA, 19 nt, Homo sapiens
  misc_RNA (1)...(19): siRNA sense strand
uacaaaccaucugagcauu

SEQ ID NO: 522736 - RNA, 19 nt, Homo sapiens
  misc_RNA (1)...(19): siRNA sense strand
uguguauuaucuugacuga

SEQ ID NO: 522737 - RNA, 19 nt, Homo sapiens
  misc_RNA (1)...(19): siRNA sense strand
guaagcugaagcagacauu

SEQ ID NO: 522738 - RNA, 19 nt, Homo sapiens
  misc_RNA (1)...(19): siRNA sense strand
gaggccaccaggaauguga

SEQ ID NO: 522739 - RNA, 19 nt, Homo sapiens
  misc_RNA (1)...(19): siRNA sense strand
uuacaaaccaucugagcau

SEQ ID NO: 522740 - RNA, 19 nt, Homo sapiens
  misc_RNA (1)...(19): siRNA sense strand
agagaaugucuuugucuga

SEQ ID NO: 522741 - RNA, 19 nt, Homo sapiens
  misc_RNA (1)...(19): siRNA sense strand
ggauccaagggacccauuu

SEQ ID NO: 522742 - RNA, 19 nt, Homo sapiens
  misc_RNA (1)...(19): siRNA sense strand
ccaagauggcuaagaugau

SEQ ID NO: 522743 - RNA, 19 nt, Homo sapiens
  misc_RNA (1)...(19): siRNA sense strand
agaaagaagaggagugagu

SEQ ID NO: 522744 - RNA, 19 nt, Homo sapiens
  misc_RNA (1)...(19): siRNA sense strand
uuuaagcucuauucugucu

SEQ ID NO: 522745 - RNA, 19 nt, Homo sapiens
  misc_RNA (1)...(19): siRNA sense strand
gaguuuaagcucuauucug

SEQ ID NO: 522746 - RNA, 19 nt, Homo sapiens
  misc_RNA (1)...(19): siRNA sense strand
ucucugaucaaugaguuua

SEQ ID NO: 522747 - RNA, 19 nt, Homo sapiens
  misc_RNA (1)...(19): siRNA sense strand
ucauucugcuguguauuau

SEQ ID NO: 522748 - RNA, 19 nt, Homo sapiens
  misc_RNA (1)...(19): siRNA sense strand
uuucuagggugaugguaug

SEQ ID NO: 522749 - RNA, 19 nt, Homo sapiens
  misc_RNA (1)...(19): siRNA sense strand
ggaacaguaagcugaagca

SEQ ID NO: 522750 - RNA, 19 nt, Homo sapiens
  misc_RNA (1)...(19): siRNA sense strand
cugccucccuuaauugugu

SEQ ID NO: 522751 - RNA, 19 nt, Homo sapiens
  misc_RNA (1)...(19): siRNA sense strand
caaugaguuuaagcucuau

SEQ ID NO: 522752 - RNA, 19 nt, Homo sapiens
  misc_RNA (1)...(19): siRNA sense strand
uaccgcaucucugaucaau

SEQ ID NO: 522753 - RNA, 19 nt, Homo sapiens
  misc_RNA (1)...(19): siRNA sense strand
cuagggugaugguauggau

SEQ ID NO: 522754 - RNA, 19 nt, Homo sapiens
  misc_RNA (1)...(19): siRNA sense strand
gguucaagaccaagagaau

SEQ ID NO: 522755 - RNA, 19 nt, Homo sapiens
  misc_RNA (1)...(19): siRNA sense strand
ccaucagaaucauccuuuc

SEQ ID NO: 522756 - RNA, 19 nt, Homo sapiens
  misc_RNA (1)...(19): siRNA sense strand
aucauucugcuguguauua

SEQ ID NO: 522757 - RNA, 19 nt, Homo sapiens
  misc_RNA (1)...(19): siRNA sense strand
caccaggaaugugacugaa

SEQ ID NO: 522758 - RNA, 19 nt, Homo sapiens
  misc_RNA (1)...(19): siRNA sense strand
ugggugcacugcucuuauc

SEQ ID NO: 522759 - RNA, 19 nt, Homo sapiens
  misc_RNA (1)...(19): siRNA sense strand
aagcugaagcagacauuug

SEQ ID NO: 522760 - RNA, 19 nt, Homo sapiens
  misc_RNA (1)...(19): siRNA sense strand
aagaagaggagugaguauu

SEQ ID NO: 522761 - RNA, 19 nt, Homo sapiens
  misc_RNA (1)...(19): siRNA sense strand
aaagaagaggagugaguau

SEQ ID NO: 522762 - RNA, 19 nt, Homo sapiens
  misc_RNA (1)...(19): siRNA sense strand
ucaaguggagaguuucuag

SEQ ID NO: 522763 - RNA, 19 nt, Homo sapiens
  misc_RNA (1)...(19): siRNA sense strand
guucaagaccaagagaaug

SEQ ID NO: 522764 - RNA, 19 nt, Homo sapiens
  misc_RNA (1)...(19): siRNA sense strand
cagggauaauaaugcaaau

SEQ ID NO: 522765 - RNA, 19 nt, Homo sapiens
  misc_RNA (1)...(19): siRNA sense strand
gucuuugucugacuucauc

SEQ ID NO: 522766 - RNA, 19 nt, Homo sapiens
  misc_RNA (1)...(19): siRNA sense strand
aagagggccaucagaauca

SEQ ID NO: 522767 - RNA, 19 nt, Homo sapiens
  misc_RNA (1)...(19): siRNA sense strand
gcacucuugaggaucauuc

SEQ ID NO: 522768 - RNA, 19 nt, Homo sapiens
  misc_RNA (1)...(19): siRNA sense strand
guugggugcacugcucuua

SEQ ID NO: 522769 - RNA, 19 nt, Homo sapiens
  misc_RNA (1)...(19): siRNA sense strand
gaggagugaguauuaucug

SEQ ID NO: 522770 - RNA, 19 nt, Homo sapiens
  misc_RNA (1)...(19): siRNA sense strand
uagugaugcuccgguguga

SEQ ID NO: 522771 - RNA, 19 nt, Homo sapiens
  misc_RNA (1)...(19): siRNA sense strand
ugcaucauuugguaauuuc

SEQ ID NO: 522772 - RNA, 19 nt, Homo sapiens
  misc_RNA (1)...(19): siRNA sense strand
ggaaagaaaucguguguuu

SEQ ID NO: 522773 - RNA, 19 nt, Homo sapiens
  misc_RNA (1)...(19): siRNA sense strand
gaaggaagaggauuuauug

SEQ ID NO: 522774 - RNA, 19 nt, Homo sapiens
  misc_RNA (1)...(19): siRNA sense strand
gcaaugggcuggcuugucu

SEQ ID NO: 522775 - RNA, 19 nt, Homo sapiens
  misc_RNA (1)...(19): siRNA sense strand
ucacaauucucauguauuc

SEQ ID NO: 522776 - RNA, 19 nt, Homo sapiens
  misc_RNA (1)...(19): siRNA sense strand
gcaauguuccagauuauuu

SEQ ID NO: 522777 - RNA, 19 nt, Homo sapiens
  misc_RNA (1)...(19): siRNA sense strand
gcgaaugucaccauauaua

SEQ ID NO: 522778 - RNA, 19 nt, Homo sapiens
  misc_RNA (1)...(19): siRNA sense strand
gaauuugcauggcuugaga

SEQ ID NO: 522779 - RNA, 19 nt, Homo sapiens
  misc_RNA (1)...(19): siRNA sense strand
gaaaauggagccaauuaua

SEQ ID NO: 522780 - RNA, 19 nt, Homo sapiens
  misc_RNA (1)...(19): siRNA sense strand
aagaauagcugacgugaag

SEQ ID NO: 522781 - RNA, 19 nt, Homo sapiens
  misc_RNA (1)...(19): siRNA sense strand
uaaaggaaguggaaauugg

SEQ ID NO: 522782 - RNA, 19 nt, Homo sapiens
  misc_RNA (1)...(19): siRNA sense strand
aaucaaaguuucagcaaug

SEQ ID NO: 522783 - RNA, 19 nt, Homo sapiens
  misc_RNA (1)...(19): siRNA sense strand
gagcaaggcuuuucucugu

SEQ ID NO: 522784 - RNA, 19 nt, Homo sapiens
  misc_RNA (1)...(19): siRNA sense strand
gaaccaagaauucaacaag

SEQ ID NO: 522785 - RNA, 19 nt, Homo sapiens
  misc_RNA (1)...(19): siRNA sense strand
cgaaugucaccauauauaa

SEQ ID NO: 522786 - RNA, 19 nt, Homo sapiens
  misc_RNA (1)...(19): siRNA sense strand
guacagggcgcacaaguca

SEQ ID NO: 522787 - RNA, 19 nt, Homo sapiens
  misc_RNA (1)...(19): siRNA sense strand
ggauugguauuacucacaa

SEQ ID NO: 522788 - RNA, 19 nt, Homo sapiens
  misc_RNA (1)...(19): siRNA sense strand
gaaagaaaucguguguuug

SEQ ID NO: 522789 - RNA, 19 nt, Homo sapiens
  misc_RNA (1)...(19): siRNA sense strand
gaaaaugaggcuuuaauug

SEQ ID NO: 522790 - RNA, 19 nt, Homo sapiens
  misc_RNA (1)...(19): siRNA sense strand
cagcaccucuugagugguu

SEQ ID NO: 522791 - RNA, 19 nt, Homo sapiens
  misc_RNA (1)...(19): siRNA sense strand
ccauugaccucuacaacug

SEQ ID NO: 522792 - RNA, 19 nt, Homo sapiens
  misc_RNA (1)...(19): siRNA sense strand
gaucuuagcaauucucaca

SEQ ID NO: 522793 - RNA, 19 nt, Homo sapiens
  misc_RNA (1)...(19): siRNA sense strand
ugaaauaaaggaaguggaa

SEQ ID NO: 522794 - RNA, 19 nt, Homo sapiens
  misc_RNA (1)...(19): siRNA sense strand
uagcugacgugaaggaaga

SEQ ID NO: 522795 - RNA, 19 nt, Homo sapiens
  misc_RNA (1)...(19): siRNA sense strand
ugucagaagucccacauuc

SEQ ID NO: 522796 - RNA, 19 nt, Homo sapiens
  misc_RNA (1)...(19): siRNA sense strand
agaagucccacauucaaua

SEQ ID NO: 522797 - RNA, 19 nt, Homo sapiens
  misc_RNA (1)...(19): siRNA sense strand
gcaaggcuuuucucuguuu

SEQ ID NO: 522798 - RNA, 19 nt, Homo sapiens
  misc_RNA (1)...(19): siRNA sense strand
uaacuugcucugcuuguuu

SEQ ID NO: 522799 - RNA, 19 nt, Homo sapiens
  misc_RNA (1)...(19): siRNA sense strand
gaaauaaaggaaguggaaa

SEQ ID NO: 522800 - RNA, 19 nt, Homo sapiens
  misc_RNA (1)...(19): siRNA sense strand
uugauaaugugaugacuga

SEQ ID NO: 522801 - RNA, 19 nt, Homo sapiens
  misc_RNA (1)...(19): siRNA sense strand
augcgaaugucaccauaua

SEQ ID NO: 522802 - RNA, 19 nt, Homo sapiens
  misc_RNA (1)...(19): siRNA sense strand
cagcagcaaaguuuaguaa

SEQ ID NO: 522803 - RNA, 19 nt, Homo sapiens
  misc_RNA (1)...(19): siRNA sense strand
ggagccaauuauaguguga

SEQ ID NO: 522804 - RNA, 19 nt, Homo sapiens
  misc_RNA (1)...(19): siRNA sense strand
ugaaggaagaggauuuauu

SEQ ID NO: 522805 - RNA, 19 nt, Homo sapiens
  misc_RNA (1)...(19): siRNA sense strand
gagaaggcacaccguaaga

SEQ ID NO: 522806 - RNA, 19 nt, Homo sapiens
  misc_RNA (1)...(19): siRNA sense strand
guuacaccguggauuggua

SEQ ID NO: 522807 - RNA, 19 nt, Homo sapiens
  misc_RNA (1)...(19): siRNA sense strand
uugagugguuuaagaauug

SEQ ID NO: 522808 - RNA, 19 nt, Homo sapiens
  misc_RNA (1)...(19): siRNA sense strand
gaauagcugacgugaagga

SEQ ID NO: 522809 - RNA, 19 nt, Homo sapiens
  misc_RNA (1)...(19): siRNA sense strand
ucucacaauucucauguau

SEQ ID NO: 522810 - RNA, 19 nt, Homo sapiens
  misc_RNA (1)...(19): siRNA sense strand
gguauuacucacaaacaaa

SEQ ID NO: 522811 - RNA, 19 nt, Homo sapiens
  misc_RNA (1)...(19): siRNA sense strand
aaccaagaauucaacaaga

SEQ ID NO: 522812 - RNA, 19 nt, Homo sapiens
  misc_RNA (1)...(19): siRNA sense strand
ggaaaaugaggcuuuaauu

SEQ ID NO: 522813 - RNA, 19 nt, Homo sapiens
  misc_RNA (1)...(19): siRNA sense strand
auugcaauguuccagauua

SEQ ID NO: 522814 - RNA, 19 nt, Homo sapiens
  misc_RNA (1)...(19): siRNA sense strand
cuugagugguuuaagaauu

SEQ ID NO: 522815 - RNA, 19 nt, Homo sapiens
  misc_RNA (1)...(19): siRNA sense strand
gaagucccacauucaauag

SEQ ID NO: 522816 - RNA, 19 nt, Homo sapiens
  misc_RNA (1)...(19): siRNA sense strand
ucagaagucccacauucaa

SEQ ID NO: 522817 - RNA, 19 nt, Homo sapiens
  misc_RNA (1)...(19): siRNA sense strand
ggacuggauaugcgaaugu

SEQ ID NO: 522818 - RNA, 19 nt, Homo sapiens
  misc_RNA (1)...(19): siRNA sense strand
cuaguuacaccguggauug

SEQ ID NO: 522819 - RNA, 19 nt, Homo sapiens
  misc_RNA (1)...(19): siRNA sense strand
aaagaaaucguguguuugc

SEQ ID NO: 522820 - RNA, 19 nt, Homo sapiens
  misc_RNA (1)...(19): siRNA sense strand
gccguccuguggcagcuua

SEQ ID NO: 522821 - RNA, 19 nt, Homo sapiens
  misc_RNA (1)...(19): siRNA sense strand
gaaaaggcacucaguucuu

SEQ ID NO: 522822 - RNA, 19 nt, Homo sapiens
  misc_RNA (1)...(19): siRNA sense strand
ggcuuuaauuguaagaugu

SEQ ID NO: 522823 - RNA, 19 nt, Homo sapiens
  misc_RNA (1)...(19): siRNA sense strand
aaauggagccaauuauagu

SEQ ID NO: 522824 - RNA, 19 nt, Homo sapiens
  misc_RNA (1)...(19): siRNA sense strand
cuucaaggaucaagguaca

SEQ ID NO: 522825 - RNA, 19 nt, Homo sapiens
  misc_RNA (1)...(19): siRNA sense strand
gcaccucuugagugguuua

SEQ ID NO: 522826 - RNA, 19 nt, Homo sapiens
  misc_RNA (1)...(19): siRNA sense strand
caauguuccagauuauuug

SEQ ID NO: 522827 - RNA, 19 nt, Homo sapiens
  misc_RNA (1)...(19): siRNA sense strand
cuaacuugcucugcuuguu

SEQ ID NO: 522828 - RNA, 19 nt, Homo sapiens
  misc_RNA (1)...(19): siRNA sense strand
aggcacaccguaagacuaa

SEQ ID NO: 522829 - RNA, 19 nt, Homo sapiens
  misc_RNA (1)...(19): siRNA sense strand
cgugaaggaagaggauuua

SEQ ID NO: 522830 - RNA, 19 nt, Homo sapiens
  misc_RNA (1)...(19): siRNA sense strand
ccacagcagcaaaguuuag

SEQ ID NO: 522831 - RNA, 19 nt, Homo sapiens
  misc_RNA (1)...(19): siRNA sense strand
gcugauucugguauuuaua

SEQ ID NO: 522832 - RNA, 19 nt, Homo sapiens
  misc_RNA (1)...(19): siRNA sense strand
gaaggcacaccguaagacu

SEQ ID NO: 522833 - RNA, 19 nt, Homo sapiens
  misc_RNA (1)...(19): siRNA sense strand
acagggcgcacaagucauu

SEQ ID NO: 522834 - RNA, 19 nt, Homo sapiens
  misc_RNA (1)...(19): siRNA sense strand
caacuggacagcaccucuu

SEQ ID NO: 522835 - RNA, 19 nt, Homo sapiens
  misc_RNA (1)...(19): siRNA sense strand
cauggggccuggaaaauga

SEQ ID NO: 522836 - RNA, 19 nt, Homo sapiens
  misc_RNA (1)...(19): siRNA sense strand
ugguauuacucacaaacaa

SEQ ID NO: 522837 - RNA, 19 nt, Homo sapiens
  misc_RNA (1)...(19): siRNA sense strand
guccuaccauugaccucua

SEQ ID NO: 522838 - RNA, 19 nt, Homo sapiens
  misc_RNA (1)...(19): siRNA sense strand
gauugguauuacucacaaa

SEQ ID NO: 522839 - RNA, 19 nt, Homo sapiens
  misc_RNA (1)...(19): siRNA sense strand
aaaaggcacucaguucuug

SEQ ID NO: 522840 - RNA, 19 nt, Homo sapiens
  misc_RNA (1)...(19): siRNA sense strand
uuuauuguccuaccauuga

SEQ ID NO: 522841 - RNA, 19 nt, Homo sapiens
  misc_RNA (1)...(19): siRNA sense strand
gauaugcgaaugucaccau

SEQ ID NO: 522842 - RNA, 19 nt, Homo sapiens
  misc_RNA (1)...(19): siRNA sense strand
caggaaagaaaucgugugu

SEQ ID NO: 522843 - RNA, 19 nt, Homo sapiens
  misc_RNA (1)...(19): siRNA sense strand
gcacaccguaagacuaagu

SEQ ID NO: 522844 - RNA, 19 nt, Homo sapiens
  misc_RNA (1)...(19): siRNA sense strand
caagguacagggcgcacaa

SEQ ID NO: 522845 - RNA, 19 nt, Homo sapiens
  misc_RNA (1)...(19): siRNA sense strand
uugcaauguuccagauuau

SEQ ID NO: 522846 - RNA, 19 nt, Homo sapiens
  misc_RNA (1)...(19): siRNA sense strand
acaaaaguauucccacuca

SEQ ID NO: 522847 - RNA, 19 nt, Homo sapiens
  misc_RNA (1)...(19): siRNA sense strand
uaagaauagcugacgugaa

SEQ ID NO: 522848 - RNA, 19 nt, Homo sapiens
  misc_RNA (1)...(19): siRNA sense strand
ucuuagcaauucucacaau

SEQ ID NO: 522849 - RNA, 19 nt, Homo sapiens
  misc_RNA (1)...(19): siRNA sense strand
aaaggaaguggaaauugga

SEQ ID NO: 522850 - RNA, 19 nt, Homo sapiens
  misc_RNA (1)...(19): siRNA sense strand
uuccacagcagcaaaguuu

SEQ ID NO: 522851 - RNA, 19 nt, Homo sapiens
  misc_RNA (1)...(19): siRNA sense strand
guugcugauucugguauuu

SEQ ID NO: 522852 - RNA, 19 nt, Homo sapiens
  misc_RNA (1)...(19): siRNA sense strand
ggaaguggaaauuggaaaa

SEQ ID NO: 522853 - RNA, 19 nt, Homo sapiens
  misc_RNA (1)...(19): siRNA sense strand
gcagcuuaauggaacaaaa

SEQ ID NO: 522854 - RNA, 19 nt, Homo sapiens
  misc_RNA (1)...(19): siRNA sense strand
gacaugguuuuaagaauag

SEQ ID NO: 522855 - RNA, 19 nt, Homo sapiens
  misc_RNA (1)...(19): siRNA sense strand
cagaagucccacauucaau

SEQ ID NO: 522856 - RNA, 19 nt, Homo sapiens
  misc_RNA (1)...(19): siRNA sense strand
aggcuuuaauuguaagaug

SEQ ID NO: 522857 - RNA, 19 nt, Homo sapiens
  misc_RNA (1)...(19): siRNA sense strand
caacaagaggaagggcaaa

SEQ ID NO: 522858 - RNA, 19 nt, Homo sapiens
  misc_RNA (1)...(19): siRNA sense strand
ggaaaaggcacucaguucu

SEQ ID NO: 522859 - RNA, 19 nt, Homo sapiens
  misc_RNA (1)...(19): siRNA sense strand
caaugaaaauggagccaau

SEQ ID NO: 522860 - RNA, 19 nt, Homo sapiens
  misc_RNA (1)...(19): siRNA sense strand
gucagaagucccacauuca

SEQ ID NO: 522861 - RNA, 19 nt, Homo sapiens
  misc_RNA (1)...(19): siRNA sense strand
ugagaaggcacaccguaag

SEQ ID NO: 522862 - RNA, 19 nt, Homo sapiens
  misc_RNA (1)...(19): siRNA sense strand
aggauuuauugcugcagua

SEQ ID NO: 522863 - RNA, 19 nt, Homo sapiens
  misc_RNA (1)...(19): siRNA sense strand
gaggaagggcaaaaucaaa

SEQ ID NO: 522864 - RNA, 19 nt, Homo sapiens
  misc_RNA (1)...(19): siRNA sense strand
auaaaggaaguggaaauug

SEQ ID NO: 522865 - RNA, 19 nt, Homo sapiens
  misc_RNA (1)...(19): siRNA sense strand
agaauugucaggcucuuca

SEQ ID NO: 522866 - RNA, 19 nt, Homo sapiens
  misc_RNA (1)...(19): siRNA sense strand
gacaaggaaaaccuaguua

SEQ ID NO: 522867 - RNA, 19 nt, Homo sapiens
  misc_RNA (1)...(19): siRNA sense strand
acaccguggauugguauua

SEQ ID NO: 522868 - RNA, 19 nt, Homo sapiens
  misc_RNA (1)...(19): siRNA sense strand
uguuccagauuauuugaug

SEQ ID NO: 522869 - RNA, 19 nt, Homo sapiens
  misc_RNA (1)...(19): siRNA sense strand
agauugcaauguuccagau

SEQ ID NO: 522870 - RNA, 19 nt, Homo sapiens
  misc_RNA (1)...(19): siRNA sense strand
accaagaauucaacaagag

SEQ ID NO: 522871 - RNA, 19 nt, Homo sapiens
  misc_RNA (1)...(19): siRNA sense strand
caccguggauugguauuac

SEQ ID NO: 522872 - RNA, 19 nt, Homo sapiens
  misc_RNA (1)...(19): siRNA sense strand
ggaaagaaaucguguguuu

SEQ ID NO: 522873 - RNA, 19 nt, Homo sapiens
  misc_RNA (1)...(19): siRNA sense strand
gaaggaagaggauuuauug

SEQ ID NO: 522874 - RNA, 19 nt, Homo sapiens
  misc_RNA (1)...(19): siRNA sense strand
gcaaugggcuggcuugucu

SEQ ID NO: 522875 - RNA, 19 nt, Homo sapiens
  misc_RNA (1)...(19): siRNA sense strand
ucacaauucucauguauuc

SEQ ID NO: 522876 - RNA, 19 nt, Homo sapiens
  misc_RNA (1)...(19): siRNA sense strand
gcaauguuccagauuauuu

SEQ ID NO: 522877 - RNA, 19 nt, Homo sapiens
  misc_RNA (1)...(19): siRNA sense strand
gcgaaugucaccauauaua

SEQ ID NO: 522878 - RNA, 19 nt, Homo sapiens
  misc_RNA (1)...(19): siRNA sense strand
gaauuugcauggcuugaga

SEQ ID NO: 522879 - RNA, 19 nt, Homo sapiens
  misc_RNA (1)...(19): siRNA sense strand
gaaaauggagccaauuaua

SEQ ID NO: 522880 - RNA, 19 nt, Homo sapiens
  misc_RNA (1)...(19): siRNA sense strand
aagaauagcugacgugaag

SEQ ID NO: 522881 - RNA, 19 nt, Homo sapiens
  misc_RNA (1)...(19): siRNA sense strand
uaaaggaaguggaaauugg

SEQ ID NO: 522882 - RNA, 19 nt, Homo sapiens
  misc_RNA (1)...(19): siRNA sense strand
aaucaaaguuucagcaaug

SEQ ID NO: 522883 - RNA, 19 nt, Homo sapiens
  misc_RNA (1)...(19): siRNA sense strand
gagcaaggcuuuucucugu

SEQ ID NO: 522884 - RNA, 19 nt, Homo sapiens
  misc_RNA (1)...(19): siRNA sense strand
gaaccaagaauucaacaag

SEQ ID NO: 522885 - RNA, 19 nt, Homo sapiens
  misc_RNA (1)...(19): siRNA sense strand
cgaaugucaccauauauaa

SEQ ID NO: 522886 - RNA, 19 nt, Homo sapiens
  misc_RNA (1)...(19): siRNA sense strand
guacagggcgcacaaguca

SEQ ID NO: 522887 - RNA, 19 nt, Homo sapiens
  misc_RNA (1)...(19): siRNA sense strand
ggauugguauuacucacaa

SEQ ID NO: 522888 - RNA, 19 nt, Homo sapiens
  misc_RNA (1)...(19): siRNA sense strand
gaaagaaaucguguguuug

SEQ ID NO: 522889 - RNA, 19 nt, Homo sapiens
  misc_RNA (1)...(19): siRNA sense strand
gaaaaugaggcuuuaauug

SEQ ID NO: 522890 - RNA, 19 nt, Homo sapiens
  misc_RNA (1)...(19): siRNA sense strand
cagcaccucuugagugguu

SEQ ID NO: 522891 - RNA, 19 nt, Homo sapiens
  misc_RNA (1)...(19): siRNA sense strand
ccauugaccucuacaacug

SEQ ID NO: 522892 - RNA, 19 nt, Homo sapiens
  misc_RNA (1)...(19): siRNA sense strand
gaucuuagcaauucucaca

SEQ ID NO: 522893 - RNA, 19 nt, Homo sapiens
  misc_RNA (1)...(19): siRNA sense strand
ugaaauaaaggaaguggaa

SEQ ID NO: 522894 - RNA, 19 nt, Homo sapiens
  misc_RNA (1)...(19): siRNA sense strand
uagcugacgugaaggaaga

SEQ ID NO: 522895 - RNA, 19 nt, Homo sapiens
  misc_RNA (1)...(19): siRNA sense strand
ugucagaagucccacauuc

SEQ ID NO: 522896 - RNA, 19 nt, Homo sapiens
  misc_RNA (1)...(19): siRNA sense strand
agaagucccacauucaaua

SEQ ID NO: 522897 - RNA, 19 nt, Homo sapiens
  misc_RNA (1)...(19): siRNA sense strand
gcaaggcuuuucucuguuu

SEQ ID NO: 522898 - RNA, 19 nt, Homo sapiens
  misc_RNA (1)...(19): siRNA sense strand
uaacuugcucugcuuguuu

SEQ ID NO: 522899 - RNA, 19 nt, Homo sapiens
  misc_RNA (1)...(19): siRNA sense strand
gaaauaaaggaaguggaaa

SEQ ID NO: 522900 - RNA, 19 nt, Homo sapiens
  misc_RNA (1)...(19): siRNA sense strand
uugauaaugugaugacuga

SEQ ID NO: 522901 - RNA, 19 nt, Homo sapiens
  misc_RNA (1)...(19): siRNA sense strand
augcgaaugucaccauaua

SEQ ID NO: 522902 - RNA, 19 nt, Homo sapiens
  misc_RNA (1)...(19): siRNA sense strand
cagcagcaaaguuuaguaa

SEQ ID NO: 522903 - RNA, 19 nt, Homo sapiens
  misc_RNA (1)...(19): siRNA sense strand
ggagccaauuauaguguga

SEQ ID NO: 522904 - RNA, 19 nt, Homo sapiens
  misc_RNA (1)...(19): siRNA sense strand
ugaaggaagaggauuuauu

SEQ ID NO: 522905 - RNA, 19 nt, Homo sapiens
  misc_RNA (1)...(19): siRNA sense strand
gagaaggcacaccguaaga

SEQ ID NO: 522906 - RNA, 19 nt, Homo sapiens
  misc_RNA (1)...(19): siRNA sense strand
guuacaccguggauuggua

SEQ ID NO: 522907 - RNA, 19 nt, Homo sapiens
  misc_RNA (1)...(19): siRNA sense strand
uugagugguuuaagaauug

SEQ ID NO: 522908 - RNA, 19 nt, Homo sapiens
  misc_RNA (1)...(19): siRNA sense strand
gaauagcugacgugaagga

SEQ ID NO: 522909 - RNA, 19 nt, Homo sapiens
  misc_RNA (1)...(19): siRNA sense strand
ucucacaauucucauguau

SEQ ID NO: 522910 - RNA, 19 nt, Homo sapiens
  misc_RNA (1)...(19): siRNA sense strand
gguauuacucacaaacaaa

SEQ ID NO: 522911 - RNA, 19 nt, Homo sapiens
  misc_RNA (1)...(19): siRNA sense strand
aaccaagaauucaacaaga

SEQ ID NO: 522912 - RNA, 19 nt, Homo sapiens
  misc_RNA (1)...(19): siRNA sense strand
ggaaaaugaggcuuuaauu

SEQ ID NO: 522913 - RNA, 19 nt, Homo sapiens
  misc_RNA (1)...(19): siRNA sense strand
auugcaauguuccagauua

SEQ ID NO: 522914 - RNA, 19 nt, Homo sapiens
  misc_RNA (1)...(19): siRNA sense strand
cuugagugguuuaagaauu

SEQ ID NO: 522915 - RNA, 19 nt, Homo sapiens
  misc_RNA (1)...(19): siRNA sense strand
gaagucccacauucaauag

SEQ ID NO: 522916 - RNA, 19 nt, Homo sapiens
  misc_RNA (1)...(19): siRNA sense strand
ucagaagucccacauucaa

SEQ ID NO: 522917 - RNA, 19 nt, Homo sapiens
  misc_RNA (1)...(19): siRNA sense strand
ggacuggauaugcgaaugu

SEQ ID NO: 522918 - RNA, 19 nt, Homo sapiens
  misc_RNA (1)...(19): siRNA sense strand
cuaguuacaccguggauug

SEQ ID NO: 522919 - RNA, 19 nt, Homo sapiens
  misc_RNA (1)...(19): siRNA sense strand
aaagaaaucguguguuugc

SEQ ID NO: 522920 - RNA, 19 nt, Homo sapiens
  misc_RNA (1)...(19): siRNA sense strand
gccguccuguggcagcuua

SEQ ID NO: 522921 - RNA, 19 nt, Homo sapiens
  misc_RNA (1)...(19): siRNA sense strand
gaaaaggcacucaguucuu

SEQ ID NO: 522922 - RNA, 19 nt, Homo sapiens
  misc_RNA (1)...(19): siRNA sense strand
ggcuuuaauuguaagaugu

SEQ ID NO: 522923 - RNA, 19 nt, Homo sapiens
  misc_RNA (1)...(19): siRNA sense strand
aaauggagccaauuauagu

SEQ ID NO: 522924 - RNA, 19 nt, Homo sapiens
  misc_RNA (1)...(19): siRNA sense strand
cuucaaggaucaagguaca

SEQ ID NO: 522925 - RNA, 19 nt, Homo sapiens
  misc_RNA (1)...(19): siRNA sense strand
gcaccucuugagugguuua

SEQ ID NO: 522926 - RNA, 19 nt, Homo sapiens
  misc_RNA (1)...(19): siRNA sense strand
caauguuccagauuauuug

SEQ ID NO: 522927 - RNA, 19 nt, Homo sapiens
  misc_RNA (1)...(19): siRNA sense strand
cuaacuugcucugcuuguu

SEQ ID NO: 522928 - RNA, 19 nt, Homo sapiens
  misc_RNA (1)...(19): siRNA sense strand
aggcacaccguaagacuaa

SEQ ID NO: 522929 - RNA, 19 nt, Homo sapiens
  misc_RNA (1)...(19): siRNA sense strand
cgugaaggaagaggauuua

SEQ ID NO: 522930 - RNA, 19 nt, Homo sapiens
  misc_RNA (1)...(19): siRNA sense strand
ccacagcagcaaaguuuag

SEQ ID NO: 522931 - RNA, 19 nt, Homo sapiens
  misc_RNA (1)...(19): siRNA sense strand
gcugauucugguauuuaua

SEQ ID NO: 522932 - RNA, 19 nt, Homo sapiens
  misc_RNA (1)...(19): siRNA sense strand
gaaggcacaccguaagacu

SEQ ID NO: 522933 - RNA, 19 nt, Homo sapiens
  misc_RNA (1)...(19): siRNA sense strand
acagggcgcacaagucauu

SEQ ID NO: 522934 - RNA, 19 nt, Homo sapiens
  misc_RNA (1)...(19): siRNA sense strand
caacuggacagcaccucuu

SEQ ID NO: 522935 - RNA, 19 nt, Homo sapiens
  misc_RNA (1)...(19): siRNA sense strand
cauggggccuggaaaauga

SEQ ID NO: 522936 - RNA, 19 nt, Homo sapiens
  misc_RNA (1)...(19): siRNA sense strand
ugguauuacucacaaacaa

SEQ ID NO: 522937 - RNA, 19 nt, Homo sapiens
  misc_RNA (1)...(19): siRNA sense strand
guccuaccauugaccucua

SEQ ID NO: 522938 - RNA, 19 nt, Homo sapiens
  misc_RNA (1)...(19): siRNA sense strand
gauugguauuacucacaaa

SEQ ID NO: 522939 - RNA, 19 nt, Homo sapiens
  misc_RNA (1)...(19): siRNA sense strand
aaaaggcacucaguucuug

SEQ ID NO: 522940 - RNA, 19 nt, Homo sapiens
  misc_RNA (1)...(19): siRNA sense strand
uuuauuguccuaccauuga

SEQ ID NO: 522941 - RNA, 19 nt, Homo sapiens
  misc_RNA (1)...(19): siRNA sense strand
gauaugcgaaugucaccau

SEQ ID NO: 522942 - RNA, 19 nt, Homo sapiens
  misc_RNA (1)...(19): siRNA sense strand
caggaaagaaaucgugugu

SEQ ID NO: 522943 - RNA, 19 nt, Homo sapiens
  misc_RNA (1)...(19): siRNA sense strand
gcacaccguaagacuaagu

SEQ ID NO: 522944 - RNA, 19 nt, Homo sapiens
  misc_RNA (1)...(19): siRNA sense strand
caagguacagggcgcacaa

SEQ ID NO: 522945 - RNA, 19 nt, Homo sapiens
  misc_RNA (1)...(19): siRNA sense strand
uugcaauguuccagauuau

SEQ ID NO: 522946 - RNA, 19 nt, Homo sapiens
  misc_RNA (1)...(19): siRNA sense strand
acaaaaguauucccacuca

SEQ ID NO: 522947 - RNA, 19 nt, Homo sapiens
  misc_RNA (1)...(19): siRNA sense strand
uaagaauagcugacgugaa

SEQ ID NO: 522948 - RNA, 19 nt, Homo sapiens
  misc_RNA (1)...(19): siRNA sense strand
ucuuagcaauucucacaau

SEQ ID NO: 522949 - RNA, 19 nt, Homo sapiens
  misc_RNA (1)...(19): siRNA sense strand
aaaggaaguggaaauugga

SEQ ID NO: 522950 - RNA, 19 nt, Homo sapiens
  misc_RNA (1)...(19): siRNA sense strand
uuccacagcagcaaaguuu

SEQ ID NO: 522951 - RNA, 19 nt, Homo sapiens
  misc_RNA (1)...(19): siRNA sense strand
guugcugauucugguauuu

SEQ ID NO: 522952 - RNA, 19 nt, Homo sapiens
  misc_RNA (1)...(19): siRNA sense strand
ggaaguggaaauuggaaaa

SEQ ID NO: 522953 - RNA, 19 nt, Homo sapiens
  misc_RNA (1)...(19): siRNA sense strand
gcagcuuaauggaacaaaa

SEQ ID NO: 522954 - RNA, 19 nt, Homo sapiens
  misc_RNA (1)...(19): siRNA sense strand
gacaugguuuuaagaauag

SEQ ID NO: 522955 - RNA, 19 nt, Homo sapiens
  misc_RNA (1)...(19): siRNA sense strand
cagaagucccacauucaau

SEQ ID NO: 522956 - RNA, 19 nt, Homo sapiens
  misc_RNA (1)...(19): siRNA sense strand
aggcuuuaauuguaagaug

SEQ ID NO: 522957 - RNA, 19 nt, Homo sapiens
  misc_RNA (1)...(19): siRNA sense strand
caacaagaggaagggcaaa

SEQ ID NO: 522958 - RNA, 19 nt, Homo sapiens
  misc_RNA (1)...(19): siRNA sense strand
ggaaaaggcacucaguucu

SEQ ID NO: 522959 - RNA, 19 nt, Homo sapiens
  misc_RNA (1)...(19): siRNA sense strand
caaugaaaauggagccaau

SEQ ID NO: 522960 - RNA, 19 nt, Homo sapiens
  misc_RNA (1)...(19): siRNA sense strand
gucagaagucccacauuca

SEQ ID NO: 522961 - RNA, 19 nt, Homo sapiens
  misc_RNA (1)...(19): siRNA sense strand
ugagaaggcacaccguaag

SEQ ID NO: 522962 - RNA, 19 nt, Homo sapiens
  misc_RNA (1)...(19): siRNA sense strand
aggauuuauugcugcagua

SEQ ID NO: 522963 - RNA, 19 nt, Homo sapiens
  misc_RNA (1)...(19): siRNA sense strand
gaggaagggcaaaaucaaa

SEQ ID NO: 522964 - RNA, 19 nt, Homo sapiens
  misc_RNA (1)...(19): siRNA sense strand
auaaaggaaguggaaauug

SEQ ID NO: 522965 - RNA, 19 nt, Homo sapiens
  misc_RNA (1)...(19): siRNA sense strand
agaauugucaggcucuuca

SEQ ID NO: 522966 - RNA, 19 nt, Homo sapiens
  misc_RNA (1)...(19): siRNA sense strand
gacaaggaaaaccuaguua

SEQ ID NO: 522967 - RNA, 19 nt, Homo sapiens
  misc_RNA (1)...(19): siRNA sense strand
acaccguggauugguauua

SEQ ID NO: 522968 - RNA, 19 nt, Homo sapiens
  misc_RNA (1)...(19): siRNA sense strand
uguuccagauuauuugaug

SEQ ID NO: 522969 - RNA, 19 nt, Homo sapiens
  misc_RNA (1)...(19): siRNA sense strand
agauugcaauguuccagau

SEQ ID NO: 522970 - RNA, 19 nt, Homo sapiens
  misc_RNA (1)...(19): siRNA sense strand
accaagaauucaacaagag

SEQ ID NO: 522971 - RNA, 19 nt, Homo sapiens
  misc_RNA (1)...(19): siRNA sense strand
caccguggauugguauuac

SEQ ID NO: 522972 - RNA, 19 nt, Homo sapiens
  misc_RNA (1)...(19): siRNA sense strand
ggaaagaaaucguguguuu

SEQ ID NO: 522973 - RNA, 19 nt, Homo sapiens
  misc_RNA (1)...(19): siRNA sense strand
ucacaauucucauguauuc

SEQ ID NO: 522974 - RNA, 19 nt, Homo sapiens
  misc_RNA (1)...(19): siRNA sense strand
gcaauguuccagauuauuu

SEQ ID NO: 522975 - RNA, 19 nt, Homo sapiens
  misc_RNA (1)...(19): siRNA sense strand
gcgaaugucaccauauaua

SEQ ID NO: 522976 - RNA, 19 nt, Homo sapiens
  misc_RNA (1)...(19): siRNA sense strand
gaaaauggagccaauuaua

SEQ ID NO: 522977 - RNA, 19 nt, Homo sapiens
  misc_RNA (1)...(19): siRNA sense strand
cgaaugucaccauauauaa

SEQ ID NO: 522978 - RNA, 19 nt, Homo sapiens
  misc_RNA (1)...(19): siRNA sense strand
guacagggcgcacaaguca

SEQ ID NO: 522979 - RNA, 19 nt, Homo sapiens
  misc_RNA (1)...(19): siRNA sense strand
ggauugguauuacucacaa

SEQ ID NO: 522980 - RNA, 19 nt, Homo sapiens
  misc_RNA (1)...(19): siRNA sense strand
gaaagaaaucguguguuug

SEQ ID NO: 522981 - RNA, 19 nt, Homo sapiens
  misc_RNA (1)...(19): siRNA sense strand
gaaaaugaggcuuuaauug

SEQ ID NO: 522982 - RNA, 19 nt, Homo sapiens
  misc_RNA (1)...(19): siRNA sense strand
cagcaccucuugagugguu

SEQ ID NO: 522983 - RNA, 19 nt, Homo sapiens
  misc_RNA (1)...(19): siRNA sense strand
ccauugaccucuacaacug

SEQ ID NO: 522984 - RNA, 19 nt, Homo sapiens
  misc_RNA (1)...(19): siRNA sense strand
gaucuuagcaauucucaca

SEQ ID NO: 522985 - RNA, 19 nt, Homo sapiens
  misc_RNA (1)...(19): siRNA sense strand
ugucagaagucccacauuc

SEQ ID NO: 522986 - RNA, 19 nt, Homo sapiens
  misc_RNA (1)...(19): siRNA sense strand
agaagucccacauucaaua

SEQ ID NO: 522987 - RNA, 19 nt, Homo sapiens
  misc_RNA (1)...(19): siRNA sense strand
uugauaaugugaugacuga

SEQ ID NO: 522988 - RNA, 19 nt, Homo sapiens
  misc_RNA (1)...(19): siRNA sense strand
cagcagcaaaguuuaguaa

SEQ ID NO: 522989 - RNA, 19 nt, Homo sapiens
  misc_RNA (1)...(19): siRNA sense strand
augcgaaugucaccauaua

SEQ ID NO: 522990 - RNA, 19 nt, Homo sapiens
  misc_RNA (1)...(19): siRNA sense strand
ggagccaauuauaguguga

SEQ ID NO: 522991 - RNA, 19 nt, Homo sapiens
  misc_RNA (1)...(19): siRNA sense strand
guuacaccguggauuggua

SEQ ID NO: 522992 - RNA, 19 nt, Homo sapiens
  misc_RNA (1)...(19): siRNA sense strand
ucucacaauucucauguau

SEQ ID NO: 522993 - RNA, 19 nt, Homo sapiens
  misc_RNA (1)...(19): siRNA sense strand
uugagugguuuaagaauug

SEQ ID NO: 522994 - RNA, 19 nt, Homo sapiens
  misc_RNA (1)...(19): siRNA sense strand
gguauuacucacaaacaaa

SEQ ID NO: 522995 - RNA, 19 nt, Homo sapiens
  misc_RNA (1)...(19): siRNA sense strand
ggaaaaugaggcuuuaauu

SEQ ID NO: 522996 - RNA, 19 nt, Homo sapiens
  misc_RNA (1)...(19): siRNA sense strand
auugcaauguuccagauua

SEQ ID NO: 522997 - RNA, 19 nt, Homo sapiens
  misc_RNA (1)...(19): siRNA sense strand
cuugagugguuuaagaauu

SEQ ID NO: 522998 - RNA, 19 nt, Homo sapiens
  misc_RNA (1)...(19): siRNA sense strand
gaagucccacauucaauag

SEQ ID NO: 522999 - RNA, 19 nt, Homo sapiens
  misc_RNA (1)...(19): siRNA sense strand
ucagaagucccacauucaa

SEQ ID NO: 523000 - RNA, 19 nt, Homo sapiens
  misc_RNA (1)...(19): siRNA sense strand
ggacuggauaugcgaaugu

SEQ ID NO: 523001 - RNA, 19 nt, Homo sapiens
  misc_RNA (1)...(19): siRNA sense strand
cuaguuacaccguggauug

SEQ ID NO: 523002 - RNA, 19 nt, Homo sapiens
  misc_RNA (1)...(19): siRNA sense strand
aaagaaaucguguguuugc

SEQ ID NO: 523003 - RNA, 19 nt, Homo sapiens
  misc_RNA (1)...(19): siRNA sense strand
ggcuuuaauuguaagaugu

SEQ ID NO: 523004 - RNA, 19 nt, Homo sapiens
  misc_RNA (1)...(19): siRNA sense strand
aaauggagccaauuauagu

SEQ ID NO: 523005 - RNA, 19 nt, Homo sapiens
  misc_RNA (1)...(19): siRNA sense strand
cuucaaggaucaagguaca

SEQ ID NO: 523006 - RNA, 19 nt, Homo sapiens
  misc_RNA (1)...(19): siRNA sense strand
gcaccucuugagugguuua

SEQ ID NO: 523007 - RNA, 19 nt, Homo sapiens
  misc_RNA (1)...(19): siRNA sense strand
caauguuccagauuauuug

SEQ ID NO: 523008 - RNA, 19 nt, Homo sapiens
  misc_RNA (1)...(19): siRNA sense strand
ccacagcagcaaaguuuag

SEQ ID NO: 523009 - RNA, 19 nt, Homo sapiens
  misc_RNA (1)...(19): siRNA sense strand
gcugauucugguauuuaua

SEQ ID NO: 523010 - RNA, 19 nt, Homo sapiens
  misc_RNA (1)...(19): siRNA sense strand
acagggcgcacaagucauu

SEQ ID NO: 523011 - RNA, 19 nt, Homo sapiens
  misc_RNA (1)...(19): siRNA sense strand
caacuggacagcaccucuu

SEQ ID NO: 523012 - RNA, 19 nt, Homo sapiens
  misc_RNA (1)...(19): siRNA sense strand
cauggggccuggaaaauga

SEQ ID NO: 523013 - RNA, 19 nt, Homo sapiens
  misc_RNA (1)...(19): siRNA sense strand
ugguauuacucacaaacaa

SEQ ID NO: 523014 - RNA, 19 nt, Homo sapiens
  misc_RNA (1)...(19): siRNA sense strand
guccuaccauugaccucua

SEQ ID NO: 523015 - RNA, 19 nt, Homo sapiens
  misc_RNA (1)...(19): siRNA sense strand
gauugguauuacucacaaa

SEQ ID NO: 523016 - RNA, 19 nt, Homo sapiens
  misc_RNA (1)...(19): siRNA sense strand
uuuauuguccuaccauuga

SEQ ID NO: 523017 - RNA, 19 nt, Homo sapiens
  misc_RNA (1)...(19): siRNA sense strand
gauaugcgaaugucaccau

SEQ ID NO: 523018 - RNA, 19 nt, Homo sapiens
  misc_RNA (1)...(19): siRNA sense strand
caggaaagaaaucgugugu

SEQ ID NO: 523019 - RNA, 19 nt, Homo sapiens
  misc_RNA (1)...(19): siRNA sense strand
caagguacagggcgcacaa

SEQ ID NO: 523020 - RNA, 19 nt, Homo sapiens
  misc_RNA (1)...(19): siRNA sense strand
uugcaauguuccagauuau

SEQ ID NO: 523021 - RNA, 19 nt, Homo sapiens
  misc_RNA (1)...(19): siRNA sense strand
acaaaaguauucccacuca

SEQ ID NO: 523022 - RNA, 19 nt, Homo sapiens
  misc_RNA (1)...(19): siRNA sense strand
ucuuagcaauucucacaau

SEQ ID NO: 523023 - RNA, 19 nt, Homo sapiens
  misc_RNA (1)...(19): siRNA sense strand
uuccacagcagcaaaguuu

SEQ ID NO: 523024 - RNA, 19 nt, Homo sapiens
  misc_RNA (1)...(19): siRNA sense strand
guugcugauucugguauuu

SEQ ID NO: 523025 - RNA, 19 nt, Homo sapiens
  misc_RNA (1)...(19): siRNA sense strand
cagaagucccacauucaau

SEQ ID NO: 523026 - RNA, 19 nt, Homo sapiens
  misc_RNA (1)...(19): siRNA sense strand
aggcuuuaauuguaagaug

SEQ ID NO: 523027 - RNA, 19 nt, Homo sapiens
  misc_RNA (1)...(19): siRNA sense strand
caaugaaaauggagccaau

SEQ ID NO: 523028 - RNA, 19 nt, Homo sapiens
  misc_RNA (1)...(19): siRNA sense strand
acaccguggauugguauua

SEQ ID NO: 523029 - RNA, 19 nt, Homo sapiens
  misc_RNA (1)...(19): siRNA sense strand
agaauugucaggcucuuca

SEQ ID NO: 523030 - RNA, 19 nt, Homo sapiens
  misc_RNA (1)...(19): siRNA sense strand
uguuccagauuauuugaug

SEQ ID NO: 523031 - RNA, 19 nt, Homo sapiens
  misc_RNA (1)...(19): siRNA sense strand
agauugcaauguuccagau

SEQ ID NO: 523032 - RNA, 19 nt, Homo sapiens
  misc_RNA (1)...(19): siRNA sense strand
gucagaagucccacauuca

SEQ ID NO: 523033 - RNA, 19 nt, Homo sapiens
  misc_RNA (1)...(19): siRNA sense strand
gacaaggaaaaccuaguua

SEQ ID NO: 523034 - RNA, 19 nt, Homo sapiens
  misc_RNA (1)...(19): siRNA sense strand
caccguggauugguauuac

SEQ ID NO: 523035 - RNA, 19 nt, Homo sapiens
  misc_RNA (1)...(19): siRNA sense strand
ccagguccuucacggucaa

SEQ ID NO: 523036 - RNA, 19 nt, Homo sapiens
  misc_RNA (1)...(19): siRNA sense strand
uugcugauucugguauuua

SEQ ID NO: 523037 - RNA, 19 nt, Homo sapiens
  misc_RNA (1)...(19): siRNA sense strand
ggaaggaauugucugauga

SEQ ID NO: 523038 - RNA, 19 nt, Homo sapiens
  misc_RNA (1)...(19): siRNA sense strand
gaaggaccgugaaccuaua

SEQ ID NO: 523039 - RNA, 19 nt, Homo sapiens
  misc_RNA (1)...(19): siRNA sense strand
gaacacaucagccucauga

SEQ ID NO: 523040 - RNA, 19 nt, Homo sapiens
  misc_RNA (1)...(19): siRNA sense strand
acacggacuuccuguauua

SEQ ID NO: 523041 - RNA, 19 nt, Homo sapiens
  misc_RNA (1)...(19): siRNA sense strand
ggaccuacaccuucuauga

SEQ ID NO: 523042 - RNA, 19 nt, Homo sapiens
  misc_RNA (1)...(19): siRNA sense strand
gcugacaccuucauguuug

SEQ ID NO: 523043 - RNA, 19 nt, Homo sapiens
  misc_RNA (1)...(19): siRNA sense strand
ggagaagcccagugaauau

SEQ ID NO: 523044 - RNA, 19 nt, Homo sapiens
  misc_RNA (1)...(19): siRNA sense strand
gaagcccagugaauauauu

SEQ ID NO: 523045 - RNA, 19 nt, Homo sapiens
  misc_RNA (1)...(19): siRNA sense strand
gaaaugugucuucagcuuu

SEQ ID NO: 523046 - RNA, 19 nt, Homo sapiens
  misc_RNA (1)...(19): siRNA sense strand
gggaaggaauugucugaug

SEQ ID NO: 523047 - RNA, 19 nt, Homo sapiens
  misc_RNA (1)...(19): siRNA sense strand
ggagcucagugccuuugua

SEQ ID NO: 523048 - RNA, 19 nt, Homo sapiens
  misc_RNA (1)...(19): siRNA sense strand
gaacagugccggcaagaag

SEQ ID NO: 523049 - RNA, 19 nt, Homo sapiens
  misc_RNA (1)...(19): siRNA sense strand
gcacacggacuuccuguau

SEQ ID NO: 523050 - RNA, 19 nt, Homo sapiens
  misc_RNA (1)...(19): siRNA sense strand
ggaugaagaugggaaggaa

SEQ ID NO: 523051 - RNA, 19 nt, Homo sapiens
  misc_RNA (1)...(19): siRNA sense strand
gagaagcccagugaauaua

SEQ ID NO: 523052 - RNA, 19 nt, Homo sapiens
  misc_RNA (1)...(19): siRNA sense strand
gcucagugccuuuguagaa

SEQ ID NO: 523053 - RNA, 19 nt, Homo sapiens
  misc_RNA (1)...(19): siRNA sense strand
gaagagggcaugaagacau

SEQ ID NO: 523054 - RNA, 19 nt, Homo sapiens
  misc_RNA (1)...(19): siRNA sense strand
guccaagacuuuagacuuc

SEQ ID NO: 523055 - RNA, 19 nt, Homo sapiens
  misc_RNA (1)...(19): siRNA sense strand
caacaagagugugaacauc

SEQ ID NO: 523056 - RNA, 19 nt, Homo sapiens
  misc_RNA (1)...(19): siRNA sense strand
agaaaugugucuucagcuu

SEQ ID NO: 523057 - RNA, 19 nt, Homo sapiens
  misc_RNA (1)...(19): siRNA sense strand
uugcaaagcacccagaaua

SEQ ID NO: 523058 - RNA, 19 nt, Homo sapiens
  misc_RNA (1)...(19): siRNA sense strand
gagcagaagcugacaccuu

SEQ ID NO: 523059 - RNA, 19 nt, Homo sapiens
  misc_RNA (1)...(19): siRNA sense strand
gaaaccagcagauucucuu

SEQ ID NO: 523060 - RNA, 19 nt, Homo sapiens
  misc_RNA (1)...(19): siRNA sense strand
aaaugugucuucagcuuug

SEQ ID NO: 523061 - RNA, 19 nt, Homo sapiens
  misc_RNA (1)...(19): siRNA sense strand
ccaaggauaugauuuucua

SEQ ID NO: 523062 - RNA, 19 nt, Homo sapiens
  misc_RNA (1)...(19): siRNA sense strand
caggaaacccgagcugaua

SEQ ID NO: 523063 - RNA, 19 nt, Homo sapiens
  misc_RNA (1)...(19): siRNA sense strand
gugcacgacuucacagaug

SEQ ID NO: 523064 - RNA, 19 nt, Homo sapiens
  misc_RNA (1)...(19): siRNA sense strand
gcaagaagugcaagagcuu

SEQ ID NO: 523065 - RNA, 19 nt, Homo sapiens
  misc_RNA (1)...(19): siRNA sense strand
gaaccuauagagauugaau

SEQ ID NO: 523066 - RNA, 19 nt, Homo sapiens
  misc_RNA (1)...(19): siRNA sense strand
ccacucaggguauugauga

SEQ ID NO: 523067 - RNA, 19 nt, Homo sapiens
  misc_RNA (1)...(19): siRNA sense strand
ggaaacccgagcugauauu

SEQ ID NO: 523068 - RNA, 19 nt, Homo sapiens
  misc_RNA (1)...(19): siRNA sense strand
gacaucauccggccuauca

SEQ ID NO: 523069 - RNA, 19 nt, Homo sapiens
  misc_RNA (1)...(19): siRNA sense strand
gugaaccuauagagauuga

SEQ ID NO: 523070 - RNA, 19 nt, Homo sapiens
  misc_RNA (1)...(19): siRNA sense strand
ggacauaagagcagaagcu

SEQ ID NO: 523071 - RNA, 19 nt, Homo sapiens
  misc_RNA (1)...(19): siRNA sense strand
gcaggaaacccgagcugau

SEQ ID NO: 523072 - RNA, 19 nt, Homo sapiens
  misc_RNA (1)...(19): siRNA sense strand
aagagggcaugaagacauu

SEQ ID NO: 523073 - RNA, 19 nt, Homo sapiens
  misc_RNA (1)...(19): siRNA sense strand
gaacaucaugcacgacaag

SEQ ID NO: 523074 - RNA, 19 nt, Homo sapiens
  misc_RNA (1)...(19): siRNA sense strand
gcacccaaggauaugauuu

SEQ ID NO: 523075 - RNA, 19 nt, Homo sapiens
  misc_RNA (1)...(19): siRNA sense strand
gaaacccgagcugauauug

SEQ ID NO: 523076 - RNA, 19 nt, Homo sapiens
  misc_RNA (1)...(19): siRNA sense strand
ccgugaaccuauagagauu

SEQ ID NO: 523077 - RNA, 19 nt, Homo sapiens
  misc_RNA (1)...(19): siRNA sense strand
ugaaggaccgugaaccuau

SEQ ID NO: 523078 - RNA, 19 nt, Homo sapiens
  misc_RNA (1)...(19): siRNA sense strand
gcacccagaauaccaggaa

SEQ ID NO: 523079 - RNA, 19 nt, Homo sapiens
  misc_RNA (1)...(19): siRNA sense strand
aaagagaaaccagcagauu

SEQ ID NO: 523080 - RNA, 19 nt, Homo sapiens
  misc_RNA (1)...(19): siRNA sense strand
aggagaagcccagugaaua

SEQ ID NO: 523081 - RNA, 19 nt, Homo sapiens
  misc_RNA (1)...(19): siRNA sense strand
gaugauuuccucaagaaca

SEQ ID NO: 523082 - RNA, 19 nt, Homo sapiens
  misc_RNA (1)...(19): siRNA sense strand
uggacagucugcagaaaug

SEQ ID NO: 523083 - RNA, 19 nt, Homo sapiens
  misc_RNA (1)...(19): siRNA sense strand
cacacggacuuccuguauu

SEQ ID NO: 523084 - RNA, 19 nt, Homo sapiens
  misc_RNA (1)...(19): siRNA sense strand
aauauuaucgggauccauu

SEQ ID NO: 523085 - RNA, 19 nt, Homo sapiens
  misc_RNA (1)...(19): siRNA sense strand
cucaggguauugaugauuu

SEQ ID NO: 523086 - RNA, 19 nt, Homo sapiens
  misc_RNA (1)...(19): siRNA sense strand
gaagaugggaaggaauugu

SEQ ID NO: 523087 - RNA, 19 nt, Homo sapiens
  misc_RNA (1)...(19): siRNA sense strand
uauaccaccuugcaaagca

SEQ ID NO: 523088 - RNA, 19 nt, Homo sapiens
  misc_RNA (1)...(19): siRNA sense strand
gcugagugguggugacaag

SEQ ID NO: 523089 - RNA, 19 nt, Homo sapiens
  misc_RNA (1)...(19): siRNA sense strand
ggucaccucuggcuuuuau

SEQ ID NO: 523090 - RNA, 19 nt, Homo sapiens
  misc_RNA (1)...(19): siRNA sense strand
cuugaagccuuauaugaag

SEQ ID NO: 523091 - RNA, 19 nt, Homo sapiens
  misc_RNA (1)...(19): siRNA sense strand
ucuugaagccuuauaugaa

SEQ ID NO: 523092 - RNA, 19 nt, Homo sapiens
  misc_RNA (1)...(19): siRNA sense strand
gaccgugaaccuauagaga

SEQ ID NO: 523093 - RNA, 19 nt, Homo sapiens
  misc_RNA (1)...(19): siRNA sense strand
agacuucauugaugugcuu

SEQ ID NO: 523094 - RNA, 19 nt, Homo sapiens
  misc_RNA (1)...(19): siRNA sense strand
acaagagugugaacaucau

SEQ ID NO: 523095 - RNA, 19 nt, Homo sapiens
  misc_RNA (1)...(19): siRNA sense strand
caaagcacccagaauacca

SEQ ID NO: 523096 - RNA, 19 nt, Homo sapiens
  misc_RNA (1)...(19): siRNA sense strand
gaaggaauugucugaugag

SEQ ID NO: 523097 - RNA, 19 nt, Homo sapiens
  misc_RNA (1)...(19): siRNA sense strand
gacuuuagacuucauugau

SEQ ID NO: 523098 - RNA, 19 nt, Homo sapiens
  misc_RNA (1)...(19): siRNA sense strand
ugacgccugccuuccauuu

SEQ ID NO: 523099 - RNA, 19 nt, Homo sapiens
  misc_RNA (1)...(19): siRNA sense strand
gcgcagaggguggacuuug

SEQ ID NO: 523100 - RNA, 19 nt, Homo sapiens
  misc_RNA (1)...(19): siRNA sense strand
uuccugaccaugugcauua

SEQ ID NO: 523101 - RNA, 19 nt, Homo sapiens
  misc_RNA (1)...(19): siRNA sense strand
caggagaagcccagugaau

SEQ ID NO: 523102 - RNA, 19 nt, Homo sapiens
  misc_RNA (1)...(19): siRNA sense strand
gaagccuuauaugaagauu

SEQ ID NO: 523103 - RNA, 19 nt, Homo sapiens
  misc_RNA (1)...(19): siRNA sense strand
ggaacagugccggcaagaa

SEQ ID NO: 523104 - RNA, 19 nt, Homo sapiens
  misc_RNA (1)...(19): siRNA sense strand
gagcucagugccuuuguag

SEQ ID NO: 523105 - RNA, 19 nt, Homo sapiens
  misc_RNA (1)...(19): siRNA sense strand
cauuacaacccaacugugu

SEQ ID NO: 523106 - RNA, 19 nt, Homo sapiens
  misc_RNA (1)...(19): siRNA sense strand
aagagaaaccagcagauuc

SEQ ID NO: 523107 - RNA, 19 nt, Homo sapiens
  misc_RNA (1)...(19): siRNA sense strand
ucaagaacaaggcaaaguc

SEQ ID NO: 523108 - RNA, 19 nt, Homo sapiens
  misc_RNA (1)...(19): siRNA sense strand
acuuuagacuucauugaug

SEQ ID NO: 523109 - RNA, 19 nt, Homo sapiens
  misc_RNA (1)...(19): siRNA sense strand
ucaacaagagugugaacau

SEQ ID NO: 523110 - RNA, 19 nt, Homo sapiens
  misc_RNA (1)...(19): siRNA sense strand
cgccauggcugagaugaag

SEQ ID NO: 523111 - RNA, 19 nt, Homo sapiens
  misc_RNA (1)...(19): siRNA sense strand
ugucugccuuaucaauauu

SEQ ID NO: 523112 - RNA, 19 nt, Homo sapiens
  misc_RNA (1)...(19): siRNA sense strand
aagcugacaccuucauguu

SEQ ID NO: 523113 - RNA, 19 nt, Homo sapiens
  misc_RNA (1)...(19): siRNA sense strand
ggaagagggcaugaagaca

SEQ ID NO: 523114 - RNA, 19 nt, Homo sapiens
  misc_RNA (1)...(19): siRNA sense strand
cugcagaaaugugucuuca

SEQ ID NO: 523115 - RNA, 19 nt, Homo sapiens
  misc_RNA (1)...(19): siRNA sense strand
gucaggagaagcccaguga

SEQ ID NO: 523116 - RNA, 19 nt, Homo sapiens
  misc_RNA (1)...(19): siRNA sense strand
uuaucgggauccauuacaa

SEQ ID NO: 523117 - RNA, 19 nt, Homo sapiens
  misc_RNA (1)...(19): siRNA sense strand
ccaagacuuuagacuucau

SEQ ID NO: 523118 - RNA, 19 nt, Homo sapiens
  misc_RNA (1)...(19): siRNA sense strand
ucaggguauugaugauuuc

SEQ ID NO: 523119 - RNA, 19 nt, Homo sapiens
  misc_RNA (1)...(19): siRNA sense strand
caucuugaagccuuauaug

SEQ ID NO: 523120 - RNA, 19 nt, Homo sapiens
  misc_RNA (1)...(19): siRNA sense strand
gauguugcacgcaggacuu

SEQ ID NO: 523121 - RNA, 19 nt, Homo sapiens
  misc_RNA (1)...(19): siRNA sense strand
cuuuagacuucauugaugu

SEQ ID NO: 523122 - RNA, 19 nt, Homo sapiens
  misc_RNA (1)...(19): siRNA sense strand
cggacuuccuguauuaucu

SEQ ID NO: 523123 - RNA, 19 nt, Homo sapiens
  misc_RNA (1)...(19): siRNA sense strand
cucagugccuuuguagaaa

SEQ ID NO: 523124 - RNA, 19 nt, Homo sapiens
  misc_RNA (1)...(19): siRNA sense strand
ugaacaucaugcacgacaa

SEQ ID NO: 523125 - RNA, 19 nt, Homo sapiens
  misc_RNA (1)...(19): siRNA sense strand
ugagggccaugacacuaca

SEQ ID NO: 523126 - RNA, 19 nt, Homo sapiens
  misc_RNA (1)...(19): siRNA sense strand
augauuuccucaagaacaa

SEQ ID NO: 523127 - RNA, 19 nt, Homo sapiens
  misc_RNA (1)...(19): siRNA sense strand
gagggcaugaagacauuga

SEQ ID NO: 523128 - RNA, 19 nt, Homo sapiens
  misc_RNA (1)...(19): siRNA sense strand
gcugagcaaggaugaagau

SEQ ID NO: 523129 - RNA, 19 nt, Homo sapiens
  misc_RNA (1)...(19): siRNA sense strand
acgccugccuuccauuuca

SEQ ID NO: 523130 - RNA, 19 nt, Homo sapiens
  misc_RNA (1)...(19): siRNA sense strand
uugucugccuuaucaauau

SEQ ID NO: 523131 - RNA, 19 nt, Homo sapiens
  misc_RNA (1)...(19): siRNA sense strand
gcaaagcacccagaauacc

SEQ ID NO: 523132 - RNA, 19 nt, Homo sapiens
  misc_RNA (1)...(19): siRNA sense strand
auauauugccgccaucuug

SEQ ID NO: 523133 - RNA, 19 nt, Homo sapiens
  misc_RNA (1)...(19): siRNA sense strand
agaagcccagugaauauau

SEQ ID NO: 523134 - RNA, 19 nt, Homo sapiens
  misc_RNA (1)...(19): siRNA sense strand
gcugucgcacccaaggaua

SEQ ID NO: 523135 - RNA, 19 nt, Homo sapiens
  misc_RNA (1)...(19): siRNA sense strand
caagacuuuagacuucauu

SEQ ID NO: 523136 - RNA, 19 nt, Homo sapiens
  misc_RNA (1)...(19): siRNA sense strand
guugacgccugccuuccau

SEQ ID NO: 523137 - RNA, 19 nt, Homo sapiens
  misc_RNA (1)...(19): siRNA sense strand
ggaagaagcacuccaccuu

SEQ ID NO: 523138 - RNA, 19 nt, Homo sapiens
  misc_RNA (1)...(19): siRNA sense strand
ugaauuaccugaaguacca

SEQ ID NO: 523139 - RNA, 19 nt, Homo sapiens
  misc_RNA (1)...(19): siRNA sense strand
ccaaaugaauuaccugaag

SEQ ID NO: 523140 - RNA, 19 nt, Homo sapiens
  misc_RNA (1)...(19): siRNA sense strand
gaacaaaguaaggaucuga

SEQ ID NO: 523141 - RNA, 19 nt, Homo sapiens
  misc_RNA (1)...(19): siRNA sense strand
gaaaucaccaagaugcaaa

SEQ ID NO: 523142 - RNA, 19 nt, Homo sapiens
  misc_RNA (1)...(19): siRNA sense strand
caaaugaauuaccugaagu

SEQ ID NO: 523143 - RNA, 19 nt, Homo sapiens
  misc_RNA (1)...(19): siRNA sense strand
cgcacgagcucauguggua

SEQ ID NO: 523144 - RNA, 19 nt, Homo sapiens
  misc_RNA (1)...(19): siRNA sense strand
ugcggaagcucaucacuga

SEQ ID NO: 523145 - RNA, 19 nt, Homo sapiens
  misc_RNA (1)...(19): siRNA sense strand
gaggaguucguccaaauga

SEQ ID NO: 523146 - RNA, 19 nt, Homo sapiens
  misc_RNA (1)...(19): siRNA sense strand
gguacgugcuggucaagga

SEQ ID NO: 523147 - RNA, 19 nt, Homo sapiens
  misc_RNA (1)...(19): siRNA sense strand
ucaccaagaugcaaaucau

SEQ ID NO: 523148 - RNA, 19 nt, Homo sapiens
  misc_RNA (1)...(19): siRNA sense strand
gagcgacccuaacuuugca

SEQ ID NO: 523149 - RNA, 19 nt, Homo sapiens
  misc_RNA (1)...(19): siRNA sense strand
gggcugcaccugaggcuaa

SEQ ID NO: 523150 - RNA, 19 nt, Homo sapiens
  misc_RNA (1)...(19): siRNA sense strand
ggaguucguccaaaugaau

SEQ ID NO: 523151 - RNA, 19 nt, Homo sapiens
  misc_RNA (1)...(19): siRNA sense strand
ucaaggaccagaagaagau

SEQ ID NO: 523152 - RNA, 19 nt, Homo sapiens
  misc_RNA (1)...(19): siRNA sense strand
gaucugagcgacccuaacu

SEQ ID NO: 523153 - RNA, 19 nt, Homo sapiens
  misc_RNA (1)...(19): siRNA sense strand
uaaccagccugcacaccau

SEQ ID NO: 523154 - RNA, 19 nt, Homo sapiens
  misc_RNA (1)...(19): siRNA sense strand
uuccagacauggugaaaga

SEQ ID NO: 523155 - RNA, 19 nt, Homo sapiens
  misc_RNA (1)...(19): siRNA sense strand
gagagagcgccgucuggaa

SEQ ID NO: 523156 - RNA, 19 nt, Homo sapiens
  misc_RNA (1)...(19): siRNA sense strand
ucugagcgacccuaacuuu

SEQ ID NO: 523157 - RNA, 19 nt, Homo sapiens
  misc_RNA (1)...(19): siRNA sense strand
gaccagaagaagaugauca

SEQ ID NO: 523158 - RNA, 19 nt, Homo sapiens
  misc_RNA (1)...(19): siRNA sense strand
gcccgaauacgaguucuuu

SEQ ID NO: 523159 - RNA, 19 nt, Homo sapiens
  misc_RNA (1)...(19): siRNA sense strand
cugaggaguucguccaaau

SEQ ID NO: 523160 - RNA, 19 nt, Homo sapiens
  misc_RNA (1)...(19): siRNA sense strand
agaugcaaaucauggaguu

SEQ ID NO: 523161 - RNA, 19 nt, Homo sapiens
  misc_RNA (1)...(19): siRNA sense strand
gagcucugcgggaggcuaa

SEQ ID NO: 523162 - RNA, 19 nt, Homo sapiens
  misc_RNA (1)...(19): siRNA sense strand
ccagacauggugaaagaug

SEQ ID NO: 523163 - RNA, 19 nt, Homo sapiens
  misc_RNA (1)...(19): siRNA sense strand
cgaaaucaccaagaugcaa

SEQ ID NO: 523164 - RNA, 19 nt, Homo sapiens
  misc_RNA (1)...(19): siRNA sense strand
gccgcgaaaucaccaagau

SEQ ID NO: 523165 - RNA, 19 nt, Homo sapiens
  misc_RNA (1)...(19): siRNA sense strand
gaguucguccaaaugaauu

SEQ ID NO: 523166 - RNA, 19 nt, Homo sapiens
  misc_RNA (1)...(19): siRNA sense strand
gcagugucucugaggacua

SEQ ID NO: 523167 - RNA, 19 nt, Homo sapiens
  misc_RNA (1)...(19): siRNA sense strand
ccaagaugcaaaucaugga

SEQ ID NO: 523168 - RNA, 19 nt, Homo sapiens
  misc_RNA (1)...(19): siRNA sense strand
gucaaggaccagaagaaga

SEQ ID NO: 523169 - RNA, 19 nt, Homo sapiens
  misc_RNA (1)...(19): siRNA sense strand
cagaacaaaguaaggaucu

SEQ ID NO: 523170 - RNA, 19 nt, Homo sapiens
  misc_RNA (1)...(19): siRNA sense strand
gcauuaaucucuuaccaua

SEQ ID NO: 523171 - RNA, 19 nt, Homo sapiens
  misc_RNA (1)...(19): siRNA sense strand
ugacagcauuaaucucuua

SEQ ID NO: 523172 - RNA, 19 nt, Homo sapiens
  misc_RNA (1)...(19): siRNA sense strand
ccaauguccucuugucuuu

SEQ ID NO: 523173 - RNA, 19 nt, Homo sapiens
  misc_RNA (1)...(19): siRNA sense strand
ggagacacaucaccuacuu

SEQ ID NO: 523174 - RNA, 19 nt, Homo sapiens
  misc_RNA (1)...(19): siRNA sense strand
ucaccaggcucaucaagaa

SEQ ID NO: 523175 - RNA, 19 nt, Homo sapiens
  misc_RNA (1)...(19): siRNA sense strand
ggauuacccuuccaacgaa

SEQ ID NO: 523176 - RNA, 19 nt, Homo sapiens
  misc_RNA (1)...(19): siRNA sense strand
caagaucgccguccuguau

SEQ ID NO: 523177 - RNA, 19 nt, Homo sapiens
  misc_RNA (1)...(19): siRNA sense strand
cgaacgaggugguguccua

SEQ ID NO: 523178 - RNA, 19 nt, Homo sapiens
  misc_RNA (1)...(19): siRNA sense strand
gcaaggaugguucagauga

SEQ ID NO: 523179 - RNA, 19 nt, Homo sapiens
  misc_RNA (1)...(19): siRNA sense strand
aaagggauguggccgcaua

SEQ ID NO: 523180 - RNA, 19 nt, Homo sapiens
  misc_RNA (1)...(19): siRNA sense strand
gcuauaaagugcucaucuu

SEQ ID NO: 523181 - RNA, 19 nt, Homo sapiens
  misc_RNA (1)...(19): siRNA sense strand
gaacugagcauggaaugug

SEQ ID NO: 523182 - RNA, 19 nt, Homo sapiens
  misc_RNA (1)...(19): siRNA sense strand
gaaggagaaguuuaagauu

SEQ ID NO: 523183 - RNA, 19 nt, Homo sapiens
  misc_RNA (1)...(19): siRNA sense strand
uuaaggucaucaaggauua

SEQ ID NO: 523184 - RNA, 19 nt, Homo sapiens
  misc_RNA (1)...(19): siRNA sense strand
ggagagauacuuugaacug

SEQ ID NO: 523185 - RNA, 19 nt, Homo sapiens
  misc_RNA (1)...(19): siRNA sense strand
ccaacacaguggccucuuu

SEQ ID NO: 523186 - RNA, 19 nt, Homo sapiens
  misc_RNA (1)...(19): siRNA sense strand
gaauguggccucaacaauc

SEQ ID NO: 523187 - RNA, 19 nt, Homo sapiens
  misc_RNA (1)...(19): siRNA sense strand
ccuccaaguuuaaucagua

SEQ ID NO: 523188 - RNA, 19 nt, Homo sapiens
  misc_RNA (1)...(19): siRNA sense strand
gcucucugcuccaugcuuu

SEQ ID NO: 523189 - RNA, 19 nt, Homo sapiens
  misc_RNA (1)...(19): siRNA sense strand
gaacuuggucaaauucaau

SEQ ID NO: 523190 - RNA, 19 nt, Homo sapiens
  misc_RNA (1)...(19): siRNA sense strand
aggaagagcuggcugacuu

SEQ ID NO: 523191 - RNA, 19 nt, Homo sapiens
  misc_RNA (1)...(19): siRNA sense strand
ggaacucgccgacaucugu

SEQ ID NO: 523192 - RNA, 19 nt, Homo sapiens
  misc_RNA (1)...(19): siRNA sense strand
aaggagaaguuuaagauuc

SEQ ID NO: 523193 - RNA, 19 nt, Homo sapiens
  misc_RNA (1)...(19): siRNA sense strand
ccaaggacguggacaagca

SEQ ID NO: 523194 - RNA, 19 nt, Homo sapiens
  misc_RNA (1)...(19): siRNA sense strand
uaucaucaccgcggaaaua

SEQ ID NO: 523195 - RNA, 19 nt, Homo sapiens
  misc_RNA (1)...(19): siRNA sense strand
gaggugguguccuaugaga

SEQ ID NO: 523196 - RNA, 19 nt, Homo sapiens
  misc_RNA (1)...(19): siRNA sense strand
gcugagaggagccguguuu

SEQ ID NO: 523197 - RNA, 19 nt, Homo sapiens
  misc_RNA (1)...(19): siRNA sense strand
ucaaggcccucacagacaa

SEQ ID NO: 523198 - RNA, 19 nt, Homo sapiens
  misc_RNA (1)...(19): siRNA sense strand
gaaauacugagagaacuga

SEQ ID NO: 523199 - RNA, 19 nt, Homo sapiens
  misc_RNA (1)...(19): siRNA sense strand
ugagagaacugagcaugga

SEQ ID NO: 523200 - RNA, 19 nt, Homo sapiens
  misc_RNA (1)...(19): siRNA sense strand
caucguccaugaccuguug

SEQ ID NO: 523201 - RNA, 19 nt, Homo sapiens
  misc_RNA (1)...(19): siRNA sense strand
gagagggacgccuuaaaga

SEQ ID NO: 523202 - RNA, 19 nt, Homo sapiens
  misc_RNA (1)...(19): siRNA sense strand
ccucacaggugcaucauag

SEQ ID NO: 523203 - RNA, 19 nt, Homo sapiens
  misc_RNA (1)...(19): siRNA sense strand
ucaacaggcaguucuauga

SEQ ID NO: 523204 - RNA, 19 nt, Homo sapiens
  misc_RNA (1)...(19): siRNA sense strand
ggagaaggccagagcaaca

SEQ ID NO: 523205 - RNA, 19 nt, Homo sapiens
  misc_RNA (1)...(19): siRNA sense strand
acauucagcuccacuacaa

SEQ ID NO: 523206 - RNA, 19 nt, Homo sapiens
  misc_RNA (1)...(19): siRNA sense strand
ucgaccagaucccaucaua

SEQ ID NO: 523207 - RNA, 19 nt, Homo sapiens
  misc_RNA (1)...(19): siRNA sense strand
caaauucaauagcuguuac

SEQ ID NO: 523208 - RNA, 19 nt, Homo sapiens
  misc_RNA (1)...(19): siRNA sense strand
ggaauguggccucaacaau

SEQ ID NO: 523209 - RNA, 19 nt, Homo sapiens
  misc_RNA (1)...(19): siRNA sense strand
uggccaagaucgugucuga

SEQ ID NO: 523210 - RNA, 19 nt, Homo sapiens
  misc_RNA (1)...(19): siRNA sense strand
gcaacgacuuuguguccau

SEQ ID NO: 523211 - RNA, 19 nt, Homo sapiens
  misc_RNA (1)...(19): siRNA sense strand
caauccugcugcccaauga

SEQ ID NO: 523212 - RNA, 19 nt, Homo sapiens
  misc_RNA (1)...(19): siRNA sense strand
ugaaggagaaguuuaagau

SEQ ID NO: 523213 - RNA, 19 nt, Homo sapiens
  misc_RNA (1)...(19): siRNA sense strand
gcuugaaggagaaguuuaa

SEQ ID NO: 523214 - RNA, 19 nt, Homo sapiens
  misc_RNA (1)...(19): siRNA sense strand
caaggaugguucagaugau

SEQ ID NO: 523215 - RNA, 19 nt, Homo sapiens
  misc_RNA (1)...(19): siRNA sense strand
ggaagagcuggcugacuuu

SEQ ID NO: 523216 - RNA, 19 nt, Homo sapiens
  misc_RNA (1)...(19): siRNA sense strand
gaaccugaucuccuauaga

SEQ ID NO: 523217 - RNA, 19 nt, Homo sapiens
  misc_RNA (1)...(19): siRNA sense strand
caacgacuuuguguccauu

SEQ ID NO: 523218 - RNA, 19 nt, Homo sapiens
  misc_RNA (1)...(19): siRNA sense strand
gaucggguccguuccaugu

SEQ ID NO: 523219 - RNA, 19 nt, Homo sapiens
  misc_RNA (1)...(19): siRNA sense strand
ccaggcucaucaagaagua

SEQ ID NO: 523220 - RNA, 19 nt, Homo sapiens
  misc_RNA (1)...(19): siRNA sense strand
ugauagggcagauuuguga

SEQ ID NO: 523221 - RNA, 19 nt, Homo sapiens
  misc_RNA (1)...(19): siRNA sense strand
ucaccuacuuggaggaaga

SEQ ID NO: 523222 - RNA, 19 nt, Homo sapiens
  misc_RNA (1)...(19): siRNA sense strand
gaagcucacgcacaucuca

SEQ ID NO: 523223 - RNA, 19 nt, Homo sapiens
  misc_RNA (1)...(19): siRNA sense strand
cugagucccugcgcuauaa

SEQ ID NO: 523224 - RNA, 19 nt, Homo sapiens
  misc_RNA (1)...(19): siRNA sense strand
aggaggagcugauuaacuc

SEQ ID NO: 523225 - RNA, 19 nt, Homo sapiens
  misc_RNA (1)...(19): siRNA sense strand
aaggacggcuggauucaga

SEQ ID NO: 523226 - RNA, 19 nt, Homo sapiens
  misc_RNA (1)...(19): siRNA sense strand
caggagagauacuuugaac

SEQ ID NO: 523227 - RNA, 19 nt, Homo sapiens
  misc_RNA (1)...(19): siRNA sense strand
ucuuuaaggucaucaagga

SEQ ID NO: 523228 - RNA, 19 nt, Homo sapiens
  misc_RNA (1)...(19): siRNA sense strand
ggacuucaccgaguuugug

SEQ ID NO: 523229 - RNA, 19 nt, Homo sapiens
  misc_RNA (1)...(19): siRNA sense strand
ggaaauacugagagaacug

SEQ ID NO: 523230 - RNA, 19 nt, Homo sapiens
  misc_RNA (1)...(19): siRNA sense strand
gcaguaugccaguguguuc

SEQ ID NO: 523231 - RNA, 19 nt, Homo sapiens
  misc_RNA (1)...(19): siRNA sense strand
gagaucguccuguccauca

SEQ ID NO: 523232 - RNA, 19 nt, Homo sapiens
  misc_RNA (1)...(19): siRNA sense strand
gacaaugggagacacauca

SEQ ID NO: 523233 - RNA, 19 nt, Homo sapiens
  misc_RNA (1)...(19): siRNA sense strand
gaugauagggcagauuugu

SEQ ID NO: 523234 - RNA, 19 nt, Homo sapiens
  misc_RNA (1)...(19): siRNA sense strand
cagacggaguuuaucauca

SEQ ID NO: 523235 - RNA, 19 nt, Homo sapiens
  misc_RNA (1)...(19): siRNA sense strand
aaaccaacaagcaaagauu

SEQ ID NO: 523236 - RNA, 19 nt, Homo sapiens
  misc_RNA (1)...(19): siRNA sense strand
gaaguuuaagauucuguug

SEQ ID NO: 523237 - RNA, 19 nt, Homo sapiens
  misc_RNA (1)...(19): siRNA sense strand
ucgcaaggaugguucagau

SEQ ID NO: 523238 - RNA, 19 nt, Homo sapiens
  misc_RNA (1)...(19): siRNA sense strand
guucaucguuacccucugu

SEQ ID NO: 523239 - RNA, 19 nt, Homo sapiens
  misc_RNA (1)...(19): siRNA sense strand
ccucggacaucaacaacau

SEQ ID NO: 523240 - RNA, 19 nt, Homo sapiens
  misc_RNA (1)...(19): siRNA sense strand
aaccugaucuccuauagag

SEQ ID NO: 523241 - RNA, 19 nt, Homo sapiens
  misc_RNA (1)...(19): siRNA sense strand
ccgcggaaauacugagaga

SEQ ID NO: 523242 - RNA, 19 nt, Homo sapiens
  misc_RNA (1)...(19): siRNA sense strand
gcccacaccuggcuaugag

SEQ ID NO: 523243 - RNA, 19 nt, Homo sapiens
  misc_RNA (1)...(19): siRNA sense strand
gguccaauguccucuuguc

SEQ ID NO: 523244 - RNA, 19 nt, Homo sapiens
  misc_RNA (1)...(19): siRNA sense strand
gcgguccaauguccucuug

SEQ ID NO: 523245 - RNA, 19 nt, Homo sapiens
  misc_RNA (1)...(19): siRNA sense strand
gaagagcuggcugacuuug

SEQ ID NO: 523246 - RNA, 19 nt, Homo sapiens
  misc_RNA (1)...(19): siRNA sense strand
ggaggacuucaccgaguuu

SEQ ID NO: 523247 - RNA, 19 nt, Homo sapiens
  misc_RNA (1)...(19): siRNA sense strand
acgcaaauauggccucaca

SEQ ID NO: 523248 - RNA, 19 nt, Homo sapiens
  misc_RNA (1)...(19): siRNA sense strand
caacacaguggccucuuuc

SEQ ID NO: 523249 - RNA, 19 nt, Homo sapiens
  misc_RNA (1)...(19): siRNA sense strand
ggccaaaccaacaagcaaa

SEQ ID NO: 523250 - RNA, 19 nt, Homo sapiens
  misc_RNA (1)...(19): siRNA sense strand
gaacaccgaggccaaaucc

SEQ ID NO: 523251 - RNA, 19 nt, Homo sapiens
  misc_RNA (1)...(19): siRNA sense strand
gggccauggucuucgaguu

SEQ ID NO: 523252 - RNA, 19 nt, Homo sapiens
  misc_RNA (1)...(19): siRNA sense strand
ccaaacagcgcgagauggu

SEQ ID NO: 523253 - RNA, 19 nt, Homo sapiens
  misc_RNA (1)...(19): siRNA sense strand
gacauucugcugaacauca

SEQ ID NO: 523254 - RNA, 19 nt, Homo sapiens
  misc_RNA (1)...(19): siRNA sense strand
cggaugauagggcagauuu

SEQ ID NO: 523255 - RNA, 19 nt, Homo sapiens
  misc_RNA (1)...(19): siRNA sense strand
caccggcucuauucucuca

SEQ ID NO: 523256 - RNA, 19 nt, Homo sapiens
  misc_RNA (1)...(19): siRNA sense strand
ccaccugggcaacgacuuu

SEQ ID NO: 523257 - RNA, 19 nt, Homo sapiens
  misc_RNA (1)...(19): siRNA sense strand
gcugagcccugagguuaag

SEQ ID NO: 523258 - RNA, 19 nt, Homo sapiens
  misc_RNA (1)...(19): siRNA sense strand
cggcugagcgcuucaagga

SEQ ID NO: 523259 - RNA, 19 nt, Homo sapiens
  misc_RNA (1)...(19): siRNA sense strand
ggccauggucuucgaguug

SEQ ID NO: 523260 - RNA, 19 nt, Homo sapiens
  misc_RNA (1)...(19): siRNA sense strand
cagcauuaaucucuuacca

SEQ ID NO: 523261 - RNA, 19 nt, Homo sapiens
  misc_RNA (1)...(19): siRNA sense strand
cuacauggagccagagaga

SEQ ID NO: 523262 - RNA, 19 nt, Homo sapiens
  misc_RNA (1)...(19): siRNA sense strand
ccacgcguguguaugagau

SEQ ID NO: 523263 - RNA, 19 nt, Homo sapiens
  misc_RNA (1)...(19): siRNA sense strand
acgaggugguguccuauga

SEQ ID NO: 523264 - RNA, 19 nt, Homo sapiens
  misc_RNA (1)...(19): siRNA sense strand
ggccaaggacggcuggauu

SEQ ID NO: 523265 - RNA, 19 nt, Homo sapiens
  misc_RNA (1)...(19): siRNA sense strand
aagcaccgcugcgacaaga

SEQ ID NO: 523266 - RNA, 19 nt, Homo sapiens
  misc_RNA (1)...(19): siRNA sense strand
gaccagaucccaucauacg

SEQ ID NO: 523267 - RNA, 19 nt, Homo sapiens
  misc_RNA (1)...(19): siRNA sense strand
guagagagggacgccuuaa

SEQ ID NO: 523268 - RNA, 19 nt, Homo sapiens
  misc_RNA (1)...(19): siRNA sense strand
gauacgucuucuccaacuu

SEQ ID NO: 523269 - RNA, 19 nt, Homo sapiens
  misc_RNA (1)...(19): siRNA sense strand
caaguuuaaucaguacauc

SEQ ID NO: 523270 - RNA, 19 nt, Homo sapiens
  misc_RNA (1)...(19): siRNA sense strand
gcauuaaucucuuaccaua

SEQ ID NO: 523271 - RNA, 19 nt, Homo sapiens
  misc_RNA (1)...(19): siRNA sense strand
ugacagcauuaaucucuua

SEQ ID NO: 523272 - RNA, 19 nt, Homo sapiens
  misc_RNA (1)...(19): siRNA sense strand
ccaauguccucuugucuuu

SEQ ID NO: 523273 - RNA, 19 nt, Homo sapiens
  misc_RNA (1)...(19): siRNA sense strand
ggagacacaucaccuacuu

SEQ ID NO: 523274 - RNA, 19 nt, Homo sapiens
  misc_RNA (1)...(19): siRNA sense strand
ucaccaggcucaucaagaa

SEQ ID NO: 523275 - RNA, 19 nt, Homo sapiens
  misc_RNA (1)...(19): siRNA sense strand
ggauuacccuuccaacgaa

SEQ ID NO: 523276 - RNA, 19 nt, Homo sapiens
  misc_RNA (1)...(19): siRNA sense strand
caagaucgccguccuguau

SEQ ID NO: 523277 - RNA, 19 nt, Homo sapiens
  misc_RNA (1)...(19): siRNA sense strand
cgaacgaggugguguccua

SEQ ID NO: 523278 - RNA, 19 nt, Homo sapiens
  misc_RNA (1)...(19): siRNA sense strand
gcaaggaugguucagauga

SEQ ID NO: 523279 - RNA, 19 nt, Homo sapiens
  misc_RNA (1)...(19): siRNA sense strand
aaagggauguggccgcaua

SEQ ID NO: 523280 - RNA, 19 nt, Homo sapiens
  misc_RNA (1)...(19): siRNA sense strand
gcuauaaagugcucaucuu

SEQ ID NO: 523281 - RNA, 19 nt, Homo sapiens
  misc_RNA (1)...(19): siRNA sense strand
gaacugagcauggaaugug

SEQ ID NO: 523282 - RNA, 19 nt, Homo sapiens
  misc_RNA (1)...(19): siRNA sense strand
gaaggagaaguuuaagauu

SEQ ID NO: 523283 - RNA, 19 nt, Homo sapiens
  misc_RNA (1)...(19): siRNA sense strand
uuaaggucaucaaggauua

SEQ ID NO: 523284 - RNA, 19 nt, Homo sapiens
  misc_RNA (1)...(19): siRNA sense strand
ggagagauacuuugaacug

SEQ ID NO: 523285 - RNA, 19 nt, Homo sapiens
  misc_RNA (1)...(19): siRNA sense strand
ccaacacaguggccucuuu

SEQ ID NO: 523286 - RNA, 19 nt, Homo sapiens
  misc_RNA (1)...(19): siRNA sense strand
gaauguggccucaacaauc

SEQ ID NO: 523287 - RNA, 19 nt, Homo sapiens
  misc_RNA (1)...(19): siRNA sense strand
ccuccaaguuuaaucagua

SEQ ID NO: 523288 - RNA, 19 nt, Homo sapiens
  misc_RNA (1)...(19): siRNA sense strand
gcucucugcuccaugcuuu

SEQ ID NO: 523289 - RNA, 19 nt, Homo sapiens
  misc_RNA (1)...(19): siRNA sense strand
gaacuuggucaaauucaau

SEQ ID NO: 523290 - RNA, 19 nt, Homo sapiens
  misc_RNA (1)...(19): siRNA sense strand
aggaagagcuggcugacuu

SEQ ID NO: 523291 - RNA, 19 nt, Homo sapiens
  misc_RNA (1)...(19): siRNA sense strand
ggaacucgccgacaucugu

SEQ ID NO: 523292 - RNA, 19 nt, Homo sapiens
  misc_RNA (1)...(19): siRNA sense strand
aaggagaaguuuaagauuc

SEQ ID NO: 523293 - RNA, 19 nt, Homo sapiens
  misc_RNA (1)...(19): siRNA sense strand
ccaaggacguggacaagca

SEQ ID NO: 523294 - RNA, 19 nt, Homo sapiens
  misc_RNA (1)...(19): siRNA sense strand
uaucaucaccgcggaaaua

SEQ ID NO: 523295 - RNA, 19 nt, Homo sapiens
  misc_RNA (1)...(19): siRNA sense strand
gaggugguguccuaugaga

SEQ ID NO: 523296 - RNA, 19 nt, Homo sapiens
  misc_RNA (1)...(19): siRNA sense strand
gcugagaggagccguguuu

SEQ ID NO: 523297 - RNA, 19 nt, Homo sapiens
  misc_RNA (1)...(19): siRNA sense strand
ucaaggcccucacagacaa

SEQ ID NO: 523298 - RNA, 19 nt, Homo sapiens
  misc_RNA (1)...(19): siRNA sense strand
gaaauacugagagaacuga

SEQ ID NO: 523299 - RNA, 19 nt, Homo sapiens
  misc_RNA (1)...(19): siRNA sense strand
ugagagaacugagcaugga

SEQ ID NO: 523300 - RNA, 19 nt, Homo sapiens
  misc_RNA (1)...(19): siRNA sense strand
caucguccaugaccuguug

SEQ ID NO: 523301 - RNA, 19 nt, Homo sapiens
  misc_RNA (1)...(19): siRNA sense strand
gagagggacgccuuaaaga

SEQ ID NO: 523302 - RNA, 19 nt, Homo sapiens
  misc_RNA (1)...(19): siRNA sense strand
ccucacaggugcaucauag

SEQ ID NO: 523303 - RNA, 19 nt, Homo sapiens
  misc_RNA (1)...(19): siRNA sense strand
ucaacaggcaguucuauga

SEQ ID NO: 523304 - RNA, 19 nt, Homo sapiens
  misc_RNA (1)...(19): siRNA sense strand
ggagaaggccagagcaaca

SEQ ID NO: 523305 - RNA, 19 nt, Homo sapiens
  misc_RNA (1)...(19): siRNA sense strand
acauucagcuccacuacaa

SEQ ID NO: 523306 - RNA, 19 nt, Homo sapiens
  misc_RNA (1)...(19): siRNA sense strand
ucgaccagaucccaucaua

SEQ ID NO: 523307 - RNA, 19 nt, Homo sapiens
  misc_RNA (1)...(19): siRNA sense strand
caaauucaauagcuguuac

SEQ ID NO: 523308 - RNA, 19 nt, Homo sapiens
  misc_RNA (1)...(19): siRNA sense strand
ggaauguggccucaacaau

SEQ ID NO: 523309 - RNA, 19 nt, Homo sapiens
  misc_RNA (1)...(19): siRNA sense strand
uggccaagaucgugucuga

SEQ ID NO: 523310 - RNA, 19 nt, Homo sapiens
  misc_RNA (1)...(19): siRNA sense strand
gcaacgacuuuguguccau

SEQ ID NO: 523311 - RNA, 19 nt, Homo sapiens
  misc_RNA (1)...(19): siRNA sense strand
caauccugcugcccaauga

SEQ ID NO: 523312 - RNA, 19 nt, Homo sapiens
  misc_RNA (1)...(19): siRNA sense strand
ugaaggagaaguuuaagau

SEQ ID NO: 523313 - RNA, 19 nt, Homo sapiens
  misc_RNA (1)...(19): siRNA sense strand
gcuugaaggagaaguuuaa

SEQ ID NO: 523314 - RNA, 19 nt, Homo sapiens
  misc_RNA (1)...(19): siRNA sense strand
caaggaugguucagaugau

SEQ ID NO: 523315 - RNA, 19 nt, Homo sapiens
  misc_RNA (1)...(19): siRNA sense strand
ggaagagcuggcugacuuu

SEQ ID NO: 523316 - RNA, 19 nt, Homo sapiens
  misc_RNA (1)...(19): siRNA sense strand
gaaccugaucuccuauaga

SEQ ID NO: 523317 - RNA, 19 nt, Homo sapiens
  misc_RNA (1)...(19): siRNA sense strand
caacgacuuuguguccauu

SEQ ID NO: 523318 - RNA, 19 nt, Homo sapiens
  misc_RNA (1)...(19): siRNA sense strand
gaucggguccguuccaugu

SEQ ID NO: 523319 - RNA, 19 nt, Homo sapiens
  misc_RNA (1)...(19): siRNA sense strand
ccaggcucaucaagaagua

SEQ ID NO: 523320 - RNA, 19 nt, Homo sapiens
  misc_RNA (1)...(19): siRNA sense strand
ugauagggcagauuuguga

SEQ ID NO: 523321 - RNA, 19 nt, Homo sapiens
  misc_RNA (1)...(19): siRNA sense strand
ucaccuacuuggaggaaga

SEQ ID NO: 523322 - RNA, 19 nt, Homo sapiens
  misc_RNA (1)...(19): siRNA sense strand
gaagcucacgcacaucuca

SEQ ID NO: 523323 - RNA, 19 nt, Homo sapiens
  misc_RNA (1)...(19): siRNA sense strand
cugagucccugcgcuauaa

SEQ ID NO: 523324 - RNA, 19 nt, Homo sapiens
  misc_RNA (1)...(19): siRNA sense strand
aggaggagcugauuaacuc

SEQ ID NO: 523325 - RNA, 19 nt, Homo sapiens
  misc_RNA (1)...(19): siRNA sense strand
aaggacggcuggauucaga

SEQ ID NO: 523326 - RNA, 19 nt, Homo sapiens
  misc_RNA (1)...(19): siRNA sense strand
caggagagauacuuugaac

SEQ ID NO: 523327 - RNA, 19 nt, Homo sapiens
  misc_RNA (1)...(19): siRNA sense strand
ucuuuaaggucaucaagga

SEQ ID NO: 523328 - RNA, 19 nt, Homo sapiens
  misc_RNA (1)...(19): siRNA sense strand
ggacuucaccgaguuugug

SEQ ID NO: 523329 - RNA, 19 nt, Homo sapiens
  misc_RNA (1)...(19): siRNA sense strand
ggaaauacugagagaacug

SEQ ID NO: 523330 - RNA, 19 nt, Homo sapiens
  misc_RNA (1)...(19): siRNA sense strand
gcaguaugccaguguguuc

SEQ ID NO: 523331 - RNA, 19 nt, Homo sapiens
  misc_RNA (1)...(19): siRNA sense strand
gagaucguccuguccauca

SEQ ID NO: 523332 - RNA, 19 nt, Homo sapiens
  misc_RNA (1)...(19): siRNA sense strand
gacaaugggagacacauca

SEQ ID NO: 523333 - RNA, 19 nt, Homo sapiens
  misc_RNA (1)...(19): siRNA sense strand
gaugauagggcagauuugu

SEQ ID NO: 523334 - RNA, 19 nt, Homo sapiens
  misc_RNA (1)...(19): siRNA sense strand
cagacggaguuuaucauca

SEQ ID NO: 523335 - RNA, 19 nt, Homo sapiens
  misc_RNA (1)...(19): siRNA sense strand
aaaccaacaagcaaagauu

SEQ ID NO: 523336 - RNA, 19 nt, Homo sapiens
  misc_RNA (1)...(19): siRNA sense strand
gaaguuuaagauucuguug

SEQ ID NO: 523337 - RNA, 19 nt, Homo sapiens
  misc_RNA (1)...(19): siRNA sense strand
ucgcaaggaugguucagau

SEQ ID NO: 523338 - RNA, 19 nt, Homo sapiens
  misc_RNA (1)...(19): siRNA sense strand
guucaucguuacccucugu

SEQ ID NO: 523339 - RNA, 19 nt, Homo sapiens
  misc_RNA (1)...(19): siRNA sense strand
ccucggacaucaacaacau

SEQ ID NO: 523340 - RNA, 19 nt, Homo sapiens
  misc_RNA (1)...(19): siRNA sense strand
aaccugaucuccuauagag

SEQ ID NO: 523341 - RNA, 19 nt, Homo sapiens
  misc_RNA (1)...(19): siRNA sense strand
ccgcggaaauacugagaga

SEQ ID NO: 523342 - RNA, 19 nt, Homo sapiens
  misc_RNA (1)...(19): siRNA sense strand
gcccacaccuggcuaugag

SEQ ID NO: 523343 - RNA, 19 nt, Homo sapiens
  misc_RNA (1)...(19): siRNA sense strand
gguccaauguccucuuguc

SEQ ID NO: 523344 - RNA, 19 nt, Homo sapiens
  misc_RNA (1)...(19): siRNA sense strand
gcgguccaauguccucuug

SEQ ID NO: 523345 - RNA, 19 nt, Homo sapiens
  misc_RNA (1)...(19): siRNA sense strand
gaagagcuggcugacuuug

SEQ ID NO: 523346 - RNA, 19 nt, Homo sapiens
  misc_RNA (1)...(19): siRNA sense strand
ggaggacuucaccgaguuu

SEQ ID NO: 523347 - RNA, 19 nt, Homo sapiens
  misc_RNA (1)...(19): siRNA sense strand
acgcaaauauggccucaca

SEQ ID NO: 523348 - RNA, 19 nt, Homo sapiens
  misc_RNA (1)...(19): siRNA sense strand
caacacaguggccucuuuc

SEQ ID NO: 523349 - RNA, 19 nt, Homo sapiens
  misc_RNA (1)...(19): siRNA sense strand
ggccaaaccaacaagcaaa

SEQ ID NO: 523350 - RNA, 19 nt, Homo sapiens
  misc_RNA (1)...(19): siRNA sense strand
gaacaccgaggccaaaucc

SEQ ID NO: 523351 - RNA, 19 nt, Homo sapiens
  misc_RNA (1)...(19): siRNA sense strand
gggccauggucuucgaguu

SEQ ID NO: 523352 - RNA, 19 nt, Homo sapiens
  misc_RNA (1)...(19): siRNA sense strand
ccaaacagcgcgagauggu

SEQ ID NO: 523353 - RNA, 19 nt, Homo sapiens
  misc_RNA (1)...(19): siRNA sense strand
gacauucugcugaacauca

SEQ ID NO: 523354 - RNA, 19 nt, Homo sapiens
  misc_RNA (1)...(19): siRNA sense strand
cggaugauagggcagauuu

SEQ ID NO: 523355 - RNA, 19 nt, Homo sapiens
  misc_RNA (1)...(19): siRNA sense strand
caccggcucuauucucuca

SEQ ID NO: 523356 - RNA, 19 nt, Homo sapiens
  misc_RNA (1)...(19): siRNA sense strand
ccaccugggcaacgacuuu

SEQ ID NO: 523357 - RNA, 19 nt, Homo sapiens
  misc_RNA (1)...(19): siRNA sense strand
gcugagcccugagguuaag

SEQ ID NO: 523358 - RNA, 19 nt, Homo sapiens
  misc_RNA (1)...(19): siRNA sense strand
cggcugagcgcuucaagga

SEQ ID NO: 523359 - RNA, 19 nt, Homo sapiens
  misc_RNA (1)...(19): siRNA sense strand
ggccauggucuucgaguug

SEQ ID NO: 523360 - RNA, 19 nt, Homo sapiens
  misc_RNA (1)...(19): siRNA sense strand
cagcauuaaucucuuacca

SEQ ID NO: 523361 - RNA, 19 nt, Homo sapiens
  misc_RNA (1)...(19): siRNA sense strand
cuacauggagccagagaga

SEQ ID NO: 523362 - RNA, 19 nt, Homo sapiens
  misc_RNA (1)...(19): siRNA sense strand
ccacgcguguguaugagau

SEQ ID NO: 523363 - RNA, 19 nt, Homo sapiens
  misc_RNA (1)...(19): siRNA sense strand
acgaggugguguccuauga

SEQ ID NO: 523364 - RNA, 19 nt, Homo sapiens
  misc_RNA (1)...(19): siRNA sense strand
ggccaaggacggcuggauu

SEQ ID NO: 523365 - RNA, 19 nt, Homo sapiens
  misc_RNA (1)...(19): siRNA sense strand
aagcaccgcugcgacaaga

SEQ ID NO: 523366 - RNA, 19 nt, Homo sapiens
  misc_RNA (1)...(19): siRNA sense strand
gaccagaucccaucauacg

SEQ ID NO: 523367 - RNA, 19 nt, Homo sapiens
  misc_RNA (1)...(19): siRNA sense strand
guagagagggacgccuuaa

SEQ ID NO: 523368 - RNA, 19 nt, Homo sapiens
  misc_RNA (1)...(19): siRNA sense strand
gauacgucuucuccaacuu

SEQ ID NO: 523369 - RNA, 19 nt, Homo sapiens
  misc_RNA (1)...(19): siRNA sense strand
caaguuuaaucaguacauc

SEQ ID NO: 523370 - RNA, 19 nt, Homo sapiens
  misc_RNA (1)...(19): siRNA sense strand
gcauuaaucucuuaccaua

SEQ ID NO: 523371 - RNA, 19 nt, Homo sapiens
  misc_RNA (1)...(19): siRNA sense strand
ugacagcauuaaucucuua

SEQ ID NO: 523372 - RNA, 19 nt, Homo sapiens
  misc_RNA (1)...(19): siRNA sense strand
ccaauguccucuugucuuu

SEQ ID NO: 523373 - RNA, 19 nt, Homo sapiens
  misc_RNA (1)...(19): siRNA sense strand
ggagacacaucaccuacuu

SEQ ID NO: 523374 - RNA, 19 nt, Homo sapiens
  misc_RNA (1)...(19): siRNA sense strand
ucaccaggcucaucaagaa

SEQ ID NO: 523375 - RNA, 19 nt, Homo sapiens
  misc_RNA (1)...(19): siRNA sense strand
ggauuacccuuccaacgaa

SEQ ID NO: 523376 - RNA, 19 nt, Homo sapiens
  misc_RNA (1)...(19): siRNA sense strand
caagaucgccguccuguau

SEQ ID NO: 523377 - RNA, 19 nt, Homo sapiens
  misc_RNA (1)...(19): siRNA sense strand
cgaacgaggugguguccua

SEQ ID NO: 523378 - RNA, 19 nt, Homo sapiens
  misc_RNA (1)...(19): siRNA sense strand
gcaaggaugguucagauga

SEQ ID NO: 523379 - RNA, 19 nt, Homo sapiens
  misc_RNA (1)...(19): siRNA sense strand
aaagggauguggccgcaua

SEQ ID NO: 523380 - RNA, 19 nt, Homo sapiens
  misc_RNA (1)...(19): siRNA sense strand
gcuauaaagugcucaucuu

SEQ ID NO: 523381 - RNA, 19 nt, Homo sapiens
  misc_RNA (1)...(19): siRNA sense strand
gaacugagcauggaaugug

SEQ ID NO: 523382 - RNA, 19 nt, Homo sapiens
  misc_RNA (1)...(19): siRNA sense strand
gaaggagaaguuuaagauu

SEQ ID NO: 523383 - RNA, 19 nt, Homo sapiens
  misc_RNA (1)...(19): siRNA sense strand
uuaaggucaucaaggauua

SEQ ID NO: 523384 - RNA, 19 nt, Homo sapiens
  misc_RNA (1)...(19): siRNA sense strand
ggagagauacuuugaacug

SEQ ID NO: 523385 - RNA, 19 nt, Homo sapiens
  misc_RNA (1)...(19): siRNA sense strand
ccaacacaguggccucuuu

SEQ ID NO: 523386 - RNA, 19 nt, Homo sapiens
  misc_RNA (1)...(19): siRNA sense strand
gaauguggccucaacaauc

SEQ ID NO: 523387 - RNA, 19 nt, Homo sapiens
  misc_RNA (1)...(19): siRNA sense strand
ccuccaaguuuaaucagua

SEQ ID NO: 523388 - RNA, 19 nt, Homo sapiens
  misc_RNA (1)...(19): siRNA sense strand
gcucucugcuccaugcuuu

SEQ ID NO: 523389 - RNA, 19 nt, Homo sapiens
  misc_RNA (1)...(19): siRNA sense strand
gaacuuggucaaauucaau

SEQ ID NO: 523390 - RNA, 19 nt, Homo sapiens
  misc_RNA (1)...(19): siRNA sense strand
aggaagagcuggcugacuu

SEQ ID NO: 523391 - RNA, 19 nt, Homo sapiens
  misc_RNA (1)...(19): siRNA sense strand
ggaacucgccgacaucugu

SEQ ID NO: 523392 - RNA, 19 nt, Homo sapiens
  misc_RNA (1)...(19): siRNA sense strand
aaggagaaguuuaagauuc

SEQ ID NO: 523393 - RNA, 19 nt, Homo sapiens
  misc_RNA (1)...(19): siRNA sense strand
ccaaggacguggacaagca

SEQ ID NO: 523394 - RNA, 19 nt, Homo sapiens
  misc_RNA (1)...(19): siRNA sense strand
uaucaucaccgcggaaaua

SEQ ID NO: 523395 - RNA, 19 nt, Homo sapiens
  misc_RNA (1)...(19): siRNA sense strand
gaggugguguccuaugaga

SEQ ID NO: 523396 - RNA, 19 nt, Homo sapiens
  misc_RNA (1)...(19): siRNA sense strand
gcugagaggagccguguuu

SEQ ID NO: 523397 - RNA, 19 nt, Homo sapiens
  misc_RNA (1)...(19): siRNA sense strand
ucaaggcccucacagacaa

SEQ ID NO: 523398 - RNA, 19 nt, Homo sapiens
  misc_RNA (1)...(19): siRNA sense strand
gaaauacugagagaacuga

SEQ ID NO: 523399 - RNA, 19 nt, Homo sapiens
  misc_RNA (1)...(19): siRNA sense strand
ugagagaacugagcaugga

SEQ ID NO: 523400 - RNA, 19 nt, Homo sapiens
  misc_RNA (1)...(19): siRNA sense strand
caucguccaugaccuguug

SEQ ID NO: 523401 - RNA, 19 nt, Homo sapiens
  misc_RNA (1)...(19): siRNA sense strand
gagagggacgccuuaaaga

SEQ ID NO: 523402 - RNA, 19 nt, Homo sapiens
  misc_RNA (1)...(19): siRNA sense strand
ccucacaggugcaucauag

SEQ ID NO: 523403 - RNA, 19 nt, Homo sapiens
  misc_RNA (1)...(19): siRNA sense strand
ucaacaggcaguucuauga

SEQ ID NO: 523404 - RNA, 19 nt, Homo sapiens
  misc_RNA (1)...(19): siRNA sense strand
ggagaaggccagagcaaca

SEQ ID NO: 523405 - RNA, 19 nt, Homo sapiens
  misc_RNA (1)...(19): siRNA sense strand
acauucagcuccacuacaa

SEQ ID NO: 523406 - RNA, 19 nt, Homo sapiens
  misc_RNA (1)...(19): siRNA sense strand
ucgaccagaucccaucaua

SEQ ID NO: 523407 - RNA, 19 nt, Homo sapiens
  misc_RNA (1)...(19): siRNA sense strand
caaauucaauagcuguuac

SEQ ID NO: 523408 - RNA, 19 nt, Homo sapiens
  misc_RNA (1)...(19): siRNA sense strand
ggaauguggccucaacaau

SEQ ID NO: 523409 - RNA, 19 nt, Homo sapiens
  misc_RNA (1)...(19): siRNA sense strand
uggccaagaucgugucuga

SEQ ID NO: 523410 - RNA, 19 nt, Homo sapiens
  misc_RNA (1)...(19): siRNA sense strand
gcaacgacuuuguguccau

SEQ ID NO: 523411 - RNA, 19 nt, Homo sapiens
  misc_RNA (1)...(19): siRNA sense strand
caauccugcugcccaauga

SEQ ID NO: 523412 - RNA, 19 nt, Homo sapiens
  misc_RNA (1)...(19): siRNA sense strand
ugaaggagaaguuuaagau

SEQ ID NO: 523413 - RNA, 19 nt, Homo sapiens
  misc_RNA (1)...(19): siRNA sense strand
gcuugaaggagaaguuuaa

SEQ ID NO: 523414 - RNA, 19 nt, Homo sapiens
  misc_RNA (1)...(19): siRNA sense strand
caaggaugguucagaugau

SEQ ID NO: 523415 - RNA, 19 nt, Homo sapiens
  misc_RNA (1)...(19): siRNA sense strand
ggaagagcuggcugacuuu

SEQ ID NO: 523416 - RNA, 19 nt, Homo sapiens
  misc_RNA (1)...(19): siRNA sense strand
gaaccugaucuccuauaga

SEQ ID NO: 523417 - RNA, 19 nt, Homo sapiens
  misc_RNA (1)...(19): siRNA sense strand
caacgacuuuguguccauu

SEQ ID NO: 523418 - RNA, 19 nt, Homo sapiens
  misc_RNA (1)...(19): siRNA sense strand
gaucggguccguuccaugu

SEQ ID NO: 523419 - RNA, 19 nt, Homo sapiens
  misc_RNA (1)...(19): siRNA sense strand
ccaggcucaucaagaagua

SEQ ID NO: 523420 - RNA, 19 nt, Homo sapiens
  misc_RNA (1)...(19): siRNA sense strand
ugauagggcagauuuguga

SEQ ID NO: 523421 - RNA, 19 nt, Homo sapiens
  misc_RNA (1)...(19): siRNA sense strand
ucaccuacuuggaggaaga

SEQ ID NO: 523422 - RNA, 19 nt, Homo sapiens
  misc_RNA (1)...(19): siRNA sense strand
gaagcucacgcacaucuca

SEQ ID NO: 523423 - RNA, 19 nt, Homo sapiens
  misc_RNA (1)...(19): siRNA sense strand
cugagucccugcgcuauaa

SEQ ID NO: 523424 - RNA, 19 nt, Homo sapiens
  misc_RNA (1)...(19): siRNA sense strand
aggaggagcugauuaacuc

SEQ ID NO: 523425 - RNA, 19 nt, Homo sapiens
  misc_RNA (1)...(19): siRNA sense strand
aaggacggcuggauucaga

SEQ ID NO: 523426 - RNA, 19 nt, Homo sapiens
  misc_RNA (1)...(19): siRNA sense strand
caggagagauacuuugaac

SEQ ID NO: 523427 - RNA, 19 nt, Homo sapiens
  misc_RNA (1)...(19): siRNA sense strand
ucuuuaaggucaucaagga

SEQ ID NO: 523428 - RNA, 19 nt, Homo sapiens
  misc_RNA (1)...(19): siRNA sense strand
ggacuucaccgaguuugug

SEQ ID NO: 523429 - RNA, 19 nt, Homo sapiens
  misc_RNA (1)...(19): siRNA sense strand
ggaaauacugagagaacug

SEQ ID NO: 523430 - RNA, 19 nt, Homo sapiens
  misc_RNA (1)...(19): siRNA sense strand
gcaguaugccaguguguuc

SEQ ID NO: 523431 - RNA, 19 nt, Homo sapiens
  misc_RNA (1)...(19): siRNA sense strand
gagaucguccuguccauca

SEQ ID NO: 523432 - RNA, 19 nt, Homo sapiens
  misc_RNA (1)...(19): siRNA sense strand
gacaaugggagacacauca

SEQ ID NO: 523433 - RNA, 19 nt, Homo sapiens
  misc_RNA (1)...(19): siRNA sense strand
gaugauagggcagauuugu

SEQ ID NO: 523434 - RNA, 19 nt, Homo sapiens
  misc_RNA (1)...(19): siRNA sense strand
cagacggaguuuaucauca

SEQ ID NO: 523435 - RNA, 19 nt, Homo sapiens
  misc_RNA (1)...(19): siRNA sense strand
aaaccaacaagcaaagauu

SEQ ID NO: 523436 - RNA, 19 nt, Homo sapiens
  misc_RNA (1)...(19): siRNA sense strand
gaaguuuaagauucuguug

SEQ ID NO: 523437 - RNA, 19 nt, Homo sapiens
  misc_RNA (1)...(19): siRNA sense strand
ucgcaaggaugguucagau

SEQ ID NO: 523438 - RNA, 19 nt, Homo sapiens
  misc_RNA (1)...(19): siRNA sense strand
guucaucguuacccucugu

SEQ ID NO: 523439 - RNA, 19 nt, Homo sapiens
  misc_RNA (1)...(19): siRNA sense strand
ccucggacaucaacaacau

SEQ ID NO: 523440 - RNA, 19 nt, Homo sapiens
  misc_RNA (1)...(19): siRNA sense strand
aaccugaucuccuauagag

SEQ ID NO: 523441 - RNA, 19 nt, Homo sapiens
  misc_RNA (1)...(19): siRNA sense strand
ccgcggaaauacugagaga

SEQ ID NO: 523442 - RNA, 19 nt, Homo sapiens
  misc_RNA (1)...(19): siRNA sense strand
gcccacaccuggcuaugag

SEQ ID NO: 523443 - RNA, 19 nt, Homo sapiens
  misc_RNA (1)...(19): siRNA sense strand
gguccaauguccucuuguc

SEQ ID NO: 523444 - RNA, 19 nt, Homo sapiens
  misc_RNA (1)...(19): siRNA sense strand
gcgguccaauguccucuug

SEQ ID NO: 523445 - RNA, 19 nt, Homo sapiens
  misc_RNA (1)...(19): siRNA sense strand
gaagagcuggcugacuuug

SEQ ID NO: 523446 - RNA, 19 nt, Homo sapiens
  misc_RNA (1)...(19): siRNA sense strand
ggaggacuucaccgaguuu

SEQ ID NO: 523447 - RNA, 19 nt, Homo sapiens
  misc_RNA (1)...(19): siRNA sense strand
acgcaaauauggccucaca

SEQ ID NO: 523448 - RNA, 19 nt, Homo sapiens
  misc_RNA (1)...(19): siRNA sense strand
caacacaguggccucuuuc

SEQ ID NO: 523449 - RNA, 19 nt, Homo sapiens
  misc_RNA (1)...(19): siRNA sense strand
ggccaaaccaacaagcaaa

SEQ ID NO: 523450 - RNA, 19 nt, Homo sapiens
  misc_RNA (1)...(19): siRNA sense strand
gaacaccgaggccaaaucc

SEQ ID NO: 523451 - RNA, 19 nt, Homo sapiens
  misc_RNA (1)...(19): siRNA sense strand
gggccauggucuucgaguu

SEQ ID NO: 523452 - RNA, 19 nt, Homo sapiens
  misc_RNA (1)...(19): siRNA sense strand
ccaaacagcgcgagauggu

SEQ ID NO: 523453 - RNA, 19 nt, Homo sapiens
  misc_RNA (1)...(19): siRNA sense strand
gacauucugcugaacauca

SEQ ID NO: 523454 - RNA, 19 nt, Homo sapiens
  misc_RNA (1)...(19): siRNA sense strand
cggaugauagggcagauuu

SEQ ID NO: 523455 - RNA, 19 nt, Homo sapiens
  misc_RNA (1)...(19): siRNA sense strand
caccggcucuauucucuca

SEQ ID NO: 523456 - RNA, 19 nt, Homo sapiens
  misc_RNA (1)...(19): siRNA sense strand
ccaccugggcaacgacuuu

SEQ ID NO: 523457 - RNA, 19 nt, Homo sapiens
  misc_RNA (1)...(19): siRNA sense strand
gcugagcccugagguuaag

SEQ ID NO: 523458 - RNA, 19 nt, Homo sapiens
  misc_RNA (1)...(19): siRNA sense strand
cggcugagcgcuucaagga

SEQ ID NO: 523459 - RNA, 19 nt, Homo sapiens
  misc_RNA (1)...(19): siRNA sense strand
ggccauggucuucgaguug

SEQ ID NO: 523460 - RNA, 19 nt, Homo sapiens
  misc_RNA (1)...(19): siRNA sense strand
cagcauuaaucucuuacca

SEQ ID NO: 523461 - RNA, 19 nt, Homo sapiens
  misc_RNA (1)...(19): siRNA sense strand
cuacauggagccagagaga

SEQ ID NO: 523462 - RNA, 19 nt, Homo sapiens
  misc_RNA (1)...(19): siRNA sense strand
ccacgcguguguaugagau

SEQ ID NO: 523463 - RNA, 19 nt, Homo sapiens
  misc_RNA (1)...(19): siRNA sense strand
acgaggugguguccuauga

SEQ ID NO: 523464 - RNA, 19 nt, Homo sapiens
  misc_RNA (1)...(19): siRNA sense strand
ggccaaggacggcuggauu

SEQ ID NO: 523465 - RNA, 19 nt, Homo sapiens
  misc_RNA (1)...(19): siRNA sense strand
aagcaccgcugcgacaaga

SEQ ID NO: 523466 - RNA, 19 nt, Homo sapiens
  misc_RNA (1)...(19): siRNA sense strand
gaccagaucccaucauacg

SEQ ID NO: 523467 - RNA, 19 nt, Homo sapiens
  misc_RNA (1)...(19): siRNA sense strand
guagagagggacgccuuaa

SEQ ID NO: 523468 - RNA, 19 nt, Homo sapiens
  misc_RNA (1)...(19): siRNA sense strand
gauacgucuucuccaacuu

SEQ ID NO: 523469 - RNA, 19 nt, Homo sapiens
  misc_RNA (1)...(19): siRNA sense strand
caaguuuaaucaguacauc

SEQ ID NO: 523470 - RNA, 19 nt, Homo sapiens
  misc_RNA (1)...(19): siRNA sense strand
gcauuaaucucuuaccaua

SEQ ID NO: 523471 - RNA, 19 nt, Homo sapiens
  misc_RNA (1)...(19): siRNA sense strand
ugacagcauuaaucucuua

SEQ ID NO: 523472 - RNA, 19 nt, Homo sapiens
  misc_RNA (1)...(19): siRNA sense strand
ccaauguccucuugucuuu

SEQ ID NO: 523473 - RNA, 19 nt, Homo sapiens
  misc_RNA (1)...(19): siRNA sense strand
ggagacacaucaccuacuu

SEQ ID NO: 523474 - RNA, 19 nt, Homo sapiens
  misc_RNA (1)...(19): siRNA sense strand
ucaccaggcucaucaagaa

SEQ ID NO: 523475 - RNA, 19 nt, Homo sapiens
  misc_RNA (1)...(19): siRNA sense strand
ggauuacccuuccaacgaa

SEQ ID NO: 523476 - RNA, 19 nt, Homo sapiens
  misc_RNA (1)...(19): siRNA sense strand
caagaucgccguccuguau

SEQ ID NO: 523477 - RNA, 19 nt, Homo sapiens
  misc_RNA (1)...(19): siRNA sense strand
cgaacgaggugguguccua

SEQ ID NO: 523478 - RNA, 19 nt, Homo sapiens
  misc_RNA (1)...(19): siRNA sense strand
gcaaggaugguucagauga

SEQ ID NO: 523479 - RNA, 19 nt, Homo sapiens
  misc_RNA (1)...(19): siRNA sense strand
aaagggauguggccgcaua

SEQ ID NO: 523480 - RNA, 19 nt, Homo sapiens
  misc_RNA (1)...(19): siRNA sense strand
gcuauaaagugcucaucuu

SEQ ID NO: 523481 - RNA, 19 nt, Homo sapiens
  misc_RNA (1)...(19): siRNA sense strand
gaacugagcauggaaugug

SEQ ID NO: 523482 - RNA, 19 nt, Homo sapiens
  misc_RNA (1)...(19): siRNA sense strand
gaaggagaaguuuaagauu

SEQ ID NO: 523483 - RNA, 19 nt, Homo sapiens
  misc_RNA (1)...(19): siRNA sense strand
uuaaggucaucaaggauua

SEQ ID NO: 523484 - RNA, 19 nt, Homo sapiens
  misc_RNA (1)...(19): siRNA sense strand
ggagagauacuuugaacug

SEQ ID NO: 523485 - RNA, 19 nt, Homo sapiens
  misc_RNA (1)...(19): siRNA sense strand
ccaacacaguggccucuuu

SEQ ID NO: 523486 - RNA, 19 nt, Homo sapiens
  misc_RNA (1)...(19): siRNA sense strand
gaauguggccucaacaauc

SEQ ID NO: 523487 - RNA, 19 nt, Homo sapiens
  misc_RNA (1)...(19): siRNA sense strand
ccuccaaguuuaaucagua

SEQ ID NO: 523488 - RNA, 19 nt, Homo sapiens
  misc_RNA (1)...(19): siRNA sense strand
gcucucugcuccaugcuuu

SEQ ID NO: 523489 - RNA, 19 nt, Homo sapiens
  misc_RNA (1)...(19): siRNA sense strand
gaacuuggucaaauucaau

SEQ ID NO: 523490 - RNA, 19 nt, Homo sapiens
  misc_RNA (1)...(19): siRNA sense strand
aggaagagcuggcugacuu

SEQ ID NO: 523491 - RNA, 19 nt, Homo sapiens
  misc_RNA (1)...(19): siRNA sense strand
ggaacucgccgacaucugu

SEQ ID NO: 523492 - RNA, 19 nt, Homo sapiens
  misc_RNA (1)...(19): siRNA sense strand
aaggagaaguuuaagauuc

SEQ ID NO: 523493 - RNA, 19 nt, Homo sapiens
  misc_RNA (1)...(19): siRNA sense strand
ccaaggacguggacaagca

SEQ ID NO: 523494 - RNA, 19 nt, Homo sapiens
  misc_RNA (1)...(19): siRNA sense strand
uaucaucaccgcggaaaua

SEQ ID NO: 523495 - RNA, 19 nt, Homo sapiens
  misc_RNA (1)...(19): siRNA sense strand
gaggugguguccuaugaga

SEQ ID NO: 523496 - RNA, 19 nt, Homo sapiens
  misc_RNA (1)...(19): siRNA sense strand
gcugagaggagccguguuu

SEQ ID NO: 523497 - RNA, 19 nt, Homo sapiens
  misc_RNA (1)...(19): siRNA sense strand
ucaaggcccucacagacaa

SEQ ID NO: 523498 - RNA, 19 nt, Homo sapiens
  misc_RNA (1)...(19): siRNA sense strand
gaaauacugagagaacuga

SEQ ID NO: 523499 - RNA, 19 nt, Homo sapiens
  misc_RNA (1)...(19): siRNA sense strand
ugagagaacugagcaugga

SEQ ID NO: 523500 - RNA, 19 nt, Homo sapiens
  misc_RNA (1)...(19): siRNA sense strand
caucguccaugaccuguug

SEQ ID NO: 523501 - RNA, 19 nt, Homo sapiens
  misc_RNA (1)...(19): siRNA sense strand
gagagggacgccuuaaaga

SEQ ID NO: 523502 - RNA, 19 nt, Homo sapiens
  misc_RNA (1)...(19): siRNA sense strand
ccucacaggugcaucauag

SEQ ID NO: 523503 - RNA, 19 nt, Homo sapiens
  misc_RNA (1)...(19): siRNA sense strand
ucaacaggcaguucuauga

SEQ ID NO: 523504 - RNA, 19 nt, Homo sapiens
  misc_RNA (1)...(19): siRNA sense strand
ggagaaggccagagcaaca

SEQ ID NO: 523505 - RNA, 19 nt, Homo sapiens
  misc_RNA (1)...(19): siRNA sense strand
acauucagcuccacuacaa

SEQ ID NO: 523506 - RNA, 19 nt, Homo sapiens
  misc_RNA (1)...(19): siRNA sense strand
ucgaccagaucccaucaua

SEQ ID NO: 523507 - RNA, 19 nt, Homo sapiens
  misc_RNA (1)...(19): siRNA sense strand
caaauucaauagcuguuac

SEQ ID NO: 523508 - RNA, 19 nt, Homo sapiens
  misc_RNA (1)...(19): siRNA sense strand
ggaauguggccucaacaau

SEQ ID NO: 523509 - RNA, 19 nt, Homo sapiens
  misc_RNA (1)...(19): siRNA sense strand
uggccaagaucgugucuga

SEQ ID NO: 523510 - RNA, 19 nt, Homo sapiens
  misc_RNA (1)...(19): siRNA sense strand
gcaacgacuuuguguccau

SEQ ID NO: 523511 - RNA, 19 nt, Homo sapiens
  misc_RNA (1)...(19): siRNA sense strand
caauccugcugcccaauga

SEQ ID NO: 523512 - RNA, 19 nt, Homo sapiens
  misc_RNA (1)...(19): siRNA sense strand
ugaaggagaaguuuaagau

SEQ ID NO: 523513 - RNA, 19 nt, Homo sapiens
  misc_RNA (1)...(19): siRNA sense strand
gcuugaaggagaaguuuaa

SEQ ID NO: 523514 - RNA, 19 nt, Homo sapiens
  misc_RNA (1)...(19): siRNA sense strand
caaggaugguucagaugau

SEQ ID NO: 523515 - RNA, 19 nt, Homo sapiens
  misc_RNA (1)...(19): siRNA sense strand
ggaagagcuggcugacuuu

SEQ ID NO: 523516 - RNA, 19 nt, Homo sapiens
  misc_RNA (1)...(19): siRNA sense strand
gaaccugaucuccuauaga

SEQ ID NO: 523517 - RNA, 19 nt, Homo sapiens
  misc_RNA (1)...(19): siRNA sense strand
caacgacuuuguguccauu

SEQ ID NO: 523518 - RNA, 19 nt, Homo sapiens
  misc_RNA (1)...(19): siRNA sense strand
gaucggguccguuccaugu

SEQ ID NO: 523519 - RNA, 19 nt, Homo sapiens
  misc_RNA (1)...(19): siRNA sense strand
ccaggcucaucaagaagua

SEQ ID NO: 523520 - RNA, 19 nt, Homo sapiens
  misc_RNA (1)...(19): siRNA sense strand
ugauagggcagauuuguga

SEQ ID NO: 523521 - RNA, 19 nt, Homo sapiens
  misc_RNA (1)...(19): siRNA sense strand
ucaccuacuuggaggaaga

SEQ ID NO: 523522 - RNA, 19 nt, Homo sapiens
  misc_RNA (1)...(19): siRNA sense strand
gaagcucacgcacaucuca

SEQ ID NO: 523523 - RNA, 19 nt, Homo sapiens
  misc_RNA (1)...(19): siRNA sense strand
cugagucccugcgcuauaa

SEQ ID NO: 523524 - RNA, 19 nt, Homo sapiens
  misc_RNA (1)...(19): siRNA sense strand
aggaggagcugauuaacuc

SEQ ID NO: 523525 - RNA, 19 nt, Homo sapiens
  misc_RNA (1)...(19): siRNA sense strand
aaggacggcuggauucaga

SEQ ID NO: 523526 - RNA, 19 nt, Homo sapiens
  misc_RNA (1)...(19): siRNA sense strand
caggagagauacuuugaac

SEQ ID NO: 523527 - RNA, 19 nt, Homo sapiens
  misc_RNA (1)...(19): siRNA sense strand
ucuuuaaggucaucaagga

SEQ ID NO: 523528 - RNA, 19 nt, Homo sapiens
  misc_RNA (1)...(19): siRNA sense strand
ggacuucaccgaguuugug

SEQ ID NO: 523529 - RNA, 19 nt, Homo sapiens
  misc_RNA (1)...(19): siRNA sense strand
ggaaauacugagagaacug

SEQ ID NO: 523530 - RNA, 19 nt, Homo sapiens
  misc_RNA (1)...(19): siRNA sense strand
gcaguaugccaguguguuc

SEQ ID NO: 523531 - RNA, 19 nt, Homo sapiens
  misc_RNA (1)...(19): siRNA sense strand
gagaucguccuguccauca

SEQ ID NO: 523532 - RNA, 19 nt, Homo sapiens
  misc_RNA (1)...(19): siRNA sense strand
gacaaugggagacacauca

SEQ ID NO: 523533 - RNA, 19 nt, Homo sapiens
  misc_RNA (1)...(19): siRNA sense strand
gaugauagggcagauuugu

SEQ ID NO: 523534 - RNA, 19 nt, Homo sapiens
  misc_RNA (1)...(19): siRNA sense strand
cagacggaguuuaucauca

SEQ ID NO: 523535 - RNA, 19 nt, Homo sapiens
  misc_RNA (1)...(19): siRNA sense strand
aaaccaacaagcaaagauu

SEQ ID NO: 523536 - RNA, 19 nt, Homo sapiens
  misc_RNA (1)...(19): siRNA sense strand
gaaguuuaagauucuguug

SEQ ID NO: 523537 - RNA, 19 nt, Homo sapiens
  misc_RNA (1)...(19): siRNA sense strand
ucgcaaggaugguucagau

SEQ ID NO: 523538 - RNA, 19 nt, Homo sapiens
  misc_RNA (1)...(19): siRNA sense strand
guucaucguuacccucugu

SEQ ID NO: 523539 - RNA, 19 nt, Homo sapiens
  misc_RNA (1)...(19): siRNA sense strand
ccucggacaucaacaacau

SEQ ID NO: 523540 - RNA, 19 nt, Homo sapiens
  misc_RNA (1)...(19): siRNA sense strand
aaccugaucuccuauagag

SEQ ID NO: 523541 - RNA, 19 nt, Homo sapiens
  misc_RNA (1)...(19): siRNA sense strand
ccgcggaaauacugagaga

SEQ ID NO: 523542 - RNA, 19 nt, Homo sapiens
  misc_RNA (1)...(19): siRNA sense strand
gcccacaccuggcuaugag

SEQ ID NO: 523543 - RNA, 19 nt, Homo sapiens
  misc_RNA (1)...(19): siRNA sense strand
gguccaauguccucuuguc

SEQ ID NO: 523544 - RNA, 19 nt, Homo sapiens
  misc_RNA (1)...(19): siRNA sense strand
gcgguccaauguccucuug

SEQ ID NO: 523545 - RNA, 19 nt, Homo sapiens
  misc_RNA (1)...(19): siRNA sense strand
gaagagcuggcugacuuug

SEQ ID NO: 523546 - RNA, 19 nt, Homo sapiens
  misc_RNA (1)...(19): siRNA sense strand
ggaggacuucaccgaguuu

SEQ ID NO: 523547 - RNA, 19 nt, Homo sapiens
  misc_RNA (1)...(19): siRNA sense strand
acgcaaauauggccucaca

SEQ ID NO: 523548 - RNA, 19 nt, Homo sapiens
  misc_RNA (1)...(19): siRNA sense strand
caacacaguggccucuuuc

SEQ ID NO: 523549 - RNA, 19 nt, Homo sapiens
  misc_RNA (1)...(19): siRNA sense strand
ggccaaaccaacaagcaaa

SEQ ID NO: 523550 - RNA, 19 nt, Homo sapiens
  misc_RNA (1)...(19): siRNA sense strand
gaacaccgaggccaaaucc

SEQ ID NO: 523551 - RNA, 19 nt, Homo sapiens
  misc_RNA (1)...(19): siRNA sense strand
gggccauggucuucgaguu

SEQ ID NO: 523552 - RNA, 19 nt, Homo sapiens
  misc_RNA (1)...(19): siRNA sense strand
ccaaacagcgcgagauggu

SEQ ID NO: 523553 - RNA, 19 nt, Homo sapiens
  misc_RNA (1)...(19): siRNA sense strand
gacauucugcugaacauca

SEQ ID NO: 523554 - RNA, 19 nt, Homo sapiens
  misc_RNA (1)...(19): siRNA sense strand
cggaugauagggcagauuu

SEQ ID NO: 523555 - RNA, 19 nt, Homo sapiens
  misc_RNA (1)...(19): siRNA sense strand
caccggcucuauucucuca

SEQ ID NO: 523556 - RNA, 19 nt, Homo sapiens
  misc_RNA (1)...(19): siRNA sense strand
ccaccugggcaacgacuuu

SEQ ID NO: 523557 - RNA, 19 nt, Homo sapiens
  misc_RNA (1)...(19): siRNA sense strand
gcugagcccugagguuaag

SEQ ID NO: 523558 - RNA, 19 nt, Homo sapiens
  misc_RNA (1)...(19): siRNA sense strand
cggcugagcgcuucaagga

SEQ ID NO: 523559 - RNA, 19 nt, Homo sapiens
  misc_RNA (1)...(19): siRNA sense strand
ggccauggucuucgaguug

SEQ ID NO: 523560 - RNA, 19 nt, Homo sapiens
  misc_RNA (1)...(19): siRNA sense strand
cagcauuaaucucuuacca

SEQ ID NO: 523561 - RNA, 19 nt, Homo sapiens
  misc_RNA (1)...(19): siRNA sense strand
cuacauggagccagagaga

SEQ ID NO: 523562 - RNA, 19 nt, Homo sapiens
  misc_RNA (1)...(19): siRNA sense strand
ccacgcguguguaugagau

SEQ ID NO: 523563 - RNA, 19 nt, Homo sapiens
  misc_RNA (1)...(19): siRNA sense strand
acgaggugguguccuauga

SEQ ID NO: 523564 - RNA, 19 nt, Homo sapiens
  misc_RNA (1)...(19): siRNA sense strand
ggccaaggacggcuggauu

SEQ ID NO: 523565 - RNA, 19 nt, Homo sapiens
  misc_RNA (1)...(19): siRNA sense strand
aagcaccgcugcgacaaga

SEQ ID NO: 523566 - RNA, 19 nt, Homo sapiens
  misc_RNA (1)...(19): siRNA sense strand
gaccagaucccaucauacg

SEQ ID NO: 523567 - RNA, 19 nt, Homo sapiens
  misc_RNA (1)...(19): siRNA sense strand
guagagagggacgccuuaa

SEQ ID NO: 523568 - RNA, 19 nt, Homo sapiens
  misc_RNA (1)...(19): siRNA sense strand
gauacgucuucuccaacuu

SEQ ID NO: 523569 - RNA, 19 nt, Homo sapiens
  misc_RNA (1)...(19): siRNA sense strand
caaguuuaaucaguacauc

SEQ ID NO: 523570 - RNA, 19 nt, Homo sapiens
  misc_RNA (1)...(19): siRNA sense strand
gcauuaaucucuuaccaua

SEQ ID NO: 523571 - RNA, 19 nt, Homo sapiens
  misc_RNA (1)...(19): siRNA sense strand
ugacagcauuaaucucuua

SEQ ID NO: 523572 - RNA, 19 nt, Homo sapiens
  misc_RNA (1)...(19): siRNA sense strand
ccaauguccucuugucuuu

SEQ ID NO: 523573 - RNA, 19 nt, Homo sapiens
  misc_RNA (1)...(19): siRNA sense strand
ggagacacaucaccuacuu

SEQ ID NO: 523574 - RNA, 19 nt, Homo sapiens
  misc_RNA (1)...(19): siRNA sense strand
ucaccaggcucaucaagaa

SEQ ID NO: 523575 - RNA, 19 nt, Homo sapiens
  misc_RNA (1)...(19): siRNA sense strand
ggauuacccuuccaacgaa

SEQ ID NO: 523576 - RNA, 19 nt, Homo sapiens
  misc_RNA (1)...(19): siRNA sense strand
caagaucgccguccuguau

SEQ ID NO: 523577 - RNA, 19 nt, Homo sapiens
  misc_RNA (1)...(19): siRNA sense strand
cgaacgaggugguguccua

SEQ ID NO: 523578 - RNA, 19 nt, Homo sapiens
  misc_RNA (1)...(19): siRNA sense strand
gcaaggaugguucagauga

SEQ ID NO: 523579 - RNA, 19 nt, Homo sapiens
  misc_RNA (1)...(19): siRNA sense strand
aaagggauguggccgcaua

SEQ ID NO: 523580 - RNA, 19 nt, Homo sapiens
  misc_RNA (1)...(19): siRNA sense strand
gcuauaaagugcucaucuu

SEQ ID NO: 523581 - RNA, 19 nt, Homo sapiens
  misc_RNA (1)...(19): siRNA sense strand
gaacugagcauggaaugug

SEQ ID NO: 523582 - RNA, 19 nt, Homo sapiens
  misc_RNA (1)...(19): siRNA sense strand
gaaggagaaguuuaagauu

SEQ ID NO: 523583 - RNA, 19 nt, Homo sapiens
  misc_RNA (1)...(19): siRNA sense strand
uuaaggucaucaaggauua

SEQ ID NO: 523584 - RNA, 19 nt, Homo sapiens
  misc_RNA (1)...(19): siRNA sense strand
ggagagauacuuugaacug

SEQ ID NO: 523585 - RNA, 19 nt, Homo sapiens
  misc_RNA (1)...(19): siRNA sense strand
ccaacacaguggccucuuu

SEQ ID NO: 523586 - RNA, 19 nt, Homo sapiens
  misc_RNA (1)...(19): siRNA sense strand
gaauguggccucaacaauc

SEQ ID NO: 523587 - RNA, 19 nt, Homo sapiens
  misc_RNA (1)...(19): siRNA sense strand
ccuccaaguuuaaucagua

SEQ ID NO: 523588 - RNA, 19 nt, Homo sapiens
  misc_RNA (1)...(19): siRNA sense strand
gcucucugcuccaugcuuu

SEQ ID NO: 523589 - RNA, 19 nt, Homo sapiens
  misc_RNA (1)...(19): siRNA sense strand
gaacuuggucaaauucaau

SEQ ID NO: 523590 - RNA, 19 nt, Homo sapiens
  misc_RNA (1)...(19): siRNA sense strand
aggaagagcuggcugacuu

SEQ ID NO: 523591 - RNA, 19 nt, Homo sapiens
  misc_RNA (1)...(19): siRNA sense strand
ggaacucgccgacaucugu

SEQ ID NO: 523592 - RNA, 19 nt, Homo sapiens
  misc_RNA (1)...(19): siRNA sense strand
aaggagaaguuuaagauuc

SEQ ID NO: 523593 - RNA, 19 nt, Homo sapiens
  misc_RNA (1)...(19): siRNA sense strand
ccaaggacguggacaagca

SEQ ID NO: 523594 - RNA, 19 nt, Homo sapiens
  misc_RNA (1)...(19): siRNA sense strand
uaucaucaccgcggaaaua

SEQ ID NO: 523595 - RNA, 19 nt, Homo sapiens
  misc_RNA (1)...(19): siRNA sense strand
gaggugguguccuaugaga

SEQ ID NO: 523596 - RNA, 19 nt, Homo sapiens
  misc_RNA (1)...(19): siRNA sense strand
gcugagaggagccguguuu

SEQ ID NO: 523597 - RNA, 19 nt, Homo sapiens
  misc_RNA (1)...(19): siRNA sense strand
ucaaggcccucacagacaa

SEQ ID NO: 523598 - RNA, 19 nt, Homo sapiens
  misc_RNA (1)...(19): siRNA sense strand
gaaauacugagagaacuga

SEQ ID NO: 523599 - RNA, 19 nt, Homo sapiens
  misc_RNA (1)...(19): siRNA sense strand
ugagagaacugagcaugga

SEQ ID NO: 523600 - RNA, 19 nt, Homo sapiens
  misc_RNA (1)...(19): siRNA sense strand
caucguccaugaccuguug

SEQ ID NO: 523601 - RNA, 19 nt, Homo sapiens
  misc_RNA (1)...(19): siRNA sense strand
gagagggacgccuuaaaga

SEQ ID NO: 523602 - RNA, 19 nt, Homo sapiens
  misc_RNA (1)...(19): siRNA sense strand
ccucacaggugcaucauag

SEQ ID NO: 523603 - RNA, 19 nt, Homo sapiens
  misc_RNA (1)...(19): siRNA sense strand
ucaacaggcaguucuauga

SEQ ID NO: 523604 - RNA, 19 nt, Homo sapiens
  misc_RNA (1)...(19): siRNA sense strand
ggagaaggccagagcaaca

SEQ ID NO: 523605 - RNA, 19 nt, Homo sapiens
  misc_RNA (1)...(19): siRNA sense strand
acauucagcuccacuacaa

SEQ ID NO: 523606 - RNA, 19 nt, Homo sapiens
  misc_RNA (1)...(19): siRNA sense strand
ucgaccagaucccaucaua

SEQ ID NO: 523607 - RNA, 19 nt, Homo sapiens
  misc_RNA (1)...(19): siRNA sense strand
caaauucaauagcuguuac

SEQ ID NO: 523608 - RNA, 19 nt, Homo sapiens
  misc_RNA (1)...(19): siRNA sense strand
ggaauguggccucaacaau

SEQ ID NO: 523609 - RNA, 19 nt, Homo sapiens
  misc_RNA (1)...(19): siRNA sense strand
uggccaagaucgugucuga

SEQ ID NO: 523610 - RNA, 19 nt, Homo sapiens
  misc_RNA (1)...(19): siRNA sense strand
gcaacgacuuuguguccau

SEQ ID NO: 523611 - RNA, 19 nt, Homo sapiens
  misc_RNA (1)...(19): siRNA sense strand
caauccugcugcccaauga

SEQ ID NO: 523612 - RNA, 19 nt, Homo sapiens
  misc_RNA (1)...(19): siRNA sense strand
ugaaggagaaguuuaagau

SEQ ID NO: 523613 - RNA, 19 nt, Homo sapiens
  misc_RNA (1)...(19): siRNA sense strand
gcuugaaggagaaguuuaa

SEQ ID NO: 523614 - RNA, 19 nt, Homo sapiens
  misc_RNA (1)...(19): siRNA sense strand
caaggaugguucagaugau

SEQ ID NO: 523615 - RNA, 19 nt, Homo sapiens
  misc_RNA (1)...(19): siRNA sense strand
ggaagagcuggcugacuuu

SEQ ID NO: 523616 - RNA, 19 nt, Homo sapiens
  misc_RNA (1)...(19): siRNA sense strand
gaaccugaucuccuauaga

SEQ ID NO: 523617 - RNA, 19 nt, Homo sapiens
  misc_RNA (1)...(19): siRNA sense strand
caacgacuuuguguccauu

SEQ ID NO: 523618 - RNA, 19 nt, Homo sapiens
  misc_RNA (1)...(19): siRNA sense strand
gaucggguccguuccaugu

SEQ ID NO: 523619 - RNA, 19 nt, Homo sapiens
  misc_RNA (1)...(19): siRNA sense strand
ccaggcucaucaagaagua

SEQ ID NO: 523620 - RNA, 19 nt, Homo sapiens
  misc_RNA (1)...(19): siRNA sense strand
ugauagggcagauuuguga

SEQ ID NO: 523621 - RNA, 19 nt, Homo sapiens
  misc_RNA (1)...(19): siRNA sense strand
ucaccuacuuggaggaaga

SEQ ID NO: 523622 - RNA, 19 nt, Homo sapiens
  misc_RNA (1)...(19): siRNA sense strand
gaagcucacgcacaucuca

SEQ ID NO: 523623 - RNA, 19 nt, Homo sapiens
  misc_RNA (1)...(19): siRNA sense strand
cugagucccugcgcuauaa

SEQ ID NO: 523624 - RNA, 19 nt, Homo sapiens
  misc_RNA (1)...(19): siRNA sense strand
aggaggagcugauuaacuc

SEQ ID NO: 523625 - RNA, 19 nt, Homo sapiens
  misc_RNA (1)...(19): siRNA sense strand
aaggacggcuggauucaga

SEQ ID NO: 523626 - RNA, 19 nt, Homo sapiens
  misc_RNA (1)...(19): siRNA sense strand
caggagagauacuuugaac

SEQ ID NO: 523627 - RNA, 19 nt, Homo sapiens
  misc_RNA (1)...(19): siRNA sense strand
ucuuuaaggucaucaagga

SEQ ID NO: 523628 - RNA, 19 nt, Homo sapiens
  misc_RNA (1)...(19): siRNA sense strand
ggacuucaccgaguuugug

SEQ ID NO: 523629 - RNA, 19 nt, Homo sapiens
  misc_RNA (1)...(19): siRNA sense strand
ggaaauacugagagaacug

SEQ ID NO: 523630 - RNA, 19 nt, Homo sapiens
  misc_RNA (1)...(19): siRNA sense strand
gcaguaugccaguguguuc

SEQ ID NO: 523631 - RNA, 19 nt, Homo sapiens
  misc_RNA (1)...(19): siRNA sense strand
gagaucguccuguccauca

SEQ ID NO: 523632 - RNA, 19 nt, Homo sapiens
  misc_RNA (1)...(19): siRNA sense strand
gacaaugggagacacauca

SEQ ID NO: 523633 - RNA, 19 nt, Homo sapiens
  misc_RNA (1)...(19): siRNA sense strand
gaugauagggcagauuugu

SEQ ID NO: 523634 - RNA, 19 nt, Homo sapiens
  misc_RNA (1)...(19): siRNA sense strand
cagacggaguuuaucauca

SEQ ID NO: 523635 - RNA, 19 nt, Homo sapiens
  misc_RNA (1)...(19): siRNA sense strand
aaaccaacaagcaaagauu

SEQ ID NO: 523636 - RNA, 19 nt, Homo sapiens
  misc_RNA (1)...(19): siRNA sense strand
gaaguuuaagauucuguug

SEQ ID NO: 523637 - RNA, 19 nt, Homo sapiens
  misc_RNA (1)...(19): siRNA sense strand
ucgcaaggaugguucagau

SEQ ID NO: 523638 - RNA, 19 nt, Homo sapiens
  misc_RNA (1)...(19): siRNA sense strand
guucaucguuacccucugu

SEQ ID NO: 523639 - RNA, 19 nt, Homo sapiens
  misc_RNA (1)...(19): siRNA sense strand
ccucggacaucaacaacau

SEQ ID NO: 523640 - RNA, 19 nt, Homo sapiens
  misc_RNA (1)...(19): siRNA sense strand
aaccugaucuccuauagag

SEQ ID NO: 523641 - RNA, 19 nt, Homo sapiens
  misc_RNA (1)...(19): siRNA sense strand
ccgcggaaauacugagaga

SEQ ID NO: 523642 - RNA, 19 nt, Homo sapiens
  misc_RNA (1)...(19): siRNA sense strand
gcccacaccuggcuaugag

SEQ ID NO: 523643 - RNA, 19 nt, Homo sapiens
  misc_RNA (1)...(19): siRNA sense strand
gguccaauguccucuuguc

SEQ ID NO: 523644 - RNA, 19 nt, Homo sapiens
  misc_RNA (1)...(19): siRNA sense strand
gcgguccaauguccucuug

SEQ ID NO: 523645 - RNA, 19 nt, Homo sapiens
  misc_RNA (1)...(19): siRNA sense strand
gaagagcuggcugacuuug

SEQ ID NO: 523646 - RNA, 19 nt, Homo sapiens
  misc_RNA (1)...(19): siRNA sense strand
ggaggacuucaccgaguuu

SEQ ID NO: 523647 - RNA, 19 nt, Homo sapiens
  misc_RNA (1)...(19): siRNA sense strand
acgcaaauauggccucaca

SEQ ID NO: 523648 - RNA, 19 nt, Homo sapiens
  misc_RNA (1)...(19): siRNA sense strand
caacacaguggccucuuuc

SEQ ID NO: 523649 - RNA, 19 nt, Homo sapiens
  misc_RNA (1)...(19): siRNA sense strand
ggccaaaccaacaagcaaa

SEQ ID NO: 523650 - RNA, 19 nt, Homo sapiens
  misc_RNA (1)...(19): siRNA sense strand
gaacaccgaggccaaaucc

SEQ ID NO: 523651 - RNA, 19 nt, Homo sapiens
  misc_RNA (1)...(19): siRNA sense strand
gggccauggucuucgaguu

SEQ ID NO: 523652 - RNA, 19 nt, Homo sapiens
  misc_RNA (1)...(19): siRNA sense strand
ccaaacagcgcgagauggu

SEQ ID NO: 523653 - RNA, 19 nt, Homo sapiens
  misc_RNA (1)...(19): siRNA sense strand
gacauucugcugaacauca

SEQ ID NO: 523654 - RNA, 19 nt, Homo sapiens
  misc_RNA (1)...(19): siRNA sense strand
cggaugauagggcagauuu

SEQ ID NO: 523655 - RNA, 19 nt, Homo sapiens
  misc_RNA (1)...(19): siRNA sense strand
caccggcucuauucucuca

SEQ ID NO: 523656 - RNA, 19 nt, Homo sapiens
  misc_RNA (1)...(19): siRNA sense strand
ccaccugggcaacgacuuu

SEQ ID NO: 523657 - RNA, 19 nt, Homo sapiens
  misc_RNA (1)...(19): siRNA sense strand
gcugagcccugagguuaag

SEQ ID NO: 523658 - RNA, 19 nt, Homo sapiens
  misc_RNA (1)...(19): siRNA sense strand
cggcugagcgcuucaagga

SEQ ID NO: 523659 - RNA, 19 nt, Homo sapiens
  misc_RNA (1)...(19): siRNA sense strand
ggccauggucuucgaguug

SEQ ID NO: 523660 - RNA, 19 nt, Homo sapiens
  misc_RNA (1)...(19): siRNA sense strand
cagcauuaaucucuuacca

SEQ ID NO: 523661 - RNA, 19 nt, Homo sapiens
  misc_RNA (1)...(19): siRNA sense strand
cuacauggagccagagaga

SEQ ID NO: 523662 - RNA, 19 nt, Homo sapiens
  misc_RNA (1)...(19): siRNA sense strand
ccacgcguguguaugagau

SEQ ID NO: 523663 - RNA, 19 nt, Homo sapiens
  misc_RNA (1)...(19): siRNA sense strand
acgaggugguguccuauga

SEQ ID NO: 523664 - RNA, 19 nt, Homo sapiens
  misc_RNA (1)...(19): siRNA sense strand
ggccaaggacggcuggauu

SEQ ID NO: 523665 - RNA, 19 nt, Homo sapiens
  misc_RNA (1)...(19): siRNA sense strand
aagcaccgcugcgacaaga

SEQ ID NO: 523666 - RNA, 19 nt, Homo sapiens
  misc_RNA (1)...(19): siRNA sense strand
gaccagaucccaucauacg

SEQ ID NO: 523667 - RNA, 19 nt, Homo sapiens
  misc_RNA (1)...(19): siRNA sense strand
guagagagggacgccuuaa

SEQ ID NO: 523668 - RNA, 19 nt, Homo sapiens
  misc_RNA (1)...(19): siRNA sense strand
gauacgucuucuccaacuu

SEQ ID NO: 523669 - RNA, 19 nt, Homo sapiens
  misc_RNA (1)...(19): siRNA sense strand
caaguuuaaucaguacauc

SEQ ID NO: 523670 - RNA, 19 nt, Homo sapiens
  misc_RNA (1)...(19): siRNA sense strand
gcauuaaucucuuaccaua

SEQ ID NO: 523671 - RNA, 19 nt, Homo sapiens
  misc_RNA (1)...(19): siRNA sense strand
ugacagcauuaaucucuua

SEQ ID NO: 523672 - RNA, 19 nt, Homo sapiens
  misc_RNA (1)...(19): siRNA sense strand
ccaauguccucuugucuuu

SEQ ID NO: 523673 - RNA, 19 nt, Homo sapiens
  misc_RNA (1)...(19): siRNA sense strand
ggagacacaucaccuacuu

SEQ ID NO: 523674 - RNA, 19 nt, Homo sapiens
  misc_RNA (1)...(19): siRNA sense strand
ucaccaggcucaucaagaa

SEQ ID NO: 523675 - RNA, 19 nt, Homo sapiens
  misc_RNA (1)...(19): siRNA sense strand
ggauuacccuuccaacgaa

SEQ ID NO: 523676 - RNA, 19 nt, Homo sapiens
  misc_RNA (1)...(19): siRNA sense strand
caagaucgccguccuguau

SEQ ID NO: 523677 - RNA, 19 nt, Homo sapiens
  misc_RNA (1)...(19): siRNA sense strand
cgaacgaggugguguccua

SEQ ID NO: 523678 - RNA, 19 nt, Homo sapiens
  misc_RNA (1)...(19): siRNA sense strand
gcaaggaugguucagauga

SEQ ID NO: 523679 - RNA, 19 nt, Homo sapiens
  misc_RNA (1)...(19): siRNA sense strand
aaagggauguggccgcaua

SEQ ID NO: 523680 - RNA, 19 nt, Homo sapiens
  misc_RNA (1)...(19): siRNA sense strand
gcuauaaagugcucaucuu

SEQ ID NO: 523681 - RNA, 19 nt, Homo sapiens
  misc_RNA (1)...(19): siRNA sense strand
gaacugagcauggaaugug

SEQ ID NO: 523682 - RNA, 19 nt, Homo sapiens
  misc_RNA (1)...(19): siRNA sense strand
gaaggagaaguuuaagauu

SEQ ID NO: 523683 - RNA, 19 nt, Homo sapiens
  misc_RNA (1)...(19): siRNA sense strand
uuaaggucaucaaggauua

SEQ ID NO: 523684 - RNA, 19 nt, Homo sapiens
  misc_RNA (1)...(19): siRNA sense strand
ggagagauacuuugaacug

SEQ ID NO: 523685 - RNA, 19 nt, Homo sapiens
  misc_RNA (1)...(19): siRNA sense strand
ccaacacaguggccucuuu

SEQ ID NO: 523686 - RNA, 19 nt, Homo sapiens
  misc_RNA (1)...(19): siRNA sense strand
gaauguggccucaacaauc

SEQ ID NO: 523687 - RNA, 19 nt, Homo sapiens
  misc_RNA (1)...(19): siRNA sense strand
ccuccaaguuuaaucagua

SEQ ID NO: 523688 - RNA, 19 nt, Homo sapiens
  misc_RNA (1)...(19): siRNA sense strand
gcucucugcuccaugcuuu

SEQ ID NO: 523689 - RNA, 19 nt, Homo sapiens
  misc_RNA (1)...(19): siRNA sense strand
gaacuuggucaaauucaau

SEQ ID NO: 523690 - RNA, 19 nt, Homo sapiens
  misc_RNA (1)...(19): siRNA sense strand
aggaagagcuggcugacuu

SEQ ID NO: 523691 - RNA, 19 nt, Homo sapiens
  misc_RNA (1)...(19): siRNA sense strand
ggaacucgccgacaucugu

SEQ ID NO: 523692 - RNA, 19 nt, Homo sapiens
  misc_RNA (1)...(19): siRNA sense strand
aaggagaaguuuaagauuc

SEQ ID NO: 523693 - RNA, 19 nt, Homo sapiens
  misc_RNA (1)...(19): siRNA sense strand
ccaaggacguggacaagca

SEQ ID NO: 523694 - RNA, 19 nt, Homo sapiens
  misc_RNA (1)...(19): siRNA sense strand
uaucaucaccgcggaaaua

SEQ ID NO: 523695 - RNA, 19 nt, Homo sapiens
  misc_RNA (1)...(19): siRNA sense strand
gaggugguguccuaugaga

SEQ ID NO: 523696 - RNA, 19 nt, Homo sapiens
  misc_RNA (1)...(19): siRNA sense strand
gcugagaggagccguguuu

SEQ ID NO: 523697 - RNA, 19 nt, Homo sapiens
  misc_RNA (1)...(19): siRNA sense strand
ucaaggcccucacagacaa

SEQ ID NO: 523698 - RNA, 19 nt, Homo sapiens
  misc_RNA (1)...(19): siRNA sense strand
gaaauacugagagaacuga

SEQ ID NO: 523699 - RNA, 19 nt, Homo sapiens
  misc_RNA (1)...(19): siRNA sense strand
ugagagaacugagcaugga

SEQ ID NO: 523700 - RNA, 19 nt, Homo sapiens
  misc_RNA (1)...(19): siRNA sense strand
caucguccaugaccuguug

SEQ ID NO: 523701 - RNA, 19 nt, Homo sapiens
  misc_RNA (1)...(19): siRNA sense strand
gagagggacgccuuaaaga

SEQ ID NO: 523702 - RNA, 19 nt, Homo sapiens
  misc_RNA (1)...(19): siRNA sense strand
ccucacaggugcaucauag

SEQ ID NO: 523703 - RNA, 19 nt, Homo sapiens
  misc_RNA (1)...(19): siRNA sense strand
ucaacaggcaguucuauga

SEQ ID NO: 523704 - RNA, 19 nt, Homo sapiens
  misc_RNA (1)...(19): siRNA sense strand
ggagaaggccagagcaaca

SEQ ID NO: 523705 - RNA, 19 nt, Homo sapiens
  misc_RNA (1)...(19): siRNA sense strand
acauucagcuccacuacaa

SEQ ID NO: 523706 - RNA, 19 nt, Homo sapiens
  misc_RNA (1)...(19): siRNA sense strand
ucgaccagaucccaucaua

SEQ ID NO: 523707 - RNA, 19 nt, Homo sapiens
  misc_RNA (1)...(19): siRNA sense strand
caaauucaauagcuguuac

SEQ ID NO: 523708 - RNA, 19 nt, Homo sapiens
  misc_RNA (1)...(19): siRNA sense strand
ggaauguggccucaacaau

SEQ ID NO: 523709 - RNA, 19 nt, Homo sapiens
  misc_RNA (1)...(19): siRNA sense strand
uggccaagaucgugucuga

SEQ ID NO: 523710 - RNA, 19 nt, Homo sapiens
  misc_RNA (1)...(19): siRNA sense strand
gcaacgacuuuguguccau

SEQ ID NO: 523711 - RNA, 19 nt, Homo sapiens
  misc_RNA (1)...(19): siRNA sense strand
caauccugcugcccaauga

SEQ ID NO: 523712 - RNA, 19 nt, Homo sapiens
  misc_RNA (1)...(19): siRNA sense strand
ugaaggagaaguuuaagau

SEQ ID NO: 523713 - RNA, 19 nt, Homo sapiens
  misc_RNA (1)...(19): siRNA sense strand
gcuugaaggagaaguuuaa

SEQ ID NO: 523714 - RNA, 19 nt, Homo sapiens
  misc_RNA (1)...(19): siRNA sense strand
caaggaugguucagaugau

SEQ ID NO: 523715 - RNA, 19 nt, Homo sapiens
  misc_RNA (1)...(19): siRNA sense strand
ggaagagcuggcugacuuu

SEQ ID NO: 523716 - RNA, 19 nt, Homo sapiens
  misc_RNA (1)...(19): siRNA sense strand
gaaccugaucuccuauaga

SEQ ID NO: 523717 - RNA, 19 nt, Homo sapiens
  misc_RNA (1)...(19): siRNA sense strand
caacgacuuuguguccauu

SEQ ID NO: 523718 - RNA, 19 nt, Homo sapiens
  misc_RNA (1)...(19): siRNA sense strand
gaucggguccguuccaugu

SEQ ID NO: 523719 - RNA, 19 nt, Homo sapiens
  misc_RNA (1)...(19): siRNA sense strand
ccaggcucaucaagaagua

SEQ ID NO: 523720 - RNA, 19 nt, Homo sapiens
  misc_RNA (1)...(19): siRNA sense strand
ugauagggcagauuuguga

SEQ ID NO: 523721 - RNA, 19 nt, Homo sapiens
  misc_RNA (1)...(19): siRNA sense strand
ucaccuacuuggaggaaga

SEQ ID NO: 523722 - RNA, 19 nt, Homo sapiens
  misc_RNA (1)...(19): siRNA sense strand
gaagcucacgcacaucuca

SEQ ID NO: 523723 - RNA, 19 nt, Homo sapiens
  misc_RNA (1)...(19): siRNA sense strand
cugagucccugcgcuauaa

SEQ ID NO: 523724 - RNA, 19 nt, Homo sapiens
  misc_RNA (1)...(19): siRNA sense strand
aggaggagcugauuaacuc

SEQ ID NO: 523725 - RNA, 19 nt, Homo sapiens
  misc_RNA (1)...(19): siRNA sense strand
aaggacggcuggauucaga

SEQ ID NO: 523726 - RNA, 19 nt, Homo sapiens
  misc_RNA (1)...(19): siRNA sense strand
caggagagauacuuugaac

SEQ ID NO: 523727 - RNA, 19 nt, Homo sapiens
  misc_RNA (1)...(19): siRNA sense strand
ucuuuaaggucaucaagga

SEQ ID NO: 523728 - RNA, 19 nt, Homo sapiens
  misc_RNA (1)...(19): siRNA sense strand
ggacuucaccgaguuugug

SEQ ID NO: 523729 - RNA, 19 nt, Homo sapiens
  misc_RNA (1)...(19): siRNA sense strand
ggaaauacugagagaacug

SEQ ID NO: 523730 - RNA, 19 nt, Homo sapiens
  misc_RNA (1)...(19): siRNA sense strand
gcaguaugccaguguguuc

SEQ ID NO: 523731 - RNA, 19 nt, Homo sapiens
  misc_RNA (1)...(19): siRNA sense strand
gagaucguccuguccauca

SEQ ID NO: 523732 - RNA, 19 nt, Homo sapiens
  misc_RNA (1)...(19): siRNA sense strand
gacaaugggagacacauca

SEQ ID NO: 523733 - RNA, 19 nt, Homo sapiens
  misc_RNA (1)...(19): siRNA sense strand
gaugauagggcagauuugu

SEQ ID NO: 523734 - RNA, 19 nt, Homo sapiens
  misc_RNA (1)...(19): siRNA sense strand
cagacggaguuuaucauca

SEQ ID NO: 523735 - RNA, 19 nt, Homo sapiens
  misc_RNA (1)...(19): siRNA sense strand
aaaccaacaagcaaagauu

SEQ ID NO: 523736 - RNA, 19 nt, Homo sapiens
  misc_RNA (1)...(19): siRNA sense strand
gaaguuuaagauucuguug

SEQ ID NO: 523737 - RNA, 19 nt, Homo sapiens
  misc_RNA (1)...(19): siRNA sense strand
ucgcaaggaugguucagau

SEQ ID NO: 523738 - RNA, 19 nt, Homo sapiens
  misc_RNA (1)...(19): siRNA sense strand
guucaucguuacccucugu

SEQ ID NO: 523739 - RNA, 19 nt, Homo sapiens
  misc_RNA (1)...(19): siRNA sense strand
ccucggacaucaacaacau

SEQ ID NO: 523740 - RNA, 19 nt, Homo sapiens
  misc_RNA (1)...(19): siRNA sense strand
aaccugaucuccuauagag

SEQ ID NO: 523741 - RNA, 19 nt, Homo sapiens
  misc_RNA (1)...(19): siRNA sense strand
ccgcggaaauacugagaga

SEQ ID NO: 523742 - RNA, 19 nt, Homo sapiens
  misc_RNA (1)...(19): siRNA sense strand
gcccacaccuggcuaugag

SEQ ID NO: 523743 - RNA, 19 nt, Homo sapiens
  misc_RNA (1)...(19): siRNA sense strand
gguccaauguccucuuguc

SEQ ID NO: 523744 - RNA, 19 nt, Homo sapiens
  misc_RNA (1)...(19): siRNA sense strand
gcgguccaauguccucuug

SEQ ID NO: 523745 - RNA, 19 nt, Homo sapiens
  misc_RNA (1)...(19): siRNA sense strand
gaagagcuggcugacuuug

SEQ ID NO: 523746 - RNA, 19 nt, Homo sapiens
  misc_RNA (1)...(19): siRNA sense strand
ggaggacuucaccgaguuu

SEQ ID NO: 523747 - RNA, 19 nt, Homo sapiens
  misc_RNA (1)...(19): siRNA sense strand
acgcaaauauggccucaca

SEQ ID NO: 523748 - RNA, 19 nt, Homo sapiens
  misc_RNA (1)...(19): siRNA sense strand
caacacaguggccucuuuc

SEQ ID NO: 523749 - RNA, 19 nt, Homo sapiens
  misc_RNA (1)...(19): siRNA sense strand
ggccaaaccaacaagcaaa

SEQ ID NO: 523750 - RNA, 19 nt, Homo sapiens
  misc_RNA (1)...(19): siRNA sense strand
gaacaccgaggccaaaucc

SEQ ID NO: 523751 - RNA, 19 nt, Homo sapiens
  misc_RNA (1)...(19): siRNA sense strand
gggccauggucuucgaguu

SEQ ID NO: 523752 - RNA, 19 nt, Homo sapiens
  misc_RNA (1)...(19): siRNA sense strand
ccaaacagcgcgagauggu

SEQ ID NO: 523753 - RNA, 19 nt, Homo sapiens
  misc_RNA (1)...(19): siRNA sense strand
gacauucugcugaacauca

SEQ ID NO: 523754 - RNA, 19 nt, Homo sapiens
  misc_RNA (1)...(19): siRNA sense strand
cggaugauagggcagauuu

SEQ ID NO: 523755 - RNA, 19 nt, Homo sapiens
  misc_RNA (1)...(19): siRNA sense strand
caccggcucuauucucuca

SEQ ID NO: 523756 - RNA, 19 nt, Homo sapiens
  misc_RNA (1)...(19): siRNA sense strand
ccaccugggcaacgacuuu

SEQ ID NO: 523757 - RNA, 19 nt, Homo sapiens
  misc_RNA (1)...(19): siRNA sense strand
gcugagcccugagguuaag

SEQ ID NO: 523758 - RNA, 19 nt, Homo sapiens
  misc_RNA (1)...(19): siRNA sense strand
cggcugagcgcuucaagga

SEQ ID NO: 523759 - RNA, 19 nt, Homo sapiens
  misc_RNA (1)...(19): siRNA sense strand
ggccauggucuucgaguug

SEQ ID NO: 523760 - RNA, 19 nt, Homo sapiens
  misc_RNA (1)...(19): siRNA sense strand
cagcauuaaucucuuacca

SEQ ID NO: 523761 - RNA, 19 nt, Homo sapiens
  misc_RNA (1)...(19): siRNA sense strand
cuacauggagccagagaga

SEQ ID NO: 523762 - RNA, 19 nt, Homo sapiens
  misc_RNA (1)...(19): siRNA sense strand
ccacgcguguguaugagau

SEQ ID NO: 523763 - RNA, 19 nt, Homo sapiens
  misc_RNA (1)...(19): siRNA sense strand
acgaggugguguccuauga

SEQ ID NO: 523764 - RNA, 19 nt, Homo sapiens
  misc_RNA (1)...(19): siRNA sense strand
ggccaaggacggcuggauu

SEQ ID NO: 523765 - RNA, 19 nt, Homo sapiens
  misc_RNA (1)...(19): siRNA sense strand
aagcaccgcugcgacaaga

SEQ ID NO: 523766 - RNA, 19 nt, Homo sapiens
  misc_RNA (1)...(19): siRNA sense strand
gaccagaucccaucauacg

SEQ ID NO: 523767 - RNA, 19 nt, Homo sapiens
  misc_RNA (1)...(19): siRNA sense strand
guagagagggacgccuuaa

SEQ ID NO: 523768 - RNA, 19 nt, Homo sapiens
  misc_RNA (1)...(19): siRNA sense strand
gauacgucuucuccaacuu

SEQ ID NO: 523769 - RNA, 19 nt, Homo sapiens
  misc_RNA (1)...(19): siRNA sense strand
caaguuuaaucaguacauc

SEQ ID NO: 523770 - RNA, 19 nt, Homo sapiens
  misc_RNA (1)...(19): siRNA sense strand
gagcucaucucuccaguuc

SEQ ID NO: 523771 - RNA, 19 nt, Homo sapiens
  misc_RNA (1)...(19): siRNA sense strand
caucuugucuuuagugguu

SEQ ID NO: 523772 - RNA, 19 nt, Homo sapiens
  misc_RNA (1)...(19): siRNA sense strand
ggagacauauacagaagau

SEQ ID NO: 523773 - RNA, 19 nt, Homo sapiens
  misc_RNA (1)...(19): siRNA sense strand
gacauucuguucucauuau

SEQ ID NO: 523774 - RNA, 19 nt, Homo sapiens
  misc_RNA (1)...(19): siRNA sense strand
ugaagcugauggucuauuu

SEQ ID NO: 523775 - RNA, 19 nt, Homo sapiens
  misc_RNA (1)...(19): siRNA sense strand
ggacauucuguucucauua

SEQ ID NO: 523776 - RNA, 19 nt, Homo sapiens
  misc_RNA (1)...(19): siRNA sense strand
gagggcaucuugucuuuag

SEQ ID NO: 523777 - RNA, 19 nt, Homo sapiens
  misc_RNA (1)...(19): siRNA sense strand
gacggaagcucauguaggu

SEQ ID NO: 523778 - RNA, 19 nt, Homo sapiens
  misc_RNA (1)...(19): siRNA sense strand
gcuauuauugccucaguua

SEQ ID NO: 523779 - RNA, 19 nt, Homo sapiens
  misc_RNA (1)...(19): siRNA sense strand
cuaugaagcugauggucua

SEQ ID NO: 523780 - RNA, 19 nt, Homo sapiens
  misc_RNA (1)...(19): siRNA sense strand
uuugugaccuugcucaaua

SEQ ID NO: 523781 - RNA, 19 nt, Homo sapiens
  misc_RNA (1)...(19): siRNA sense strand
gaacuugugacuacgagaa

SEQ ID NO: 523782 - RNA, 19 nt, Homo sapiens
  misc_RNA (1)...(19): siRNA sense strand
gcucaucucuccaguucau

SEQ ID NO: 523783 - RNA, 19 nt, Homo sapiens
  misc_RNA (1)...(19): siRNA sense strand
gaggagacauauacagaag

SEQ ID NO: 523784 - RNA, 19 nt, Homo sapiens
  misc_RNA (1)...(19): siRNA sense strand
cgagaaauaacacaucauu

SEQ ID NO: 523785 - RNA, 19 nt, Homo sapiens
  misc_RNA (1)...(19): siRNA sense strand
gugugaagauuacuaacuu

SEQ ID NO: 523786 - RNA, 19 nt, Homo sapiens
  misc_RNA (1)...(19): siRNA sense strand
ggcaucaccagguuucuua

SEQ ID NO: 523787 - RNA, 19 nt, Homo sapiens
  misc_RNA (1)...(19): siRNA sense strand
ucacacauccuaaacugaa

SEQ ID NO: 523788 - RNA, 19 nt, Homo sapiens
  misc_RNA (1)...(19): siRNA sense strand
cagucuaccugucugcuuu

SEQ ID NO: 523789 - RNA, 19 nt, Homo sapiens
  misc_RNA (1)...(19): siRNA sense strand
uaucacacauccuaaacug

SEQ ID NO: 523790 - RNA, 19 nt, Homo sapiens
  misc_RNA (1)...(19): siRNA sense strand
uguguuguguuucauguuu

SEQ ID NO: 523791 - RNA, 19 nt, Homo sapiens
  misc_RNA (1)...(19): siRNA sense strand
ugaccuugcucaauaucuu

SEQ ID NO: 523792 - RNA, 19 nt, Homo sapiens
  misc_RNA (1)...(19): siRNA sense strand
uacuucgucucuucaaaua

SEQ ID NO: 523793 - RNA, 19 nt, Homo sapiens
  misc_RNA (1)...(19): siRNA sense strand
cggaauaucuccccaaaga

SEQ ID NO: 523794 - RNA, 19 nt, Homo sapiens
  misc_RNA (1)...(19): siRNA sense strand
gccauagaaucuccucuuc

SEQ ID NO: 523795 - RNA, 19 nt, Homo sapiens
  misc_RNA (1)...(19): siRNA sense strand
uuacaguggucaauugcaa

SEQ ID NO: 523796 - RNA, 19 nt, Homo sapiens
  misc_RNA (1)...(19): siRNA sense strand
uuauuacaguggucaauug

SEQ ID NO: 523797 - RNA, 19 nt, Homo sapiens
  misc_RNA (1)...(19): siRNA sense strand
ugucuuuagugguuucuuu

SEQ ID NO: 523798 - RNA, 19 nt, Homo sapiens
  misc_RNA (1)...(19): siRNA sense strand
uccaguaucuccccuuuua

SEQ ID NO: 523799 - RNA, 19 nt, Homo sapiens
  misc_RNA (1)...(19): siRNA sense strand
uacgagaaauaacacauca

SEQ ID NO: 523800 - RNA, 19 nt, Homo sapiens
  misc_RNA (1)...(19): siRNA sense strand
gaaaacaacagcaaagaag

SEQ ID NO: 523801 - RNA, 19 nt, Homo sapiens
  misc_RNA (1)...(19): siRNA sense strand
gacuucugcuuccuugcua

SEQ ID NO: 523802 - RNA, 19 nt, Homo sapiens
  misc_RNA (1)...(19): siRNA sense strand
aaacaacagcaaagaagau

SEQ ID NO: 523803 - RNA, 19 nt, Homo sapiens
  misc_RNA (1)...(19): siRNA sense strand
uacauuccauauucaguug

SEQ ID NO: 523804 - RNA, 19 nt, Homo sapiens
  misc_RNA (1)...(19): siRNA sense strand
ucaauaucuuguacugugu

SEQ ID NO: 523805 - RNA, 19 nt, Homo sapiens
  misc_RNA (1)...(19): siRNA sense strand
ccagacggaagcucaugua

SEQ ID NO: 523806 - RNA, 19 nt, Homo sapiens
  misc_RNA (1)...(19): siRNA sense strand
ccacuugccuguacaucac

SEQ ID NO: 523807 - RNA, 19 nt, Homo sapiens
  misc_RNA (1)...(19): siRNA sense strand
cuacauuccauauucaguu

SEQ ID NO: 523808 - RNA, 19 nt, Homo sapiens
  misc_RNA (1)...(19): siRNA sense strand
ccucuacauuccauauuca

SEQ ID NO: 523809 - RNA, 19 nt, Homo sapiens
  misc_RNA (1)...(19): siRNA sense strand
ucuauuuccucauccucua

SEQ ID NO: 523810 - RNA, 19 nt, Homo sapiens
  misc_RNA (1)...(19): siRNA sense strand
ugaggagacauauacagaa

SEQ ID NO: 523811 - RNA, 19 nt, Homo sapiens
  misc_RNA (1)...(19): siRNA sense strand
gugcugauuucugcuuuca

SEQ ID NO: 523812 - RNA, 19 nt, Homo sapiens
  misc_RNA (1)...(19): siRNA sense strand
ccaucuacuucgucucuuc

SEQ ID NO: 523813 - RNA, 19 nt, Homo sapiens
  misc_RNA (1)...(19): siRNA sense strand
cuacuucgucucuucaaau

SEQ ID NO: 523814 - RNA, 19 nt, Homo sapiens
  misc_RNA (1)...(19): siRNA sense strand
cacacauccuaaacugaaa

SEQ ID NO: 523815 - RNA, 19 nt, Homo sapiens
  misc_RNA (1)...(19): siRNA sense strand
gaagcugauggucuauuuc

SEQ ID NO: 523816 - RNA, 19 nt, Homo sapiens
  misc_RNA (1)...(19): siRNA sense strand
aggacauucuguucucauu

SEQ ID NO: 523817 - RNA, 19 nt, Homo sapiens
  misc_RNA (1)...(19): siRNA sense strand
gggcaucuugucuuuagug

SEQ ID NO: 523818 - RNA, 19 nt, Homo sapiens
  misc_RNA (1)...(19): siRNA sense strand
uuccugaacuugugacuac

SEQ ID NO: 523819 - RNA, 19 nt, Homo sapiens
  misc_RNA (1)...(19): siRNA sense strand
ccaggacauucuguucuca

SEQ ID NO: 523820 - RNA, 19 nt, Homo sapiens
  misc_RNA (1)...(19): siRNA sense strand
gaccuugcucaauaucuug

SEQ ID NO: 523821 - RNA, 19 nt, Homo sapiens
  misc_RNA (1)...(19): siRNA sense strand
gaaucuccucuucugauag

SEQ ID NO: 523822 - RNA, 19 nt, Homo sapiens
  misc_RNA (1)...(19): siRNA sense strand
gccacugguuucuggaauc

SEQ ID NO: 523823 - RNA, 19 nt, Homo sapiens
  misc_RNA (1)...(19): siRNA sense strand
ucuacuucgucucuucaaa

SEQ ID NO: 523824 - RNA, 19 nt, Homo sapiens
  misc_RNA (1)...(19): siRNA sense strand
gccuguacaucacgcuuag

SEQ ID NO: 523825 - RNA, 19 nt, Homo sapiens
  misc_RNA (1)...(19): siRNA sense strand
caguguuucuccugcugaa

SEQ ID NO: 523826 - RNA, 19 nt, Homo sapiens
  misc_RNA (1)...(19): siRNA sense strand
cuugugacuacgagaaaua

SEQ ID NO: 523827 - RNA, 19 nt, Homo sapiens
  misc_RNA (1)...(19): siRNA sense strand
uuucugcuuucaccacuug

SEQ ID NO: 523828 - RNA, 19 nt, Homo sapiens
  misc_RNA (1)...(19): siRNA sense strand
gugugcugauuucugcuuu

SEQ ID NO: 523829 - RNA, 19 nt, Homo sapiens
  misc_RNA (1)...(19): siRNA sense strand
gcuggccugugugcugauu

SEQ ID NO: 523830 - RNA, 19 nt, Homo sapiens
  misc_RNA (1)...(19): siRNA sense strand
aaucuccucuucugauagg

SEQ ID NO: 523831 - RNA, 19 nt, Homo sapiens
  misc_RNA (1)...(19): siRNA sense strand
ucugauaggauucuguuca

SEQ ID NO: 523832 - RNA, 19 nt, Homo sapiens
  misc_RNA (1)...(19): siRNA sense strand
caucaaugcugaacaauuu

SEQ ID NO: 523833 - RNA, 19 nt, Homo sapiens
  misc_RNA (1)...(19): siRNA sense strand
gcaucaaggucucuucuuu

SEQ ID NO: 523834 - RNA, 19 nt, Homo sapiens
  misc_RNA (1)...(19): siRNA sense strand
ugucuaugcuuucaucuua

SEQ ID NO: 523835 - RNA, 19 nt, Homo sapiens
  misc_RNA (1)...(19): siRNA sense strand
uggcugagguggagaauuu

SEQ ID NO: 523836 - RNA, 19 nt, Homo sapiens
  misc_RNA (1)...(19): siRNA sense strand
gggcaucucucgcuucugu

SEQ ID NO: 523837 - RNA, 19 nt, Homo sapiens
  misc_RNA (1)...(19): siRNA sense strand
cuugaguccuugacaauua

SEQ ID NO: 523838 - RNA, 19 nt, Homo sapiens
  misc_RNA (1)...(19): siRNA sense strand
gugcagagcagccuaauug

SEQ ID NO: 523839 - RNA, 19 nt, Homo sapiens
  misc_RNA (1)...(19): siRNA sense strand
gagcagcccuacguugaaa

SEQ ID NO: 523840 - RNA, 19 nt, Homo sapiens
  misc_RNA (1)...(19): siRNA sense strand
aaucaucccuucagcuauu

SEQ ID NO: 523841 - RNA, 19 nt, Homo sapiens
  misc_RNA (1)...(19): siRNA sense strand
ccaacucacugucuucuuc

SEQ ID NO: 523842 - RNA, 19 nt, Homo sapiens
  misc_RNA (1)...(19): siRNA sense strand
ccaagcagauacaacauca

SEQ ID NO: 523843 - RNA, 19 nt, Homo sapiens
  misc_RNA (1)...(19): siRNA sense strand
cuucagcuauugggaauua

SEQ ID NO: 523844 - RNA, 19 nt, Homo sapiens
  misc_RNA (1)...(19): siRNA sense strand
uaagagauguugguuaugg

SEQ ID NO: 523845 - RNA, 19 nt, Homo sapiens
  misc_RNA (1)...(19): siRNA sense strand
gagguuguuucccuggaua

SEQ ID NO: 523846 - RNA, 19 nt, Homo sapiens
  misc_RNA (1)...(19): siRNA sense strand
gcuuucaucuuaaugcauu

SEQ ID NO: 523847 - RNA, 19 nt, Homo sapiens
  misc_RNA (1)...(19): siRNA sense strand
cagagcagccuaauuguug

SEQ ID NO: 523848 - RNA, 19 nt, Homo sapiens
  misc_RNA (1)...(19): siRNA sense strand
gcauuccacuucacugaug

SEQ ID NO: 523849 - RNA, 19 nt, Homo sapiens
  misc_RNA (1)...(19): siRNA sense strand
guuccaggcucauacaguu

SEQ ID NO: 523850 - RNA, 19 nt, Homo sapiens
  misc_RNA (1)...(19): siRNA sense strand
gaggucccuugccgucuua

SEQ ID NO: 523851 - RNA, 19 nt, Homo sapiens
  misc_RNA (1)...(19): siRNA sense strand
gcagagcagccuaauuguu

SEQ ID NO: 523852 - RNA, 19 nt, Homo sapiens
  misc_RNA (1)...(19): siRNA sense strand
gagcaucuaccaagaaaca

SEQ ID NO: 523853 - RNA, 19 nt, Homo sapiens
  misc_RNA (1)...(19): siRNA sense strand
uuacuggguucucugauga

SEQ ID NO: 523854 - RNA, 19 nt, Homo sapiens
  misc_RNA (1)...(19): siRNA sense strand
aagcagauacaacaucaua

SEQ ID NO: 523855 - RNA, 19 nt, Homo sapiens
  misc_RNA (1)...(19): siRNA sense strand
ucauacaguugcauugguu

SEQ ID NO: 523856 - RNA, 19 nt, Homo sapiens
  misc_RNA (1)...(19): siRNA sense strand
gguacucuauuugauaaga

SEQ ID NO: 523857 - RNA, 19 nt, Homo sapiens
  misc_RNA (1)...(19): siRNA sense strand
guuuaccucuuacuuucua

SEQ ID NO: 523858 - RNA, 19 nt, Homo sapiens
  misc_RNA (1)...(19): siRNA sense strand
gcugaugccuguggacaug

SEQ ID NO: 523859 - RNA, 19 nt, Homo sapiens
  misc_RNA (1)...(19): siRNA sense strand
guguuuaccucuuacuuuc

SEQ ID NO: 523860 - RNA, 19 nt, Homo sapiens
  misc_RNA (1)...(19): siRNA sense strand
cacuguaacugacaaacuu

SEQ ID NO: 523861 - RNA, 19 nt, Homo sapiens
  misc_RNA (1)...(19): siRNA sense strand
guucucugaugauuacuug

SEQ ID NO: 523862 - RNA, 19 nt, Homo sapiens
  misc_RNA (1)...(19): siRNA sense strand
aaaggauucuaaagggaaa

SEQ ID NO: 523863 - RNA, 19 nt, Homo sapiens
  misc_RNA (1)...(19): siRNA sense strand
uggagcaucuaccaagaaa

SEQ ID NO: 523864 - RNA, 19 nt, Homo sapiens
  misc_RNA (1)...(19): siRNA sense strand
acaaucaucccuucagcua

SEQ ID NO: 523865 - RNA, 19 nt, Homo sapiens
  misc_RNA (1)...(19): siRNA sense strand
gaucaucuaugugcuugag

SEQ ID NO: 523866 - RNA, 19 nt, Homo sapiens
  misc_RNA (1)...(19): siRNA sense strand
uugcauugguuauuccuuu

SEQ ID NO: 523867 - RNA, 19 nt, Homo sapiens
  misc_RNA (1)...(19): siRNA sense strand
guacuuugcaacuuaacaa

SEQ ID NO: 523868 - RNA, 19 nt, Homo sapiens
  misc_RNA (1)...(19): siRNA sense strand
uggcaucacugaccaagca

SEQ ID NO: 523869 - RNA, 19 nt, Homo sapiens
  misc_RNA (1)...(19): siRNA sense strand
guaacugacaaacuugaaa

SEQ ID NO: 523870 - RNA, 19 nt, Homo sapiens
  misc_RNA (1)...(19): siRNA sense strand
cauggagcaucuaccaaga

SEQ ID NO: 523871 - RNA, 19 nt, Homo sapiens
  misc_RNA (1)...(19): siRNA sense strand
ugauaagagauguugguua

SEQ ID NO: 523872 - RNA, 19 nt, Homo sapiens
  misc_RNA (1)...(19): siRNA sense strand
uuucacccaucacaucuuu

SEQ ID NO: 523873 - RNA, 19 nt, Homo sapiens
  misc_RNA (1)...(19): siRNA sense strand
ggauauuacuggguucucu

SEQ ID NO: 523874 - RNA, 19 nt, Homo sapiens
  misc_RNA (1)...(19): siRNA sense strand
guuguuucccuggauauua

SEQ ID NO: 523875 - RNA, 19 nt, Homo sapiens
  misc_RNA (1)...(19): siRNA sense strand
ugaccaagcagauacaaca

SEQ ID NO: 523876 - RNA, 19 nt, Homo sapiens
  misc_RNA (1)...(19): siRNA sense strand
gugcuugaguccuugacaa

SEQ ID NO: 523877 - RNA, 19 nt, Homo sapiens
  misc_RNA (1)...(19): siRNA sense strand
ucuaugugcuugaguccuu

SEQ ID NO: 523878 - RNA, 19 nt, Homo sapiens
  misc_RNA (1)...(19): siRNA sense strand
uaaccauacucaucaccau

SEQ ID NO: 523879 - RNA, 19 nt, Homo sapiens
  misc_RNA (1)...(19): siRNA sense strand
cuuugcaacuuaacaauca

SEQ ID NO: 523880 - RNA, 19 nt, Homo sapiens
  misc_RNA (1)...(19): siRNA sense strand
aacaaucaccugggaauuu

SEQ ID NO: 523881 - RNA, 19 nt, Homo sapiens
  misc_RNA (1)...(19): siRNA sense strand
acaguugcauugguuauuc

SEQ ID NO: 523882 - RNA, 19 nt, Homo sapiens
  misc_RNA (1)...(19): siRNA sense strand
cuuaaugcauuccacuuca

SEQ ID NO: 523883 - RNA, 19 nt, Homo sapiens
  misc_RNA (1)...(19): siRNA sense strand
uaacaaucaccugggaauu

SEQ ID NO: 523884 - RNA, 19 nt, Homo sapiens
  misc_RNA (1)...(19): siRNA sense strand
ccauacucaucaccauuau

SEQ ID NO: 523885 - RNA, 19 nt, Homo sapiens
  misc_RNA (1)...(19): siRNA sense strand
ugaggucccuugccgucuu

SEQ ID NO: 523886 - RNA, 19 nt, Homo sapiens
  misc_RNA (1)...(19): siRNA sense strand
gcagauacaacaucauagc

SEQ ID NO: 523887 - RNA, 19 nt, Homo sapiens
  misc_RNA (1)...(19): siRNA sense strand
caucaaggucucuucuuuc

SEQ ID NO: 523888 - RNA, 19 nt, Homo sapiens
  misc_RNA (1)...(19): siRNA sense strand
ucccuugccgucuuauuua

SEQ ID NO: 523889 - RNA, 19 nt, Homo sapiens
  misc_RNA (1)...(19): siRNA sense strand
auccuuacauucugguuaa

SEQ ID NO: 523890 - RNA, 19 nt, Homo sapiens
  misc_RNA (1)...(19): siRNA sense strand
gucccuugccgucuuauuu

SEQ ID NO: 523891 - RNA, 19 nt, Homo sapiens
  misc_RNA (1)...(19): siRNA sense strand
gcacuguaacugacaaacu

SEQ ID NO: 523892 - RNA, 19 nt, Homo sapiens
  misc_RNA (1)...(19): siRNA sense strand
ugguuaaacagcuugcuua

SEQ ID NO: 523893 - RNA, 19 nt, Homo sapiens
  misc_RNA (1)...(19): siRNA sense strand
cucacugucuucuucauga

SEQ ID NO: 523894 - RNA, 19 nt, Homo sapiens
  misc_RNA (1)...(19): siRNA sense strand
gucuaugcuuucaucuuaa

SEQ ID NO: 523895 - RNA, 19 nt, Homo sapiens
  misc_RNA (1)...(19): siRNA sense strand
cuugccgucuuauuuauug

SEQ ID NO: 523896 - RNA, 19 nt, Homo sapiens
  misc_RNA (1)...(19): siRNA sense strand
acaaucaccugggaauuuu

SEQ ID NO: 523897 - RNA, 19 nt, Homo sapiens
  misc_RNA (1)...(19): siRNA sense strand
accauacucaucaccauua

SEQ ID NO: 523898 - RNA, 19 nt, Homo sapiens
  misc_RNA (1)...(19): siRNA sense strand
ccucuuacuuucuaaccau

SEQ ID NO: 523899 - RNA, 19 nt, Homo sapiens
  misc_RNA (1)...(19): siRNA sense strand
uauccuuacauucugguua

SEQ ID NO: 523900 - RNA, 19 nt, Homo sapiens
  misc_RNA (1)...(19): siRNA sense strand
auacucaucaccauuauag

SEQ ID NO: 523901 - RNA, 19 nt, Homo sapiens
  misc_RNA (1)...(19): siRNA sense strand
aucaaggucucuucuuuca

SEQ ID NO: 523902 - RNA, 19 nt, Homo sapiens
  misc_RNA (1)...(19): siRNA sense strand
gcagugcugggcagagaau

SEQ ID NO: 523903 - RNA, 19 nt, Homo sapiens
  misc_RNA (1)...(19): siRNA sense strand
uggguucucugaugauuac

SEQ ID NO: 523904 - RNA, 19 nt, Homo sapiens
  misc_RNA (1)...(19): siRNA sense strand
ccauccaacucacugucuu

SEQ ID NO: 523905 - RNA, 19 nt, Homo sapiens
  misc_RNA (1)...(19): siRNA sense strand
cugggaagcuuuugucuau

SEQ ID NO: 523906 - RNA, 19 nt, Homo sapiens
  misc_RNA (1)...(19): siRNA sense strand
uguguuuaccucuuacuuu

SEQ ID NO: 523907 - RNA, 19 nt, Homo sapiens
  misc_RNA (1)...(19): siRNA sense strand
ucugaugauuacuugugua

SEQ ID NO: 523908 - RNA, 19 nt, Homo sapiens
  misc_RNA (1)...(19): siRNA sense strand
ucucuucuuucacccauca

SEQ ID NO: 523909 - RNA, 19 nt, Homo sapiens
  misc_RNA (1)...(19): siRNA sense strand
uagcacuggucacugcaau

SEQ ID NO: 523910 - RNA, 19 nt, Homo sapiens
  misc_RNA (1)...(19): siRNA sense strand
cauacaguugcauugguua

SEQ ID NO: 523911 - RNA, 19 nt, Homo sapiens
  misc_RNA (1)...(19): siRNA sense strand
cuuacauucugguuaaaca

SEQ ID NO: 523912 - RNA, 19 nt, Homo sapiens
  misc_RNA (1)...(19): siRNA sense strand
caacucacugucuucuuca

SEQ ID NO: 523913 - RNA, 19 nt, Homo sapiens
  misc_RNA (1)...(19): siRNA sense strand
cugagcagcccuacguuga

SEQ ID NO: 523914 - RNA, 19 nt, Homo sapiens
  misc_RNA (1)...(19): siRNA sense strand
ucacugucuucuucaugau

SEQ ID NO: 523915 - RNA, 19 nt, Homo sapiens
  misc_RNA (1)...(19): siRNA sense strand
cauacucaucaccauuaua

SEQ ID NO: 523916 - RNA, 19 nt, Homo sapiens
  misc_RNA (1)...(19): siRNA sense strand
caucauagcacuggucacu

SEQ ID NO: 523917 - RNA, 19 nt, Homo sapiens
  misc_RNA (1)...(19): siRNA sense strand
uaucaguuccaggcucaua

SEQ ID NO: 523918 - RNA, 19 nt, Homo sapiens
  misc_RNA (1)...(19): siRNA sense strand
guaacaaucaucccuucag

SEQ ID NO: 523919 - RNA, 19 nt, Homo sapiens
  misc_RNA (1)...(19): siRNA sense strand
acuggucacugcaauccaa

SEQ ID NO: 523920 - RNA, 19 nt, Homo sapiens
  misc_RNA (1)...(19): siRNA sense strand
ucacugaccaagcagauac

SEQ ID NO: 523921 - RNA, 19 nt, Homo sapiens
  misc_RNA (1)...(19): siRNA sense strand
uugaguccuugacaauuau

SEQ ID NO: 523922 - RNA, 19 nt, Homo sapiens
  misc_RNA (1)...(19): siRNA sense strand
gcuugaguccuugacaauu

SEQ ID NO: 523923 - RNA, 19 nt, Homo sapiens
  misc_RNA (1)...(19): siRNA sense strand
uuucuaaccauacucauca

SEQ ID NO: 523924 - RNA, 19 nt, Homo sapiens
  misc_RNA (1)...(19): siRNA sense strand
gcucauacaguugcauugg

SEQ ID NO: 523925 - RNA, 19 nt, Homo sapiens
  misc_RNA (1)...(19): siRNA sense strand
ugagcagcccuacguugaa

SEQ ID NO: 523926 - RNA, 19 nt, Homo sapiens
  misc_RNA (1)...(19): siRNA sense strand
agagaauggcugcaaguca

SEQ ID NO: 523927 - RNA, 19 nt, Homo sapiens
  misc_RNA (1)...(19): siRNA sense strand
gcauugguuauuccuuuca

SEQ ID NO: 523928 - RNA, 19 nt, Homo sapiens
  misc_RNA (1)...(19): siRNA sense strand
ggaaggagcuggaggaaga

SEQ ID NO: 523929 - RNA, 19 nt, Homo sapiens
  misc_RNA (1)...(19): siRNA sense strand
gaauuucgcuaaggaguuu

SEQ ID NO: 523930 - RNA, 19 nt, Homo sapiens
  misc_RNA (1)...(19): siRNA sense strand
ggaggaagauuucaucaag

SEQ ID NO: 523931 - RNA, 19 nt, Homo sapiens
  misc_RNA (1)...(19): siRNA sense strand
ccaccaagaucgacaaaga

SEQ ID NO: 523932 - RNA, 19 nt, Homo sapiens
  misc_RNA (1)...(19): siRNA sense strand
ugaaggaggucguacagaa

SEQ ID NO: 523933 - RNA, 19 nt, Homo sapiens
  misc_RNA (1)...(19): siRNA sense strand
gaggaagauuucaucaaga

SEQ ID NO: 523934 - RNA, 19 nt, Homo sapiens
  misc_RNA (1)...(19): siRNA sense strand
gagcaagagguccaaguuu

SEQ ID NO: 523935 - RNA, 19 nt, Homo sapiens
  misc_RNA (1)...(19): siRNA sense strand
acaagacccuggugaagga

SEQ ID NO: 523936 - RNA, 19 nt, Homo sapiens
  misc_RNA (1)...(19): siRNA sense strand
gcuaaggaguuugugauca

SEQ ID NO: 523937 - RNA, 19 nt, Homo sapiens
  misc_RNA (1)...(19): siRNA sense strand
gaaggaggucguacagaau

SEQ ID NO: 523938 - RNA, 19 nt, Homo sapiens
  misc_RNA (1)...(19): siRNA sense strand
guacagaauuucgcuaagg

SEQ ID NO: 523939 - RNA, 19 nt, Homo sapiens
  misc_RNA (1)...(19): siRNA sense strand
agcaagagguccaaguuug

SEQ ID NO: 523940 - RNA, 19 nt, Homo sapiens
  misc_RNA (1)...(19): siRNA sense strand
ggacaagacccuggugaag

SEQ ID NO: 523941 - RNA, 19 nt, Homo sapiens
  misc_RNA (1)...(19): siRNA sense strand
gaugacguccgguuguuug

SEQ ID NO: 523942 - RNA, 19 nt, Homo sapiens
  misc_RNA (1)...(19): siRNA sense strand
cagaugacguccgguuguu

SEQ ID NO: 523943 - RNA, 19 nt, Homo sapiens
  misc_RNA (1)...(19): siRNA sense strand
uacagaauuucgcuaagga

SEQ ID NO: 523944 - RNA, 19 nt, Homo sapiens
  misc_RNA (1)...(19): siRNA sense strand
cuaaggaguuugugaucag

SEQ ID NO: 523945 - RNA, 19 nt, Homo sapiens
  misc_RNA (1)...(19): siRNA sense strand
ggagcuggaggaagauuuc

SEQ ID NO: 523946 - RNA, 19 nt, Homo sapiens
  misc_RNA (1)...(19): siRNA sense strand
gagcggaguaccagcacuu

SEQ ID NO: 523947 - RNA, 19 nt, Homo sapiens
  misc_RNA (1)...(19): siRNA sense strand
aggaagauuucaucaagag

SEQ ID NO: 523948 - RNA, 19 nt, Homo sapiens
  misc_RNA (1)...(19): siRNA sense strand
ugagcaagagguccaaguu

SEQ ID NO: 523949 - RNA, 19 nt, Homo sapiens
  misc_RNA (1)...(19): siRNA sense strand
ucaagagcgagcugaagaa

SEQ ID NO: 523950 - RNA, 19 nt, Homo sapiens
  misc_RNA (1)...(19): siRNA sense strand
gguccaaguuugcccucau

SEQ ID NO: 523951 - RNA, 19 nt, Homo sapiens
  misc_RNA (1)...(19): siRNA sense strand
ggaguaccagcacuucauc

SEQ ID NO: 523952 - RNA, 19 nt, Homo sapiens
  misc_RNA (1)...(19): siRNA sense strand
aaggaggucguacagaauu

SEQ ID NO: 523953 - RNA, 19 nt, Homo sapiens
  misc_RNA (1)...(19): siRNA sense strand
aggaggucguacagaauuu

SEQ ID NO: 523954 - RNA, 19 nt, Homo sapiens
  misc_RNA (1)...(19): siRNA sense strand
aggaguuugugaucaguga

SEQ ID NO: 523955 - RNA, 19 nt, Homo sapiens
  misc_RNA (1)...(19): siRNA sense strand
gggaugccaugagcaagag

SEQ ID NO: 523956 - RNA, 19 nt, Homo sapiens
  misc_RNA (1)...(19): siRNA sense strand
uaaggaguuugugaucagu

SEQ ID NO: 523957 - RNA, 19 nt, Homo sapiens
  misc_RNA (1)...(19): siRNA sense strand
guccaaguuugcccucauc

SEQ ID NO: 523958 - RNA, 19 nt, Homo sapiens
  misc_RNA (1)...(19): siRNA sense strand
ggaggucguacagaauuuc

SEQ ID NO: 523959 - RNA, 19 nt, Homo sapiens
  misc_RNA (1)...(19): siRNA sense strand
ggaaaucuccuaucaggua

SEQ ID NO: 523960 - RNA, 19 nt, Homo sapiens
  misc_RNA (1)...(19): siRNA sense strand
gcagugcagucaaauaauu

SEQ ID NO: 523961 - RNA, 19 nt, Homo sapiens
  misc_RNA (1)...(19): siRNA sense strand
ggagcaaaguguucaauau

SEQ ID NO: 523962 - RNA, 19 nt, Homo sapiens
  misc_RNA (1)...(19): siRNA sense strand
ccuaucagguauucuauua

SEQ ID NO: 523963 - RNA, 19 nt, Homo sapiens
  misc_RNA (1)...(19): siRNA sense strand
caacaggagucauaagaau

SEQ ID NO: 523964 - RNA, 19 nt, Homo sapiens
  misc_RNA (1)...(19): siRNA sense strand
ugaaagaacaggugacaua

SEQ ID NO: 523965 - RNA, 19 nt, Homo sapiens
  misc_RNA (1)...(19): siRNA sense strand
gaaccugucuucuacaucu

SEQ ID NO: 523966 - RNA, 19 nt, Homo sapiens
  misc_RNA (1)...(19): siRNA sense strand
ggauaucaaugacaaugaa

SEQ ID NO: 523967 - RNA, 19 nt, Homo sapiens
  misc_RNA (1)...(19): siRNA sense strand
ccacagggaucauuuguag

SEQ ID NO: 523968 - RNA, 19 nt, Homo sapiens
  misc_RNA (1)...(19): siRNA sense strand
gacgaucccucaaguggua

SEQ ID NO: 523969 - RNA, 19 nt, Homo sapiens
  misc_RNA (1)...(19): siRNA sense strand
gcaaaguguucaauaucaa

SEQ ID NO: 523970 - RNA, 19 nt, Homo sapiens
  misc_RNA (1)...(19): siRNA sense strand
gcuauucucauuugcauua

SEQ ID NO: 523971 - RNA, 19 nt, Homo sapiens
  misc_RNA (1)...(19): siRNA sense strand
aagaacaggugacauauau

SEQ ID NO: 523972 - RNA, 19 nt, Homo sapiens
  misc_RNA (1)...(19): siRNA sense strand
caagaugaguauuggguaa

SEQ ID NO: 523973 - RNA, 19 nt, Homo sapiens
  misc_RNA (1)...(19): siRNA sense strand
ccagaaggaacauuaguua

SEQ ID NO: 523974 - RNA, 19 nt, Homo sapiens
  misc_RNA (1)...(19): siRNA sense strand
uaacacagcugucauuuug

SEQ ID NO: 523975 - RNA, 19 nt, Homo sapiens
  misc_RNA (1)...(19): siRNA sense strand
auagagaacugcaagauga

SEQ ID NO: 523976 - RNA, 19 nt, Homo sapiens
  misc_RNA (1)...(19): siRNA sense strand
uacagaagcuugauagaga

SEQ ID NO: 523977 - RNA, 19 nt, Homo sapiens
  misc_RNA (1)...(19): siRNA sense strand
cgaagaagcuaauacugau

SEQ ID NO: 523978 - RNA, 19 nt, Homo sapiens
  misc_RNA (1)...(19): siRNA sense strand
ccagugcgaucucauuuga

SEQ ID NO: 523979 - RNA, 19 nt, Homo sapiens
  misc_RNA (1)...(19): siRNA sense strand
cagaaccacuacgguauua

SEQ ID NO: 523980 - RNA, 19 nt, Homo sapiens
  misc_RNA (1)...(19): siRNA sense strand
gaaaguuuauaccgcuuga

SEQ ID NO: 523981 - RNA, 19 nt, Homo sapiens
  misc_RNA (1)...(19): siRNA sense strand
gaagauuucagagagaaua

SEQ ID NO: 523982 - RNA, 19 nt, Homo sapiens
  misc_RNA (1)...(19): siRNA sense strand
gaaaucuccuaucagguau

SEQ ID NO: 523983 - RNA, 19 nt, Homo sapiens
  misc_RNA (1)...(19): siRNA sense strand
guugggaccucgcuuuaaa

SEQ ID NO: 523984 - RNA, 19 nt, Homo sapiens
  misc_RNA (1)...(19): siRNA sense strand
ggaaucccgucacuuacaa

SEQ ID NO: 523985 - RNA, 19 nt, Homo sapiens
  misc_RNA (1)...(19): siRNA sense strand
guacaaucacuacaaguaa

SEQ ID NO: 523986 - RNA, 19 nt, Homo sapiens
  misc_RNA (1)...(19): siRNA sense strand
gcacacagaccugccagua

SEQ ID NO: 523987 - RNA, 19 nt, Homo sapiens
  misc_RNA (1)...(19): siRNA sense strand
ucaugaaacucaagaagga

SEQ ID NO: 523988 - RNA, 19 nt, Homo sapiens
  misc_RNA (1)...(19): siRNA sense strand
ugaaagcuaugauuaccuu

SEQ ID NO: 523989 - RNA, 19 nt, Homo sapiens
  misc_RNA (1)...(19): siRNA sense strand
gguacaaucacuacaagua

SEQ ID NO: 523990 - RNA, 19 nt, Homo sapiens
  misc_RNA (1)...(19): siRNA sense strand
ggaaguacuuuuaucauug

SEQ ID NO: 523991 - RNA, 19 nt, Homo sapiens
  misc_RNA (1)...(19): siRNA sense strand
guagaagacacuaacaauu

SEQ ID NO: 523992 - RNA, 19 nt, Homo sapiens
  misc_RNA (1)...(19): siRNA sense strand
cuuaagagcccagguaaua

SEQ ID NO: 523993 - RNA, 19 nt, Homo sapiens
  misc_RNA (1)...(19): siRNA sense strand
aaacaauucuuuccaguac

SEQ ID NO: 523994 - RNA, 19 nt, Homo sapiens
  misc_RNA (1)...(19): siRNA sense strand
aagauuagcaugcauguuu

SEQ ID NO: 523995 - RNA, 19 nt, Homo sapiens
  misc_RNA (1)...(19): siRNA sense strand
gcagagcugaggaguagua

SEQ ID NO: 523996 - RNA, 19 nt, Homo sapiens
  misc_RNA (1)...(19): siRNA sense strand
uagcagagcugaggaguag

SEQ ID NO: 523997 - RNA, 19 nt, Homo sapiens
  misc_RNA (1)...(19): siRNA sense strand
gaaagaacaggugacauau

SEQ ID NO: 523998 - RNA, 19 nt, Homo sapiens
  misc_RNA (1)...(19): siRNA sense strand
uaggaacaaucauggcaua

SEQ ID NO: 523999 - RNA, 19 nt, Homo sapiens
  misc_RNA (1)...(19): siRNA sense strand
cuacaucuccaucuuaauu

SEQ ID NO: 524000 - RNA, 19 nt, Homo sapiens
  misc_RNA (1)...(19): siRNA sense strand
ccacagacccagacaauag

SEQ ID NO: 524001 - RNA, 19 nt, Homo sapiens
  misc_RNA (1)...(19): siRNA sense strand
gaucugauuuagacaaugg

SEQ ID NO: 524002 - RNA, 19 nt, Homo sapiens
  misc_RNA (1)...(19): siRNA sense strand
gaaccaaaauuccuagaug

SEQ ID NO: 524003 - RNA, 19 nt, Homo sapiens
  misc_RNA (1)...(19): siRNA sense strand
gaaccugagucugaguuug

SEQ ID NO: 524004 - RNA, 19 nt, Homo sapiens
  misc_RNA (1)...(19): siRNA sense strand
gggaauuccucuccuaugg

SEQ ID NO: 524005 - RNA, 19 nt, Homo sapiens
  misc_RNA (1)...(19): siRNA sense strand
gcugaggaguaguaccaua

SEQ ID NO: 524006 - RNA, 19 nt, Homo sapiens
  misc_RNA (1)...(19): siRNA sense strand
aauggaaucccgucacuua

SEQ ID NO: 524007 - RNA, 19 nt, Homo sapiens
  misc_RNA (1)...(19): siRNA sense strand
gauaaugguacaaucacua

SEQ ID NO: 524008 - RNA, 19 nt, Homo sapiens
  misc_RNA (1)...(19): siRNA sense strand
guuauuuacugcugcguuu

SEQ ID NO: 524009 - RNA, 19 nt, Homo sapiens
  misc_RNA (1)...(19): siRNA sense strand
gaaggaacauuaguuaucc

SEQ ID NO: 524010 - RNA, 19 nt, Homo sapiens
  misc_RNA (1)...(19): siRNA sense strand
gaaccacuacgguauuaga

SEQ ID NO: 524011 - RNA, 19 nt, Homo sapiens
  misc_RNA (1)...(19): siRNA sense strand
ggaaauucauucuggaaaa

SEQ ID NO: 524012 - RNA, 19 nt, Homo sapiens
  misc_RNA (1)...(19): siRNA sense strand
cagauucuauuuccugaga

SEQ ID NO: 524013 - RNA, 19 nt, Homo sapiens
  misc_RNA (1)...(19): siRNA sense strand
uagaagacacuaacaauuc

SEQ ID NO: 524014 - RNA, 19 nt, Homo sapiens
  misc_RNA (1)...(19): siRNA sense strand
gaacaggugacauauaugc

SEQ ID NO: 524015 - RNA, 19 nt, Homo sapiens
  misc_RNA (1)...(19): siRNA sense strand
uacagaggccuuugauaua

SEQ ID NO: 524016 - RNA, 19 nt, Homo sapiens
  misc_RNA (1)...(19): siRNA sense strand
uagaacagaucucuucgau

SEQ ID NO: 524017 - RNA, 19 nt, Homo sapiens
  misc_RNA (1)...(19): siRNA sense strand
ugguacaaccuaaguauua

SEQ ID NO: 524018 - RNA, 19 nt, Homo sapiens
  misc_RNA (1)...(19): siRNA sense strand
gaaaugaauacgacuaguc

SEQ ID NO: 524019 - RNA, 19 nt, Homo sapiens
  misc_RNA (1)...(19): siRNA sense strand
agaagacacuaacaauuca

SEQ ID NO: 524020 - RNA, 19 nt, Homo sapiens
  misc_RNA (1)...(19): siRNA sense strand
ggaacaacaaguguauuaa

SEQ ID NO: 524021 - RNA, 19 nt, Homo sapiens
  misc_RNA (1)...(19): siRNA sense strand
uggaacaacaaguguauua

SEQ ID NO: 524022 - RNA, 19 nt, Homo sapiens
  misc_RNA (1)...(19): siRNA sense strand
gagcaaaguguucaauauc

SEQ ID NO: 524023 - RNA, 19 nt, Homo sapiens
  misc_RNA (1)...(19): siRNA sense strand
gagaugaauccauagaaga

SEQ ID NO: 524024 - RNA, 19 nt, Homo sapiens
  misc_RNA (1)...(19): siRNA sense strand
ccagcuaagaucugauuua

SEQ ID NO: 524025 - RNA, 19 nt, Homo sapiens
  misc_RNA (1)...(19): siRNA sense strand
auacagaggccuuugauau

SEQ ID NO: 524026 - RNA, 19 nt, Homo sapiens
  misc_RNA (1)...(19): siRNA sense strand
ggacuucuauaggaacaau

SEQ ID NO: 524027 - RNA, 19 nt, Homo sapiens
  misc_RNA (1)...(19): siRNA sense strand
aaagaacaggugacauaua

SEQ ID NO: 524028 - RNA, 19 nt, Homo sapiens
  misc_RNA (1)...(19): siRNA sense strand
caucaaaguuucggauauc

SEQ ID NO: 524029 - RNA, 19 nt, Homo sapiens
  misc_RNA (1)...(19): siRNA sense strand
gaggaguaguaccauaaug

SEQ ID NO: 524030 - RNA, 19 nt, Homo sapiens
  misc_RNA (1)...(19): siRNA sense strand
gguauuagagcaaaaguua

SEQ ID NO: 524031 - RNA, 19 nt, Homo sapiens
  misc_RNA (1)...(19): siRNA sense strand
gguggaagauguugaugag

SEQ ID NO: 524032 - RNA, 19 nt, Homo sapiens
  misc_RNA (1)...(19): siRNA sense strand
gaguugggaccucgcuuua

SEQ ID NO: 524033 - RNA, 19 nt, Homo sapiens
  misc_RNA (1)...(19): siRNA sense strand
ucccugagcuccuuagaau

SEQ ID NO: 524034 - RNA, 19 nt, Homo sapiens
  misc_RNA (1)...(19): siRNA sense strand
gauaacacagcugucauuu

SEQ ID NO: 524035 - RNA, 19 nt, Homo sapiens
  misc_RNA (1)...(19): siRNA sense strand
ucauugcuauucucauuug

SEQ ID NO: 524036 - RNA, 19 nt, Homo sapiens
  misc_RNA (1)...(19): siRNA sense strand
acagaggccuuugauauag

SEQ ID NO: 524037 - RNA, 19 nt, Homo sapiens
  misc_RNA (1)...(19): siRNA sense strand
gauagagaacugcaagaug

SEQ ID NO: 524038 - RNA, 19 nt, Homo sapiens
  misc_RNA (1)...(19): siRNA sense strand
guacaaacacccuuaccau

SEQ ID NO: 524039 - RNA, 19 nt, Homo sapiens
  misc_RNA (1)...(19): siRNA sense strand
caagauaacacagcuguca

SEQ ID NO: 524040 - RNA, 19 nt, Homo sapiens
  misc_RNA (1)...(19): siRNA sense strand
gcaaguucuuaacaucaau

SEQ ID NO: 524041 - RNA, 19 nt, Homo sapiens
  misc_RNA (1)...(19): siRNA sense strand
gauaaugacauaggagaga

SEQ ID NO: 524042 - RNA, 19 nt, Homo sapiens
  misc_RNA (1)...(19): siRNA sense strand
gaggaugauucgcaaacau

SEQ ID NO: 524043 - RNA, 19 nt, Homo sapiens
  misc_RNA (1)...(19): siRNA sense strand
ugagggaacagggucauua

SEQ ID NO: 524044 - RNA, 19 nt, Homo sapiens
  misc_RNA (1)...(19): siRNA sense strand
ucgaagaagcuaauacuga

SEQ ID NO: 524045 - RNA, 19 nt, Homo sapiens
  misc_RNA (1)...(19): siRNA sense strand
gauacagaggccuuugaua

SEQ ID NO: 524046 - RNA, 19 nt, Homo sapiens
  misc_RNA (1)...(19): siRNA sense strand
ccauagaagagcaccauuu

SEQ ID NO: 524047 - RNA, 19 nt, Homo sapiens
  misc_RNA (1)...(19): siRNA sense strand
ucucuucgaucccacugua

SEQ ID NO: 524048 - RNA, 19 nt, Homo sapiens
  misc_RNA (1)...(19): siRNA sense strand
ggaaaugaauacgacuagu

SEQ ID NO: 524049 - RNA, 19 nt, Homo sapiens
  misc_RNA (1)...(19): siRNA sense strand
ggaugauucgcaaacauuu

SEQ ID NO: 524050 - RNA, 19 nt, Homo sapiens
  misc_RNA (1)...(19): siRNA sense strand
acaauucuuuccaguacaa

SEQ ID NO: 524051 - RNA, 19 nt, Homo sapiens
  misc_RNA (1)...(19): siRNA sense strand
gaggaaaugaauacgacua

SEQ ID NO: 524052 - RNA, 19 nt, Homo sapiens
  misc_RNA (1)...(19): siRNA sense strand
caucacaucggccagcuaa

SEQ ID NO: 524053 - RNA, 19 nt, Homo sapiens
  misc_RNA (1)...(19): siRNA sense strand
caaacacccuuaccaucca

SEQ ID NO: 524054 - RNA, 19 nt, Homo sapiens
  misc_RNA (1)...(19): siRNA sense strand
acagaaaacucucaaacaa

SEQ ID NO: 524055 - RNA, 19 nt, Homo sapiens
  misc_RNA (1)...(19): siRNA sense strand
cuaugagacuuauguuugu

SEQ ID NO: 524056 - RNA, 19 nt, Homo sapiens
  misc_RNA (1)...(19): siRNA sense strand
gagaacugcaagaugagua

SEQ ID NO: 524057 - RNA, 19 nt, Homo sapiens
  misc_RNA (1)...(19): siRNA sense strand
ucaucaaaguuucggauau

SEQ ID NO: 524058 - RNA, 19 nt, Homo sapiens
  misc_RNA (1)...(19): siRNA sense strand
uaagagcccagguaauaga

SEQ ID NO: 524059 - RNA, 19 nt, Homo sapiens
  misc_RNA (1)...(19): siRNA sense strand
ggaaacagcuccuuguaca

SEQ ID NO: 524060 - RNA, 19 nt, Homo sapiens
  misc_RNA (1)...(19): siRNA sense strand
gagcaguacugguuuguga

SEQ ID NO: 524061 - RNA, 19 nt, Homo sapiens
  misc_RNA (1)...(19): siRNA sense strand
guauaaugcugucacaauu

SEQ ID NO: 524062 - RNA, 19 nt, Homo sapiens
  misc_RNA (1)...(19): siRNA sense strand
ggagaugcaucagcuauga

SEQ ID NO: 524063 - RNA, 19 nt, Homo sapiens
  misc_RNA (1)...(19): siRNA sense strand
caaaggaguuggcauuagu

SEQ ID NO: 524064 - RNA, 19 nt, Homo sapiens
  misc_RNA (1)...(19): siRNA sense strand
uaaauaucguucacccuaa

SEQ ID NO: 524065 - RNA, 19 nt, Homo sapiens
  misc_RNA (1)...(19): siRNA sense strand
gcauuaguguucuugaaau

SEQ ID NO: 524066 - RNA, 19 nt, Homo sapiens
  misc_RNA (1)...(19): siRNA sense strand
caagaaguuugggacuaua

SEQ ID NO: 524067 - RNA, 19 nt, Homo sapiens
  misc_RNA (1)...(19): siRNA sense strand
ggaguuggcauuaguguuc

SEQ ID NO: 524068 - RNA, 19 nt, Homo sapiens
  misc_RNA (1)...(19): siRNA sense strand
caagggagcaguacugguu

SEQ ID NO: 524069 - RNA, 19 nt, Homo sapiens
  misc_RNA (1)...(19): siRNA sense strand
gaagaagccaagaaguuug

SEQ ID NO: 524070 - RNA, 19 nt, Homo sapiens
  misc_RNA (1)...(19): siRNA sense strand
cagaagaagccaagaaguu

SEQ ID NO: 524071 - RNA, 19 nt, Homo sapiens
  misc_RNA (1)...(19): siRNA sense strand
ccuccuacguguauuauug

SEQ ID NO: 524072 - RNA, 19 nt, Homo sapiens
  misc_RNA (1)...(19): siRNA sense strand
ugacauguccucaaacuuc

SEQ ID NO: 524073 - RNA, 19 nt, Homo sapiens
  misc_RNA (1)...(19): siRNA sense strand
agucacaggucaucagauu

SEQ ID NO: 524074 - RNA, 19 nt, Homo sapiens
  misc_RNA (1)...(19): siRNA sense strand
gguguggaguuugacuuua

SEQ ID NO: 524075 - RNA, 19 nt, Homo sapiens
  misc_RNA (1)...(19): siRNA sense strand
aaauaucguucacccuaaa

SEQ ID NO: 524076 - RNA, 19 nt, Homo sapiens
  misc_RNA (1)...(19): siRNA sense strand
ccaggcagguggucaacuu

SEQ ID NO: 524077 - RNA, 19 nt, Homo sapiens
  misc_RNA (1)...(19): siRNA sense strand
agaagaagccaagaaguuu

SEQ ID NO: 524078 - RNA, 19 nt, Homo sapiens
  misc_RNA (1)...(19): siRNA sense strand
auaaugcugucacaauuga

SEQ ID NO: 524079 - RNA, 19 nt, Homo sapiens
  misc_RNA (1)...(19): siRNA sense strand
cuacaaaggaguuggcauu

SEQ ID NO: 524080 - RNA, 19 nt, Homo sapiens
  misc_RNA (1)...(19): siRNA sense strand
ugauaauucucaaggauuc

SEQ ID NO: 524081 - RNA, 19 nt, Homo sapiens
  misc_RNA (1)...(19): siRNA sense strand
guacaacacgccuccaugu

SEQ ID NO: 524082 - RNA, 19 nt, Homo sapiens
  misc_RNA (1)...(19): siRNA sense strand
aaaccucauuggcuugaaa

SEQ ID NO: 524083 - RNA, 19 nt, Homo sapiens
  misc_RNA (1)...(19): siRNA sense strand
gaaacagcuccuuguacaa

SEQ ID NO: 524084 - RNA, 19 nt, Homo sapiens
  misc_RNA (1)...(19): siRNA sense strand
guucagugcuguccccuua

SEQ ID NO: 524085 - RNA, 19 nt, Homo sapiens
  misc_RNA (1)...(19): siRNA sense strand
agacaacuauaaggugauu

SEQ ID NO: 524086 - RNA, 19 nt, Homo sapiens
  misc_RNA (1)...(19): siRNA sense strand
guguggaguuugacuuuau

SEQ ID NO: 524087 - RNA, 19 nt, Homo sapiens
  misc_RNA (1)...(19): siRNA sense strand
gaaguuugggacuauaaau

SEQ ID NO: 524088 - RNA, 19 nt, Homo sapiens
  misc_RNA (1)...(19): siRNA sense strand
cagcuaaggccgcagaaga

SEQ ID NO: 524089 - RNA, 19 nt, Homo sapiens
  misc_RNA (1)...(19): siRNA sense strand
gggccucucuguauaaugc

SEQ ID NO: 524090 - RNA, 19 nt, Homo sapiens
  misc_RNA (1)...(19): siRNA sense strand
ccucaaacuuccuguccaa

SEQ ID NO: 524091 - RNA, 19 nt, Homo sapiens
  misc_RNA (1)...(19): siRNA sense strand
ggcauuaguguucuugaaa

SEQ ID NO: 524092 - RNA, 19 nt, Homo sapiens
  misc_RNA (1)...(19): siRNA sense strand
uguggaguuugacuuuaua

SEQ ID NO: 524093 - RNA, 19 nt, Homo sapiens
  misc_RNA (1)...(19): siRNA sense strand
guacugguuugugacaugu

SEQ ID NO: 524094 - RNA, 19 nt, Homo sapiens
  misc_RNA (1)...(19): siRNA sense strand
acaaaggaguuggcauuag

SEQ ID NO: 524095 - RNA, 19 nt, Homo sapiens
  misc_RNA (1)...(19): siRNA sense strand
ugucacaauugaagacguu

SEQ ID NO: 524096 - RNA, 19 nt, Homo sapiens
  misc_RNA (1)...(19): siRNA sense strand
ccaagccaguggauguuuc

SEQ ID NO: 524097 - RNA, 19 nt, Homo sapiens
  misc_RNA (1)...(19): siRNA sense strand
uacaaaggaguuggcauua

SEQ ID NO: 524098 - RNA, 19 nt, Homo sapiens
  misc_RNA (1)...(19): siRNA sense strand
gcagaagaagccaagaagu

SEQ ID NO: 524099 - RNA, 19 nt, Homo sapiens
  misc_RNA (1)...(19): siRNA sense strand
ccucgguccuggaauacaa

SEQ ID NO: 524100 - RNA, 19 nt, Homo sapiens
  misc_RNA (1)...(19): siRNA sense strand
uggcauuaguguucuugaa

SEQ ID NO: 524101 - RNA, 19 nt, Homo sapiens
  misc_RNA (1)...(19): siRNA sense strand
uauaaugcugucacaauug

SEQ ID NO: 524102 - RNA, 19 nt, Homo sapiens
  misc_RNA (1)...(19): siRNA sense strand
ggacuauaaauaucguuca

SEQ ID NO: 524103 - RNA, 19 nt, Homo sapiens
  misc_RNA (1)...(19): siRNA sense strand
guucuggaguggauuaaaa

SEQ ID NO: 524104 - RNA, 19 nt, Homo sapiens
  misc_RNA (1)...(19): siRNA sense strand
uccaucaaaucucaaacaa

SEQ ID NO: 524105 - RNA, 19 nt, Homo sapiens
  misc_RNA (1)...(19): siRNA sense strand
uguauuauugcgcaaauga

SEQ ID NO: 524106 - RNA, 19 nt, Homo sapiens
  misc_RNA (1)...(19): siRNA sense strand
gcaguacugguuugugaca

SEQ ID NO: 524107 - RNA, 19 nt, Homo sapiens
  misc_RNA (1)...(19): siRNA sense strand
ucacaggucaucagauuuu

SEQ ID NO: 524108 - RNA, 19 nt, Homo sapiens
  misc_RNA (1)...(19): siRNA sense strand
ugcaugguguggaguuuga

SEQ ID NO: 524109 - RNA, 19 nt, Homo sapiens
  misc_RNA (1)...(19): siRNA sense strand
ggugcaugguguggaguuu

SEQ ID NO: 524110 - RNA, 19 nt, Homo sapiens
  misc_RNA (1)...(19): siRNA sense strand
uguauaaugcugucacaau

SEQ ID NO: 524111 - RNA, 19 nt, Homo sapiens
  misc_RNA (1)...(19): siRNA sense strand
caucagauuuugccaagau

SEQ ID NO: 524112 - RNA, 19 nt, Homo sapiens
  misc_RNA (1)...(19): siRNA sense strand
guuugggacuauaaauauc

SEQ ID NO: 524113 - RNA, 19 nt, Homo sapiens
  misc_RNA (1)...(19): siRNA sense strand
caauacagagaaucuugug

SEQ ID NO: 524114 - RNA, 19 nt, Homo sapiens
  misc_RNA (1)...(19): siRNA sense strand
uuagcuccaucaaaucuca

SEQ ID NO: 524115 - RNA, 19 nt, Homo sapiens
  misc_RNA (1)...(19): siRNA sense strand
ggcagguggucaacuuugg

SEQ ID NO: 524116 - RNA, 19 nt, Homo sapiens
  misc_RNA (1)...(19): siRNA sense strand
gagaaucuugugcgggaau

SEQ ID NO: 524117 - RNA, 19 nt, Homo sapiens
  misc_RNA (1)...(19): siRNA sense strand
aaacagcuccuuguacaac

SEQ ID NO: 524118 - RNA, 19 nt, Homo sapiens
  misc_RNA (1)...(19): siRNA sense strand
ccgcagaagaagccaagaa

SEQ ID NO: 524119 - RNA, 19 nt, Homo sapiens
  misc_RNA (1)...(19): siRNA sense strand
gcuuagcuccaucaaaucu

SEQ ID NO: 524120 - RNA, 19 nt, Homo sapiens
  misc_RNA (1)...(19): siRNA sense strand
aagaaguuugggacuauaa

SEQ ID NO: 524121 - RNA, 19 nt, Homo sapiens
  misc_RNA (1)...(19): siRNA sense strand
uagcuguuccagacaacua

SEQ ID NO: 524122 - RNA, 19 nt, Homo sapiens
  misc_RNA (1)...(19): siRNA sense strand
gcuguuccagacaacuaua

SEQ ID NO: 524123 - RNA, 19 nt, Homo sapiens
  misc_RNA (1)...(19): siRNA sense strand
uuaguguucuugaaaugag

SEQ ID NO: 524124 - RNA, 19 nt, Homo sapiens
  misc_RNA (1)...(19): siRNA sense strand
gcuugguucuggaguggau

SEQ ID NO: 524125 - RNA, 19 nt, Homo sapiens
  misc_RNA (1)...(19): siRNA sense strand
acaaggugcaggcuggaaa

SEQ ID NO: 524126 - RNA, 19 nt, Homo sapiens
  misc_RNA (1)...(19): siRNA sense strand
ugugacauguccucaaacu

SEQ ID NO: 524127 - RNA, 19 nt, Homo sapiens
  misc_RNA (1)...(19): siRNA sense strand
cguguauuauugcgcaaau

SEQ ID NO: 524128 - RNA, 19 nt, Homo sapiens
  misc_RNA (1)...(19): siRNA sense strand
aacaauacagagaaucuug

SEQ ID NO: 524129 - RNA, 19 nt, Homo sapiens
  misc_RNA (1)...(19): siRNA sense strand
cuggaaacagcuccuugua

SEQ ID NO: 524130 - RNA, 19 nt, Homo sapiens
  misc_RNA (1)...(19): siRNA sense strand
gccccucgguccuggaaua

SEQ ID NO: 524131 - RNA, 19 nt, Homo sapiens
  misc_RNA (1)...(19): siRNA sense strand
uauuauugcgcaaaugaga

SEQ ID NO: 524132 - RNA, 19 nt, Homo sapiens
  misc_RNA (1)...(19): siRNA sense strand
ggaaacagcuccuuguaca

SEQ ID NO: 524133 - RNA, 19 nt, Homo sapiens
  misc_RNA (1)...(19): siRNA sense strand
gagcaguacugguuuguga

SEQ ID NO: 524134 - RNA, 19 nt, Homo sapiens
  misc_RNA (1)...(19): siRNA sense strand
guauaaugcugucacaauu

SEQ ID NO: 524135 - RNA, 19 nt, Homo sapiens
  misc_RNA (1)...(19): siRNA sense strand
ggagaugcaucagcuauga

SEQ ID NO: 524136 - RNA, 19 nt, Homo sapiens
  misc_RNA (1)...(19): siRNA sense strand
caaaggaguuggcauuagu

SEQ ID NO: 524137 - RNA, 19 nt, Homo sapiens
  misc_RNA (1)...(19): siRNA sense strand
uaaauaucguucacccuaa

SEQ ID NO: 524138 - RNA, 19 nt, Homo sapiens
  misc_RNA (1)...(19): siRNA sense strand
gcauuaguguucuugaaau

SEQ ID NO: 524139 - RNA, 19 nt, Homo sapiens
  misc_RNA (1)...(19): siRNA sense strand
caagaaguuugggacuaua

SEQ ID NO: 524140 - RNA, 19 nt, Homo sapiens
  misc_RNA (1)...(19): siRNA sense strand
ggaguuggcauuaguguuc

SEQ ID NO: 524141 - RNA, 19 nt, Homo sapiens
  misc_RNA (1)...(19): siRNA sense strand
caagggagcaguacugguu

SEQ ID NO: 524142 - RNA, 19 nt, Homo sapiens
  misc_RNA (1)...(19): siRNA sense strand
gaagaagccaagaaguuug

SEQ ID NO: 524143 - RNA, 19 nt, Homo sapiens
  misc_RNA (1)...(19): siRNA sense strand
cagaagaagccaagaaguu

SEQ ID NO: 524144 - RNA, 19 nt, Homo sapiens
  misc_RNA (1)...(19): siRNA sense strand
ccuccuacguguauuauug

SEQ ID NO: 524145 - RNA, 19 nt, Homo sapiens
  misc_RNA (1)...(19): siRNA sense strand
ugacauguccucaaacuuc

SEQ ID NO: 524146 - RNA, 19 nt, Homo sapiens
  misc_RNA (1)...(19): siRNA sense strand
agucacaggucaucagauu

SEQ ID NO: 524147 - RNA, 19 nt, Homo sapiens
  misc_RNA (1)...(19): siRNA sense strand
gguguggaguuugacuuua

SEQ ID NO: 524148 - RNA, 19 nt, Homo sapiens
  misc_RNA (1)...(19): siRNA sense strand
aaauaucguucacccuaaa

SEQ ID NO: 524149 - RNA, 19 nt, Homo sapiens
  misc_RNA (1)...(19): siRNA sense strand
ccaggcagguggucaacuu

SEQ ID NO: 524150 - RNA, 19 nt, Homo sapiens
  misc_RNA (1)...(19): siRNA sense strand
agaagaagccaagaaguuu

SEQ ID NO: 524151 - RNA, 19 nt, Homo sapiens
  misc_RNA (1)...(19): siRNA sense strand
auaaugcugucacaauuga

SEQ ID NO: 524152 - RNA, 19 nt, Homo sapiens
  misc_RNA (1)...(19): siRNA sense strand
cuacaaaggaguuggcauu

SEQ ID NO: 524153 - RNA, 19 nt, Homo sapiens
  misc_RNA (1)...(19): siRNA sense strand
ugauaauucucaaggauuc

SEQ ID NO: 524154 - RNA, 19 nt, Homo sapiens
  misc_RNA (1)...(19): siRNA sense strand
guacaacacgccuccaugu

SEQ ID NO: 524155 - RNA, 19 nt, Homo sapiens
  misc_RNA (1)...(19): siRNA sense strand
aaaccucauuggcuugaaa

SEQ ID NO: 524156 - RNA, 19 nt, Homo sapiens
  misc_RNA (1)...(19): siRNA sense strand
gaaacagcuccuuguacaa

SEQ ID NO: 524157 - RNA, 19 nt, Homo sapiens
  misc_RNA (1)...(19): siRNA sense strand
guucagugcuguccccuua

SEQ ID NO: 524158 - RNA, 19 nt, Homo sapiens
  misc_RNA (1)...(19): siRNA sense strand
agacaacuauaaggugauu

SEQ ID NO: 524159 - RNA, 19 nt, Homo sapiens
  misc_RNA (1)...(19): siRNA sense strand
guguggaguuugacuuuau

SEQ ID NO: 524160 - RNA, 19 nt, Homo sapiens
  misc_RNA (1)...(19): siRNA sense strand
gaaguuugggacuauaaau

SEQ ID NO: 524161 - RNA, 19 nt, Homo sapiens
  misc_RNA (1)...(19): siRNA sense strand
cagcuaaggccgcagaaga

SEQ ID NO: 524162 - RNA, 19 nt, Homo sapiens
  misc_RNA (1)...(19): siRNA sense strand
gggccucucuguauaaugc

SEQ ID NO: 524163 - RNA, 19 nt, Homo sapiens
  misc_RNA (1)...(19): siRNA sense strand
ccucaaacuuccuguccaa

SEQ ID NO: 524164 - RNA, 19 nt, Homo sapiens
  misc_RNA (1)...(19): siRNA sense strand
ggcauuaguguucuugaaa

SEQ ID NO: 524165 - RNA, 19 nt, Homo sapiens
  misc_RNA (1)...(19): siRNA sense strand
uguggaguuugacuuuaua

SEQ ID NO: 524166 - RNA, 19 nt, Homo sapiens
  misc_RNA (1)...(19): siRNA sense strand
guacugguuugugacaugu

SEQ ID NO: 524167 - RNA, 19 nt, Homo sapiens
  misc_RNA (1)...(19): siRNA sense strand
acaaaggaguuggcauuag

SEQ ID NO: 524168 - RNA, 19 nt, Homo sapiens
  misc_RNA (1)...(19): siRNA sense strand
ugucacaauugaagacguu

SEQ ID NO: 524169 - RNA, 19 nt, Homo sapiens
  misc_RNA (1)...(19): siRNA sense strand
ccaagccaguggauguuuc

SEQ ID NO: 524170 - RNA, 19 nt, Homo sapiens
  misc_RNA (1)...(19): siRNA sense strand
uacaaaggaguuggcauua

SEQ ID NO: 524171 - RNA, 19 nt, Homo sapiens
  misc_RNA (1)...(19): siRNA sense strand
gcagaagaagccaagaagu

SEQ ID NO: 524172 - RNA, 19 nt, Homo sapiens
  misc_RNA (1)...(19): siRNA sense strand
ccucgguccuggaauacaa

SEQ ID NO: 524173 - RNA, 19 nt, Homo sapiens
  misc_RNA (1)...(19): siRNA sense strand
uggcauuaguguucuugaa

SEQ ID NO: 524174 - RNA, 19 nt, Homo sapiens
  misc_RNA (1)...(19): siRNA sense strand
uauaaugcugucacaauug

SEQ ID NO: 524175 - RNA, 19 nt, Homo sapiens
  misc_RNA (1)...(19): siRNA sense strand
ggacuauaaauaucguuca

SEQ ID NO: 524176 - RNA, 19 nt, Homo sapiens
  misc_RNA (1)...(19): siRNA sense strand
guucuggaguggauuaaaa

SEQ ID NO: 524177 - RNA, 19 nt, Homo sapiens
  misc_RNA (1)...(19): siRNA sense strand
uccaucaaaucucaaacaa

SEQ ID NO: 524178 - RNA, 19 nt, Homo sapiens
  misc_RNA (1)...(19): siRNA sense strand
uguauuauugcgcaaauga

SEQ ID NO: 524179 - RNA, 19 nt, Homo sapiens
  misc_RNA (1)...(19): siRNA sense strand
gcaguacugguuugugaca

SEQ ID NO: 524180 - RNA, 19 nt, Homo sapiens
  misc_RNA (1)...(19): siRNA sense strand
ucacaggucaucagauuuu

SEQ ID NO: 524181 - RNA, 19 nt, Homo sapiens
  misc_RNA (1)...(19): siRNA sense strand
ugcaugguguggaguuuga

SEQ ID NO: 524182 - RNA, 19 nt, Homo sapiens
  misc_RNA (1)...(19): siRNA sense strand
ggugcaugguguggaguuu

SEQ ID NO: 524183 - RNA, 19 nt, Homo sapiens
  misc_RNA (1)...(19): siRNA sense strand
uguauaaugcugucacaau

SEQ ID NO: 524184 - RNA, 19 nt, Homo sapiens
  misc_RNA (1)...(19): siRNA sense strand
caucagauuuugccaagau

SEQ ID NO: 524185 - RNA, 19 nt, Homo sapiens
  misc_RNA (1)...(19): siRNA sense strand
guuugggacuauaaauauc

SEQ ID NO: 524186 - RNA, 19 nt, Homo sapiens
  misc_RNA (1)...(19): siRNA sense strand
caauacagagaaucuugug

SEQ ID NO: 524187 - RNA, 19 nt, Homo sapiens
  misc_RNA (1)...(19): siRNA sense strand
uuagcuccaucaaaucuca

SEQ ID NO: 524188 - RNA, 19 nt, Homo sapiens
  misc_RNA (1)...(19): siRNA sense strand
ggcagguggucaacuuugg

SEQ ID NO: 524189 - RNA, 19 nt, Homo sapiens
  misc_RNA (1)...(19): siRNA sense strand
gagaaucuugugcgggaau

SEQ ID NO: 524190 - RNA, 19 nt, Homo sapiens
  misc_RNA (1)...(19): siRNA sense strand
aaacagcuccuuguacaac

SEQ ID NO: 524191 - RNA, 19 nt, Homo sapiens
  misc_RNA (1)...(19): siRNA sense strand
ccgcagaagaagccaagaa

SEQ ID NO: 524192 - RNA, 19 nt, Homo sapiens
  misc_RNA (1)...(19): siRNA sense strand
gcuuagcuccaucaaaucu

SEQ ID NO: 524193 - RNA, 19 nt, Homo sapiens
  misc_RNA (1)...(19): siRNA sense strand
aagaaguuugggacuauaa

SEQ ID NO: 524194 - RNA, 19 nt, Homo sapiens
  misc_RNA (1)...(19): siRNA sense strand
uagcuguuccagacaacua

SEQ ID NO: 524195 - RNA, 19 nt, Homo sapiens
  misc_RNA (1)...(19): siRNA sense strand
gcuguuccagacaacuaua

SEQ ID NO: 524196 - RNA, 19 nt, Homo sapiens
  misc_RNA (1)...(19): siRNA sense strand
uuaguguucuugaaaugag

SEQ ID NO: 524197 - RNA, 19 nt, Homo sapiens
  misc_RNA (1)...(19): siRNA sense strand
gcuugguucuggaguggau

SEQ ID NO: 524198 - RNA, 19 nt, Homo sapiens
  misc_RNA (1)...(19): siRNA sense strand
acaaggugcaggcuggaaa

SEQ ID NO: 524199 - RNA, 19 nt, Homo sapiens
  misc_RNA (1)...(19): siRNA sense strand
ugugacauguccucaaacu

SEQ ID NO: 524200 - RNA, 19 nt, Homo sapiens
  misc_RNA (1)...(19): siRNA sense strand
cguguauuauugcgcaaau

SEQ ID NO: 524201 - RNA, 19 nt, Homo sapiens
  misc_RNA (1)...(19): siRNA sense strand
aacaauacagagaaucuug

SEQ ID NO: 524202 - RNA, 19 nt, Homo sapiens
  misc_RNA (1)...(19): siRNA sense strand
cuggaaacagcuccuugua

SEQ ID NO: 524203 - RNA, 19 nt, Homo sapiens
  misc_RNA (1)...(19): siRNA sense strand
gccccucgguccuggaaua

SEQ ID NO: 524204 - RNA, 19 nt, Homo sapiens
  misc_RNA (1)...(19): siRNA sense strand
uauuauugcgcaaaugaga

SEQ ID NO: 524205 - RNA, 19 nt, Homo sapiens
  misc_RNA (1)...(19): siRNA sense strand
gaacacuucucgagacuuu

SEQ ID NO: 524206 - RNA, 19 nt, Homo sapiens
  misc_RNA (1)...(19): siRNA sense strand
gcauguaacuucaagguuu

SEQ ID NO: 524207 - RNA, 19 nt, Homo sapiens
  misc_RNA (1)...(19): siRNA sense strand
gauaugagcuggccucugu

SEQ ID NO: 524208 - RNA, 19 nt, Homo sapiens
  misc_RNA (1)...(19): siRNA sense strand
gaaaucagcgcuucuggua

SEQ ID NO: 524209 - RNA, 19 nt, Homo sapiens
  misc_RNA (1)...(19): siRNA sense strand
gaucuugccuuguaaauag

SEQ ID NO: 524210 - RNA, 19 nt, Homo sapiens
  misc_RNA (1)...(19): siRNA sense strand
caaauuaugugguagcuau

SEQ ID NO: 524211 - RNA, 19 nt, Homo sapiens
  misc_RNA (1)...(19): siRNA sense strand
gaaauggaguggcuggauu

SEQ ID NO: 524212 - RNA, 19 nt, Homo sapiens
  misc_RNA (1)...(19): siRNA sense strand
gaacucggaugaucugaau

SEQ ID NO: 524213 - RNA, 19 nt, Homo sapiens
  misc_RNA (1)...(19): siRNA sense strand
ucauagaucuugccuugua

SEQ ID NO: 524214 - RNA, 19 nt, Homo sapiens
  misc_RNA (1)...(19): siRNA sense strand
acaaagaacuggaaagugu

SEQ ID NO: 524215 - RNA, 19 nt, Homo sapiens
  misc_RNA (1)...(19): siRNA sense strand
gaacauuccugugcaacaa

SEQ ID NO: 524216 - RNA, 19 nt, Homo sapiens
  misc_RNA (1)...(19): siRNA sense strand
gcgaaugcccagaguauua

SEQ ID NO: 524217 - RNA, 19 nt, Homo sapiens
  misc_RNA (1)...(19): siRNA sense strand
gaacaacgccuggaggauu

SEQ ID NO: 524218 - RNA, 19 nt, Homo sapiens
  misc_RNA (1)...(19): siRNA sense strand
ggacaguucuacagacaug

SEQ ID NO: 524219 - RNA, 19 nt, Homo sapiens
  misc_RNA (1)...(19): siRNA sense strand
gaccaaacguggacaguuc

SEQ ID NO: 524220 - RNA, 19 nt, Homo sapiens
  misc_RNA (1)...(19): siRNA sense strand
cauguaacuucaagguuua

SEQ ID NO: 524221 - RNA, 19 nt, Homo sapiens
  misc_RNA (1)...(19): siRNA sense strand
caacagcgccugcgucaga

SEQ ID NO: 524222 - RNA, 19 nt, Homo sapiens
  misc_RNA (1)...(19): siRNA sense strand
gaacccagcccuucagaga

SEQ ID NO: 524223 - RNA, 19 nt, Homo sapiens
  misc_RNA (1)...(19): siRNA sense strand
ggacgaugauggcauguca

SEQ ID NO: 524224 - RNA, 19 nt, Homo sapiens
  misc_RNA (1)...(19): siRNA sense strand
gcagccaccuggacgauga

SEQ ID NO: 524225 - RNA, 19 nt, Homo sapiens
  misc_RNA (1)...(19): siRNA sense strand
uggcaaacauucauucuau

SEQ ID NO: 524226 - RNA, 19 nt, Homo sapiens
  misc_RNA (1)...(19): siRNA sense strand
gaccagcucccuacacuuu

SEQ ID NO: 524227 - RNA, 19 nt, Homo sapiens
  misc_RNA (1)...(19): siRNA sense strand
ggagagagcacagaguuug

SEQ ID NO: 524228 - RNA, 19 nt, Homo sapiens
  misc_RNA (1)...(19): siRNA sense strand
gcuaucagcucuugaaagc

SEQ ID NO: 524229 - RNA, 19 nt, Homo sapiens
  misc_RNA (1)...(19): siRNA sense strand
gcaaacauucauucuauuc

SEQ ID NO: 524230 - RNA, 19 nt, Homo sapiens
  misc_RNA (1)...(19): siRNA sense strand
ggaugagaaucuucagguu

SEQ ID NO: 524231 - RNA, 19 nt, Homo sapiens
  misc_RNA (1)...(19): siRNA sense strand
cauuacagcuuauagaaag

SEQ ID NO: 524232 - RNA, 19 nt, Homo sapiens
  misc_RNA (1)...(19): siRNA sense strand
gcaaaguuaucagguguca

SEQ ID NO: 524233 - RNA, 19 nt, Homo sapiens
  misc_RNA (1)...(19): siRNA sense strand
gcaaagacugcaaaguuau

SEQ ID NO: 524234 - RNA, 19 nt, Homo sapiens
  misc_RNA (1)...(19): siRNA sense strand
ggaggucuaugccagugaa

SEQ ID NO: 524235 - RNA, 19 nt, Homo sapiens
  misc_RNA (1)...(19): siRNA sense strand
gcaugucaguguacacaga

SEQ ID NO: 524236 - RNA, 19 nt, Homo sapiens
  misc_RNA (1)...(19): siRNA sense strand
ggagcaguuucgaauagaa

SEQ ID NO: 524237 - RNA, 19 nt, Homo sapiens
  misc_RNA (1)...(19): siRNA sense strand
caacaucaaugagaaguac

SEQ ID NO: 524238 - RNA, 19 nt, Homo sapiens
  misc_RNA (1)...(19): siRNA sense strand
guagaaacuuugaagaaac

SEQ ID NO: 524239 - RNA, 19 nt, Homo sapiens
  misc_RNA (1)...(19): siRNA sense strand
acacuuuaauggagacuuu

SEQ ID NO: 524240 - RNA, 19 nt, Homo sapiens
  misc_RNA (1)...(19): siRNA sense strand
ccagcucccuacacuuuaa

SEQ ID NO: 524241 - RNA, 19 nt, Homo sapiens
  misc_RNA (1)...(19): siRNA sense strand
uggaaaguguaucaaguuu

SEQ ID NO: 524242 - RNA, 19 nt, Homo sapiens
  misc_RNA (1)...(19): siRNA sense strand
gauaaggugaagucaguaa

SEQ ID NO: 524243 - RNA, 19 nt, Homo sapiens
  misc_RNA (1)...(19): siRNA sense strand
gagcuggccucuguucuca

SEQ ID NO: 524244 - RNA, 19 nt, Homo sapiens
  misc_RNA (1)...(19): siRNA sense strand
ggcaaacauucauucuauu

SEQ ID NO: 524245 - RNA, 19 nt, Homo sapiens
  misc_RNA (1)...(19): siRNA sense strand
gaugauggcaugucagugu

SEQ ID NO: 524246 - RNA, 19 nt, Homo sapiens
  misc_RNA (1)...(19): siRNA sense strand
ugaaugccgagauauauuu

SEQ ID NO: 524247 - RNA, 19 nt, Homo sapiens
  misc_RNA (1)...(19): siRNA sense strand
cccacaagcuccagcauug

SEQ ID NO: 524248 - RNA, 19 nt, Homo sapiens
  misc_RNA (1)...(19): siRNA sense strand
gggcaggcauugagauaca

SEQ ID NO: 524249 - RNA, 19 nt, Homo sapiens
  misc_RNA (1)...(19): siRNA sense strand
uaccaaagacuagaucaua

SEQ ID NO: 524250 - RNA, 19 nt, Homo sapiens
  misc_RNA (1)...(19): siRNA sense strand
gcaauccgaccaccugcua

SEQ ID NO: 524251 - RNA, 19 nt, Homo sapiens
  misc_RNA (1)...(19): siRNA sense strand
uauagaaaguguugaaugc

SEQ ID NO: 524252 - RNA, 19 nt, Homo sapiens
  misc_RNA (1)...(19): siRNA sense strand
aagauaaggugaagucagu

SEQ ID NO: 524253 - RNA, 19 nt, Homo sapiens
  misc_RNA (1)...(19): siRNA sense strand
cgacagcugugcaccauac

SEQ ID NO: 524254 - RNA, 19 nt, Homo sapiens
  misc_RNA (1)...(19): siRNA sense strand
cuaguacacugcucagaug

SEQ ID NO: 524255 - RNA, 19 nt, Homo sapiens
  misc_RNA (1)...(19): siRNA sense strand
caaagaacuggaaagugua

SEQ ID NO: 524256 - RNA, 19 nt, Homo sapiens
  misc_RNA (1)...(19): siRNA sense strand
cuggaucacugacaaagaa

SEQ ID NO: 524257 - RNA, 19 nt, Homo sapiens
  misc_RNA (1)...(19): siRNA sense strand
caacaacgccaaggagaga

SEQ ID NO: 524258 - RNA, 19 nt, Homo sapiens
  misc_RNA (1)...(19): siRNA sense strand
caaagaggagaguggagua

SEQ ID NO: 524259 - RNA, 19 nt, Homo sapiens
  misc_RNA (1)...(19): siRNA sense strand
gccgucagcugucugcuau

SEQ ID NO: 524260 - RNA, 19 nt, Homo sapiens
  misc_RNA (1)...(19): siRNA sense strand
ggaauugugggaacguauu

SEQ ID NO: 524261 - RNA, 19 nt, Homo sapiens
  misc_RNA (1)...(19): siRNA sense strand
aggagucucuuguuaaugu

SEQ ID NO: 524262 - RNA, 19 nt, Homo sapiens
  misc_RNA (1)...(19): siRNA sense strand
cauagaucuugccuuguaa

SEQ ID NO: 524263 - RNA, 19 nt, Homo sapiens
  misc_RNA (1)...(19): siRNA sense strand
guggagcaguuucgaauag

SEQ ID NO: 524264 - RNA, 19 nt, Homo sapiens
  misc_RNA (1)...(19): siRNA sense strand
ggauuuccaacaucaauga

SEQ ID NO: 524265 - RNA, 19 nt, Homo sapiens
  misc_RNA (1)...(19): siRNA sense strand
aacaacgccuggaggauuu

SEQ ID NO: 524266 - RNA, 19 nt, Homo sapiens
  misc_RNA (1)...(19): siRNA sense strand
aaucagcgcuucugguagu

SEQ ID NO: 524267 - RNA, 19 nt, Homo sapiens
  misc_RNA (1)...(19): siRNA sense strand
ggagccaucuggauaugag

SEQ ID NO: 524268 - RNA, 19 nt, Homo sapiens
  misc_RNA (1)...(19): siRNA sense strand
gaacguugcccaguguuuc

SEQ ID NO: 524269 - RNA, 19 nt, Homo sapiens
  misc_RNA (1)...(19): siRNA sense strand
guucgauucuucucuguca

SEQ ID NO: 524270 - RNA, 19 nt, Homo sapiens
  misc_RNA (1)...(19): siRNA sense strand
cgucagcugucugcuauga

SEQ ID NO: 524271 - RNA, 19 nt, Homo sapiens
  misc_RNA (1)...(19): siRNA sense strand
ucagguuccuuuccuugaa

SEQ ID NO: 524272 - RNA, 19 nt, Homo sapiens
  misc_RNA (1)...(19): siRNA sense strand
gaggagccaucuggauaug

SEQ ID NO: 524273 - RNA, 19 nt, Homo sapiens
  misc_RNA (1)...(19): siRNA sense strand
ggaaaagcauacucaggaa

SEQ ID NO: 524274 - RNA, 19 nt, Homo sapiens
  misc_RNA (1)...(19): siRNA sense strand
uuacagacuucacaucaag

SEQ ID NO: 524275 - RNA, 19 nt, Homo sapiens
  misc_RNA (1)...(19): siRNA sense strand
ggcauuggcuaagcucuug

SEQ ID NO: 524276 - RNA, 19 nt, Homo sapiens
  misc_RNA (1)...(19): siRNA sense strand
gaggauggguuuugauaug

SEQ ID NO: 524277 - RNA, 19 nt, Homo sapiens
  misc_RNA (1)...(19): siRNA sense strand
guauucugcuccaguuguu

SEQ ID NO: 524278 - RNA, 19 nt, Homo sapiens
  misc_RNA (1)...(19): siRNA sense strand
acagucauguucucugcua

SEQ ID NO: 524279 - RNA, 19 nt, Homo sapiens
  misc_RNA (1)...(19): siRNA sense strand
ucucgagacuuucccaaug

SEQ ID NO: 524280 - RNA, 19 nt, Homo sapiens
  misc_RNA (1)...(19): siRNA sense strand
gagauauauuucagcuuca

SEQ ID NO: 524281 - RNA, 19 nt, Homo sapiens
  misc_RNA (1)...(19): siRNA sense strand
gcuccagcauugaccuuga

SEQ ID NO: 524282 - RNA, 19 nt, Homo sapiens
  misc_RNA (1)...(19): siRNA sense strand
uuagcacccuccagaugua

SEQ ID NO: 524283 - RNA, 19 nt, Homo sapiens
  misc_RNA (1)...(19): siRNA sense strand
ugucugugcuucugaaauc

SEQ ID NO: 524284 - RNA, 19 nt, Homo sapiens
  misc_RNA (1)...(19): siRNA sense strand
ugucaagaguggcugaaga

SEQ ID NO: 524285 - RNA, 19 nt, Homo sapiens
  misc_RNA (1)...(19): siRNA sense strand
ucaguguucuccucaguuc

SEQ ID NO: 524286 - RNA, 19 nt, Homo sapiens
  misc_RNA (1)...(19): siRNA sense strand
gguagugcaugcuguggau

SEQ ID NO: 524287 - RNA, 19 nt, Homo sapiens
  misc_RNA (1)...(19): siRNA sense strand
gaucucuucucauuugcau

SEQ ID NO: 524288 - RNA, 19 nt, Homo sapiens
  misc_RNA (1)...(19): siRNA sense strand
gaacuggauaagcccauug

SEQ ID NO: 524289 - RNA, 19 nt, Homo sapiens
  misc_RNA (1)...(19): siRNA sense strand
acugugaaguuguguuuau

SEQ ID NO: 524290 - RNA, 19 nt, Homo sapiens
  misc_RNA (1)...(19): siRNA sense strand
ggaccaaacguggacaguu

SEQ ID NO: 524291 - RNA, 19 nt, Homo sapiens
  misc_RNA (1)...(19): siRNA sense strand
ggagaguggaguagaggaa

SEQ ID NO: 524292 - RNA, 19 nt, Homo sapiens
  misc_RNA (1)...(19): siRNA sense strand
ggagaacucggaugaucug

SEQ ID NO: 524293 - RNA, 19 nt, Homo sapiens
  misc_RNA (1)...(19): siRNA sense strand
ccaggccaaucagaucuuu

SEQ ID NO: 524294 - RNA, 19 nt, Homo sapiens
  misc_RNA (1)...(19): siRNA sense strand
aguguugaaugccgagaua

SEQ ID NO: 524295 - RNA, 19 nt, Homo sapiens
  misc_RNA (1)...(19): siRNA sense strand
ggagucucuuguuaauguu

SEQ ID NO: 524296 - RNA, 19 nt, Homo sapiens
  misc_RNA (1)...(19): siRNA sense strand
ugacaaagaacuggaaagu

SEQ ID NO: 524297 - RNA, 19 nt, Homo sapiens
  misc_RNA (1)...(19): siRNA sense strand
ggaaggccaucugcaacca

SEQ ID NO: 524298 - RNA, 19 nt, Homo sapiens
  misc_RNA (1)...(19): siRNA sense strand
acauguuaguggaagauaa

SEQ ID NO: 524299 - RNA, 19 nt, Homo sapiens
  misc_RNA (1)...(19): siRNA sense strand
gcucaguguucuccucagu

SEQ ID NO: 524300 - RNA, 19 nt, Homo sapiens
  misc_RNA (1)...(19): siRNA sense strand
cugaggagccaucuggaua

SEQ ID NO: 524301 - RNA, 19 nt, Homo sapiens
  misc_RNA (1)...(19): siRNA sense strand
gacuagaucauacgacaau

SEQ ID NO: 524302 - RNA, 19 nt, Homo sapiens
  misc_RNA (1)...(19): siRNA sense strand
gaacuggaaaguguaucaa

SEQ ID NO: 524303 - RNA, 19 nt, Homo sapiens
  misc_RNA (1)...(19): siRNA sense strand
gcaggaggccaccaaagag

SEQ ID NO: 524304 - RNA, 19 nt, Homo sapiens
  misc_RNA (1)...(19): siRNA sense strand
ccaaggucaucauagaucu

SEQ ID NO: 524305 - RNA, 19 nt, Homo sapiens
  misc_RNA (1)...(19): siRNA sense strand
gaacacuucucgagacuuu

SEQ ID NO: 524306 - RNA, 19 nt, Homo sapiens
  misc_RNA (1)...(19): siRNA sense strand
gcauguaacuucaagguuu

SEQ ID NO: 524307 - RNA, 19 nt, Homo sapiens
  misc_RNA (1)...(19): siRNA sense strand
gauaugagcuggccucugu

SEQ ID NO: 524308 - RNA, 19 nt, Homo sapiens
  misc_RNA (1)...(19): siRNA sense strand
gaaaucagcgcuucuggua

SEQ ID NO: 524309 - RNA, 19 nt, Homo sapiens
  misc_RNA (1)...(19): siRNA sense strand
gaucuugccuuguaaauag

SEQ ID NO: 524310 - RNA, 19 nt, Homo sapiens
  misc_RNA (1)...(19): siRNA sense strand
caaauuaugugguagcuau

SEQ ID NO: 524311 - RNA, 19 nt, Homo sapiens
  misc_RNA (1)...(19): siRNA sense strand
gaaauggaguggcuggauu

SEQ ID NO: 524312 - RNA, 19 nt, Homo sapiens
  misc_RNA (1)...(19): siRNA sense strand
gaacucggaugaucugaau

SEQ ID NO: 524313 - RNA, 19 nt, Homo sapiens
  misc_RNA (1)...(19): siRNA sense strand
ucauagaucuugccuugua

SEQ ID NO: 524314 - RNA, 19 nt, Homo sapiens
  misc_RNA (1)...(19): siRNA sense strand
acaaagaacuggaaagugu

SEQ ID NO: 524315 - RNA, 19 nt, Homo sapiens
  misc_RNA (1)...(19): siRNA sense strand
gaacauuccugugcaacaa

SEQ ID NO: 524316 - RNA, 19 nt, Homo sapiens
  misc_RNA (1)...(19): siRNA sense strand
gcgaaugcccagaguauua

SEQ ID NO: 524317 - RNA, 19 nt, Homo sapiens
  misc_RNA (1)...(19): siRNA sense strand
gaacaacgccuggaggauu

SEQ ID NO: 524318 - RNA, 19 nt, Homo sapiens
  misc_RNA (1)...(19): siRNA sense strand
ggacaguucuacagacaug

SEQ ID NO: 524319 - RNA, 19 nt, Homo sapiens
  misc_RNA (1)...(19): siRNA sense strand
gaccaaacguggacaguuc

SEQ ID NO: 524320 - RNA, 19 nt, Homo sapiens
  misc_RNA (1)...(19): siRNA sense strand
cauguaacuucaagguuua

SEQ ID NO: 524321 - RNA, 19 nt, Homo sapiens
  misc_RNA (1)...(19): siRNA sense strand
caacagcgccugcgucaga

SEQ ID NO: 524322 - RNA, 19 nt, Homo sapiens
  misc_RNA (1)...(19): siRNA sense strand
gaacccagcccuucagaga

SEQ ID NO: 524323 - RNA, 19 nt, Homo sapiens
  misc_RNA (1)...(19): siRNA sense strand
ggacgaugauggcauguca

SEQ ID NO: 524324 - RNA, 19 nt, Homo sapiens
  misc_RNA (1)...(19): siRNA sense strand
gcagccaccuggacgauga

SEQ ID NO: 524325 - RNA, 19 nt, Homo sapiens
  misc_RNA (1)...(19): siRNA sense strand
uggcaaacauucauucuau

SEQ ID NO: 524326 - RNA, 19 nt, Homo sapiens
  misc_RNA (1)...(19): siRNA sense strand
gaccagcucccuacacuuu

SEQ ID NO: 524327 - RNA, 19 nt, Homo sapiens
  misc_RNA (1)...(19): siRNA sense strand
ggagagagcacagaguuug

SEQ ID NO: 524328 - RNA, 19 nt, Homo sapiens
  misc_RNA (1)...(19): siRNA sense strand
gcuaucagcucuugaaagc

SEQ ID NO: 524329 - RNA, 19 nt, Homo sapiens
  misc_RNA (1)...(19): siRNA sense strand
gcaaacauucauucuauuc

SEQ ID NO: 524330 - RNA, 19 nt, Homo sapiens
  misc_RNA (1)...(19): siRNA sense strand
ggaugagaaucuucagguu

SEQ ID NO: 524331 - RNA, 19 nt, Homo sapiens
  misc_RNA (1)...(19): siRNA sense strand
cauuacagcuuauagaaag

SEQ ID NO: 524332 - RNA, 19 nt, Homo sapiens
  misc_RNA (1)...(19): siRNA sense strand
gcaaaguuaucagguguca

SEQ ID NO: 524333 - RNA, 19 nt, Homo sapiens
  misc_RNA (1)...(19): siRNA sense strand
gcaaagacugcaaaguuau

SEQ ID NO: 524334 - RNA, 19 nt, Homo sapiens
  misc_RNA (1)...(19): siRNA sense strand
ggaggucuaugccagugaa

SEQ ID NO: 524335 - RNA, 19 nt, Homo sapiens
  misc_RNA (1)...(19): siRNA sense strand
gcaugucaguguacacaga

SEQ ID NO: 524336 - RNA, 19 nt, Homo sapiens
  misc_RNA (1)...(19): siRNA sense strand
ggagcaguuucgaauagaa

SEQ ID NO: 524337 - RNA, 19 nt, Homo sapiens
  misc_RNA (1)...(19): siRNA sense strand
caacaucaaugagaaguac

SEQ ID NO: 524338 - RNA, 19 nt, Homo sapiens
  misc_RNA (1)...(19): siRNA sense strand
guagaaacuuugaagaaac

SEQ ID NO: 524339 - RNA, 19 nt, Homo sapiens
  misc_RNA (1)...(19): siRNA sense strand
acacuuuaauggagacuuu

SEQ ID NO: 524340 - RNA, 19 nt, Homo sapiens
  misc_RNA (1)...(19): siRNA sense strand
ccagcucccuacacuuuaa

SEQ ID NO: 524341 - RNA, 19 nt, Homo sapiens
  misc_RNA (1)...(19): siRNA sense strand
uggaaaguguaucaaguuu

SEQ ID NO: 524342 - RNA, 19 nt, Homo sapiens
  misc_RNA (1)...(19): siRNA sense strand
gauaaggugaagucaguaa

SEQ ID NO: 524343 - RNA, 19 nt, Homo sapiens
  misc_RNA (1)...(19): siRNA sense strand
gagcuggccucuguucuca

SEQ ID NO: 524344 - RNA, 19 nt, Homo sapiens
  misc_RNA (1)...(19): siRNA sense strand
ggcaaacauucauucuauu

SEQ ID NO: 524345 - RNA, 19 nt, Homo sapiens
  misc_RNA (1)...(19): siRNA sense strand
gaugauggcaugucagugu

SEQ ID NO: 524346 - RNA, 19 nt, Homo sapiens
  misc_RNA (1)...(19): siRNA sense strand
ugaaugccgagauauauuu

SEQ ID NO: 524347 - RNA, 19 nt, Homo sapiens
  misc_RNA (1)...(19): siRNA sense strand
cccacaagcuccagcauug

SEQ ID NO: 524348 - RNA, 19 nt, Homo sapiens
  misc_RNA (1)...(19): siRNA sense strand
gggcaggcauugagauaca

SEQ ID NO: 524349 - RNA, 19 nt, Homo sapiens
  misc_RNA (1)...(19): siRNA sense strand
uaccaaagacuagaucaua

SEQ ID NO: 524350 - RNA, 19 nt, Homo sapiens
  misc_RNA (1)...(19): siRNA sense strand
gcaauccgaccaccugcua

SEQ ID NO: 524351 - RNA, 19 nt, Homo sapiens
  misc_RNA (1)...(19): siRNA sense strand
uauagaaaguguugaaugc

SEQ ID NO: 524352 - RNA, 19 nt, Homo sapiens
  misc_RNA (1)...(19): siRNA sense strand
aagauaaggugaagucagu

SEQ ID NO: 524353 - RNA, 19 nt, Homo sapiens
  misc_RNA (1)...(19): siRNA sense strand
cgacagcugugcaccauac

SEQ ID NO: 524354 - RNA, 19 nt, Homo sapiens
  misc_RNA (1)...(19): siRNA sense strand
cuaguacacugcucagaug

SEQ ID NO: 524355 - RNA, 19 nt, Homo sapiens
  misc_RNA (1)...(19): siRNA sense strand
caaagaacuggaaagugua

SEQ ID NO: 524356 - RNA, 19 nt, Homo sapiens
  misc_RNA (1)...(19): siRNA sense strand
cuggaucacugacaaagaa

SEQ ID NO: 524357 - RNA, 19 nt, Homo sapiens
  misc_RNA (1)...(19): siRNA sense strand
caacaacgccaaggagaga

SEQ ID NO: 524358 - RNA, 19 nt, Homo sapiens
  misc_RNA (1)...(19): siRNA sense strand
caaagaggagaguggagua

SEQ ID NO: 524359 - RNA, 19 nt, Homo sapiens
  misc_RNA (1)...(19): siRNA sense strand
gccgucagcugucugcuau

SEQ ID NO: 524360 - RNA, 19 nt, Homo sapiens
  misc_RNA (1)...(19): siRNA sense strand
ggaauugugggaacguauu

SEQ ID NO: 524361 - RNA, 19 nt, Homo sapiens
  misc_RNA (1)...(19): siRNA sense strand
aggagucucuuguuaaugu

SEQ ID NO: 524362 - RNA, 19 nt, Homo sapiens
  misc_RNA (1)...(19): siRNA sense strand
cauagaucuugccuuguaa

SEQ ID NO: 524363 - RNA, 19 nt, Homo sapiens
  misc_RNA (1)...(19): siRNA sense strand
guggagcaguuucgaauag

SEQ ID NO: 524364 - RNA, 19 nt, Homo sapiens
  misc_RNA (1)...(19): siRNA sense strand
ggauuuccaacaucaauga

SEQ ID NO: 524365 - RNA, 19 nt, Homo sapiens
  misc_RNA (1)...(19): siRNA sense strand
aacaacgccuggaggauuu

SEQ ID NO: 524366 - RNA, 19 nt, Homo sapiens
  misc_RNA (1)...(19): siRNA sense strand
aaucagcgcuucugguagu

SEQ ID NO: 524367 - RNA, 19 nt, Homo sapiens
  misc_RNA (1)...(19): siRNA sense strand
ggagccaucuggauaugag

SEQ ID NO: 524368 - RNA, 19 nt, Homo sapiens
  misc_RNA (1)...(19): siRNA sense strand
gaacguugcccaguguuuc

SEQ ID NO: 524369 - RNA, 19 nt, Homo sapiens
  misc_RNA (1)...(19): siRNA sense strand
guucgauucuucucuguca

SEQ ID NO: 524370 - RNA, 19 nt, Homo sapiens
  misc_RNA (1)...(19): siRNA sense strand
cgucagcugucugcuauga

SEQ ID NO: 524371 - RNA, 19 nt, Homo sapiens
  misc_RNA (1)...(19): siRNA sense strand
ucagguuccuuuccuugaa

SEQ ID NO: 524372 - RNA, 19 nt, Homo sapiens
  misc_RNA (1)...(19): siRNA sense strand
gaggagccaucuggauaug

SEQ ID NO: 524373 - RNA, 19 nt, Homo sapiens
  misc_RNA (1)...(19): siRNA sense strand
ggaaaagcauacucaggaa

SEQ ID NO: 524374 - RNA, 19 nt, Homo sapiens
  misc_RNA (1)...(19): siRNA sense strand
uuacagacuucacaucaag

SEQ ID NO: 524375 - RNA, 19 nt, Homo sapiens
  misc_RNA (1)...(19): siRNA sense strand
ggcauuggcuaagcucuug

SEQ ID NO: 524376 - RNA, 19 nt, Homo sapiens
  misc_RNA (1)...(19): siRNA sense strand
gaggauggguuuugauaug

SEQ ID NO: 524377 - RNA, 19 nt, Homo sapiens
  misc_RNA (1)...(19): siRNA sense strand
guauucugcuccaguuguu

SEQ ID NO: 524378 - RNA, 19 nt, Homo sapiens
  misc_RNA (1)...(19): siRNA sense strand
acagucauguucucugcua

SEQ ID NO: 524379 - RNA, 19 nt, Homo sapiens
  misc_RNA (1)...(19): siRNA sense strand
ucucgagacuuucccaaug

SEQ ID NO: 524380 - RNA, 19 nt, Homo sapiens
  misc_RNA (1)...(19): siRNA sense strand
gagauauauuucagcuuca

SEQ ID NO: 524381 - RNA, 19 nt, Homo sapiens
  misc_RNA (1)...(19): siRNA sense strand
gcuccagcauugaccuuga

SEQ ID NO: 524382 - RNA, 19 nt, Homo sapiens
  misc_RNA (1)...(19): siRNA sense strand
uuagcacccuccagaugua

SEQ ID NO: 524383 - RNA, 19 nt, Homo sapiens
  misc_RNA (1)...(19): siRNA sense strand
ugucugugcuucugaaauc

SEQ ID NO: 524384 - RNA, 19 nt, Homo sapiens
  misc_RNA (1)...(19): siRNA sense strand
ugucaagaguggcugaaga

SEQ ID NO: 524385 - RNA, 19 nt, Homo sapiens
  misc_RNA (1)...(19): siRNA sense strand
ucaguguucuccucaguuc

SEQ ID NO: 524386 - RNA, 19 nt, Homo sapiens
  misc_RNA (1)...(19): siRNA sense strand
gguagugcaugcuguggau

SEQ ID NO: 524387 - RNA, 19 nt, Homo sapiens
  misc_RNA (1)...(19): siRNA sense strand
gaucucuucucauuugcau

SEQ ID NO: 524388 - RNA, 19 nt, Homo sapiens
  misc_RNA (1)...(19): siRNA sense strand
gaacuggauaagcccauug

SEQ ID NO: 524389 - RNA, 19 nt, Homo sapiens
  misc_RNA (1)...(19): siRNA sense strand
acugugaaguuguguuuau

SEQ ID NO: 524390 - RNA, 19 nt, Homo sapiens
  misc_RNA (1)...(19): siRNA sense strand
ggaccaaacguggacaguu

SEQ ID NO: 524391 - RNA, 19 nt, Homo sapiens
  misc_RNA (1)...(19): siRNA sense strand
ggagaguggaguagaggaa

SEQ ID NO: 524392 - RNA, 19 nt, Homo sapiens
  misc_RNA (1)...(19): siRNA sense strand
ggagaacucggaugaucug

SEQ ID NO: 524393 - RNA, 19 nt, Homo sapiens
  misc_RNA (1)...(19): siRNA sense strand
ccaggccaaucagaucuuu

SEQ ID NO: 524394 - RNA, 19 nt, Homo sapiens
  misc_RNA (1)...(19): siRNA sense strand
aguguugaaugccgagaua

SEQ ID NO: 524395 - RNA, 19 nt, Homo sapiens
  misc_RNA (1)...(19): siRNA sense strand
ggagucucuuguuaauguu

SEQ ID NO: 524396 - RNA, 19 nt, Homo sapiens
  misc_RNA (1)...(19): siRNA sense strand
ugacaaagaacuggaaagu

SEQ ID NO: 524397 - RNA, 19 nt, Homo sapiens
  misc_RNA (1)...(19): siRNA sense strand
ggaaggccaucugcaacca

SEQ ID NO: 524398 - RNA, 19 nt, Homo sapiens
  misc_RNA (1)...(19): siRNA sense strand
acauguuaguggaagauaa

SEQ ID NO: 524399 - RNA, 19 nt, Homo sapiens
  misc_RNA (1)...(19): siRNA sense strand
gcucaguguucuccucagu

SEQ ID NO: 524400 - RNA, 19 nt, Homo sapiens
  misc_RNA (1)...(19): siRNA sense strand
cugaggagccaucuggaua

SEQ ID NO: 524401 - RNA, 19 nt, Homo sapiens
  misc_RNA (1)...(19): siRNA sense strand
gacuagaucauacgacaau

SEQ ID NO: 524402 - RNA, 19 nt, Homo sapiens
  misc_RNA (1)...(19): siRNA sense strand
gaacuggaaaguguaucaa

SEQ ID NO: 524403 - RNA, 19 nt, Homo sapiens
  misc_RNA (1)...(19): siRNA sense strand
gcaggaggccaccaaagag

SEQ ID NO: 524404 - RNA, 19 nt, Homo sapiens
  misc_RNA (1)...(19): siRNA sense strand
ccaaggucaucauagaucu

SEQ ID NO: 524405 - RNA, 19 nt, Homo sapiens
  misc_RNA (1)...(19): siRNA sense strand
gaacacuucucgagacuuu

SEQ ID NO: 524406 - RNA, 19 nt, Homo sapiens
  misc_RNA (1)...(19): siRNA sense strand
gcauguaacuucaagguuu

SEQ ID NO: 524407 - RNA, 19 nt, Homo sapiens
  misc_RNA (1)...(19): siRNA sense strand
gauaugagcuggccucugu

SEQ ID NO: 524408 - RNA, 19 nt, Homo sapiens
  misc_RNA (1)...(19): siRNA sense strand
gaaaucagcgcuucuggua

SEQ ID NO: 524409 - RNA, 19 nt, Homo sapiens
  misc_RNA (1)...(19): siRNA sense strand
gaucuugccuuguaaauag

SEQ ID NO: 524410 - RNA, 19 nt, Homo sapiens
  misc_RNA (1)...(19): siRNA sense strand
caaauuaugugguagcuau

SEQ ID NO: 524411 - RNA, 19 nt, Homo sapiens
  misc_RNA (1)...(19): siRNA sense strand
gaaauggaguggcuggauu

SEQ ID NO: 524412 - RNA, 19 nt, Homo sapiens
  misc_RNA (1)...(19): siRNA sense strand
gaacucggaugaucugaau

SEQ ID NO: 524413 - RNA, 19 nt, Homo sapiens
  misc_RNA (1)...(19): siRNA sense strand
ucauagaucuugccuugua

SEQ ID NO: 524414 - RNA, 19 nt, Homo sapiens
  misc_RNA (1)...(19): siRNA sense strand
acaaagaacuggaaagugu

SEQ ID NO: 524415 - RNA, 19 nt, Homo sapiens
  misc_RNA (1)...(19): siRNA sense strand
gaacauuccugugcaacaa

SEQ ID NO: 524416 - RNA, 19 nt, Homo sapiens
  misc_RNA (1)...(19): siRNA sense strand
gcgaaugcccagaguauua

SEQ ID NO: 524417 - RNA, 19 nt, Homo sapiens
  misc_RNA (1)...(19): siRNA sense strand
gaacaacgccuggaggauu

SEQ ID NO: 524418 - RNA, 19 nt, Homo sapiens
  misc_RNA (1)...(19): siRNA sense strand
ggacaguucuacagacaug

SEQ ID NO: 524419 - RNA, 19 nt, Homo sapiens
  misc_RNA (1)...(19): siRNA sense strand
gaccaaacguggacaguuc

SEQ ID NO: 524420 - RNA, 19 nt, Homo sapiens
  misc_RNA (1)...(19): siRNA sense strand
cauguaacuucaagguuua

SEQ ID NO: 524421 - RNA, 19 nt, Homo sapiens
  misc_RNA (1)...(19): siRNA sense strand
caacagcgccugcgucaga

SEQ ID NO: 524422 - RNA, 19 nt, Homo sapiens
  misc_RNA (1)...(19): siRNA sense strand
gaacccagcccuucagaga

SEQ ID NO: 524423 - RNA, 19 nt, Homo sapiens
  misc_RNA (1)...(19): siRNA sense strand
ggacgaugauggcauguca

SEQ ID NO: 524424 - RNA, 19 nt, Homo sapiens
  misc_RNA (1)...(19): siRNA sense strand
gcagccaccuggacgauga

SEQ ID NO: 524425 - RNA, 19 nt, Homo sapiens
  misc_RNA (1)...(19): siRNA sense strand
uggcaaacauucauucuau

SEQ ID NO: 524426 - RNA, 19 nt, Homo sapiens
  misc_RNA (1)...(19): siRNA sense strand
gaccagcucccuacacuuu

SEQ ID NO: 524427 - RNA, 19 nt, Homo sapiens
  misc_RNA (1)...(19): siRNA sense strand
ggagagagcacagaguuug

SEQ ID NO: 524428 - RNA, 19 nt, Homo sapiens
  misc_RNA (1)...(19): siRNA sense strand
gcuaucagcucuugaaagc

SEQ ID NO: 524429 - RNA, 19 nt, Homo sapiens
  misc_RNA (1)...(19): siRNA sense strand
gcaaacauucauucuauuc

SEQ ID NO: 524430 - RNA, 19 nt, Homo sapiens
  misc_RNA (1)...(19): siRNA sense strand
ggaugagaaucuucagguu

SEQ ID NO: 524431 - RNA, 19 nt, Homo sapiens
  misc_RNA (1)...(19): siRNA sense strand
cauuacagcuuauagaaag

SEQ ID NO: 524432 - RNA, 19 nt, Homo sapiens
  misc_RNA (1)...(19): siRNA sense strand
gcaaaguuaucagguguca

SEQ ID NO: 524433 - RNA, 19 nt, Homo sapiens
  misc_RNA (1)...(19): siRNA sense strand
gcaaagacugcaaaguuau

SEQ ID NO: 524434 - RNA, 19 nt, Homo sapiens
  misc_RNA (1)...(19): siRNA sense strand
ggaggucuaugccagugaa

SEQ ID NO: 524435 - RNA, 19 nt, Homo sapiens
  misc_RNA (1)...(19): siRNA sense strand
gcaugucaguguacacaga

SEQ ID NO: 524436 - RNA, 19 nt, Homo sapiens
  misc_RNA (1)...(19): siRNA sense strand
ggagcaguuucgaauagaa

SEQ ID NO: 524437 - RNA, 19 nt, Homo sapiens
  misc_RNA (1)...(19): siRNA sense strand
caacaucaaugagaaguac

SEQ ID NO: 524438 - RNA, 19 nt, Homo sapiens
  misc_RNA (1)...(19): siRNA sense strand
guagaaacuuugaagaaac

SEQ ID NO: 524439 - RNA, 19 nt, Homo sapiens
  misc_RNA (1)...(19): siRNA sense strand
acacuuuaauggagacuuu

SEQ ID NO: 524440 - RNA, 19 nt, Homo sapiens
  misc_RNA (1)...(19): siRNA sense strand
ccagcucccuacacuuuaa

SEQ ID NO: 524441 - RNA, 19 nt, Homo sapiens
  misc_RNA (1)...(19): siRNA sense strand
uggaaaguguaucaaguuu

SEQ ID NO: 524442 - RNA, 19 nt, Homo sapiens
  misc_RNA (1)...(19): siRNA sense strand
gauaaggugaagucaguaa

SEQ ID NO: 524443 - RNA, 19 nt, Homo sapiens
  misc_RNA (1)...(19): siRNA sense strand
gagcuggccucuguucuca

SEQ ID NO: 524444 - RNA, 19 nt, Homo sapiens
  misc_RNA (1)...(19): siRNA sense strand
ggcaaacauucauucuauu

SEQ ID NO: 524445 - RNA, 19 nt, Homo sapiens
  misc_RNA (1)...(19): siRNA sense strand
gaugauggcaugucagugu

SEQ ID NO: 524446 - RNA, 19 nt, Homo sapiens
  misc_RNA (1)...(19): siRNA sense strand
ugaaugccgagauauauuu

SEQ ID NO: 524447 - RNA, 19 nt, Homo sapiens
  misc_RNA (1)...(19): siRNA sense strand
cccacaagcuccagcauug

SEQ ID NO: 524448 - RNA, 19 nt, Homo sapiens
  misc_RNA (1)...(19): siRNA sense strand
gggcaggcauugagauaca

SEQ ID NO: 524449 - RNA, 19 nt, Homo sapiens
  misc_RNA (1)...(19): siRNA sense strand
uaccaaagacuagaucaua

SEQ ID NO: 524450 - RNA, 19 nt, Homo sapiens
  misc_RNA (1)...(19): siRNA sense strand
gcaauccgaccaccugcua

SEQ ID NO: 524451 - RNA, 19 nt, Homo sapiens
  misc_RNA (1)...(19): siRNA sense strand
uauagaaaguguugaaugc

SEQ ID NO: 524452 - RNA, 19 nt, Homo sapiens
  misc_RNA (1)...(19): siRNA sense strand
aagauaaggugaagucagu

SEQ ID NO: 524453 - RNA, 19 nt, Homo sapiens
  misc_RNA (1)...(19): siRNA sense strand
cgacagcugugcaccauac

SEQ ID NO: 524454 - RNA, 19 nt, Homo sapiens
  misc_RNA (1)...(19): siRNA sense strand
cuaguacacugcucagaug

SEQ ID NO: 524455 - RNA, 19 nt, Homo sapiens
  misc_RNA (1)...(19): siRNA sense strand
caaagaacuggaaagugua

SEQ ID NO: 524456 - RNA, 19 nt, Homo sapiens
  misc_RNA (1)...(19): siRNA sense strand
cuggaucacugacaaagaa

SEQ ID NO: 524457 - RNA, 19 nt, Homo sapiens
  misc_RNA (1)...(19): siRNA sense strand
caacaacgccaaggagaga

SEQ ID NO: 524458 - RNA, 19 nt, Homo sapiens
  misc_RNA (1)...(19): siRNA sense strand
caaagaggagaguggagua

SEQ ID NO: 524459 - RNA, 19 nt, Homo sapiens
  misc_RNA (1)...(19): siRNA sense strand
gccgucagcugucugcuau

SEQ ID NO: 524460 - RNA, 19 nt, Homo sapiens
  misc_RNA (1)...(19): siRNA sense strand
ggaauugugggaacguauu

SEQ ID NO: 524461 - RNA, 19 nt, Homo sapiens
  misc_RNA (1)...(19): siRNA sense strand
aggagucucuuguuaaugu

SEQ ID NO: 524462 - RNA, 19 nt, Homo sapiens
  misc_RNA (1)...(19): siRNA sense strand
cauagaucuugccuuguaa

SEQ ID NO: 524463 - RNA, 19 nt, Homo sapiens
  misc_RNA (1)...(19): siRNA sense strand
guggagcaguuucgaauag

SEQ ID NO: 524464 - RNA, 19 nt, Homo sapiens
  misc_RNA (1)...(19): siRNA sense strand
ggauuuccaacaucaauga

SEQ ID NO: 524465 - RNA, 19 nt, Homo sapiens
  misc_RNA (1)...(19): siRNA sense strand
aacaacgccuggaggauuu

SEQ ID NO: 524466 - RNA, 19 nt, Homo sapiens
  misc_RNA (1)...(19): siRNA sense strand
aaucagcgcuucugguagu

SEQ ID NO: 524467 - RNA, 19 nt, Homo sapiens
  misc_RNA (1)...(19): siRNA sense strand
ggagccaucuggauaugag

SEQ ID NO: 524468 - RNA, 19 nt, Homo sapiens
  misc_RNA (1)...(19): siRNA sense strand
gaacguugcccaguguuuc

SEQ ID NO: 524469 - RNA, 19 nt, Homo sapiens
  misc_RNA (1)...(19): siRNA sense strand
guucgauucuucucuguca

SEQ ID NO: 524470 - RNA, 19 nt, Homo sapiens
  misc_RNA (1)...(19): siRNA sense strand
cgucagcugucugcuauga

SEQ ID NO: 524471 - RNA, 19 nt, Homo sapiens
  misc_RNA (1)...(19): siRNA sense strand
ucagguuccuuuccuugaa

SEQ ID NO: 524472 - RNA, 19 nt, Homo sapiens
  misc_RNA (1)...(19): siRNA sense strand
gaggagccaucuggauaug

SEQ ID NO: 524473 - RNA, 19 nt, Homo sapiens
  misc_RNA (1)...(19): siRNA sense strand
ggaaaagcauacucaggaa

SEQ ID NO: 524474 - RNA, 19 nt, Homo sapiens
  misc_RNA (1)...(19): siRNA sense strand
uuacagacuucacaucaag

SEQ ID NO: 524475 - RNA, 19 nt, Homo sapiens
  misc_RNA (1)...(19): siRNA sense strand
ggcauuggcuaagcucuug

SEQ ID NO: 524476 - RNA, 19 nt, Homo sapiens
  misc_RNA (1)...(19): siRNA sense strand
gaggauggguuuugauaug

SEQ ID NO: 524477 - RNA, 19 nt, Homo sapiens
  misc_RNA (1)...(19): siRNA sense strand
guauucugcuccaguuguu

SEQ ID NO: 524478 - RNA, 19 nt, Homo sapiens
  misc_RNA (1)...(19): siRNA sense strand
acagucauguucucugcua

SEQ ID NO: 524479 - RNA, 19 nt, Homo sapiens
  misc_RNA (1)...(19): siRNA sense strand
ucucgagacuuucccaaug

SEQ ID NO: 524480 - RNA, 19 nt, Homo sapiens
  misc_RNA (1)...(19): siRNA sense strand
gagauauauuucagcuuca

SEQ ID NO: 524481 - RNA, 19 nt, Homo sapiens
  misc_RNA (1)...(19): siRNA sense strand
gcuccagcauugaccuuga

SEQ ID NO: 524482 - RNA, 19 nt, Homo sapiens
  misc_RNA (1)...(19): siRNA sense strand
uuagcacccuccagaugua

SEQ ID NO: 524483 - RNA, 19 nt, Homo sapiens
  misc_RNA (1)...(19): siRNA sense strand
ugucugugcuucugaaauc

SEQ ID NO: 524484 - RNA, 19 nt, Homo sapiens
  misc_RNA (1)...(19): siRNA sense strand
ugucaagaguggcugaaga

SEQ ID NO: 524485 - RNA, 19 nt, Homo sapiens
  misc_RNA (1)...(19): siRNA sense strand
ucaguguucuccucaguuc

SEQ ID NO: 524486 - RNA, 19 nt, Homo sapiens
  misc_RNA (1)...(19): siRNA sense strand
gguagugcaugcuguggau

SEQ ID NO: 524487 - RNA, 19 nt, Homo sapiens
  misc_RNA (1)...(19): siRNA sense strand
gaucucuucucauuugcau

SEQ ID NO: 524488 - RNA, 19 nt, Homo sapiens
  misc_RNA (1)...(19): siRNA sense strand
gaacuggauaagcccauug

SEQ ID NO: 524489 - RNA, 19 nt, Homo sapiens
  misc_RNA (1)...(19): siRNA sense strand
acugugaaguuguguuuau

SEQ ID NO: 524490 - RNA, 19 nt, Homo sapiens
  misc_RNA (1)...(19): siRNA sense strand
ggaccaaacguggacaguu

SEQ ID NO: 524491 - RNA, 19 nt, Homo sapiens
  misc_RNA (1)...(19): siRNA sense strand
ggagaguggaguagaggaa

SEQ ID NO: 524492 - RNA, 19 nt, Homo sapiens
  misc_RNA (1)...(19): siRNA sense strand
ggagaacucggaugaucug

SEQ ID NO: 524493 - RNA, 19 nt, Homo sapiens
  misc_RNA (1)...(19): siRNA sense strand
ccaggccaaucagaucuuu

SEQ ID NO: 524494 - RNA, 19 nt, Homo sapiens
  misc_RNA (1)...(19): siRNA sense strand
aguguugaaugccgagaua

SEQ ID NO: 524495 - RNA, 19 nt, Homo sapiens
  misc_RNA (1)...(19): siRNA sense strand
ggagucucuuguuaauguu

SEQ ID NO: 524496 - RNA, 19 nt, Homo sapiens
  misc_RNA (1)...(19): siRNA sense strand
ugacaaagaacuggaaagu

SEQ ID NO: 524497 - RNA, 19 nt, Homo sapiens
  misc_RNA (1)...(19): siRNA sense strand
ggaaggccaucugcaacca

SEQ ID NO: 524498 - RNA, 19 nt, Homo sapiens
  misc_RNA (1)...(19): siRNA sense strand
acauguuaguggaagauaa

SEQ ID NO: 524499 - RNA, 19 nt, Homo sapiens
  misc_RNA (1)...(19): siRNA sense strand
gcucaguguucuccucagu

SEQ ID NO: 524500 - RNA, 19 nt, Homo sapiens
  misc_RNA (1)...(19): siRNA sense strand
cugaggagccaucuggaua

SEQ ID NO: 524501 - RNA, 19 nt, Homo sapiens
  misc_RNA (1)...(19): siRNA sense strand
gacuagaucauacgacaau

SEQ ID NO: 524502 - RNA, 19 nt, Homo sapiens
  misc_RNA (1)...(19): siRNA sense strand
gaacuggaaaguguaucaa

SEQ ID NO: 524503 - RNA, 19 nt, Homo sapiens
  misc_RNA (1)...(19): siRNA sense strand
gcaggaggccaccaaagag

SEQ ID NO: 524504 - RNA, 19 nt, Homo sapiens
  misc_RNA (1)...(19): siRNA sense strand
ccaaggucaucauagaucu

SEQ ID NO: 524505 - RNA, 19 nt, Homo sapiens
  misc_RNA (1)...(19): siRNA sense strand
gaagaggacuggugucugu

SEQ ID NO: 524506 - RNA, 19 nt, Homo sapiens
  misc_RNA (1)...(19): siRNA sense strand
gcaaugaccuccugcugaa

SEQ ID NO: 524507 - RNA, 19 nt, Homo sapiens
  misc_RNA (1)...(19): siRNA sense strand
ggaagcaucugcacaacuu

SEQ ID NO: 524508 - RNA, 19 nt, Homo sapiens
  misc_RNA (1)...(19): siRNA sense strand
uuaagaagcugccuuguca

SEQ ID NO: 524509 - RNA, 19 nt, Homo sapiens
  misc_RNA (1)...(19): siRNA sense strand
ggacaugagugcagaugga

SEQ ID NO: 524510 - RNA, 19 nt, Homo sapiens
  misc_RNA (1)...(19): siRNA sense strand
ggacauugcugcuacuucu

SEQ ID NO: 524511 - RNA, 19 nt, Homo sapiens
  misc_RNA (1)...(19): siRNA sense strand
caaagcugcuggccuguga

SEQ ID NO: 524512 - RNA, 19 nt, Homo sapiens
  misc_RNA (1)...(19): siRNA sense strand
gaagcugccuugucagauc

SEQ ID NO: 524513 - RNA, 19 nt, Homo sapiens
  misc_RNA (1)...(19): siRNA sense strand
ggaaagguuacuugaguuu

SEQ ID NO: 524514 - RNA, 19 nt, Homo sapiens
  misc_RNA (1)...(19): siRNA sense strand
ucugguccaucucuuauua

SEQ ID NO: 524515 - RNA, 19 nt, Homo sapiens
  misc_RNA (1)...(19): siRNA sense strand
caggaaagguuacuugagu

SEQ ID NO: 524516 - RNA, 19 nt, Homo sapiens
  misc_RNA (1)...(19): siRNA sense strand
ccuggaagcuggauauuca

SEQ ID NO: 524517 - RNA, 19 nt, Homo sapiens
  misc_RNA (1)...(19): siRNA sense strand
ggcagcaucucaaucuaaa

SEQ ID NO: 524518 - RNA, 19 nt, Homo sapiens
  misc_RNA (1)...(19): siRNA sense strand
cggagcagcugugcagaua

SEQ ID NO: 524519 - RNA, 19 nt, Homo sapiens
  misc_RNA (1)...(19): siRNA sense strand
caacuacaacuuugacuuc

SEQ ID NO: 524520 - RNA, 19 nt, Homo sapiens
  misc_RNA (1)...(19): siRNA sense strand
guacaggaaagguuacuug

SEQ ID NO: 524521 - RNA, 19 nt, Homo sapiens
  misc_RNA (1)...(19): siRNA sense strand
ucacuaugcugggacauug

SEQ ID NO: 524522 - RNA, 19 nt, Homo sapiens
  misc_RNA (1)...(19): siRNA sense strand
aaagguuacuugaguuugu

SEQ ID NO: 524523 - RNA, 19 nt, Homo sapiens
  misc_RNA (1)...(19): siRNA sense strand
gagauugacaccauguuug

SEQ ID NO: 524524 - RNA, 19 nt, Homo sapiens
  misc_RNA (1)...(19): siRNA sense strand
gaggcagcaucucaaucua

SEQ ID NO: 524525 - RNA, 19 nt, Homo sapiens
  misc_RNA (1)...(19): siRNA sense strand
ggcggcagcuggcuuuguu

SEQ ID NO: 524526 - RNA, 19 nt, Homo sapiens
  misc_RNA (1)...(19): siRNA sense strand
cggaaccagucuucagaaa

SEQ ID NO: 524527 - RNA, 19 nt, Homo sapiens
  misc_RNA (1)...(19): siRNA sense strand
gaaccagucuucagaaaac

SEQ ID NO: 524528 - RNA, 19 nt, Homo sapiens
  misc_RNA (1)...(19): siRNA sense strand
gcagcuggcuuuguuucug

SEQ ID NO: 524529 - RNA, 19 nt, Homo sapiens
  misc_RNA (1)...(19): siRNA sense strand
ggacagaagcuggugaucu

SEQ ID NO: 524530 - RNA, 19 nt, Homo sapiens
  misc_RNA (1)...(19): siRNA sense strand
cccaggacaucaucaucua

SEQ ID NO: 524531 - RNA, 19 nt, Homo sapiens
  misc_RNA (1)...(19): siRNA sense strand
gaaagguuacuugaguuug

SEQ ID NO: 524532 - RNA, 19 nt, Homo sapiens
  misc_RNA (1)...(19): siRNA sense strand
guccugggcuggaaucauc

SEQ ID NO: 524533 - RNA, 19 nt, Homo sapiens
  misc_RNA (1)...(19): siRNA sense strand
guucaucaccaucuuggaa

SEQ ID NO: 524534 - RNA, 19 nt, Homo sapiens
  misc_RNA (1)...(19): siRNA sense strand
ggauguggugguccaguuu

SEQ ID NO: 524535 - RNA, 19 nt, Homo sapiens
  misc_RNA (1)...(19): siRNA sense strand
ugagauugacaccauguuu

SEQ ID NO: 524536 - RNA, 19 nt, Homo sapiens
  misc_RNA (1)...(19): siRNA sense strand
gagcuggccagucgacuuc

SEQ ID NO: 524537 - RNA, 19 nt, Homo sapiens
  misc_RNA (1)...(19): siRNA sense strand
cuggaugccuccuuugaug

SEQ ID NO: 524538 - RNA, 19 nt, Homo sapiens
  misc_RNA (1)...(19): siRNA sense strand
ggagaaccaaggaugagau

SEQ ID NO: 524539 - RNA, 19 nt, Homo sapiens
  misc_RNA (1)...(19): siRNA sense strand
gcaguucaucaccaucuug

SEQ ID NO: 524540 - RNA, 19 nt, Homo sapiens
  misc_RNA (1)...(19): siRNA sense strand
gcaucucaaucuaaacaac

SEQ ID NO: 524541 - RNA, 19 nt, Homo sapiens
  misc_RNA (1)...(19): siRNA sense strand
cuugucagaucaccagcua

SEQ ID NO: 524542 - RNA, 19 nt, Homo sapiens
  misc_RNA (1)...(19): siRNA sense strand
ucaguauucugguccaucu

SEQ ID NO: 524543 - RNA, 19 nt, Homo sapiens
  misc_RNA (1)...(19): siRNA sense strand
cagcaucucaaucuaaaca

SEQ ID NO: 524544 - RNA, 19 nt, Homo sapiens
  misc_RNA (1)...(19): siRNA sense strand
ggaaugcuggguuuuauga

SEQ ID NO: 524545 - RNA, 19 nt, Homo sapiens
  misc_RNA (1)...(19): siRNA sense strand
gcuccugggauacguacua

SEQ ID NO: 524546 - RNA, 19 nt, Homo sapiens
  misc_RNA (1)...(19): siRNA sense strand
gagcagcugugcagauacc

SEQ ID NO: 524547 - RNA, 19 nt, Homo sapiens
  misc_RNA (1)...(19): siRNA sense strand
guacugcugauccggagaa

SEQ ID NO: 524548 - RNA, 19 nt, Homo sapiens
  misc_RNA (1)...(19): siRNA sense strand
aggaaagguuacuugaguu

SEQ ID NO: 524549 - RNA, 19 nt, Homo sapiens
  misc_RNA (1)...(19): siRNA sense strand
gaagcaucugcacaacuuu

SEQ ID NO: 524550 - RNA, 19 nt, Homo sapiens
  misc_RNA (1)...(19): siRNA sense strand
ggagcuggccagucgacuu

SEQ ID NO: 524551 - RNA, 19 nt, Homo sapiens
  misc_RNA (1)...(19): siRNA sense strand
ccaaaguggugccguuuuc

SEQ ID NO: 524552 - RNA, 19 nt, Homo sapiens
  misc_RNA (1)...(19): siRNA sense strand
guuaagaagcugccuuguc

SEQ ID NO: 524553 - RNA, 19 nt, Homo sapiens
  misc_RNA (1)...(19): siRNA sense strand
ccaacuacaacuuugacuu

SEQ ID NO: 524554 - RNA, 19 nt, Homo sapiens
  misc_RNA (1)...(19): siRNA sense strand
cagcagacacccuccucaa

SEQ ID NO: 524555 - RNA, 19 nt, Homo sapiens
  misc_RNA (1)...(19): siRNA sense strand
gccauguccuacccagaug

SEQ ID NO: 524556 - RNA, 19 nt, Homo sapiens
  misc_RNA (1)...(19): siRNA sense strand
gagaaccaaggaugagauc

SEQ ID NO: 524557 - RNA, 19 nt, Homo sapiens
  misc_RNA (1)...(19): siRNA sense strand
ggcaguucaucaccaucuu

SEQ ID NO: 524558 - RNA, 19 nt, Homo sapiens
  misc_RNA (1)...(19): siRNA sense strand
gauguggugguccaguuug

SEQ ID NO: 524559 - RNA, 19 nt, Homo sapiens
  misc_RNA (1)...(19): siRNA sense strand
aagcugccuugucagauca

SEQ ID NO: 524560 - RNA, 19 nt, Homo sapiens
  misc_RNA (1)...(19): siRNA sense strand
aagaagcugccuugucaga

SEQ ID NO: 524561 - RNA, 19 nt, Homo sapiens
  misc_RNA (1)...(19): siRNA sense strand
ggaaccagucuucagaaaa

SEQ ID NO: 524562 - RNA, 19 nt, Homo sapiens
  misc_RNA (1)...(19): siRNA sense strand
uauucugguccaucucuua

SEQ ID NO: 524563 - RNA, 19 nt, Homo sapiens
  misc_RNA (1)...(19): siRNA sense strand
gcuccuaccaggcagaaca

SEQ ID NO: 524564 - RNA, 19 nt, Homo sapiens
  misc_RNA (1)...(19): siRNA sense strand
aggcagcaucucaaucuaa

SEQ ID NO: 524565 - RNA, 19 nt, Homo sapiens
  misc_RNA (1)...(19): siRNA sense strand
gcuugccaacuacaacuuu

SEQ ID NO: 524566 - RNA, 19 nt, Homo sapiens
  misc_RNA (1)...(19): siRNA sense strand
cccgugcccuggagaaaca

SEQ ID NO: 524567 - RNA, 19 nt, Homo sapiens
  misc_RNA (1)...(19): siRNA sense strand
gagaacaacucauuacuug

SEQ ID NO: 524568 - RNA, 19 nt, Homo sapiens
  misc_RNA (1)...(19): siRNA sense strand
gaacaacucauuacuugaa

SEQ ID NO: 524569 - RNA, 19 nt, Homo sapiens
  misc_RNA (1)...(19): siRNA sense strand
gaauuccacucuuugguuu

SEQ ID NO: 524570 - RNA, 19 nt, Homo sapiens
  misc_RNA (1)...(19): siRNA sense strand
gaaacgcuggcaucaauua

SEQ ID NO: 524571 - RNA, 19 nt, Homo sapiens
  misc_RNA (1)...(19): siRNA sense strand
gggaaacgcuggcaucaau

SEQ ID NO: 524572 - RNA, 19 nt, Homo sapiens
  misc_RNA (1)...(19): siRNA sense strand
gagaagcgcucugucuuug

SEQ ID NO: 524573 - RNA, 19 nt, Homo sapiens
  misc_RNA (1)...(19): siRNA sense strand
gagagcagccagaagaaua

SEQ ID NO: 524574 - RNA, 19 nt, Homo sapiens
  misc_RNA (1)...(19): siRNA sense strand
uacaagaccuuccggaauu

SEQ ID NO: 524575 - RNA, 19 nt, Homo sapiens
  misc_RNA (1)...(19): siRNA sense strand
gaucccugcugucaucuuu

SEQ ID NO: 524576 - RNA, 19 nt, Homo sapiens
  misc_RNA (1)...(19): siRNA sense strand
ucaauuaucgggaguggua

SEQ ID NO: 524577 - RNA, 19 nt, Homo sapiens
  misc_RNA (1)...(19): siRNA sense strand
ggagaacaacucauuacuu

SEQ ID NO: 524578 - RNA, 19 nt, Homo sapiens
  misc_RNA (1)...(19): siRNA sense strand
gcagcuguccucaguauga

SEQ ID NO: 524579 - RNA, 19 nt, Homo sapiens
  misc_RNA (1)...(19): siRNA sense strand
ggaauuccacucuuugguu

SEQ ID NO: 524580 - RNA, 19 nt, Homo sapiens
  misc_RNA (1)...(19): siRNA sense strand
uggagaaggucuuucgaaa

SEQ ID NO: 524581 - RNA, 19 nt, Homo sapiens
  misc_RNA (1)...(19): siRNA sense strand
gacggugguugccaucuuu

SEQ ID NO: 524582 - RNA, 19 nt, Homo sapiens
  misc_RNA (1)...(19): siRNA sense strand
acaagaccuuccggaauua

SEQ ID NO: 524583 - RNA, 19 nt, Homo sapiens
  misc_RNA (1)...(19): siRNA sense strand
gaacugucauuacgaccau

SEQ ID NO: 524584 - RNA, 19 nt, Homo sapiens
  misc_RNA (1)...(19): siRNA sense strand
gggagucaguccaauagga

SEQ ID NO: 524585 - RNA, 19 nt, Homo sapiens
  misc_RNA (1)...(19): siRNA sense strand
gacgaucccugcugucauc

SEQ ID NO: 524586 - RNA, 19 nt, Homo sapiens
  misc_RNA (1)...(19): siRNA sense strand
caacuuggaaccaucuuug

SEQ ID NO: 524587 - RNA, 19 nt, Homo sapiens
  misc_RNA (1)...(19): siRNA sense strand
caaccauccuguucaucuu

SEQ ID NO: 524588 - RNA, 19 nt, Homo sapiens
  misc_RNA (1)...(19): siRNA sense strand
gcugucaucuuuaaguaca

SEQ ID NO: 524589 - RNA, 19 nt, Homo sapiens
  misc_RNA (1)...(19): siRNA sense strand
cgagaagcgcucugucuuu

SEQ ID NO: 524590 - RNA, 19 nt, Homo sapiens
  misc_RNA (1)...(19): siRNA sense strand
ggagucaguccaauaggaa

SEQ ID NO: 524591 - RNA, 19 nt, Homo sapiens
  misc_RNA (1)...(19): siRNA sense strand
aagaagaggugggugaaau

SEQ ID NO: 524592 - RNA, 19 nt, Homo sapiens
  misc_RNA (1)...(19): siRNA sense strand
acucuuugguuucuuauug

SEQ ID NO: 524593 - RNA, 19 nt, Homo sapiens
  misc_RNA (1)...(19): siRNA sense strand
cggagcagcugaacaagca

SEQ ID NO: 524594 - RNA, 19 nt, Homo sapiens
  misc_RNA (1)...(19): siRNA sense strand
cuuauuggcuggaauugga

SEQ ID NO: 524595 - RNA, 19 nt, Homo sapiens
  misc_RNA (1)...(19): siRNA sense strand
gaagaggugggugaaauca

SEQ ID NO: 524596 - RNA, 19 nt, Homo sapiens
  misc_RNA (1)...(19): siRNA sense strand
gaagcgcucugucuuugcu

SEQ ID NO: 524597 - RNA, 19 nt, Homo sapiens
  misc_RNA (1)...(19): siRNA sense strand
ggaaaagcauugcaagagu

SEQ ID NO: 524598 - RNA, 19 nt, Homo sapiens
  misc_RNA (1)...(19): siRNA sense strand
ccaacaaccugcgccugaa

SEQ ID NO: 524599 - RNA, 19 nt, Homo sapiens
  misc_RNA (1)...(19): siRNA sense strand
gauccagcaugcucuugau

SEQ ID NO: 524600 - RNA, 19 nt, Homo sapiens
  misc_RNA (1)...(19): siRNA sense strand
caacaucaucaacaaguuc

SEQ ID NO: 524601 - RNA, 19 nt, Homo sapiens
  misc_RNA (1)...(19): siRNA sense strand
ggaguccauuuacuuugug

SEQ ID NO: 524602 - RNA, 19 nt, Homo sapiens
  misc_RNA (1)...(19): siRNA sense strand
ggaaacgcuggcaucaauu

SEQ ID NO: 524603 - RNA, 19 nt, Homo sapiens
  misc_RNA (1)...(19): siRNA sense strand
gaggacaacaucaucaaca

SEQ ID NO: 524604 - RNA, 19 nt, Homo sapiens
  misc_RNA (1)...(19): siRNA sense strand
uauaugccaucuuuggaau

SEQ ID NO: 524605 - RNA, 19 nt, Homo sapiens
  misc_RNA (1)...(19): siRNA sense strand
gacaacaucaucaacaagu

SEQ ID NO: 524606 - RNA, 19 nt, Homo sapiens
  misc_RNA (1)...(19): siRNA sense strand
cugcugucaucuuuaagua

SEQ ID NO: 524607 - RNA, 19 nt, Homo sapiens
  misc_RNA (1)...(19): siRNA sense strand
caagugagucagaccaaga

SEQ ID NO: 524608 - RNA, 19 nt, Homo sapiens
  misc_RNA (1)...(19): siRNA sense strand
ggaaccaucuuugggaaaa

SEQ ID NO: 524609 - RNA, 19 nt, Homo sapiens
  misc_RNA (1)...(19): siRNA sense strand
agaauaccaucgccuugga

SEQ ID NO: 524610 - RNA, 19 nt, Homo sapiens
  misc_RNA (1)...(19): siRNA sense strand
ucccugcugucaucuuuaa

SEQ ID NO: 524611 - RNA, 19 nt, Homo sapiens
  misc_RNA (1)...(19): siRNA sense strand
ggccggagcagcugaacaa

SEQ ID NO: 524612 - RNA, 19 nt, Homo sapiens
  misc_RNA (1)...(19): siRNA sense strand
acaacaucaucaacaaguu

SEQ ID NO: 524613 - RNA, 19 nt, Homo sapiens
  misc_RNA (1)...(19): siRNA sense strand
gagauuggcuacggguucu

SEQ ID NO: 524614 - RNA, 19 nt, Homo sapiens
  misc_RNA (1)...(19): siRNA sense strand
guuggagaacggaaugaua

SEQ ID NO: 524615 - RNA, 19 nt, Homo sapiens
  misc_RNA (1)...(19): siRNA sense strand
cuacaagaccuuccggaau

SEQ ID NO: 524616 - RNA, 19 nt, Homo sapiens
  misc_RNA (1)...(19): siRNA sense strand
gcauuguguuugugacgau

SEQ ID NO: 524617 - RNA, 19 nt, Homo sapiens
  misc_RNA (1)...(19): siRNA sense strand
gcccgaggacguucagaaa

SEQ ID NO: 524618 - RNA, 19 nt, Homo sapiens
  misc_RNA (1)...(19): siRNA sense strand
cauuggagcagcccuuuga

SEQ ID NO: 524619 - RNA, 19 nt, Homo sapiens
  misc_RNA (1)...(19): siRNA sense strand
ggacaacaucaucaacaag

SEQ ID NO: 524620 - RNA, 19 nt, Homo sapiens
  misc_RNA (1)...(19): siRNA sense strand
agaggugggugaaaucaag

SEQ ID NO: 524621 - RNA, 19 nt, Homo sapiens
  misc_RNA (1)...(19): siRNA sense strand
ucaguaugaucggagauug

SEQ ID NO: 524622 - RNA, 19 nt, Homo sapiens
  misc_RNA (1)...(19): siRNA sense strand
uccacucuuugguuucuua

SEQ ID NO: 524623 - RNA, 19 nt, Homo sapiens
  misc_RNA (1)...(19): siRNA sense strand
ggagaaggucuuucgaaaa

SEQ ID NO: 524624 - RNA, 19 nt, Homo sapiens
  misc_RNA (1)...(19): siRNA sense strand
gugguggucuaccuuguca

SEQ ID NO: 524625 - RNA, 19 nt, Homo sapiens
  misc_RNA (1)...(19): siRNA sense strand
aggacaacaucaucaacaa

SEQ ID NO: 524626 - RNA, 19 nt, Homo sapiens
  misc_RNA (1)...(19): siRNA sense strand
uugcagcuguccucaguau

SEQ ID NO: 524627 - RNA, 19 nt, Homo sapiens
  misc_RNA (1)...(19): siRNA sense strand
uaugccaucuuuggaauuc

SEQ ID NO: 524628 - RNA, 19 nt, Homo sapiens
  misc_RNA (1)...(19): siRNA sense strand
gccggagaacaacucauua

SEQ ID NO: 524629 - RNA, 19 nt, Homo sapiens
  misc_RNA (1)...(19): siRNA sense strand
agacggugguugccaucuu

SEQ ID NO: 524630 - RNA, 19 nt, Homo sapiens
  misc_RNA (1)...(19): siRNA sense strand
ugaaggaggcaaaaucuuu

SEQ ID NO: 524631 - RNA, 19 nt, Homo sapiens
  misc_RNA (1)...(19): siRNA sense strand
caucucaaccauccuguuc

SEQ ID NO: 524632 - RNA, 19 nt, Homo sapiens
  misc_RNA (1)...(19): siRNA sense strand
gaaacucuuccaacaacag

SEQ ID NO: 524633 - RNA, 19 nt, Homo sapiens
  misc_RNA (1)...(19): siRNA sense strand
caaugucacggcugaguuc

SEQ ID NO: 524634 - RNA, 19 nt, Homo sapiens
  misc_RNA (1)...(19): siRNA sense strand
cagaguggaaggccaaugu

SEQ ID NO: 524635 - RNA, 19 nt, Homo sapiens
  misc_RNA (1)...(19): siRNA sense strand
gcuacggguucuguccaaa

SEQ ID NO: 524636 - RNA, 19 nt, Homo sapiens
  misc_RNA (1)...(19): siRNA sense strand
gagcacugaaggaggcaaa

SEQ ID NO: 524637 - RNA, 19 nt, Homo sapiens
  misc_RNA (1)...(19): siRNA sense strand
ggguccaccuccagacuca

SEQ ID NO: 524638 - RNA, 19 nt, Homo sapiens
  misc_RNA (1)...(19): siRNA sense strand
acggugggcuuuggugauu

SEQ ID NO: 524639 - RNA, 19 nt, Homo sapiens
  misc_RNA (1)...(19): siRNA sense strand
guggagaaggucuuucgaa

SEQ ID NO: 524640 - RNA, 19 nt, Homo sapiens
  misc_RNA (1)...(19): siRNA sense strand
gcgggagucaguccaauag

SEQ ID NO: 524641 - RNA, 19 nt, Homo sapiens
  misc_RNA (1)...(19): siRNA sense strand
cucauuacuugaagacaga

SEQ ID NO: 524642 - RNA, 19 nt, Homo sapiens
  misc_RNA (1)...(19): siRNA sense strand
cggaauuccugcgggauca

SEQ ID NO: 524643 - RNA, 19 nt, Homo sapiens
  misc_RNA (1)...(19): siRNA sense strand
acaacucauuacuugaaga

SEQ ID NO: 524644 - RNA, 19 nt, Homo sapiens
  misc_RNA (1)...(19): siRNA sense strand
ucucaaccauccuguucau

SEQ ID NO: 524645 - RNA, 19 nt, Homo sapiens
  misc_RNA (1)...(19): siRNA sense strand
uuugagagcagccagaaga

SEQ ID NO: 524646 - RNA, 19 nt, Homo sapiens
  misc_RNA (1)...(19): siRNA sense strand
gauacccacggacaccaaa

SEQ ID NO: 524647 - RNA, 19 nt, Homo sapiens
  misc_RNA (1)...(19): siRNA sense strand
ccuccagacucaccaagag

SEQ ID NO: 524648 - RNA, 19 nt, Homo sapiens
  misc_RNA (1)...(19): siRNA sense strand
agaccgucaugaaguggaa

SEQ ID NO: 524649 - RNA, 19 nt, Homo sapiens
  misc_RNA (1)...(19): siRNA sense strand
ccaaugucacggcugaguu

SEQ ID NO: 524650 - RNA, 19 nt, Homo sapiens
  misc_RNA (1)...(19): siRNA sense strand
gaguggaaggccaauguca

SEQ ID NO: 524651 - RNA, 19 nt, Homo sapiens
  misc_RNA (1)...(19): siRNA sense strand
gcuugcagaccgucaugaa

SEQ ID NO: 524652 - RNA, 19 nt, Homo sapiens
  misc_RNA (1)...(19): siRNA sense strand
uaucgggagugguauaagc

SEQ ID NO: 524653 - RNA, 19 nt, Homo sapiens
  misc_RNA (1)...(19): siRNA sense strand
ucaaccauccuguucaucu

SEQ ID NO: 524654 - RNA, 19 nt, Homo sapiens
  misc_RNA (1)...(19): siRNA sense strand
uuauaugccaucuuuggaa

SEQ ID NO: 524655 - RNA, 19 nt, Homo sapiens
  misc_RNA (1)...(19): siRNA sense strand
ccgagaagcgcucugucuu

SEQ ID NO: 524656 - RNA, 19 nt, Homo sapiens
  misc_RNA (1)...(19): siRNA sense strand
cacuggcggucuugucuuc

SEQ ID NO: 524657 - RNA, 19 nt, Homo sapiens
  misc_RNA (1)...(19): siRNA sense strand
cagcuguccucaguaugau

SEQ ID NO: 524658 - RNA, 19 nt, Homo sapiens
  misc_RNA (1)...(19): siRNA sense strand
acuugaagacagaaacuaa

SEQ ID NO: 524659 - RNA, 19 nt, Homo sapiens
  misc_RNA (1)...(19): siRNA sense strand
ccgaggacguucagaaaau

SEQ ID NO: 524660 - RNA, 19 nt, Homo sapiens
  misc_RNA (1)...(19): siRNA sense strand
gaccuugcccgaggacguu

SEQ ID NO: 524661 - RNA, 19 nt, Homo sapiens
  misc_RNA (1)...(19): siRNA sense strand
caacaaccugcgccugaag

SEQ ID NO: 524662 - RNA, 19 nt, Homo sapiens
  misc_RNA (1)...(19): siRNA sense strand
aaagaagaggugggugaaa

SEQ ID NO: 524663 - RNA, 19 nt, Homo sapiens
  misc_RNA (1)...(19): siRNA sense strand
ggcuacggguucuguccaa

SEQ ID NO: 524664 - RNA, 19 nt, Homo sapiens
  misc_RNA (1)...(19): siRNA sense strand
ccugcgggaucaugucugu

SEQ ID NO: 524665 - RNA, 19 nt, Homo sapiens
  misc_RNA (1)...(19): siRNA sense strand
gagaacaacucauuacuug

SEQ ID NO: 524666 - RNA, 19 nt, Homo sapiens
  misc_RNA (1)...(19): siRNA sense strand
gaacaacucauuacuugaa

SEQ ID NO: 524667 - RNA, 19 nt, Homo sapiens
  misc_RNA (1)...(19): siRNA sense strand
gaauuccacucuuugguuu

SEQ ID NO: 524668 - RNA, 19 nt, Homo sapiens
  misc_RNA (1)...(19): siRNA sense strand
gaaacgcuggcaucaauua

SEQ ID NO: 524669 - RNA, 19 nt, Homo sapiens
  misc_RNA (1)...(19): siRNA sense strand
gggaaacgcuggcaucaau

SEQ ID NO: 524670 - RNA, 19 nt, Homo sapiens
  misc_RNA (1)...(19): siRNA sense strand
gagaagcgcucugucuuug

SEQ ID NO: 524671 - RNA, 19 nt, Homo sapiens
  misc_RNA (1)...(19): siRNA sense strand
gagagcagccagaagaaua

SEQ ID NO: 524672 - RNA, 19 nt, Homo sapiens
  misc_RNA (1)...(19): siRNA sense strand
uacaagaccuuccggaauu

SEQ ID NO: 524673 - RNA, 19 nt, Homo sapiens
  misc_RNA (1)...(19): siRNA sense strand
gaucccugcugucaucuuu

SEQ ID NO: 524674 - RNA, 19 nt, Homo sapiens
  misc_RNA (1)...(19): siRNA sense strand
ucaauuaucgggaguggua

SEQ ID NO: 524675 - RNA, 19 nt, Homo sapiens
  misc_RNA (1)...(19): siRNA sense strand
ggagaacaacucauuacuu

SEQ ID NO: 524676 - RNA, 19 nt, Homo sapiens
  misc_RNA (1)...(19): siRNA sense strand
gcagcuguccucaguauga

SEQ ID NO: 524677 - RNA, 19 nt, Homo sapiens
  misc_RNA (1)...(19): siRNA sense strand
ggaauuccacucuuugguu

SEQ ID NO: 524678 - RNA, 19 nt, Homo sapiens
  misc_RNA (1)...(19): siRNA sense strand
uggagaaggucuuucgaaa

SEQ ID NO: 524679 - RNA, 19 nt, Homo sapiens
  misc_RNA (1)...(19): siRNA sense strand
gacggugguugccaucuuu

SEQ ID NO: 524680 - RNA, 19 nt, Homo sapiens
  misc_RNA (1)...(19): siRNA sense strand
acaagaccuuccggaauua

SEQ ID NO: 524681 - RNA, 19 nt, Homo sapiens
  misc_RNA (1)...(19): siRNA sense strand
gaacugucauuacgaccau

SEQ ID NO: 524682 - RNA, 19 nt, Homo sapiens
  misc_RNA (1)...(19): siRNA sense strand
gggagucaguccaauagga

SEQ ID NO: 524683 - RNA, 19 nt, Homo sapiens
  misc_RNA (1)...(19): siRNA sense strand
gacgaucccugcugucauc

SEQ ID NO: 524684 - RNA, 19 nt, Homo sapiens
  misc_RNA (1)...(19): siRNA sense strand
caacuuggaaccaucuuug

SEQ ID NO: 524685 - RNA, 19 nt, Homo sapiens
  misc_RNA (1)...(19): siRNA sense strand
caaccauccuguucaucuu

SEQ ID NO: 524686 - RNA, 19 nt, Homo sapiens
  misc_RNA (1)...(19): siRNA sense strand
gcugucaucuuuaaguaca

SEQ ID NO: 524687 - RNA, 19 nt, Homo sapiens
  misc_RNA (1)...(19): siRNA sense strand
cgagaagcgcucugucuuu

SEQ ID NO: 524688 - RNA, 19 nt, Homo sapiens
  misc_RNA (1)...(19): siRNA sense strand
ggagucaguccaauaggaa

SEQ ID NO: 524689 - RNA, 19 nt, Homo sapiens
  misc_RNA (1)...(19): siRNA sense strand
aagaagaggugggugaaau

SEQ ID NO: 524690 - RNA, 19 nt, Homo sapiens
  misc_RNA (1)...(19): siRNA sense strand
acucuuugguuucuuauug

SEQ ID NO: 524691 - RNA, 19 nt, Homo sapiens
  misc_RNA (1)...(19): siRNA sense strand
cggagcagcugaacaagca

SEQ ID NO: 524692 - RNA, 19 nt, Homo sapiens
  misc_RNA (1)...(19): siRNA sense strand
cuuauuggcuggaauugga

SEQ ID NO: 524693 - RNA, 19 nt, Homo sapiens
  misc_RNA (1)...(19): siRNA sense strand
gaagaggugggugaaauca

SEQ ID NO: 524694 - RNA, 19 nt, Homo sapiens
  misc_RNA (1)...(19): siRNA sense strand
gaagcgcucugucuuugcu

SEQ ID NO: 524695 - RNA, 19 nt, Homo sapiens
  misc_RNA (1)...(19): siRNA sense strand
ggaaaagcauugcaagagu

SEQ ID NO: 524696 - RNA, 19 nt, Homo sapiens
  misc_RNA (1)...(19): siRNA sense strand
ccaacaaccugcgccugaa

SEQ ID NO: 524697 - RNA, 19 nt, Homo sapiens
  misc_RNA (1)...(19): siRNA sense strand
gauccagcaugcucuugau

SEQ ID NO: 524698 - RNA, 19 nt, Homo sapiens
  misc_RNA (1)...(19): siRNA sense strand
caacaucaucaacaaguuc

SEQ ID NO: 524699 - RNA, 19 nt, Homo sapiens
  misc_RNA (1)...(19): siRNA sense strand
ggaguccauuuacuuugug

SEQ ID NO: 524700 - RNA, 19 nt, Homo sapiens
  misc_RNA (1)...(19): siRNA sense strand
ggaaacgcuggcaucaauu

SEQ ID NO: 524701 - RNA, 19 nt, Homo sapiens
  misc_RNA (1)...(19): siRNA sense strand
gaggacaacaucaucaaca

SEQ ID NO: 524702 - RNA, 19 nt, Homo sapiens
  misc_RNA (1)...(19): siRNA sense strand
uauaugccaucuuuggaau

SEQ ID NO: 524703 - RNA, 19 nt, Homo sapiens
  misc_RNA (1)...(19): siRNA sense strand
gacaacaucaucaacaagu

SEQ ID NO: 524704 - RNA, 19 nt, Homo sapiens
  misc_RNA (1)...(19): siRNA sense strand
cugcugucaucuuuaagua

SEQ ID NO: 524705 - RNA, 19 nt, Homo sapiens
  misc_RNA (1)...(19): siRNA sense strand
caagugagucagaccaaga

SEQ ID NO: 524706 - RNA, 19 nt, Homo sapiens
  misc_RNA (1)...(19): siRNA sense strand
ggaaccaucuuugggaaaa

SEQ ID NO: 524707 - RNA, 19 nt, Homo sapiens
  misc_RNA (1)...(19): siRNA sense strand
agaauaccaucgccuugga

SEQ ID NO: 524708 - RNA, 19 nt, Homo sapiens
  misc_RNA (1)...(19): siRNA sense strand
ucccugcugucaucuuuaa

SEQ ID NO: 524709 - RNA, 19 nt, Homo sapiens
  misc_RNA (1)...(19): siRNA sense strand
ggccggagcagcugaacaa

SEQ ID NO: 524710 - RNA, 19 nt, Homo sapiens
  misc_RNA (1)...(19): siRNA sense strand
acaacaucaucaacaaguu

SEQ ID NO: 524711 - RNA, 19 nt, Homo sapiens
  misc_RNA (1)...(19): siRNA sense strand
gagauuggcuacggguucu

SEQ ID NO: 524712 - RNA, 19 nt, Homo sapiens
  misc_RNA (1)...(19): siRNA sense strand
guuggagaacggaaugaua

SEQ ID NO: 524713 - RNA, 19 nt, Homo sapiens
  misc_RNA (1)...(19): siRNA sense strand
cuacaagaccuuccggaau

SEQ ID NO: 524714 - RNA, 19 nt, Homo sapiens
  misc_RNA (1)...(19): siRNA sense strand
gcauuguguuugugacgau

SEQ ID NO: 524715 - RNA, 19 nt, Homo sapiens
  misc_RNA (1)...(19): siRNA sense strand
gcccgaggacguucagaaa

SEQ ID NO: 524716 - RNA, 19 nt, Homo sapiens
  misc_RNA (1)...(19): siRNA sense strand
cauuggagcagcccuuuga

SEQ ID NO: 524717 - RNA, 19 nt, Homo sapiens
  misc_RNA (1)...(19): siRNA sense strand
ggacaacaucaucaacaag

SEQ ID NO: 524718 - RNA, 19 nt, Homo sapiens
  misc_RNA (1)...(19): siRNA sense strand
agaggugggugaaaucaag

SEQ ID NO: 524719 - RNA, 19 nt, Homo sapiens
  misc_RNA (1)...(19): siRNA sense strand
ucaguaugaucggagauug

SEQ ID NO: 524720 - RNA, 19 nt, Homo sapiens
  misc_RNA (1)...(19): siRNA sense strand
uccacucuuugguuucuua

SEQ ID NO: 524721 - RNA, 19 nt, Homo sapiens
  misc_RNA (1)...(19): siRNA sense strand
ggagaaggucuuucgaaaa

SEQ ID NO: 524722 - RNA, 19 nt, Homo sapiens
  misc_RNA (1)...(19): siRNA sense strand
gugguggucuaccuuguca

SEQ ID NO: 524723 - RNA, 19 nt, Homo sapiens
  misc_RNA (1)...(19): siRNA sense strand
aggacaacaucaucaacaa

SEQ ID NO: 524724 - RNA, 19 nt, Homo sapiens
  misc_RNA (1)...(19): siRNA sense strand
uugcagcuguccucaguau

SEQ ID NO: 524725 - RNA, 19 nt, Homo sapiens
  misc_RNA (1)...(19): siRNA sense strand
uaugccaucuuuggaauuc

SEQ ID NO: 524726 - RNA, 19 nt, Homo sapiens
  misc_RNA (1)...(19): siRNA sense strand
gccggagaacaacucauua

SEQ ID NO: 524727 - RNA, 19 nt, Homo sapiens
  misc_RNA (1)...(19): siRNA sense strand
agacggugguugccaucuu

SEQ ID NO: 524728 - RNA, 19 nt, Homo sapiens
  misc_RNA (1)...(19): siRNA sense strand
ugaaggaggcaaaaucuuu

SEQ ID NO: 524729 - RNA, 19 nt, Homo sapiens
  misc_RNA (1)...(19): siRNA sense strand
caucucaaccauccuguuc

SEQ ID NO: 524730 - RNA, 19 nt, Homo sapiens
  misc_RNA (1)...(19): siRNA sense strand
gaaacucuuccaacaacag

SEQ ID NO: 524731 - RNA, 19 nt, Homo sapiens
  misc_RNA (1)...(19): siRNA sense strand
caaugucacggcugaguuc

SEQ ID NO: 524732 - RNA, 19 nt, Homo sapiens
  misc_RNA (1)...(19): siRNA sense strand
cagaguggaaggccaaugu

SEQ ID NO: 524733 - RNA, 19 nt, Homo sapiens
  misc_RNA (1)...(19): siRNA sense strand
gcuacggguucuguccaaa

SEQ ID NO: 524734 - RNA, 19 nt, Homo sapiens
  misc_RNA (1)...(19): siRNA sense strand
gagcacugaaggaggcaaa

SEQ ID NO: 524735 - RNA, 19 nt, Homo sapiens
  misc_RNA (1)...(19): siRNA sense strand
ggguccaccuccagacuca

SEQ ID NO: 524736 - RNA, 19 nt, Homo sapiens
  misc_RNA (1)...(19): siRNA sense strand
acggugggcuuuggugauu

SEQ ID NO: 524737 - RNA, 19 nt, Homo sapiens
  misc_RNA (1)...(19): siRNA sense strand
guggagaaggucuuucgaa

SEQ ID NO: 524738 - RNA, 19 nt, Homo sapiens
  misc_RNA (1)...(19): siRNA sense strand
gcgggagucaguccaauag

SEQ ID NO: 524739 - RNA, 19 nt, Homo sapiens
  misc_RNA (1)...(19): siRNA sense strand
cucauuacuugaagacaga

SEQ ID NO: 524740 - RNA, 19 nt, Homo sapiens
  misc_RNA (1)...(19): siRNA sense strand
cggaauuccugcgggauca

SEQ ID NO: 524741 - RNA, 19 nt, Homo sapiens
  misc_RNA (1)...(19): siRNA sense strand
acaacucauuacuugaaga

SEQ ID NO: 524742 - RNA, 19 nt, Homo sapiens
  misc_RNA (1)...(19): siRNA sense strand
ucucaaccauccuguucau

SEQ ID NO: 524743 - RNA, 19 nt, Homo sapiens
  misc_RNA (1)...(19): siRNA sense strand
uuugagagcagccagaaga

SEQ ID NO: 524744 - RNA, 19 nt, Homo sapiens
  misc_RNA (1)...(19): siRNA sense strand
gauacccacggacaccaaa

SEQ ID NO: 524745 - RNA, 19 nt, Homo sapiens
  misc_RNA (1)...(19): siRNA sense strand
ccuccagacucaccaagag

SEQ ID NO: 524746 - RNA, 19 nt, Homo sapiens
  misc_RNA (1)...(19): siRNA sense strand
agaccgucaugaaguggaa

SEQ ID NO: 524747 - RNA, 19 nt, Homo sapiens
  misc_RNA (1)...(19): siRNA sense strand
ccaaugucacggcugaguu

SEQ ID NO: 524748 - RNA, 19 nt, Homo sapiens
  misc_RNA (1)...(19): siRNA sense strand
gaguggaaggccaauguca

SEQ ID NO: 524749 - RNA, 19 nt, Homo sapiens
  misc_RNA (1)...(19): siRNA sense strand
gcuugcagaccgucaugaa

SEQ ID NO: 524750 - RNA, 19 nt, Homo sapiens
  misc_RNA (1)...(19): siRNA sense strand
uaucgggagugguauaagc

SEQ ID NO: 524751 - RNA, 19 nt, Homo sapiens
  misc_RNA (1)...(19): siRNA sense strand
ucaaccauccuguucaucu

SEQ ID NO: 524752 - RNA, 19 nt, Homo sapiens
  misc_RNA (1)...(19): siRNA sense strand
uuauaugccaucuuuggaa

SEQ ID NO: 524753 - RNA, 19 nt, Homo sapiens
  misc_RNA (1)...(19): siRNA sense strand
ccgagaagcgcucugucuu

SEQ ID NO: 524754 - RNA, 19 nt, Homo sapiens
  misc_RNA (1)...(19): siRNA sense strand
cacuggcggucuugucuuc

SEQ ID NO: 524755 - RNA, 19 nt, Homo sapiens
  misc_RNA (1)...(19): siRNA sense strand
cagcuguccucaguaugau

SEQ ID NO: 524756 - RNA, 19 nt, Homo sapiens
  misc_RNA (1)...(19): siRNA sense strand
acuugaagacagaaacuaa

SEQ ID NO: 524757 - RNA, 19 nt, Homo sapiens
  misc_RNA (1)...(19): siRNA sense strand
ccgaggacguucagaaaau

SEQ ID NO: 524758 - RNA, 19 nt, Homo sapiens
  misc_RNA (1)...(19): siRNA sense strand
gaccuugcccgaggacguu

SEQ ID NO: 524759 - RNA, 19 nt, Homo sapiens
  misc_RNA (1)...(19): siRNA sense strand
caacaaccugcgccugaag

SEQ ID NO: 524760 - RNA, 19 nt, Homo sapiens
  misc_RNA (1)...(19): siRNA sense strand
aaagaagaggugggugaaa

SEQ ID NO: 524761 - RNA, 19 nt, Homo sapiens
  misc_RNA (1)...(19): siRNA sense strand
ggcuacggguucuguccaa

SEQ ID NO: 524762 - RNA, 19 nt, Homo sapiens
  misc_RNA (1)...(19): siRNA sense strand
ccugcgggaucaugucugu

SEQ ID NO: 524763 - RNA, 19 nt, Homo sapiens
  misc_RNA (1)...(19): siRNA sense strand
gagaacaacucauuacuug

SEQ ID NO: 524764 - RNA, 19 nt, Homo sapiens
  misc_RNA (1)...(19): siRNA sense strand
gaacaacucauuacuugaa

SEQ ID NO: 524765 - RNA, 19 nt, Homo sapiens
  misc_RNA (1)...(19): siRNA sense strand
gaauuccacucuuugguuu

SEQ ID NO: 524766 - RNA, 19 nt, Homo sapiens
  misc_RNA (1)...(19): siRNA sense strand
gaaacgcuggcaucaauua

SEQ ID NO: 524767 - RNA, 19 nt, Homo sapiens
  misc_RNA (1)...(19): siRNA sense strand
gggaaacgcuggcaucaau

SEQ ID NO: 524768 - RNA, 19 nt, Homo sapiens
  misc_RNA (1)...(19): siRNA sense strand
gagaagcgcucugucuuug

SEQ ID NO: 524769 - RNA, 19 nt, Homo sapiens
  misc_RNA (1)...(19): siRNA sense strand
gagagcagccagaagaaua

SEQ ID NO: 524770 - RNA, 19 nt, Homo sapiens
  misc_RNA (1)...(19): siRNA sense strand
uacaagaccuuccggaauu

SEQ ID NO: 524771 - RNA, 19 nt, Homo sapiens
  misc_RNA (1)...(19): siRNA sense strand
gaucccugcugucaucuuu

SEQ ID NO: 524772 - RNA, 19 nt, Homo sapiens
  misc_RNA (1)...(19): siRNA sense strand
ucaauuaucgggaguggua

SEQ ID NO: 524773 - RNA, 19 nt, Homo sapiens
  misc_RNA (1)...(19): siRNA sense strand
ggagaacaacucauuacuu

SEQ ID NO: 524774 - RNA, 19 nt, Homo sapiens
  misc_RNA (1)...(19): siRNA sense strand
gcagcuguccucaguauga

SEQ ID NO: 524775 - RNA, 19 nt, Homo sapiens
  misc_RNA (1)...(19): siRNA sense strand
ggaauuccacucuuugguu

SEQ ID NO: 524776 - RNA, 19 nt, Homo sapiens
  misc_RNA (1)...(19): siRNA sense strand
uggagaaggucuuucgaaa

SEQ ID NO: 524777 - RNA, 19 nt, Homo sapiens
  misc_RNA (1)...(19): siRNA sense strand
gacggugguugccaucuuu

SEQ ID NO: 524778 - RNA, 19 nt, Homo sapiens
  misc_RNA (1)...(19): siRNA sense strand
acaagaccuuccggaauua

SEQ ID NO: 524779 - RNA, 19 nt, Homo sapiens
  misc_RNA (1)...(19): siRNA sense strand
gaacugucauuacgaccau

SEQ ID NO: 524780 - RNA, 19 nt, Homo sapiens
  misc_RNA (1)...(19): siRNA sense strand
gggagucaguccaauagga

SEQ ID NO: 524781 - RNA, 19 nt, Homo sapiens
  misc_RNA (1)...(19): siRNA sense strand
gacgaucccugcugucauc

SEQ ID NO: 524782 - RNA, 19 nt, Homo sapiens
  misc_RNA (1)...(19): siRNA sense strand
caacuuggaaccaucuuug

SEQ ID NO: 524783 - RNA, 19 nt, Homo sapiens
  misc_RNA (1)...(19): siRNA sense strand
caaccauccuguucaucuu

SEQ ID NO: 524784 - RNA, 19 nt, Homo sapiens
  misc_RNA (1)...(19): siRNA sense strand
gcugucaucuuuaaguaca

SEQ ID NO: 524785 - RNA, 19 nt, Homo sapiens
  misc_RNA (1)...(19): siRNA sense strand
cgagaagcgcucugucuuu

SEQ ID NO: 524786 - RNA, 19 nt, Homo sapiens
  misc_RNA (1)...(19): siRNA sense strand
ggagucaguccaauaggaa

SEQ ID NO: 524787 - RNA, 19 nt, Homo sapiens
  misc_RNA (1)...(19): siRNA sense strand
aagaagaggugggugaaau

SEQ ID NO: 524788 - RNA, 19 nt, Homo sapiens
  misc_RNA (1)...(19): siRNA sense strand
acucuuugguuucuuauug

SEQ ID NO: 524789 - RNA, 19 nt, Homo sapiens
  misc_RNA (1)...(19): siRNA sense strand
cggagcagcugaacaagca

SEQ ID NO: 524790 - RNA, 19 nt, Homo sapiens
  misc_RNA (1)...(19): siRNA sense strand
cuuauuggcuggaauugga

SEQ ID NO: 524791 - RNA, 19 nt, Homo sapiens
  misc_RNA (1)...(19): siRNA sense strand
gaagaggugggugaaauca

SEQ ID NO: 524792 - RNA, 19 nt, Homo sapiens
  misc_RNA (1)...(19): siRNA sense strand
gaagcgcucugucuuugcu

SEQ ID NO: 524793 - RNA, 19 nt, Homo sapiens
  misc_RNA (1)...(19): siRNA sense strand
ggaaaagcauugcaagagu

SEQ ID NO: 524794 - RNA, 19 nt, Homo sapiens
  misc_RNA (1)...(19): siRNA sense strand
ccaacaaccugcgccugaa

SEQ ID NO: 524795 - RNA, 19 nt, Homo sapiens
  misc_RNA (1)...(19): siRNA sense strand
gauccagcaugcucuugau

SEQ ID NO: 524796 - RNA, 19 nt, Homo sapiens
  misc_RNA (1)...(19): siRNA sense strand
caacaucaucaacaaguuc

SEQ ID NO: 524797 - RNA, 19 nt, Homo sapiens
  misc_RNA (1)...(19): siRNA sense strand
ggaguccauuuacuuugug

SEQ ID NO: 524798 - RNA, 19 nt, Homo sapiens
  misc_RNA (1)...(19): siRNA sense strand
ggaaacgcuggcaucaauu

SEQ ID NO: 524799 - RNA, 19 nt, Homo sapiens
  misc_RNA (1)...(19): siRNA sense strand
gaggacaacaucaucaaca

SEQ ID NO: 524800 - RNA, 19 nt, Homo sapiens
  misc_RNA (1)...(19): siRNA sense strand
uauaugccaucuuuggaau

SEQ ID NO: 524801 - RNA, 19 nt, Homo sapiens
  misc_RNA (1)...(19): siRNA sense strand
gacaacaucaucaacaagu

SEQ ID NO: 524802 - RNA, 19 nt, Homo sapiens
  misc_RNA (1)...(19): siRNA sense strand
cugcugucaucuuuaagua

SEQ ID NO: 524803 - RNA, 19 nt, Homo sapiens
  misc_RNA (1)...(19): siRNA sense strand
caagugagucagaccaaga

SEQ ID NO: 524804 - RNA, 19 nt, Homo sapiens
  misc_RNA (1)...(19): siRNA sense strand
ggaaccaucuuugggaaaa

SEQ ID NO: 524805 - RNA, 19 nt, Homo sapiens
  misc_RNA (1)...(19): siRNA sense strand
agaauaccaucgccuugga

SEQ ID NO: 524806 - RNA, 19 nt, Homo sapiens
  misc_RNA (1)...(19): siRNA sense strand
ucccugcugucaucuuuaa

SEQ ID NO: 524807 - RNA, 19 nt, Homo sapiens
  misc_RNA (1)...(19): siRNA sense strand
ggccggagcagcugaacaa

SEQ ID NO: 524808 - RNA, 19 nt, Homo sapiens
  misc_RNA (1)...(19): siRNA sense strand
acaacaucaucaacaaguu

SEQ ID NO: 524809 - RNA, 19 nt, Homo sapiens
  misc_RNA (1)...(19): siRNA sense strand
gagauuggcuacggguucu

SEQ ID NO: 524810 - RNA, 19 nt, Homo sapiens
  misc_RNA (1)...(19): siRNA sense strand
guuggagaacggaaugaua

SEQ ID NO: 524811 - RNA, 19 nt, Homo sapiens
  misc_RNA (1)...(19): siRNA sense strand
cuacaagaccuuccggaau

SEQ ID NO: 524812 - RNA, 19 nt, Homo sapiens
  misc_RNA (1)...(19): siRNA sense strand
gcauuguguuugugacgau

SEQ ID NO: 524813 - RNA, 19 nt, Homo sapiens
  misc_RNA (1)...(19): siRNA sense strand
gcccgaggacguucagaaa

SEQ ID NO: 524814 - RNA, 19 nt, Homo sapiens
  misc_RNA (1)...(19): siRNA sense strand
cauuggagcagcccuuuga

SEQ ID NO: 524815 - RNA, 19 nt, Homo sapiens
  misc_RNA (1)...(19): siRNA sense strand
ggacaacaucaucaacaag

SEQ ID NO: 524816 - RNA, 19 nt, Homo sapiens
  misc_RNA (1)...(19): siRNA sense strand
agaggugggugaaaucaag

SEQ ID NO: 524817 - RNA, 19 nt, Homo sapiens
  misc_RNA (1)...(19): siRNA sense strand
ucaguaugaucggagauug

SEQ ID NO: 524818 - RNA, 19 nt, Homo sapiens
  misc_RNA (1)...(19): siRNA sense strand
uccacucuuugguuucuua

SEQ ID NO: 524819 - RNA, 19 nt, Homo sapiens
  misc_RNA (1)...(19): siRNA sense strand
ggagaaggucuuucgaaaa

SEQ ID NO: 524820 - RNA, 19 nt, Homo sapiens
  misc_RNA (1)...(19): siRNA sense strand
gugguggucuaccuuguca

SEQ ID NO: 524821 - RNA, 19 nt, Homo sapiens
  misc_RNA (1)...(19): siRNA sense strand
aggacaacaucaucaacaa

SEQ ID NO: 524822 - RNA, 19 nt, Homo sapiens
  misc_RNA (1)...(19): siRNA sense strand
uugcagcuguccucaguau

SEQ ID NO: 524823 - RNA, 19 nt, Homo sapiens
  misc_RNA (1)...(19): siRNA sense strand
uaugccaucuuuggaauuc

SEQ ID NO: 524824 - RNA, 19 nt, Homo sapiens
  misc_RNA (1)...(19): siRNA sense strand
gccggagaacaacucauua

SEQ ID NO: 524825 - RNA, 19 nt, Homo sapiens
  misc_RNA (1)...(19): siRNA sense strand
agacggugguugccaucuu

SEQ ID NO: 524826 - RNA, 19 nt, Homo sapiens
  misc_RNA (1)...(19): siRNA sense strand
ugaaggaggcaaaaucuuu

SEQ ID NO: 524827 - RNA, 19 nt, Homo sapiens
  misc_RNA (1)...(19): siRNA sense strand
caucucaaccauccuguuc

SEQ ID NO: 524828 - RNA, 19 nt, Homo sapiens
  misc_RNA (1)...(19): siRNA sense strand
gaaacucuuccaacaacag

SEQ ID NO: 524829 - RNA, 19 nt, Homo sapiens
  misc_RNA (1)...(19): siRNA sense strand
caaugucacggcugaguuc

SEQ ID NO: 524830 - RNA, 19 nt, Homo sapiens
  misc_RNA (1)...(19): siRNA sense strand
cagaguggaaggccaaugu

SEQ ID NO: 524831 - RNA, 19 nt, Homo sapiens
  misc_RNA (1)...(19): siRNA sense strand
gcuacggguucuguccaaa

SEQ ID NO: 524832 - RNA, 19 nt, Homo sapiens
  misc_RNA (1)...(19): siRNA sense strand
gagcacugaaggaggcaaa

SEQ ID NO: 524833 - RNA, 19 nt, Homo sapiens
  misc_RNA (1)...(19): siRNA sense strand
ggguccaccuccagacuca

SEQ ID NO: 524834 - RNA, 19 nt, Homo sapiens
  misc_RNA (1)...(19): siRNA sense strand
acggugggcuuuggugauu

SEQ ID NO: 524835 - RNA, 19 nt, Homo sapiens
  misc_RNA (1)...(19): siRNA sense strand
guggagaaggucuuucgaa

SEQ ID NO: 524836 - RNA, 19 nt, Homo sapiens
  misc_RNA (1)...(19): siRNA sense strand
gcgggagucaguccaauag

SEQ ID NO: 524837 - RNA, 19 nt, Homo sapiens
  misc_RNA (1)...(19): siRNA sense strand
cucauuacuugaagacaga

SEQ ID NO: 524838 - RNA, 19 nt, Homo sapiens
  misc_RNA (1)...(19): siRNA sense strand
cggaauuccugcgggauca

SEQ ID NO: 524839 - RNA, 19 nt, Homo sapiens
  misc_RNA (1)...(19): siRNA sense strand
acaacucauuacuugaaga

SEQ ID NO: 524840 - RNA, 19 nt, Homo sapiens
  misc_RNA (1)...(19): siRNA sense strand
ucucaaccauccuguucau

SEQ ID NO: 524841 - RNA, 19 nt, Homo sapiens
  misc_RNA (1)...(19): siRNA sense strand
uuugagagcagccagaaga

SEQ ID NO: 524842 - RNA, 19 nt, Homo sapiens
  misc_RNA (1)...(19): siRNA sense strand
gauacccacggacaccaaa

SEQ ID NO: 524843 - RNA, 19 nt, Homo sapiens
  misc_RNA (1)...(19): siRNA sense strand
ccuccagacucaccaagag

SEQ ID NO: 524844 - RNA, 19 nt, Homo sapiens
  misc_RNA (1)...(19): siRNA sense strand
agaccgucaugaaguggaa

SEQ ID NO: 524845 - RNA, 19 nt, Homo sapiens
  misc_RNA (1)...(19): siRNA sense strand
ccaaugucacggcugaguu

SEQ ID NO: 524846 - RNA, 19 nt, Homo sapiens
  misc_RNA (1)...(19): siRNA sense strand
gaguggaaggccaauguca

SEQ ID NO: 524847 - RNA, 19 nt, Homo sapiens
  misc_RNA (1)...(19): siRNA sense strand
gcuugcagaccgucaugaa

SEQ ID NO: 524848 - RNA, 19 nt, Homo sapiens
  misc_RNA (1)...(19): siRNA sense strand
uaucgggagugguauaagc

SEQ ID NO: 524849 - RNA, 19 nt, Homo sapiens
  misc_RNA (1)...(19): siRNA sense strand
ucaaccauccuguucaucu

SEQ ID NO: 524850 - RNA, 19 nt, Homo sapiens
  misc_RNA (1)...(19): siRNA sense strand
uuauaugccaucuuuggaa

SEQ ID NO: 524851 - RNA, 19 nt, Homo sapiens
  misc_RNA (1)...(19): siRNA sense strand
ccgagaagcgcucugucuu

SEQ ID NO: 524852 - RNA, 19 nt, Homo sapiens
  misc_RNA (1)...(19): siRNA sense strand
cacuggcggucuugucuuc

SEQ ID NO: 524853 - RNA, 19 nt, Homo sapiens
  misc_RNA (1)...(19): siRNA sense strand
cagcuguccucaguaugau

SEQ ID NO: 524854 - RNA, 19 nt, Homo sapiens
  misc_RNA (1)...(19): siRNA sense strand
acuugaagacagaaacuaa

SEQ ID NO: 524855 - RNA, 19 nt, Homo sapiens
  misc_RNA (1)...(19): siRNA sense strand
ccgaggacguucagaaaau

SEQ ID NO: 524856 - RNA, 19 nt, Homo sapiens
  misc_RNA (1)...(19): siRNA sense strand
gaccuugcccgaggacguu

SEQ ID NO: 524857 - RNA, 19 nt, Homo sapiens
  misc_RNA (1)...(19): siRNA sense strand
caacaaccugcgccugaag

SEQ ID NO: 524858 - RNA, 19 nt, Homo sapiens
  misc_RNA (1)...(19): siRNA sense strand
aaagaagaggugggugaaa

SEQ ID NO: 524859 - RNA, 19 nt, Homo sapiens
  misc_RNA (1)...(19): siRNA sense strand
ggcuacggguucuguccaa

SEQ ID NO: 524860 - RNA, 19 nt, Homo sapiens
  misc_RNA (1)...(19): siRNA sense strand
ccugcgggaucaugucugu

SEQ ID NO: 524861 - RNA, 19 nt, Homo sapiens
  misc_RNA (1)...(19): siRNA sense strand
gagagaagcuuuauaaaug

SEQ ID NO: 524862 - RNA, 19 nt, Homo sapiens
  misc_RNA (1)...(19): siRNA sense strand
gagaaacccuuugaauaua

SEQ ID NO: 524863 - RNA, 19 nt, Homo sapiens
  misc_RNA (1)...(19): siRNA sense strand
gaagagaaaucccaugaau

SEQ ID NO: 524864 - RNA, 19 nt, Homo sapiens
  misc_RNA (1)...(19): siRNA sense strand
ggagaaacccuuugaauau

SEQ ID NO: 524865 - RNA, 19 nt, Homo sapiens
  misc_RNA (1)...(19): siRNA sense strand
gagaagcccuauaaaugua

SEQ ID NO: 524866 - RNA, 19 nt, Homo sapiens
  misc_RNA (1)...(19): siRNA sense strand
gaacguacuugauguggaa

SEQ ID NO: 524867 - RNA, 19 nt, Homo sapiens
  misc_RNA (1)...(19): siRNA sense strand
ggagaaauccuaugaaugu

SEQ ID NO: 524868 - RNA, 19 nt, Homo sapiens
  misc_RNA (1)...(19): siRNA sense strand
gagaguugaugaccugaua

SEQ ID NO: 524869 - RNA, 19 nt, Homo sapiens
  misc_RNA (1)...(19): siRNA sense strand
gaucacaaauggaaaugaa

SEQ ID NO: 524870 - RNA, 19 nt, Homo sapiens
  misc_RNA (1)...(19): siRNA sense strand
agagaaaccuuaugaaugu

SEQ ID NO: 524871 - RNA, 19 nt, Homo sapiens
  misc_RNA (1)...(19): siRNA sense strand
gauaaugggaggugaauuu

SEQ ID NO: 524872 - RNA, 19 nt, Homo sapiens
  misc_RNA (1)...(19): siRNA sense strand
ucauacagcucauuuagaa

SEQ ID NO: 524873 - RNA, 19 nt, Homo sapiens
  misc_RNA (1)...(19): siRNA sense strand
gagaagcccuaucagugua

SEQ ID NO: 524874 - RNA, 19 nt, Homo sapiens
  misc_RNA (1)...(19): siRNA sense strand
ggaccagacuucauacaga

SEQ ID NO: 524875 - RNA, 19 nt, Homo sapiens
  misc_RNA (1)...(19): siRNA sense strand
ggagagaagcuuuauaaau

SEQ ID NO: 524876 - RNA, 19 nt, Homo sapiens
  misc_RNA (1)...(19): siRNA sense strand
gaaaugaagcccuuugaau

SEQ ID NO: 524877 - RNA, 19 nt, Homo sapiens
  misc_RNA (1)...(19): siRNA sense strand
gagaaacccuaugaaugua

SEQ ID NO: 524878 - RNA, 19 nt, Homo sapiens
  misc_RNA (1)...(19): siRNA sense strand
gagaaacccuaugaaugua

SEQ ID NO: 524879 - RNA, 19 nt, Homo sapiens
  misc_RNA (1)...(19): siRNA sense strand
gagaaacccuaugaaugua

SEQ ID NO: 524880 - RNA, 19 nt, Homo sapiens
  misc_RNA (1)...(19): siRNA sense strand
gagaaacccuaugaaugua

SEQ ID NO: 524881 - RNA, 19 nt, Homo sapiens
  misc_RNA (1)...(19): siRNA sense strand
gaagagaaacccuaugaau

SEQ ID NO: 524882 - RNA, 19 nt, Homo sapiens
  misc_RNA (1)...(19): siRNA sense strand
gagaaacccuaugaaugua

SEQ ID NO: 524883 - RNA, 19 nt, Homo sapiens
  misc_RNA (1)...(19): siRNA sense strand
gaagagaaacccuaugaau

SEQ ID NO: 524884 - RNA, 19 nt, Homo sapiens
  misc_RNA (1)...(19): siRNA sense strand
ggaaaguucucucaguugu

SEQ ID NO: 524885 - RNA, 19 nt, Homo sapiens
  misc_RNA (1)...(19): siRNA sense strand
ggaaaauccuucuguaaaa

SEQ ID NO: 524886 - RNA, 19 nt, Homo sapiens
  misc_RNA (1)...(19): siRNA sense strand
uaucagagaucacaaaugg

SEQ ID NO: 524887 - RNA, 19 nt, Homo sapiens
  misc_RNA (1)...(19): siRNA sense strand
gagaggcccuauccaugua

SEQ ID NO: 524888 - RNA, 19 nt, Homo sapiens
  misc_RNA (1)...(19): siRNA sense strand
gagaaacccuacgaaugua

SEQ ID NO: 524889 - RNA, 19 nt, Homo sapiens
  misc_RNA (1)...(19): siRNA sense strand
ggagaagcccuauaaaugu

SEQ ID NO: 524890 - RNA, 19 nt, Homo sapiens
  misc_RNA (1)...(19): siRNA sense strand
gagagaaaccuuaugaaug

SEQ ID NO: 524891 - RNA, 19 nt, Homo sapiens
  misc_RNA (1)...(19): siRNA sense strand
ggagaacuauagccaucua

SEQ ID NO: 524892 - RNA, 19 nt, Homo sapiens
  misc_RNA (1)...(19): siRNA sense strand
agagaaaccuuauggaugu

SEQ ID NO: 524893 - RNA, 19 nt, Homo sapiens
  misc_RNA (1)...(19): siRNA sense strand
ggaaaguuauucaaugagu

SEQ ID NO: 524894 - RNA, 19 nt, Homo sapiens
  misc_RNA (1)...(19): siRNA sense strand
gagagaaacccuaugaaug

SEQ ID NO: 524895 - RNA, 19 nt, Homo sapiens
  misc_RNA (1)...(19): siRNA sense strand
gagagaaacccuaugaaug

SEQ ID NO: 524896 - RNA, 19 nt, Homo sapiens
  misc_RNA (1)...(19): siRNA sense strand
gagagaaacccuaugaaug

SEQ ID NO: 524897 - RNA, 19 nt, Homo sapiens
  misc_RNA (1)...(19): siRNA sense strand
gaagagaaaccuuauggau

SEQ ID NO: 524898 - RNA, 19 nt, Homo sapiens
  misc_RNA (1)...(19): siRNA sense strand
guggaaaguuauucaauga

SEQ ID NO: 524899 - RNA, 19 nt, Homo sapiens
  misc_RNA (1)...(19): siRNA sense strand
ggagagaaaccuuaugaau

SEQ ID NO: 524900 - RNA, 19 nt, Homo sapiens
  misc_RNA (1)...(19): siRNA sense strand
cgagaaacccuaugaaugu

SEQ ID NO: 524901 - RNA, 19 nt, Homo sapiens
  misc_RNA (1)...(19): siRNA sense strand
ggcaaaaccuucaauuuaa

SEQ ID NO: 524902 - RNA, 19 nt, Homo sapiens
  misc_RNA (1)...(19): siRNA sense strand
gagagaaacccuacgaaug

SEQ ID NO: 524903 - RNA, 19 nt, Homo sapiens
  misc_RNA (1)...(19): siRNA sense strand
gagaaauccuaugaaugua

SEQ ID NO: 524904 - RNA, 19 nt, Homo sapiens
  misc_RNA (1)...(19): siRNA sense strand
gaagucauuuagaagagaa

SEQ ID NO: 524905 - RNA, 19 nt, Homo sapiens
  misc_RNA (1)...(19): siRNA sense strand
cuucagacaucaaagagua

SEQ ID NO: 524906 - RNA, 19 nt, Homo sapiens
  misc_RNA (1)...(19): siRNA sense strand
gcaaaacccugacugaaga

SEQ ID NO: 524907 - RNA, 19 nt, Homo sapiens
  misc_RNA (1)...(19): siRNA sense strand
caucagagaauucauagaa

SEQ ID NO: 524908 - RNA, 19 nt, Homo sapiens
  misc_RNA (1)...(19): siRNA sense strand
ggagagaaacccuaugaau

SEQ ID NO: 524909 - RNA, 19 nt, Homo sapiens
  misc_RNA (1)...(19): siRNA sense strand
ggagagaaacccuaugaau

SEQ ID NO: 524910 - RNA, 19 nt, Homo sapiens
  misc_RNA (1)...(19): siRNA sense strand
ggagagaaacccuaugaau

SEQ ID NO: 524911 - RNA, 19 nt, Homo sapiens
  misc_RNA (1)...(19): siRNA sense strand
gagaaacccuaugaauguu

SEQ ID NO: 524912 - RNA, 19 nt, Homo sapiens
  misc_RNA (1)...(19): siRNA sense strand
gggaaauccuucagccaaa

SEQ ID NO: 524913 - RNA, 19 nt, Homo sapiens
  misc_RNA (1)...(19): siRNA sense strand
ggagaggagccguggauaa

SEQ ID NO: 524914 - RNA, 19 nt, Homo sapiens
  misc_RNA (1)...(19): siRNA sense strand
ucagagaauucauagaaga

SEQ ID NO: 524915 - RNA, 19 nt, Homo sapiens
  misc_RNA (1)...(19): siRNA sense strand
gauggaagcuaugcuagga

SEQ ID NO: 524916 - RNA, 19 nt, Homo sapiens
  misc_RNA (1)...(19): siRNA sense strand
gaagucauaccucacugua

SEQ ID NO: 524917 - RNA, 19 nt, Homo sapiens
  misc_RNA (1)...(19): siRNA sense strand
gaaaucccaugaauguagu

SEQ ID NO: 524918 - RNA, 19 nt, Homo sapiens
  misc_RNA (1)...(19): siRNA sense strand
gaaauaugaacguacuuga

SEQ ID NO: 524919 - RNA, 19 nt, Homo sapiens
  misc_RNA (1)...(19): siRNA sense strand
caaacgucaucauuaaguu

SEQ ID NO: 524920 - RNA, 19 nt, Homo sapiens
  misc_RNA (1)...(19): siRNA sense strand
gaaacccuaugaauguaau

SEQ ID NO: 524921 - RNA, 19 nt, Homo sapiens
  misc_RNA (1)...(19): siRNA sense strand
ucucagaaaucauaucuca

SEQ ID NO: 524922 - RNA, 19 nt, Homo sapiens
  misc_RNA (1)...(19): siRNA sense strand
gaaacccuaugaauguaau

SEQ ID NO: 524923 - RNA, 19 nt, Homo sapiens
  misc_RNA (1)...(19): siRNA sense strand
gaaacccuaugaauguaau

SEQ ID NO: 524924 - RNA, 19 nt, Homo sapiens
  misc_RNA (1)...(19): siRNA sense strand
ugucauaccucacuauaca

SEQ ID NO: 524925 - RNA, 19 nt, Homo sapiens
  misc_RNA (1)...(19): siRNA sense strand
gcaagucugcucucaguga

SEQ ID NO: 524926 - RNA, 19 nt, Homo sapiens
  misc_RNA (1)...(19): siRNA sense strand
gaggagaagcccuauaaau

SEQ ID NO: 524927 - RNA, 19 nt, Homo sapiens
  misc_RNA (1)...(19): siRNA sense strand
gaggugaauuuccauguca

SEQ ID NO: 524928 - RNA, 19 nt, Homo sapiens
  misc_RNA (1)...(19): siRNA sense strand
ccgaaagucuacucugauu

SEQ ID NO: 524929 - RNA, 19 nt, Homo sapiens
  misc_RNA (1)...(19): siRNA sense strand
uggagaaacccuuugaaua

SEQ ID NO: 524930 - RNA, 19 nt, Homo sapiens
  misc_RNA (1)...(19): siRNA sense strand
ggaaaugaagcccuuugaa

SEQ ID NO: 524931 - RNA, 19 nt, Homo sapiens
  misc_RNA (1)...(19): siRNA sense strand
ggaaaauucuucucucaga

SEQ ID NO: 524932 - RNA, 19 nt, Homo sapiens
  misc_RNA (1)...(19): siRNA sense strand
gcgagaaacccuaugaaug

SEQ ID NO: 524933 - RNA, 19 nt, Homo sapiens
  misc_RNA (1)...(19): siRNA sense strand
aaaccuuccuuguaaauuc

SEQ ID NO: 524934 - RNA, 19 nt, Homo sapiens
  misc_RNA (1)...(19): siRNA sense strand
gaaaguucucucaguugua

SEQ ID NO: 524935 - RNA, 19 nt, Homo sapiens
  misc_RNA (1)...(19): siRNA sense strand
guggaaaguucucucaguu

SEQ ID NO: 524936 - RNA, 19 nt, Homo sapiens
  misc_RNA (1)...(19): siRNA sense strand
cauuagacaucggaaagua

SEQ ID NO: 524937 - RNA, 19 nt, Homo sapiens
  misc_RNA (1)...(19): siRNA sense strand
gaaagucuacucugauuac

SEQ ID NO: 524938 - RNA, 19 nt, Homo sapiens
  misc_RNA (1)...(19): siRNA sense strand
caucggagaucacacuuag

SEQ ID NO: 524939 - RNA, 19 nt, Homo sapiens
  misc_RNA (1)...(19): siRNA sense strand
gagaaaccuuaugaaugua

SEQ ID NO: 524940 - RNA, 19 nt, Homo sapiens
  misc_RNA (1)...(19): siRNA sense strand
gaucacacuuagaggagaa

SEQ ID NO: 524941 - RNA, 19 nt, Homo sapiens
  misc_RNA (1)...(19): siRNA sense strand
agagaaacccuaugaaugu

SEQ ID NO: 524942 - RNA, 19 nt, Homo sapiens
  misc_RNA (1)...(19): siRNA sense strand
agagaaacccuaugaaugu

SEQ ID NO: 524943 - RNA, 19 nt, Homo sapiens
  misc_RNA (1)...(19): siRNA sense strand
agagaaacccuaugaaugu

SEQ ID NO: 524944 - RNA, 19 nt, Homo sapiens
  misc_RNA (1)...(19): siRNA sense strand
agagaaacccuaugaaugu

SEQ ID NO: 524945 - RNA, 19 nt, Homo sapiens
  misc_RNA (1)...(19): siRNA sense strand
agagaaaucccaugaaugu

SEQ ID NO: 524946 - RNA, 19 nt, Homo sapiens
  misc_RNA (1)...(19): siRNA sense strand
ggaaaguacacacagaaga

SEQ ID NO: 524947 - RNA, 19 nt, Homo sapiens
  misc_RNA (1)...(19): siRNA sense strand
agagaaacccuaugaaugu

SEQ ID NO: 524948 - RNA, 19 nt, Homo sapiens
  misc_RNA (1)...(19): siRNA sense strand
ggauaccuauucucacaau

SEQ ID NO: 524949 - RNA, 19 nt, Homo sapiens
  misc_RNA (1)...(19): siRNA sense strand
ccacagaucagccuucaau

SEQ ID NO: 524950 - RNA, 19 nt, Homo sapiens
  misc_RNA (1)...(19): siRNA sense strand
gaaaguacacacagaagag

SEQ ID NO: 524951 - RNA, 19 nt, Homo sapiens
  misc_RNA (1)...(19): siRNA sense strand
gggaaaaccuucugccaaa

SEQ ID NO: 524952 - RNA, 19 nt, Homo sapiens
  misc_RNA (1)...(19): siRNA sense strand
uagaggagaagcccuauaa

SEQ ID NO: 524953 - RNA, 19 nt, Homo sapiens
  misc_RNA (1)...(19): siRNA sense strand
gaccagacuucauacagau

SEQ ID NO: 524954 - RNA, 19 nt, Homo sapiens
  misc_RNA (1)...(19): siRNA sense strand
ggagagaaacccuacgaau

SEQ ID NO: 524955 - RNA, 19 nt, Homo sapiens
  misc_RNA (1)...(19): siRNA sense strand
caauagccaucagagaauu

SEQ ID NO: 524956 - RNA, 19 nt, Homo sapiens
  misc_RNA (1)...(19): siRNA sense strand
agccaaacgucaucauuaa

SEQ ID NO: 524957 - RNA, 19 nt, Homo sapiens
  misc_RNA (1)...(19): siRNA sense strand
gagaaaccuuauggaugua

SEQ ID NO: 524958 - RNA, 19 nt, Homo sapiens
  misc_RNA (1)...(19): siRNA sense strand
aaaguucucucaguuguau

SEQ ID NO: 524959 - RNA, 19 nt, Homo sapiens
  misc_RNA (1)...(19): siRNA sense strand
gaacacacacgggagagaa

SEQ ID NO: 524960 - RNA, 19 nt, Homo sapiens
  misc_RNA (1)...(19): siRNA sense strand
cgggagagaagcuuuauaa

SEQ ID NO: 524961 - RNA, 19 nt, Homo sapiens
  misc_RNA (1)...(19): siRNA sense strand
gggcuaggcuguuguuaua

SEQ ID NO: 524962 - RNA, 19 nt, Homo sapiens
  misc_RNA (1)...(19): siRNA sense strand
ggaaugacagugcguguaa

SEQ ID NO: 524963 - RNA, 19 nt, Homo sapiens
  misc_RNA (1)...(19): siRNA sense strand
gcugaucccuguccagaaa

SEQ ID NO: 524964 - RNA, 19 nt, Homo sapiens
  misc_RNA (1)...(19): siRNA sense strand
gcaacucucucccaaucaa

SEQ ID NO: 524965 - RNA, 19 nt, Homo sapiens
  misc_RNA (1)...(19): siRNA sense strand
agaggaagcugcucaagug

SEQ ID NO: 524966 - RNA, 19 nt, Homo sapiens
  misc_RNA (1)...(19): siRNA sense strand
ucaagaaacagaagaguug

SEQ ID NO: 524967 - RNA, 19 nt, Homo sapiens
  misc_RNA (1)...(19): siRNA sense strand
gaaacacugugaccuugca

SEQ ID NO: 524968 - RNA, 19 nt, Homo sapiens
  misc_RNA (1)...(19): siRNA sense strand
ccaccacccuuuccugaga

SEQ ID NO: 524969 - RNA, 19 nt, Homo sapiens
  misc_RNA (1)...(19): siRNA sense strand
gaucucagucgaagaagaa

SEQ ID NO: 524970 - RNA, 19 nt, Homo sapiens
  misc_RNA (1)...(19): siRNA sense strand
gcucaaguguccuauggau

SEQ ID NO: 524971 - RNA, 19 nt, Homo sapiens
  misc_RNA (1)...(19): siRNA sense strand
cagaaagccuuggaucuuc

SEQ ID NO: 524972 - RNA, 19 nt, Homo sapiens
  misc_RNA (1)...(19): siRNA sense strand
uagcaacucucucccaauc

SEQ ID NO: 524973 - RNA, 19 nt, Homo sapiens
  misc_RNA (1)...(19): siRNA sense strand
acugugaccuugcauugua

SEQ ID NO: 524974 - RNA, 19 nt, Homo sapiens
  misc_RNA (1)...(19): siRNA sense strand
gagaugcuccagauacuga

SEQ ID NO: 524975 - RNA, 19 nt, Homo sapiens
  misc_RNA (1)...(19): siRNA sense strand
ggcaacgucuccuccugua

SEQ ID NO: 524976 - RNA, 19 nt, Homo sapiens
  misc_RNA (1)...(19): siRNA sense strand
caucuucaccuucagcuuu

SEQ ID NO: 524977 - RNA, 19 nt, Homo sapiens
  misc_RNA (1)...(19): siRNA sense strand
gugaagggcuaggcuguug

SEQ ID NO: 524978 - RNA, 19 nt, Homo sapiens
  misc_RNA (1)...(19): siRNA sense strand
gagggccauuucucuauug

SEQ ID NO: 524979 - RNA, 19 nt, Homo sapiens
  misc_RNA (1)...(19): siRNA sense strand
caccagcgcuucagcaucu

SEQ ID NO: 524980 - RNA, 19 nt, Homo sapiens
  misc_RNA (1)...(19): siRNA sense strand
gugaauuccugcuacuaug

SEQ ID NO: 524981 - RNA, 19 nt, Homo sapiens
  misc_RNA (1)...(19): siRNA sense strand
cagaccaaaugugucaaua

SEQ ID NO: 524982 - RNA, 19 nt, Homo sapiens
  misc_RNA (1)...(19): siRNA sense strand
ccagaaagccuuggaucuu

SEQ ID NO: 524983 - RNA, 19 nt, Homo sapiens
  misc_RNA (1)...(19): siRNA sense strand
gcagaaugacuccgacugu

SEQ ID NO: 524984 - RNA, 19 nt, Homo sapiens
  misc_RNA (1)...(19): siRNA sense strand
ucagauugccaaagauaaa

SEQ ID NO: 524985 - RNA, 19 nt, Homo sapiens
  misc_RNA (1)...(19): siRNA sense strand
gcuuggcccuuaggaauga

SEQ ID NO: 524986 - RNA, 19 nt, Homo sapiens
  misc_RNA (1)...(19): siRNA sense strand
gauacugacuggugugacu

SEQ ID NO: 524987 - RNA, 19 nt, Homo sapiens
  misc_RNA (1)...(19): siRNA sense strand
guggugaccuguccugauc

SEQ ID NO: 524988 - RNA, 19 nt, Homo sapiens
  misc_RNA (1)...(19): siRNA sense strand
gaagaaauuuugacaacag

SEQ ID NO: 524989 - RNA, 19 nt, Homo sapiens
  misc_RNA (1)...(19): siRNA sense strand
uguggcaccuggauaagaa

SEQ ID NO: 524990 - RNA, 19 nt, Homo sapiens
  misc_RNA (1)...(19): siRNA sense strand
ccuguagacucgaaaguuc

SEQ ID NO: 524991 - RNA, 19 nt, Homo sapiens
  misc_RNA (1)...(19): siRNA sense strand
ucugugcgcuuggcccuua

SEQ ID NO: 524992 - RNA, 19 nt, Homo sapiens
  misc_RNA (1)...(19): siRNA sense strand
gaagggcuaggcuguuguu

SEQ ID NO: 524993 - RNA, 19 nt, Homo sapiens
  misc_RNA (1)...(19): siRNA sense strand
ggacucccacuacaucaug

SEQ ID NO: 524994 - RNA, 19 nt, Homo sapiens
  misc_RNA (1)...(19): siRNA sense strand
gaagaguugcccagaccaa

SEQ ID NO: 524995 - RNA, 19 nt, Homo sapiens
  misc_RNA (1)...(19): siRNA sense strand
ucucagaacacuacugcua

SEQ ID NO: 524996 - RNA, 19 nt, Homo sapiens
  misc_RNA (1)...(19): siRNA sense strand
caccacugcucuuggauuc

SEQ ID NO: 524997 - RNA, 19 nt, Homo sapiens
  misc_RNA (1)...(19): siRNA sense strand
ggugaauuccugcuacuau

SEQ ID NO: 524998 - RNA, 19 nt, Homo sapiens
  misc_RNA (1)...(19): siRNA sense strand
gagaggaagcugcucaagu

SEQ ID NO: 524999 - RNA, 19 nt, Homo sapiens
  misc_RNA (1)...(19): siRNA sense strand
gcagcuccgugguguugga

SEQ ID NO: 525000 - RNA, 19 nt, Homo sapiens
  misc_RNA (1)...(19): siRNA sense strand
gagcuuccaguuugcugua

SEQ ID NO: 525001 - RNA, 19 nt, Homo sapiens
  misc_RNA (1)...(19): siRNA sense strand
gggcaacacccagcacuga

SEQ ID NO: 525002 - RNA, 19 nt, Homo sapiens
  misc_RNA (1)...(19): siRNA sense strand
agaccgagcaguauaugaa

SEQ ID NO: 525003 - RNA, 19 nt, Homo sapiens
  misc_RNA (1)...(19): siRNA sense strand
gcgcuuggcccuuaggaau

SEQ ID NO: 525004 - RNA, 19 nt, Homo sapiens
  misc_RNA (1)...(19): siRNA sense strand
caucaugccaguuggaguu

SEQ ID NO: 525005 - RNA, 19 nt, Homo sapiens
  misc_RNA (1)...(19): siRNA sense strand
aaagcuccguguuccugua

SEQ ID NO: 525006 - RNA, 19 nt, Homo sapiens
  misc_RNA (1)...(19): siRNA sense strand
gacuguggcaccuggauaa

SEQ ID NO: 525007 - RNA, 19 nt, Homo sapiens
  misc_RNA (1)...(19): siRNA sense strand
agaccaaaugugucaauaa

SEQ ID NO: 525008 - RNA, 19 nt, Homo sapiens
  misc_RNA (1)...(19): siRNA sense strand
gagccuuguuaguauccua

SEQ ID NO: 525009 - RNA, 19 nt, Homo sapiens
  misc_RNA (1)...(19): siRNA sense strand
cuuggagccuuguuaguau

SEQ ID NO: 525010 - RNA, 19 nt, Homo sapiens
  misc_RNA (1)...(19): siRNA sense strand
cccaaucaauguccagguu

SEQ ID NO: 525011 - RNA, 19 nt, Homo sapiens
  misc_RNA (1)...(19): siRNA sense strand
ccacugcucuuggauucug

SEQ ID NO: 525012 - RNA, 19 nt, Homo sapiens
  misc_RNA (1)...(19): siRNA sense strand
aacacaaggugguuacaga

SEQ ID NO: 525013 - RNA, 19 nt, Homo sapiens
  misc_RNA (1)...(19): siRNA sense strand
acuaauagcuugggacaac

SEQ ID NO: 525014 - RNA, 19 nt, Homo sapiens
  misc_RNA (1)...(19): siRNA sense strand
uuugcuguguguuucauua

SEQ ID NO: 525015 - RNA, 19 nt, Homo sapiens
  misc_RNA (1)...(19): siRNA sense strand
gaccgagcaguauaugaaa

SEQ ID NO: 525016 - RNA, 19 nt, Homo sapiens
  misc_RNA (1)...(19): siRNA sense strand
ccuuggagccuuguuagua

SEQ ID NO: 525017 - RNA, 19 nt, Homo sapiens
  misc_RNA (1)...(19): siRNA sense strand
gcuguguguuucauuaucu

SEQ ID NO: 525018 - RNA, 19 nt, Homo sapiens
  misc_RNA (1)...(19): siRNA sense strand
ucaaguguccuauggaucu

SEQ ID NO: 525019 - RNA, 19 nt, Homo sapiens
  misc_RNA (1)...(19): siRNA sense strand
acuaaggacccuccagaaa

SEQ ID NO: 525020 - RNA, 19 nt, Homo sapiens
  misc_RNA (1)...(19): siRNA sense strand
cuucagauugccaaagaua

SEQ ID NO: 525021 - RNA, 19 nt, Homo sapiens
  misc_RNA (1)...(19): siRNA sense strand
cuacauuggagacaacuau

SEQ ID NO: 525022 - RNA, 19 nt, Homo sapiens
  misc_RNA (1)...(19): siRNA sense strand
gcugaacacaaggugguua

SEQ ID NO: 525023 - RNA, 19 nt, Homo sapiens
  misc_RNA (1)...(19): siRNA sense strand
gcccagaccaaauguguca

SEQ ID NO: 525024 - RNA, 19 nt, Homo sapiens
  misc_RNA (1)...(19): siRNA sense strand
gaacuucagauugccaaag

SEQ ID NO: 525025 - RNA, 19 nt, Homo sapiens
  misc_RNA (1)...(19): siRNA sense strand
ccaaucaauguccagguuu

SEQ ID NO: 525026 - RNA, 19 nt, Homo sapiens
  misc_RNA (1)...(19): siRNA sense strand
gaacacaaggugguuacag

SEQ ID NO: 525027 - RNA, 19 nt, Homo sapiens
  misc_RNA (1)...(19): siRNA sense strand
gaguugcccagaccaaaug

SEQ ID NO: 525028 - RNA, 19 nt, Homo sapiens
  misc_RNA (1)...(19): siRNA sense strand
gggcugcuccuacaacagu

SEQ ID NO: 525029 - RNA, 19 nt, Homo sapiens
  misc_RNA (1)...(19): siRNA sense strand
cgacuguggcaccuggaua

SEQ ID NO: 525030 - RNA, 19 nt, Homo sapiens
  misc_RNA (1)...(19): siRNA sense strand
gaauuccugcuacuaugga

SEQ ID NO: 525031 - RNA, 19 nt, Homo sapiens
  misc_RNA (1)...(19): siRNA sense strand
caugccaguuggaguugaa

SEQ ID NO: 525032 - RNA, 19 nt, Homo sapiens
  misc_RNA (1)...(19): siRNA sense strand
caaucaauguccagguuuu

SEQ ID NO: 525033 - RNA, 19 nt, Homo sapiens
  misc_RNA (1)...(19): siRNA sense strand
cuguuccaguuuccauuua

SEQ ID NO: 525034 - RNA, 19 nt, Homo sapiens
  misc_RNA (1)...(19): siRNA sense strand
acacugugaccuugcauug

SEQ ID NO: 525035 - RNA, 19 nt, Homo sapiens
  misc_RNA (1)...(19): siRNA sense strand
gcuuccaguuugcuguaaa

SEQ ID NO: 525036 - RNA, 19 nt, Homo sapiens
  misc_RNA (1)...(19): siRNA sense strand
gaggugaauuccugcuacu

SEQ ID NO: 525037 - RNA, 19 nt, Homo sapiens
  misc_RNA (1)...(19): siRNA sense strand
caacgucuccuccuguacu

SEQ ID NO: 525038 - RNA, 19 nt, Homo sapiens
  misc_RNA (1)...(19): siRNA sense strand
gucaagaaacagaagaguu

SEQ ID NO: 525039 - RNA, 19 nt, Homo sapiens
  misc_RNA (1)...(19): siRNA sense strand
uguguuucauuaucucuug

SEQ ID NO: 525040 - RNA, 19 nt, Homo sapiens
  misc_RNA (1)...(19): siRNA sense strand
aacuucagauugccaaaga

SEQ ID NO: 525041 - RNA, 19 nt, Homo sapiens
  misc_RNA (1)...(19): siRNA sense strand
caaguguccuauggaucuu

SEQ ID NO: 525042 - RNA, 19 nt, Homo sapiens
  misc_RNA (1)...(19): siRNA sense strand
uaaggacccuccagaaaag

SEQ ID NO: 525043 - RNA, 19 nt, Homo sapiens
  misc_RNA (1)...(19): siRNA sense strand
gagaccgagcaguauauga

SEQ ID NO: 525044 - RNA, 19 nt, Homo sapiens
  misc_RNA (1)...(19): siRNA sense strand
ggagaccgagcaguauaug

SEQ ID NO: 525045 - RNA, 19 nt, Homo sapiens
  misc_RNA (1)...(19): siRNA sense strand
gcaaaggccccaugauucu

SEQ ID NO: 525046 - RNA, 19 nt, Homo sapiens
  misc_RNA (1)...(19): siRNA sense strand
ugaucucagucgaagaaga

SEQ ID NO: 525047 - RNA, 19 nt, Homo sapiens
  misc_RNA (1)...(19): siRNA sense strand
aaacuauggcucuuacuac

SEQ ID NO: 525048 - RNA, 19 nt, Homo sapiens
  misc_RNA (1)...(19): siRNA sense strand
guuguuauagcucugaaga

SEQ ID NO: 525049 - RNA, 19 nt, Homo sapiens
  misc_RNA (1)...(19): siRNA sense strand
cuaaggacccuccagaaaa

SEQ ID NO: 525050 - RNA, 19 nt, Homo sapiens
  misc_RNA (1)...(19): siRNA sense strand
ccaccacugcucuuggauu

SEQ ID NO: 525051 - RNA, 19 nt, Homo sapiens
  misc_RNA (1)...(19): siRNA sense strand
ccgagaugcuccagauacu

SEQ ID NO: 525052 - RNA, 19 nt, Homo sapiens
  misc_RNA (1)...(19): siRNA sense strand
uagcaaaggccccaugauu

SEQ ID NO: 525053 - RNA, 19 nt, Homo sapiens
  misc_RNA (1)...(19): siRNA sense strand
gaacccuacaguggagaaa

SEQ ID NO: 525054 - RNA, 19 nt, Homo sapiens
  misc_RNA (1)...(19): siRNA sense strand
gaaugacagugcguguaac

SEQ ID NO: 525055 - RNA, 19 nt, Homo sapiens
  misc_RNA (1)...(19): siRNA sense strand
cgccaccacugcucuugga

SEQ ID NO: 525056 - RNA, 19 nt, Homo sapiens
  misc_RNA (1)...(19): siRNA sense strand
acaguggcccauccuggua

SEQ ID NO: 525057 - RNA, 19 nt, Homo sapiens
  misc_RNA (1)...(19): siRNA sense strand
cugcucaaguguccuaugg

SEQ ID NO: 525058 - RNA, 19 nt, Homo sapiens
  misc_RNA (1)...(19): siRNA sense strand
gcagcugcuaugucacuga

SEQ ID NO: 525059 - RNA, 19 nt, Homo sapiens
  misc_RNA (1)...(19): siRNA sense strand
gcuucgggaucccauuuac

SEQ ID NO: 525060 - RNA, 19 nt, Homo sapiens
  misc_RNA (1)...(19): siRNA sense strand
uauccuacuuggcugucaa

SEQ ID NO: 525061 - RNA, 19 nt, Homo sapiens
  misc_RNA (1)...(19): siRNA sense strand
gugaaugucucuagucgua

SEQ ID NO: 525062 - RNA, 19 nt, Homo sapiens
  misc_RNA (1)...(19): siRNA sense strand
uaaaguggaugaacggaaa

SEQ ID NO: 525063 - RNA, 19 nt, Homo sapiens
  misc_RNA (1)...(19): siRNA sense strand
ggaaauggcaguucgaugu

SEQ ID NO: 525064 - RNA, 19 nt, Homo sapiens
  misc_RNA (1)...(19): siRNA sense strand
gcacauagcaccgcaguug

SEQ ID NO: 525065 - RNA, 19 nt, Homo sapiens
  misc_RNA (1)...(19): siRNA sense strand
gaaagaagacaucaacaca

SEQ ID NO: 525066 - RNA, 19 nt, Homo sapiens
  misc_RNA (1)...(19): siRNA sense strand
gagcacuccuucaacaauu

SEQ ID NO: 525067 - RNA, 19 nt, Homo sapiens
  misc_RNA (1)...(19): siRNA sense strand
aagaagacaucaacacaaa

SEQ ID NO: 525068 - RNA, 19 nt, Homo sapiens
  misc_RNA (1)...(19): siRNA sense strand
gaaguuggccaugaucuuu

SEQ ID NO: 525069 - RNA, 19 nt, Homo sapiens
  misc_RNA (1)...(19): siRNA sense strand
cacaagaucuacauacaga

SEQ ID NO: 525070 - RNA, 19 nt, Homo sapiens
  misc_RNA (1)...(19): siRNA sense strand
ccauggagaugaaagaaga

SEQ ID NO: 525071 - RNA, 19 nt, Homo sapiens
  misc_RNA (1)...(19): siRNA sense strand
gagagaggaucuugagaag

SEQ ID NO: 525072 - RNA, 19 nt, Homo sapiens
  misc_RNA (1)...(19): siRNA sense strand
guguguggcuguuauguuu

SEQ ID NO: 525073 - RNA, 19 nt, Homo sapiens
  misc_RNA (1)...(19): siRNA sense strand
uggaggagcuacaggcaua

SEQ ID NO: 525074 - RNA, 19 nt, Homo sapiens
  misc_RNA (1)...(19): siRNA sense strand
gcaaugaugaacucuacua

SEQ ID NO: 525075 - RNA, 19 nt, Homo sapiens
  misc_RNA (1)...(19): siRNA sense strand
gaugaacucuacuaucagu

SEQ ID NO: 525076 - RNA, 19 nt, Homo sapiens
  misc_RNA (1)...(19): siRNA sense strand
gaaugucucuagucguaug

SEQ ID NO: 525077 - RNA, 19 nt, Homo sapiens
  misc_RNA (1)...(19): siRNA sense strand
ucacugcccuggcugacua

SEQ ID NO: 525078 - RNA, 19 nt, Homo sapiens
  misc_RNA (1)...(19): siRNA sense strand
ggguggcccucaaauauau

SEQ ID NO: 525079 - RNA, 19 nt, Homo sapiens
  misc_RNA (1)...(19): siRNA sense strand
ugacaggugugaaugugaa

SEQ ID NO: 525080 - RNA, 19 nt, Homo sapiens
  misc_RNA (1)...(19): siRNA sense strand
ggaacaugcugcugagucu

SEQ ID NO: 525081 - RNA, 19 nt, Homo sapiens
  misc_RNA (1)...(19): siRNA sense strand
gugguucucuguucccuaa

SEQ ID NO: 525082 - RNA, 19 nt, Homo sapiens
  misc_RNA (1)...(19): siRNA sense strand
gaaaagaucaagacgauug

SEQ ID NO: 525083 - RNA, 19 nt, Homo sapiens
  misc_RNA (1)...(19): siRNA sense strand
ugacaacuaugaccuacug

SEQ ID NO: 525084 - RNA, 19 nt, Homo sapiens
  misc_RNA (1)...(19): siRNA sense strand
caacuuaaccguggugaug

SEQ ID NO: 525085 - RNA, 19 nt, Homo sapiens
  misc_RNA (1)...(19): siRNA sense strand
gaugugugguccaaugaug

SEQ ID NO: 525086 - RNA, 19 nt, Homo sapiens
  misc_RNA (1)...(19): siRNA sense strand
ggagaugaccaccuacuuc

SEQ ID NO: 525087 - RNA, 19 nt, Homo sapiens
  misc_RNA (1)...(19): siRNA sense strand
ucaacaauuuccagaugaa

SEQ ID NO: 525088 - RNA, 19 nt, Homo sapiens
  misc_RNA (1)...(19): siRNA sense strand
ccacaucacucgggcaaca

SEQ ID NO: 525089 - RNA, 19 nt, Homo sapiens
  misc_RNA (1)...(19): siRNA sense strand
ucaaugagcacuccuucaa

SEQ ID NO: 525090 - RNA, 19 nt, Homo sapiens
  misc_RNA (1)...(19): siRNA sense strand
ggaggcugcugcauaacau

SEQ ID NO: 525091 - RNA, 19 nt, Homo sapiens
  misc_RNA (1)...(19): siRNA sense strand
gcagcucggugccaaugug

SEQ ID NO: 525092 - RNA, 19 nt, Homo sapiens
  misc_RNA (1)...(19): siRNA sense strand
caccgcaguuggcaucuuu

SEQ ID NO: 525093 - RNA, 19 nt, Homo sapiens
  misc_RNA (1)...(19): siRNA sense strand
guccuuggcuugcggaaau

SEQ ID NO: 525094 - RNA, 19 nt, Homo sapiens
  misc_RNA (1)...(19): siRNA sense strand
gaaauggcaguucgaugug

SEQ ID NO: 525095 - RNA, 19 nt, Homo sapiens
  misc_RNA (1)...(19): siRNA sense strand
gaucuuggccuggcaacuu

SEQ ID NO: 525096 - RNA, 19 nt, Homo sapiens
  misc_RNA (1)...(19): siRNA sense strand
caccaucuuugacaacuau

SEQ ID NO: 525097 - RNA, 19 nt, Homo sapiens
  misc_RNA (1)...(19): siRNA sense strand
aggaugagguggaugaguu

SEQ ID NO: 525098 - RNA, 19 nt, Homo sapiens
  misc_RNA (1)...(19): siRNA sense strand
gugcugaucugugcugugu

SEQ ID NO: 525099 - RNA, 19 nt, Homo sapiens
  misc_RNA (1)...(19): siRNA sense strand
caagcuggcugcggagaau

SEQ ID NO: 525100 - RNA, 19 nt, Homo sapiens
  misc_RNA (1)...(19): siRNA sense strand
gcuguguacuccugugguu

SEQ ID NO: 525101 - RNA, 19 nt, Homo sapiens
  misc_RNA (1)...(19): siRNA sense strand
ccaccuacuuccucaaugg

SEQ ID NO: 525102 - RNA, 19 nt, Homo sapiens
  misc_RNA (1)...(19): siRNA sense strand
gaacacagugaaugucucu

SEQ ID NO: 525103 - RNA, 19 nt, Homo sapiens
  misc_RNA (1)...(19): siRNA sense strand
cuucaacaauuuccagaug

SEQ ID NO: 525104 - RNA, 19 nt, Homo sapiens
  misc_RNA (1)...(19): siRNA sense strand
cgagaucaucgcugacuuu

SEQ ID NO: 525105 - RNA, 19 nt, Homo sapiens
  misc_RNA (1)...(19): siRNA sense strand
ggaaguuggccaugaucuu

SEQ ID NO: 525106 - RNA, 19 nt, Homo sapiens
  misc_RNA (1)...(19): siRNA sense strand
uacagaagcaugacaaugu

SEQ ID NO: 525107 - RNA, 19 nt, Homo sapiens
  misc_RNA (1)...(19): siRNA sense strand
gcugaucugugcuguguac

SEQ ID NO: 525108 - RNA, 19 nt, Homo sapiens
  misc_RNA (1)...(19): siRNA sense strand
gggcaacacugcaguaccu

SEQ ID NO: 525109 - RNA, 19 nt, Homo sapiens
  misc_RNA (1)...(19): siRNA sense strand
gacccugaaugagcucuuu

SEQ ID NO: 525110 - RNA, 19 nt, Homo sapiens
  misc_RNA (1)...(19): siRNA sense strand
aaugagcacuccuucaaca

SEQ ID NO: 525111 - RNA, 19 nt, Homo sapiens
  misc_RNA (1)...(19): siRNA sense strand
ggugacaggugugaaugug

SEQ ID NO: 525112 - RNA, 19 nt, Homo sapiens
  misc_RNA (1)...(19): siRNA sense strand
gugaguguguggcuguuau

SEQ ID NO: 525113 - RNA, 19 nt, Homo sapiens
  misc_RNA (1)...(19): siRNA sense strand
caacuaugaccuacugcuu

SEQ ID NO: 525114 - RNA, 19 nt, Homo sapiens
  misc_RNA (1)...(19): siRNA sense strand
ccaccaucuuugacaacua

SEQ ID NO: 525115 - RNA, 19 nt, Homo sapiens
  misc_RNA (1)...(19): siRNA sense strand
gcccucagccugccuaugu

SEQ ID NO: 525116 - RNA, 19 nt, Homo sapiens
  misc_RNA (1)...(19): siRNA sense strand
agagagaggaucuugagaa

SEQ ID NO: 525117 - RNA, 19 nt, Homo sapiens
  misc_RNA (1)...(19): siRNA sense strand
aaagaagacaucaacacaa

SEQ ID NO: 525118 - RNA, 19 nt, Homo sapiens
  misc_RNA (1)...(19): siRNA sense strand
cauccuguuugcagacauu

SEQ ID NO: 525119 - RNA, 19 nt, Homo sapiens
  misc_RNA (1)...(19): siRNA sense strand
ucauccagcuucucaucuu

SEQ ID NO: 525120 - RNA, 19 nt, Homo sapiens
  misc_RNA (1)...(19): siRNA sense strand
caacacugcaguaccugaa

SEQ ID NO: 525121 - RNA, 19 nt, Homo sapiens
  misc_RNA (1)...(19): siRNA sense strand
gcgcaacgcguaccucaag

SEQ ID NO: 525122 - RNA, 19 nt, Homo sapiens
  misc_RNA (1)...(19): siRNA sense strand
gaagauugggcugaacaug

SEQ ID NO: 525123 - RNA, 19 nt, Homo sapiens
  misc_RNA (1)...(19): siRNA sense strand
accggaggcugcugcauaa

SEQ ID NO: 525124 - RNA, 19 nt, Homo sapiens
  misc_RNA (1)...(19): siRNA sense strand
guccauggcuuggcuucuu

SEQ ID NO: 525125 - RNA, 19 nt, Homo sapiens
  misc_RNA (1)...(19): siRNA sense strand
caaugucagcauccuguuu

SEQ ID NO: 525126 - RNA, 19 nt, Homo sapiens
  misc_RNA (1)...(19): siRNA sense strand
ugacuuugaugagauuauc

SEQ ID NO: 525127 - RNA, 19 nt, Homo sapiens
  misc_RNA (1)...(19): siRNA sense strand
ccgcaaugaugaacucuac

SEQ ID NO: 525128 - RNA, 19 nt, Homo sapiens
  misc_RNA (1)...(19): siRNA sense strand
gcaccgcaguuggcaucuu

SEQ ID NO: 525129 - RNA, 19 nt, Homo sapiens
  misc_RNA (1)...(19): siRNA sense strand
cagaugggcauugaugauu

SEQ ID NO: 525130 - RNA, 19 nt, Homo sapiens
  misc_RNA (1)...(19): siRNA sense strand
caccuugcauuugaucuug

SEQ ID NO: 525131 - RNA, 19 nt, Homo sapiens
  misc_RNA (1)...(19): siRNA sense strand
gggagaaggaggagaugga

SEQ ID NO: 525132 - RNA, 19 nt, Homo sapiens
  misc_RNA (1)...(19): siRNA sense strand
cauugaugauuccagcaaa

SEQ ID NO: 525133 - RNA, 19 nt, Homo sapiens
  misc_RNA (1)...(19): siRNA sense strand
gcauugaugauuccagcaa

SEQ ID NO: 525134 - RNA, 19 nt, Homo sapiens
  misc_RNA (1)...(19): siRNA sense strand
gugccaaugugcugcuguu

SEQ ID NO: 525135 - RNA, 19 nt, Homo sapiens
  misc_RNA (1)...(19): siRNA sense strand
caagaucuacauacagaag

SEQ ID NO: 525136 - RNA, 19 nt, Homo sapiens
  misc_RNA (1)...(19): siRNA sense strand
gcucggaagccacaguaug

SEQ ID NO: 525137 - RNA, 19 nt, Homo sapiens
  misc_RNA (1)...(19): siRNA sense strand
gagaucaucgcugacuuug

SEQ ID NO: 525138 - RNA, 19 nt, Homo sapiens
  misc_RNA (1)...(19): siRNA sense strand
gagcuggaggcaaacaaug

SEQ ID NO: 525139 - RNA, 19 nt, Homo sapiens
  misc_RNA (1)...(19): siRNA sense strand
agcagcacauugagacuuu

SEQ ID NO: 525140 - RNA, 19 nt, Homo sapiens
  misc_RNA (1)...(19): siRNA sense strand
gagcagcacauugagacuu

SEQ ID NO: 525141 - RNA, 19 nt, Homo sapiens
  misc_RNA (1)...(19): siRNA sense strand
gcacguugccauggagaug

SEQ ID NO: 525142 - RNA, 19 nt, Homo sapiens
  misc_RNA (1)...(19): siRNA sense strand
cagccaccaucuuugacaa

SEQ ID NO: 525143 - RNA, 19 nt, Homo sapiens
  misc_RNA (1)...(19): siRNA sense strand
ggccaugaucuuugucuug

SEQ ID NO: 525144 - RNA, 19 nt, Homo sapiens
  misc_RNA (1)...(19): siRNA sense strand
ccaaugugcugcuguuccu

SEQ ID NO: 525145 - RNA, 19 nt, Homo sapiens
  misc_RNA (1)...(19): siRNA sense strand
ggagcuggaggcaaacaau

SEQ ID NO: 525146 - RNA, 19 nt, Homo sapiens
  misc_RNA (1)...(19): siRNA sense strand
aaccggaggcugcugcaua

SEQ ID NO: 525147 - RNA, 19 nt, Homo sapiens
  misc_RNA (1)...(19): siRNA sense strand
uguguuuacuucugccauu

SEQ ID NO: 525148 - RNA, 19 nt, Homo sapiens
  misc_RNA (1)...(19): siRNA sense strand
ccagagagaggaucuugag

SEQ ID NO: 525149 - RNA, 19 nt, Homo sapiens
  misc_RNA (1)...(19): siRNA sense strand
gcccuguguucuuugucua

SEQ ID NO: 525150 - RNA, 19 nt, Homo sapiens
  misc_RNA (1)...(19): siRNA sense strand
agaugggcauugaugauuc

SEQ ID NO: 525151 - RNA, 19 nt, Homo sapiens
  misc_RNA (1)...(19): siRNA sense strand
gcaacgcguaccucaagga

SEQ ID NO: 525152 - RNA, 19 nt, Homo sapiens
  misc_RNA (1)...(19): siRNA sense strand
gcgcaggagcuggucauga

SEQ ID NO: 525153 - RNA, 19 nt, Homo sapiens
  misc_RNA (1)...(19): siRNA sense strand
gggagaugaccaccuacuu

SEQ ID NO: 525154 - RNA, 19 nt, Homo sapiens
  misc_RNA (1)...(19): siRNA sense strand
gaagccacaguaugacauc

SEQ ID NO: 525155 - RNA, 19 nt, Homo sapiens
  misc_RNA (1)...(19): siRNA sense strand
ggaagccacaguaugacau

SEQ ID NO: 525156 - RNA, 19 nt, Homo sapiens
  misc_RNA (1)...(19): siRNA sense strand
agaugaagauugggcugaa

SEQ ID NO: 525157 - RNA, 19 nt, Homo sapiens
  misc_RNA (1)...(19): siRNA sense strand
caaugaugaacucuacuau

SEQ ID NO: 525158 - RNA, 19 nt, Homo sapiens
  misc_RNA (1)...(19): siRNA sense strand
cauccagcuucucaucuuc

SEQ ID NO: 525159 - RNA, 19 nt, Homo sapiens
  misc_RNA (1)...(19): siRNA sense strand
gaugauuccagcaaagaca

SEQ ID NO: 525160 - RNA, 19 nt, Homo sapiens
  misc_RNA (1)...(19): siRNA sense strand
gcugguacgugaggugaca

SEQ ID NO: 525161 - RNA, 19 nt, Homo sapiens
  misc_RNA (1)...(19): siRNA sense strand
gugaaugucucuagucgua

SEQ ID NO: 525162 - RNA, 19 nt, Homo sapiens
  misc_RNA (1)...(19): siRNA sense strand
uaaaguggaugaacggaaa

SEQ ID NO: 525163 - RNA, 19 nt, Homo sapiens
  misc_RNA (1)...(19): siRNA sense strand
ggaaauggcaguucgaugu

SEQ ID NO: 525164 - RNA, 19 nt, Homo sapiens
  misc_RNA (1)...(19): siRNA sense strand
gcacauagcaccgcaguug

SEQ ID NO: 525165 - RNA, 19 nt, Homo sapiens
  misc_RNA (1)...(19): siRNA sense strand
gaaagaagacaucaacaca

SEQ ID NO: 525166 - RNA, 19 nt, Homo sapiens
  misc_RNA (1)...(19): siRNA sense strand
gagcacuccuucaacaauu

SEQ ID NO: 525167 - RNA, 19 nt, Homo sapiens
  misc_RNA (1)...(19): siRNA sense strand
aagaagacaucaacacaaa

SEQ ID NO: 525168 - RNA, 19 nt, Homo sapiens
  misc_RNA (1)...(19): siRNA sense strand
gaaguuggccaugaucuuu

SEQ ID NO: 525169 - RNA, 19 nt, Homo sapiens
  misc_RNA (1)...(19): siRNA sense strand
cacaagaucuacauacaga

SEQ ID NO: 525170 - RNA, 19 nt, Homo sapiens
  misc_RNA (1)...(19): siRNA sense strand
ccauggagaugaaagaaga

SEQ ID NO: 525171 - RNA, 19 nt, Homo sapiens
  misc_RNA (1)...(19): siRNA sense strand
gagagaggaucuugagaag

SEQ ID NO: 525172 - RNA, 19 nt, Homo sapiens
  misc_RNA (1)...(19): siRNA sense strand
guguguggcuguuauguuu

SEQ ID NO: 525173 - RNA, 19 nt, Homo sapiens
  misc_RNA (1)...(19): siRNA sense strand
uggaggagcuacaggcaua

SEQ ID NO: 525174 - RNA, 19 nt, Homo sapiens
  misc_RNA (1)...(19): siRNA sense strand
gcaaugaugaacucuacua

SEQ ID NO: 525175 - RNA, 19 nt, Homo sapiens
  misc_RNA (1)...(19): siRNA sense strand
gaugaacucuacuaucagu

SEQ ID NO: 525176 - RNA, 19 nt, Homo sapiens
  misc_RNA (1)...(19): siRNA sense strand
gaaugucucuagucguaug

SEQ ID NO: 525177 - RNA, 19 nt, Homo sapiens
  misc_RNA (1)...(19): siRNA sense strand
ucacugcccuggcugacua

SEQ ID NO: 525178 - RNA, 19 nt, Homo sapiens
  misc_RNA (1)...(19): siRNA sense strand
ggguggcccucaaauauau

SEQ ID NO: 525179 - RNA, 19 nt, Homo sapiens
  misc_RNA (1)...(19): siRNA sense strand
ugacaggugugaaugugaa

SEQ ID NO: 525180 - RNA, 19 nt, Homo sapiens
  misc_RNA (1)...(19): siRNA sense strand
ggaacaugcugcugagucu

SEQ ID NO: 525181 - RNA, 19 nt, Homo sapiens
  misc_RNA (1)...(19): siRNA sense strand
gugguucucuguucccuaa

SEQ ID NO: 525182 - RNA, 19 nt, Homo sapiens
  misc_RNA (1)...(19): siRNA sense strand
gaaaagaucaagacgauug

SEQ ID NO: 525183 - RNA, 19 nt, Homo sapiens
  misc_RNA (1)...(19): siRNA sense strand
ugacaacuaugaccuacug

SEQ ID NO: 525184 - RNA, 19 nt, Homo sapiens
  misc_RNA (1)...(19): siRNA sense strand
caacuuaaccguggugaug

SEQ ID NO: 525185 - RNA, 19 nt, Homo sapiens
  misc_RNA (1)...(19): siRNA sense strand
gaugugugguccaaugaug

SEQ ID NO: 525186 - RNA, 19 nt, Homo sapiens
  misc_RNA (1)...(19): siRNA sense strand
ggagaugaccaccuacuuc

SEQ ID NO: 525187 - RNA, 19 nt, Homo sapiens
  misc_RNA (1)...(19): siRNA sense strand
ucaacaauuuccagaugaa

SEQ ID NO: 525188 - RNA, 19 nt, Homo sapiens
  misc_RNA (1)...(19): siRNA sense strand
ccacaucacucgggcaaca

SEQ ID NO: 525189 - RNA, 19 nt, Homo sapiens
  misc_RNA (1)...(19): siRNA sense strand
ucaaugagcacuccuucaa

SEQ ID NO: 525190 - RNA, 19 nt, Homo sapiens
  misc_RNA (1)...(19): siRNA sense strand
ggaggcugcugcauaacau

SEQ ID NO: 525191 - RNA, 19 nt, Homo sapiens
  misc_RNA (1)...(19): siRNA sense strand
gcagcucggugccaaugug

SEQ ID NO: 525192 - RNA, 19 nt, Homo sapiens
  misc_RNA (1)...(19): siRNA sense strand
caccgcaguuggcaucuuu

SEQ ID NO: 525193 - RNA, 19 nt, Homo sapiens
  misc_RNA (1)...(19): siRNA sense strand
guccuuggcuugcggaaau

SEQ ID NO: 525194 - RNA, 19 nt, Homo sapiens
  misc_RNA (1)...(19): siRNA sense strand
gaaauggcaguucgaugug

SEQ ID NO: 525195 - RNA, 19 nt, Homo sapiens
  misc_RNA (1)...(19): siRNA sense strand
gaucuuggccuggcaacuu

SEQ ID NO: 525196 - RNA, 19 nt, Homo sapiens
  misc_RNA (1)...(19): siRNA sense strand
caccaucuuugacaacuau

SEQ ID NO: 525197 - RNA, 19 nt, Homo sapiens
  misc_RNA (1)...(19): siRNA sense strand
aggaugagguggaugaguu

SEQ ID NO: 525198 - RNA, 19 nt, Homo sapiens
  misc_RNA (1)...(19): siRNA sense strand
gugcugaucugugcugugu

SEQ ID NO: 525199 - RNA, 19 nt, Homo sapiens
  misc_RNA (1)...(19): siRNA sense strand
caagcuggcugcggagaau

SEQ ID NO: 525200 - RNA, 19 nt, Homo sapiens
  misc_RNA (1)...(19): siRNA sense strand
gcuguguacuccugugguu

SEQ ID NO: 525201 - RNA, 19 nt, Homo sapiens
  misc_RNA (1)...(19): siRNA sense strand
ccaccuacuuccucaaugg

SEQ ID NO: 525202 - RNA, 19 nt, Homo sapiens
  misc_RNA (1)...(19): siRNA sense strand
gaacacagugaaugucucu

SEQ ID NO: 525203 - RNA, 19 nt, Homo sapiens
  misc_RNA (1)...(19): siRNA sense strand
cuucaacaauuuccagaug

SEQ ID NO: 525204 - RNA, 19 nt, Homo sapiens
  misc_RNA (1)...(19): siRNA sense strand
cgagaucaucgcugacuuu

SEQ ID NO: 525205 - RNA, 19 nt, Homo sapiens
  misc_RNA (1)...(19): siRNA sense strand
ggaaguuggccaugaucuu

SEQ ID NO: 525206 - RNA, 19 nt, Homo sapiens
  misc_RNA (1)...(19): siRNA sense strand
uacagaagcaugacaaugu

SEQ ID NO: 525207 - RNA, 19 nt, Homo sapiens
  misc_RNA (1)...(19): siRNA sense strand
gcugaucugugcuguguac

SEQ ID NO: 525208 - RNA, 19 nt, Homo sapiens
  misc_RNA (1)...(19): siRNA sense strand
gggcaacacugcaguaccu

SEQ ID NO: 525209 - RNA, 19 nt, Homo sapiens
  misc_RNA (1)...(19): siRNA sense strand
gacccugaaugagcucuuu

SEQ ID NO: 525210 - RNA, 19 nt, Homo sapiens
  misc_RNA (1)...(19): siRNA sense strand
aaugagcacuccuucaaca

SEQ ID NO: 525211 - RNA, 19 nt, Homo sapiens
  misc_RNA (1)...(19): siRNA sense strand
ggugacaggugugaaugug

SEQ ID NO: 525212 - RNA, 19 nt, Homo sapiens
  misc_RNA (1)...(19): siRNA sense strand
gugaguguguggcuguuau

SEQ ID NO: 525213 - RNA, 19 nt, Homo sapiens
  misc_RNA (1)...(19): siRNA sense strand
caacuaugaccuacugcuu

SEQ ID NO: 525214 - RNA, 19 nt, Homo sapiens
  misc_RNA (1)...(19): siRNA sense strand
ccaccaucuuugacaacua

SEQ ID NO: 525215 - RNA, 19 nt, Homo sapiens
  misc_RNA (1)...(19): siRNA sense strand
gcccucagccugccuaugu

SEQ ID NO: 525216 - RNA, 19 nt, Homo sapiens
  misc_RNA (1)...(19): siRNA sense strand
agagagaggaucuugagaa

SEQ ID NO: 525217 - RNA, 19 nt, Homo sapiens
  misc_RNA (1)...(19): siRNA sense strand
aaagaagacaucaacacaa

SEQ ID NO: 525218 - RNA, 19 nt, Homo sapiens
  misc_RNA (1)...(19): siRNA sense strand
cauccuguuugcagacauu

SEQ ID NO: 525219 - RNA, 19 nt, Homo sapiens
  misc_RNA (1)...(19): siRNA sense strand
ucauccagcuucucaucuu

SEQ ID NO: 525220 - RNA, 19 nt, Homo sapiens
  misc_RNA (1)...(19): siRNA sense strand
caacacugcaguaccugaa

SEQ ID NO: 525221 - RNA, 19 nt, Homo sapiens
  misc_RNA (1)...(19): siRNA sense strand
gcgcaacgcguaccucaag

SEQ ID NO: 525222 - RNA, 19 nt, Homo sapiens
  misc_RNA (1)...(19): siRNA sense strand
gaagauugggcugaacaug

SEQ ID NO: 525223 - RNA, 19 nt, Homo sapiens
  misc_RNA (1)...(19): siRNA sense strand
accggaggcugcugcauaa

SEQ ID NO: 525224 - RNA, 19 nt, Homo sapiens
  misc_RNA (1)...(19): siRNA sense strand
guccauggcuuggcuucuu

SEQ ID NO: 525225 - RNA, 19 nt, Homo sapiens
  misc_RNA (1)...(19): siRNA sense strand
caaugucagcauccuguuu

SEQ ID NO: 525226 - RNA, 19 nt, Homo sapiens
  misc_RNA (1)...(19): siRNA sense strand
ugacuuugaugagauuauc

SEQ ID NO: 525227 - RNA, 19 nt, Homo sapiens
  misc_RNA (1)...(19): siRNA sense strand
ccgcaaugaugaacucuac

SEQ ID NO: 525228 - RNA, 19 nt, Homo sapiens
  misc_RNA (1)...(19): siRNA sense strand
gcaccgcaguuggcaucuu

SEQ ID NO: 525229 - RNA, 19 nt, Homo sapiens
  misc_RNA (1)...(19): siRNA sense strand
cagaugggcauugaugauu

SEQ ID NO: 525230 - RNA, 19 nt, Homo sapiens
  misc_RNA (1)...(19): siRNA sense strand
caccuugcauuugaucuug

SEQ ID NO: 525231 - RNA, 19 nt, Homo sapiens
  misc_RNA (1)...(19): siRNA sense strand
gggagaaggaggagaugga

SEQ ID NO: 525232 - RNA, 19 nt, Homo sapiens
  misc_RNA (1)...(19): siRNA sense strand
cauugaugauuccagcaaa

SEQ ID NO: 525233 - RNA, 19 nt, Homo sapiens
  misc_RNA (1)...(19): siRNA sense strand
gcauugaugauuccagcaa

SEQ ID NO: 525234 - RNA, 19 nt, Homo sapiens
  misc_RNA (1)...(19): siRNA sense strand
gugccaaugugcugcuguu

SEQ ID NO: 525235 - RNA, 19 nt, Homo sapiens
  misc_RNA (1)...(19): siRNA sense strand
caagaucuacauacagaag

SEQ ID NO: 525236 - RNA, 19 nt, Homo sapiens
  misc_RNA (1)...(19): siRNA sense strand
gcucggaagccacaguaug

SEQ ID NO: 525237 - RNA, 19 nt, Homo sapiens
  misc_RNA (1)...(19): siRNA sense strand
gagaucaucgcugacuuug

SEQ ID NO: 525238 - RNA, 19 nt, Homo sapiens
  misc_RNA (1)...(19): siRNA sense strand
gagcuggaggcaaacaaug

SEQ ID NO: 525239 - RNA, 19 nt, Homo sapiens
  misc_RNA (1)...(19): siRNA sense strand
agcagcacauugagacuuu

SEQ ID NO: 525240 - RNA, 19 nt, Homo sapiens
  misc_RNA (1)...(19): siRNA sense strand
gagcagcacauugagacuu

SEQ ID NO: 525241 - RNA, 19 nt, Homo sapiens
  misc_RNA (1)...(19): siRNA sense strand
gcacguugccauggagaug

SEQ ID NO: 525242 - RNA, 19 nt, Homo sapiens
  misc_RNA (1)...(19): siRNA sense strand
cagccaccaucuuugacaa

SEQ ID NO: 525243 - RNA, 19 nt, Homo sapiens
  misc_RNA (1)...(19): siRNA sense strand
ggccaugaucuuugucuug

SEQ ID NO: 525244 - RNA, 19 nt, Homo sapiens
  misc_RNA (1)...(19): siRNA sense strand
ccaaugugcugcuguuccu

SEQ ID NO: 525245 - RNA, 19 nt, Homo sapiens
  misc_RNA (1)...(19): siRNA sense strand
ggagcuggaggcaaacaau

SEQ ID NO: 525246 - RNA, 19 nt, Homo sapiens
  misc_RNA (1)...(19): siRNA sense strand
aaccggaggcugcugcaua

SEQ ID NO: 525247 - RNA, 19 nt, Homo sapiens
  misc_RNA (1)...(19): siRNA sense strand
uguguuuacuucugccauu

SEQ ID NO: 525248 - RNA, 19 nt, Homo sapiens
  misc_RNA (1)...(19): siRNA sense strand
ccagagagaggaucuugag

SEQ ID NO: 525249 - RNA, 19 nt, Homo sapiens
  misc_RNA (1)...(19): siRNA sense strand
gcccuguguucuuugucua

SEQ ID NO: 525250 - RNA, 19 nt, Homo sapiens
  misc_RNA (1)...(19): siRNA sense strand
agaugggcauugaugauuc

SEQ ID NO: 525251 - RNA, 19 nt, Homo sapiens
  misc_RNA (1)...(19): siRNA sense strand
gcaacgcguaccucaagga

SEQ ID NO: 525252 - RNA, 19 nt, Homo sapiens
  misc_RNA (1)...(19): siRNA sense strand
gcgcaggagcuggucauga

SEQ ID NO: 525253 - RNA, 19 nt, Homo sapiens
  misc_RNA (1)...(19): siRNA sense strand
gggagaugaccaccuacuu

SEQ ID NO: 525254 - RNA, 19 nt, Homo sapiens
  misc_RNA (1)...(19): siRNA sense strand
gaagccacaguaugacauc

SEQ ID NO: 525255 - RNA, 19 nt, Homo sapiens
  misc_RNA (1)...(19): siRNA sense strand
ggaagccacaguaugacau

SEQ ID NO: 525256 - RNA, 19 nt, Homo sapiens
  misc_RNA (1)...(19): siRNA sense strand
agaugaagauugggcugaa

SEQ ID NO: 525257 - RNA, 19 nt, Homo sapiens
  misc_RNA (1)...(19): siRNA sense strand
caaugaugaacucuacuau

SEQ ID NO: 525258 - RNA, 19 nt, Homo sapiens
  misc_RNA (1)...(19): siRNA sense strand
cauccagcuucucaucuuc

SEQ ID NO: 525259 - RNA, 19 nt, Homo sapiens
  misc_RNA (1)...(19): siRNA sense strand
gaugauuccagcaaagaca

SEQ ID NO: 525260 - RNA, 19 nt, Homo sapiens
  misc_RNA (1)...(19): siRNA sense strand
gcugguacgugaggugaca

SEQ ID NO: 525261 - RNA, 19 nt, Homo sapiens
  misc_RNA (1)...(19): siRNA sense strand
gaagaaagccucauugaca

SEQ ID NO: 525262 - RNA, 19 nt, Homo sapiens
  misc_RNA (1)...(19): siRNA sense strand
gaugaaaccuaccugauga

SEQ ID NO: 525263 - RNA, 19 nt, Homo sapiens
  misc_RNA (1)...(19): siRNA sense strand
gcaaggagcugcccgagau

SEQ ID NO: 525264 - RNA, 19 nt, Homo sapiens
  misc_RNA (1)...(19): siRNA sense strand
uaacagggauggccauuga

SEQ ID NO: 525265 - RNA, 19 nt, Homo sapiens
  misc_RNA (1)...(19): siRNA sense strand
uaaagaaccuugacuucau

SEQ ID NO: 525266 - RNA, 19 nt, Homo sapiens
  misc_RNA (1)...(19): siRNA sense strand
ggaaauucaaggccacuua

SEQ ID NO: 525267 - RNA, 19 nt, Homo sapiens
  misc_RNA (1)...(19): siRNA sense strand
ccaacugggugucugagua

SEQ ID NO: 525268 - RNA, 19 nt, Homo sapiens
  misc_RNA (1)...(19): siRNA sense strand
gcaaucaguucuuugucuu

SEQ ID NO: 525269 - RNA, 19 nt, Homo sapiens
  misc_RNA (1)...(19): siRNA sense strand
gaggagcaguucaggaaga

SEQ ID NO: 525270 - RNA, 19 nt, Homo sapiens
  misc_RNA (1)...(19): siRNA sense strand
aaaccuaccugaugagcaa

SEQ ID NO: 525271 - RNA, 19 nt, Homo sapiens
  misc_RNA (1)...(19): siRNA sense strand
gcaauacuaugggcucuuc

SEQ ID NO: 525272 - RNA, 19 nt, Homo sapiens
  misc_RNA (1)...(19): siRNA sense strand
gggaaaacauucauuaaga

SEQ ID NO: 525273 - RNA, 19 nt, Homo sapiens
  misc_RNA (1)...(19): siRNA sense strand
aaagaaccuugacuucauu

SEQ ID NO: 525274 - RNA, 19 nt, Homo sapiens
  misc_RNA (1)...(19): siRNA sense strand
ugaaugacauguaucucaa

SEQ ID NO: 525275 - RNA, 19 nt, Homo sapiens
  misc_RNA (1)...(19): siRNA sense strand
ggaugaaaccuaccugaug

SEQ ID NO: 525276 - RNA, 19 nt, Homo sapiens
  misc_RNA (1)...(19): siRNA sense strand
guaaagaaccuugacuuca

SEQ ID NO: 525277 - RNA, 19 nt, Homo sapiens
  misc_RNA (1)...(19): siRNA sense strand
gagauguucugcugcuaug

SEQ ID NO: 525278 - RNA, 19 nt, Homo sapiens
  misc_RNA (1)...(19): siRNA sense strand
ugucuuggauguugucauu

SEQ ID NO: 525279 - RNA, 19 nt, Homo sapiens
  misc_RNA (1)...(19): siRNA sense strand
uuucacagcugcaaagaga

SEQ ID NO: 525280 - RNA, 19 nt, Homo sapiens
  misc_RNA (1)...(19): siRNA sense strand
cgacaagucccugcaguuu

SEQ ID NO: 525281 - RNA, 19 nt, Homo sapiens
  misc_RNA (1)...(19): siRNA sense strand
gcucagaacagcagcauca

SEQ ID NO: 525282 - RNA, 19 nt, Homo sapiens
  misc_RNA (1)...(19): siRNA sense strand
ugacauguaucucaacaac

SEQ ID NO: 525283 - RNA, 19 nt, Homo sapiens
  misc_RNA (1)...(19): siRNA sense strand
gcaccaggacucaccaaga

SEQ ID NO: 525284 - RNA, 19 nt, Homo sapiens
  misc_RNA (1)...(19): siRNA sense strand
gggacucgcuggacaugau

SEQ ID NO: 525285 - RNA, 19 nt, Homo sapiens
  misc_RNA (1)...(19): siRNA sense strand
gcaugaagcaauacuaugg

SEQ ID NO: 525286 - RNA, 19 nt, Homo sapiens
  misc_RNA (1)...(19): siRNA sense strand
gaaauucaaggccacuuag

SEQ ID NO: 525287 - RNA, 19 nt, Homo sapiens
  misc_RNA (1)...(19): siRNA sense strand
ucuuggauguugucauuaa

SEQ ID NO: 525288 - RNA, 19 nt, Homo sapiens
  misc_RNA (1)...(19): siRNA sense strand
ggaagagccaggccauugu

SEQ ID NO: 525289 - RNA, 19 nt, Homo sapiens
  misc_RNA (1)...(19): siRNA sense strand
caucguagccugcugcaau

SEQ ID NO: 525290 - RNA, 19 nt, Homo sapiens
  misc_RNA (1)...(19): siRNA sense strand
ccacaaccacggagauguu

SEQ ID NO: 525291 - RNA, 19 nt, Homo sapiens
  misc_RNA (1)...(19): siRNA sense strand
aagaaagccucauugacau

SEQ ID NO: 525292 - RNA, 19 nt, Homo sapiens
  misc_RNA (1)...(19): siRNA sense strand
ccucaucucugguguacuc

SEQ ID NO: 525293 - RNA, 19 nt, Homo sapiens
  misc_RNA (1)...(19): siRNA sense strand
ggagauguucugcugcuau

SEQ ID NO: 525294 - RNA, 19 nt, Homo sapiens
  misc_RNA (1)...(19): siRNA sense strand
gagcguuugccuccaauug

SEQ ID NO: 525295 - RNA, 19 nt, Homo sapiens
  misc_RNA (1)...(19): siRNA sense strand
gacgagcguuugccuccaa

SEQ ID NO: 525296 - RNA, 19 nt, Homo sapiens
  misc_RNA (1)...(19): siRNA sense strand
gaagagccaggccauugug

SEQ ID NO: 525297 - RNA, 19 nt, Homo sapiens
  misc_RNA (1)...(19): siRNA sense strand
gaauaguaaagaaccuuga

SEQ ID NO: 525298 - RNA, 19 nt, Homo sapiens
  misc_RNA (1)...(19): siRNA sense strand
gaaaugcuccccggaaauu

SEQ ID NO: 525299 - RNA, 19 nt, Homo sapiens
  misc_RNA (1)...(19): siRNA sense strand
ugacuucauugucuauaag

SEQ ID NO: 525300 - RNA, 19 nt, Homo sapiens
  misc_RNA (1)...(19): siRNA sense strand
ggaagaaagccucauugac

SEQ ID NO: 525301 - RNA, 19 nt, Homo sapiens
  misc_RNA (1)...(19): siRNA sense strand
ggcggaggcuacagcaaga

SEQ ID NO: 525302 - RNA, 19 nt, Homo sapiens
  misc_RNA (1)...(19): siRNA sense strand
cuacugagagcaagccauu

SEQ ID NO: 525303 - RNA, 19 nt, Homo sapiens
  misc_RNA (1)...(19): siRNA sense strand
gaucuguucacucaguuga

SEQ ID NO: 525304 - RNA, 19 nt, Homo sapiens
  misc_RNA (1)...(19): siRNA sense strand
gaaccuugacuucauuguc

SEQ ID NO: 525305 - RNA, 19 nt, Homo sapiens
  misc_RNA (1)...(19): siRNA sense strand
gacaagucccugcaguuug

SEQ ID NO: 525306 - RNA, 19 nt, Homo sapiens
  misc_RNA (1)...(19): siRNA sense strand
gccacuccauucccacuga

SEQ ID NO: 525307 - RNA, 19 nt, Homo sapiens
  misc_RNA (1)...(19): siRNA sense strand
caaaagcuguggaagaaag

SEQ ID NO: 525308 - RNA, 19 nt, Homo sapiens
  misc_RNA (1)...(19): siRNA sense strand
ggauggccauugacaacca

SEQ ID NO: 525309 - RNA, 19 nt, Homo sapiens
  misc_RNA (1)...(19): siRNA sense strand
ccagggacaccaaccuuga

SEQ ID NO: 525310 - RNA, 19 nt, Homo sapiens
  misc_RNA (1)...(19): siRNA sense strand
gcagaaaugcagcccugau

SEQ ID NO: 525311 - RNA, 19 nt, Homo sapiens
  misc_RNA (1)...(19): siRNA sense strand
uggaagaaagccucauuga

SEQ ID NO: 525312 - RNA, 19 nt, Homo sapiens
  misc_RNA (1)...(19): siRNA sense strand
caccaggacucaccaagac

SEQ ID NO: 525313 - RNA, 19 nt, Homo sapiens
  misc_RNA (1)...(19): siRNA sense strand
gggaucuguucacucaguu

SEQ ID NO: 525314 - RNA, 19 nt, Homo sapiens
  misc_RNA (1)...(19): siRNA sense strand
cagaaaugcagcccugaug

SEQ ID NO: 525315 - RNA, 19 nt, Homo sapiens
  misc_RNA (1)...(19): siRNA sense strand
caagacgcccauccuggaa

SEQ ID NO: 525316 - RNA, 19 nt, Homo sapiens
  misc_RNA (1)...(19): siRNA sense strand
ucugaguacuggcugaaug

SEQ ID NO: 525317 - RNA, 19 nt, Homo sapiens
  misc_RNA (1)...(19): siRNA sense strand
gaugaccagcugagguuug

SEQ ID NO: 525318 - RNA, 19 nt, Homo sapiens
  misc_RNA (1)...(19): siRNA sense strand
gcgcugcaucugccuugua

SEQ ID NO: 525319 - RNA, 19 nt, Homo sapiens
  misc_RNA (1)...(19): siRNA sense strand
cugcugcaaucaguucuuu

SEQ ID NO: 525320 - RNA, 19 nt, Homo sapiens
  misc_RNA (1)...(19): siRNA sense strand
ucaguucuuugucuuggau

SEQ ID NO: 525321 - RNA, 19 nt, Homo sapiens
  misc_RNA (1)...(19): siRNA sense strand
gguuuguccucuccacuag

SEQ ID NO: 525322 - RNA, 19 nt, Homo sapiens
  misc_RNA (1)...(19): siRNA sense strand
aaccuugacuucauugucu

SEQ ID NO: 525323 - RNA, 19 nt, Homo sapiens
  misc_RNA (1)...(19): siRNA sense strand
agcagacccuggccacgua

SEQ ID NO: 525324 - RNA, 19 nt, Homo sapiens
  misc_RNA (1)...(19): siRNA sense strand
ggacucgcuggacaugauu

SEQ ID NO: 525325 - RNA, 19 nt, Homo sapiens
  misc_RNA (1)...(19): siRNA sense strand
guagccugcugcaaucagu

SEQ ID NO: 525326 - RNA, 19 nt, Homo sapiens
  misc_RNA (1)...(19): siRNA sense strand
gcugcaaucaguucuuugu

SEQ ID NO: 525327 - RNA, 19 nt, Homo sapiens
  misc_RNA (1)...(19): siRNA sense strand
ccgaugaccagcugagguu

SEQ ID NO: 525328 - RNA, 19 nt, Homo sapiens
  misc_RNA (1)...(19): siRNA sense strand
ugcaaaagcuguggaagaa

SEQ ID NO: 525329 - RNA, 19 nt, Homo sapiens
  misc_RNA (1)...(19): siRNA sense strand
acacgcugguggcucagaa

SEQ ID NO: 525330 - RNA, 19 nt, Homo sapiens
  misc_RNA (1)...(19): siRNA sense strand
ucucugguguacucagcua

SEQ ID NO: 525331 - RNA, 19 nt, Homo sapiens
  misc_RNA (1)...(19): siRNA sense strand
aaugacauguaucucaaca

SEQ ID NO: 525332 - RNA, 19 nt, Homo sapiens
  misc_RNA (1)...(19): siRNA sense strand
caacugggugucugaguac

SEQ ID NO: 525333 - RNA, 19 nt, Homo sapiens
  misc_RNA (1)...(19): siRNA sense strand
ugcaaucaguucuuugucu

SEQ ID NO: 525334 - RNA, 19 nt, Homo sapiens
  misc_RNA (1)...(19): siRNA sense strand
cugaaugacauguaucuca

SEQ ID NO: 525335 - RNA, 19 nt, Homo sapiens
  misc_RNA (1)...(19): siRNA sense strand
uaguaaagaaccuugacuu

SEQ ID NO: 525336 - RNA, 19 nt, Homo sapiens
  misc_RNA (1)...(19): siRNA sense strand
ggagcugcccgagauguuc

SEQ ID NO: 525337 - RNA, 19 nt, Homo sapiens
  misc_RNA (1)...(19): siRNA sense strand
caaucaguucuuugucuug

SEQ ID NO: 525338 - RNA, 19 nt, Homo sapiens
  misc_RNA (1)...(19): siRNA sense strand
guggaagaaagccucauug

SEQ ID NO: 525339 - RNA, 19 nt, Homo sapiens
  misc_RNA (1)...(19): siRNA sense strand
ugcccgagauguucaugga

SEQ ID NO: 525340 - RNA, 19 nt, Homo sapiens
  misc_RNA (1)...(19): siRNA sense strand
gagcugcccgagauguuca

SEQ ID NO: 525341 - RNA, 19 nt, Homo sapiens
  misc_RNA (1)...(19): siRNA sense strand
acacagucauggccauaac

SEQ ID NO: 525342 - RNA, 19 nt, Homo sapiens
  misc_RNA (1)...(19): siRNA sense strand
ggcacuggcuuuugugaga

SEQ ID NO: 525343 - RNA, 19 nt, Homo sapiens
  misc_RNA (1)...(19): siRNA sense strand
aguacuggcugaaugacau

SEQ ID NO: 525344 - RNA, 19 nt, Homo sapiens
  misc_RNA (1)...(19): siRNA sense strand
cgcugcaucugccuuguau

SEQ ID NO: 525345 - RNA, 19 nt, Homo sapiens
  misc_RNA (1)...(19): siRNA sense strand
aggaagagccaggccauug

SEQ ID NO: 525346 - RNA, 19 nt, Homo sapiens
  misc_RNA (1)...(19): siRNA sense strand
ucagaacagcagcaucaug

SEQ ID NO: 525347 - RNA, 19 nt, Homo sapiens
  misc_RNA (1)...(19): siRNA sense strand
guccuguggucccaaaugg

SEQ ID NO: 525348 - RNA, 19 nt, Homo sapiens
  misc_RNA (1)...(19): siRNA sense strand
cagaggcacuggcuuuugu

SEQ ID NO: 525349 - RNA, 19 nt, Homo sapiens
  misc_RNA (1)...(19): siRNA sense strand
cuacaggcuccaccgaaga

SEQ ID NO: 525350 - RNA, 19 nt, Homo sapiens
  misc_RNA (1)...(19): siRNA sense strand
aguaaagaaccuugacuuc

SEQ ID NO: 525351 - RNA, 19 nt, Homo sapiens
  misc_RNA (1)...(19): siRNA sense strand
ggauguugucauuaauuuc

SEQ ID NO: 525352 - RNA, 19 nt, Homo sapiens
  misc_RNA (1)...(19): siRNA sense strand
gaagaaagccucauugaca

SEQ ID NO: 525353 - RNA, 19 nt, Homo sapiens
  misc_RNA (1)...(19): siRNA sense strand
gaugaaaccuaccugauga

SEQ ID NO: 525354 - RNA, 19 nt, Homo sapiens
  misc_RNA (1)...(19): siRNA sense strand
gcaaggagcugcccgagau

SEQ ID NO: 525355 - RNA, 19 nt, Homo sapiens
  misc_RNA (1)...(19): siRNA sense strand
uaacagggauggccauuga

SEQ ID NO: 525356 - RNA, 19 nt, Homo sapiens
  misc_RNA (1)...(19): siRNA sense strand
uaaagaaccuugacuucau

SEQ ID NO: 525357 - RNA, 19 nt, Homo sapiens
  misc_RNA (1)...(19): siRNA sense strand
ggaaauucaaggccacuua

SEQ ID NO: 525358 - RNA, 19 nt, Homo sapiens
  misc_RNA (1)...(19): siRNA sense strand
ccaacugggugucugagua

SEQ ID NO: 525359 - RNA, 19 nt, Homo sapiens
  misc_RNA (1)...(19): siRNA sense strand
gcaaucaguucuuugucuu

SEQ ID NO: 525360 - RNA, 19 nt, Homo sapiens
  misc_RNA (1)...(19): siRNA sense strand
gaggagcaguucaggaaga

SEQ ID NO: 525361 - RNA, 19 nt, Homo sapiens
  misc_RNA (1)...(19): siRNA sense strand
aaaccuaccugaugagcaa

SEQ ID NO: 525362 - RNA, 19 nt, Homo sapiens
  misc_RNA (1)...(19): siRNA sense strand
gcaauacuaugggcucuuc

SEQ ID NO: 525363 - RNA, 19 nt, Homo sapiens
  misc_RNA (1)...(19): siRNA sense strand
gggaaaacauucauuaaga

SEQ ID NO: 525364 - RNA, 19 nt, Homo sapiens
  misc_RNA (1)...(19): siRNA sense strand
aaagaaccuugacuucauu

SEQ ID NO: 525365 - RNA, 19 nt, Homo sapiens
  misc_RNA (1)...(19): siRNA sense strand
ugaaugacauguaucucaa

SEQ ID NO: 525366 - RNA, 19 nt, Homo sapiens
  misc_RNA (1)...(19): siRNA sense strand
ggaugaaaccuaccugaug

SEQ ID NO: 525367 - RNA, 19 nt, Homo sapiens
  misc_RNA (1)...(19): siRNA sense strand
guaaagaaccuugacuuca

SEQ ID NO: 525368 - RNA, 19 nt, Homo sapiens
  misc_RNA (1)...(19): siRNA sense strand
gagauguucugcugcuaug

SEQ ID NO: 525369 - RNA, 19 nt, Homo sapiens
  misc_RNA (1)...(19): siRNA sense strand
ugucuuggauguugucauu

SEQ ID NO: 525370 - RNA, 19 nt, Homo sapiens
  misc_RNA (1)...(19): siRNA sense strand
uuucacagcugcaaagaga

SEQ ID NO: 525371 - RNA, 19 nt, Homo sapiens
  misc_RNA (1)...(19): siRNA sense strand
cgacaagucccugcaguuu

SEQ ID NO: 525372 - RNA, 19 nt, Homo sapiens
  misc_RNA (1)...(19): siRNA sense strand
gcucagaacagcagcauca

SEQ ID NO: 525373 - RNA, 19 nt, Homo sapiens
  misc_RNA (1)...(19): siRNA sense strand
ugacauguaucucaacaac

SEQ ID NO: 525374 - RNA, 19 nt, Homo sapiens
  misc_RNA (1)...(19): siRNA sense strand
gggacucgcuggacaugau

SEQ ID NO: 525375 - RNA, 19 nt, Homo sapiens
  misc_RNA (1)...(19): siRNA sense strand
gcaugaagcaauacuaugg

SEQ ID NO: 525376 - RNA, 19 nt, Homo sapiens
  misc_RNA (1)...(19): siRNA sense strand
gaaauucaaggccacuuag

SEQ ID NO: 525377 - RNA, 19 nt, Homo sapiens
  misc_RNA (1)...(19): siRNA sense strand
ucuuggauguugucauuaa

SEQ ID NO: 525378 - RNA, 19 nt, Homo sapiens
  misc_RNA (1)...(19): siRNA sense strand
caucguagccugcugcaau

SEQ ID NO: 525379 - RNA, 19 nt, Homo sapiens
  misc_RNA (1)...(19): siRNA sense strand
ggaagagccaggccauugu

SEQ ID NO: 525380 - RNA, 19 nt, Homo sapiens
  misc_RNA (1)...(19): siRNA sense strand
ccacaaccacggagauguu

SEQ ID NO: 525381 - RNA, 19 nt, Homo sapiens
  misc_RNA (1)...(19): siRNA sense strand
aagaaagccucauugacau

SEQ ID NO: 525382 - RNA, 19 nt, Homo sapiens
  misc_RNA (1)...(19): siRNA sense strand
ccucaucucugguguacuc

SEQ ID NO: 525383 - RNA, 19 nt, Homo sapiens
  misc_RNA (1)...(19): siRNA sense strand
ggagauguucugcugcuau

SEQ ID NO: 525384 - RNA, 19 nt, Homo sapiens
  misc_RNA (1)...(19): siRNA sense strand
gagcguuugccuccaauug

SEQ ID NO: 525385 - RNA, 19 nt, Homo sapiens
  misc_RNA (1)...(19): siRNA sense strand
gacgagcguuugccuccaa

SEQ ID NO: 525386 - RNA, 19 nt, Homo sapiens
  misc_RNA (1)...(19): siRNA sense strand
gaagagccaggccauugug

SEQ ID NO: 525387 - RNA, 19 nt, Homo sapiens
  misc_RNA (1)...(19): siRNA sense strand
gaauaguaaagaaccuuga

SEQ ID NO: 525388 - RNA, 19 nt, Homo sapiens
  misc_RNA (1)...(19): siRNA sense strand
gaaaugcuccccggaaauu

SEQ ID NO: 525389 - RNA, 19 nt, Homo sapiens
  misc_RNA (1)...(19): siRNA sense strand
ugacuucauugucuauaag

SEQ ID NO: 525390 - RNA, 19 nt, Homo sapiens
  misc_RNA (1)...(19): siRNA sense strand
ggaagaaagccucauugac

SEQ ID NO: 525391 - RNA, 19 nt, Homo sapiens
  misc_RNA (1)...(19): siRNA sense strand
ggcggaggcuacagcaaga

SEQ ID NO: 525392 - RNA, 19 nt, Homo sapiens
  misc_RNA (1)...(19): siRNA sense strand
cuacugagagcaagccauu

SEQ ID NO: 525393 - RNA, 19 nt, Homo sapiens
  misc_RNA (1)...(19): siRNA sense strand
gaucuguucacucaguuga

SEQ ID NO: 525394 - RNA, 19 nt, Homo sapiens
  misc_RNA (1)...(19): siRNA sense strand
gaaccuugacuucauuguc

SEQ ID NO: 525395 - RNA, 19 nt, Homo sapiens
  misc_RNA (1)...(19): siRNA sense strand
gacaagucccugcaguuug

SEQ ID NO: 525396 - RNA, 19 nt, Homo sapiens
  misc_RNA (1)...(19): siRNA sense strand
gccacuccauucccacuga

SEQ ID NO: 525397 - RNA, 19 nt, Homo sapiens
  misc_RNA (1)...(19): siRNA sense strand
caaaagcuguggaagaaag

SEQ ID NO: 525398 - RNA, 19 nt, Homo sapiens
  misc_RNA (1)...(19): siRNA sense strand
ggauggccauugacaacca

SEQ ID NO: 525399 - RNA, 19 nt, Homo sapiens
  misc_RNA (1)...(19): siRNA sense strand
ccagggacaccaaccuuga

SEQ ID NO: 525400 - RNA, 19 nt, Homo sapiens
  misc_RNA (1)...(19): siRNA sense strand
gcagaaaugcagcccugau

SEQ ID NO: 525401 - RNA, 19 nt, Homo sapiens
  misc_RNA (1)...(19): siRNA sense strand
uggaagaaagccucauuga

SEQ ID NO: 525402 - RNA, 19 nt, Homo sapiens
  misc_RNA (1)...(19): siRNA sense strand
gggaucuguucacucaguu

SEQ ID NO: 525403 - RNA, 19 nt, Homo sapiens
  misc_RNA (1)...(19): siRNA sense strand
cagaaaugcagcccugaug

SEQ ID NO: 525404 - RNA, 19 nt, Homo sapiens
  misc_RNA (1)...(19): siRNA sense strand
ucugaguacuggcugaaug

SEQ ID NO: 525405 - RNA, 19 nt, Homo sapiens
  misc_RNA (1)...(19): siRNA sense strand
gaugaccagcugagguuug

SEQ ID NO: 525406 - RNA, 19 nt, Homo sapiens
  misc_RNA (1)...(19): siRNA sense strand
gcgcugcaucugccuugua

SEQ ID NO: 525407 - RNA, 19 nt, Homo sapiens
  misc_RNA (1)...(19): siRNA sense strand
cugcugcaaucaguucuuu

SEQ ID NO: 525408 - RNA, 19 nt, Homo sapiens
  misc_RNA (1)...(19): siRNA sense strand
ucaguucuuugucuuggau

SEQ ID NO: 525409 - RNA, 19 nt, Homo sapiens
  misc_RNA (1)...(19): siRNA sense strand
gguuuguccucuccacuag

SEQ ID NO: 525410 - RNA, 19 nt, Homo sapiens
  misc_RNA (1)...(19): siRNA sense strand
agcagacccuggccacgua

SEQ ID NO: 525411 - RNA, 19 nt, Homo sapiens
  misc_RNA (1)...(19): siRNA sense strand
aaccuugacuucauugucu

SEQ ID NO: 525412 - RNA, 19 nt, Homo sapiens
  misc_RNA (1)...(19): siRNA sense strand
ggacucgcuggacaugauu

SEQ ID NO: 525413 - RNA, 19 nt, Homo sapiens
  misc_RNA (1)...(19): siRNA sense strand
guagccugcugcaaucagu

SEQ ID NO: 525414 - RNA, 19 nt, Homo sapiens
  misc_RNA (1)...(19): siRNA sense strand
gcugcaaucaguucuuugu

SEQ ID NO: 525415 - RNA, 19 nt, Homo sapiens
  misc_RNA (1)...(19): siRNA sense strand
ucucugguguacucagcua

SEQ ID NO: 525416 - RNA, 19 nt, Homo sapiens
  misc_RNA (1)...(19): siRNA sense strand
ugcaaaagcuguggaagaa

SEQ ID NO: 525417 - RNA, 19 nt, Homo sapiens
  misc_RNA (1)...(19): siRNA sense strand
ccgaugaccagcugagguu

SEQ ID NO: 525418 - RNA, 19 nt, Homo sapiens
  misc_RNA (1)...(19): siRNA sense strand
acacgcugguggcucagaa

SEQ ID NO: 525419 - RNA, 19 nt, Homo sapiens
  misc_RNA (1)...(19): siRNA sense strand
caacugggugucugaguac

SEQ ID NO: 525420 - RNA, 19 nt, Homo sapiens
  misc_RNA (1)...(19): siRNA sense strand
aaugacauguaucucaaca

SEQ ID NO: 525421 - RNA, 19 nt, Homo sapiens
  misc_RNA (1)...(19): siRNA sense strand
ugcaaucaguucuuugucu

SEQ ID NO: 525422 - RNA, 19 nt, Homo sapiens
  misc_RNA (1)...(19): siRNA sense strand
cugaaugacauguaucuca

SEQ ID NO: 525423 - RNA, 19 nt, Homo sapiens
  misc_RNA (1)...(19): siRNA sense strand
uaguaaagaaccuugacuu

SEQ ID NO: 525424 - RNA, 19 nt, Homo sapiens
  misc_RNA (1)...(19): siRNA sense strand
ggagcugcccgagauguuc

SEQ ID NO: 525425 - RNA, 19 nt, Homo sapiens
  misc_RNA (1)...(19): siRNA sense strand
aggaagagccaggccauug

SEQ ID NO: 525426 - RNA, 19 nt, Homo sapiens
  misc_RNA (1)...(19): siRNA sense strand
guggaagaaagccucauug

SEQ ID NO: 525427 - RNA, 19 nt, Homo sapiens
  misc_RNA (1)...(19): siRNA sense strand
ugcccgagauguucaugga

SEQ ID NO: 525428 - RNA, 19 nt, Homo sapiens
  misc_RNA (1)...(19): siRNA sense strand
gagcugcccgagauguuca

SEQ ID NO: 525429 - RNA, 19 nt, Homo sapiens
  misc_RNA (1)...(19): siRNA sense strand
acacagucauggccauaac

SEQ ID NO: 525430 - RNA, 19 nt, Homo sapiens
  misc_RNA (1)...(19): siRNA sense strand
ggcacuggcuuuugugaga

SEQ ID NO: 525431 - RNA, 19 nt, Homo sapiens
  misc_RNA (1)...(19): siRNA sense strand
aguacuggcugaaugacau

SEQ ID NO: 525432 - RNA, 19 nt, Homo sapiens
  misc_RNA (1)...(19): siRNA sense strand
cgcugcaucugccuuguau

SEQ ID NO: 525433 - RNA, 19 nt, Homo sapiens
  misc_RNA (1)...(19): siRNA sense strand
caaucaguucuuugucuug

SEQ ID NO: 525434 - RNA, 19 nt, Homo sapiens
  misc_RNA (1)...(19): siRNA sense strand
ucagaacagcagcaucaug

SEQ ID NO: 525435 - RNA, 19 nt, Homo sapiens
  misc_RNA (1)...(19): siRNA sense strand
guccuguggucccaaaugg

SEQ ID NO: 525436 - RNA, 19 nt, Homo sapiens
  misc_RNA (1)...(19): siRNA sense strand
cagaggcacuggcuuuugu

SEQ ID NO: 525437 - RNA, 19 nt, Homo sapiens
  misc_RNA (1)...(19): siRNA sense strand
cuacaggcuccaccgaaga

SEQ ID NO: 525438 - RNA, 19 nt, Homo sapiens
  misc_RNA (1)...(19): siRNA sense strand
aguaaagaaccuugacuuc

SEQ ID NO: 525439 - RNA, 19 nt, Homo sapiens
  misc_RNA (1)...(19): siRNA sense strand
ggauguugucauuaauuuc

SEQ ID NO: 525440 - RNA, 19 nt, Homo sapiens
  misc_RNA (1)...(19): siRNA sense strand
gaagaaagccucauugaca

SEQ ID NO: 525441 - RNA, 19 nt, Homo sapiens
  misc_RNA (1)...(19): siRNA sense strand
gaugaaaccuaccugauga

SEQ ID NO: 525442 - RNA, 19 nt, Homo sapiens
  misc_RNA (1)...(19): siRNA sense strand
gcaaggagcugcccgagau

SEQ ID NO: 525443 - RNA, 19 nt, Homo sapiens
  misc_RNA (1)...(19): siRNA sense strand
uaacagggauggccauuga

SEQ ID NO: 525444 - RNA, 19 nt, Homo sapiens
  misc_RNA (1)...(19): siRNA sense strand
uaaagaaccuugacuucau

SEQ ID NO: 525445 - RNA, 19 nt, Homo sapiens
  misc_RNA (1)...(19): siRNA sense strand
ggaaauucaaggccacuua

SEQ ID NO: 525446 - RNA, 19 nt, Homo sapiens
  misc_RNA (1)...(19): siRNA sense strand
ccaacugggugucugagua

SEQ ID NO: 525447 - RNA, 19 nt, Homo sapiens
  misc_RNA (1)...(19): siRNA sense strand
gcaaucaguucuuugucuu

SEQ ID NO: 525448 - RNA, 19 nt, Homo sapiens
  misc_RNA (1)...(19): siRNA sense strand
gaggagcaguucaggaaga

SEQ ID NO: 525449 - RNA, 19 nt, Homo sapiens
  misc_RNA (1)...(19): siRNA sense strand
aaaccuaccugaugagcaa

SEQ ID NO: 525450 - RNA, 19 nt, Homo sapiens
  misc_RNA (1)...(19): siRNA sense strand
gcaauacuaugggcucuuc

SEQ ID NO: 525451 - RNA, 19 nt, Homo sapiens
  misc_RNA (1)...(19): siRNA sense strand
gggaaaacauucauuaaga

SEQ ID NO: 525452 - RNA, 19 nt, Homo sapiens
  misc_RNA (1)...(19): siRNA sense strand
aaagaaccuugacuucauu

SEQ ID NO: 525453 - RNA, 19 nt, Homo sapiens
  misc_RNA (1)...(19): siRNA sense strand
ugaaugacauguaucucaa

SEQ ID NO: 525454 - RNA, 19 nt, Homo sapiens
  misc_RNA (1)...(19): siRNA sense strand
ggaugaaaccuaccugaug

SEQ ID NO: 525455 - RNA, 19 nt, Homo sapiens
  misc_RNA (1)...(19): siRNA sense strand
guaaagaaccuugacuuca

SEQ ID NO: 525456 - RNA, 19 nt, Homo sapiens
  misc_RNA (1)...(19): siRNA sense strand
gagauguucugcugcuaug

SEQ ID NO: 525457 - RNA, 19 nt, Homo sapiens
  misc_RNA (1)...(19): siRNA sense strand
ugucuuggauguugucauu

SEQ ID NO: 525458 - RNA, 19 nt, Homo sapiens
  misc_RNA (1)...(19): siRNA sense strand
uuucacagcugcaaagaga

SEQ ID NO: 525459 - RNA, 19 nt, Homo sapiens
  misc_RNA (1)...(19): siRNA sense strand
cgacaagucccugcaguuu

SEQ ID NO: 525460 - RNA, 19 nt, Homo sapiens
  misc_RNA (1)...(19): siRNA sense strand
gcucagaacagcagcauca

SEQ ID NO: 525461 - RNA, 19 nt, Homo sapiens
  misc_RNA (1)...(19): siRNA sense strand
ugacauguaucucaacaac

SEQ ID NO: 525462 - RNA, 19 nt, Homo sapiens
  misc_RNA (1)...(19): siRNA sense strand
gggacucgcuggacaugau

SEQ ID NO: 525463 - RNA, 19 nt, Homo sapiens
  misc_RNA (1)...(19): siRNA sense strand
gcaugaagcaauacuaugg

SEQ ID NO: 525464 - RNA, 19 nt, Homo sapiens
  misc_RNA (1)...(19): siRNA sense strand
gaaauucaaggccacuuag

SEQ ID NO: 525465 - RNA, 19 nt, Homo sapiens
  misc_RNA (1)...(19): siRNA sense strand
ucuuggauguugucauuaa

SEQ ID NO: 525466 - RNA, 19 nt, Homo sapiens
  misc_RNA (1)...(19): siRNA sense strand
caucguagccugcugcaau

SEQ ID NO: 525467 - RNA, 19 nt, Homo sapiens
  misc_RNA (1)...(19): siRNA sense strand
ggaagagccaggccauugu

SEQ ID NO: 525468 - RNA, 19 nt, Homo sapiens
  misc_RNA (1)...(19): siRNA sense strand
ccacaaccacggagauguu

SEQ ID NO: 525469 - RNA, 19 nt, Homo sapiens
  misc_RNA (1)...(19): siRNA sense strand
aagaaagccucauugacau

SEQ ID NO: 525470 - RNA, 19 nt, Homo sapiens
  misc_RNA (1)...(19): siRNA sense strand
ccucaucucugguguacuc

SEQ ID NO: 525471 - RNA, 19 nt, Homo sapiens
  misc_RNA (1)...(19): siRNA sense strand
ggagauguucugcugcuau

SEQ ID NO: 525472 - RNA, 19 nt, Homo sapiens
  misc_RNA (1)...(19): siRNA sense strand
gagcguuugccuccaauug

SEQ ID NO: 525473 - RNA, 19 nt, Homo sapiens
  misc_RNA (1)...(19): siRNA sense strand
gacgagcguuugccuccaa

SEQ ID NO: 525474 - RNA, 19 nt, Homo sapiens
  misc_RNA (1)...(19): siRNA sense strand
gaagagccaggccauugug

SEQ ID NO: 525475 - RNA, 19 nt, Homo sapiens
  misc_RNA (1)...(19): siRNA sense strand
gaauaguaaagaaccuuga

SEQ ID NO: 525476 - RNA, 19 nt, Homo sapiens
  misc_RNA (1)...(19): siRNA sense strand
gaaaugcuccccggaaauu

SEQ ID NO: 525477 - RNA, 19 nt, Homo sapiens
  misc_RNA (1)...(19): siRNA sense strand
ugacuucauugucuauaag

SEQ ID NO: 525478 - RNA, 19 nt, Homo sapiens
  misc_RNA (1)...(19): siRNA sense strand
ggaagaaagccucauugac

SEQ ID NO: 525479 - RNA, 19 nt, Homo sapiens
  misc_RNA (1)...(19): siRNA sense strand
ggcggaggcuacagcaaga

SEQ ID NO: 525480 - RNA, 19 nt, Homo sapiens
  misc_RNA (1)...(19): siRNA sense strand
cuacugagagcaagccauu

SEQ ID NO: 525481 - RNA, 19 nt, Homo sapiens
  misc_RNA (1)...(19): siRNA sense strand
gaucuguucacucaguuga

SEQ ID NO: 525482 - RNA, 19 nt, Homo sapiens
  misc_RNA (1)...(19): siRNA sense strand
gaaccuugacuucauuguc

SEQ ID NO: 525483 - RNA, 19 nt, Homo sapiens
  misc_RNA (1)...(19): siRNA sense strand
gacaagucccugcaguuug

SEQ ID NO: 525484 - RNA, 19 nt, Homo sapiens
  misc_RNA (1)...(19): siRNA sense strand
gccacuccauucccacuga

SEQ ID NO: 525485 - RNA, 19 nt, Homo sapiens
  misc_RNA (1)...(19): siRNA sense strand
caaaagcuguggaagaaag

SEQ ID NO: 525486 - RNA, 19 nt, Homo sapiens
  misc_RNA (1)...(19): siRNA sense strand
ggauggccauugacaacca

SEQ ID NO: 525487 - RNA, 19 nt, Homo sapiens
  misc_RNA (1)...(19): siRNA sense strand
ccagggacaccaaccuuga

SEQ ID NO: 525488 - RNA, 19 nt, Homo sapiens
  misc_RNA (1)...(19): siRNA sense strand
gcagaaaugcagcccugau

SEQ ID NO: 525489 - RNA, 19 nt, Homo sapiens
  misc_RNA (1)...(19): siRNA sense strand
uggaagaaagccucauuga

SEQ ID NO: 525490 - RNA, 19 nt, Homo sapiens
  misc_RNA (1)...(19): siRNA sense strand
gggaucuguucacucaguu

SEQ ID NO: 525491 - RNA, 19 nt, Homo sapiens
  misc_RNA (1)...(19): siRNA sense strand
cagaaaugcagcccugaug

SEQ ID NO: 525492 - RNA, 19 nt, Homo sapiens
  misc_RNA (1)...(19): siRNA sense strand
ucugaguacuggcugaaug

SEQ ID NO: 525493 - RNA, 19 nt, Homo sapiens
  misc_RNA (1)...(19): siRNA sense strand
gaugaccagcugagguuug

SEQ ID NO: 525494 - RNA, 19 nt, Homo sapiens
  misc_RNA (1)...(19): siRNA sense strand
gcgcugcaucugccuugua

SEQ ID NO: 525495 - RNA, 19 nt, Homo sapiens
  misc_RNA (1)...(19): siRNA sense strand
cugcugcaaucaguucuuu

SEQ ID NO: 525496 - RNA, 19 nt, Homo sapiens
  misc_RNA (1)...(19): siRNA sense strand
ucaguucuuugucuuggau

SEQ ID NO: 525497 - RNA, 19 nt, Homo sapiens
  misc_RNA (1)...(19): siRNA sense strand
gguuuguccucuccacuag

SEQ ID NO: 525498 - RNA, 19 nt, Homo sapiens
  misc_RNA (1)...(19): siRNA sense strand
agcagacccuggccacgua

SEQ ID NO: 525499 - RNA, 19 nt, Homo sapiens
  misc_RNA (1)...(19): siRNA sense strand
aaccuugacuucauugucu

SEQ ID NO: 525500 - RNA, 19 nt, Homo sapiens
  misc_RNA (1)...(19): siRNA sense strand
ggacucgcuggacaugauu

SEQ ID NO: 525501 - RNA, 19 nt, Homo sapiens
  misc_RNA (1)...(19): siRNA sense strand
guagccugcugcaaucagu

SEQ ID NO: 525502 - RNA, 19 nt, Homo sapiens
  misc_RNA (1)...(19): siRNA sense strand
gcugcaaucaguucuuugu

SEQ ID NO: 525503 - RNA, 19 nt, Homo sapiens
  misc_RNA (1)...(19): siRNA sense strand
ucucugguguacucagcua

SEQ ID NO: 525504 - RNA, 19 nt, Homo sapiens
  misc_RNA (1)...(19): siRNA sense strand
ugcaaaagcuguggaagaa

SEQ ID NO: 525505 - RNA, 19 nt, Homo sapiens
  misc_RNA (1)...(19): siRNA sense strand
ccgaugaccagcugagguu

SEQ ID NO: 525506 - RNA, 19 nt, Homo sapiens
  misc_RNA (1)...(19): siRNA sense strand
acacgcugguggcucagaa

SEQ ID NO: 525507 - RNA, 19 nt, Homo sapiens
  misc_RNA (1)...(19): siRNA sense strand
caacugggugucugaguac

SEQ ID NO: 525508 - RNA, 19 nt, Homo sapiens
  misc_RNA (1)...(19): siRNA sense strand
aaugacauguaucucaaca

SEQ ID NO: 525509 - RNA, 19 nt, Homo sapiens
  misc_RNA (1)...(19): siRNA sense strand
ugcaaucaguucuuugucu

SEQ ID NO: 525510 - RNA, 19 nt, Homo sapiens
  misc_RNA (1)...(19): siRNA sense strand
cugaaugacauguaucuca

SEQ ID NO: 525511 - RNA, 19 nt, Homo sapiens
  misc_RNA (1)...(19): siRNA sense strand
uaguaaagaaccuugacuu

SEQ ID NO: 525512 - RNA, 19 nt, Homo sapiens
  misc_RNA (1)...(19): siRNA sense strand
ggagcugcccgagauguuc

SEQ ID NO: 525513 - RNA, 19 nt, Homo sapiens
  misc_RNA (1)...(19): siRNA sense strand
aggaagagccaggccauug

SEQ ID NO: 525514 - RNA, 19 nt, Homo sapiens
  misc_RNA (1)...(19): siRNA sense strand
guggaagaaagccucauug

SEQ ID NO: 525515 - RNA, 19 nt, Homo sapiens
  misc_RNA (1)...(19): siRNA sense strand
ugcccgagauguucaugga

SEQ ID NO: 525516 - RNA, 19 nt, Homo sapiens
  misc_RNA (1)...(19): siRNA sense strand
gagcugcccgagauguuca

SEQ ID NO: 525517 - RNA, 19 nt, Homo sapiens
  misc_RNA (1)...(19): siRNA sense strand
acacagucauggccauaac

SEQ ID NO: 525518 - RNA, 19 nt, Homo sapiens
  misc_RNA (1)...(19): siRNA sense strand
ggcacuggcuuuugugaga

SEQ ID NO: 525519 - RNA, 19 nt, Homo sapiens
  misc_RNA (1)...(19): siRNA sense strand
aguacuggcugaaugacau

SEQ ID NO: 525520 - RNA, 19 nt, Homo sapiens
  misc_RNA (1)...(19): siRNA sense strand
cgcugcaucugccuuguau

SEQ ID NO: 525521 - RNA, 19 nt, Homo sapiens
  misc_RNA (1)...(19): siRNA sense strand
caaucaguucuuugucuug

SEQ ID NO: 525522 - RNA, 19 nt, Homo sapiens
  misc_RNA (1)...(19): siRNA sense strand
ucagaacagcagcaucaug

SEQ ID NO: 525523 - RNA, 19 nt, Homo sapiens
  misc_RNA (1)...(19): siRNA sense strand
guccuguggucccaaaugg

SEQ ID NO: 525524 - RNA, 19 nt, Homo sapiens
  misc_RNA (1)...(19): siRNA sense strand
cagaggcacuggcuuuugu

SEQ ID NO: 525525 - RNA, 19 nt, Homo sapiens
  misc_RNA (1)...(19): siRNA sense strand
cuacaggcuccaccgaaga

SEQ ID NO: 525526 - RNA, 19 nt, Homo sapiens
  misc_RNA (1)...(19): siRNA sense strand
aguaaagaaccuugacuuc

SEQ ID NO: 525527 - RNA, 19 nt, Homo sapiens
  misc_RNA (1)...(19): siRNA sense strand
ggauguugucauuaauuuc

SEQ ID NO: 525528 - RNA, 19 nt, Homo sapiens
  misc_RNA (1)...(19): siRNA sense strand
gaagaaagccucauugaca

SEQ ID NO: 525529 - RNA, 19 nt, Homo sapiens
  misc_RNA (1)...(19): siRNA sense strand
gaugaaaccuaccugauga

SEQ ID NO: 525530 - RNA, 19 nt, Homo sapiens
  misc_RNA (1)...(19): siRNA sense strand
gcaaggagcugcccgagau

SEQ ID NO: 525531 - RNA, 19 nt, Homo sapiens
  misc_RNA (1)...(19): siRNA sense strand
uaacagggauggccauuga

SEQ ID NO: 525532 - RNA, 19 nt, Homo sapiens
  misc_RNA (1)...(19): siRNA sense strand
uaaagaaccuugacuucau

SEQ ID NO: 525533 - RNA, 19 nt, Homo sapiens
  misc_RNA (1)...(19): siRNA sense strand
ggaaauucaaggccacuua

SEQ ID NO: 525534 - RNA, 19 nt, Homo sapiens
  misc_RNA (1)...(19): siRNA sense strand
ccaacugggugucugagua

SEQ ID NO: 525535 - RNA, 19 nt, Homo sapiens
  misc_RNA (1)...(19): siRNA sense strand
gcaaucaguucuuugucuu

SEQ ID NO: 525536 - RNA, 19 nt, Homo sapiens
  misc_RNA (1)...(19): siRNA sense strand
gaggagcaguucaggaaga

SEQ ID NO: 525537 - RNA, 19 nt, Homo sapiens
  misc_RNA (1)...(19): siRNA sense strand
aaaccuaccugaugagcaa

SEQ ID NO: 525538 - RNA, 19 nt, Homo sapiens
  misc_RNA (1)...(19): siRNA sense strand
gcaauacuaugggcucuuc

SEQ ID NO: 525539 - RNA, 19 nt, Homo sapiens
  misc_RNA (1)...(19): siRNA sense strand
gggaaaacauucauuaaga

SEQ ID NO: 525540 - RNA, 19 nt, Homo sapiens
  misc_RNA (1)...(19): siRNA sense strand
aaagaaccuugacuucauu

SEQ ID NO: 525541 - RNA, 19 nt, Homo sapiens
  misc_RNA (1)...(19): siRNA sense strand
ugaaugacauguaucucaa

SEQ ID NO: 525542 - RNA, 19 nt, Homo sapiens
  misc_RNA (1)...(19): siRNA sense strand
ggaugaaaccuaccugaug

SEQ ID NO: 525543 - RNA, 19 nt, Homo sapiens
  misc_RNA (1)...(19): siRNA sense strand
guaaagaaccuugacuuca

SEQ ID NO: 525544 - RNA, 19 nt, Homo sapiens
  misc_RNA (1)...(19): siRNA sense strand
gagauguucugcugcuaug

SEQ ID NO: 525545 - RNA, 19 nt, Homo sapiens
  misc_RNA (1)...(19): siRNA sense strand
ugucuuggauguugucauu

SEQ ID NO: 525546 - RNA, 19 nt, Homo sapiens
  misc_RNA (1)...(19): siRNA sense strand
uuucacagcugcaaagaga

SEQ ID NO: 525547 - RNA, 19 nt, Homo sapiens
  misc_RNA (1)...(19): siRNA sense strand
cgacaagucccugcaguuu

SEQ ID NO: 525548 - RNA, 19 nt, Homo sapiens
  misc_RNA (1)...(19): siRNA sense strand
gcucagaacagcagcauca

SEQ ID NO: 525549 - RNA, 19 nt, Homo sapiens
  misc_RNA (1)...(19): siRNA sense strand
ugacauguaucucaacaac

SEQ ID NO: 525550 - RNA, 19 nt, Homo sapiens
  misc_RNA (1)...(19): siRNA sense strand
gggacucgcuggacaugau

SEQ ID NO: 525551 - RNA, 19 nt, Homo sapiens
  misc_RNA (1)...(19): siRNA sense strand
gcaugaagcaauacuaugg

SEQ ID NO: 525552 - RNA, 19 nt, Homo sapiens
  misc_RNA (1)...(19): siRNA sense strand
gaaauucaaggccacuuag

SEQ ID NO: 525553 - RNA, 19 nt, Homo sapiens
  misc_RNA (1)...(19): siRNA sense strand
ucuuggauguugucauuaa

SEQ ID NO: 525554 - RNA, 19 nt, Homo sapiens
  misc_RNA (1)...(19): siRNA sense strand
caucguagccugcugcaau

SEQ ID NO: 525555 - RNA, 19 nt, Homo sapiens
  misc_RNA (1)...(19): siRNA sense strand
ggaagagccaggccauugu

SEQ ID NO: 525556 - RNA, 19 nt, Homo sapiens
  misc_RNA (1)...(19): siRNA sense strand
ccacaaccacggagauguu

SEQ ID NO: 525557 - RNA, 19 nt, Homo sapiens
  misc_RNA (1)...(19): siRNA sense strand
aagaaagccucauugacau

SEQ ID NO: 525558 - RNA, 19 nt, Homo sapiens
  misc_RNA (1)...(19): siRNA sense strand
ccucaucucugguguacuc

SEQ ID NO: 525559 - RNA, 19 nt, Homo sapiens
  misc_RNA (1)...(19): siRNA sense strand
ggagauguucugcugcuau

SEQ ID NO: 525560 - RNA, 19 nt, Homo sapiens
  misc_RNA (1)...(19): siRNA sense strand
gagcguuugccuccaauug

SEQ ID NO: 525561 - RNA, 19 nt, Homo sapiens
  misc_RNA (1)...(19): siRNA sense strand
gacgagcguuugccuccaa

SEQ ID NO: 525562 - RNA, 19 nt, Homo sapiens
  misc_RNA (1)...(19): siRNA sense strand
gaagagccaggccauugug

SEQ ID NO: 525563 - RNA, 19 nt, Homo sapiens
  misc_RNA (1)...(19): siRNA sense strand
gaauaguaaagaaccuuga

SEQ ID NO: 525564 - RNA, 19 nt, Homo sapiens
  misc_RNA (1)...(19): siRNA sense strand
gaaaugcuccccggaaauu

SEQ ID NO: 525565 - RNA, 19 nt, Homo sapiens
  misc_RNA (1)...(19): siRNA sense strand
ugacuucauugucuauaag

SEQ ID NO: 525566 - RNA, 19 nt, Homo sapiens
  misc_RNA (1)...(19): siRNA sense strand
ggaagaaagccucauugac

SEQ ID NO: 525567 - RNA, 19 nt, Homo sapiens
  misc_RNA (1)...(19): siRNA sense strand
ggcggaggcuacagcaaga

SEQ ID NO: 525568 - RNA, 19 nt, Homo sapiens
  misc_RNA (1)...(19): siRNA sense strand
cuacugagagcaagccauu

SEQ ID NO: 525569 - RNA, 19 nt, Homo sapiens
  misc_RNA (1)...(19): siRNA sense strand
gaucuguucacucaguuga

SEQ ID NO: 525570 - RNA, 19 nt, Homo sapiens
  misc_RNA (1)...(19): siRNA sense strand
gaaccuugacuucauuguc

SEQ ID NO: 525571 - RNA, 19 nt, Homo sapiens
  misc_RNA (1)...(19): siRNA sense strand
gacaagucccugcaguuug

SEQ ID NO: 525572 - RNA, 19 nt, Homo sapiens
  misc_RNA (1)...(19): siRNA sense strand
gccacuccauucccacuga

SEQ ID NO: 525573 - RNA, 19 nt, Homo sapiens
  misc_RNA (1)...(19): siRNA sense strand
caaaagcuguggaagaaag

SEQ ID NO: 525574 - RNA, 19 nt, Homo sapiens
  misc_RNA (1)...(19): siRNA sense strand
ggauggccauugacaacca

SEQ ID NO: 525575 - RNA, 19 nt, Homo sapiens
  misc_RNA (1)...(19): siRNA sense strand
ccagggacaccaaccuuga

SEQ ID NO: 525576 - RNA, 19 nt, Homo sapiens
  misc_RNA (1)...(19): siRNA sense strand
gcagaaaugcagcccugau

SEQ ID NO: 525577 - RNA, 19 nt, Homo sapiens
  misc_RNA (1)...(19): siRNA sense strand
uggaagaaagccucauuga

SEQ ID NO: 525578 - RNA, 19 nt, Homo sapiens
  misc_RNA (1)...(19): siRNA sense strand
gggaucuguucacucaguu

SEQ ID NO: 525579 - RNA, 19 nt, Homo sapiens
  misc_RNA (1)...(19): siRNA sense strand
cagaaaugcagcccugaug

SEQ ID NO: 525580 - RNA, 19 nt, Homo sapiens
  misc_RNA (1)...(19): siRNA sense strand
ucugaguacuggcugaaug

SEQ ID NO: 525581 - RNA, 19 nt, Homo sapiens
  misc_RNA (1)...(19): siRNA sense strand
gaugaccagcugagguuug

SEQ ID NO: 525582 - RNA, 19 nt, Homo sapiens
  misc_RNA (1)...(19): siRNA sense strand
gcgcugcaucugccuugua

SEQ ID NO: 525583 - RNA, 19 nt, Homo sapiens
  misc_RNA (1)...(19): siRNA sense strand
cugcugcaaucaguucuuu

SEQ ID NO: 525584 - RNA, 19 nt, Homo sapiens
  misc_RNA (1)...(19): siRNA sense strand
ucaguucuuugucuuggau

SEQ ID NO: 525585 - RNA, 19 nt, Homo sapiens
  misc_RNA (1)...(19): siRNA sense strand
gguuuguccucuccacuag

SEQ ID NO: 525586 - RNA, 19 nt, Homo sapiens
  misc_RNA (1)...(19): siRNA sense strand
agcagacccuggccacgua

SEQ ID NO: 525587 - RNA, 19 nt, Homo sapiens
  misc_RNA (1)...(19): siRNA sense strand
aaccuugacuucauugucu

SEQ ID NO: 525588 - RNA, 19 nt, Homo sapiens
  misc_RNA (1)...(19): siRNA sense strand
ggacucgcuggacaugauu

SEQ ID NO: 525589 - RNA, 19 nt, Homo sapiens
  misc_RNA (1)...(19): siRNA sense strand
guagccugcugcaaucagu

SEQ ID NO: 525590 - RNA, 19 nt, Homo sapiens
  misc_RNA (1)...(19): siRNA sense strand
gcugcaaucaguucuuugu

SEQ ID NO: 525591 - RNA, 19 nt, Homo sapiens
  misc_RNA (1)...(19): siRNA sense strand
ucucugguguacucagcua

SEQ ID NO: 525592 - RNA, 19 nt, Homo sapiens
  misc_RNA (1)...(19): siRNA sense strand
ugcaaaagcuguggaagaa

SEQ ID NO: 525593 - RNA, 19 nt, Homo sapiens
  misc_RNA (1)...(19): siRNA sense strand
ccgaugaccagcugagguu

SEQ ID NO: 525594 - RNA, 19 nt, Homo sapiens
  misc_RNA (1)...(19): siRNA sense strand
acacgcugguggcucagaa

SEQ ID NO: 525595 - RNA, 19 nt, Homo sapiens
  misc_RNA (1)...(19): siRNA sense strand
caacugggugucugaguac

SEQ ID NO: 525596 - RNA, 19 nt, Homo sapiens
  misc_RNA (1)...(19): siRNA sense strand
aaugacauguaucucaaca

SEQ ID NO: 525597 - RNA, 19 nt, Homo sapiens
  misc_RNA (1)...(19): siRNA sense strand
ugcaaucaguucuuugucu

SEQ ID NO: 525598 - RNA, 19 nt, Homo sapiens
  misc_RNA (1)...(19): siRNA sense strand
cugaaugacauguaucuca

SEQ ID NO: 525599 - RNA, 19 nt, Homo sapiens
  misc_RNA (1)...(19): siRNA sense strand
uaguaaagaaccuugacuu

SEQ ID NO: 525600 - RNA, 19 nt, Homo sapiens
  misc_RNA (1)...(19): siRNA sense strand
ggagcugcccgagauguuc

SEQ ID NO: 525601 - RNA, 19 nt, Homo sapiens
  misc_RNA (1)...(19): siRNA sense strand
aggaagagccaggccauug

SEQ ID NO: 525602 - RNA, 19 nt, Homo sapiens
  misc_RNA (1)...(19): siRNA sense strand
guggaagaaagccucauug

SEQ ID NO: 525603 - RNA, 19 nt, Homo sapiens
  misc_RNA (1)...(19): siRNA sense strand
ugcccgagauguucaugga

SEQ ID NO: 525604 - RNA, 19 nt, Homo sapiens
  misc_RNA (1)...(19): siRNA sense strand
gagcugcccgagauguuca

SEQ ID NO: 525605 - RNA, 19 nt, Homo sapiens
  misc_RNA (1)...(19): siRNA sense strand
acacagucauggccauaac

SEQ ID NO: 525606 - RNA, 19 nt, Homo sapiens
  misc_RNA (1)...(19): siRNA sense strand
ggcacuggcuuuugugaga

SEQ ID NO: 525607 - RNA, 19 nt, Homo sapiens
  misc_RNA (1)...(19): siRNA sense strand
aguacuggcugaaugacau

SEQ ID NO: 525608 - RNA, 19 nt, Homo sapiens
  misc_RNA (1)...(19): siRNA sense strand
cgcugcaucugccuuguau

SEQ ID NO: 525609 - RNA, 19 nt, Homo sapiens
  misc_RNA (1)...(19): siRNA sense strand
caaucaguucuuugucuug

SEQ ID NO: 525610 - RNA, 19 nt, Homo sapiens
  misc_RNA (1)...(19): siRNA sense strand
ucagaacagcagcaucaug

SEQ ID NO: 525611 - RNA, 19 nt, Homo sapiens
  misc_RNA (1)...(19): siRNA sense strand
guccuguggucccaaaugg

SEQ ID NO: 525612 - RNA, 19 nt, Homo sapiens
  misc_RNA (1)...(19): siRNA sense strand
cagaggcacuggcuuuugu

SEQ ID NO: 525613 - RNA, 19 nt, Homo sapiens
  misc_RNA (1)...(19): siRNA sense strand
cuacaggcuccaccgaaga

SEQ ID NO: 525614 - RNA, 19 nt, Homo sapiens
  misc_RNA (1)...(19): siRNA sense strand
aguaaagaaccuugacuuc

SEQ ID NO: 525615 - RNA, 19 nt, Homo sapiens
  misc_RNA (1)...(19): siRNA sense strand
ggauguugucauuaauuuc

SEQ ID NO: 525616 - RNA, 19 nt, Homo sapiens
  misc_RNA (1)...(19): siRNA sense strand
gaagaaagccucauugaca

SEQ ID NO: 525617 - RNA, 19 nt, Homo sapiens
  misc_RNA (1)...(19): siRNA sense strand
gaugaaaccuaccugauga

SEQ ID NO: 525618 - RNA, 19 nt, Homo sapiens
  misc_RNA (1)...(19): siRNA sense strand
gcaaggagcugcccgagau

SEQ ID NO: 525619 - RNA, 19 nt, Homo sapiens
  misc_RNA (1)...(19): siRNA sense strand
uaacagggauggccauuga

SEQ ID NO: 525620 - RNA, 19 nt, Homo sapiens
  misc_RNA (1)...(19): siRNA sense strand
uaaagaaccuugacuucau

SEQ ID NO: 525621 - RNA, 19 nt, Homo sapiens
  misc_RNA (1)...(19): siRNA sense strand
ggaaauucaaggccacuua

SEQ ID NO: 525622 - RNA, 19 nt, Homo sapiens
  misc_RNA (1)...(19): siRNA sense strand
ccaacugggugucugagua

SEQ ID NO: 525623 - RNA, 19 nt, Homo sapiens
  misc_RNA (1)...(19): siRNA sense strand
gcaaucaguucuuugucuu

SEQ ID NO: 525624 - RNA, 19 nt, Homo sapiens
  misc_RNA (1)...(19): siRNA sense strand
gaggagcaguucaggaaga

SEQ ID NO: 525625 - RNA, 19 nt, Homo sapiens
  misc_RNA (1)...(19): siRNA sense strand
aaaccuaccugaugagcaa

SEQ ID NO: 525626 - RNA, 19 nt, Homo sapiens
  misc_RNA (1)...(19): siRNA sense strand
gcaauacuaugggcucuuc

SEQ ID NO: 525627 - RNA, 19 nt, Homo sapiens
  misc_RNA (1)...(19): siRNA sense strand
gggaaaacauucauuaaga

SEQ ID NO: 525628 - RNA, 19 nt, Homo sapiens
  misc_RNA (1)...(19): siRNA sense strand
aaagaaccuugacuucauu

SEQ ID NO: 525629 - RNA, 19 nt, Homo sapiens
  misc_RNA (1)...(19): siRNA sense strand
ugaaugacauguaucucaa

SEQ ID NO: 525630 - RNA, 19 nt, Homo sapiens
  misc_RNA (1)...(19): siRNA sense strand
ggaugaaaccuaccugaug

SEQ ID NO: 525631 - RNA, 19 nt, Homo sapiens
  misc_RNA (1)...(19): siRNA sense strand
guaaagaaccuugacuuca

SEQ ID NO: 525632 - RNA, 19 nt, Homo sapiens
  misc_RNA (1)...(19): siRNA sense strand
gagauguucugcugcuaug

SEQ ID NO: 525633 - RNA, 19 nt, Homo sapiens
  misc_RNA (1)...(19): siRNA sense strand
ugucuuggauguugucauu

SEQ ID NO: 525634 - RNA, 19 nt, Homo sapiens
  misc_RNA (1)...(19): siRNA sense strand
uuucacagcugcaaagaga

SEQ ID NO: 525635 - RNA, 19 nt, Homo sapiens
  misc_RNA (1)...(19): siRNA sense strand
cgacaagucccugcaguuu

SEQ ID NO: 525636 - RNA, 19 nt, Homo sapiens
  misc_RNA (1)...(19): siRNA sense strand
gcucagaacagcagcauca

SEQ ID NO: 525637 - RNA, 19 nt, Homo sapiens
  misc_RNA (1)...(19): siRNA sense strand
ugacauguaucucaacaac

SEQ ID NO: 525638 - RNA, 19 nt, Homo sapiens
  misc_RNA (1)...(19): siRNA sense strand
gcaccaggacucaccaaga

SEQ ID NO: 525639 - RNA, 19 nt, Homo sapiens
  misc_RNA (1)...(19): siRNA sense strand
gggacucgcuggacaugau

SEQ ID NO: 525640 - RNA, 19 nt, Homo sapiens
  misc_RNA (1)...(19): siRNA sense strand
gcaugaagcaauacuaugg

SEQ ID NO: 525641 - RNA, 19 nt, Homo sapiens
  misc_RNA (1)...(19): siRNA sense strand
gaaauucaaggccacuuag

SEQ ID NO: 525642 - RNA, 19 nt, Homo sapiens
  misc_RNA (1)...(19): siRNA sense strand
ucuuggauguugucauuaa

SEQ ID NO: 525643 - RNA, 19 nt, Homo sapiens
  misc_RNA (1)...(19): siRNA sense strand
ggaagagccaggccauugu

SEQ ID NO: 525644 - RNA, 19 nt, Homo sapiens
  misc_RNA (1)...(19): siRNA sense strand
caucguagccugcugcaau

SEQ ID NO: 525645 - RNA, 19 nt, Homo sapiens
  misc_RNA (1)...(19): siRNA sense strand
ccacaaccacggagauguu

SEQ ID NO: 525646 - RNA, 19 nt, Homo sapiens
  misc_RNA (1)...(19): siRNA sense strand
aagaaagccucauugacau

SEQ ID NO: 525647 - RNA, 19 nt, Homo sapiens
  misc_RNA (1)...(19): siRNA sense strand
ccucaucucugguguacuc

SEQ ID NO: 525648 - RNA, 19 nt, Homo sapiens
  misc_RNA (1)...(19): siRNA sense strand
ggagauguucugcugcuau

SEQ ID NO: 525649 - RNA, 19 nt, Homo sapiens
  misc_RNA (1)...(19): siRNA sense strand
gagcguuugccuccaauug

SEQ ID NO: 525650 - RNA, 19 nt, Homo sapiens
  misc_RNA (1)...(19): siRNA sense strand
gacgagcguuugccuccaa

SEQ ID NO: 525651 - RNA, 19 nt, Homo sapiens
  misc_RNA (1)...(19): siRNA sense strand
gaagagccaggccauugug

SEQ ID NO: 525652 - RNA, 19 nt, Homo sapiens
  misc_RNA (1)...(19): siRNA sense strand
gaauaguaaagaaccuuga

SEQ ID NO: 525653 - RNA, 19 nt, Homo sapiens
  misc_RNA (1)...(19): siRNA sense strand
gaaaugcuccccggaaauu

SEQ ID NO: 525654 - RNA, 19 nt, Homo sapiens
  misc_RNA (1)...(19): siRNA sense strand
ugacuucauugucuauaag

SEQ ID NO: 525655 - RNA, 19 nt, Homo sapiens
  misc_RNA (1)...(19): siRNA sense strand
ggaagaaagccucauugac

SEQ ID NO: 525656 - RNA, 19 nt, Homo sapiens
  misc_RNA (1)...(19): siRNA sense strand
ggcggaggcuacagcaaga

SEQ ID NO: 525657 - RNA, 19 nt, Homo sapiens
  misc_RNA (1)...(19): siRNA sense strand
cuacugagagcaagccauu

SEQ ID NO: 525658 - RNA, 19 nt, Homo sapiens
  misc_RNA (1)...(19): siRNA sense strand
gaucuguucacucaguuga

SEQ ID NO: 525659 - RNA, 19 nt, Homo sapiens
  misc_RNA (1)...(19): siRNA sense strand
gaaccuugacuucauuguc

SEQ ID NO: 525660 - RNA, 19 nt, Homo sapiens
  misc_RNA (1)...(19): siRNA sense strand
gacaagucccugcaguuug

SEQ ID NO: 525661 - RNA, 19 nt, Homo sapiens
  misc_RNA (1)...(19): siRNA sense strand
gccacuccauucccacuga

SEQ ID NO: 525662 - RNA, 19 nt, Homo sapiens
  misc_RNA (1)...(19): siRNA sense strand
caaaagcuguggaagaaag

SEQ ID NO: 525663 - RNA, 19 nt, Homo sapiens
  misc_RNA (1)...(19): siRNA sense strand
ggauggccauugacaacca

SEQ ID NO: 525664 - RNA, 19 nt, Homo sapiens
  misc_RNA (1)...(19): siRNA sense strand
ccagggacaccaaccuuga

SEQ ID NO: 525665 - RNA, 19 nt, Homo sapiens
  misc_RNA (1)...(19): siRNA sense strand
gcagaaaugcagcccugau

SEQ ID NO: 525666 - RNA, 19 nt, Homo sapiens
  misc_RNA (1)...(19): siRNA sense strand
uggaagaaagccucauuga

SEQ ID NO: 525667 - RNA, 19 nt, Homo sapiens
  misc_RNA (1)...(19): siRNA sense strand
caccaggacucaccaagac

SEQ ID NO: 525668 - RNA, 19 nt, Homo sapiens
  misc_RNA (1)...(19): siRNA sense strand
gggaucuguucacucaguu

SEQ ID NO: 525669 - RNA, 19 nt, Homo sapiens
  misc_RNA (1)...(19): siRNA sense strand
cagaaaugcagcccugaug

SEQ ID NO: 525670 - RNA, 19 nt, Homo sapiens
  misc_RNA (1)...(19): siRNA sense strand
caagacgcccauccuggaa

SEQ ID NO: 525671 - RNA, 19 nt, Homo sapiens
  misc_RNA (1)...(19): siRNA sense strand
ucugaguacuggcugaaug

SEQ ID NO: 525672 - RNA, 19 nt, Homo sapiens
  misc_RNA (1)...(19): siRNA sense strand
gaugaccagcugagguuug

SEQ ID NO: 525673 - RNA, 19 nt, Homo sapiens
  misc_RNA (1)...(19): siRNA sense strand
gcgcugcaucugccuugua

SEQ ID NO: 525674 - RNA, 19 nt, Homo sapiens
  misc_RNA (1)...(19): siRNA sense strand
cugcugcaaucaguucuuu

SEQ ID NO: 525675 - RNA, 19 nt, Homo sapiens
  misc_RNA (1)...(19): siRNA sense strand
ucaguucuuugucuuggau

SEQ ID NO: 525676 - RNA, 19 nt, Homo sapiens
  misc_RNA (1)...(19): siRNA sense strand
gguuuguccucuccacuag

SEQ ID NO: 525677 - RNA, 19 nt, Homo sapiens
  misc_RNA (1)...(19): siRNA sense strand
aaccuugacuucauugucu

SEQ ID NO: 525678 - RNA, 19 nt, Homo sapiens
  misc_RNA (1)...(19): siRNA sense strand
agcagacccuggccacgua

SEQ ID NO: 525679 - RNA, 19 nt, Homo sapiens
  misc_RNA (1)...(19): siRNA sense strand
ggacucgcuggacaugauu

SEQ ID NO: 525680 - RNA, 19 nt, Homo sapiens
  misc_RNA (1)...(19): siRNA sense strand
guagccugcugcaaucagu

SEQ ID NO: 525681 - RNA, 19 nt, Homo sapiens
  misc_RNA (1)...(19): siRNA sense strand
gcugcaaucaguucuuugu

SEQ ID NO: 525682 - RNA, 19 nt, Homo sapiens
  misc_RNA (1)...(19): siRNA sense strand
ccgaugaccagcugagguu

SEQ ID NO: 525683 - RNA, 19 nt, Homo sapiens
  misc_RNA (1)...(19): siRNA sense strand
ugcaaaagcuguggaagaa

SEQ ID NO: 525684 - RNA, 19 nt, Homo sapiens
  misc_RNA (1)...(19): siRNA sense strand
acacgcugguggcucagaa

SEQ ID NO: 525685 - RNA, 19 nt, Homo sapiens
  misc_RNA (1)...(19): siRNA sense strand
ucucugguguacucagcua

SEQ ID NO: 525686 - RNA, 19 nt, Homo sapiens
  misc_RNA (1)...(19): siRNA sense strand
aaugacauguaucucaaca

SEQ ID NO: 525687 - RNA, 19 nt, Homo sapiens
  misc_RNA (1)...(19): siRNA sense strand
caacugggugucugaguac

SEQ ID NO: 525688 - RNA, 19 nt, Homo sapiens
  misc_RNA (1)...(19): siRNA sense strand
ugcaaucaguucuuugucu

SEQ ID NO: 525689 - RNA, 19 nt, Homo sapiens
  misc_RNA (1)...(19): siRNA sense strand
cugaaugacauguaucuca

SEQ ID NO: 525690 - RNA, 19 nt, Homo sapiens
  misc_RNA (1)...(19): siRNA sense strand
uaguaaagaaccuugacuu

SEQ ID NO: 525691 - RNA, 19 nt, Homo sapiens
  misc_RNA (1)...(19): siRNA sense strand
ggagcugcccgagauguuc

SEQ ID NO: 525692 - RNA, 19 nt, Homo sapiens
  misc_RNA (1)...(19): siRNA sense strand
caaucaguucuuugucuug

SEQ ID NO: 525693 - RNA, 19 nt, Homo sapiens
  misc_RNA (1)...(19): siRNA sense strand
guggaagaaagccucauug

SEQ ID NO: 525694 - RNA, 19 nt, Homo sapiens
  misc_RNA (1)...(19): siRNA sense strand
ugcccgagauguucaugga

SEQ ID NO: 525695 - RNA, 19 nt, Homo sapiens
  misc_RNA (1)...(19): siRNA sense strand
gagcugcccgagauguuca

SEQ ID NO: 525696 - RNA, 19 nt, Homo sapiens
  misc_RNA (1)...(19): siRNA sense strand
acacagucauggccauaac

SEQ ID NO: 525697 - RNA, 19 nt, Homo sapiens
  misc_RNA (1)...(19): siRNA sense strand
ggcacuggcuuuugugaga

SEQ ID NO: 525698 - RNA, 19 nt, Homo sapiens
  misc_RNA (1)...(19): siRNA sense strand
aguacuggcugaaugacau

SEQ ID NO: 525699 - RNA, 19 nt, Homo sapiens
  misc_RNA (1)...(19): siRNA sense strand
cgcugcaucugccuuguau

SEQ ID NO: 525700 - RNA, 19 nt, Homo sapiens
  misc_RNA (1)...(19): siRNA sense strand
aggaagagccaggccauug

SEQ ID NO: 525701 - RNA, 19 nt, Homo sapiens
  misc_RNA (1)...(19): siRNA sense strand
ucagaacagcagcaucaug

SEQ ID NO: 525702 - RNA, 19 nt, Homo sapiens
  misc_RNA (1)...(19): siRNA sense strand
guccuguggucccaaaugg

SEQ ID NO: 525703 - RNA, 19 nt, Homo sapiens
  misc_RNA (1)...(19): siRNA sense strand
cagaggcacuggcuuuugu

SEQ ID NO: 525704 - RNA, 19 nt, Homo sapiens
  misc_RNA (1)...(19): siRNA sense strand
cuacaggcuccaccgaaga

SEQ ID NO: 525705 - RNA, 19 nt, Homo sapiens
  misc_RNA (1)...(19): siRNA sense strand
aguaaagaaccuugacuuc

SEQ ID NO: 525706 - RNA, 19 nt, Homo sapiens
  misc_RNA (1)...(19): siRNA sense strand
ggauguugucauuaauuuc

SEQ ID NO: 525707 - RNA, 19 nt, Homo sapiens
  misc_RNA (1)...(19): siRNA sense strand
gaagaaagccucauugaca

SEQ ID NO: 525708 - RNA, 19 nt, Homo sapiens
  misc_RNA (1)...(19): siRNA sense strand
gaugaaaccuaccugauga

SEQ ID NO: 525709 - RNA, 19 nt, Homo sapiens
  misc_RNA (1)...(19): siRNA sense strand
gcaaggagcugcccgagau

SEQ ID NO: 525710 - RNA, 19 nt, Homo sapiens
  misc_RNA (1)...(19): siRNA sense strand
uaacagggauggccauuga

SEQ ID NO: 525711 - RNA, 19 nt, Homo sapiens
  misc_RNA (1)...(19): siRNA sense strand
uaaagaaccuugacuucau

SEQ ID NO: 525712 - RNA, 19 nt, Homo sapiens
  misc_RNA (1)...(19): siRNA sense strand
ggaaauucaaggccacuua

SEQ ID NO: 525713 - RNA, 19 nt, Homo sapiens
  misc_RNA (1)...(19): siRNA sense strand
ccaacugggugucugagua

SEQ ID NO: 525714 - RNA, 19 nt, Homo sapiens
  misc_RNA (1)...(19): siRNA sense strand
gcaaucaguucuuugucuu

SEQ ID NO: 525715 - RNA, 19 nt, Homo sapiens
  misc_RNA (1)...(19): siRNA sense strand
gaggagcaguucaggaaga

SEQ ID NO: 525716 - RNA, 19 nt, Homo sapiens
  misc_RNA (1)...(19): siRNA sense strand
aaaccuaccugaugagcaa

SEQ ID NO: 525717 - RNA, 19 nt, Homo sapiens
  misc_RNA (1)...(19): siRNA sense strand
gcaauacuaugggcucuuc

SEQ ID NO: 525718 - RNA, 19 nt, Homo sapiens
  misc_RNA (1)...(19): siRNA sense strand
gggaaaacauucauuaaga

SEQ ID NO: 525719 - RNA, 19 nt, Homo sapiens
  misc_RNA (1)...(19): siRNA sense strand
aaagaaccuugacuucauu

SEQ ID NO: 525720 - RNA, 19 nt, Homo sapiens
  misc_RNA (1)...(19): siRNA sense strand
ugaaugacauguaucucaa

SEQ ID NO: 525721 - RNA, 19 nt, Homo sapiens
  misc_RNA (1)...(19): siRNA sense strand
ggaugaaaccuaccugaug

SEQ ID NO: 525722 - RNA, 19 nt, Homo sapiens
  misc_RNA (1)...(19): siRNA sense strand
guaaagaaccuugacuuca

SEQ ID NO: 525723 - RNA, 19 nt, Homo sapiens
  misc_RNA (1)...(19): siRNA sense strand
gagauguucugcugcuaug

SEQ ID NO: 525724 - RNA, 19 nt, Homo sapiens
  misc_RNA (1)...(19): siRNA sense strand
ugucuuggauguugucauu

SEQ ID NO: 525725 - RNA, 19 nt, Homo sapiens
  misc_RNA (1)...(19): siRNA sense strand
uuucacagcugcaaagaga

SEQ ID NO: 525726 - RNA, 19 nt, Homo sapiens
  misc_RNA (1)...(19): siRNA sense strand
cgacaagucccugcaguuu

SEQ ID NO: 525727 - RNA, 19 nt, Homo sapiens
  misc_RNA (1)...(19): siRNA sense strand
gcucagaacagcagcauca

SEQ ID NO: 525728 - RNA, 19 nt, Homo sapiens
  misc_RNA (1)...(19): siRNA sense strand
ugacauguaucucaacaac

SEQ ID NO: 525729 - RNA, 19 nt, Homo sapiens
  misc_RNA (1)...(19): siRNA sense strand
gggacucgcuggacaugau

SEQ ID NO: 525730 - RNA, 19 nt, Homo sapiens
  misc_RNA (1)...(19): siRNA sense strand
gcaugaagcaauacuaugg

SEQ ID NO: 525731 - RNA, 19 nt, Homo sapiens
  misc_RNA (1)...(19): siRNA sense strand
gaaauucaaggccacuuag

SEQ ID NO: 525732 - RNA, 19 nt, Homo sapiens
  misc_RNA (1)...(19): siRNA sense strand
ucuuggauguugucauuaa

SEQ ID NO: 525733 - RNA, 19 nt, Homo sapiens
  misc_RNA (1)...(19): siRNA sense strand
caucguagccugcugcaau

SEQ ID NO: 525734 - RNA, 19 nt, Homo sapiens
  misc_RNA (1)...(19): siRNA sense strand
ggaagagccaggccauugu

SEQ ID NO: 525735 - RNA, 19 nt, Homo sapiens
  misc_RNA (1)...(19): siRNA sense strand
ccacaaccacggagauguu

SEQ ID NO: 525736 - RNA, 19 nt, Homo sapiens
  misc_RNA (1)...(19): siRNA sense strand
aagaaagccucauugacau

SEQ ID NO: 525737 - RNA, 19 nt, Homo sapiens
  misc_RNA (1)...(19): siRNA sense strand
ccucaucucugguguacuc

SEQ ID NO: 525738 - RNA, 19 nt, Homo sapiens
  misc_RNA (1)...(19): siRNA sense strand
ggagauguucugcugcuau

SEQ ID NO: 525739 - RNA, 19 nt, Homo sapiens
  misc_RNA (1)...(19): siRNA sense strand
gagcguuugccuccaauug

SEQ ID NO: 525740 - RNA, 19 nt, Homo sapiens
  misc_RNA (1)...(19): siRNA sense strand
gacgagcguuugccuccaa

SEQ ID NO: 525741 - RNA, 19 nt, Homo sapiens
  misc_RNA (1)...(19): siRNA sense strand
gaagagccaggccauugug

SEQ ID NO: 525742 - RNA, 19 nt, Homo sapiens
  misc_RNA (1)...(19): siRNA sense strand
gaauaguaaagaaccuuga

SEQ ID NO: 525743 - RNA, 19 nt, Homo sapiens
  misc_RNA (1)...(19): siRNA sense strand
gaaaugcuccccggaaauu

SEQ ID NO: 525744 - RNA, 19 nt, Homo sapiens
  misc_RNA (1)...(19): siRNA sense strand
ugacuucauugucuauaag

SEQ ID NO: 525745 - RNA, 19 nt, Homo sapiens
  misc_RNA (1)...(19): siRNA sense strand
ggaagaaagccucauugac

SEQ ID NO: 525746 - RNA, 19 nt, Homo sapiens
  misc_RNA (1)...(19): siRNA sense strand
ggcggaggcuacagcaaga

SEQ ID NO: 525747 - RNA, 19 nt, Homo sapiens
  misc_RNA (1)...(19): siRNA sense strand
cuacugagagcaagccauu

SEQ ID NO: 525748 - RNA, 19 nt, Homo sapiens
  misc_RNA (1)...(19): siRNA sense strand
gaucuguucacucaguuga

SEQ ID NO: 525749 - RNA, 19 nt, Homo sapiens
  misc_RNA (1)...(19): siRNA sense strand
gaaccuugacuucauuguc

SEQ ID NO: 525750 - RNA, 19 nt, Homo sapiens
  misc_RNA (1)...(19): siRNA sense strand
gacaagucccugcaguuug

SEQ ID NO: 525751 - RNA, 19 nt, Homo sapiens
  misc_RNA (1)...(19): siRNA sense strand
gccacuccauucccacuga

SEQ ID NO: 525752 - RNA, 19 nt, Homo sapiens
  misc_RNA (1)...(19): siRNA sense strand
caaaagcuguggaagaaag

SEQ ID NO: 525753 - RNA, 19 nt, Homo sapiens
  misc_RNA (1)...(19): siRNA sense strand
ggauggccauugacaacca

SEQ ID NO: 525754 - RNA, 19 nt, Homo sapiens
  misc_RNA (1)...(19): siRNA sense strand
ccagggacaccaaccuuga

SEQ ID NO: 525755 - RNA, 19 nt, Homo sapiens
  misc_RNA (1)...(19): siRNA sense strand
gcagaaaugcagcccugau

SEQ ID NO: 525756 - RNA, 19 nt, Homo sapiens
  misc_RNA (1)...(19): siRNA sense strand
uggaagaaagccucauuga

SEQ ID NO: 525757 - RNA, 19 nt, Homo sapiens
  misc_RNA (1)...(19): siRNA sense strand
gggaucuguucacucaguu

SEQ ID NO: 525758 - RNA, 19 nt, Homo sapiens
  misc_RNA (1)...(19): siRNA sense strand
cagaaaugcagcccugaug

SEQ ID NO: 525759 - RNA, 19 nt, Homo sapiens
  misc_RNA (1)...(19): siRNA sense strand
ucugaguacuggcugaaug

SEQ ID NO: 525760 - RNA, 19 nt, Homo sapiens
  misc_RNA (1)...(19): siRNA sense strand
gaugaccagcugagguuug

SEQ ID NO: 525761 - RNA, 19 nt, Homo sapiens
  misc_RNA (1)...(19): siRNA sense strand
gcgcugcaucugccuugua

SEQ ID NO: 525762 - RNA, 19 nt, Homo sapiens
  misc_RNA (1)...(19): siRNA sense strand
cugcugcaaucaguucuuu

SEQ ID NO: 525763 - RNA, 19 nt, Homo sapiens
  misc_RNA (1)...(19): siRNA sense strand
ucaguucuuugucuuggau

SEQ ID NO: 525764 - RNA, 19 nt, Homo sapiens
  misc_RNA (1)...(19): siRNA sense strand
gguuuguccucuccacuag

SEQ ID NO: 525765 - RNA, 19 nt, Homo sapiens
  misc_RNA (1)...(19): siRNA sense strand
agcagacccuggccacgua

SEQ ID NO: 525766 - RNA, 19 nt, Homo sapiens
  misc_RNA (1)...(19): siRNA sense strand
aaccuugacuucauugucu

SEQ ID NO: 525767 - RNA, 19 nt, Homo sapiens
  misc_RNA (1)...(19): siRNA sense strand
ggacucgcuggacaugauu

SEQ ID NO: 525768 - RNA, 19 nt, Homo sapiens
  misc_RNA (1)...(19): siRNA sense strand
guagccugcugcaaucagu

SEQ ID NO: 525769 - RNA, 19 nt, Homo sapiens
  misc_RNA (1)...(19): siRNA sense strand
gcugcaaucaguucuuugu

SEQ ID NO: 525770 - RNA, 19 nt, Homo sapiens
  misc_RNA (1)...(19): siRNA sense strand
ucucugguguacucagcua

SEQ ID NO: 525771 - RNA, 19 nt, Homo sapiens
  misc_RNA (1)...(19): siRNA sense strand
ugcaaaagcuguggaagaa

SEQ ID NO: 525772 - RNA, 19 nt, Homo sapiens
  misc_RNA (1)...(19): siRNA sense strand
ccgaugaccagcugagguu

SEQ ID NO: 525773 - RNA, 19 nt, Homo sapiens
  misc_RNA (1)...(19): siRNA sense strand
acacgcugguggcucagaa

SEQ ID NO: 525774 - RNA, 19 nt, Homo sapiens
  misc_RNA (1)...(19): siRNA sense strand
caacugggugucugaguac

SEQ ID NO: 525775 - RNA, 19 nt, Homo sapiens
  misc_RNA (1)...(19): siRNA sense strand
aaugacauguaucucaaca

SEQ ID NO: 525776 - RNA, 19 nt, Homo sapiens
  misc_RNA (1)...(19): siRNA sense strand
ugcaaucaguucuuugucu

SEQ ID NO: 525777 - RNA, 19 nt, Homo sapiens
  misc_RNA (1)...(19): siRNA sense strand
cugaaugacauguaucuca

SEQ ID NO: 525778 - RNA, 19 nt, Homo sapiens
  misc_RNA (1)...(19): siRNA sense strand
uaguaaagaaccuugacuu

SEQ ID NO: 525779 - RNA, 19 nt, Homo sapiens
  misc_RNA (1)...(19): siRNA sense strand
ggagcugcccgagauguuc

SEQ ID NO: 525780 - RNA, 19 nt, Homo sapiens
  misc_RNA (1)...(19): siRNA sense strand
aggaagagccaggccauug

SEQ ID NO: 525781 - RNA, 19 nt, Homo sapiens
  misc_RNA (1)...(19): siRNA sense strand
guggaagaaagccucauug

SEQ ID NO: 525782 - RNA, 19 nt, Homo sapiens
  misc_RNA (1)...(19): siRNA sense strand
ugcccgagauguucaugga

SEQ ID NO: 525783 - RNA, 19 nt, Homo sapiens
  misc_RNA (1)...(19): siRNA sense strand
gagcugcccgagauguuca

SEQ ID NO: 525784 - RNA, 19 nt, Homo sapiens
  misc_RNA (1)...(19): siRNA sense strand
acacagucauggccauaac

SEQ ID NO: 525785 - RNA, 19 nt, Homo sapiens
  misc_RNA (1)...(19): siRNA sense strand
ggcacuggcuuuugugaga

SEQ ID NO: 525786 - RNA, 19 nt, Homo sapiens
  misc_RNA (1)...(19): siRNA sense strand
aguacuggcugaaugacau

SEQ ID NO: 525787 - RNA, 19 nt, Homo sapiens
  misc_RNA (1)...(19): siRNA sense strand
cgcugcaucugccuuguau

SEQ ID NO: 525788 - RNA, 19 nt, Homo sapiens
  misc_RNA (1)...(19): siRNA sense strand
caaucaguucuuugucuug

SEQ ID NO: 525789 - RNA, 19 nt, Homo sapiens
  misc_RNA (1)...(19): siRNA sense strand
ucagaacagcagcaucaug

SEQ ID NO: 525790 - RNA, 19 nt, Homo sapiens
  misc_RNA (1)...(19): siRNA sense strand
guccuguggucccaaaugg

SEQ ID NO: 525791 - RNA, 19 nt, Homo sapiens
  misc_RNA (1)...(19): siRNA sense strand
cagaggcacuggcuuuugu

SEQ ID NO: 525792 - RNA, 19 nt, Homo sapiens
  misc_RNA (1)...(19): siRNA sense strand
cuacaggcuccaccgaaga

SEQ ID NO: 525793 - RNA, 19 nt, Homo sapiens
  misc_RNA (1)...(19): siRNA sense strand
aguaaagaaccuugacuuc

SEQ ID NO: 525794 - RNA, 19 nt, Homo sapiens
  misc_RNA (1)...(19): siRNA sense strand
ggauguugucauuaauuuc

SEQ ID NO: 525795 - RNA, 19 nt, Homo sapiens
  misc_RNA (1)...(19): siRNA sense strand
gaagaaagccucauugaca

SEQ ID NO: 525796 - RNA, 19 nt, Homo sapiens
  misc_RNA (1)...(19): siRNA sense strand
gaugaaaccuaccugauga

SEQ ID NO: 525797 - RNA, 19 nt, Homo sapiens
  misc_RNA (1)...(19): siRNA sense strand
gcaaggagcugcccgagau

SEQ ID NO: 525798 - RNA, 19 nt, Homo sapiens
  misc_RNA (1)...(19): siRNA sense strand
uaacagggauggccauuga

SEQ ID NO: 525799 - RNA, 19 nt, Homo sapiens
  misc_RNA (1)...(19): siRNA sense strand
uaaagaaccuugacuucau

SEQ ID NO: 525800 - RNA, 19 nt, Homo sapiens
  misc_RNA (1)...(19): siRNA sense strand
ggaaauucaaggccacuua

SEQ ID NO: 525801 - RNA, 19 nt, Homo sapiens
  misc_RNA (1)...(19): siRNA sense strand
ccaacugggugucugagua

SEQ ID NO: 525802 - RNA, 19 nt, Homo sapiens
  misc_RNA (1)...(19): siRNA sense strand
gcaaucaguucuuugucuu

SEQ ID NO: 525803 - RNA, 19 nt, Homo sapiens
  misc_RNA (1)...(19): siRNA sense strand
gaggagcaguucaggaaga

SEQ ID NO: 525804 - RNA, 19 nt, Homo sapiens
  misc_RNA (1)...(19): siRNA sense strand
aaaccuaccugaugagcaa

SEQ ID NO: 525805 - RNA, 19 nt, Homo sapiens
  misc_RNA (1)...(19): siRNA sense strand
gcaauacuaugggcucuuc

SEQ ID NO: 525806 - RNA, 19 nt, Homo sapiens
  misc_RNA (1)...(19): siRNA sense strand
gggaaaacauucauuaaga

SEQ ID NO: 525807 - RNA, 19 nt, Homo sapiens
  misc_RNA (1)...(19): siRNA sense strand
aaagaaccuugacuucauu

SEQ ID NO: 525808 - RNA, 19 nt, Homo sapiens
  misc_RNA (1)...(19): siRNA sense strand
ugaaugacauguaucucaa

SEQ ID NO: 525809 - RNA, 19 nt, Homo sapiens
  misc_RNA (1)...(19): siRNA sense strand
ggaugaaaccuaccugaug

SEQ ID NO: 525810 - RNA, 19 nt, Homo sapiens
  misc_RNA (1)...(19): siRNA sense strand
guaaagaaccuugacuuca

SEQ ID NO: 525811 - RNA, 19 nt, Homo sapiens
  misc_RNA (1)...(19): siRNA sense strand
gagauguucugcugcuaug

SEQ ID NO: 525812 - RNA, 19 nt, Homo sapiens
  misc_RNA (1)...(19): siRNA sense strand
ugucuuggauguugucauu

SEQ ID NO: 525813 - RNA, 19 nt, Homo sapiens
  misc_RNA (1)...(19): siRNA sense strand
uuucacagcugcaaagaga

SEQ ID NO: 525814 - RNA, 19 nt, Homo sapiens
  misc_RNA (1)...(19): siRNA sense strand
cgacaagucccugcaguuu

SEQ ID NO: 525815 - RNA, 19 nt, Homo sapiens
  misc_RNA (1)...(19): siRNA sense strand
gcucagaacagcagcauca

SEQ ID NO: 525816 - RNA, 19 nt, Homo sapiens
  misc_RNA (1)...(19): siRNA sense strand
ugacauguaucucaacaac

SEQ ID NO: 525817 - RNA, 19 nt, Homo sapiens
  misc_RNA (1)...(19): siRNA sense strand
gggacucgcuggacaugau

SEQ ID NO: 525818 - RNA, 19 nt, Homo sapiens
  misc_RNA (1)...(19): siRNA sense strand
gcaugaagcaauacuaugg

SEQ ID NO: 525819 - RNA, 19 nt, Homo sapiens
  misc_RNA (1)...(19): siRNA sense strand
gaaauucaaggccacuuag

SEQ ID NO: 525820 - RNA, 19 nt, Homo sapiens
  misc_RNA (1)...(19): siRNA sense strand
ucuuggauguugucauuaa

SEQ ID NO: 525821 - RNA, 19 nt, Homo sapiens
  misc_RNA (1)...(19): siRNA sense strand
caucguagccugcugcaau

SEQ ID NO: 525822 - RNA, 19 nt, Homo sapiens
  misc_RNA (1)...(19): siRNA sense strand
ggaagagccaggccauugu

SEQ ID NO: 525823 - RNA, 19 nt, Homo sapiens
  misc_RNA (1)...(19): siRNA sense strand
ccacaaccacggagauguu

SEQ ID NO: 525824 - RNA, 19 nt, Homo sapiens
  misc_RNA (1)...(19): siRNA sense strand
aagaaagccucauugacau

SEQ ID NO: 525825 - RNA, 19 nt, Homo sapiens
  misc_RNA (1)...(19): siRNA sense strand
ccucaucucugguguacuc

SEQ ID NO: 525826 - RNA, 19 nt, Homo sapiens
  misc_RNA (1)...(19): siRNA sense strand
ggagauguucugcugcuau

SEQ ID NO: 525827 - RNA, 19 nt, Homo sapiens
  misc_RNA (1)...(19): siRNA sense strand
gagcguuugccuccaauug

SEQ ID NO: 525828 - RNA, 19 nt, Homo sapiens
  misc_RNA (1)...(19): siRNA sense strand
gacgagcguuugccuccaa

SEQ ID NO: 525829 - RNA, 19 nt, Homo sapiens
  misc_RNA (1)...(19): siRNA sense strand
gaagagccaggccauugug

SEQ ID NO: 525830 - RNA, 19 nt, Homo sapiens
  misc_RNA (1)...(19): siRNA sense strand
gaauaguaaagaaccuuga

SEQ ID NO: 525831 - RNA, 19 nt, Homo sapiens
  misc_RNA (1)...(19): siRNA sense strand
gaaaugcuccccggaaauu

SEQ ID NO: 525832 - RNA, 19 nt, Homo sapiens
  misc_RNA (1)...(19): siRNA sense strand
ugacuucauugucuauaag

SEQ ID NO: 525833 - RNA, 19 nt, Homo sapiens
  misc_RNA (1)...(19): siRNA sense strand
ggaagaaagccucauugac

SEQ ID NO: 525834 - RNA, 19 nt, Homo sapiens
  misc_RNA (1)...(19): siRNA sense strand
ggcggaggcuacagcaaga

SEQ ID NO: 525835 - RNA, 19 nt, Homo sapiens
  misc_RNA (1)...(19): siRNA sense strand
cuacugagagcaagccauu

SEQ ID NO: 525836 - RNA, 19 nt, Homo sapiens
  misc_RNA (1)...(19): siRNA sense strand
gaucuguucacucaguuga

SEQ ID NO: 525837 - RNA, 19 nt, Homo sapiens
  misc_RNA (1)...(19): siRNA sense strand
gaaccuugacuucauuguc

SEQ ID NO: 525838 - RNA, 19 nt, Homo sapiens
  misc_RNA (1)...(19): siRNA sense strand
gacaagucccugcaguuug

SEQ ID NO: 525839 - RNA, 19 nt, Homo sapiens
  misc_RNA (1)...(19): siRNA sense strand
gccacuccauucccacuga

SEQ ID NO: 525840 - RNA, 19 nt, Homo sapiens
  misc_RNA (1)...(19): siRNA sense strand
caaaagcuguggaagaaag

SEQ ID NO: 525841 - RNA, 19 nt, Homo sapiens
  misc_RNA (1)...(19): siRNA sense strand
ggauggccauugacaacca

SEQ ID NO: 525842 - RNA, 19 nt, Homo sapiens
  misc_RNA (1)...(19): siRNA sense strand
ccagggacaccaaccuuga

SEQ ID NO: 525843 - RNA, 19 nt, Homo sapiens
  misc_RNA (1)...(19): siRNA sense strand
gcagaaaugcagcccugau

SEQ ID NO: 525844 - RNA, 19 nt, Homo sapiens
  misc_RNA (1)...(19): siRNA sense strand
uggaagaaagccucauuga

SEQ ID NO: 525845 - RNA, 19 nt, Homo sapiens
  misc_RNA (1)...(19): siRNA sense strand
gggaucuguucacucaguu

SEQ ID NO: 525846 - RNA, 19 nt, Homo sapiens
  misc_RNA (1)...(19): siRNA sense strand
cagaaaugcagcccugaug

SEQ ID NO: 525847 - RNA, 19 nt, Homo sapiens
  misc_RNA (1)...(19): siRNA sense strand
ucugaguacuggcugaaug

SEQ ID NO: 525848 - RNA, 19 nt, Homo sapiens
  misc_RNA (1)...(19): siRNA sense strand
gaugaccagcugagguuug

SEQ ID NO: 525849 - RNA, 19 nt, Homo sapiens
  misc_RNA (1)...(19): siRNA sense strand
gcgcugcaucugccuugua

SEQ ID NO: 525850 - RNA, 19 nt, Homo sapiens
  misc_RNA (1)...(19): siRNA sense strand
cugcugcaaucaguucuuu

SEQ ID NO: 525851 - RNA, 19 nt, Homo sapiens
  misc_RNA (1)...(19): siRNA sense strand
ucaguucuuugucuuggau

SEQ ID NO: 525852 - RNA, 19 nt, Homo sapiens
  misc_RNA (1)...(19): siRNA sense strand
gguuuguccucuccacuag

SEQ ID NO: 525853 - RNA, 19 nt, Homo sapiens
  misc_RNA (1)...(19): siRNA sense strand
agcagacccuggccacgua

SEQ ID NO: 525854 - RNA, 19 nt, Homo sapiens
  misc_RNA (1)...(19): siRNA sense strand
aaccuugacuucauugucu

SEQ ID NO: 525855 - RNA, 19 nt, Homo sapiens
  misc_RNA (1)...(19): siRNA sense strand
ggacucgcuggacaugauu

SEQ ID NO: 525856 - RNA, 19 nt, Homo sapiens
  misc_RNA (1)...(19): siRNA sense strand
guagccugcugcaaucagu

SEQ ID NO: 525857 - RNA, 19 nt, Homo sapiens
  misc_RNA (1)...(19): siRNA sense strand
gcugcaaucaguucuuugu

SEQ ID NO: 525858 - RNA, 19 nt, Homo sapiens
  misc_RNA (1)...(19): siRNA sense strand
ucucugguguacucagcua

SEQ ID NO: 525859 - RNA, 19 nt, Homo sapiens
  misc_RNA (1)...(19): siRNA sense strand
ugcaaaagcuguggaagaa

SEQ ID NO: 525860 - RNA, 19 nt, Homo sapiens
  misc_RNA (1)...(19): siRNA sense strand
ccgaugaccagcugagguu

SEQ ID NO: 525861 - RNA, 19 nt, Homo sapiens
  misc_RNA (1)...(19): siRNA sense strand
acacgcugguggcucagaa

SEQ ID NO: 525862 - RNA, 19 nt, Homo sapiens
  misc_RNA (1)...(19): siRNA sense strand
caacugggugucugaguac

SEQ ID NO: 525863 - RNA, 19 nt, Homo sapiens
  misc_RNA (1)...(19): siRNA sense strand
aaugacauguaucucaaca

SEQ ID NO: 525864 - RNA, 19 nt, Homo sapiens
  misc_RNA (1)...(19): siRNA sense strand
ugcaaucaguucuuugucu

SEQ ID NO: 525865 - RNA, 19 nt, Homo sapiens
  misc_RNA (1)...(19): siRNA sense strand
cugaaugacauguaucuca

SEQ ID NO: 525866 - RNA, 19 nt, Homo sapiens
  misc_RNA (1)...(19): siRNA sense strand
uaguaaagaaccuugacuu

SEQ ID NO: 525867 - RNA, 19 nt, Homo sapiens
  misc_RNA (1)...(19): siRNA sense strand
ggagcugcccgagauguuc

SEQ ID NO: 525868 - RNA, 19 nt, Homo sapiens
  misc_RNA (1)...(19): siRNA sense strand
aggaagagccaggccauug

SEQ ID NO: 525869 - RNA, 19 nt, Homo sapiens
  misc_RNA (1)...(19): siRNA sense strand
guggaagaaagccucauug

SEQ ID NO: 525870 - RNA, 19 nt, Homo sapiens
  misc_RNA (1)...(19): siRNA sense strand
ugcccgagauguucaugga

SEQ ID NO: 525871 - RNA, 19 nt, Homo sapiens
  misc_RNA (1)...(19): siRNA sense strand
gagcugcccgagauguuca

SEQ ID NO: 525872 - RNA, 19 nt, Homo sapiens
  misc_RNA (1)...(19): siRNA sense strand
acacagucauggccauaac

SEQ ID NO: 525873 - RNA, 19 nt, Homo sapiens
  misc_RNA (1)...(19): siRNA sense strand
ggcacuggcuuuugugaga

SEQ ID NO: 525874 - RNA, 19 nt, Homo sapiens
  misc_RNA (1)...(19): siRNA sense strand
aguacuggcugaaugacau

SEQ ID NO: 525875 - RNA, 19 nt, Homo sapiens
  misc_RNA (1)...(19): siRNA sense strand
cgcugcaucugccuuguau

SEQ ID NO: 525876 - RNA, 19 nt, Homo sapiens
  misc_RNA (1)...(19): siRNA sense strand
caaucaguucuuugucuug

SEQ ID NO: 525877 - RNA, 19 nt, Homo sapiens
  misc_RNA (1)...(19): siRNA sense strand
ucagaacagcagcaucaug

SEQ ID NO: 525878 - RNA, 19 nt, Homo sapiens
  misc_RNA (1)...(19): siRNA sense strand
guccuguggucccaaaugg

SEQ ID NO: 525879 - RNA, 19 nt, Homo sapiens
  misc_RNA (1)...(19): siRNA sense strand
cagaggcacuggcuuuugu

SEQ ID NO: 525880 - RNA, 19 nt, Homo sapiens
  misc_RNA (1)...(19): siRNA sense strand
cuacaggcuccaccgaaga

SEQ ID NO: 525881 - RNA, 19 nt, Homo sapiens
  misc_RNA (1)...(19): siRNA sense strand
aguaaagaaccuugacuuc

SEQ ID NO: 525882 - RNA, 19 nt, Homo sapiens
  misc_RNA (1)...(19): siRNA sense strand
ggauguugucauuaauuuc

SEQ ID NO: 525883 - RNA, 19 nt, Homo sapiens
  misc_RNA (1)...(19): siRNA sense strand
gaagaaagccucauugaca

SEQ ID NO: 525884 - RNA, 19 nt, Homo sapiens
  misc_RNA (1)...(19): siRNA sense strand
gaugaaaccuaccugauga

SEQ ID NO: 525885 - RNA, 19 nt, Homo sapiens
  misc_RNA (1)...(19): siRNA sense strand
gcaaggagcugcccgagau

SEQ ID NO: 525886 - RNA, 19 nt, Homo sapiens
  misc_RNA (1)...(19): siRNA sense strand
uaacagggauggccauuga

SEQ ID NO: 525887 - RNA, 19 nt, Homo sapiens
  misc_RNA (1)...(19): siRNA sense strand
uaaagaaccuugacuucau

SEQ ID NO: 525888 - RNA, 19 nt, Homo sapiens
  misc_RNA (1)...(19): siRNA sense strand
ggaaauucaaggccacuua

SEQ ID NO: 525889 - RNA, 19 nt, Homo sapiens
  misc_RNA (1)...(19): siRNA sense strand
ccaacugggugucugagua

SEQ ID NO: 525890 - RNA, 19 nt, Homo sapiens
  misc_RNA (1)...(19): siRNA sense strand
gcaaucaguucuuugucuu

SEQ ID NO: 525891 - RNA, 19 nt, Homo sapiens
  misc_RNA (1)...(19): siRNA sense strand
gaggagcaguucaggaaga

SEQ ID NO: 525892 - RNA, 19 nt, Homo sapiens
  misc_RNA (1)...(19): siRNA sense strand
aaaccuaccugaugagcaa

SEQ ID NO: 525893 - RNA, 19 nt, Homo sapiens
  misc_RNA (1)...(19): siRNA sense strand
gcaauacuaugggcucuuc

SEQ ID NO: 525894 - RNA, 19 nt, Homo sapiens
  misc_RNA (1)...(19): siRNA sense strand
gggaaaacauucauuaaga

SEQ ID NO: 525895 - RNA, 19 nt, Homo sapiens
  misc_RNA (1)...(19): siRNA sense strand
aaagaaccuugacuucauu

SEQ ID NO: 525896 - RNA, 19 nt, Homo sapiens
  misc_RNA (1)...(19): siRNA sense strand
ugaaugacauguaucucaa

SEQ ID NO: 525897 - RNA, 19 nt, Homo sapiens
  misc_RNA (1)...(19): siRNA sense strand
ggaugaaaccuaccugaug

SEQ ID NO: 525898 - RNA, 19 nt, Homo sapiens
  misc_RNA (1)...(19): siRNA sense strand
guaaagaaccuugacuuca

SEQ ID NO: 525899 - RNA, 19 nt, Homo sapiens
  misc_RNA (1)...(19): siRNA sense strand
gagauguucugcugcuaug

SEQ ID NO: 525900 - RNA, 19 nt, Homo sapiens
  misc_RNA (1)...(19): siRNA sense strand
ugucuuggauguugucauu

SEQ ID NO: 525901 - RNA, 19 nt, Homo sapiens
  misc_RNA (1)...(19): siRNA sense strand
uuucacagcugcaaagaga

SEQ ID NO: 525902 - RNA, 19 nt, Homo sapiens
  misc_RNA (1)...(19): siRNA sense strand
cgacaagucccugcaguuu

SEQ ID NO: 525903 - RNA, 19 nt, Homo sapiens
  misc_RNA (1)...(19): siRNA sense strand
gcucagaacagcagcauca

SEQ ID NO: 525904 - RNA, 19 nt, Homo sapiens
  misc_RNA (1)...(19): siRNA sense strand
ugacauguaucucaacaac

SEQ ID NO: 525905 - RNA, 19 nt, Homo sapiens
  misc_RNA (1)...(19): siRNA sense strand
gggacucgcuggacaugau

SEQ ID NO: 525906 - RNA, 19 nt, Homo sapiens
  misc_RNA (1)...(19): siRNA sense strand
gcaugaagcaauacuaugg

SEQ ID NO: 525907 - RNA, 19 nt, Homo sapiens
  misc_RNA (1)...(19): siRNA sense strand
gaaauucaaggccacuuag

SEQ ID NO: 525908 - RNA, 19 nt, Homo sapiens
  misc_RNA (1)...(19): siRNA sense strand
ucuuggauguugucauuaa

SEQ ID NO: 525909 - RNA, 19 nt, Homo sapiens
  misc_RNA (1)...(19): siRNA sense strand
caucguagccugcugcaau

SEQ ID NO: 525910 - RNA, 19 nt, Homo sapiens
  misc_RNA (1)...(19): siRNA sense strand
ggaagagccaggccauugu

SEQ ID NO: 525911 - RNA, 19 nt, Homo sapiens
  misc_RNA (1)...(19): siRNA sense strand
ccacaaccacggagauguu

SEQ ID NO: 525912 - RNA, 19 nt, Homo sapiens
  misc_RNA (1)...(19): siRNA sense strand
aagaaagccucauugacau

SEQ ID NO: 525913 - RNA, 19 nt, Homo sapiens
  misc_RNA (1)...(19): siRNA sense strand
ccucaucucugguguacuc

SEQ ID NO: 525914 - RNA, 19 nt, Homo sapiens
  misc_RNA (1)...(19): siRNA sense strand
ggagauguucugcugcuau

SEQ ID NO: 525915 - RNA, 19 nt, Homo sapiens
  misc_RNA (1)...(19): siRNA sense strand
gagcguuugccuccaauug

SEQ ID NO: 525916 - RNA, 19 nt, Homo sapiens
  misc_RNA (1)...(19): siRNA sense strand
gacgagcguuugccuccaa

SEQ ID NO: 525917 - RNA, 19 nt, Homo sapiens
  misc_RNA (1)...(19): siRNA sense strand
gaagagccaggccauugug

SEQ ID NO: 525918 - RNA, 19 nt, Homo sapiens
  misc_RNA (1)...(19): siRNA sense strand
gaauaguaaagaaccuuga

SEQ ID NO: 525919 - RNA, 19 nt, Homo sapiens
  misc_RNA (1)...(19): siRNA sense strand
gaaaugcuccccggaaauu

SEQ ID NO: 525920 - RNA, 19 nt, Homo sapiens
  misc_RNA (1)...(19): siRNA sense strand
ugacuucauugucuauaag

SEQ ID NO: 525921 - RNA, 19 nt, Homo sapiens
  misc_RNA (1)...(19): siRNA sense strand
ggaagaaagccucauugac

SEQ ID NO: 525922 - RNA, 19 nt, Homo sapiens
  misc_RNA (1)...(19): siRNA sense strand
ggcggaggcuacagcaaga

SEQ ID NO: 525923 - RNA, 19 nt, Homo sapiens
  misc_RNA (1)...(19): siRNA sense strand
cuacugagagcaagccauu

SEQ ID NO: 525924 - RNA, 19 nt, Homo sapiens
  misc_RNA (1)...(19): siRNA sense strand
gaucuguucacucaguuga

SEQ ID NO: 525925 - RNA, 19 nt, Homo sapiens
  misc_RNA (1)...(19): siRNA sense strand
gaaccuugacuucauuguc

SEQ ID NO: 525926 - RNA, 19 nt, Homo sapiens
  misc_RNA (1)...(19): siRNA sense strand
gacaagucccugcaguuug

SEQ ID NO: 525927 - RNA, 19 nt, Homo sapiens
  misc_RNA (1)...(19): siRNA sense strand
gccacuccauucccacuga

SEQ ID NO: 525928 - RNA, 19 nt, Homo sapiens
  misc_RNA (1)...(19): siRNA sense strand
caaaagcuguggaagaaag

SEQ ID NO: 525929 - RNA, 19 nt, Homo sapiens
  misc_RNA (1)...(19): siRNA sense strand
ggauggccauugacaacca

SEQ ID NO: 525930 - RNA, 19 nt, Homo sapiens
  misc_RNA (1)...(19): siRNA sense strand
ccagggacaccaaccuuga

SEQ ID NO: 525931 - RNA, 19 nt, Homo sapiens
  misc_RNA (1)...(19): siRNA sense strand
gcagaaaugcagcccugau

SEQ ID NO: 525932 - RNA, 19 nt, Homo sapiens
  misc_RNA (1)...(19): siRNA sense strand
uggaagaaagccucauuga

SEQ ID NO: 525933 - RNA, 19 nt, Homo sapiens
  misc_RNA (1)...(19): siRNA sense strand
gggaucuguucacucaguu

SEQ ID NO: 525934 - RNA, 19 nt, Homo sapiens
  misc_RNA (1)...(19): siRNA sense strand
cagaaaugcagcccugaug

SEQ ID NO: 525935 - RNA, 19 nt, Homo sapiens
  misc_RNA (1)...(19): siRNA sense strand
ucugaguacuggcugaaug

SEQ ID NO: 525936 - RNA, 19 nt, Homo sapiens
  misc_RNA (1)...(19): siRNA sense strand
gaugaccagcugagguuug

SEQ ID NO: 525937 - RNA, 19 nt, Homo sapiens
  misc_RNA (1)...(19): siRNA sense strand
gcgcugcaucugccuugua

SEQ ID NO: 525938 - RNA, 19 nt, Homo sapiens
  misc_RNA (1)...(19): siRNA sense strand
cugcugcaaucaguucuuu

SEQ ID NO: 525939 - RNA, 19 nt, Homo sapiens
  misc_RNA (1)...(19): siRNA sense strand
ucaguucuuugucuuggau

SEQ ID NO: 525940 - RNA, 19 nt, Homo sapiens
  misc_RNA (1)...(19): siRNA sense strand
gguuuguccucuccacuag

SEQ ID NO: 525941 - RNA, 19 nt, Homo sapiens
  misc_RNA (1)...(19): siRNA sense strand
agcagacccuggccacgua

SEQ ID NO: 525942 - RNA, 19 nt, Homo sapiens
  misc_RNA (1)...(19): siRNA sense strand
aaccuugacuucauugucu

SEQ ID NO: 525943 - RNA, 19 nt, Homo sapiens
  misc_RNA (1)...(19): siRNA sense strand
ggacucgcuggacaugauu

SEQ ID NO: 525944 - RNA, 19 nt, Homo sapiens
  misc_RNA (1)...(19): siRNA sense strand
guagccugcugcaaucagu

SEQ ID NO: 525945 - RNA, 19 nt, Homo sapiens
  misc_RNA (1)...(19): siRNA sense strand
gcugcaaucaguucuuugu

SEQ ID NO: 525946 - RNA, 19 nt, Homo sapiens
  misc_RNA (1)...(19): siRNA sense strand
ucucugguguacucagcua

SEQ ID NO: 525947 - RNA, 19 nt, Homo sapiens
  misc_RNA (1)...(19): siRNA sense strand
ugcaaaagcuguggaagaa

SEQ ID NO: 525948 - RNA, 19 nt, Homo sapiens
  misc_RNA (1)...(19): siRNA sense strand
ccgaugaccagcugagguu

SEQ ID NO: 525949 - RNA, 19 nt, Homo sapiens
  misc_RNA (1)...(19): siRNA sense strand
acacgcugguggcucagaa

SEQ ID NO: 525950 - RNA, 19 nt, Homo sapiens
  misc_RNA (1)...(19): siRNA sense strand
caacugggugucugaguac

SEQ ID NO: 525951 - RNA, 19 nt, Homo sapiens
  misc_RNA (1)...(19): siRNA sense strand
aaugacauguaucucaaca

SEQ ID NO: 525952 - RNA, 19 nt, Homo sapiens
  misc_RNA (1)...(19): siRNA sense strand
ugcaaucaguucuuugucu

SEQ ID NO: 525953 - RNA, 19 nt, Homo sapiens
  misc_RNA (1)...(19): siRNA sense strand
cugaaugacauguaucuca

SEQ ID NO: 525954 - RNA, 19 nt, Homo sapiens
  misc_RNA (1)...(19): siRNA sense strand
uaguaaagaaccuugacuu

SEQ ID NO: 525955 - RNA, 19 nt, Homo sapiens
  misc_RNA (1)...(19): siRNA sense strand
ggagcugcccgagauguuc

SEQ ID NO: 525956 - RNA, 19 nt, Homo sapiens
  misc_RNA (1)...(19): siRNA sense strand
aggaagagccaggccauug

SEQ ID NO: 525957 - RNA, 19 nt, Homo sapiens
  misc_RNA (1)...(19): siRNA sense strand
guggaagaaagccucauug

SEQ ID NO: 525958 - RNA, 19 nt, Homo sapiens
  misc_RNA (1)...(19): siRNA sense strand
ugcccgagauguucaugga

SEQ ID NO: 525959 - RNA, 19 nt, Homo sapiens
  misc_RNA (1)...(19): siRNA sense strand
gagcugcccgagauguuca

SEQ ID NO: 525960 - RNA, 19 nt, Homo sapiens
  misc_RNA (1)...(19): siRNA sense strand
acacagucauggccauaac

SEQ ID NO: 525961 - RNA, 19 nt, Homo sapiens
  misc_RNA (1)...(19): siRNA sense strand
ggcacuggcuuuugugaga

SEQ ID NO: 525962 - RNA, 19 nt, Homo sapiens
  misc_RNA (1)...(19): siRNA sense strand
aguacuggcugaaugacau

SEQ ID NO: 525963 - RNA, 19 nt, Homo sapiens
  misc_RNA (1)...(19): siRNA sense strand
cgcugcaucugccuuguau

SEQ ID NO: 525964 - RNA, 19 nt, Homo sapiens
  misc_RNA (1)...(19): siRNA sense strand
caaucaguucuuugucuug

SEQ ID NO: 525965 - RNA, 19 nt, Homo sapiens
  misc_RNA (1)...(19): siRNA sense strand
ucagaacagcagcaucaug

SEQ ID NO: 525966 - RNA, 19 nt, Homo sapiens
  misc_RNA (1)...(19): siRNA sense strand
guccuguggucccaaaugg

SEQ ID NO: 525967 - RNA, 19 nt, Homo sapiens
  misc_RNA (1)...(19): siRNA sense strand
cagaggcacuggcuuuugu

SEQ ID NO: 525968 - RNA, 19 nt, Homo sapiens
  misc_RNA (1)...(19): siRNA sense strand
cuacaggcuccaccgaaga

SEQ ID NO: 525969 - RNA, 19 nt, Homo sapiens
  misc_RNA (1)...(19): siRNA sense strand
aguaaagaaccuugacuuc

SEQ ID NO: 525970 - RNA, 19 nt, Homo sapiens
  misc_RNA (1)...(19): siRNA sense strand
ggauguugucauuaauuuc

SEQ ID NO: 525971 - RNA, 19 nt, Homo sapiens
  misc_RNA (1)...(19): siRNA sense strand
gaagaaagccucauugaca

SEQ ID NO: 525972 - RNA, 19 nt, Homo sapiens
  misc_RNA (1)...(19): siRNA sense strand
gaugaaaccuaccugauga

SEQ ID NO: 525973 - RNA, 19 nt, Homo sapiens
  misc_RNA (1)...(19): siRNA sense strand
gcaaggagcugcccgagau

SEQ ID NO: 525974 - RNA, 19 nt, Homo sapiens
  misc_RNA (1)...(19): siRNA sense strand
uaacagggauggccauuga

SEQ ID NO: 525975 - RNA, 19 nt, Homo sapiens
  misc_RNA (1)...(19): siRNA sense strand
uaaagaaccuugacuucau

SEQ ID NO: 525976 - RNA, 19 nt, Homo sapiens
  misc_RNA (1)...(19): siRNA sense strand
ggaaauucaaggccacuua

SEQ ID NO: 525977 - RNA, 19 nt, Homo sapiens
  misc_RNA (1)...(19): siRNA sense strand
ccaacugggugucugagua

SEQ ID NO: 525978 - RNA, 19 nt, Homo sapiens
  misc_RNA (1)...(19): siRNA sense strand
gcaaucaguucuuugucuu

SEQ ID NO: 525979 - RNA, 19 nt, Homo sapiens
  misc_RNA (1)...(19): siRNA sense strand
gaggagcaguucaggaaga

SEQ ID NO: 525980 - RNA, 19 nt, Homo sapiens
  misc_RNA (1)...(19): siRNA sense strand
aaaccuaccugaugagcaa

SEQ ID NO: 525981 - RNA, 19 nt, Homo sapiens
  misc_RNA (1)...(19): siRNA sense strand
gcaauacuaugggcucuuc

SEQ ID NO: 525982 - RNA, 19 nt, Homo sapiens
  misc_RNA (1)...(19): siRNA sense strand
gggaaaacauucauuaaga

SEQ ID NO: 525983 - RNA, 19 nt, Homo sapiens
  misc_RNA (1)...(19): siRNA sense strand
aaagaaccuugacuucauu

SEQ ID NO: 525984 - RNA, 19 nt, Homo sapiens
  misc_RNA (1)...(19): siRNA sense strand
ugaaugacauguaucucaa

SEQ ID NO: 525985 - RNA, 19 nt, Homo sapiens
  misc_RNA (1)...(19): siRNA sense strand
ggaugaaaccuaccugaug

SEQ ID NO: 525986 - RNA, 19 nt, Homo sapiens
  misc_RNA (1)...(19): siRNA sense strand
guaaagaaccuugacuuca

SEQ ID NO: 525987 - RNA, 19 nt, Homo sapiens
  misc_RNA (1)...(19): siRNA sense strand
gagauguucugcugcuaug

SEQ ID NO: 525988 - RNA, 19 nt, Homo sapiens
  misc_RNA (1)...(19): siRNA sense strand
ugucuuggauguugucauu

SEQ ID NO: 525989 - RNA, 19 nt, Homo sapiens
  misc_RNA (1)...(19): siRNA sense strand
uuucacagcugcaaagaga

SEQ ID NO: 525990 - RNA, 19 nt, Homo sapiens
  misc_RNA (1)...(19): siRNA sense strand
cgacaagucccugcaguuu

SEQ ID NO: 525991 - RNA, 19 nt, Homo sapiens
  misc_RNA (1)...(19): siRNA sense strand
gcucagaacagcagcauca

SEQ ID NO: 525992 - RNA, 19 nt, Homo sapiens
  misc_RNA (1)...(19): siRNA sense strand
ugacauguaucucaacaac

SEQ ID NO: 525993 - RNA, 19 nt, Homo sapiens
  misc_RNA (1)...(19): siRNA sense strand
gcaccaggacucaccaaga

SEQ ID NO: 525994 - RNA, 19 nt, Homo sapiens
  misc_RNA (1)...(19): siRNA sense strand
gggacucgcuggacaugau

SEQ ID NO: 525995 - RNA, 19 nt, Homo sapiens
  misc_RNA (1)...(19): siRNA sense strand
gcaugaagcaauacuaugg

SEQ ID NO: 525996 - RNA, 19 nt, Homo sapiens
  misc_RNA (1)...(19): siRNA sense strand
gaaauucaaggccacuuag

SEQ ID NO: 525997 - RNA, 19 nt, Homo sapiens
  misc_RNA (1)...(19): siRNA sense strand
ucuuggauguugucauuaa

SEQ ID NO: 525998 - RNA, 19 nt, Homo sapiens
  misc_RNA (1)...(19): siRNA sense strand
ggaagagccaggccauugu

SEQ ID NO: 525999 - RNA, 19 nt, Homo sapiens
  misc_RNA (1)...(19): siRNA sense strand
caucguagccugcugcaau

SEQ ID NO: 526000 - RNA, 19 nt, Homo sapiens
  misc_RNA (1)...(19): siRNA sense strand
ccacaaccacggagauguu

SEQ ID NO: 526001 - RNA, 19 nt, Homo sapiens
  misc_RNA (1)...(19): siRNA sense strand
aagaaagccucauugacau

SEQ ID NO: 526002 - RNA, 19 nt, Homo sapiens
  misc_RNA (1)...(19): siRNA sense strand
ccucaucucugguguacuc

SEQ ID NO: 526003 - RNA, 19 nt, Homo sapiens
  misc_RNA (1)...(19): siRNA sense strand
ggagauguucugcugcuau

SEQ ID NO: 526004 - RNA, 19 nt, Homo sapiens
  misc_RNA (1)...(19): siRNA sense strand
gagcguuugccuccaauug

SEQ ID NO: 526005 - RNA, 19 nt, Homo sapiens
  misc_RNA (1)...(19): siRNA sense strand
gacgagcguuugccuccaa

SEQ ID NO: 526006 - RNA, 19 nt, Homo sapiens
  misc_RNA (1)...(19): siRNA sense strand
gaagagccaggccauugug

SEQ ID NO: 526007 - RNA, 19 nt, Homo sapiens
  misc_RNA (1)...(19): siRNA sense strand
gaauaguaaagaaccuuga

SEQ ID NO: 526008 - RNA, 19 nt, Homo sapiens
  misc_RNA (1)...(19): siRNA sense strand
gaaaugcuccccggaaauu

SEQ ID NO: 526009 - RNA, 19 nt, Homo sapiens
  misc_RNA (1)...(19): siRNA sense strand
ugacuucauugucuauaag

SEQ ID NO: 526010 - RNA, 19 nt, Homo sapiens
  misc_RNA (1)...(19): siRNA sense strand
ggaagaaagccucauugac

SEQ ID NO: 526011 - RNA, 19 nt, Homo sapiens
  misc_RNA (1)...(19): siRNA sense strand
ggcggaggcuacagcaaga

SEQ ID NO: 526012 - RNA, 19 nt, Homo sapiens
  misc_RNA (1)...(19): siRNA sense strand
cuacugagagcaagccauu

SEQ ID NO: 526013 - RNA, 19 nt, Homo sapiens
  misc_RNA (1)...(19): siRNA sense strand
gaucuguucacucaguuga

SEQ ID NO: 526014 - RNA, 19 nt, Homo sapiens
  misc_RNA (1)...(19): siRNA sense strand
gaaccuugacuucauuguc

SEQ ID NO: 526015 - RNA, 19 nt, Homo sapiens
  misc_RNA (1)...(19): siRNA sense strand
gacaagucccugcaguuug

SEQ ID NO: 526016 - RNA, 19 nt, Homo sapiens
  misc_RNA (1)...(19): siRNA sense strand
gccacuccauucccacuga

SEQ ID NO: 526017 - RNA, 19 nt, Homo sapiens
  misc_RNA (1)...(19): siRNA sense strand
caaaagcuguggaagaaag

SEQ ID NO: 526018 - RNA, 19 nt, Homo sapiens
  misc_RNA (1)...(19): siRNA sense strand
ggauggccauugacaacca

SEQ ID NO: 526019 - RNA, 19 nt, Homo sapiens
  misc_RNA (1)...(19): siRNA sense strand
ccagggacaccaaccuuga

SEQ ID NO: 526020 - RNA, 19 nt, Homo sapiens
  misc_RNA (1)...(19): siRNA sense strand
gcagaaaugcagcccugau

SEQ ID NO: 526021 - RNA, 19 nt, Homo sapiens
  misc_RNA (1)...(19): siRNA sense strand
uggaagaaagccucauuga

SEQ ID NO: 526022 - RNA, 19 nt, Homo sapiens
  misc_RNA (1)...(19): siRNA sense strand
caccaggacucaccaagac

SEQ ID NO: 526023 - RNA, 19 nt, Homo sapiens
  misc_RNA (1)...(19): siRNA sense strand
gggaucuguucacucaguu

SEQ ID NO: 526024 - RNA, 19 nt, Homo sapiens
  misc_RNA (1)...(19): siRNA sense strand
cagaaaugcagcccugaug

SEQ ID NO: 526025 - RNA, 19 nt, Homo sapiens
  misc_RNA (1)...(19): siRNA sense strand
caagacgcccauccuggaa

SEQ ID NO: 526026 - RNA, 19 nt, Homo sapiens
  misc_RNA (1)...(19): siRNA sense strand
ucugaguacuggcugaaug

SEQ ID NO: 526027 - RNA, 19 nt, Homo sapiens
  misc_RNA (1)...(19): siRNA sense strand
gaugaccagcugagguuug

SEQ ID NO: 526028 - RNA, 19 nt, Homo sapiens
  misc_RNA (1)...(19): siRNA sense strand
gcgcugcaucugccuugua

SEQ ID NO: 526029 - RNA, 19 nt, Homo sapiens
  misc_RNA (1)...(19): siRNA sense strand
cugcugcaaucaguucuuu

SEQ ID NO: 526030 - RNA, 19 nt, Homo sapiens
  misc_RNA (1)...(19): siRNA sense strand
ucaguucuuugucuuggau

SEQ ID NO: 526031 - RNA, 19 nt, Homo sapiens
  misc_RNA (1)...(19): siRNA sense strand
gguuuguccucuccacuag

SEQ ID NO: 526032 - RNA, 19 nt, Homo sapiens
  misc_RNA (1)...(19): siRNA sense strand
aaccuugacuucauugucu

SEQ ID NO: 526033 - RNA, 19 nt, Homo sapiens
  misc_RNA (1)...(19): siRNA sense strand
agcagacccuggccacgua

SEQ ID NO: 526034 - RNA, 19 nt, Homo sapiens
  misc_RNA (1)...(19): siRNA sense strand
ggacucgcuggacaugauu

SEQ ID NO: 526035 - RNA, 19 nt, Homo sapiens
  misc_RNA (1)...(19): siRNA sense strand
guagccugcugcaaucagu

SEQ ID NO: 526036 - RNA, 19 nt, Homo sapiens
  misc_RNA (1)...(19): siRNA sense strand
gcugcaaucaguucuuugu

SEQ ID NO: 526037 - RNA, 19 nt, Homo sapiens
  misc_RNA (1)...(19): siRNA sense strand
ccgaugaccagcugagguu

SEQ ID NO: 526038 - RNA, 19 nt, Homo sapiens
  misc_RNA (1)...(19): siRNA sense strand
ugcaaaagcuguggaagaa

SEQ ID NO: 526039 - RNA, 19 nt, Homo sapiens
  misc_RNA (1)...(19): siRNA sense strand
acacgcugguggcucagaa

SEQ ID NO: 526040 - RNA, 19 nt, Homo sapiens
  misc_RNA (1)...(19): siRNA sense strand
ucucugguguacucagcua

SEQ ID NO: 526041 - RNA, 19 nt, Homo sapiens
  misc_RNA (1)...(19): siRNA sense strand
aaugacauguaucucaaca

SEQ ID NO: 526042 - RNA, 19 nt, Homo sapiens
  misc_RNA (1)...(19): siRNA sense strand
caacugggugucugaguac

SEQ ID NO: 526043 - RNA, 19 nt, Homo sapiens
  misc_RNA (1)...(19): siRNA sense strand
ugcaaucaguucuuugucu

SEQ ID NO: 526044 - RNA, 19 nt, Homo sapiens
  misc_RNA (1)...(19): siRNA sense strand
cugaaugacauguaucuca

SEQ ID NO: 526045 - RNA, 19 nt, Homo sapiens
  misc_RNA (1)...(19): siRNA sense strand
uaguaaagaaccuugacuu

SEQ ID NO: 526046 - RNA, 19 nt, Homo sapiens
  misc_RNA (1)...(19): siRNA sense strand
ggagcugcccgagauguuc

SEQ ID NO: 526047 - RNA, 19 nt, Homo sapiens
  misc_RNA (1)...(19): siRNA sense strand
caaucaguucuuugucuug

SEQ ID NO: 526048 - RNA, 19 nt, Homo sapiens
  misc_RNA (1)...(19): siRNA sense strand
guggaagaaagccucauug

SEQ ID NO: 526049 - RNA, 19 nt, Homo sapiens
  misc_RNA (1)...(19): siRNA sense strand
ugcccgagauguucaugga

SEQ ID NO: 526050 - RNA, 19 nt, Homo sapiens
  misc_RNA (1)...(19): siRNA sense strand
gagcugcccgagauguuca

SEQ ID NO: 526051 - RNA, 19 nt, Homo sapiens
  misc_RNA (1)...(19): siRNA sense strand
acacagucauggccauaac

SEQ ID NO: 526052 - RNA, 19 nt, Homo sapiens
  misc_RNA (1)...(19): siRNA sense strand
ggcacuggcuuuugugaga

SEQ ID NO: 526053 - RNA, 19 nt, Homo sapiens
  misc_RNA (1)...(19): siRNA sense strand
aguacuggcugaaugacau

SEQ ID NO: 526054 - RNA, 19 nt, Homo sapiens
  misc_RNA (1)...(19): siRNA sense strand
cgcugcaucugccuuguau

SEQ ID NO: 526055 - RNA, 19 nt, Homo sapiens
  misc_RNA (1)...(19): siRNA sense strand
aggaagagccaggccauug

SEQ ID NO: 526056 - RNA, 19 nt, Homo sapiens
  misc_RNA (1)...(19): siRNA sense strand
ucagaacagcagcaucaug

SEQ ID NO: 526057 - RNA, 19 nt, Homo sapiens
  misc_RNA (1)...(19): siRNA sense strand
guccuguggucccaaaugg

SEQ ID NO: 526058 - RNA, 19 nt, Homo sapiens
  misc_RNA (1)...(19): siRNA sense strand
cagaggcacuggcuuuugu

SEQ ID NO: 526059 - RNA, 19 nt, Homo sapiens
  misc_RNA (1)...(19): siRNA sense strand
cuacaggcuccaccgaaga

SEQ ID NO: 526060 - RNA, 19 nt, Homo sapiens
  misc_RNA (1)...(19): siRNA sense strand
aguaaagaaccuugacuuc

SEQ ID NO: 526061 - RNA, 19 nt, Homo sapiens
  misc_RNA (1)...(19): siRNA sense strand
ggauguugucauuaauuuc

SEQ ID NO: 526062 - RNA, 19 nt, Homo sapiens
  misc_RNA (1)...(19): siRNA sense strand
gaagaaagccucauugaca

SEQ ID NO: 526063 - RNA, 19 nt, Homo sapiens
  misc_RNA (1)...(19): siRNA sense strand
gaugaaaccuaccugauga

SEQ ID NO: 526064 - RNA, 19 nt, Homo sapiens
  misc_RNA (1)...(19): siRNA sense strand
gcaaggagcugcccgagau

SEQ ID NO: 526065 - RNA, 19 nt, Homo sapiens
  misc_RNA (1)...(19): siRNA sense strand
uaacagggauggccauuga

SEQ ID NO: 526066 - RNA, 19 nt, Homo sapiens
  misc_RNA (1)...(19): siRNA sense strand
uaaagaaccuugacuucau

SEQ ID NO: 526067 - RNA, 19 nt, Homo sapiens
  misc_RNA (1)...(19): siRNA sense strand
ggaaauucaaggccacuua

SEQ ID NO: 526068 - RNA, 19 nt, Homo sapiens
  misc_RNA (1)...(19): siRNA sense strand
ccaacugggugucugagua

SEQ ID NO: 526069 - RNA, 19 nt, Homo sapiens
  misc_RNA (1)...(19): siRNA sense strand
gcaaucaguucuuugucuu

SEQ ID NO: 526070 - RNA, 19 nt, Homo sapiens
  misc_RNA (1)...(19): siRNA sense strand
gaggagcaguucaggaaga

SEQ ID NO: 526071 - RNA, 19 nt, Homo sapiens
  misc_RNA (1)...(19): siRNA sense strand
aaaccuaccugaugagcaa

SEQ ID NO: 526072 - RNA, 19 nt, Homo sapiens
  misc_RNA (1)...(19): siRNA sense strand
gcaauacuaugggcucuuc

SEQ ID NO: 526073 - RNA, 19 nt, Homo sapiens
  misc_RNA (1)...(19): siRNA sense strand
gggaaaacauucauuaaga

SEQ ID NO: 526074 - RNA, 19 nt, Homo sapiens
  misc_RNA (1)...(19): siRNA sense strand
aaagaaccuugacuucauu

SEQ ID NO: 526075 - RNA, 19 nt, Homo sapiens
  misc_RNA (1)...(19): siRNA sense strand
ugaaugacauguaucucaa

SEQ ID NO: 526076 - RNA, 19 nt, Homo sapiens
  misc_RNA (1)...(19): siRNA sense strand
ggaugaaaccuaccugaug

SEQ ID NO: 526077 - RNA, 19 nt, Homo sapiens
  misc_RNA (1)...(19): siRNA sense strand
guaaagaaccuugacuuca

SEQ ID NO: 526078 - RNA, 19 nt, Homo sapiens
  misc_RNA (1)...(19): siRNA sense strand
gagauguucugcugcuaug

SEQ ID NO: 526079 - RNA, 19 nt, Homo sapiens
  misc_RNA (1)...(19): siRNA sense strand
ugucuuggauguugucauu

SEQ ID NO: 526080 - RNA, 19 nt, Homo sapiens
  misc_RNA (1)...(19): siRNA sense strand
uuucacagcugcaaagaga

SEQ ID NO: 526081 - RNA, 19 nt, Homo sapiens
  misc_RNA (1)...(19): siRNA sense strand
cgacaagucccugcaguuu

SEQ ID NO: 526082 - RNA, 19 nt, Homo sapiens
  misc_RNA (1)...(19): siRNA sense strand
gcucagaacagcagcauca

SEQ ID NO: 526083 - RNA, 19 nt, Homo sapiens
  misc_RNA (1)...(19): siRNA sense strand
ugacauguaucucaacaac

SEQ ID NO: 526084 - RNA, 19 nt, Homo sapiens
  misc_RNA (1)...(19): siRNA sense strand
gggacucgcuggacaugau

SEQ ID NO: 526085 - RNA, 19 nt, Homo sapiens
  misc_RNA (1)...(19): siRNA sense strand
gcaugaagcaauacuaugg

SEQ ID NO: 526086 - RNA, 19 nt, Homo sapiens
  misc_RNA (1)...(19): siRNA sense strand
gaaauucaaggccacuuag

SEQ ID NO: 526087 - RNA, 19 nt, Homo sapiens
  misc_RNA (1)...(19): siRNA sense strand
ucuuggauguugucauuaa

SEQ ID NO: 526088 - RNA, 19 nt, Homo sapiens
  misc_RNA (1)...(19): siRNA sense strand
caucguagccugcugcaau

SEQ ID NO: 526089 - RNA, 19 nt, Homo sapiens
  misc_RNA (1)...(19): siRNA sense strand
ggaagagccaggccauugu

SEQ ID NO: 526090 - RNA, 19 nt, Homo sapiens
  misc_RNA (1)...(19): siRNA sense strand
ccacaaccacggagauguu

SEQ ID NO: 526091 - RNA, 19 nt, Homo sapiens
  misc_RNA (1)...(19): siRNA sense strand
aagaaagccucauugacau

SEQ ID NO: 526092 - RNA, 19 nt, Homo sapiens
  misc_RNA (1)...(19): siRNA sense strand
ccucaucucugguguacuc

SEQ ID NO: 526093 - RNA, 19 nt, Homo sapiens
  misc_RNA (1)...(19): siRNA sense strand
ggagauguucugcugcuau

SEQ ID NO: 526094 - RNA, 19 nt, Homo sapiens
  misc_RNA (1)...(19): siRNA sense strand
gagcguuugccuccaauug

SEQ ID NO: 526095 - RNA, 19 nt, Homo sapiens
  misc_RNA (1)...(19): siRNA sense strand
gacgagcguuugccuccaa

SEQ ID NO: 526096 - RNA, 19 nt, Homo sapiens
  misc_RNA (1)...(19): siRNA sense strand
gaagagccaggccauugug

SEQ ID NO: 526097 - RNA, 19 nt, Homo sapiens
  misc_RNA (1)...(19): siRNA sense strand
gaauaguaaagaaccuuga

SEQ ID NO: 526098 - RNA, 19 nt, Homo sapiens
  misc_RNA (1)...(19): siRNA sense strand
gaaaugcuccccggaaauu

SEQ ID NO: 526099 - RNA, 19 nt, Homo sapiens
  misc_RNA (1)...(19): siRNA sense strand
ugacuucauugucuauaag

SEQ ID NO: 526100 - RNA, 19 nt, Homo sapiens
  misc_RNA (1)...(19): siRNA sense strand
ggaagaaagccucauugac

SEQ ID NO: 526101 - RNA, 19 nt, Homo sapiens
  misc_RNA (1)...(19): siRNA sense strand
ggcggaggcuacagcaaga

SEQ ID NO: 526102 - RNA, 19 nt, Homo sapiens
  misc_RNA (1)...(19): siRNA sense strand
cuacugagagcaagccauu

SEQ ID NO: 526103 - RNA, 19 nt, Homo sapiens
  misc_RNA (1)...(19): siRNA sense strand
gaucuguucacucaguuga

SEQ ID NO: 526104 - RNA, 19 nt, Homo sapiens
  misc_RNA (1)...(19): siRNA sense strand
gaaccuugacuucauuguc

SEQ ID NO: 526105 - RNA, 19 nt, Homo sapiens
  misc_RNA (1)...(19): siRNA sense strand
gacaagucccugcaguuug

SEQ ID NO: 526106 - RNA, 19 nt, Homo sapiens
  misc_RNA (1)...(19): siRNA sense strand
gccacuccauucccacuga

SEQ ID NO: 526107 - RNA, 19 nt, Homo sapiens
  misc_RNA (1)...(19): siRNA sense strand
caaaagcuguggaagaaag

SEQ ID NO: 526108 - RNA, 19 nt, Homo sapiens
  misc_RNA (1)...(19): siRNA sense strand
ggauggccauugacaacca

SEQ ID NO: 526109 - RNA, 19 nt, Homo sapiens
  misc_RNA (1)...(19): siRNA sense strand
ccagggacaccaaccuuga

SEQ ID NO: 526110 - RNA, 19 nt, Homo sapiens
  misc_RNA (1)...(19): siRNA sense strand
gcagaaaugcagcccugau

SEQ ID NO: 526111 - RNA, 19 nt, Homo sapiens
  misc_RNA (1)...(19): siRNA sense strand
uggaagaaagccucauuga

SEQ ID NO: 526112 - RNA, 19 nt, Homo sapiens
  misc_RNA (1)...(19): siRNA sense strand
gggaucuguucacucaguu

SEQ ID NO: 526113 - RNA, 19 nt, Homo sapiens
  misc_RNA (1)...(19): siRNA sense strand
cagaaaugcagcccugaug

SEQ ID NO: 526114 - RNA, 19 nt, Homo sapiens
  misc_RNA (1)...(19): siRNA sense strand
ucugaguacuggcugaaug

SEQ ID NO: 526115 - RNA, 19 nt, Homo sapiens
  misc_RNA (1)...(19): siRNA sense strand
gaugaccagcugagguuug

SEQ ID NO: 526116 - RNA, 19 nt, Homo sapiens
  misc_RNA (1)...(19): siRNA sense strand
gcgcugcaucugccuugua

SEQ ID NO: 526117 - RNA, 19 nt, Homo sapiens
  misc_RNA (1)...(19): siRNA sense strand
cugcugcaaucaguucuuu

SEQ ID NO: 526118 - RNA, 19 nt, Homo sapiens
  misc_RNA (1)...(19): siRNA sense strand
ucaguucuuugucuuggau

SEQ ID NO: 526119 - RNA, 19 nt, Homo sapiens
  misc_RNA (1)...(19): siRNA sense strand
gguuuguccucuccacuag

SEQ ID NO: 526120 - RNA, 19 nt, Homo sapiens
  misc_RNA (1)...(19): siRNA sense strand
agcagacccuggccacgua

SEQ ID NO: 526121 - RNA, 19 nt, Homo sapiens
  misc_RNA (1)...(19): siRNA sense strand
aaccuugacuucauugucu

SEQ ID NO: 526122 - RNA, 19 nt, Homo sapiens
  misc_RNA (1)...(19): siRNA sense strand
ggacucgcuggacaugauu

SEQ ID NO: 526123 - RNA, 19 nt, Homo sapiens
  misc_RNA (1)...(19): siRNA sense strand
guagccugcugcaaucagu

SEQ ID NO: 526124 - RNA, 19 nt, Homo sapiens
  misc_RNA (1)...(19): siRNA sense strand
gcugcaaucaguucuuugu

SEQ ID NO: 526125 - RNA, 19 nt, Homo sapiens
  misc_RNA (1)...(19): siRNA sense strand
ucucugguguacucagcua

SEQ ID NO: 526126 - RNA, 19 nt, Homo sapiens
  misc_RNA (1)...(19): siRNA sense strand
ugcaaaagcuguggaagaa

SEQ ID NO: 526127 - RNA, 19 nt, Homo sapiens
  misc_RNA (1)...(19): siRNA sense strand
ccgaugaccagcugagguu

SEQ ID NO: 526128 - RNA, 19 nt, Homo sapiens
  misc_RNA (1)...(19): siRNA sense strand
acacgcugguggcucagaa

SEQ ID NO: 526129 - RNA, 19 nt, Homo sapiens
  misc_RNA (1)...(19): siRNA sense strand
caacugggugucugaguac

SEQ ID NO: 526130 - RNA, 19 nt, Homo sapiens
  misc_RNA (1)...(19): siRNA sense strand
aaugacauguaucucaaca

SEQ ID NO: 526131 - RNA, 19 nt, Homo sapiens
  misc_RNA (1)...(19): siRNA sense strand
ugcaaucaguucuuugucu

SEQ ID NO: 526132 - RNA, 19 nt, Homo sapiens
  misc_RNA (1)...(19): siRNA sense strand
cugaaugacauguaucuca

SEQ ID NO: 526133 - RNA, 19 nt, Homo sapiens
  misc_RNA (1)...(19): siRNA sense strand
uaguaaagaaccuugacuu

SEQ ID NO: 526134 - RNA, 19 nt, Homo sapiens
  misc_RNA (1)...(19): siRNA sense strand
ggagcugcccgagauguuc

SEQ ID NO: 526135 - RNA, 19 nt, Homo sapiens
  misc_RNA (1)...(19): siRNA sense strand
aggaagagccaggccauug

SEQ ID NO: 526136 - RNA, 19 nt, Homo sapiens
  misc_RNA (1)...(19): siRNA sense strand
guggaagaaagccucauug

SEQ ID NO: 526137 - RNA, 19 nt, Homo sapiens
  misc_RNA (1)...(19): siRNA sense strand
ugcccgagauguucaugga

SEQ ID NO: 526138 - RNA, 19 nt, Homo sapiens
  misc_RNA (1)...(19): siRNA sense strand
gagcugcccgagauguuca

SEQ ID NO: 526139 - RNA, 19 nt, Homo sapiens
  misc_RNA (1)...(19): siRNA sense strand
acacagucauggccauaac

SEQ ID NO: 526140 - RNA, 19 nt, Homo sapiens
  misc_RNA (1)...(19): siRNA sense strand
ggcacuggcuuuugugaga

SEQ ID NO: 526141 - RNA, 19 nt, Homo sapiens
  misc_RNA (1)...(19): siRNA sense strand
aguacuggcugaaugacau

SEQ ID NO: 526142 - RNA, 19 nt, Homo sapiens
  misc_RNA (1)...(19): siRNA sense strand
cgcugcaucugccuuguau

SEQ ID NO: 526143 - RNA, 19 nt, Homo sapiens
  misc_RNA (1)...(19): siRNA sense strand
caaucaguucuuugucuug

SEQ ID NO: 526144 - RNA, 19 nt, Homo sapiens
  misc_RNA (1)...(19): siRNA sense strand
ucagaacagcagcaucaug

SEQ ID NO: 526145 - RNA, 19 nt, Homo sapiens
  misc_RNA (1)...(19): siRNA sense strand
guccuguggucccaaaugg

SEQ ID NO: 526146 - RNA, 19 nt, Homo sapiens
  misc_RNA (1)...(19): siRNA sense strand
cagaggcacuggcuuuugu

SEQ ID NO: 526147 - RNA, 19 nt, Homo sapiens
  misc_RNA (1)...(19): siRNA sense strand
cuacaggcuccaccgaaga

SEQ ID NO: 526148 - RNA, 19 nt, Homo sapiens
  misc_RNA (1)...(19): siRNA sense strand
aguaaagaaccuugacuuc

SEQ ID NO: 526149 - RNA, 19 nt, Homo sapiens
  misc_RNA (1)...(19): siRNA sense strand
ggauguugucauuaauuuc

SEQ ID NO: 526150 - RNA, 19 nt, Homo sapiens
  misc_RNA (1)...(19): siRNA sense strand
gaagaaagccucauugaca

SEQ ID NO: 526151 - RNA, 19 nt, Homo sapiens
  misc_RNA (1)...(19): siRNA sense strand
gaugaaaccuaccugauga

SEQ ID NO: 526152 - RNA, 19 nt, Homo sapiens
  misc_RNA (1)...(19): siRNA sense strand
gcaaggagcugcccgagau

SEQ ID NO: 526153 - RNA, 19 nt, Homo sapiens
  misc_RNA (1)...(19): siRNA sense strand
uaacagggauggccauuga

SEQ ID NO: 526154 - RNA, 19 nt, Homo sapiens
  misc_RNA (1)...(19): siRNA sense strand
uaaagaaccuugacuucau

SEQ ID NO: 526155 - RNA, 19 nt, Homo sapiens
  misc_RNA (1)...(19): siRNA sense strand
ggaaauucaaggccacuua

SEQ ID NO: 526156 - RNA, 19 nt, Homo sapiens
  misc_RNA (1)...(19): siRNA sense strand
ccaacugggugucugagua

SEQ ID NO: 526157 - RNA, 19 nt, Homo sapiens
  misc_RNA (1)...(19): siRNA sense strand
gcaaucaguucuuugucuu

SEQ ID NO: 526158 - RNA, 19 nt, Homo sapiens
  misc_RNA (1)...(19): siRNA sense strand
gaggagcaguucaggaaga

SEQ ID NO: 526159 - RNA, 19 nt, Homo sapiens
  misc_RNA (1)...(19): siRNA sense strand
aaaccuaccugaugagcaa

SEQ ID NO: 526160 - RNA, 19 nt, Homo sapiens
  misc_RNA (1)...(19): siRNA sense strand
gcaauacuaugggcucuuc

SEQ ID NO: 526161 - RNA, 19 nt, Homo sapiens
  misc_RNA (1)...(19): siRNA sense strand
gggaaaacauucauuaaga

SEQ ID NO: 526162 - RNA, 19 nt, Homo sapiens
  misc_RNA (1)...(19): siRNA sense strand
aaagaaccuugacuucauu

SEQ ID NO: 526163 - RNA, 19 nt, Homo sapiens
  misc_RNA (1)...(19): siRNA sense strand
ugaaugacauguaucucaa

SEQ ID NO: 526164 - RNA, 19 nt, Homo sapiens
  misc_RNA (1)...(19): siRNA sense strand
ggaugaaaccuaccugaug

SEQ ID NO: 526165 - RNA, 19 nt, Homo sapiens
  misc_RNA (1)...(19): siRNA sense strand
guaaagaaccuugacuuca

SEQ ID NO: 526166 - RNA, 19 nt, Homo sapiens
  misc_RNA (1)...(19): siRNA sense strand
gagauguucugcugcuaug

SEQ ID NO: 526167 - RNA, 19 nt, Homo sapiens
  misc_RNA (1)...(19): siRNA sense strand
ugucuuggauguugucauu

SEQ ID NO: 526168 - RNA, 19 nt, Homo sapiens
  misc_RNA (1)...(19): siRNA sense strand
uuucacagcugcaaagaga

SEQ ID NO: 526169 - RNA, 19 nt, Homo sapiens
  misc_RNA (1)...(19): siRNA sense strand
cgacaagucccugcaguuu

SEQ ID NO: 526170 - RNA, 19 nt, Homo sapiens
  misc_RNA (1)...(19): siRNA sense strand
gcucagaacagcagcauca

SEQ ID NO: 526171 - RNA, 19 nt, Homo sapiens
  misc_RNA (1)...(19): siRNA sense strand
ugacauguaucucaacaac

SEQ ID NO: 526172 - RNA, 19 nt, Homo sapiens
  misc_RNA (1)...(19): siRNA sense strand
gggacucgcuggacaugau

SEQ ID NO: 526173 - RNA, 19 nt, Homo sapiens
  misc_RNA (1)...(19): siRNA sense strand
gcaugaagcaauacuaugg

SEQ ID NO: 526174 - RNA, 19 nt, Homo sapiens
  misc_RNA (1)...(19): siRNA sense strand
gaaauucaaggccacuuag

SEQ ID NO: 526175 - RNA, 19 nt, Homo sapiens
  misc_RNA (1)...(19): siRNA sense strand
ucuuggauguugucauuaa

SEQ ID NO: 526176 - RNA, 19 nt, Homo sapiens
  misc_RNA (1)...(19): siRNA sense strand
caucguagccugcugcaau

SEQ ID NO: 526177 - RNA, 19 nt, Homo sapiens
  misc_RNA (1)...(19): siRNA sense strand
ggaagagccaggccauugu

SEQ ID NO: 526178 - RNA, 19 nt, Homo sapiens
  misc_RNA (1)...(19): siRNA sense strand
ccacaaccacggagauguu

SEQ ID NO: 526179 - RNA, 19 nt, Homo sapiens
  misc_RNA (1)...(19): siRNA sense strand
aagaaagccucauugacau

SEQ ID NO: 526180 - RNA, 19 nt, Homo sapiens
  misc_RNA (1)...(19): siRNA sense strand
ccucaucucugguguacuc

SEQ ID NO: 526181 - RNA, 19 nt, Homo sapiens
  misc_RNA (1)...(19): siRNA sense strand
ggagauguucugcugcuau

SEQ ID NO: 526182 - RNA, 19 nt, Homo sapiens
  misc_RNA (1)...(19): siRNA sense strand
gagcguuugccuccaauug

SEQ ID NO: 526183 - RNA, 19 nt, Homo sapiens
  misc_RNA (1)...(19): siRNA sense strand
gacgagcguuugccuccaa

SEQ ID NO: 526184 - RNA, 19 nt, Homo sapiens
  misc_RNA (1)...(19): siRNA sense strand
gaagagccaggccauugug

SEQ ID NO: 526185 - RNA, 19 nt, Homo sapiens
  misc_RNA (1)...(19): siRNA sense strand
gaauaguaaagaaccuuga

SEQ ID NO: 526186 - RNA, 19 nt, Homo sapiens
  misc_RNA (1)...(19): siRNA sense strand
gaaaugcuccccggaaauu

SEQ ID NO: 526187 - RNA, 19 nt, Homo sapiens
  misc_RNA (1)...(19): siRNA sense strand
ugacuucauugucuauaag

SEQ ID NO: 526188 - RNA, 19 nt, Homo sapiens
  misc_RNA (1)...(19): siRNA sense strand
ggaagaaagccucauugac

SEQ ID NO: 526189 - RNA, 19 nt, Homo sapiens
  misc_RNA (1)...(19): siRNA sense strand
ggcggaggcuacagcaaga

SEQ ID NO: 526190 - RNA, 19 nt, Homo sapiens
  misc_RNA (1)...(19): siRNA sense strand
cuacugagagcaagccauu

SEQ ID NO: 526191 - RNA, 19 nt, Homo sapiens
  misc_RNA (1)...(19): siRNA sense strand
gaucuguucacucaguuga

SEQ ID NO: 526192 - RNA, 19 nt, Homo sapiens
  misc_RNA (1)...(19): siRNA sense strand
gaaccuugacuucauuguc

SEQ ID NO: 526193 - RNA, 19 nt, Homo sapiens
  misc_RNA (1)...(19): siRNA sense strand
gacaagucccugcaguuug

SEQ ID NO: 526194 - RNA, 19 nt, Homo sapiens
  misc_RNA (1)...(19): siRNA sense strand
gccacuccauucccacuga

SEQ ID NO: 526195 - RNA, 19 nt, Homo sapiens
  misc_RNA (1)...(19): siRNA sense strand
caaaagcuguggaagaaag

SEQ ID NO: 526196 - RNA, 19 nt, Homo sapiens
  misc_RNA (1)...(19): siRNA sense strand
ggauggccauugacaacca

SEQ ID NO: 526197 - RNA, 19 nt, Homo sapiens
  misc_RNA (1)...(19): siRNA sense strand
ccagggacaccaaccuuga

SEQ ID NO: 526198 - RNA, 19 nt, Homo sapiens
  misc_RNA (1)...(19): siRNA sense strand
gcagaaaugcagcccugau

SEQ ID NO: 526199 - RNA, 19 nt, Homo sapiens
  misc_RNA (1)...(19): siRNA sense strand
uggaagaaagccucauuga

SEQ ID NO: 526200 - RNA, 19 nt, Homo sapiens
  misc_RNA (1)...(19): siRNA sense strand
gggaucuguucacucaguu

SEQ ID NO: 526201 - RNA, 19 nt, Homo sapiens
  misc_RNA (1)...(19): siRNA sense strand
cagaaaugcagcccugaug

SEQ ID NO: 526202 - RNA, 19 nt, Homo sapiens
  misc_RNA (1)...(19): siRNA sense strand
ucugaguacuggcugaaug

SEQ ID NO: 526203 - RNA, 19 nt, Homo sapiens
  misc_RNA (1)...(19): siRNA sense strand
gaugaccagcugagguuug

SEQ ID NO: 526204 - RNA, 19 nt, Homo sapiens
  misc_RNA (1)...(19): siRNA sense strand
gcgcugcaucugccuugua

SEQ ID NO: 526205 - RNA, 19 nt, Homo sapiens
  misc_RNA (1)...(19): siRNA sense strand
cugcugcaaucaguucuuu

SEQ ID NO: 526206 - RNA, 19 nt, Homo sapiens
  misc_RNA (1)...(19): siRNA sense strand
ucaguucuuugucuuggau

SEQ ID NO: 526207 - RNA, 19 nt, Homo sapiens
  misc_RNA (1)...(19): siRNA sense strand
gguuuguccucuccacuag

SEQ ID NO: 526208 - RNA, 19 nt, Homo sapiens
  misc_RNA (1)...(19): siRNA sense strand
agcagacccuggccacgua

SEQ ID NO: 526209 - RNA, 19 nt, Homo sapiens
  misc_RNA (1)...(19): siRNA sense strand
aaccuugacuucauugucu

SEQ ID NO: 526210 - RNA, 19 nt, Homo sapiens
  misc_RNA (1)...(19): siRNA sense strand
ggacucgcuggacaugauu

SEQ ID NO: 526211 - RNA, 19 nt, Homo sapiens
  misc_RNA (1)...(19): siRNA sense strand
guagccugcugcaaucagu

SEQ ID NO: 526212 - RNA, 19 nt, Homo sapiens
  misc_RNA (1)...(19): siRNA sense strand
gcugcaaucaguucuuugu

SEQ ID NO: 526213 - RNA, 19 nt, Homo sapiens
  misc_RNA (1)...(19): siRNA sense strand
ucucugguguacucagcua

SEQ ID NO: 526214 - RNA, 19 nt, Homo sapiens
  misc_RNA (1)...(19): siRNA sense strand
ugcaaaagcuguggaagaa

SEQ ID NO: 526215 - RNA, 19 nt, Homo sapiens
  misc_RNA (1)...(19): siRNA sense strand
ccgaugaccagcugagguu

SEQ ID NO: 526216 - RNA, 19 nt, Homo sapiens
  misc_RNA (1)...(19): siRNA sense strand
acacgcugguggcucagaa

SEQ ID NO: 526217 - RNA, 19 nt, Homo sapiens
  misc_RNA (1)...(19): siRNA sense strand
caacugggugucugaguac

SEQ ID NO: 526218 - RNA, 19 nt, Homo sapiens
  misc_RNA (1)...(19): siRNA sense strand
aaugacauguaucucaaca

SEQ ID NO: 526219 - RNA, 19 nt, Homo sapiens
  misc_RNA (1)...(19): siRNA sense strand
ugcaaucaguucuuugucu

SEQ ID NO: 526220 - RNA, 19 nt, Homo sapiens
  misc_RNA (1)...(19): siRNA sense strand
cugaaugacauguaucuca

SEQ ID NO: 526221 - RNA, 19 nt, Homo sapiens
  misc_RNA (1)...(19): siRNA sense strand
uaguaaagaaccuugacuu

SEQ ID NO: 526222 - RNA, 19 nt, Homo sapiens
  misc_RNA (1)...(19): siRNA sense strand
ggagcugcccgagauguuc

SEQ ID NO: 526223 - RNA, 19 nt, Homo sapiens
  misc_RNA (1)...(19): siRNA sense strand
aggaagagccaggccauug

SEQ ID NO: 526224 - RNA, 19 nt, Homo sapiens
  misc_RNA (1)...(19): siRNA sense strand
guggaagaaagccucauug

SEQ ID NO: 526225 - RNA, 19 nt, Homo sapiens
  misc_RNA (1)...(19): siRNA sense strand
ugcccgagauguucaugga

SEQ ID NO: 526226 - RNA, 19 nt, Homo sapiens
  misc_RNA (1)...(19): siRNA sense strand
gagcugcccgagauguuca

SEQ ID NO: 526227 - RNA, 19 nt, Homo sapiens
  misc_RNA (1)...(19): siRNA sense strand
acacagucauggccauaac

SEQ ID NO: 526228 - RNA, 19 nt, Homo sapiens
  misc_RNA (1)...(19): siRNA sense strand
ggcacuggcuuuugugaga

SEQ ID NO: 526229 - RNA, 19 nt, Homo sapiens
  misc_RNA (1)...(19): siRNA sense strand
aguacuggcugaaugacau

SEQ ID NO: 526230 - RNA, 19 nt, Homo sapiens
  misc_RNA (1)...(19): siRNA sense strand
cgcugcaucugccuuguau

SEQ ID NO: 526231 - RNA, 19 nt, Homo sapiens
  misc_RNA (1)...(19): siRNA sense strand
caaucaguucuuugucuug

SEQ ID NO: 526232 - RNA, 19 nt, Homo sapiens
  misc_RNA (1)...(19): siRNA sense strand
ucagaacagcagcaucaug

SEQ ID NO: 526233 - RNA, 19 nt, Homo sapiens
  misc_RNA (1)...(19): siRNA sense strand
guccuguggucccaaaugg

SEQ ID NO: 526234 - RNA, 19 nt, Homo sapiens
  misc_RNA (1)...(19): siRNA sense strand
cagaggcacuggcuuuugu

SEQ ID NO: 526235 - RNA, 19 nt, Homo sapiens
  misc_RNA (1)...(19): siRNA sense strand
cuacaggcuccaccgaaga

SEQ ID NO: 526236 - RNA, 19 nt, Homo sapiens
  misc_RNA (1)...(19): siRNA sense strand
aguaaagaaccuugacuuc

SEQ ID NO: 526237 - RNA, 19 nt, Homo sapiens
  misc_RNA (1)...(19): siRNA sense strand
ggauguugucauuaauuuc

SEQ ID NO: 526238 - RNA, 19 nt, Homo sapiens
  misc_RNA (1)...(19): siRNA sense strand
gaagaaagccucauugaca

SEQ ID NO: 526239 - RNA, 19 nt, Homo sapiens
  misc_RNA (1)...(19): siRNA sense strand
gaugaaaccuaccugauga

SEQ ID NO: 526240 - RNA, 19 nt, Homo sapiens
  misc_RNA (1)...(19): siRNA sense strand
gcaaggagcugcccgagau

SEQ ID NO: 526241 - RNA, 19 nt, Homo sapiens
  misc_RNA (1)...(19): siRNA sense strand
uaacagggauggccauuga

SEQ ID NO: 526242 - RNA, 19 nt, Homo sapiens
  misc_RNA (1)...(19): siRNA sense strand
uaaagaaccuugacuucau

SEQ ID NO: 526243 - RNA, 19 nt, Homo sapiens
  misc_RNA (1)...(19): siRNA sense strand
ggaaauucaaggccacuua

SEQ ID NO: 526244 - RNA, 19 nt, Homo sapiens
  misc_RNA (1)...(19): siRNA sense strand
ccaacugggugucugagua

SEQ ID NO: 526245 - RNA, 19 nt, Homo sapiens
  misc_RNA (1)...(19): siRNA sense strand
gcaaucaguucuuugucuu

SEQ ID NO: 526246 - RNA, 19 nt, Homo sapiens
  misc_RNA (1)...(19): siRNA sense strand
gaggagcaguucaggaaga

SEQ ID NO: 526247 - RNA, 19 nt, Homo sapiens
  misc_RNA (1)...(19): siRNA sense strand
aaaccuaccugaugagcaa

SEQ ID NO: 526248 - RNA, 19 nt, Homo sapiens
  misc_RNA (1)...(19): siRNA sense strand
gcaauacuaugggcucuuc

SEQ ID NO: 526249 - RNA, 19 nt, Homo sapiens
  misc_RNA (1)...(19): siRNA sense strand
gggaaaacauucauuaaga

SEQ ID NO: 526250 - RNA, 19 nt, Homo sapiens
  misc_RNA (1)...(19): siRNA sense strand
aaagaaccuugacuucauu

SEQ ID NO: 526251 - RNA, 19 nt, Homo sapiens
  misc_RNA (1)...(19): siRNA sense strand
ugaaugacauguaucucaa

SEQ ID NO: 526252 - RNA, 19 nt, Homo sapiens
  misc_RNA (1)...(19): siRNA sense strand
ggaugaaaccuaccugaug

SEQ ID NO: 526253 - RNA, 19 nt, Homo sapiens
  misc_RNA (1)...(19): siRNA sense strand
guaaagaaccuugacuuca

SEQ ID NO: 526254 - RNA, 19 nt, Homo sapiens
  misc_RNA (1)...(19): siRNA sense strand
gagauguucugcugcuaug

SEQ ID NO: 526255 - RNA, 19 nt, Homo sapiens
  misc_RNA (1)...(19): siRNA sense strand
ugucuuggauguugucauu

SEQ ID NO: 526256 - RNA, 19 nt, Homo sapiens
  misc_RNA (1)...(19): siRNA sense strand
uuucacagcugcaaagaga

SEQ ID NO: 526257 - RNA, 19 nt, Homo sapiens
  misc_RNA (1)...(19): siRNA sense strand
cgacaagucccugcaguuu

SEQ ID NO: 526258 - RNA, 19 nt, Homo sapiens
  misc_RNA (1)...(19): siRNA sense strand
gcucagaacagcagcauca

SEQ ID NO: 526259 - RNA, 19 nt, Homo sapiens
  misc_RNA (1)...(19): siRNA sense strand
ugacauguaucucaacaac

SEQ ID NO: 526260 - RNA, 19 nt, Homo sapiens
  misc_RNA (1)...(19): siRNA sense strand
gggacucgcuggacaugau

SEQ ID NO: 526261 - RNA, 19 nt, Homo sapiens
  misc_RNA (1)...(19): siRNA sense strand
gcaugaagcaauacuaugg

SEQ ID NO: 526262 - RNA, 19 nt, Homo sapiens
  misc_RNA (1)...(19): siRNA sense strand
gaaauucaaggccacuuag

SEQ ID NO: 526263 - RNA, 19 nt, Homo sapiens
  misc_RNA (1)...(19): siRNA sense strand
ucuuggauguugucauuaa

SEQ ID NO: 526264 - RNA, 19 nt, Homo sapiens
  misc_RNA (1)...(19): siRNA sense strand
caucguagccugcugcaau

SEQ ID NO: 526265 - RNA, 19 nt, Homo sapiens
  misc_RNA (1)...(19): siRNA sense strand
ggaagagccaggccauugu

SEQ ID NO: 526266 - RNA, 19 nt, Homo sapiens
  misc_RNA (1)...(19): siRNA sense strand
ccacaaccacggagauguu

SEQ ID NO: 526267 - RNA, 19 nt, Homo sapiens
  misc_RNA (1)...(19): siRNA sense strand
aagaaagccucauugacau

SEQ ID NO: 526268 - RNA, 19 nt, Homo sapiens
  misc_RNA (1)...(19): siRNA sense strand
ccucaucucugguguacuc

SEQ ID NO: 526269 - RNA, 19 nt, Homo sapiens
  misc_RNA (1)...(19): siRNA sense strand
ggagauguucugcugcuau

SEQ ID NO: 526270 - RNA, 19 nt, Homo sapiens
  misc_RNA (1)...(19): siRNA sense strand
gagcguuugccuccaauug

SEQ ID NO: 526271 - RNA, 19 nt, Homo sapiens
  misc_RNA (1)...(19): siRNA sense strand
gacgagcguuugccuccaa

SEQ ID NO: 526272 - RNA, 19 nt, Homo sapiens
  misc_RNA (1)...(19): siRNA sense strand
gaagagccaggccauugug

SEQ ID NO: 526273 - RNA, 19 nt, Homo sapiens
  misc_RNA (1)...(19): siRNA sense strand
gaauaguaaagaaccuuga

SEQ ID NO: 526274 - RNA, 19 nt, Homo sapiens
  misc_RNA (1)...(19): siRNA sense strand
gaaaugcuccccggaaauu

SEQ ID NO: 526275 - RNA, 19 nt, Homo sapiens
  misc_RNA (1)...(19): siRNA sense strand
ugacuucauugucuauaag

SEQ ID NO: 526276 - RNA, 19 nt, Homo sapiens
  misc_RNA (1)...(19): siRNA sense strand
ggaagaaagccucauugac

SEQ ID NO: 526277 - RNA, 19 nt, Homo sapiens
  misc_RNA (1)...(19): siRNA sense strand
ggcggaggcuacagcaaga

SEQ ID NO: 526278 - RNA, 19 nt, Homo sapiens
  misc_RNA (1)...(19): siRNA sense strand
cuacugagagcaagccauu

SEQ ID NO: 526279 - RNA, 19 nt, Homo sapiens
  misc_RNA (1)...(19): siRNA sense strand
gaucuguucacucaguuga

SEQ ID NO: 526280 - RNA, 19 nt, Homo sapiens
  misc_RNA (1)...(19): siRNA sense strand
gaaccuugacuucauuguc

SEQ ID NO: 526281 - RNA, 19 nt, Homo sapiens
  misc_RNA (1)...(19): siRNA sense strand
gacaagucccugcaguuug

SEQ ID NO: 526282 - RNA, 19 nt, Homo sapiens
  misc_RNA (1)...(19): siRNA sense strand
gccacuccauucccacuga

SEQ ID NO: 526283 - RNA, 19 nt, Homo sapiens
  misc_RNA (1)...(19): siRNA sense strand
caaaagcuguggaagaaag

SEQ ID NO: 526284 - RNA, 19 nt, Homo sapiens
  misc_RNA (1)...(19): siRNA sense strand
ggauggccauugacaacca

SEQ ID NO: 526285 - RNA, 19 nt, Homo sapiens
  misc_RNA (1)...(19): siRNA sense strand
ccagggacaccaaccuuga

SEQ ID NO: 526286 - RNA, 19 nt, Homo sapiens
  misc_RNA (1)...(19): siRNA sense strand
gcagaaaugcagcccugau

SEQ ID NO: 526287 - RNA, 19 nt, Homo sapiens
  misc_RNA (1)...(19): siRNA sense strand
uggaagaaagccucauuga

SEQ ID NO: 526288 - RNA, 19 nt, Homo sapiens
  misc_RNA (1)...(19): siRNA sense strand
gggaucuguucacucaguu

SEQ ID NO: 526289 - RNA, 19 nt, Homo sapiens
  misc_RNA (1)...(19): siRNA sense strand
cagaaaugcagcccugaug

SEQ ID NO: 526290 - RNA, 19 nt, Homo sapiens
  misc_RNA (1)...(19): siRNA sense strand
ucugaguacuggcugaaug

SEQ ID NO: 526291 - RNA, 19 nt, Homo sapiens
  misc_RNA (1)...(19): siRNA sense strand
gaugaccagcugagguuug

SEQ ID NO: 526292 - RNA, 19 nt, Homo sapiens
  misc_RNA (1)...(19): siRNA sense strand
gcgcugcaucugccuugua

SEQ ID NO: 526293 - RNA, 19 nt, Homo sapiens
  misc_RNA (1)...(19): siRNA sense strand
cugcugcaaucaguucuuu

SEQ ID NO: 526294 - RNA, 19 nt, Homo sapiens
  misc_RNA (1)...(19): siRNA sense strand
ucaguucuuugucuuggau

SEQ ID NO: 526295 - RNA, 19 nt, Homo sapiens
  misc_RNA (1)...(19): siRNA sense strand
gguuuguccucuccacuag

SEQ ID NO: 526296 - RNA, 19 nt, Homo sapiens
  misc_RNA (1)...(19): siRNA sense strand
agcagacccuggccacgua

SEQ ID NO: 526297 - RNA, 19 nt, Homo sapiens
  misc_RNA (1)...(19): siRNA sense strand
aaccuugacuucauugucu

SEQ ID NO: 526298 - RNA, 19 nt, Homo sapiens
  misc_RNA (1)...(19): siRNA sense strand
ggacucgcuggacaugauu

SEQ ID NO: 526299 - RNA, 19 nt, Homo sapiens
  misc_RNA (1)...(19): siRNA sense strand
guagccugcugcaaucagu

SEQ ID NO: 526300 - RNA, 19 nt, Homo sapiens
  misc_RNA (1)...(19): siRNA sense strand
gcugcaaucaguucuuugu

SEQ ID NO: 526301 - RNA, 19 nt, Homo sapiens
  misc_RNA (1)...(19): siRNA sense strand
ucucugguguacucagcua

SEQ ID NO: 526302 - RNA, 19 nt, Homo sapiens
  misc_RNA (1)...(19): siRNA sense strand
ugcaaaagcuguggaagaa

SEQ ID NO: 526303 - RNA, 19 nt, Homo sapiens
  misc_RNA (1)...(19): siRNA sense strand
ccgaugaccagcugagguu

SEQ ID NO: 526304 - RNA, 19 nt, Homo sapiens
  misc_RNA (1)...(19): siRNA sense strand
acacgcugguggcucagaa

SEQ ID NO: 526305 - RNA, 19 nt, Homo sapiens
  misc_RNA (1)...(19): siRNA sense strand
caacugggugucugaguac

SEQ ID NO: 526306 - RNA, 19 nt, Homo sapiens
  misc_RNA (1)...(19): siRNA sense strand
aaugacauguaucucaaca

SEQ ID NO: 526307 - RNA, 19 nt, Homo sapiens
  misc_RNA (1)...(19): siRNA sense strand
ugcaaucaguucuuugucu

SEQ ID NO: 526308 - RNA, 19 nt, Homo sapiens
  misc_RNA (1)...(19): siRNA sense strand
cugaaugacauguaucuca

SEQ ID NO: 526309 - RNA, 19 nt, Homo sapiens
  misc_RNA (1)...(19): siRNA sense strand
uaguaaagaaccuugacuu

SEQ ID NO: 526310 - RNA, 19 nt, Homo sapiens
  misc_RNA (1)...(19): siRNA sense strand
ggagcugcccgagauguuc

SEQ ID NO: 526311 - RNA, 19 nt, Homo sapiens
  misc_RNA (1)...(19): siRNA sense strand
aggaagagccaggccauug

SEQ ID NO: 526312 - RNA, 19 nt, Homo sapiens
  misc_RNA (1)...(19): siRNA sense strand
guggaagaaagccucauug

SEQ ID NO: 526313 - RNA, 19 nt, Homo sapiens
  misc_RNA (1)...(19): siRNA sense strand
ugcccgagauguucaugga

SEQ ID NO: 526314 - RNA, 19 nt, Homo sapiens
  misc_RNA (1)...(19): siRNA sense strand
gagcugcccgagauguuca

SEQ ID NO: 526315 - RNA, 19 nt, Homo sapiens
  misc_RNA (1)...(19): siRNA sense strand
acacagucauggccauaac

SEQ ID NO: 526316 - RNA, 19 nt, Homo sapiens
  misc_RNA (1)...(19): siRNA sense strand
ggcacuggcuuuugugaga

SEQ ID NO: 526317 - RNA, 19 nt, Homo sapiens
  misc_RNA (1)...(19): siRNA sense strand
aguacuggcugaaugacau

SEQ ID NO: 526318 - RNA, 19 nt, Homo sapiens
  misc_RNA (1)...(19): siRNA sense strand
cgcugcaucugccuuguau

SEQ ID NO: 526319 - RNA, 19 nt, Homo sapiens
  misc_RNA (1)...(19): siRNA sense strand
caaucaguucuuugucuug

SEQ ID NO: 526320 - RNA, 19 nt, Homo sapiens
  misc_RNA (1)...(19): siRNA sense strand
ucagaacagcagcaucaug

SEQ ID NO: 526321 - RNA, 19 nt, Homo sapiens
  misc_RNA (1)...(19): siRNA sense strand
guccuguggucccaaaugg

SEQ ID NO: 526322 - RNA, 19 nt, Homo sapiens
  misc_RNA (1)...(19): siRNA sense strand
cagaggcacuggcuuuugu

SEQ ID NO: 526323 - RNA, 19 nt, Homo sapiens
  misc_RNA (1)...(19): siRNA sense strand
cuacaggcuccaccgaaga

SEQ ID NO: 526324 - RNA, 19 nt, Homo sapiens
  misc_RNA (1)...(19): siRNA sense strand
aguaaagaaccuugacuuc

SEQ ID NO: 526325 - RNA, 19 nt, Homo sapiens
  misc_RNA (1)...(19): siRNA sense strand
ggauguugucauuaauuuc

SEQ ID NO: 526326 - RNA, 19 nt, Homo sapiens
  misc_RNA (1)...(19): siRNA sense strand
gaagaaaccagcaagcuua

SEQ ID NO: 526327 - RNA, 19 nt, Homo sapiens
  misc_RNA (1)...(19): siRNA sense strand
ucagaaaucucuagaagaa

SEQ ID NO: 526328 - RNA, 19 nt, Homo sapiens
  misc_RNA (1)...(19): siRNA sense strand
gagauuccauuaccucaua

SEQ ID NO: 526329 - RNA, 19 nt, Homo sapiens
  misc_RNA (1)...(19): siRNA sense strand
gaacaacuccuuugacguu

SEQ ID NO: 526330 - RNA, 19 nt, Homo sapiens
  misc_RNA (1)...(19): siRNA sense strand
aagcguaucugcaggauua

SEQ ID NO: 526331 - RNA, 19 nt, Homo sapiens
  misc_RNA (1)...(19): siRNA sense strand
ggaaggagcaucaguuuga

SEQ ID NO: 526332 - RNA, 19 nt, Homo sapiens
  misc_RNA (1)...(19): siRNA sense strand
uaacuucggucuugacaaa

SEQ ID NO: 526333 - RNA, 19 nt, Homo sapiens
  misc_RNA (1)...(19): siRNA sense strand
aggagaagcuggcaaauuu

SEQ ID NO: 526334 - RNA, 19 nt, Homo sapiens
  misc_RNA (1)...(19): siRNA sense strand
gaaaccagcaagcuuauaa

SEQ ID NO: 526335 - RNA, 19 nt, Homo sapiens
  misc_RNA (1)...(19): siRNA sense strand
cagauucucuuagacauua

SEQ ID NO: 526336 - RNA, 19 nt, Homo sapiens
  misc_RNA (1)...(19): siRNA sense strand
gcaaagauauugagguucu

SEQ ID NO: 526337 - RNA, 19 nt, Homo sapiens
  misc_RNA (1)...(19): siRNA sense strand
cgucuucucuguagcauua

SEQ ID NO: 526338 - RNA, 19 nt, Homo sapiens
  misc_RNA (1)...(19): siRNA sense strand
gcagugguuucccggauua

SEQ ID NO: 526339 - RNA, 19 nt, Homo sapiens
  misc_RNA (1)...(19): siRNA sense strand
ggagagggauuagccagua

SEQ ID NO: 526340 - RNA, 19 nt, Homo sapiens
  misc_RNA (1)...(19): siRNA sense strand
ccagcaagcuuauaauaga

SEQ ID NO: 526341 - RNA, 19 nt, Homo sapiens
  misc_RNA (1)...(19): siRNA sense strand
gaaauuccauaaaccaauc

SEQ ID NO: 526342 - RNA, 19 nt, Homo sapiens
  misc_RNA (1)...(19): siRNA sense strand
ucucagagcuucauguuau

SEQ ID NO: 526343 - RNA, 19 nt, Homo sapiens
  misc_RNA (1)...(19): siRNA sense strand
ggacaaaacuuuagagcaa

SEQ ID NO: 526344 - RNA, 19 nt, Homo sapiens
  misc_RNA (1)...(19): siRNA sense strand
gcuagaaggaccaauauuu

SEQ ID NO: 526345 - RNA, 19 nt, Homo sapiens
  misc_RNA (1)...(19): siRNA sense strand
gcagacaccuuagacaaug

SEQ ID NO: 526346 - RNA, 19 nt, Homo sapiens
  misc_RNA (1)...(19): siRNA sense strand
gcaagaagcaaagauauug

SEQ ID NO: 526347 - RNA, 19 nt, Homo sapiens
  misc_RNA (1)...(19): siRNA sense strand
cacaggaccuuaaggaauu

SEQ ID NO: 526348 - RNA, 19 nt, Homo sapiens
  misc_RNA (1)...(19): siRNA sense strand
ccacgcaacuguacagaga

SEQ ID NO: 526349 - RNA, 19 nt, Homo sapiens
  misc_RNA (1)...(19): siRNA sense strand
ggaccaauauuugauuaug

SEQ ID NO: 526350 - RNA, 19 nt, Homo sapiens
  misc_RNA (1)...(19): siRNA sense strand
ggacuuaguuggacagaac

SEQ ID NO: 526351 - RNA, 19 nt, Homo sapiens
  misc_RNA (1)...(19): siRNA sense strand
gaacagaagcuccuaugca

SEQ ID NO: 526352 - RNA, 19 nt, Homo sapiens
  misc_RNA (1)...(19): siRNA sense strand
gaaccagcaucaccacuag

SEQ ID NO: 526353 - RNA, 19 nt, Homo sapiens
  misc_RNA (1)...(19): siRNA sense strand
gcaggauuaucacgaaaga

SEQ ID NO: 526354 - RNA, 19 nt, Homo sapiens
  misc_RNA (1)...(19): siRNA sense strand
gaaccaagaagacggaaau

SEQ ID NO: 526355 - RNA, 19 nt, Homo sapiens
  misc_RNA (1)...(19): siRNA sense strand
ugacagcccugaccagugu

SEQ ID NO: 526356 - RNA, 19 nt, Homo sapiens
  misc_RNA (1)...(19): siRNA sense strand
aagcaaagauauugagguu

SEQ ID NO: 526357 - RNA, 19 nt, Homo sapiens
  misc_RNA (1)...(19): siRNA sense strand
aaagauccuuggaaacaaa

SEQ ID NO: 526358 - RNA, 19 nt, Homo sapiens
  misc_RNA (1)...(19): siRNA sense strand
gacaucaaguggaaaccua

SEQ ID NO: 526359 - RNA, 19 nt, Homo sapiens
  misc_RNA (1)...(19): siRNA sense strand
gaaggaccaauauuugauu

SEQ ID NO: 526360 - RNA, 19 nt, Homo sapiens
  misc_RNA (1)...(19): siRNA sense strand
caacugaugccuuaacuuc

SEQ ID NO: 526361 - RNA, 19 nt, Homo sapiens
  misc_RNA (1)...(19): siRNA sense strand
ugccacaacugaugccuua

SEQ ID NO: 526362 - RNA, 19 nt, Homo sapiens
  misc_RNA (1)...(19): siRNA sense strand
caugacagaugacaaagug

SEQ ID NO: 526363 - RNA, 19 nt, Homo sapiens
  misc_RNA (1)...(19): siRNA sense strand
ggacacagacaaauaucuu

SEQ ID NO: 526364 - RNA, 19 nt, Homo sapiens
  misc_RNA (1)...(19): siRNA sense strand
agaaaucacuccagaagca

SEQ ID NO: 526365 - RNA, 19 nt, Homo sapiens
  misc_RNA (1)...(19): siRNA sense strand
guacagagaauugauaugu

SEQ ID NO: 526366 - RNA, 19 nt, Homo sapiens
  misc_RNA (1)...(19): siRNA sense strand
gcacgggacagcaugauga

SEQ ID NO: 526367 - RNA, 19 nt, Homo sapiens
  misc_RNA (1)...(19): siRNA sense strand
uaucagaaaucucuagaag

SEQ ID NO: 526368 - RNA, 19 nt, Homo sapiens
  misc_RNA (1)...(19): siRNA sense strand
caucaccacuagcagcaua

SEQ ID NO: 526369 - RNA, 19 nt, Homo sapiens
  misc_RNA (1)...(19): siRNA sense strand
caaaggagaagcuggcaaa

SEQ ID NO: 526370 - RNA, 19 nt, Homo sapiens
  misc_RNA (1)...(19): siRNA sense strand
gagaagguguauccaaugg

SEQ ID NO: 526371 - RNA, 19 nt, Homo sapiens
  misc_RNA (1)...(19): siRNA sense strand
ggaagucgcaagaagcaaa

SEQ ID NO: 526372 - RNA, 19 nt, Homo sapiens
  misc_RNA (1)...(19): siRNA sense strand
caaugucaaucuuguuuca

SEQ ID NO: 526373 - RNA, 19 nt, Homo sapiens
  misc_RNA (1)...(19): siRNA sense strand
caacuccuuugacguuuau

SEQ ID NO: 526374 - RNA, 19 nt, Homo sapiens
  misc_RNA (1)...(19): siRNA sense strand
ggauuaagcaggaaagcaa

SEQ ID NO: 526375 - RNA, 19 nt, Homo sapiens
  misc_RNA (1)...(19): siRNA sense strand
gagaagcuggcaaauuuga

SEQ ID NO: 526376 - RNA, 19 nt, Homo sapiens
  misc_RNA (1)...(19): siRNA sense strand
gaaucuuccuugcgauguu

SEQ ID NO: 526377 - RNA, 19 nt, Homo sapiens
  misc_RNA (1)...(19): siRNA sense strand
cgaaucaccugccguuugg

SEQ ID NO: 526378 - RNA, 19 nt, Homo sapiens
  misc_RNA (1)...(19): siRNA sense strand
cagcaagcuuauaauagaa

SEQ ID NO: 526379 - RNA, 19 nt, Homo sapiens
  misc_RNA (1)...(19): siRNA sense strand
aggaaacucugaaaccaaa

SEQ ID NO: 526380 - RNA, 19 nt, Homo sapiens
  misc_RNA (1)...(19): siRNA sense strand
caaggaaacucugaaacca

SEQ ID NO: 526381 - RNA, 19 nt, Homo sapiens
  misc_RNA (1)...(19): siRNA sense strand
gaagacaucacaggaacaa

SEQ ID NO: 526382 - RNA, 19 nt, Homo sapiens
  misc_RNA (1)...(19): siRNA sense strand
gggacagcaugaugauuga

SEQ ID NO: 526383 - RNA, 19 nt, Homo sapiens
  misc_RNA (1)...(19): siRNA sense strand
aaugagacaucaaguggaa

SEQ ID NO: 526384 - RNA, 19 nt, Homo sapiens
  misc_RNA (1)...(19): siRNA sense strand
acagagaauugauaugugu

SEQ ID NO: 526385 - RNA, 19 nt, Homo sapiens
  misc_RNA (1)...(19): siRNA sense strand
gcaggaaagcaaccagauu

SEQ ID NO: 526386 - RNA, 19 nt, Homo sapiens
  misc_RNA (1)...(19): siRNA sense strand
uggcauggaugaagaacuu

SEQ ID NO: 526387 - RNA, 19 nt, Homo sapiens
  misc_RNA (1)...(19): siRNA sense strand
ugauucagauucucuuaga

SEQ ID NO: 526388 - RNA, 19 nt, Homo sapiens
  misc_RNA (1)...(19): siRNA sense strand
gcaagcuuauaauagaaga

SEQ ID NO: 526389 - RNA, 19 nt, Homo sapiens
  misc_RNA (1)...(19): siRNA sense strand
ucgaauagauauagugaca

SEQ ID NO: 526390 - RNA, 19 nt, Homo sapiens
  misc_RNA (1)...(19): siRNA sense strand
gaauugauauguguuccau

SEQ ID NO: 526391 - RNA, 19 nt, Homo sapiens
  misc_RNA (1)...(19): siRNA sense strand
cauaaaccaaucacaauga

SEQ ID NO: 526392 - RNA, 19 nt, Homo sapiens
  misc_RNA (1)...(19): siRNA sense strand
ugauagcccagaagaguua

SEQ ID NO: 526393 - RNA, 19 nt, Homo sapiens
  misc_RNA (1)...(19): siRNA sense strand
cauucuggguuucugguua

SEQ ID NO: 526394 - RNA, 19 nt, Homo sapiens
  misc_RNA (1)...(19): siRNA sense strand
gaucuggucauguugaaga

SEQ ID NO: 526395 - RNA, 19 nt, Homo sapiens
  misc_RNA (1)...(19): siRNA sense strand
aaacagaguaccaaggaaa

SEQ ID NO: 526396 - RNA, 19 nt, Homo sapiens
  misc_RNA (1)...(19): siRNA sense strand
gcaacuguacagagaauug

SEQ ID NO: 526397 - RNA, 19 nt, Homo sapiens
  misc_RNA (1)...(19): siRNA sense strand
acaacuccuuugacguuua

SEQ ID NO: 526398 - RNA, 19 nt, Homo sapiens
  misc_RNA (1)...(19): siRNA sense strand
agaaagaaauccggcaugu

SEQ ID NO: 526399 - RNA, 19 nt, Homo sapiens
  misc_RNA (1)...(19): siRNA sense strand
ccaaaaugauguaggaaaa

SEQ ID NO: 526400 - RNA, 19 nt, Homo sapiens
  misc_RNA (1)...(19): siRNA sense strand
uccauuaccucauaucuca

SEQ ID NO: 526401 - RNA, 19 nt, Homo sapiens
  misc_RNA (1)...(19): siRNA sense strand
gcucaagcucgaagaguaa

SEQ ID NO: 526402 - RNA, 19 nt, Homo sapiens
  misc_RNA (1)...(19): siRNA sense strand
cuagaaggaccaauauuug

SEQ ID NO: 526403 - RNA, 19 nt, Homo sapiens
  misc_RNA (1)...(19): siRNA sense strand
ggaggacagcaacuuguuu

SEQ ID NO: 526404 - RNA, 19 nt, Homo sapiens
  misc_RNA (1)...(19): siRNA sense strand
ugaaugaucccguagaauc

SEQ ID NO: 526405 - RNA, 19 nt, Homo sapiens
  misc_RNA (1)...(19): siRNA sense strand
aaagagagagaacucauug

SEQ ID NO: 526406 - RNA, 19 nt, Homo sapiens
  misc_RNA (1)...(19): siRNA sense strand
gaaagaaccaaagacaaca

SEQ ID NO: 526407 - RNA, 19 nt, Homo sapiens
  misc_RNA (1)...(19): siRNA sense strand
ccacaggaccuuaaggaau

SEQ ID NO: 526408 - RNA, 19 nt, Homo sapiens
  misc_RNA (1)...(19): siRNA sense strand
uuaauggcauggaugaaga

SEQ ID NO: 526409 - RNA, 19 nt, Homo sapiens
  misc_RNA (1)...(19): siRNA sense strand
uagaaggaccaauauuuga

SEQ ID NO: 526410 - RNA, 19 nt, Homo sapiens
  misc_RNA (1)...(19): siRNA sense strand
caggaaagcaaccagauug

SEQ ID NO: 526411 - RNA, 19 nt, Homo sapiens
  misc_RNA (1)...(19): siRNA sense strand
guggaaaucccucacuuug

SEQ ID NO: 526412 - RNA, 19 nt, Homo sapiens
  misc_RNA (1)...(19): siRNA sense strand
agaaaucucuagaagaaac

SEQ ID NO: 526413 - RNA, 19 nt, Homo sapiens
  misc_RNA (1)...(19): siRNA sense strand
guuacuagaucgacuggau

SEQ ID NO: 526414 - RNA, 19 nt, Homo sapiens
  misc_RNA (1)...(19): siRNA sense strand
gaccaauauuugauuaugg

SEQ ID NO: 526415 - RNA, 19 nt, Homo sapiens
  misc_RNA (1)...(19): siRNA sense strand
gcgguuugcaacuuaaaua

SEQ ID NO: 526416 - RNA, 19 nt, Homo sapiens
  misc_RNA (1)...(19): siRNA sense strand
ggagaagguguauccaaug

SEQ ID NO: 526417 - RNA, 19 nt, Homo sapiens
  misc_RNA (1)...(19): siRNA sense strand
ggauuaucacgaaagauuu

SEQ ID NO: 526418 - RNA, 19 nt, Homo sapiens
  misc_RNA (1)...(19): siRNA sense strand
gguggaaggagagggauua

SEQ ID NO: 526419 - RNA, 19 nt, Homo sapiens
  misc_RNA (1)...(19): siRNA sense strand
aaagaagagccacucguaa

SEQ ID NO: 526420 - RNA, 19 nt, Homo sapiens
  misc_RNA (1)...(19): siRNA sense strand
gaaaacagaguaccaagga

SEQ ID NO: 526421 - RNA, 19 nt, Homo sapiens
  misc_RNA (1)...(19): siRNA sense strand
aaugaaugaucccguagaa

SEQ ID NO: 526422 - RNA, 19 nt, Homo sapiens
  misc_RNA (1)...(19): siRNA sense strand
agacugccaucaaguuuua

SEQ ID NO: 526423 - RNA, 19 nt, Homo sapiens
  misc_RNA (1)...(19): siRNA sense strand
ccaaagagcagcaucuaac

SEQ ID NO: 526424 - RNA, 19 nt, Homo sapiens
  misc_RNA (1)...(19): siRNA sense strand
gaacuggcaagggaacuga

SEQ ID NO: 526425 - RNA, 19 nt, Homo sapiens
  misc_RNA (1)...(19): siRNA sense strand
caagaagcaaagauauuga

SEQ ID NO: 526426 - RNA, 19 nt, Homo sapiens
  misc_RNA (1)...(19): siRNA sense strand
gaagaaaccagcaagcuua

SEQ ID NO: 526427 - RNA, 19 nt, Homo sapiens
  misc_RNA (1)...(19): siRNA sense strand
ucagaaaucucuagaagaa

SEQ ID NO: 526428 - RNA, 19 nt, Homo sapiens
  misc_RNA (1)...(19): siRNA sense strand
gagauuccauuaccucaua

SEQ ID NO: 526429 - RNA, 19 nt, Homo sapiens
  misc_RNA (1)...(19): siRNA sense strand
gaacaacuccuuugacguu

SEQ ID NO: 526430 - RNA, 19 nt, Homo sapiens
  misc_RNA (1)...(19): siRNA sense strand
aagcguaucugcaggauua

SEQ ID NO: 526431 - RNA, 19 nt, Homo sapiens
  misc_RNA (1)...(19): siRNA sense strand
ggaaggagcaucaguuuga

SEQ ID NO: 526432 - RNA, 19 nt, Homo sapiens
  misc_RNA (1)...(19): siRNA sense strand
uaacuucggucuugacaaa

SEQ ID NO: 526433 - RNA, 19 nt, Homo sapiens
  misc_RNA (1)...(19): siRNA sense strand
aggagaagcuggcaaauuu

SEQ ID NO: 526434 - RNA, 19 nt, Homo sapiens
  misc_RNA (1)...(19): siRNA sense strand
gaaaccagcaagcuuauaa

SEQ ID NO: 526435 - RNA, 19 nt, Homo sapiens
  misc_RNA (1)...(19): siRNA sense strand
cagauucucuuagacauua

SEQ ID NO: 526436 - RNA, 19 nt, Homo sapiens
  misc_RNA (1)...(19): siRNA sense strand
gcaaagauauugagguucu

SEQ ID NO: 526437 - RNA, 19 nt, Homo sapiens
  misc_RNA (1)...(19): siRNA sense strand
cgucuucucuguagcauua

SEQ ID NO: 526438 - RNA, 19 nt, Homo sapiens
  misc_RNA (1)...(19): siRNA sense strand
gcagugguuucccggauua

SEQ ID NO: 526439 - RNA, 19 nt, Homo sapiens
  misc_RNA (1)...(19): siRNA sense strand
ggagagggauuagccagua

SEQ ID NO: 526440 - RNA, 19 nt, Homo sapiens
  misc_RNA (1)...(19): siRNA sense strand
ccagcaagcuuauaauaga

SEQ ID NO: 526441 - RNA, 19 nt, Homo sapiens
  misc_RNA (1)...(19): siRNA sense strand
gaaauuccauaaaccaauc

SEQ ID NO: 526442 - RNA, 19 nt, Homo sapiens
  misc_RNA (1)...(19): siRNA sense strand
ucucagagcuucauguuau

SEQ ID NO: 526443 - RNA, 19 nt, Homo sapiens
  misc_RNA (1)...(19): siRNA sense strand
ggacaaaacuuuagagcaa

SEQ ID NO: 526444 - RNA, 19 nt, Homo sapiens
  misc_RNA (1)...(19): siRNA sense strand
gcuagaaggaccaauauuu

SEQ ID NO: 526445 - RNA, 19 nt, Homo sapiens
  misc_RNA (1)...(19): siRNA sense strand
gcagacaccuuagacaaug

SEQ ID NO: 526446 - RNA, 19 nt, Homo sapiens
  misc_RNA (1)...(19): siRNA sense strand
gcaagaagcaaagauauug

SEQ ID NO: 526447 - RNA, 19 nt, Homo sapiens
  misc_RNA (1)...(19): siRNA sense strand
cacaggaccuuaaggaauu

SEQ ID NO: 526448 - RNA, 19 nt, Homo sapiens
  misc_RNA (1)...(19): siRNA sense strand
ccacgcaacuguacagaga

SEQ ID NO: 526449 - RNA, 19 nt, Homo sapiens
  misc_RNA (1)...(19): siRNA sense strand
ggaccaauauuugauuaug

SEQ ID NO: 526450 - RNA, 19 nt, Homo sapiens
  misc_RNA (1)...(19): siRNA sense strand
ggacuuaguuggacagaac

SEQ ID NO: 526451 - RNA, 19 nt, Homo sapiens
  misc_RNA (1)...(19): siRNA sense strand
gaacagaagcuccuaugca

SEQ ID NO: 526452 - RNA, 19 nt, Homo sapiens
  misc_RNA (1)...(19): siRNA sense strand
gaaccagcaucaccacuag

SEQ ID NO: 526453 - RNA, 19 nt, Homo sapiens
  misc_RNA (1)...(19): siRNA sense strand
gcaggauuaucacgaaaga

SEQ ID NO: 526454 - RNA, 19 nt, Homo sapiens
  misc_RNA (1)...(19): siRNA sense strand
gaaccaagaagacggaaau

SEQ ID NO: 526455 - RNA, 19 nt, Homo sapiens
  misc_RNA (1)...(19): siRNA sense strand
ugacagcccugaccagugu

SEQ ID NO: 526456 - RNA, 19 nt, Homo sapiens
  misc_RNA (1)...(19): siRNA sense strand
aagcaaagauauugagguu

SEQ ID NO: 526457 - RNA, 19 nt, Homo sapiens
  misc_RNA (1)...(19): siRNA sense strand
aaagauccuuggaaacaaa

SEQ ID NO: 526458 - RNA, 19 nt, Homo sapiens
  misc_RNA (1)...(19): siRNA sense strand
gacaucaaguggaaaccua

SEQ ID NO: 526459 - RNA, 19 nt, Homo sapiens
  misc_RNA (1)...(19): siRNA sense strand
gaaggaccaauauuugauu

SEQ ID NO: 526460 - RNA, 19 nt, Homo sapiens
  misc_RNA (1)...(19): siRNA sense strand
caacugaugccuuaacuuc

SEQ ID NO: 526461 - RNA, 19 nt, Homo sapiens
  misc_RNA (1)...(19): siRNA sense strand
ugccacaacugaugccuua

SEQ ID NO: 526462 - RNA, 19 nt, Homo sapiens
  misc_RNA (1)...(19): siRNA sense strand
caugacagaugacaaagug

SEQ ID NO: 526463 - RNA, 19 nt, Homo sapiens
  misc_RNA (1)...(19): siRNA sense strand
ggacacagacaaauaucuu

SEQ ID NO: 526464 - RNA, 19 nt, Homo sapiens
  misc_RNA (1)...(19): siRNA sense strand
agaaaucacuccagaagca

SEQ ID NO: 526465 - RNA, 19 nt, Homo sapiens
  misc_RNA (1)...(19): siRNA sense strand
guacagagaauugauaugu

SEQ ID NO: 526466 - RNA, 19 nt, Homo sapiens
  misc_RNA (1)...(19): siRNA sense strand
gcacgggacagcaugauga

SEQ ID NO: 526467 - RNA, 19 nt, Homo sapiens
  misc_RNA (1)...(19): siRNA sense strand
uaucagaaaucucuagaag

SEQ ID NO: 526468 - RNA, 19 nt, Homo sapiens
  misc_RNA (1)...(19): siRNA sense strand
caucaccacuagcagcaua

SEQ ID NO: 526469 - RNA, 19 nt, Homo sapiens
  misc_RNA (1)...(19): siRNA sense strand
caaaggagaagcuggcaaa

SEQ ID NO: 526470 - RNA, 19 nt, Homo sapiens
  misc_RNA (1)...(19): siRNA sense strand
gagaagguguauccaaugg

SEQ ID NO: 526471 - RNA, 19 nt, Homo sapiens
  misc_RNA (1)...(19): siRNA sense strand
ggaagucgcaagaagcaaa

SEQ ID NO: 526472 - RNA, 19 nt, Homo sapiens
  misc_RNA (1)...(19): siRNA sense strand
caaugucaaucuuguuuca

SEQ ID NO: 526473 - RNA, 19 nt, Homo sapiens
  misc_RNA (1)...(19): siRNA sense strand
caacuccuuugacguuuau

SEQ ID NO: 526474 - RNA, 19 nt, Homo sapiens
  misc_RNA (1)...(19): siRNA sense strand
ggauuaagcaggaaagcaa

SEQ ID NO: 526475 - RNA, 19 nt, Homo sapiens
  misc_RNA (1)...(19): siRNA sense strand
gagaagcuggcaaauuuga

SEQ ID NO: 526476 - RNA, 19 nt, Homo sapiens
  misc_RNA (1)...(19): siRNA sense strand
gaaucuuccuugcgauguu

SEQ ID NO: 526477 - RNA, 19 nt, Homo sapiens
  misc_RNA (1)...(19): siRNA sense strand
cgaaucaccugccguuugg

SEQ ID NO: 526478 - RNA, 19 nt, Homo sapiens
  misc_RNA (1)...(19): siRNA sense strand
cagcaagcuuauaauagaa

SEQ ID NO: 526479 - RNA, 19 nt, Homo sapiens
  misc_RNA (1)...(19): siRNA sense strand
aggaaacucugaaaccaaa

SEQ ID NO: 526480 - RNA, 19 nt, Homo sapiens
  misc_RNA (1)...(19): siRNA sense strand
caaggaaacucugaaacca

SEQ ID NO: 526481 - RNA, 19 nt, Homo sapiens
  misc_RNA (1)...(19): siRNA sense strand
gaagacaucacaggaacaa

SEQ ID NO: 526482 - RNA, 19 nt, Homo sapiens
  misc_RNA (1)...(19): siRNA sense strand
gggacagcaugaugauuga

SEQ ID NO: 526483 - RNA, 19 nt, Homo sapiens
  misc_RNA (1)...(19): siRNA sense strand
aaugagacaucaaguggaa

SEQ ID NO: 526484 - RNA, 19 nt, Homo sapiens
  misc_RNA (1)...(19): siRNA sense strand
acagagaauugauaugugu

SEQ ID NO: 526485 - RNA, 19 nt, Homo sapiens
  misc_RNA (1)...(19): siRNA sense strand
gcaggaaagcaaccagauu

SEQ ID NO: 526486 - RNA, 19 nt, Homo sapiens
  misc_RNA (1)...(19): siRNA sense strand
uggcauggaugaagaacuu

SEQ ID NO: 526487 - RNA, 19 nt, Homo sapiens
  misc_RNA (1)...(19): siRNA sense strand
ugauucagauucucuuaga

SEQ ID NO: 526488 - RNA, 19 nt, Homo sapiens
  misc_RNA (1)...(19): siRNA sense strand
gcaagcuuauaauagaaga

SEQ ID NO: 526489 - RNA, 19 nt, Homo sapiens
  misc_RNA (1)...(19): siRNA sense strand
ucgaauagauauagugaca

SEQ ID NO: 526490 - RNA, 19 nt, Homo sapiens
  misc_RNA (1)...(19): siRNA sense strand
gaauugauauguguuccau

SEQ ID NO: 526491 - RNA, 19 nt, Homo sapiens
  misc_RNA (1)...(19): siRNA sense strand
cauaaaccaaucacaauga

SEQ ID NO: 526492 - RNA, 19 nt, Homo sapiens
  misc_RNA (1)...(19): siRNA sense strand
ugauagcccagaagaguua

SEQ ID NO: 526493 - RNA, 19 nt, Homo sapiens
  misc_RNA (1)...(19): siRNA sense strand
cauucuggguuucugguua

SEQ ID NO: 526494 - RNA, 19 nt, Homo sapiens
  misc_RNA (1)...(19): siRNA sense strand
gaucuggucauguugaaga

SEQ ID NO: 526495 - RNA, 19 nt, Homo sapiens
  misc_RNA (1)...(19): siRNA sense strand
aaacagaguaccaaggaaa

SEQ ID NO: 526496 - RNA, 19 nt, Homo sapiens
  misc_RNA (1)...(19): siRNA sense strand
gcaacuguacagagaauug

SEQ ID NO: 526497 - RNA, 19 nt, Homo sapiens
  misc_RNA (1)...(19): siRNA sense strand
acaacuccuuugacguuua

SEQ ID NO: 526498 - RNA, 19 nt, Homo sapiens
  misc_RNA (1)...(19): siRNA sense strand
agaaagaaauccggcaugu

SEQ ID NO: 526499 - RNA, 19 nt, Homo sapiens
  misc_RNA (1)...(19): siRNA sense strand
ccaaaaugauguaggaaaa

SEQ ID NO: 526500 - RNA, 19 nt, Homo sapiens
  misc_RNA (1)...(19): siRNA sense strand
uccauuaccucauaucuca

SEQ ID NO: 526501 - RNA, 19 nt, Homo sapiens
  misc_RNA (1)...(19): siRNA sense strand
gcucaagcucgaagaguaa

SEQ ID NO: 526502 - RNA, 19 nt, Homo sapiens
  misc_RNA (1)...(19): siRNA sense strand
cuagaaggaccaauauuug

SEQ ID NO: 526503 - RNA, 19 nt, Homo sapiens
  misc_RNA (1)...(19): siRNA sense strand
ggaggacagcaacuuguuu

SEQ ID NO: 526504 - RNA, 19 nt, Homo sapiens
  misc_RNA (1)...(19): siRNA sense strand
ugaaugaucccguagaauc

SEQ ID NO: 526505 - RNA, 19 nt, Homo sapiens
  misc_RNA (1)...(19): siRNA sense strand
aaagagagagaacucauug

SEQ ID NO: 526506 - RNA, 19 nt, Homo sapiens
  misc_RNA (1)...(19): siRNA sense strand
gaaagaaccaaagacaaca

SEQ ID NO: 526507 - RNA, 19 nt, Homo sapiens
  misc_RNA (1)...(19): siRNA sense strand
ccacaggaccuuaaggaau

SEQ ID NO: 526508 - RNA, 19 nt, Homo sapiens
  misc_RNA (1)...(19): siRNA sense strand
uuaauggcauggaugaaga

SEQ ID NO: 526509 - RNA, 19 nt, Homo sapiens
  misc_RNA (1)...(19): siRNA sense strand
uagaaggaccaauauuuga

SEQ ID NO: 526510 - RNA, 19 nt, Homo sapiens
  misc_RNA (1)...(19): siRNA sense strand
caggaaagcaaccagauug

SEQ ID NO: 526511 - RNA, 19 nt, Homo sapiens
  misc_RNA (1)...(19): siRNA sense strand
guggaaaucccucacuuug

SEQ ID NO: 526512 - RNA, 19 nt, Homo sapiens
  misc_RNA (1)...(19): siRNA sense strand
agaaaucucuagaagaaac

SEQ ID NO: 526513 - RNA, 19 nt, Homo sapiens
  misc_RNA (1)...(19): siRNA sense strand
guuacuagaucgacuggau

SEQ ID NO: 526514 - RNA, 19 nt, Homo sapiens
  misc_RNA (1)...(19): siRNA sense strand
gaccaauauuugauuaugg

SEQ ID NO: 526515 - RNA, 19 nt, Homo sapiens
  misc_RNA (1)...(19): siRNA sense strand
gcgguuugcaacuuaaaua

SEQ ID NO: 526516 - RNA, 19 nt, Homo sapiens
  misc_RNA (1)...(19): siRNA sense strand
ggagaagguguauccaaug

SEQ ID NO: 526517 - RNA, 19 nt, Homo sapiens
  misc_RNA (1)...(19): siRNA sense strand
ggauuaucacgaaagauuu

SEQ ID NO: 526518 - RNA, 19 nt, Homo sapiens
  misc_RNA (1)...(19): siRNA sense strand
gguggaaggagagggauua

SEQ ID NO: 526519 - RNA, 19 nt, Homo sapiens
  misc_RNA (1)...(19): siRNA sense strand
aaagaagagccacucguaa

SEQ ID NO: 526520 - RNA, 19 nt, Homo sapiens
  misc_RNA (1)...(19): siRNA sense strand
gaaaacagaguaccaagga

SEQ ID NO: 526521 - RNA, 19 nt, Homo sapiens
  misc_RNA (1)...(19): siRNA sense strand
aaugaaugaucccguagaa

SEQ ID NO: 526522 - RNA, 19 nt, Homo sapiens
  misc_RNA (1)...(19): siRNA sense strand
agacugccaucaaguuuua

SEQ ID NO: 526523 - RNA, 19 nt, Homo sapiens
  misc_RNA (1)...(19): siRNA sense strand
ccaaagagcagcaucuaac

SEQ ID NO: 526524 - RNA, 19 nt, Homo sapiens
  misc_RNA (1)...(19): siRNA sense strand
gaacuggcaagggaacuga

SEQ ID NO: 526525 - RNA, 19 nt, Homo sapiens
  misc_RNA (1)...(19): siRNA sense strand
caagaagcaaagauauuga

SEQ ID NO: 526526 - RNA, 19 nt, Homo sapiens
  misc_RNA (1)...(19): siRNA sense strand
gaagauggguguugacaaa

SEQ ID NO: 526527 - RNA, 19 nt, Homo sapiens
  misc_RNA (1)...(19): siRNA sense strand
gaacgugacuucuacuuca

SEQ ID NO: 526528 - RNA, 19 nt, Homo sapiens
  misc_RNA (1)...(19): siRNA sense strand
ugaagagcaucaacaagaa

SEQ ID NO: 526529 - RNA, 19 nt, Homo sapiens
  misc_RNA (1)...(19): siRNA sense strand
ccucaacuauaccaagaua

SEQ ID NO: 526530 - RNA, 19 nt, Homo sapiens
  misc_RNA (1)...(19): siRNA sense strand
aaucauuccuguagagaaa

SEQ ID NO: 526531 - RNA, 19 nt, Homo sapiens
  misc_RNA (1)...(19): siRNA sense strand
guagagaaauuagugaaag

SEQ ID NO: 526532 - RNA, 19 nt, Homo sapiens
  misc_RNA (1)...(19): siRNA sense strand
ugagacugaugcccaaauu

SEQ ID NO: 526533 - RNA, 19 nt, Homo sapiens
  misc_RNA (1)...(19): siRNA sense strand
gccaggagcaugaaaguga

SEQ ID NO: 526534 - RNA, 19 nt, Homo sapiens
  misc_RNA (1)...(19): siRNA sense strand
gaauacauccacaacuuca

SEQ ID NO: 526535 - RNA, 19 nt, Homo sapiens
  misc_RNA (1)...(19): siRNA sense strand
caaacuagagcaugaauac

SEQ ID NO: 526536 - RNA, 19 nt, Homo sapiens
  misc_RNA (1)...(19): siRNA sense strand
cagcaaacuucgugacauc

SEQ ID NO: 526537 - RNA, 19 nt, Homo sapiens
  misc_RNA (1)...(19): siRNA sense strand
aaacuaugauggaaaggau

SEQ ID NO: 526538 - RNA, 19 nt, Homo sapiens
  misc_RNA (1)...(19): siRNA sense strand
uggaugggcuggagaagga

SEQ ID NO: 526539 - RNA, 19 nt, Homo sapiens
  misc_RNA (1)...(19): siRNA sense strand
aagaagaccaggacgagua

SEQ ID NO: 526540 - RNA, 19 nt, Homo sapiens
  misc_RNA (1)...(19): siRNA sense strand
aaucugagucgccaugaua

SEQ ID NO: 526541 - RNA, 19 nt, Homo sapiens
  misc_RNA (1)...(19): siRNA sense strand
caagauagaacagcuuugu

SEQ ID NO: 526542 - RNA, 19 nt, Homo sapiens
  misc_RNA (1)...(19): siRNA sense strand
caacaaauccaagaaacuc

SEQ ID NO: 526543 - RNA, 19 nt, Homo sapiens
  misc_RNA (1)...(19): siRNA sense strand
ccaggagcaugaaagugaa

SEQ ID NO: 526544 - RNA, 19 nt, Homo sapiens
  misc_RNA (1)...(19): siRNA sense strand
caccucaacuauaccaaga

SEQ ID NO: 526545 - RNA, 19 nt, Homo sapiens
  misc_RNA (1)...(19): siRNA sense strand
gaguuuauucagugguuua

SEQ ID NO: 526546 - RNA, 19 nt, Homo sapiens
  misc_RNA (1)...(19): siRNA sense strand
augaauacauccacaacuu

SEQ ID NO: 526547 - RNA, 19 nt, Homo sapiens
  misc_RNA (1)...(19): siRNA sense strand
gagaaauuagugaaaggaa

SEQ ID NO: 526548 - RNA, 19 nt, Homo sapiens
  misc_RNA (1)...(19): siRNA sense strand
ggaacgugacuucuacuuc

SEQ ID NO: 526549 - RNA, 19 nt, Homo sapiens
  misc_RNA (1)...(19): siRNA sense strand
ugaggacgaugagauugaa

SEQ ID NO: 526550 - RNA, 19 nt, Homo sapiens
  misc_RNA (1)...(19): siRNA sense strand
ccaaacuagagcaugaaua

SEQ ID NO: 526551 - RNA, 19 nt, Homo sapiens
  misc_RNA (1)...(19): siRNA sense strand
ugacuucuacuucagcaaa

SEQ ID NO: 526552 - RNA, 19 nt, Homo sapiens
  misc_RNA (1)...(19): siRNA sense strand
aggccaaacuagagcauga

SEQ ID NO: 526553 - RNA, 19 nt, Homo sapiens
  misc_RNA (1)...(19): siRNA sense strand
gaagagcaucaacaagaag

SEQ ID NO: 526554 - RNA, 19 nt, Homo sapiens
  misc_RNA (1)...(19): siRNA sense strand
ccggaagaauccuccauca

SEQ ID NO: 526555 - RNA, 19 nt, Homo sapiens
  misc_RNA (1)...(19): siRNA sense strand
gacgcaaacuaugauggaa

SEQ ID NO: 526556 - RNA, 19 nt, Homo sapiens
  misc_RNA (1)...(19): siRNA sense strand
ucauuccuguagagaaauu

SEQ ID NO: 526557 - RNA, 19 nt, Homo sapiens
  misc_RNA (1)...(19): siRNA sense strand
caaauccaagaaacucauu

SEQ ID NO: 526558 - RNA, 19 nt, Homo sapiens
  misc_RNA (1)...(19): siRNA sense strand
acuaugauggaaaggauua

SEQ ID NO: 526559 - RNA, 19 nt, Homo sapiens
  misc_RNA (1)...(19): siRNA sense strand
caaaaucauuccuguagag

SEQ ID NO: 526560 - RNA, 19 nt, Homo sapiens
  misc_RNA (1)...(19): siRNA sense strand
caacagcugguggacuuga

SEQ ID NO: 526561 - RNA, 19 nt, Homo sapiens
  misc_RNA (1)...(19): siRNA sense strand
caaacuaugauggaaagga

SEQ ID NO: 526562 - RNA, 19 nt, Homo sapiens
  misc_RNA (1)...(19): siRNA sense strand
cgcaaacuaugauggaaag

SEQ ID NO: 526563 - RNA, 19 nt, Homo sapiens
  misc_RNA (1)...(19): siRNA sense strand
uagagaaauuagugaaagg

SEQ ID NO: 526564 - RNA, 19 nt, Homo sapiens
  misc_RNA (1)...(19): siRNA sense strand
gcaaacuucgugacaucga

SEQ ID NO: 526565 - RNA, 19 nt, Homo sapiens
  misc_RNA (1)...(19): siRNA sense strand
caucauuggcauccucuau

SEQ ID NO: 526566 - RNA, 19 nt, Homo sapiens
  misc_RNA (1)...(19): siRNA sense strand
ugaauacauccacaacuuc

SEQ ID NO: 526567 - RNA, 19 nt, Homo sapiens
  misc_RNA (1)...(19): siRNA sense strand
ugacgcaaacuaugaugga

SEQ ID NO: 526568 - RNA, 19 nt, Homo sapiens
  misc_RNA (1)...(19): siRNA sense strand
gagucgccaugauaugcuu

SEQ ID NO: 526569 - RNA, 19 nt, Homo sapiens
  misc_RNA (1)...(19): siRNA sense strand
gacaaaaucauuccuguag

SEQ ID NO: 526570 - RNA, 19 nt, Homo sapiens
  misc_RNA (1)...(19): siRNA sense strand
ugugugcacuugaggaaag

SEQ ID NO: 526571 - RNA, 19 nt, Homo sapiens
  misc_RNA (1)...(19): siRNA sense strand
ucagcaaacuucgugacau

SEQ ID NO: 526572 - RNA, 19 nt, Homo sapiens
  misc_RNA (1)...(19): siRNA sense strand
agacugaugcccaaauucu

SEQ ID NO: 526573 - RNA, 19 nt, Homo sapiens
  misc_RNA (1)...(19): siRNA sense strand
acuagagcaugaauacauc

SEQ ID NO: 526574 - RNA, 19 nt, Homo sapiens
  misc_RNA (1)...(19): siRNA sense strand
ucagugguuuaagaaauuc

SEQ ID NO: 526575 - RNA, 19 nt, Homo sapiens
  misc_RNA (1)...(19): siRNA sense strand
ucccugcaccucaacuaua

SEQ ID NO: 526576 - RNA, 19 nt, Homo sapiens
  misc_RNA (1)...(19): siRNA sense strand
gcugugugcacuugaggaa

SEQ ID NO: 526577 - RNA, 19 nt, Homo sapiens
  misc_RNA (1)...(19): siRNA sense strand
cuucaacaaauccaagaaa

SEQ ID NO: 526578 - RNA, 19 nt, Homo sapiens
  misc_RNA (1)...(19): siRNA sense strand
ugaguuuauucagugguuu

SEQ ID NO: 526579 - RNA, 19 nt, Homo sapiens
  misc_RNA (1)...(19): siRNA sense strand
gagacugaugcccaaauuc

SEQ ID NO: 526580 - RNA, 19 nt, Homo sapiens
  misc_RNA (1)...(19): siRNA sense strand
ggacgaugagauugaagag

SEQ ID NO: 526581 - RNA, 19 nt, Homo sapiens
  misc_RNA (1)...(19): siRNA sense strand
gcccaaauucuugaacuca

SEQ ID NO: 526582 - RNA, 19 nt, Homo sapiens
  misc_RNA (1)...(19): siRNA sense strand
gcaugaauacauccacaac

SEQ ID NO: 526583 - RNA, 19 nt, Homo sapiens
  misc_RNA (1)...(19): siRNA sense strand
ggaacuagaugucauguau

SEQ ID NO: 526584 - RNA, 19 nt, Homo sapiens
  misc_RNA (1)...(19): siRNA sense strand
ggauaaaucgauucaugua

SEQ ID NO: 526585 - RNA, 19 nt, Homo sapiens
  misc_RNA (1)...(19): siRNA sense strand
gcacacccagccuaaguua

SEQ ID NO: 526586 - RNA, 19 nt, Homo sapiens
  misc_RNA (1)...(19): siRNA sense strand
ggagagagcugggcaccau

SEQ ID NO: 526587 - RNA, 19 nt, Homo sapiens
  misc_RNA (1)...(19): siRNA sense strand
aggaggaccuggacaagua

SEQ ID NO: 526588 - RNA, 19 nt, Homo sapiens
  misc_RNA (1)...(19): siRNA sense strand
ggaaauccaaggaggaauu

SEQ ID NO: 526589 - RNA, 19 nt, Homo sapiens
  misc_RNA (1)...(19): siRNA sense strand
caacuccagugacaucuuc

SEQ ID NO: 526590 - RNA, 19 nt, Homo sapiens
  misc_RNA (1)...(19): siRNA sense strand
gacucugacuuccaagaua

SEQ ID NO: 526591 - RNA, 19 nt, Homo sapiens
  misc_RNA (1)...(19): siRNA sense strand
ggaccaggguggcuucaag

SEQ ID NO: 526592 - RNA, 19 nt, Homo sapiens
  misc_RNA (1)...(19): siRNA sense strand
caggacagcucagagaaug

SEQ ID NO: 526593 - RNA, 19 nt, Homo sapiens
  misc_RNA (1)...(19): siRNA sense strand
gagcugggcaccauggaaa

SEQ ID NO: 526594 - RNA, 19 nt, Homo sapiens
  misc_RNA (1)...(19): siRNA sense strand
gucaacaacuugcggcuau

SEQ ID NO: 526595 - RNA, 19 nt, Homo sapiens
  misc_RNA (1)...(19): siRNA sense strand
gauaacagcagaagucaac

SEQ ID NO: 526596 - RNA, 19 nt, Homo sapiens
  misc_RNA (1)...(19): siRNA sense strand
ccacaaggcuuuuccaagu

SEQ ID NO: 526597 - RNA, 19 nt, Homo sapiens
  misc_RNA (1)...(19): siRNA sense strand
gaagggcuguaauggugau

SEQ ID NO: 526598 - RNA, 19 nt, Homo sapiens
  misc_RNA (1)...(19): siRNA sense strand
ggaggaggacuucuacauc

SEQ ID NO: 526599 - RNA, 19 nt, Homo sapiens
  misc_RNA (1)...(19): siRNA sense strand
cagcaucaaccaucucuga

SEQ ID NO: 526600 - RNA, 19 nt, Homo sapiens
  misc_RNA (1)...(19): siRNA sense strand
caggguggcuucaagaucu

SEQ ID NO: 526601 - RNA, 19 nt, Homo sapiens
  misc_RNA (1)...(19): siRNA sense strand
aagcagcucuuccggacuu

SEQ ID NO: 526602 - RNA, 19 nt, Homo sapiens
  misc_RNA (1)...(19): siRNA sense strand
gaacuagaugucauguaug

SEQ ID NO: 526603 - RNA, 19 nt, Homo sapiens
  misc_RNA (1)...(19): siRNA sense strand
agggauaaaucgauucaug

SEQ ID NO: 526604 - RNA, 19 nt, Homo sapiens
  misc_RNA (1)...(19): siRNA sense strand
ccacugcggaugagauuga

SEQ ID NO: 526605 - RNA, 19 nt, Homo sapiens
  misc_RNA (1)...(19): siRNA sense strand
gggauaaaucgauucaugu

SEQ ID NO: 526606 - RNA, 19 nt, Homo sapiens
  misc_RNA (1)...(19): siRNA sense strand
ugagauaacagcagaaguc

SEQ ID NO: 526607 - RNA, 19 nt, Homo sapiens
  misc_RNA (1)...(19): siRNA sense strand
gcagcagcaucaaccaucu

SEQ ID NO: 526608 - RNA, 19 nt, Homo sapiens
  misc_RNA (1)...(19): siRNA sense strand
gccaugagccucccaccuu

SEQ ID NO: 526609 - RNA, 19 nt, Homo sapiens
  misc_RNA (1)...(19): siRNA sense strand
ccaagaccagcauuucuga

SEQ ID NO: 526610 - RNA, 19 nt, Homo sapiens
  misc_RNA (1)...(19): siRNA sense strand
gaaauccaaggaggaauuc

SEQ ID NO: 526611 - RNA, 19 nt, Homo sapiens
  misc_RNA (1)...(19): siRNA sense strand
ggacagcucagagaaugau

SEQ ID NO: 526612 - RNA, 19 nt, Homo sapiens
  misc_RNA (1)...(19): siRNA sense strand
cgggagggauaaaucgauu

SEQ ID NO: 526613 - RNA, 19 nt, Homo sapiens
  misc_RNA (1)...(19): siRNA sense strand
ggagggauaaaucgauuca

SEQ ID NO: 526614 - RNA, 19 nt, Homo sapiens
  misc_RNA (1)...(19): siRNA sense strand
cauguaugguggcguccua

SEQ ID NO: 526615 - RNA, 19 nt, Homo sapiens
  misc_RNA (1)...(19): siRNA sense strand
gagccucccaccuucauug

SEQ ID NO: 526616 - RNA, 19 nt, Homo sapiens
  misc_RNA (1)...(19): siRNA sense strand
acucugacuuccaagauau

SEQ ID NO: 526617 - RNA, 19 nt, Homo sapiens
  misc_RNA (1)...(19): siRNA sense strand
guaugguggcguccuagua

SEQ ID NO: 526618 - RNA, 19 nt, Homo sapiens
  misc_RNA (1)...(19): siRNA sense strand
agauuggugugguggauga

SEQ ID NO: 526619 - RNA, 19 nt, Homo sapiens
  misc_RNA (1)...(19): siRNA sense strand
uaacagcagaagucaacaa

SEQ ID NO: 526620 - RNA, 19 nt, Homo sapiens
  misc_RNA (1)...(19): siRNA sense strand
gccuguaccaugucuauga

SEQ ID NO: 526621 - RNA, 19 nt, Homo sapiens
  misc_RNA (1)...(19): siRNA sense strand
gagauaacagcagaaguca

SEQ ID NO: 526622 - RNA, 19 nt, Homo sapiens
  misc_RNA (1)...(19): siRNA sense strand
ccagugacaucuucuugcu

SEQ ID NO: 526623 - RNA, 19 nt, Homo sapiens
  misc_RNA (1)...(19): siRNA sense strand
gcauccaccacaaggcuuu

SEQ ID NO: 526624 - RNA, 19 nt, Homo sapiens
  misc_RNA (1)...(19): siRNA sense strand
uuggaugguucuucacuug

SEQ ID NO: 526625 - RNA, 19 nt, Homo sapiens
  misc_RNA (1)...(19): siRNA sense strand
gcaggaggaggacuucuac

SEQ ID NO: 526626 - RNA, 19 nt, Homo sapiens
  misc_RNA (1)...(19): siRNA sense strand
uguaccaugucuaugagaa

SEQ ID NO: 526627 - RNA, 19 nt, Homo sapiens
  misc_RNA (1)...(19): siRNA sense strand
ucacagccagcgucugcua

SEQ ID NO: 526628 - RNA, 19 nt, Homo sapiens
  misc_RNA (1)...(19): siRNA sense strand
gaccaggguggcuucaaga

SEQ ID NO: 526629 - RNA, 19 nt, Homo sapiens
  misc_RNA (1)...(19): siRNA sense strand
ggaggaccuggacaaguau

SEQ ID NO: 526630 - RNA, 19 nt, Homo sapiens
  misc_RNA (1)...(19): siRNA sense strand
gguggucacugucauuucc

SEQ ID NO: 526631 - RNA, 19 nt, Homo sapiens
  misc_RNA (1)...(19): siRNA sense strand
gcugggccguguucaguac

SEQ ID NO: 526632 - RNA, 19 nt, Homo sapiens
  misc_RNA (1)...(19): siRNA sense strand
gcaccagcgccacgaucaa

SEQ ID NO: 526633 - RNA, 19 nt, Homo sapiens
  misc_RNA (1)...(19): siRNA sense strand
ccucccaccuucauuggau

SEQ ID NO: 526634 - RNA, 19 nt, Homo sapiens
  misc_RNA (1)...(19): siRNA sense strand
gguggaugaugaggccaaa

SEQ ID NO: 526635 - RNA, 19 nt, Homo sapiens
  misc_RNA (1)...(19): siRNA sense strand
aacuagaugucauguaugg

SEQ ID NO: 526636 - RNA, 19 nt, Homo sapiens
  misc_RNA (1)...(19): siRNA sense strand
acugcuaccuugugcucua

SEQ ID NO: 526637 - RNA, 19 nt, Homo sapiens
  misc_RNA (1)...(19): siRNA sense strand
gcaacgcugaggaacuaga

SEQ ID NO: 526638 - RNA, 19 nt, Homo sapiens
  misc_RNA (1)...(19): siRNA sense strand
gcacugacagccacaacac

SEQ ID NO: 526639 - RNA, 19 nt, Homo sapiens
  misc_RNA (1)...(19): siRNA sense strand
gagauugaggcccugaaca

SEQ ID NO: 526640 - RNA, 19 nt, Homo sapiens
  misc_RNA (1)...(19): siRNA sense strand
aauccaaggaggaauucua

SEQ ID NO: 526641 - RNA, 19 nt, Homo sapiens
  misc_RNA (1)...(19): siRNA sense strand
gggcuggcuuugaccuaca

SEQ ID NO: 526642 - RNA, 19 nt, Homo sapiens
  misc_RNA (1)...(19): siRNA sense strand
ggccaauguucgccuguac

SEQ ID NO: 526643 - RNA, 19 nt, Homo sapiens
  misc_RNA (1)...(19): siRNA sense strand
cgucugcuaccucugguuu

SEQ ID NO: 526644 - RNA, 19 nt, Homo sapiens
  misc_RNA (1)...(19): siRNA sense strand
ggccacugcggaugagauu

SEQ ID NO: 526645 - RNA, 19 nt, Homo sapiens
  misc_RNA (1)...(19): siRNA sense strand
gggcccaagaccagcauuu

SEQ ID NO: 526646 - RNA, 19 nt, Homo sapiens
  misc_RNA (1)...(19): siRNA sense strand
ccaggacagcucagagaau

SEQ ID NO: 526647 - RNA, 19 nt, Homo sapiens
  misc_RNA (1)...(19): siRNA sense strand
ccaggaagaaugaggaaac

SEQ ID NO: 526648 - RNA, 19 nt, Homo sapiens
  misc_RNA (1)...(19): siRNA sense strand
ccacuuccucgccaucuuc

SEQ ID NO: 526649 - RNA, 19 nt, Homo sapiens
  misc_RNA (1)...(19): siRNA sense strand
uugaggcccugaacagcaa

SEQ ID NO: 526650 - RNA, 19 nt, Homo sapiens
  misc_RNA (1)...(19): siRNA sense strand
ucccucaacuccagugaca

SEQ ID NO: 526651 - RNA, 19 nt, Homo sapiens
  misc_RNA (1)...(19): siRNA sense strand
uggcagggacgcaugucua

SEQ ID NO: 526652 - RNA, 19 nt, Homo sapiens
  misc_RNA (1)...(19): siRNA sense strand
ccaaggaggaauucuacag

SEQ ID NO: 526653 - RNA, 19 nt, Homo sapiens
  misc_RNA (1)...(19): siRNA sense strand
ccacccgucccacaaggaa

SEQ ID NO: 526654 - RNA, 19 nt, Homo sapiens
  misc_RNA (1)...(19): siRNA sense strand
ccaccuucauuggaugguu

SEQ ID NO: 526655 - RNA, 19 nt, Homo sapiens
  misc_RNA (1)...(19): siRNA sense strand
caacgcugaggaacuagau

SEQ ID NO: 526656 - RNA, 19 nt, Homo sapiens
  misc_RNA (1)...(19): siRNA sense strand
cagcgguccuuaccagaaa

SEQ ID NO: 526657 - RNA, 19 nt, Homo sapiens
  misc_RNA (1)...(19): siRNA sense strand
gaaaggccacgugaagaug

SEQ ID NO: 526658 - RNA, 19 nt, Homo sapiens
  misc_RNA (1)...(19): siRNA sense strand
ggaagcuucuguucaaucc

SEQ ID NO: 526659 - RNA, 19 nt, Homo sapiens
  misc_RNA (1)...(19): siRNA sense strand
ugaaaggccacgugaagau

SEQ ID NO: 526660 - RNA, 19 nt, Homo sapiens
  misc_RNA (1)...(19): siRNA sense strand
gcacuugugacagcaguau

SEQ ID NO: 526661 - RNA, 19 nt, Homo sapiens
  misc_RNA (1)...(19): siRNA sense strand
accggaagcuucuguucaa

SEQ ID NO: 526662 - RNA, 19 nt, Homo sapiens
  misc_RNA (1)...(19): siRNA sense strand
gugaaaggccacgugaaga

SEQ ID NO: 526663 - RNA, 19 nt, Homo sapiens
  misc_RNA (1)...(19): siRNA sense strand
ccagcgguccuuaccagaa

SEQ ID NO: 526664 - RNA, 19 nt, Homo sapiens
  misc_RNA (1)...(19): siRNA sense strand
cagcgguccuuaccagaaa

SEQ ID NO: 526665 - RNA, 19 nt, Homo sapiens
  misc_RNA (1)...(19): siRNA sense strand
gaaaggccacgugaagaug

SEQ ID NO: 526666 - RNA, 19 nt, Homo sapiens
  misc_RNA (1)...(19): siRNA sense strand
ggaagcuucuguucaaucc

SEQ ID NO: 526667 - RNA, 19 nt, Homo sapiens
  misc_RNA (1)...(19): siRNA sense strand
ugaaaggccacgugaagau

SEQ ID NO: 526668 - RNA, 19 nt, Homo sapiens
  misc_RNA (1)...(19): siRNA sense strand
gcacuugugacagcaguau

SEQ ID NO: 526669 - RNA, 19 nt, Homo sapiens
  misc_RNA (1)...(19): siRNA sense strand
accggaagcuucuguucaa

SEQ ID NO: 526670 - RNA, 19 nt, Homo sapiens
  misc_RNA (1)...(19): siRNA sense strand
gugaaaggccacgugaaga

SEQ ID NO: 526671 - RNA, 19 nt, Homo sapiens
  misc_RNA (1)...(19): siRNA sense strand
ccagcgguccuuaccagaa

SEQ ID NO: 526672 - RNA, 19 nt, Homo sapiens
  misc_RNA (1)...(19): siRNA sense strand
cagcgguccuuaccagaaa

SEQ ID NO: 526673 - RNA, 19 nt, Homo sapiens
  misc_RNA (1)...(19): siRNA sense strand
gaaaggccacgugaagaug

SEQ ID NO: 526674 - RNA, 19 nt, Homo sapiens
  misc_RNA (1)...(19): siRNA sense strand
ggaagcuucuguucaaucc

SEQ ID NO: 526675 - RNA, 19 nt, Homo sapiens
  misc_RNA (1)...(19): siRNA sense strand
ugaaaggccacgugaagau

SEQ ID NO: 526676 - RNA, 19 nt, Homo sapiens
  misc_RNA (1)...(19): siRNA sense strand
gcacuugugacagcaguau

SEQ ID NO: 526677 - RNA, 19 nt, Homo sapiens
  misc_RNA (1)...(19): siRNA sense strand
accggaagcuucuguucaa

SEQ ID NO: 526678 - RNA, 19 nt, Homo sapiens
  misc_RNA (1)...(19): siRNA sense strand
gugaaaggccacgugaaga

SEQ ID NO: 526679 - RNA, 19 nt, Homo sapiens
  misc_RNA (1)...(19): siRNA sense strand
ccagcgguccuuaccagaa

SEQ ID NO: 526680 - RNA, 19 nt, Homo sapiens
  misc_RNA (1)...(19): siRNA sense strand
cagcgguccuuaccagaaa

SEQ ID NO: 526681 - RNA, 19 nt, Homo sapiens
  misc_RNA (1)...(19): siRNA sense strand
gaaaggccacgugaagaug

SEQ ID NO: 526682 - RNA, 19 nt, Homo sapiens
  misc_RNA (1)...(19): siRNA sense strand
ggaagcuucuguucaaucc

SEQ ID NO: 526683 - RNA, 19 nt, Homo sapiens
  misc_RNA (1)...(19): siRNA sense strand
ugaaaggccacgugaagau

SEQ ID NO: 526684 - RNA, 19 nt, Homo sapiens
  misc_RNA (1)...(19): siRNA sense strand
gcacuugugacagcaguau

SEQ ID NO: 526685 - RNA, 19 nt, Homo sapiens
  misc_RNA (1)...(19): siRNA sense strand
accggaagcuucuguucaa

SEQ ID NO: 526686 - RNA, 19 nt, Homo sapiens
  misc_RNA (1)...(19): siRNA sense strand
gugaaaggccacgugaaga

SEQ ID NO: 526687 - RNA, 19 nt, Homo sapiens
  misc_RNA (1)...(19): siRNA sense strand
ccagcgguccuuaccagaa

SEQ ID NO: 526688 - RNA, 19 nt, Homo sapiens
  misc_RNA (1)...(19): siRNA sense strand
gaacggagaugacaccuuu

SEQ ID NO: 526689 - RNA, 19 nt, Homo sapiens
  misc_RNA (1)...(19): siRNA sense strand
ccaaauacuucucuaagga

SEQ ID NO: 526690 - RNA, 19 nt, Homo sapiens
  misc_RNA (1)...(19): siRNA sense strand
ucaaauaccagagaagaua

SEQ ID NO: 526691 - RNA, 19 nt, Homo sapiens
  misc_RNA (1)...(19): siRNA sense strand
gcagaggaaggaaauguuu

SEQ ID NO: 526692 - RNA, 19 nt, Homo sapiens
  misc_RNA (1)...(19): siRNA sense strand
caaaaggccuucgaugaua

SEQ ID NO: 526693 - RNA, 19 nt, Homo sapiens
  misc_RNA (1)...(19): siRNA sense strand
guaauaaacgggucacaga

SEQ ID NO: 526694 - RNA, 19 nt, Homo sapiens
  misc_RNA (1)...(19): siRNA sense strand
ccaacuaccucugagaaga

SEQ ID NO: 526695 - RNA, 19 nt, Homo sapiens
  misc_RNA (1)...(19): siRNA sense strand
cgaagaucaugcccaagaa

SEQ ID NO: 526696 - RNA, 19 nt, Homo sapiens
  misc_RNA (1)...(19): siRNA sense strand
gaaaaucgucuauguguau

SEQ ID NO: 526697 - RNA, 19 nt, Homo sapiens
  misc_RNA (1)...(19): siRNA sense strand
caucuuucaugcguaauaa

SEQ ID NO: 526698 - RNA, 19 nt, Homo sapiens
  misc_RNA (1)...(19): siRNA sense strand
ggagaugacaccuuugcaa

SEQ ID NO: 526699 - RNA, 19 nt, Homo sapiens
  misc_RNA (1)...(19): siRNA sense strand
cacgguuggugcucaaaua

SEQ ID NO: 526700 - RNA, 19 nt, Homo sapiens
  misc_RNA (1)...(19): siRNA sense strand
caaauacuucucuaaggaa

SEQ ID NO: 526701 - RNA, 19 nt, Homo sapiens
  misc_RNA (1)...(19): siRNA sense strand
caagaagccagcagaggaa

SEQ ID NO: 526702 - RNA, 19 nt, Homo sapiens
  misc_RNA (1)...(19): siRNA sense strand
agaagcaucuggcccacaa

SEQ ID NO: 526703 - RNA, 19 nt, Homo sapiens
  misc_RNA (1)...(19): siRNA sense strand
cugagaagauuaacaugau

SEQ ID NO: 526704 - RNA, 19 nt, Homo sapiens
  misc_RNA (1)...(19): siRNA sense strand
gccaaauacuucucuaagg

SEQ ID NO: 526705 - RNA, 19 nt, Homo sapiens
  misc_RNA (1)...(19): siRNA sense strand
gaaggaagugccagaagca

SEQ ID NO: 526706 - RNA, 19 nt, Homo sapiens
  misc_RNA (1)...(19): siRNA sense strand
aguaugaggccaugacuaa

SEQ ID NO: 526707 - RNA, 19 nt, Homo sapiens
  misc_RNA (1)...(19): siRNA sense strand
gcucaaauaccagagaaga

SEQ ID NO: 526708 - RNA, 19 nt, Homo sapiens
  misc_RNA (1)...(19): siRNA sense strand
ggccaugacuaaacuaggu

SEQ ID NO: 526709 - RNA, 19 nt, Homo sapiens
  misc_RNA (1)...(19): siRNA sense strand
guucaacguccucagauga

SEQ ID NO: 526710 - RNA, 19 nt, Homo sapiens
  misc_RNA (1)...(19): siRNA sense strand
gaaaaccaacuaccucuga

SEQ ID NO: 526711 - RNA, 19 nt, Homo sapiens
  misc_RNA (1)...(19): siRNA sense strand
ggaagugccagaagcaucu

SEQ ID NO: 526712 - RNA, 19 nt, Homo sapiens
  misc_RNA (1)...(19): siRNA sense strand
gaaaguaugaggccaugac

SEQ ID NO: 526713 - RNA, 19 nt, Homo sapiens
  misc_RNA (1)...(19): siRNA sense strand
ccgaagaucaugcccaaga

SEQ ID NO: 526714 - RNA, 19 nt, Homo sapiens
  misc_RNA (1)...(19): siRNA sense strand
gagaaaaucgucuaugugu

SEQ ID NO: 526715 - RNA, 19 nt, Homo sapiens
  misc_RNA (1)...(19): siRNA sense strand
gugcucaaauaccagagaa

SEQ ID NO: 526716 - RNA, 19 nt, Homo sapiens
  misc_RNA (1)...(19): siRNA sense strand
auaaacgggucacagacuu

SEQ ID NO: 526717 - RNA, 19 nt, Homo sapiens
  misc_RNA (1)...(19): siRNA sense strand
caacuaccucugagaagau

SEQ ID NO: 526718 - RNA, 19 nt, Homo sapiens
  misc_RNA (1)...(19): siRNA sense strand
gaagccagcagaggaagga

SEQ ID NO: 526719 - RNA, 19 nt, Homo sapiens
  misc_RNA (1)...(19): siRNA sense strand
gaagaucaugcccaagaag

SEQ ID NO: 526720 - RNA, 19 nt, Homo sapiens
  misc_RNA (1)...(19): siRNA sense strand
gguucaacguccucagaug

SEQ ID NO: 526721 - RNA, 19 nt, Homo sapiens
  misc_RNA (1)...(19): siRNA sense strand
ucccaucuuucaugcguaa

SEQ ID NO: 526722 - RNA, 19 nt, Homo sapiens
  misc_RNA (1)...(19): siRNA sense strand
ucugagaagauuaacauga

SEQ ID NO: 526723 - RNA, 19 nt, Homo sapiens
  misc_RNA (1)...(19): siRNA sense strand
ccaucuuucaugcguaaua

SEQ ID NO: 526724 - RNA, 19 nt, Homo sapiens
  misc_RNA (1)...(19): siRNA sense strand
aaucgucuauguguauaug

SEQ ID NO: 526725 - RNA, 19 nt, Homo sapiens
  misc_RNA (1)...(19): siRNA sense strand
cuaccucugagaagauuaa

SEQ ID NO: 526726 - RNA, 19 nt, Homo sapiens
  misc_RNA (1)...(19): siRNA sense strand
cggagaaaaucgucuaugu

SEQ ID NO: 526727 - RNA, 19 nt, Homo sapiens
  misc_RNA (1)...(19): siRNA sense strand
ccucugagaagauuaacau

SEQ ID NO: 526728 - RNA, 19 nt, Homo sapiens
  misc_RNA (1)...(19): siRNA sense strand
cagcagaggaaggaaaugu

SEQ ID NO: 526729 - RNA, 19 nt, Homo sapiens
  misc_RNA (1)...(19): siRNA sense strand
ggggaaugauuuugauaau

SEQ ID NO: 526730 - RNA, 19 nt, Homo sapiens
  misc_RNA (1)...(19): siRNA sense strand
aggccauccucccaucuuu

SEQ ID NO: 526731 - RNA, 19 nt, Homo sapiens
  misc_RNA (1)...(19): siRNA sense strand
gggaaugauuuugauaaug

SEQ ID NO: 526732 - RNA, 19 nt, Homo sapiens
  misc_RNA (1)...(19): siRNA sense strand
caaauaccagagaagauac

SEQ ID NO: 526733 - RNA, 19 nt, Homo sapiens
  misc_RNA (1)...(19): siRNA sense strand
agaaaaucgucuaugugua

SEQ ID NO: 526734 - RNA, 19 nt, Homo sapiens
  misc_RNA (1)...(19): siRNA sense strand
guaugaggccaugacuaaa

SEQ ID NO: 526735 - RNA, 19 nt, Homo sapiens
  misc_RNA (1)...(19): siRNA sense strand
gucuauguguauaugaaga

SEQ ID NO: 526736 - RNA, 19 nt, Homo sapiens
  misc_RNA (1)...(19): siRNA sense strand
ucgucuauguguauaugaa

SEQ ID NO: 526737 - RNA, 19 nt, Homo sapiens
  misc_RNA (1)...(19): siRNA sense strand
aaaaggccuucgaugauau

SEQ ID NO: 526738 - RNA, 19 nt, Homo sapiens
  misc_RNA (1)...(19): siRNA sense strand
cuucgaugauauugccaaa

SEQ ID NO: 526739 - RNA, 19 nt, Homo sapiens
  misc_RNA (1)...(19): siRNA sense strand
gaagagugggaaaagauga

SEQ ID NO: 526740 - RNA, 19 nt, Homo sapiens
  misc_RNA (1)...(19): siRNA sense strand
gccauccucccaucuuuca

SEQ ID NO: 526741 - RNA, 19 nt, Homo sapiens
  misc_RNA (1)...(19): siRNA sense strand
gaacggagaugacaccuuu

SEQ ID NO: 526742 - RNA, 19 nt, Homo sapiens
  misc_RNA (1)...(19): siRNA sense strand
ccaaauacuucucuaagga

SEQ ID NO: 526743 - RNA, 19 nt, Homo sapiens
  misc_RNA (1)...(19): siRNA sense strand
ucaaauaccagagaagaua

SEQ ID NO: 526744 - RNA, 19 nt, Homo sapiens
  misc_RNA (1)...(19): siRNA sense strand
gcagaggaaggaaauguuu

SEQ ID NO: 526745 - RNA, 19 nt, Homo sapiens
  misc_RNA (1)...(19): siRNA sense strand
caaaaggccuucgaugaua

SEQ ID NO: 526746 - RNA, 19 nt, Homo sapiens
  misc_RNA (1)...(19): siRNA sense strand
guaauaaacgggucacaga

SEQ ID NO: 526747 - RNA, 19 nt, Homo sapiens
  misc_RNA (1)...(19): siRNA sense strand
ccaacuaccucugagaaga

SEQ ID NO: 526748 - RNA, 19 nt, Homo sapiens
  misc_RNA (1)...(19): siRNA sense strand
cgaagaucaugcccaagaa

SEQ ID NO: 526749 - RNA, 19 nt, Homo sapiens
  misc_RNA (1)...(19): siRNA sense strand
gaaaaucgucuauguguau

SEQ ID NO: 526750 - RNA, 19 nt, Homo sapiens
  misc_RNA (1)...(19): siRNA sense strand
caucuuucaugcguaauaa

SEQ ID NO: 526751 - RNA, 19 nt, Homo sapiens
  misc_RNA (1)...(19): siRNA sense strand
ggagaugacaccuuugcaa

SEQ ID NO: 526752 - RNA, 19 nt, Homo sapiens
  misc_RNA (1)...(19): siRNA sense strand
cacgguuggugcucaaaua

SEQ ID NO: 526753 - RNA, 19 nt, Homo sapiens
  misc_RNA (1)...(19): siRNA sense strand
caaauacuucucuaaggaa

SEQ ID NO: 526754 - RNA, 19 nt, Homo sapiens
  misc_RNA (1)...(19): siRNA sense strand
caagaagccagcagaggaa

SEQ ID NO: 526755 - RNA, 19 nt, Homo sapiens
  misc_RNA (1)...(19): siRNA sense strand
agaagcaucuggcccacaa

SEQ ID NO: 526756 - RNA, 19 nt, Homo sapiens
  misc_RNA (1)...(19): siRNA sense strand
cugagaagauuaacaugau

SEQ ID NO: 526757 - RNA, 19 nt, Homo sapiens
  misc_RNA (1)...(19): siRNA sense strand
gccaaauacuucucuaagg

SEQ ID NO: 526758 - RNA, 19 nt, Homo sapiens
  misc_RNA (1)...(19): siRNA sense strand
gaaggaagugccagaagca

SEQ ID NO: 526759 - RNA, 19 nt, Homo sapiens
  misc_RNA (1)...(19): siRNA sense strand
aguaugaggccaugacuaa

SEQ ID NO: 526760 - RNA, 19 nt, Homo sapiens
  misc_RNA (1)...(19): siRNA sense strand
gcucaaauaccagagaaga

SEQ ID NO: 526761 - RNA, 19 nt, Homo sapiens
  misc_RNA (1)...(19): siRNA sense strand
ggccaugacuaaacuaggu

SEQ ID NO: 526762 - RNA, 19 nt, Homo sapiens
  misc_RNA (1)...(19): siRNA sense strand
guucaacguccucagauga

SEQ ID NO: 526763 - RNA, 19 nt, Homo sapiens
  misc_RNA (1)...(19): siRNA sense strand
gaaaaccaacuaccucuga

SEQ ID NO: 526764 - RNA, 19 nt, Homo sapiens
  misc_RNA (1)...(19): siRNA sense strand
ggaagugccagaagcaucu

SEQ ID NO: 526765 - RNA, 19 nt, Homo sapiens
  misc_RNA (1)...(19): siRNA sense strand
gaaaguaugaggccaugac

SEQ ID NO: 526766 - RNA, 19 nt, Homo sapiens
  misc_RNA (1)...(19): siRNA sense strand
ccgaagaucaugcccaaga

SEQ ID NO: 526767 - RNA, 19 nt, Homo sapiens
  misc_RNA (1)...(19): siRNA sense strand
gagaaaaucgucuaugugu

SEQ ID NO: 526768 - RNA, 19 nt, Homo sapiens
  misc_RNA (1)...(19): siRNA sense strand
gugcucaaauaccagagaa

SEQ ID NO: 526769 - RNA, 19 nt, Homo sapiens
  misc_RNA (1)...(19): siRNA sense strand
auaaacgggucacagacuu

SEQ ID NO: 526770 - RNA, 19 nt, Homo sapiens
  misc_RNA (1)...(19): siRNA sense strand
caacuaccucugagaagau

SEQ ID NO: 526771 - RNA, 19 nt, Homo sapiens
  misc_RNA (1)...(19): siRNA sense strand
gaagccagcagaggaagga

SEQ ID NO: 526772 - RNA, 19 nt, Homo sapiens
  misc_RNA (1)...(19): siRNA sense strand
gaagaucaugcccaagaag

SEQ ID NO: 526773 - RNA, 19 nt, Homo sapiens
  misc_RNA (1)...(19): siRNA sense strand
gguucaacguccucagaug

SEQ ID NO: 526774 - RNA, 19 nt, Homo sapiens
  misc_RNA (1)...(19): siRNA sense strand
ucccaucuuucaugcguaa

SEQ ID NO: 526775 - RNA, 19 nt, Homo sapiens
  misc_RNA (1)...(19): siRNA sense strand
ucugagaagauuaacauga

SEQ ID NO: 526776 - RNA, 19 nt, Homo sapiens
  misc_RNA (1)...(19): siRNA sense strand
ccaucuuucaugcguaaua

SEQ ID NO: 526777 - RNA, 19 nt, Homo sapiens
  misc_RNA (1)...(19): siRNA sense strand
aaucgucuauguguauaug

SEQ ID NO: 526778 - RNA, 19 nt, Homo sapiens
  misc_RNA (1)...(19): siRNA sense strand
cuaccucugagaagauuaa

SEQ ID NO: 526779 - RNA, 19 nt, Homo sapiens
  misc_RNA (1)...(19): siRNA sense strand
cggagaaaaucgucuaugu

SEQ ID NO: 526780 - RNA, 19 nt, Homo sapiens
  misc_RNA (1)...(19): siRNA sense strand
ccucugagaagauuaacau

SEQ ID NO: 526781 - RNA, 19 nt, Homo sapiens
  misc_RNA (1)...(19): siRNA sense strand
cagcagaggaaggaaaugu

SEQ ID NO: 526782 - RNA, 19 nt, Homo sapiens
  misc_RNA (1)...(19): siRNA sense strand
ggggaaugauuuugauaau

SEQ ID NO: 526783 - RNA, 19 nt, Homo sapiens
  misc_RNA (1)...(19): siRNA sense strand
aggccauccucccaucuuu

SEQ ID NO: 526784 - RNA, 19 nt, Homo sapiens
  misc_RNA (1)...(19): siRNA sense strand
gggaaugauuuugauaaug

SEQ ID NO: 526785 - RNA, 19 nt, Homo sapiens
  misc_RNA (1)...(19): siRNA sense strand
caaauaccagagaagauac

SEQ ID NO: 526786 - RNA, 19 nt, Homo sapiens
  misc_RNA (1)...(19): siRNA sense strand
agaaaaucgucuaugugua

SEQ ID NO: 526787 - RNA, 19 nt, Homo sapiens
  misc_RNA (1)...(19): siRNA sense strand
guaugaggccaugacuaaa

SEQ ID NO: 526788 - RNA, 19 nt, Homo sapiens
  misc_RNA (1)...(19): siRNA sense strand
gucuauguguauaugaaga

SEQ ID NO: 526789 - RNA, 19 nt, Homo sapiens
  misc_RNA (1)...(19): siRNA sense strand
ucgucuauguguauaugaa

SEQ ID NO: 526790 - RNA, 19 nt, Homo sapiens
  misc_RNA (1)...(19): siRNA sense strand
aaaaggccuucgaugauau

SEQ ID NO: 526791 - RNA, 19 nt, Homo sapiens
  misc_RNA (1)...(19): siRNA sense strand
cuucgaugauauugccaaa

SEQ ID NO: 526792 - RNA, 19 nt, Homo sapiens
  misc_RNA (1)...(19): siRNA sense strand
gaagagugggaaaagauga

SEQ ID NO: 526793 - RNA, 19 nt, Homo sapiens
  misc_RNA (1)...(19): siRNA sense strand
gccauccucccaucuuuca

SEQ ID NO: 526794 - RNA, 19 nt, Homo sapiens
  misc_RNA (1)...(19): siRNA sense strand
gcugugagcuccugacuga

SEQ ID NO: 526795 - RNA, 19 nt, Homo sapiens
  misc_RNA (1)...(19): siRNA sense strand
ggucaaggcugcucaacug

SEQ ID NO: 526796 - RNA, 19 nt, Homo sapiens
  misc_RNA (1)...(19): siRNA sense strand
ggacaccucugcacucaag

SEQ ID NO: 526797 - RNA, 19 nt, Homo sapiens
  misc_RNA (1)...(19): siRNA sense strand
gaaaugccagagaaggaua

SEQ ID NO: 526798 - RNA, 19 nt, Homo sapiens
  misc_RNA (1)...(19): siRNA sense strand
caaggcugcucaacugguu

SEQ ID NO: 526799 - RNA, 19 nt, Homo sapiens
  misc_RNA (1)...(19): siRNA sense strand
gggaguacgugcugaccuu

SEQ ID NO: 526800 - RNA, 19 nt, Homo sapiens
  misc_RNA (1)...(19): siRNA sense strand
cagagaaggauaacacauu

SEQ ID NO: 526801 - RNA, 19 nt, Homo sapiens
  misc_RNA (1)...(19): siRNA sense strand
agagaaggauaacacauuc

SEQ ID NO: 526802 - RNA, 19 nt, Homo sapiens
  misc_RNA (1)...(19): siRNA sense strand
acaccgagcucuccuguac

SEQ ID NO: 526803 - RNA, 19 nt, Homo sapiens
  misc_RNA (1)...(19): siRNA sense strand
gcacaaguucugccguuuc

SEQ ID NO: 526804 - RNA, 19 nt, Homo sapiens
  misc_RNA (1)...(19): siRNA sense strand
gcggacaccucugcacuca

SEQ ID NO: 526805 - RNA, 19 nt, Homo sapiens
  misc_RNA (1)...(19): siRNA sense strand
gaaccaguacuccuucuac

SEQ ID NO: 526806 - RNA, 19 nt, Homo sapiens
  misc_RNA (1)...(19): siRNA sense strand
ggaaaugccagagaaggau

SEQ ID NO: 526807 - RNA, 19 nt, Homo sapiens
  misc_RNA (1)...(19): siRNA sense strand
gagaugccgucagagaauc

SEQ ID NO: 526808 - RNA, 19 nt, Homo sapiens
  misc_RNA (1)...(19): siRNA sense strand
cgagaugccgucagagaau

SEQ ID NO: 526809 - RNA, 19 nt, Homo sapiens
  misc_RNA (1)...(19): siRNA sense strand
ccacggccagugucacgua

SEQ ID NO: 526810 - RNA, 19 nt, Homo sapiens
  misc_RNA (1)...(19): siRNA sense strand
uaacacauucguccucaag

SEQ ID NO: 526811 - RNA, 19 nt, Homo sapiens
  misc_RNA (1)...(19): siRNA sense strand
cagcggcagugacagcaau

SEQ ID NO: 526812 - RNA, 19 nt, Homo sapiens
  misc_RNA (1)...(19): siRNA sense strand
caucgacucucugcagaag

SEQ ID NO: 526813 - RNA, 19 nt, Homo sapiens
  misc_RNA (1)...(19): siRNA sense strand
acacauucguccucaaggu

SEQ ID NO: 526814 - RNA, 19 nt, Homo sapiens
  misc_RNA (1)...(19): siRNA sense strand
caucacccuucgcagcuau

SEQ ID NO: 526815 - RNA, 19 nt, Homo sapiens
  misc_RNA (1)...(19): siRNA sense strand
cacauucguccucaaggua

SEQ ID NO: 526816 - RNA, 19 nt, Homo sapiens
  misc_RNA (1)...(19): siRNA sense strand
ccaacuuccuggacgucuu

SEQ ID NO: 526817 - RNA, 19 nt, Homo sapiens
  misc_RNA (1)...(19): siRNA sense strand
ggucagcaucccacuguca

SEQ ID NO: 526818 - RNA, 19 nt, Homo sapiens
  misc_RNA (1)...(19): siRNA sense strand
caacuuccuggacgucuuc

SEQ ID NO: 526819 - RNA, 19 nt, Homo sapiens
  misc_RNA (1)...(19): siRNA sense strand
ggcagugacagcaauaaca

SEQ ID NO: 526820 - RNA, 19 nt, Homo sapiens
  misc_RNA (1)...(19): siRNA sense strand
gggacaacccagcuuacga

SEQ ID NO: 526821 - RNA, 19 nt, Homo sapiens
  misc_RNA (1)...(19): siRNA sense strand
ugacaugcuccgccacuuc

SEQ ID NO: 526822 - RNA, 19 nt, Homo sapiens
  misc_RNA (1)...(19): siRNA sense strand
gcagugacagcaauaacac

SEQ ID NO: 526823 - RNA, 19 nt, Homo sapiens
  misc_RNA (1)...(19): siRNA sense strand
ccacugucagccaucauug

SEQ ID NO: 526824 - RNA, 19 nt, Homo sapiens
  misc_RNA (1)...(19): siRNA sense strand
gugauccgccaaagugaga

SEQ ID NO: 526825 - RNA, 19 nt, Homo sapiens
  misc_RNA (1)...(19): siRNA sense strand
ucgacucucugcagaagca

SEQ ID NO: 526826 - RNA, 19 nt, Homo sapiens
  misc_RNA (1)...(19): siRNA sense strand
ugugagcuccugacugaug

SEQ ID NO: 526827 - RNA, 19 nt, Homo sapiens
  misc_RNA (1)...(19): siRNA sense strand
gccaggagauguacauuga

SEQ ID NO: 526828 - RNA, 19 nt, Homo sapiens
  misc_RNA (1)...(19): siRNA sense strand
gagcucagggcgacuguga

SEQ ID NO: 526829 - RNA, 19 nt, Homo sapiens
  misc_RNA (1)...(19): siRNA sense strand
gggcgacugugacccugaa

SEQ ID NO: 526830 - RNA, 19 nt, Homo sapiens
  misc_RNA (1)...(19): siRNA sense strand
cuuccuggcuuaugagugu

SEQ ID NO: 526831 - RNA, 19 nt, Homo sapiens
  misc_RNA (1)...(19): siRNA sense strand
ugaccgaggccgugaacuu

SEQ ID NO: 526832 - RNA, 19 nt, Homo sapiens
  misc_RNA (1)...(19): siRNA sense strand
ggaugaagugggccgagaa

SEQ ID NO: 526833 - RNA, 19 nt, Homo sapiens
  misc_RNA (1)...(19): siRNA sense strand
acaugagggugcagaagug

SEQ ID NO: 526834 - RNA, 19 nt, Homo sapiens
  misc_RNA (1)...(19): siRNA sense strand
caaccgcaccucccucauc

SEQ ID NO: 526835 - RNA, 19 nt, Homo sapiens
  misc_RNA (1)...(19): siRNA sense strand
gaccgaggccgugaacuuc

SEQ ID NO: 526836 - RNA, 19 nt, Homo sapiens
  misc_RNA (1)...(19): siRNA sense strand
cgggcuuccuggcuuauga

SEQ ID NO: 526837 - RNA, 19 nt, Homo sapiens
  misc_RNA (1)...(19): siRNA sense strand
gcugggcacucuggguguu

SEQ ID NO: 526838 - RNA, 19 nt, Homo sapiens
  misc_RNA (1)...(19): siRNA sense strand
ugaagugggccgagaacug

SEQ ID NO: 526839 - RNA, 19 nt, Homo sapiens
  misc_RNA (1)...(19): siRNA sense strand
gacccugaagcaccaauga

SEQ ID NO: 526840 - RNA, 19 nt, Homo sapiens
  misc_RNA (1)...(19): siRNA sense strand
cgacugugacccugaagca

SEQ ID NO: 526841 - RNA, 19 nt, Homo sapiens
  misc_RNA (1)...(19): siRNA sense strand
cugacucgcugcccaugau

SEQ ID NO: 526842 - RNA, 19 nt, Homo sapiens
  misc_RNA (1)...(19): siRNA sense strand
ggaagaaguugccuaugaa

SEQ ID NO: 526843 - RNA, 19 nt, Homo sapiens
  misc_RNA (1)...(19): siRNA sense strand
gaaguugccuaugaagaaa

SEQ ID NO: 526844 - RNA, 19 nt, Homo sapiens
  misc_RNA (1)...(19): siRNA sense strand
caaggaagcagacuacgua

SEQ ID NO: 526845 - RNA, 19 nt, Homo sapiens
  misc_RNA (1)...(19): siRNA sense strand
caguagaagugacagauaa

SEQ ID NO: 526846 - RNA, 19 nt, Homo sapiens
  misc_RNA (1)...(19): siRNA sense strand
cagauaagccuguggauga

SEQ ID NO: 526847 - RNA, 19 nt, Homo sapiens
  misc_RNA (1)...(19): siRNA sense strand
gacagucccuauuuccuuu

SEQ ID NO: 526848 - RNA, 19 nt, Homo sapiens
  misc_RNA (1)...(19): siRNA sense strand
aggaagaaguugccuauga

SEQ ID NO: 526849 - RNA, 19 nt, Homo sapiens
  misc_RNA (1)...(19): siRNA sense strand
gaagaaagggccugugaag

SEQ ID NO: 526850 - RNA, 19 nt, Homo sapiens
  misc_RNA (1)...(19): siRNA sense strand
caaauuugccacaguagaa

SEQ ID NO: 526851 - RNA, 19 nt, Homo sapiens
  misc_RNA (1)...(19): siRNA sense strand
gggaaggcaucacugucua

SEQ ID NO: 526852 - RNA, 19 nt, Homo sapiens
  misc_RNA (1)...(19): siRNA sense strand
ggaugacagucccuauuuc

SEQ ID NO: 526853 - RNA, 19 nt, Homo sapiens
  misc_RNA (1)...(19): siRNA sense strand
ggaagcagacuacguagca

SEQ ID NO: 526854 - RNA, 19 nt, Homo sapiens
  misc_RNA (1)...(19): siRNA sense strand
caaggaagaaguugccuau

SEQ ID NO: 526855 - RNA, 19 nt, Homo sapiens
  misc_RNA (1)...(19): siRNA sense strand
agaaguugccuaugaagaa

SEQ ID NO: 526856 - RNA, 19 nt, Homo sapiens
  misc_RNA (1)...(19): siRNA sense strand
gacaaaagcguuaagauug

SEQ ID NO: 526857 - RNA, 19 nt, Homo sapiens
  misc_RNA (1)...(19): siRNA sense strand
gggaagcaaugcccaaggu

SEQ ID NO: 526858 - RNA, 19 nt, Homo sapiens
  misc_RNA (1)...(19): siRNA sense strand
ugcccaaggucgcaaagua

SEQ ID NO: 526859 - RNA, 19 nt, Homo sapiens
  misc_RNA (1)...(19): siRNA sense strand
guuaugacccucccaugaa

SEQ ID NO: 526860 - RNA, 19 nt, Homo sapiens
  misc_RNA (1)...(19): siRNA sense strand
gaaggcaucacugucuauu

SEQ ID NO: 526861 - RNA, 19 nt, Homo sapiens
  misc_RNA (1)...(19): siRNA sense strand
ccaugcaguuuggugguua

SEQ ID NO: 526862 - RNA, 19 nt, Homo sapiens
  misc_RNA (1)...(19): siRNA sense strand
gguuaugacccucccauga

SEQ ID NO: 526863 - RNA, 19 nt, Homo sapiens
  misc_RNA (1)...(19): siRNA sense strand
gcucucugcagaagaaauu

SEQ ID NO: 526864 - RNA, 19 nt, Homo sapiens
  misc_RNA (1)...(19): siRNA sense strand
acaaaagcguuaagauuga

SEQ ID NO: 526865 - RNA, 19 nt, Homo sapiens
  misc_RNA (1)...(19): siRNA sense strand
gaagaaguugccuaugaag

SEQ ID NO: 526866 - RNA, 19 nt, Homo sapiens
  misc_RNA (1)...(19): siRNA sense strand
ggaaggcaucacugucuau

SEQ ID NO: 526867 - RNA, 19 nt, Homo sapiens
  misc_RNA (1)...(19): siRNA sense strand
gcaccaaugacaagggaau

SEQ ID NO: 526868 - RNA, 19 nt, Homo sapiens
  misc_RNA (1)...(19): siRNA sense strand
ugacaaaagcguuaagauu

SEQ ID NO: 526869 - RNA, 19 nt, Homo sapiens
  misc_RNA (1)...(19): siRNA sense strand
ugacagucccuauuuccuu

SEQ ID NO: 526870 - RNA, 19 nt, Homo sapiens
  misc_RNA (1)...(19): siRNA sense strand
gcccaaggucgcaaaguau

SEQ ID NO: 526871 - RNA, 19 nt, Homo sapiens
  misc_RNA (1)...(19): siRNA sense strand
acaguagaagugacagaua

SEQ ID NO: 526872 - RNA, 19 nt, Homo sapiens
  misc_RNA (1)...(19): siRNA sense strand
ugugaaggcggcaaauuug

SEQ ID NO: 526873 - RNA, 19 nt, Homo sapiens
  misc_RNA (1)...(19): siRNA sense strand
aaagucugguuccggauuc

SEQ ID NO: 526874 - RNA, 19 nt, Homo sapiens
  misc_RNA (1)...(19): siRNA sense strand
gcaucacugucuauuccau

SEQ ID NO: 526875 - RNA, 19 nt, Homo sapiens
  misc_RNA (1)...(19): siRNA sense strand
cugugaaggcggcaaauuu

SEQ ID NO: 526876 - RNA, 19 nt, Homo sapiens
  misc_RNA (1)...(19): siRNA sense strand
gcaaaggggacaaggaaga

SEQ ID NO: 526877 - RNA, 19 nt, Homo sapiens
  misc_RNA (1)...(19): siRNA sense strand
ugaagaaagggccugugaa

SEQ ID NO: 526878 - RNA, 19 nt, Homo sapiens
  misc_RNA (1)...(19): siRNA sense strand
ucuauuccaugcaguuugg

SEQ ID NO: 526879 - RNA, 19 nt, Homo sapiens
  misc_RNA (1)...(19): siRNA sense strand
ccuauuuccuuugcugugu

SEQ ID NO: 526880 - RNA, 19 nt, Homo sapiens
  misc_RNA (1)...(19): siRNA sense strand
ccggauuccaaaccaauuu

SEQ ID NO: 526881 - RNA, 19 nt, Homo sapiens
  misc_RNA (1)...(19): siRNA sense strand
uuaugacccucccaugaag

SEQ ID NO: 526882 - RNA, 19 nt, Homo sapiens
  misc_RNA (1)...(19): siRNA sense strand
ggacugagaugaucauuac

SEQ ID NO: 526883 - RNA, 19 nt, Homo sapiens
  misc_RNA (1)...(19): siRNA sense strand
caacaguucucagucuuua

SEQ ID NO: 526884 - RNA, 19 nt, Homo sapiens
  misc_RNA (1)...(19): siRNA sense strand
guaaucauguucauuggua

SEQ ID NO: 526885 - RNA, 19 nt, Homo sapiens
  misc_RNA (1)...(19): siRNA sense strand
gcaauuaaccauuaccuuu

SEQ ID NO: 526886 - RNA, 19 nt, Homo sapiens
  misc_RNA (1)...(19): siRNA sense strand
gcaugaaacucaccaacaa

SEQ ID NO: 526887 - RNA, 19 nt, Homo sapiens
  misc_RNA (1)...(19): siRNA sense strand
gaaggcaaauguaaucaug

SEQ ID NO: 526888 - RNA, 19 nt, Homo sapiens
  misc_RNA (1)...(19): siRNA sense strand
gcacuuaguugcuccuuuc

SEQ ID NO: 526889 - RNA, 19 nt, Homo sapiens
  misc_RNA (1)...(19): siRNA sense strand
caacagauuacgaaacuaa

SEQ ID NO: 526890 - RNA, 19 nt, Homo sapiens
  misc_RNA (1)...(19): siRNA sense strand
ugacaaaggccacaucauu

SEQ ID NO: 526891 - RNA, 19 nt, Homo sapiens
  misc_RNA (1)...(19): siRNA sense strand
gauggaagugccuauguua

SEQ ID NO: 526892 - RNA, 19 nt, Homo sapiens
  misc_RNA (1)...(19): siRNA sense strand
acaaugagauggaugacaa

SEQ ID NO: 526893 - RNA, 19 nt, Homo sapiens
  misc_RNA (1)...(19): siRNA sense strand
ccaaucaaauguuauaugg

SEQ ID NO: 526894 - RNA, 19 nt, Homo sapiens
  misc_RNA (1)...(19): siRNA sense strand
gagcaaggcagcaguguug

SEQ ID NO: 526895 - RNA, 19 nt, Homo sapiens
  misc_RNA (1)...(19): siRNA sense strand
gaugguagcugggaauaca

SEQ ID NO: 526896 - RNA, 19 nt, Homo sapiens
  misc_RNA (1)...(19): siRNA sense strand
ccuuugaacuccuuacuuu

SEQ ID NO: 526897 - RNA, 19 nt, Homo sapiens
  misc_RNA (1)...(19): siRNA sense strand
gagaugaucauuacuaaag

SEQ ID NO: 526898 - RNA, 19 nt, Homo sapiens
  misc_RNA (1)...(19): siRNA sense strand
gcaccuaauucuaccaauc

SEQ ID NO: 526899 - RNA, 19 nt, Homo sapiens
  misc_RNA (1)...(19): siRNA sense strand
acagucaccuggaaauauu

SEQ ID NO: 526900 - RNA, 19 nt, Homo sapiens
  misc_RNA (1)...(19): siRNA sense strand
ccaaccaucuuaaagugaa

SEQ ID NO: 526901 - RNA, 19 nt, Homo sapiens
  misc_RNA (1)...(19): siRNA sense strand
ccucuaugcuacaagauuu

SEQ ID NO: 526902 - RNA, 19 nt, Homo sapiens
  misc_RNA (1)...(19): siRNA sense strand
ggagaaggcaaauguaauc

SEQ ID NO: 526903 - RNA, 19 nt, Homo sapiens
  misc_RNA (1)...(19): siRNA sense strand
ggaagugccuauguuaucu

SEQ ID NO: 526904 - RNA, 19 nt, Homo sapiens
  misc_RNA (1)...(19): siRNA sense strand
ggauuacagucaccuggaa

SEQ ID NO: 526905 - RNA, 19 nt, Homo sapiens
  misc_RNA (1)...(19): siRNA sense strand
cagcuuugaucgcaugaaa

SEQ ID NO: 526906 - RNA, 19 nt, Homo sapiens
  misc_RNA (1)...(19): siRNA sense strand
uaaagugaaugacgacagu

SEQ ID NO: 526907 - RNA, 19 nt, Homo sapiens
  misc_RNA (1)...(19): siRNA sense strand
agacagagcccucaacauc

SEQ ID NO: 526908 - RNA, 19 nt, Homo sapiens
  misc_RNA (1)...(19): siRNA sense strand
gcaaauguaaucauguuca

SEQ ID NO: 526909 - RNA, 19 nt, Homo sapiens
  misc_RNA (1)...(19): siRNA sense strand
cugaaagucuggaagagaa

SEQ ID NO: 526910 - RNA, 19 nt, Homo sapiens
  misc_RNA (1)...(19): siRNA sense strand
caagauuuguccaacuaau

SEQ ID NO: 526911 - RNA, 19 nt, Homo sapiens
  misc_RNA (1)...(19): siRNA sense strand
gacaaaggccacaucauuc

SEQ ID NO: 526912 - RNA, 19 nt, Homo sapiens
  misc_RNA (1)...(19): siRNA sense strand
gaccauuugugcaucauuc

SEQ ID NO: 526913 - RNA, 19 nt, Homo sapiens
  misc_RNA (1)...(19): siRNA sense strand
gcaacaguucucagucuuu

SEQ ID NO: 526914 - RNA, 19 nt, Homo sapiens
  misc_RNA (1)...(19): siRNA sense strand
ggcaacagcucugaaaguc

SEQ ID NO: 526915 - RNA, 19 nt, Homo sapiens
  misc_RNA (1)...(19): siRNA sense strand
ucaccuauguuucauuuac

SEQ ID NO: 526916 - RNA, 19 nt, Homo sapiens
  misc_RNA (1)...(19): siRNA sense strand
ucaccacaguaacggcuua

SEQ ID NO: 526917 - RNA, 19 nt, Homo sapiens
  misc_RNA (1)...(19): siRNA sense strand
cugagaugaucauuacuaa

SEQ ID NO: 526918 - RNA, 19 nt, Homo sapiens
  misc_RNA (1)...(19): siRNA sense strand
ggaagagaaagauauucaa

SEQ ID NO: 526919 - RNA, 19 nt, Homo sapiens
  misc_RNA (1)...(19): siRNA sense strand
auccagcaauuaaccauua

SEQ ID NO: 526920 - RNA, 19 nt, Homo sapiens
  misc_RNA (1)...(19): siRNA sense strand
uaugccaucuagacugaua

SEQ ID NO: 526921 - RNA, 19 nt, Homo sapiens
  misc_RNA (1)...(19): siRNA sense strand
acagcaaccucuuguuuua

SEQ ID NO: 526922 - RNA, 19 nt, Homo sapiens
  misc_RNA (1)...(19): siRNA sense strand
gugcaucauuccuagauuc

SEQ ID NO: 526923 - RNA, 19 nt, Homo sapiens
  misc_RNA (1)...(19): siRNA sense strand
ucaaauggagcuucaagga

SEQ ID NO: 526924 - RNA, 19 nt, Homo sapiens
  misc_RNA (1)...(19): siRNA sense strand
cuacaagcaccuaauucua

SEQ ID NO: 526925 - RNA, 19 nt, Homo sapiens
  misc_RNA (1)...(19): siRNA sense strand
ugauggaagugccuauguu

SEQ ID NO: 526926 - RNA, 19 nt, Homo sapiens
  misc_RNA (1)...(19): siRNA sense strand
gcagacacacaaaguggaa

SEQ ID NO: 526927 - RNA, 19 nt, Homo sapiens
  misc_RNA (1)...(19): siRNA sense strand
uuagagaccuacccaugga

SEQ ID NO: 526928 - RNA, 19 nt, Homo sapiens
  misc_RNA (1)...(19): siRNA sense strand
gggacugagaugaucauua

SEQ ID NO: 526929 - RNA, 19 nt, Homo sapiens
  misc_RNA (1)...(19): siRNA sense strand
cagcaacaguucucagucu

SEQ ID NO: 526930 - RNA, 19 nt, Homo sapiens
  misc_RNA (1)...(19): siRNA sense strand
ggauuuagagauacuggaa

SEQ ID NO: 526931 - RNA, 19 nt, Homo sapiens
  misc_RNA (1)...(19): siRNA sense strand
ccacuuugcuuuucaccua

SEQ ID NO: 526932 - RNA, 19 nt, Homo sapiens
  misc_RNA (1)...(19): siRNA sense strand
aggcaaauguaaucauguu

SEQ ID NO: 526933 - RNA, 19 nt, Homo sapiens
  misc_RNA (1)...(19): siRNA sense strand
gaagaggaggagagaagga

SEQ ID NO: 526934 - RNA, 19 nt, Homo sapiens
  misc_RNA (1)...(19): siRNA sense strand
ggaauacagaccauuugug

SEQ ID NO: 526935 - RNA, 19 nt, Homo sapiens
  misc_RNA (1)...(19): siRNA sense strand
agacuccagugaucaguau

SEQ ID NO: 526936 - RNA, 19 nt, Homo sapiens
  misc_RNA (1)...(19): siRNA sense strand
ccaacaaugagauggauga

SEQ ID NO: 526937 - RNA, 19 nt, Homo sapiens
  misc_RNA (1)...(19): siRNA sense strand
gagaaagauauucaaaugg

SEQ ID NO: 526938 - RNA, 19 nt, Homo sapiens
  misc_RNA (1)...(19): siRNA sense strand
gaaaagauuccaugacauc

SEQ ID NO: 526939 - RNA, 19 nt, Homo sapiens
  misc_RNA (1)...(19): siRNA sense strand
caaauggagcuucaaggau

SEQ ID NO: 526940 - RNA, 19 nt, Homo sapiens
  misc_RNA (1)...(19): siRNA sense strand
gaucugaacuguggaaaag

SEQ ID NO: 526941 - RNA, 19 nt, Homo sapiens
  misc_RNA (1)...(19): siRNA sense strand
gcucugaaagucuggaaga

SEQ ID NO: 526942 - RNA, 19 nt, Homo sapiens
  misc_RNA (1)...(19): siRNA sense strand
cggcagaucaucagcuuug

SEQ ID NO: 526943 - RNA, 19 nt, Homo sapiens
  misc_RNA (1)...(19): siRNA sense strand
caucugaagacuccaguga

SEQ ID NO: 526944 - RNA, 19 nt, Homo sapiens
  misc_RNA (1)...(19): siRNA sense strand
ugaaacucaccaacaauga

SEQ ID NO: 526945 - RNA, 19 nt, Homo sapiens
  misc_RNA (1)...(19): siRNA sense strand
ucugaagacuccagugauc

SEQ ID NO: 526946 - RNA, 19 nt, Homo sapiens
  misc_RNA (1)...(19): siRNA sense strand
cagggaagcaguaccaugu

SEQ ID NO: 526947 - RNA, 19 nt, Homo sapiens
  misc_RNA (1)...(19): siRNA sense strand
guucauugguauccagcaa

SEQ ID NO: 526948 - RNA, 19 nt, Homo sapiens
  misc_RNA (1)...(19): siRNA sense strand
gggaauacagaccauuugu

SEQ ID NO: 526949 - RNA, 19 nt, Homo sapiens
  misc_RNA (1)...(19): siRNA sense strand
uaucuacaagcaccuaauu

SEQ ID NO: 526950 - RNA, 19 nt, Homo sapiens
  misc_RNA (1)...(19): siRNA sense strand
ccauggaggccuucuuuca

SEQ ID NO: 526951 - RNA, 19 nt, Homo sapiens
  misc_RNA (1)...(19): siRNA sense strand
guguugaccugucccagau

SEQ ID NO: 526952 - RNA, 19 nt, Homo sapiens
  misc_RNA (1)...(19): siRNA sense strand
gaagugccuauguuaucuu

SEQ ID NO: 526953 - RNA, 19 nt, Homo sapiens
  misc_RNA (1)...(19): siRNA sense strand
uaccaaaaccaacagauua

SEQ ID NO: 526954 - RNA, 19 nt, Homo sapiens
  misc_RNA (1)...(19): siRNA sense strand
uaagacagagcccucaaca

SEQ ID NO: 526955 - RNA, 19 nt, Homo sapiens
  misc_RNA (1)...(19): siRNA sense strand
ccaucuagacugauaagug

SEQ ID NO: 526956 - RNA, 19 nt, Homo sapiens
  misc_RNA (1)...(19): siRNA sense strand
cuuaguugcuccuuucauc

SEQ ID NO: 526957 - RNA, 19 nt, Homo sapiens
  misc_RNA (1)...(19): siRNA sense strand
aaacagggguguauuggau

SEQ ID NO: 526958 - RNA, 19 nt, Homo sapiens
  misc_RNA (1)...(19): siRNA sense strand
uuagagauacuggaagaaa

SEQ ID NO: 526959 - RNA, 19 nt, Homo sapiens
  misc_RNA (1)...(19): siRNA sense strand
caucuccagugaccucuag

SEQ ID NO: 526960 - RNA, 19 nt, Homo sapiens
  misc_RNA (1)...(19): siRNA sense strand
uuacagucaccuggaaaua

SEQ ID NO: 526961 - RNA, 19 nt, Homo sapiens
  misc_RNA (1)...(19): siRNA sense strand
guugaccugucccagauuc

SEQ ID NO: 526962 - RNA, 19 nt, Homo sapiens
  misc_RNA (1)...(19): siRNA sense strand
caccuaauucuaccaauca

SEQ ID NO: 526963 - RNA, 19 nt, Homo sapiens
  misc_RNA (1)...(19): siRNA sense strand
ccagugaucaguaucuaca

SEQ ID NO: 526964 - RNA, 19 nt, Homo sapiens
  misc_RNA (1)...(19): siRNA sense strand
gcaagcagcaacaguucuc

SEQ ID NO: 526965 - RNA, 19 nt, Homo sapiens
  misc_RNA (1)...(19): siRNA sense strand
cuagcaagcagcaacaguu

SEQ ID NO: 526966 - RNA, 19 nt, Homo sapiens
  misc_RNA (1)...(19): siRNA sense strand
ccaacagauuacgaaacua

SEQ ID NO: 526967 - RNA, 19 nt, Homo sapiens
  misc_RNA (1)...(19): siRNA sense strand
gcauaccugcccaauguca

SEQ ID NO: 526968 - RNA, 19 nt, Homo sapiens
  misc_RNA (1)...(19): siRNA sense strand
gagaaggcaaauguaauca

SEQ ID NO: 526969 - RNA, 19 nt, Homo sapiens
  misc_RNA (1)...(19): siRNA sense strand
caaccaucuuaaagugaau

SEQ ID NO: 526970 - RNA, 19 nt, Homo sapiens
  misc_RNA (1)...(19): siRNA sense strand
caugacaucgggacugaga

SEQ ID NO: 526971 - RNA, 19 nt, Homo sapiens
  misc_RNA (1)...(19): siRNA sense strand
gacagagcccucaacaucu

SEQ ID NO: 526972 - RNA, 19 nt, Homo sapiens
  misc_RNA (1)...(19): siRNA sense strand
uggaagagaaagauauuca

SEQ ID NO: 526973 - RNA, 19 nt, Homo sapiens
  misc_RNA (1)...(19): siRNA sense strand
guuccaaccaucuuaaagu

SEQ ID NO: 526974 - RNA, 19 nt, Homo sapiens
  misc_RNA (1)...(19): siRNA sense strand
caauuucucuaugccaucu

SEQ ID NO: 526975 - RNA, 19 nt, Homo sapiens
  misc_RNA (1)...(19): siRNA sense strand
uuuaccggcuccugaaaga

SEQ ID NO: 526976 - RNA, 19 nt, Homo sapiens
  misc_RNA (1)...(19): siRNA sense strand
uagagauacuggaagaaac

SEQ ID NO: 526977 - RNA, 19 nt, Homo sapiens
  misc_RNA (1)...(19): siRNA sense strand
acagaccauuugugcauca

SEQ ID NO: 526978 - RNA, 19 nt, Homo sapiens
  misc_RNA (1)...(19): siRNA sense strand
acugagaugaucauuacua

SEQ ID NO: 526979 - RNA, 19 nt, Homo sapiens
  misc_RNA (1)...(19): siRNA sense strand
gauuacagucaccuggaaa

SEQ ID NO: 526980 - RNA, 19 nt, Homo sapiens
  misc_RNA (1)...(19): siRNA sense strand
uguauuggaugggcuuuua

SEQ ID NO: 526981 - RNA, 19 nt, Homo sapiens
  misc_RNA (1)...(19): siRNA sense strand
uacaagcaccuaauucuac

SEQ ID NO: 526982 - RNA, 19 nt, Homo sapiens
  misc_RNA (1)...(19): siRNA sense strand
caagaagacccgcaucauc

SEQ ID NO: 526983 - RNA, 19 nt, Homo sapiens
  misc_RNA (1)...(19): siRNA sense strand
caacauucaggccgugcua

SEQ ID NO: 526984 - RNA, 19 nt, Homo sapiens
  misc_RNA (1)...(19): siRNA sense strand
caaggcgaagggcaaguaa

SEQ ID NO: 526985 - RNA, 19 nt, Homo sapiens
  misc_RNA (1)...(19): siRNA sense strand
guaccugaccgccgagauc

SEQ ID NO: 526986 - RNA, 19 nt, Homo sapiens
  misc_RNA (1)...(19): siRNA sense strand
agacugagagccaccacaa

SEQ ID NO: 526987 - RNA, 19 nt, Homo sapiens
  misc_RNA (1)...(19): siRNA sense strand
gcaacgacgaggagcucaa

SEQ ID NO: 526988 - RNA, 19 nt, Homo sapiens
  misc_RNA (1)...(19): siRNA sense strand
acaaggcgaagggcaagua

SEQ ID NO: 526989 - RNA, 19 nt, Homo sapiens
  misc_RNA (1)...(19): siRNA sense strand
gcgguguccugcccaacau

SEQ ID NO: 526990 - RNA, 19 nt, Homo sapiens
  misc_RNA (1)...(19): siRNA sense strand
cgacgaggagcucaacaag

SEQ ID NO: 526991 - RNA, 19 nt, Homo sapiens
  misc_RNA (1)...(19): siRNA sense strand
caacaagcugcugggcaaa

SEQ ID NO: 526992 - RNA, 19 nt, Homo sapiens
  misc_RNA (1)...(19): siRNA sense strand
acaagcugcugggcaaagu

SEQ ID NO: 526993 - RNA, 19 nt, Homo sapiens
  misc_RNA (1)...(19): siRNA sense strand
ggagagcuauuccaucuau

SEQ ID NO: 526994 - RNA, 19 nt, Homo sapiens
  misc_RNA (1)...(19): siRNA sense strand
gaagaaagacggcaagaag

SEQ ID NO: 526995 - RNA, 19 nt, Homo sapiens
  misc_RNA (1)...(19): siRNA sense strand
ccaagaaggcggugacuaa

SEQ ID NO: 526996 - RNA, 19 nt, Homo sapiens
  misc_RNA (1)...(19): siRNA sense strand
gcuauuccaucuaugugua

SEQ ID NO: 526997 - RNA, 19 nt, Homo sapiens
  misc_RNA (1)...(19): siRNA sense strand
cuaaggccgucaccaagua

SEQ ID NO: 526998 - RNA, 19 nt, Homo sapiens
  misc_RNA (1)...(19): siRNA sense strand
ugacuaaggcgcagaagaa

SEQ ID NO: 526999 - RNA, 19 nt, Homo sapiens
  misc_RNA (1)...(19): siRNA sense strand
guacaccagcgcuaaguaa

SEQ ID NO: 527000 - RNA, 19 nt, Homo sapiens
  misc_RNA (1)...(19): siRNA sense strand
guacuaaggccgucaccaa

SEQ ID NO: 527001 - RNA, 19 nt, Homo sapiens
  misc_RNA (1)...(19): siRNA sense strand
aacaagcgcucgaccauca

SEQ ID NO: 527002 - RNA, 19 nt, Homo sapiens
  misc_RNA (1)...(19): siRNA sense strand
gcaaggagagcuauuccau

SEQ ID NO: 527003 - RNA, 19 nt, Homo sapiens
  misc_RNA (1)...(19): siRNA sense strand
cuaaggcgcagaagaaaga

SEQ ID NO: 527004 - RNA, 19 nt, Homo sapiens
  misc_RNA (1)...(19): siRNA sense strand
aaggagagcuauuccaucu

SEQ ID NO: 527005 - RNA, 19 nt, Homo sapiens
  misc_RNA (1)...(19): siRNA sense strand
caucaugaauucguuugug

SEQ ID NO: 527006 - RNA, 19 nt, Homo sapiens
  misc_RNA (1)...(19): siRNA sense strand
ccaaguacaccagcgcuaa

SEQ ID NO: 527007 - RNA, 19 nt, Homo sapiens
  misc_RNA (1)...(19): siRNA sense strand
uguacaagguucugaagca

SEQ ID NO: 527008 - RNA, 19 nt, Homo sapiens
  misc_RNA (1)...(19): siRNA sense strand
ccaucuauguguacaaggu

SEQ ID NO: 527009 - RNA, 19 nt, Homo sapiens
  misc_RNA (1)...(19): siRNA sense strand
gacuaaggcgcagaagaaa

SEQ ID NO: 527010 - RNA, 19 nt, Homo sapiens
  misc_RNA (1)...(19): siRNA sense strand
gagcuauuccaucuaugug

SEQ ID NO: 527011 - RNA, 19 nt, Homo sapiens
  misc_RNA (1)...(19): siRNA sense strand
gagagcuauuccaucuaug

SEQ ID NO: 527012 - RNA, 19 nt, Homo sapiens
  misc_RNA (1)...(19): siRNA sense strand
gggcaucaugaauucguuu

SEQ ID NO: 527013 - RNA, 19 nt, Homo sapiens
  misc_RNA (1)...(19): siRNA sense strand
acaccggcauuucguccaa

SEQ ID NO: 527014 - RNA, 19 nt, Homo sapiens
  misc_RNA (1)...(19): siRNA sense strand
caagaaggcggugacuaag

SEQ ID NO: 527015 - RNA, 19 nt, Homo sapiens
  misc_RNA (1)...(19): siRNA sense strand
aucaugaauucguuuguga

SEQ ID NO: 527016 - RNA, 19 nt, Homo sapiens
  misc_RNA (1)...(19): siRNA sense strand
agaagaaagacggcaagaa

SEQ ID NO: 527017 - RNA, 19 nt, Homo sapiens
  misc_RNA (1)...(19): siRNA sense strand
agacgaaccugcuuugaaa

SEQ ID NO: 527018 - RNA, 19 nt, Homo sapiens
  misc_RNA (1)...(19): siRNA sense strand
uaaagucauuccuguauuc

SEQ ID NO: 527019 - RNA, 19 nt, Homo sapiens
  misc_RNA (1)...(19): siRNA sense strand
ggauagcauugaagccaaa

SEQ ID NO: 527020 - RNA, 19 nt, Homo sapiens
  misc_RNA (1)...(19): siRNA sense strand
ggagaaucauguagugaca

SEQ ID NO: 527021 - RNA, 19 nt, Homo sapiens
  misc_RNA (1)...(19): siRNA sense strand
ucacagaauccgacuggua

SEQ ID NO: 527022 - RNA, 19 nt, Homo sapiens
  misc_RNA (1)...(19): siRNA sense strand
ggauccaucuauaaaguca

SEQ ID NO: 527023 - RNA, 19 nt, Homo sapiens
  misc_RNA (1)...(19): siRNA sense strand
gcagcgacauccagguuca

SEQ ID NO: 527024 - RNA, 19 nt, Homo sapiens
  misc_RNA (1)...(19): siRNA sense strand
caggauccaucuauaaagu

SEQ ID NO: 527025 - RNA, 19 nt, Homo sapiens
  misc_RNA (1)...(19): siRNA sense strand
agaaaucaauugccaggau

SEQ ID NO: 527026 - RNA, 19 nt, Homo sapiens
  misc_RNA (1)...(19): siRNA sense strand
gaagaggacuaccccaaug

SEQ ID NO: 527027 - RNA, 19 nt, Homo sapiens
  misc_RNA (1)...(19): siRNA sense strand
gaaacgccagcgacuagaa

SEQ ID NO: 527028 - RNA, 19 nt, Homo sapiens
  misc_RNA (1)...(19): siRNA sense strand
gccaggauccaucuauaaa

SEQ ID NO: 527029 - RNA, 19 nt, Homo sapiens
  misc_RNA (1)...(19): siRNA sense strand
gcgguuggauagcauugaa

SEQ ID NO: 527030 - RNA, 19 nt, Homo sapiens
  misc_RNA (1)...(19): siRNA sense strand
gaagacgaaccugcuuuga

SEQ ID NO: 527031 - RNA, 19 nt, Homo sapiens
  misc_RNA (1)...(19): siRNA sense strand
agaaucauguagugacaga

SEQ ID NO: 527032 - RNA, 19 nt, Homo sapiens
  misc_RNA (1)...(19): siRNA sense strand
ccuggaggcuacuuguaaa

SEQ ID NO: 527033 - RNA, 19 nt, Homo sapiens
  misc_RNA (1)...(19): siRNA sense strand
agugacagaugaagacgaa

SEQ ID NO: 527034 - RNA, 19 nt, Homo sapiens
  misc_RNA (1)...(19): siRNA sense strand
cgaccuggccgaugugguu

SEQ ID NO: 527035 - RNA, 19 nt, Homo sapiens
  misc_RNA (1)...(19): siRNA sense strand
cuauaaauuuggcaucaca

SEQ ID NO: 527036 - RNA, 19 nt, Homo sapiens
  misc_RNA (1)...(19): siRNA sense strand
cgcuaacgcugcuggacua

SEQ ID NO: 527037 - RNA, 19 nt, Homo sapiens
  misc_RNA (1)...(19): siRNA sense strand
uagcauugaagccaaauug

SEQ ID NO: 527038 - RNA, 19 nt, Homo sapiens
  misc_RNA (1)...(19): siRNA sense strand
uaaauuuggcaucacagaa

SEQ ID NO: 527039 - RNA, 19 nt, Homo sapiens
  misc_RNA (1)...(19): siRNA sense strand
ggaggcuacuuguaaaucc

SEQ ID NO: 527040 - RNA, 19 nt, Homo sapiens
  misc_RNA (1)...(19): siRNA sense strand
uugccaggauccaucuaua

SEQ ID NO: 527041 - RNA, 19 nt, Homo sapiens
  misc_RNA (1)...(19): siRNA sense strand
gggcagcgacauccagguu

SEQ ID NO: 527042 - RNA, 19 nt, Homo sapiens
  misc_RNA (1)...(19): siRNA sense strand
gcauugaagccaaauugca

SEQ ID NO: 527043 - RNA, 19 nt, Homo sapiens
  misc_RNA (1)...(19): siRNA sense strand
ugaagacgaaccugcuuug

SEQ ID NO: 527044 - RNA, 19 nt, Homo sapiens
  misc_RNA (1)...(19): siRNA sense strand
aaauuuggcaucacagaau

SEQ ID NO: 527045 - RNA, 19 nt, Homo sapiens
  misc_RNA (1)...(19): siRNA sense strand
gcaagcacgggaagaagca

SEQ ID NO: 527046 - RNA, 19 nt, Homo sapiens
  misc_RNA (1)...(19): siRNA sense strand
aaacgccagcgacuagaaa

SEQ ID NO: 527047 - RNA, 19 nt, Homo sapiens
  misc_RNA (1)...(19): siRNA sense strand
gggcaacccagacgugcaa

SEQ ID NO: 527048 - RNA, 19 nt, Homo sapiens
  misc_RNA (1)...(19): siRNA sense strand
cauugaagccaaauugcaa

SEQ ID NO: 527049 - RNA, 19 nt, Homo sapiens
  misc_RNA (1)...(19): siRNA sense strand
cuauaaagucauuccugua

SEQ ID NO: 527050 - RNA, 19 nt, Homo sapiens
  misc_RNA (1)...(19): siRNA sense strand
gaugaagacgaaccugcuu

SEQ ID NO: 527051 - RNA, 19 nt, Homo sapiens
  misc_RNA (1)...(19): siRNA sense strand
uggacccgcucaccaucua

SEQ ID NO: 527052 - RNA, 19 nt, Homo sapiens
  misc_RNA (1)...(19): siRNA sense strand
aagacgaaccugcuuugaa

SEQ ID NO: 527053 - RNA, 19 nt, Homo sapiens
  misc_RNA (1)...(19): siRNA sense strand
gccagcgacuagaaaucaa

SEQ ID NO: 527054 - RNA, 19 nt, Homo sapiens
  misc_RNA (1)...(19): siRNA sense strand
ccgagaagauggcgcuaac

SEQ ID NO: 527055 - RNA, 19 nt, Homo sapiens
  misc_RNA (1)...(19): siRNA sense strand
caacccagacgugcaacaa

SEQ ID NO: 527056 - RNA, 19 nt, Homo sapiens
  misc_RNA (1)...(19): siRNA sense strand
uaacgcugcuggacuaccu

SEQ ID NO: 527057 - RNA, 19 nt, Homo sapiens
  misc_RNA (1)...(19): siRNA sense strand
agacggacaggugcaagua

SEQ ID NO: 527058 - RNA, 19 nt, Homo sapiens
  misc_RNA (1)...(19): siRNA sense strand
cuucagagccgaugaugag

SEQ ID NO: 527059 - RNA, 19 nt, Homo sapiens
  misc_RNA (1)...(19): siRNA sense strand
gaaucaagcagagcaucga

SEQ ID NO: 527060 - RNA, 19 nt, Homo sapiens
  misc_RNA (1)...(19): siRNA sense strand
aacacgaccuggccgaugu

SEQ ID NO: 527061 - RNA, 19 nt, Homo sapiens
  misc_RNA (1)...(19): siRNA sense strand
ggcuacuuguaaauccuua

SEQ ID NO: 527062 - RNA, 19 nt, Homo sapiens
  misc_RNA (1)...(19): siRNA sense strand
ugccaggauccaucuauaa

SEQ ID NO: 527063 - RNA, 19 nt, Homo sapiens
  misc_RNA (1)...(19): siRNA sense strand
cgacauccagguucaguac

SEQ ID NO: 527064 - RNA, 19 nt, Homo sapiens
  misc_RNA (1)...(19): siRNA sense strand
cgacugguaccgaaucaag

SEQ ID NO: 527065 - RNA, 19 nt, Homo sapiens
  misc_RNA (1)...(19): siRNA sense strand
gaacucggaagaggacuac

SEQ ID NO: 527066 - RNA, 19 nt, Homo sapiens
  misc_RNA (1)...(19): siRNA sense strand
gcgacauccagguucagua

SEQ ID NO: 527067 - RNA, 19 nt, Homo sapiens
  misc_RNA (1)...(19): siRNA sense strand
cagcgacuagaaaucaauu

SEQ ID NO: 527068 - RNA, 19 nt, Homo sapiens
  misc_RNA (1)...(19): siRNA sense strand
cccuggaggcuacuuguaa

SEQ ID NO: 527069 - RNA, 19 nt, Homo sapiens
  misc_RNA (1)...(19): siRNA sense strand
agucauuccuguauuccau

SEQ ID NO: 527070 - RNA, 19 nt, Homo sapiens
  misc_RNA (1)...(19): siRNA sense strand
aaucauguagugacagaug

SEQ ID NO: 527071 - RNA, 19 nt, Homo sapiens
  misc_RNA (1)...(19): siRNA sense strand
gccgaugugguucagauug

SEQ ID NO: 527072 - RNA, 19 nt, Homo sapiens
  misc_RNA (1)...(19): siRNA sense strand
acccagacgugcaacaaag

SEQ ID NO: 527073 - RNA, 19 nt, Homo sapiens
  misc_RNA (1)...(19): siRNA sense strand
gcccuggaggcuacuugua

SEQ ID NO: 527074 - RNA, 19 nt, Homo sapiens
  misc_RNA (1)...(19): siRNA sense strand
agacgaaccugcuuugaaa

SEQ ID NO: 527075 - RNA, 19 nt, Homo sapiens
  misc_RNA (1)...(19): siRNA sense strand
uaaagucauuccuguauuc

SEQ ID NO: 527076 - RNA, 19 nt, Homo sapiens
  misc_RNA (1)...(19): siRNA sense strand
ggauagcauugaagccaaa

SEQ ID NO: 527077 - RNA, 19 nt, Homo sapiens
  misc_RNA (1)...(19): siRNA sense strand
ggagaaucauguagugaca

SEQ ID NO: 527078 - RNA, 19 nt, Homo sapiens
  misc_RNA (1)...(19): siRNA sense strand
ucacagaauccgacuggua

SEQ ID NO: 527079 - RNA, 19 nt, Homo sapiens
  misc_RNA (1)...(19): siRNA sense strand
ggauccaucuauaaaguca

SEQ ID NO: 527080 - RNA, 19 nt, Homo sapiens
  misc_RNA (1)...(19): siRNA sense strand
gcagcgacauccagguuca

SEQ ID NO: 527081 - RNA, 19 nt, Homo sapiens
  misc_RNA (1)...(19): siRNA sense strand
caggauccaucuauaaagu

SEQ ID NO: 527082 - RNA, 19 nt, Homo sapiens
  misc_RNA (1)...(19): siRNA sense strand
agaaaucaauugccaggau

SEQ ID NO: 527083 - RNA, 19 nt, Homo sapiens
  misc_RNA (1)...(19): siRNA sense strand
gaagaggacuaccccaaug

SEQ ID NO: 527084 - RNA, 19 nt, Homo sapiens
  misc_RNA (1)...(19): siRNA sense strand
gaaacgccagcgacuagaa

SEQ ID NO: 527085 - RNA, 19 nt, Homo sapiens
  misc_RNA (1)...(19): siRNA sense strand
gccaggauccaucuauaaa

SEQ ID NO: 527086 - RNA, 19 nt, Homo sapiens
  misc_RNA (1)...(19): siRNA sense strand
gcgguuggauagcauugaa

SEQ ID NO: 527087 - RNA, 19 nt, Homo sapiens
  misc_RNA (1)...(19): siRNA sense strand
gaagacgaaccugcuuuga

SEQ ID NO: 527088 - RNA, 19 nt, Homo sapiens
  misc_RNA (1)...(19): siRNA sense strand
agaaucauguagugacaga

SEQ ID NO: 527089 - RNA, 19 nt, Homo sapiens
  misc_RNA (1)...(19): siRNA sense strand
ccuggaggcuacuuguaaa

SEQ ID NO: 527090 - RNA, 19 nt, Homo sapiens
  misc_RNA (1)...(19): siRNA sense strand
agugacagaugaagacgaa

SEQ ID NO: 527091 - RNA, 19 nt, Homo sapiens
  misc_RNA (1)...(19): siRNA sense strand
cgaccuggccgaugugguu

SEQ ID NO: 527092 - RNA, 19 nt, Homo sapiens
  misc_RNA (1)...(19): siRNA sense strand
cuauaaauuuggcaucaca

SEQ ID NO: 527093 - RNA, 19 nt, Homo sapiens
  misc_RNA (1)...(19): siRNA sense strand
cgcuaacgcugcuggacua

SEQ ID NO: 527094 - RNA, 19 nt, Homo sapiens
  misc_RNA (1)...(19): siRNA sense strand
uagcauugaagccaaauug

SEQ ID NO: 527095 - RNA, 19 nt, Homo sapiens
  misc_RNA (1)...(19): siRNA sense strand
uaaauuuggcaucacagaa

SEQ ID NO: 527096 - RNA, 19 nt, Homo sapiens
  misc_RNA (1)...(19): siRNA sense strand
ggaggcuacuuguaaaucc

SEQ ID NO: 527097 - RNA, 19 nt, Homo sapiens
  misc_RNA (1)...(19): siRNA sense strand
uugccaggauccaucuaua

SEQ ID NO: 527098 - RNA, 19 nt, Homo sapiens
  misc_RNA (1)...(19): siRNA sense strand
gggcagcgacauccagguu

SEQ ID NO: 527099 - RNA, 19 nt, Homo sapiens
  misc_RNA (1)...(19): siRNA sense strand
gcauugaagccaaauugca

SEQ ID NO: 527100 - RNA, 19 nt, Homo sapiens
  misc_RNA (1)...(19): siRNA sense strand
ugaagacgaaccugcuuug

SEQ ID NO: 527101 - RNA, 19 nt, Homo sapiens
  misc_RNA (1)...(19): siRNA sense strand
aaauuuggcaucacagaau

SEQ ID NO: 527102 - RNA, 19 nt, Homo sapiens
  misc_RNA (1)...(19): siRNA sense strand
gcaagcacgggaagaagca

SEQ ID NO: 527103 - RNA, 19 nt, Homo sapiens
  misc_RNA (1)...(19): siRNA sense strand
aaacgccagcgacuagaaa

SEQ ID NO: 527104 - RNA, 19 nt, Homo sapiens
  misc_RNA (1)...(19): siRNA sense strand
gggcaacccagacgugcaa

SEQ ID NO: 527105 - RNA, 19 nt, Homo sapiens
  misc_RNA (1)...(19): siRNA sense strand
cauugaagccaaauugcaa

SEQ ID NO: 527106 - RNA, 19 nt, Homo sapiens
  misc_RNA (1)...(19): siRNA sense strand
cuauaaagucauuccugua

SEQ ID NO: 527107 - RNA, 19 nt, Homo sapiens
  misc_RNA (1)...(19): siRNA sense strand
gaugaagacgaaccugcuu

SEQ ID NO: 527108 - RNA, 19 nt, Homo sapiens
  misc_RNA (1)...(19): siRNA sense strand
uggacccgcucaccaucua

SEQ ID NO: 527109 - RNA, 19 nt, Homo sapiens
  misc_RNA (1)...(19): siRNA sense strand
aagacgaaccugcuuugaa

SEQ ID NO: 527110 - RNA, 19 nt, Homo sapiens
  misc_RNA (1)...(19): siRNA sense strand
gccagcgacuagaaaucaa

SEQ ID NO: 527111 - RNA, 19 nt, Homo sapiens
  misc_RNA (1)...(19): siRNA sense strand
ccgagaagauggcgcuaac

SEQ ID NO: 527112 - RNA, 19 nt, Homo sapiens
  misc_RNA (1)...(19): siRNA sense strand
caacccagacgugcaacaa

SEQ ID NO: 527113 - RNA, 19 nt, Homo sapiens
  misc_RNA (1)...(19): siRNA sense strand
uaacgcugcuggacuaccu

SEQ ID NO: 527114 - RNA, 19 nt, Homo sapiens
  misc_RNA (1)...(19): siRNA sense strand
agacggacaggugcaagua

SEQ ID NO: 527115 - RNA, 19 nt, Homo sapiens
  misc_RNA (1)...(19): siRNA sense strand
cuucagagccgaugaugag

SEQ ID NO: 527116 - RNA, 19 nt, Homo sapiens
  misc_RNA (1)...(19): siRNA sense strand
gaaucaagcagagcaucga

SEQ ID NO: 527117 - RNA, 19 nt, Homo sapiens
  misc_RNA (1)...(19): siRNA sense strand
aacacgaccuggccgaugu

SEQ ID NO: 527118 - RNA, 19 nt, Homo sapiens
  misc_RNA (1)...(19): siRNA sense strand
ggcuacuuguaaauccuua

SEQ ID NO: 527119 - RNA, 19 nt, Homo sapiens
  misc_RNA (1)...(19): siRNA sense strand
ugccaggauccaucuauaa

SEQ ID NO: 527120 - RNA, 19 nt, Homo sapiens
  misc_RNA (1)...(19): siRNA sense strand
cgacauccagguucaguac

SEQ ID NO: 527121 - RNA, 19 nt, Homo sapiens
  misc_RNA (1)...(19): siRNA sense strand
cgacugguaccgaaucaag

SEQ ID NO: 527122 - RNA, 19 nt, Homo sapiens
  misc_RNA (1)...(19): siRNA sense strand
gaacucggaagaggacuac

SEQ ID NO: 527123 - RNA, 19 nt, Homo sapiens
  misc_RNA (1)...(19): siRNA sense strand
gcgacauccagguucagua

SEQ ID NO: 527124 - RNA, 19 nt, Homo sapiens
  misc_RNA (1)...(19): siRNA sense strand
cagcgacuagaaaucaauu

SEQ ID NO: 527125 - RNA, 19 nt, Homo sapiens
  misc_RNA (1)...(19): siRNA sense strand
cccuggaggcuacuuguaa

SEQ ID NO: 527126 - RNA, 19 nt, Homo sapiens
  misc_RNA (1)...(19): siRNA sense strand
agucauuccuguauuccau

SEQ ID NO: 527127 - RNA, 19 nt, Homo sapiens
  misc_RNA (1)...(19): siRNA sense strand
aaucauguagugacagaug

SEQ ID NO: 527128 - RNA, 19 nt, Homo sapiens
  misc_RNA (1)...(19): siRNA sense strand
gccgaugugguucagauug

SEQ ID NO: 527129 - RNA, 19 nt, Homo sapiens
  misc_RNA (1)...(19): siRNA sense strand
acccagacgugcaacaaag

SEQ ID NO: 527130 - RNA, 19 nt, Homo sapiens
  misc_RNA (1)...(19): siRNA sense strand
gcccuggaggcuacuugua

SEQ ID NO: 527131 - RNA, 19 nt, Homo sapiens
  misc_RNA (1)...(19): siRNA sense strand
ccucugaucuuguuucuaa

SEQ ID NO: 527132 - RNA, 19 nt, Homo sapiens
  misc_RNA (1)...(19): siRNA sense strand
gaaagaggcugugauacug

SEQ ID NO: 527133 - RNA, 19 nt, Homo sapiens
  misc_RNA (1)...(19): siRNA sense strand
gagaacaagcccuccauua

SEQ ID NO: 527134 - RNA, 19 nt, Homo sapiens
  misc_RNA (1)...(19): siRNA sense strand
gaaaacagaugguuauuca

SEQ ID NO: 527135 - RNA, 19 nt, Homo sapiens
  misc_RNA (1)...(19): siRNA sense strand
gaacaagcccuccauuauc

SEQ ID NO: 527136 - RNA, 19 nt, Homo sapiens
  misc_RNA (1)...(19): siRNA sense strand
ggaugucccuggagauaaa

SEQ ID NO: 527137 - RNA, 19 nt, Homo sapiens
  misc_RNA (1)...(19): siRNA sense strand
gcugugauacugccuauua

SEQ ID NO: 527138 - RNA, 19 nt, Homo sapiens
  misc_RNA (1)...(19): siRNA sense strand
gauaaagccaagcaaagua

SEQ ID NO: 527139 - RNA, 19 nt, Homo sapiens
  misc_RNA (1)...(19): siRNA sense strand
ucugggagcuacaaauaua

SEQ ID NO: 527140 - RNA, 19 nt, Homo sapiens
  misc_RNA (1)...(19): siRNA sense strand
gggcaaaguguacagaaua

SEQ ID NO: 527141 - RNA, 19 nt, Homo sapiens
  misc_RNA (1)...(19): siRNA sense strand
gaagccgcacguagaauua

SEQ ID NO: 527142 - RNA, 19 nt, Homo sapiens
  misc_RNA (1)...(19): siRNA sense strand
gagcagcaauguuuaaacu

SEQ ID NO: 527143 - RNA, 19 nt, Homo sapiens
  misc_RNA (1)...(19): siRNA sense strand
cgauagaucuggcuagcaa

SEQ ID NO: 527144 - RNA, 19 nt, Homo sapiens
  misc_RNA (1)...(19): siRNA sense strand
ugaaauugauucucucugu

SEQ ID NO: 527145 - RNA, 19 nt, Homo sapiens
  misc_RNA (1)...(19): siRNA sense strand
gcaaagcagcgcaagaaga

SEQ ID NO: 527146 - RNA, 19 nt, Homo sapiens
  misc_RNA (1)...(19): siRNA sense strand
ugacguugcuggacuugaa

SEQ ID NO: 527147 - RNA, 19 nt, Homo sapiens
  misc_RNA (1)...(19): siRNA sense strand
ggcaaaguguacagaauau

SEQ ID NO: 527148 - RNA, 19 nt, Homo sapiens
  misc_RNA (1)...(19): siRNA sense strand
ccaaagaagcacugaaaga

SEQ ID NO: 527149 - RNA, 19 nt, Homo sapiens
  misc_RNA (1)...(19): siRNA sense strand
ggaaggagaaucugaugau

SEQ ID NO: 527150 - RNA, 19 nt, Homo sapiens
  misc_RNA (1)...(19): siRNA sense strand
gaaggagaaucugaugauc

SEQ ID NO: 527151 - RNA, 19 nt, Homo sapiens
  misc_RNA (1)...(19): siRNA sense strand
cuacuuagccaaagcugua

SEQ ID NO: 527152 - RNA, 19 nt, Homo sapiens
  misc_RNA (1)...(19): siRNA sense strand
gaaauggagugacguugcu

SEQ ID NO: 527153 - RNA, 19 nt, Homo sapiens
  misc_RNA (1)...(19): siRNA sense strand
uccauuaucuucauugaug

SEQ ID NO: 527154 - RNA, 19 nt, Homo sapiens
  misc_RNA (1)...(19): siRNA sense strand
gagcugauccuaaccaucu

SEQ ID NO: 527155 - RNA, 19 nt, Homo sapiens
  misc_RNA (1)...(19): siRNA sense strand
gaaacuacagaaucaacuu

SEQ ID NO: 527156 - RNA, 19 nt, Homo sapiens
  misc_RNA (1)...(19): siRNA sense strand
guucugggagcuacaaaua

SEQ ID NO: 527157 - RNA, 19 nt, Homo sapiens
  misc_RNA (1)...(19): siRNA sense strand
gccaacaacucaacauuuu

SEQ ID NO: 527158 - RNA, 19 nt, Homo sapiens
  misc_RNA (1)...(19): siRNA sense strand
ccuauuaaauuuccucauc

SEQ ID NO: 527159 - RNA, 19 nt, Homo sapiens
  misc_RNA (1)...(19): siRNA sense strand
ucaaggugccauuguuaua

SEQ ID NO: 527160 - RNA, 19 nt, Homo sapiens
  misc_RNA (1)...(19): siRNA sense strand
caacagaagccaacaacuc

SEQ ID NO: 527161 - RNA, 19 nt, Homo sapiens
  misc_RNA (1)...(19): siRNA sense strand
gccauuaggcgaagauuug

SEQ ID NO: 527162 - RNA, 19 nt, Homo sapiens
  misc_RNA (1)...(19): siRNA sense strand
agaacaagcccuccauuau

SEQ ID NO: 527163 - RNA, 19 nt, Homo sapiens
  misc_RNA (1)...(19): siRNA sense strand
gaaagugaagccgcacgua

SEQ ID NO: 527164 - RNA, 19 nt, Homo sapiens
  misc_RNA (1)...(19): siRNA sense strand
guucuggauucugccauua

SEQ ID NO: 527165 - RNA, 19 nt, Homo sapiens
  misc_RNA (1)...(19): siRNA sense strand
uguagacaaugauggaauu

SEQ ID NO: 527166 - RNA, 19 nt, Homo sapiens
  misc_RNA (1)...(19): siRNA sense strand
caaagaagcacugaaagag

SEQ ID NO: 527167 - RNA, 19 nt, Homo sapiens
  misc_RNA (1)...(19): siRNA sense strand
gcccuuaugcagccuguua

SEQ ID NO: 527168 - RNA, 19 nt, Homo sapiens
  misc_RNA (1)...(19): siRNA sense strand
gcgaagauuugagaaacga

SEQ ID NO: 527169 - RNA, 19 nt, Homo sapiens
  misc_RNA (1)...(19): siRNA sense strand
agccaaagcuguagcaaca

SEQ ID NO: 527170 - RNA, 19 nt, Homo sapiens
  misc_RNA (1)...(19): siRNA sense strand
cacagaagccagugaaaga

SEQ ID NO: 527171 - RNA, 19 nt, Homo sapiens
  misc_RNA (1)...(19): siRNA sense strand
agacaaggcugggaacuac

SEQ ID NO: 527172 - RNA, 19 nt, Homo sapiens
  misc_RNA (1)...(19): siRNA sense strand
gcacagaagccagugaaag

SEQ ID NO: 527173 - RNA, 19 nt, Homo sapiens
  misc_RNA (1)...(19): siRNA sense strand
gauccuaaccaucuuguag

SEQ ID NO: 527174 - RNA, 19 nt, Homo sapiens
  misc_RNA (1)...(19): siRNA sense strand
caaaguaucagggcaaagu

SEQ ID NO: 527175 - RNA, 19 nt, Homo sapiens
  misc_RNA (1)...(19): siRNA sense strand
ugaaggagccaaagaagca

SEQ ID NO: 527176 - RNA, 19 nt, Homo sapiens
  misc_RNA (1)...(19): siRNA sense strand
uagcaaagcagcgcaagaa

SEQ ID NO: 527177 - RNA, 19 nt, Homo sapiens
  misc_RNA (1)...(19): siRNA sense strand
ggaggggaauccuauuauu

SEQ ID NO: 527178 - RNA, 19 nt, Homo sapiens
  misc_RNA (1)...(19): siRNA sense strand
ggugauaaagccaagcaaa

SEQ ID NO: 527179 - RNA, 19 nt, Homo sapiens
  misc_RNA (1)...(19): siRNA sense strand
gaagugaaaaugaaaguga

SEQ ID NO: 527180 - RNA, 19 nt, Homo sapiens
  misc_RNA (1)...(19): siRNA sense strand
ugaaagaggcugugauacu

SEQ ID NO: 527181 - RNA, 19 nt, Homo sapiens
  misc_RNA (1)...(19): siRNA sense strand
aacaagcccuccauuaucu

SEQ ID NO: 527182 - RNA, 19 nt, Homo sapiens
  misc_RNA (1)...(19): siRNA sense strand
ggguugguguagacaauga

SEQ ID NO: 527183 - RNA, 19 nt, Homo sapiens
  misc_RNA (1)...(19): siRNA sense strand
caaaguguacagaauaucu

SEQ ID NO: 527184 - RNA, 19 nt, Homo sapiens
  misc_RNA (1)...(19): siRNA sense strand
gaugaucugcuaacaccuu

SEQ ID NO: 527185 - RNA, 19 nt, Homo sapiens
  misc_RNA (1)...(19): siRNA sense strand
guacagucagcuacucauu

SEQ ID NO: 527186 - RNA, 19 nt, Homo sapiens
  misc_RNA (1)...(19): siRNA sense strand
gaagauuugagaaacgaau

SEQ ID NO: 527187 - RNA, 19 nt, Homo sapiens
  misc_RNA (1)...(19): siRNA sense strand
caaagcagcgcaagaagac

SEQ ID NO: 527188 - RNA, 19 nt, Homo sapiens
  misc_RNA (1)...(19): siRNA sense strand
ugaagccgcacguagaauu

SEQ ID NO: 527189 - RNA, 19 nt, Homo sapiens
  misc_RNA (1)...(19): siRNA sense strand
guggcuaggugaaagugaa

SEQ ID NO: 527190 - RNA, 19 nt, Homo sapiens
  misc_RNA (1)...(19): siRNA sense strand
agcaugcugugcaguauuu

SEQ ID NO: 527191 - RNA, 19 nt, Homo sapiens
  misc_RNA (1)...(19): siRNA sense strand
acugaaagaggcugugaua

SEQ ID NO: 527192 - RNA, 19 nt, Homo sapiens
  misc_RNA (1)...(19): siRNA sense strand
auagaacgaccaaauguga

SEQ ID NO: 527193 - RNA, 19 nt, Homo sapiens
  misc_RNA (1)...(19): siRNA sense strand
gauauguugcggucacuau

SEQ ID NO: 527194 - RNA, 19 nt, Homo sapiens
  misc_RNA (1)...(19): siRNA sense strand
uaugcagccuguuaggaaa

SEQ ID NO: 527195 - RNA, 19 nt, Homo sapiens
  misc_RNA (1)...(19): siRNA sense strand
cuucaaggugccauuguua

SEQ ID NO: 527196 - RNA, 19 nt, Homo sapiens
  misc_RNA (1)...(19): siRNA sense strand
ggaggaaaacagaugguua

SEQ ID NO: 527197 - RNA, 19 nt, Homo sapiens
  misc_RNA (1)...(19): siRNA sense strand
gcacugaaagaggcuguga

SEQ ID NO: 527198 - RNA, 19 nt, Homo sapiens
  misc_RNA (1)...(19): siRNA sense strand
guuauagaacgaccaaaug

SEQ ID NO: 527199 - RNA, 19 nt, Homo sapiens
  misc_RNA (1)...(19): siRNA sense strand
gugauacugccuauuaaau

SEQ ID NO: 527200 - RNA, 19 nt, Homo sapiens
  misc_RNA (1)...(19): siRNA sense strand
gguucuggauucugccauu

SEQ ID NO: 527201 - RNA, 19 nt, Homo sapiens
  misc_RNA (1)...(19): siRNA sense strand
gagugacguugcuggacuu

SEQ ID NO: 527202 - RNA, 19 nt, Homo sapiens
  misc_RNA (1)...(19): siRNA sense strand
acagucagcuacucauuuu

SEQ ID NO: 527203 - RNA, 19 nt, Homo sapiens
  misc_RNA (1)...(19): siRNA sense strand
agacaaugauggaauuuug

SEQ ID NO: 527204 - RNA, 19 nt, Homo sapiens
  misc_RNA (1)...(19): siRNA sense strand
gggaaggagaaucugauga

SEQ ID NO: 527205 - RNA, 19 nt, Homo sapiens
  misc_RNA (1)...(19): siRNA sense strand
gaauuaagacggaguuccu

SEQ ID NO: 527206 - RNA, 19 nt, Homo sapiens
  misc_RNA (1)...(19): siRNA sense strand
cuaaguggcuaggugaaag

SEQ ID NO: 527207 - RNA, 19 nt, Homo sapiens
  misc_RNA (1)...(19): siRNA sense strand
uucaauaucuuccucugau

SEQ ID NO: 527208 - RNA, 19 nt, Homo sapiens
  misc_RNA (1)...(19): siRNA sense strand
aaggugccauuguuauaga

SEQ ID NO: 527209 - RNA, 19 nt, Homo sapiens
  misc_RNA (1)...(19): siRNA sense strand
caaggugccauuguuauag

SEQ ID NO: 527210 - RNA, 19 nt, Homo sapiens
  misc_RNA (1)...(19): siRNA sense strand
agaaucugaugauccugaa

SEQ ID NO: 527211 - RNA, 19 nt, Homo sapiens
  misc_RNA (1)...(19): siRNA sense strand
gcccgagcagcaauguuua

SEQ ID NO: 527212 - RNA, 19 nt, Homo sapiens
  misc_RNA (1)...(19): siRNA sense strand
gaggggaauccuauuauuu

SEQ ID NO: 527213 - RNA, 19 nt, Homo sapiens
  misc_RNA (1)...(19): siRNA sense strand
caacuucaaggugccauug

SEQ ID NO: 527214 - RNA, 19 nt, Homo sapiens
  misc_RNA (1)...(19): siRNA sense strand
agaacgaccaaaugugaaa

SEQ ID NO: 527215 - RNA, 19 nt, Homo sapiens
  misc_RNA (1)...(19): siRNA sense strand
uacagucagcuacucauuu

SEQ ID NO: 527216 - RNA, 19 nt, Homo sapiens
  misc_RNA (1)...(19): siRNA sense strand
ggaccacucagaacagucu

SEQ ID NO: 527217 - RNA, 19 nt, Homo sapiens
  misc_RNA (1)...(19): siRNA sense strand
gcugggaacuacgaagaag

SEQ ID NO: 527218 - RNA, 19 nt, Homo sapiens
  misc_RNA (1)...(19): siRNA sense strand
uaagacggaguuccuagug

SEQ ID NO: 527219 - RNA, 19 nt, Homo sapiens
  misc_RNA (1)...(19): siRNA sense strand
ccuccauuaucuucauuga

SEQ ID NO: 527220 - RNA, 19 nt, Homo sapiens
  misc_RNA (1)...(19): siRNA sense strand
gaacgaccaaaugugaaau

SEQ ID NO: 527221 - RNA, 19 nt, Homo sapiens
  misc_RNA (1)...(19): siRNA sense strand
acuaaaggaguaccugaaa

SEQ ID NO: 527222 - RNA, 19 nt, Homo sapiens
  misc_RNA (1)...(19): siRNA sense strand
caaccuccagaaagcgaua

SEQ ID NO: 527223 - RNA, 19 nt, Homo sapiens
  misc_RNA (1)...(19): siRNA sense strand
ugauaaagccaagcaaagu

SEQ ID NO: 527224 - RNA, 19 nt, Homo sapiens
  misc_RNA (1)...(19): siRNA sense strand
guagacaaugauggaauuu

SEQ ID NO: 527225 - RNA, 19 nt, Homo sapiens
  misc_RNA (1)...(19): siRNA sense strand
cugugauacugccuauuaa

SEQ ID NO: 527226 - RNA, 19 nt, Homo sapiens
  misc_RNA (1)...(19): siRNA sense strand
cuacagucaaugaacauga

SEQ ID NO: 527227 - RNA, 19 nt, Homo sapiens
  misc_RNA (1)...(19): siRNA sense strand
cacaaaaccuacagucaau

SEQ ID NO: 527228 - RNA, 19 nt, Homo sapiens
  misc_RNA (1)...(19): siRNA sense strand
cuucaugucguuaaauaug

SEQ ID NO: 527229 - RNA, 19 nt, Homo sapiens
  misc_RNA (1)...(19): siRNA sense strand
ucaauaucuuccucugauc

SEQ ID NO: 527230 - RNA, 19 nt, Homo sapiens
  misc_RNA (1)...(19): siRNA sense strand
gugauaaagccaagcaaag

SEQ ID NO: 527231 - RNA, 19 nt, Homo sapiens
  misc_RNA (1)...(19): siRNA sense strand
gaaauggacuugaaauuga

SEQ ID NO: 527232 - RNA, 19 nt, Homo sapiens
  misc_RNA (1)...(19): siRNA sense strand
gaagagaaguuucguuaca

SEQ ID NO: 527233 - RNA, 19 nt, Homo sapiens
  misc_RNA (1)...(19): siRNA sense strand
gaucaagccuauucucgua

SEQ ID NO: 527234 - RNA, 19 nt, Homo sapiens
  misc_RNA (1)...(19): siRNA sense strand
uuccauagcucuucaaaua

SEQ ID NO: 527235 - RNA, 19 nt, Homo sapiens
  misc_RNA (1)...(19): siRNA sense strand
gugcagagcugucagaaga

SEQ ID NO: 527236 - RNA, 19 nt, Homo sapiens
  misc_RNA (1)...(19): siRNA sense strand
caaaggagcuauugcuugu

SEQ ID NO: 527237 - RNA, 19 nt, Homo sapiens
  misc_RNA (1)...(19): siRNA sense strand
gaaaucauccauugugaaa

SEQ ID NO: 527238 - RNA, 19 nt, Homo sapiens
  misc_RNA (1)...(19): siRNA sense strand
ccaaggaaaucauccauug

SEQ ID NO: 527239 - RNA, 19 nt, Homo sapiens
  misc_RNA (1)...(19): siRNA sense strand
gcacguaauucaagugaug

SEQ ID NO: 527240 - RNA, 19 nt, Homo sapiens
  misc_RNA (1)...(19): siRNA sense strand
ggaaauggacuugaaauug

SEQ ID NO: 527241 - RNA, 19 nt, Homo sapiens
  misc_RNA (1)...(19): siRNA sense strand
gaccagaccuccaagcuau

SEQ ID NO: 527242 - RNA, 19 nt, Homo sapiens
  misc_RNA (1)...(19): siRNA sense strand
ucaaaugcaucaaagcuuu

SEQ ID NO: 527243 - RNA, 19 nt, Homo sapiens
  misc_RNA (1)...(19): siRNA sense strand
gcacuuggaaauaaagaua

SEQ ID NO: 527244 - RNA, 19 nt, Homo sapiens
  misc_RNA (1)...(19): siRNA sense strand
gguuaaaucucccaaggaa

SEQ ID NO: 527245 - RNA, 19 nt, Homo sapiens
  misc_RNA (1)...(19): siRNA sense strand
ggcaauauguugaugauuc

SEQ ID NO: 527246 - RNA, 19 nt, Homo sapiens
  misc_RNA (1)...(19): siRNA sense strand
gcacagcauugcagcaguu

SEQ ID NO: 527247 - RNA, 19 nt, Homo sapiens
  misc_RNA (1)...(19): siRNA sense strand
gaacgagugauuaguacua

SEQ ID NO: 527248 - RNA, 19 nt, Homo sapiens
  misc_RNA (1)...(19): siRNA sense strand
gcauuuggcauaggaauua

SEQ ID NO: 527249 - RNA, 19 nt, Homo sapiens
  misc_RNA (1)...(19): siRNA sense strand
ccagauauaguaaagguua

SEQ ID NO: 527250 - RNA, 19 nt, Homo sapiens
  misc_RNA (1)...(19): siRNA sense strand
gaagagaaagcaucauaau

SEQ ID NO: 527251 - RNA, 19 nt, Homo sapiens
  misc_RNA (1)...(19): siRNA sense strand
ggaugaaacugcugucaca

SEQ ID NO: 527252 - RNA, 19 nt, Homo sapiens
  misc_RNA (1)...(19): siRNA sense strand
cgacaagccaaucuucuua

SEQ ID NO: 527253 - RNA, 19 nt, Homo sapiens
  misc_RNA (1)...(19): siRNA sense strand
ccaggaaaguggagaauuc

SEQ ID NO: 527254 - RNA, 19 nt, Homo sapiens
  misc_RNA (1)...(19): siRNA sense strand
ucaaauagcacuuggaaau

SEQ ID NO: 527255 - RNA, 19 nt, Homo sapiens
  misc_RNA (1)...(19): siRNA sense strand
ggauguacuuuaccuucua

SEQ ID NO: 527256 - RNA, 19 nt, Homo sapiens
  misc_RNA (1)...(19): siRNA sense strand
caaauagcacuuggaaaua

SEQ ID NO: 527257 - RNA, 19 nt, Homo sapiens
  misc_RNA (1)...(19): siRNA sense strand
gaaguuucguuacaugugu

SEQ ID NO: 527258 - RNA, 19 nt, Homo sapiens
  misc_RNA (1)...(19): siRNA sense strand
acacagauguagcacguaa

SEQ ID NO: 527259 - RNA, 19 nt, Homo sapiens
  misc_RNA (1)...(19): siRNA sense strand
ugaagaaaguggugcaguu

SEQ ID NO: 527260 - RNA, 19 nt, Homo sapiens
  misc_RNA (1)...(19): siRNA sense strand
guaaauggaccuacuaaca

SEQ ID NO: 527261 - RNA, 19 nt, Homo sapiens
  misc_RNA (1)...(19): siRNA sense strand
ugauagguauguaggauuu

SEQ ID NO: 527262 - RNA, 19 nt, Homo sapiens
  misc_RNA (1)...(19): siRNA sense strand
gaacgccuaugaagaugau

SEQ ID NO: 527263 - RNA, 19 nt, Homo sapiens
  misc_RNA (1)...(19): siRNA sense strand
caacaauaccuuccucuau

SEQ ID NO: 527264 - RNA, 19 nt, Homo sapiens
  misc_RNA (1)...(19): siRNA sense strand
agagagaucuagaagagaa

SEQ ID NO: 527265 - RNA, 19 nt, Homo sapiens
  misc_RNA (1)...(19): siRNA sense strand
gguaguagcuguggauaca

SEQ ID NO: 527266 - RNA, 19 nt, Homo sapiens
  misc_RNA (1)...(19): siRNA sense strand
ccaccuaggacgagaaaua

SEQ ID NO: 527267 - RNA, 19 nt, Homo sapiens
  misc_RNA (1)...(19): siRNA sense strand
aaauggaccuacuaacaaa

SEQ ID NO: 527268 - RNA, 19 nt, Homo sapiens
  misc_RNA (1)...(19): siRNA sense strand
gcaagaagccggcaagcau

SEQ ID NO: 527269 - RNA, 19 nt, Homo sapiens
  misc_RNA (1)...(19): siRNA sense strand
cggaagagaaguuucguua

SEQ ID NO: 527270 - RNA, 19 nt, Homo sapiens
  misc_RNA (1)...(19): siRNA sense strand
cagaagagaaagcaucaua

SEQ ID NO: 527271 - RNA, 19 nt, Homo sapiens
  misc_RNA (1)...(19): siRNA sense strand
uaaauggaccuacuaacaa

SEQ ID NO: 527272 - RNA, 19 nt, Homo sapiens
  misc_RNA (1)...(19): siRNA sense strand
gauguacuuuaccuucuaa

SEQ ID NO: 527273 - RNA, 19 nt, Homo sapiens
  misc_RNA (1)...(19): siRNA sense strand
gaagaaaguggugcaguug

SEQ ID NO: 527274 - RNA, 19 nt, Homo sapiens
  misc_RNA (1)...(19): siRNA sense strand
ccagugggcugagcaagaa

SEQ ID NO: 527275 - RNA, 19 nt, Homo sapiens
  misc_RNA (1)...(19): siRNA sense strand
acagaucgaugacuacaau

SEQ ID NO: 527276 - RNA, 19 nt, Homo sapiens
  misc_RNA (1)...(19): siRNA sense strand
gcaagcauccagaagagaa

SEQ ID NO: 527277 - RNA, 19 nt, Homo sapiens
  misc_RNA (1)...(19): siRNA sense strand
gcagagcugucagaagaug

SEQ ID NO: 527278 - RNA, 19 nt, Homo sapiens
  misc_RNA (1)...(19): siRNA sense strand
ggaguggaacgagugauua

SEQ ID NO: 527279 - RNA, 19 nt, Homo sapiens
  misc_RNA (1)...(19): siRNA sense strand
acucggaucuccuagcuuu

SEQ ID NO: 527280 - RNA, 19 nt, Homo sapiens
  misc_RNA (1)...(19): siRNA sense strand
agaacaaucugcaugaauc

SEQ ID NO: 527281 - RNA, 19 nt, Homo sapiens
  misc_RNA (1)...(19): siRNA sense strand
ccaaucuucuuaagggaaa

SEQ ID NO: 527282 - RNA, 19 nt, Homo sapiens
  misc_RNA (1)...(19): siRNA sense strand
uaguagcuguggauacaua

SEQ ID NO: 527283 - RNA, 19 nt, Homo sapiens
  misc_RNA (1)...(19): siRNA sense strand
ccucguggcucccuaugaa

SEQ ID NO: 527284 - RNA, 19 nt, Homo sapiens
  misc_RNA (1)...(19): siRNA sense strand
ggaaaucauccauugugaa

SEQ ID NO: 527285 - RNA, 19 nt, Homo sapiens
  misc_RNA (1)...(19): siRNA sense strand
gagaauaauaugucugaug

SEQ ID NO: 527286 - RNA, 19 nt, Homo sapiens
  misc_RNA (1)...(19): siRNA sense strand
caaaacaugucaaaaguca

SEQ ID NO: 527287 - RNA, 19 nt, Homo sapiens
  misc_RNA (1)...(19): siRNA sense strand
caagguuccugggcuauau

SEQ ID NO: 527288 - RNA, 19 nt, Homo sapiens
  misc_RNA (1)...(19): siRNA sense strand
ccucuuugccugagaauaa

SEQ ID NO: 527289 - RNA, 19 nt, Homo sapiens
  misc_RNA (1)...(19): siRNA sense strand
gaacaaucugcaugaauca

SEQ ID NO: 527290 - RNA, 19 nt, Homo sapiens
  misc_RNA (1)...(19): siRNA sense strand
gagcuuuucugaaguguuu

SEQ ID NO: 527291 - RNA, 19 nt, Homo sapiens
  misc_RNA (1)...(19): siRNA sense strand
gagagcagcaaauuuacaa

SEQ ID NO: 527292 - RNA, 19 nt, Homo sapiens
  misc_RNA (1)...(19): siRNA sense strand
guauaaagggcagguagua

SEQ ID NO: 527293 - RNA, 19 nt, Homo sapiens
  misc_RNA (1)...(19): siRNA sense strand
aaauagcucugaaggcaau

SEQ ID NO: 527294 - RNA, 19 nt, Homo sapiens
  misc_RNA (1)...(19): siRNA sense strand
uaucaaagaagcuucagaa

SEQ ID NO: 527295 - RNA, 19 nt, Homo sapiens
  misc_RNA (1)...(19): siRNA sense strand
guuagcagcauuuggcaua

SEQ ID NO: 527296 - RNA, 19 nt, Homo sapiens
  misc_RNA (1)...(19): siRNA sense strand
aagcuacgcugggcaauau

SEQ ID NO: 527297 - RNA, 19 nt, Homo sapiens
  misc_RNA (1)...(19): siRNA sense strand
uugaacagaucgaugacua

SEQ ID NO: 527298 - RNA, 19 nt, Homo sapiens
  misc_RNA (1)...(19): siRNA sense strand
gcaguuggccuaucuuaac

SEQ ID NO: 527299 - RNA, 19 nt, Homo sapiens
  misc_RNA (1)...(19): siRNA sense strand
guacuaaaggguuaaaucu

SEQ ID NO: 527300 - RNA, 19 nt, Homo sapiens
  misc_RNA (1)...(19): siRNA sense strand
ccaauaauccagauauagu

SEQ ID NO: 527301 - RNA, 19 nt, Homo sapiens
  misc_RNA (1)...(19): siRNA sense strand
ggaccaguuuggaaaugga

SEQ ID NO: 527302 - RNA, 19 nt, Homo sapiens
  misc_RNA (1)...(19): siRNA sense strand
ggaauugugcaagccauaa

SEQ ID NO: 527303 - RNA, 19 nt, Homo sapiens
  misc_RNA (1)...(19): siRNA sense strand
gguuacagaucaaacucaa

SEQ ID NO: 527304 - RNA, 19 nt, Homo sapiens
  misc_RNA (1)...(19): siRNA sense strand
gaacagaucgaugacuaca

SEQ ID NO: 527305 - RNA, 19 nt, Homo sapiens
  misc_RNA (1)...(19): siRNA sense strand
acaauaccuuccucuauca

SEQ ID NO: 527306 - RNA, 19 nt, Homo sapiens
  misc_RNA (1)...(19): siRNA sense strand
ggacucggaucuccuagcu

SEQ ID NO: 527307 - RNA, 19 nt, Homo sapiens
  misc_RNA (1)...(19): siRNA sense strand
gacaagccaaucuucuuaa

SEQ ID NO: 527308 - RNA, 19 nt, Homo sapiens
  misc_RNA (1)...(19): siRNA sense strand
guggaacgagugauuagua

SEQ ID NO: 527309 - RNA, 19 nt, Homo sapiens
  misc_RNA (1)...(19): siRNA sense strand
cuaugaagaugauguugau

SEQ ID NO: 527310 - RNA, 19 nt, Homo sapiens
  misc_RNA (1)...(19): siRNA sense strand
aacaauaccuuccucuauc

SEQ ID NO: 527311 - RNA, 19 nt, Homo sapiens
  misc_RNA (1)...(19): siRNA sense strand
ugccauggcccacaaagua

SEQ ID NO: 527312 - RNA, 19 nt, Homo sapiens
  misc_RNA (1)...(19): siRNA sense strand
ucaagccuauucucguauu

SEQ ID NO: 527313 - RNA, 19 nt, Homo sapiens
  misc_RNA (1)...(19): siRNA sense strand
gcgcaguuggccuaucuua

SEQ ID NO: 527314 - RNA, 19 nt, Homo sapiens
  misc_RNA (1)...(19): siRNA sense strand
gagaacaaucugcaugaau

SEQ ID NO: 527315 - RNA, 19 nt, Homo sapiens
  misc_RNA (1)...(19): siRNA sense strand
guuugugccugaccuggua

SEQ ID NO: 527316 - RNA, 19 nt, Homo sapiens
  misc_RNA (1)...(19): siRNA sense strand
uuaaaucucccaaggaaau

SEQ ID NO: 527317 - RNA, 19 nt, Homo sapiens
  misc_RNA (1)...(19): siRNA sense strand
ucacgguaccagaggauua

SEQ ID NO: 527318 - RNA, 19 nt, Homo sapiens
  misc_RNA (1)...(19): siRNA sense strand
uuacgaagaagaccaagaa

SEQ ID NO: 527319 - RNA, 19 nt, Homo sapiens
  misc_RNA (1)...(19): siRNA sense strand
gugaucauauuccagacaa

SEQ ID NO: 527320 - RNA, 19 nt, Homo sapiens
  misc_RNA (1)...(19): siRNA sense strand
gaagugcagagcugucaga

SEQ ID NO: 527321 - RNA, 19 nt, Homo sapiens
  misc_RNA (1)...(19): siRNA sense strand
caagcuauguuuaucucau

SEQ ID NO: 527322 - RNA, 19 nt, Homo sapiens
  misc_RNA (1)...(19): siRNA sense strand
ucugaugugucgcaguuaa

SEQ ID NO: 527323 - RNA, 19 nt, Homo sapiens
  misc_RNA (1)...(19): siRNA sense strand
ugucugaugugucgcaguu

SEQ ID NO: 527324 - RNA, 19 nt, Homo sapiens
  misc_RNA (1)...(19): siRNA sense strand
cagcaguuccgaagaaaga

SEQ ID NO: 527325 - RNA, 19 nt, Homo sapiens
  misc_RNA (1)...(19): siRNA sense strand
gagacugguugacacagau

SEQ ID NO: 527326 - RNA, 19 nt, Homo sapiens
  misc_RNA (1)...(19): siRNA sense strand
agaaaguggugcaguugug

SEQ ID NO: 527327 - RNA, 19 nt, Homo sapiens
  misc_RNA (1)...(19): siRNA sense strand
agagaaguuucguuacaug

SEQ ID NO: 527328 - RNA, 19 nt, Homo sapiens
  misc_RNA (1)...(19): siRNA sense strand
caagaucaaaccucuagga

SEQ ID NO: 527329 - RNA, 19 nt, Homo sapiens
  misc_RNA (1)...(19): siRNA sense strand
gcuauugcuugugcugaaa

SEQ ID NO: 527330 - RNA, 19 nt, Homo sapiens
  misc_RNA (1)...(19): siRNA sense strand
ucagaacccauccauguga

SEQ ID NO: 527331 - RNA, 19 nt, Homo sapiens
  misc_RNA (1)...(19): siRNA sense strand
gaaauggacuugaaauuga

SEQ ID NO: 527332 - RNA, 19 nt, Homo sapiens
  misc_RNA (1)...(19): siRNA sense strand
gaagagaaguuucguuaca

SEQ ID NO: 527333 - RNA, 19 nt, Homo sapiens
  misc_RNA (1)...(19): siRNA sense strand
gaucaagccuauucucgua

SEQ ID NO: 527334 - RNA, 19 nt, Homo sapiens
  misc_RNA (1)...(19): siRNA sense strand
uuccauagcucuucaaaua

SEQ ID NO: 527335 - RNA, 19 nt, Homo sapiens
  misc_RNA (1)...(19): siRNA sense strand
gugcagagcugucagaaga

SEQ ID NO: 527336 - RNA, 19 nt, Homo sapiens
  misc_RNA (1)...(19): siRNA sense strand
caaaggagcuauugcuugu

SEQ ID NO: 527337 - RNA, 19 nt, Homo sapiens
  misc_RNA (1)...(19): siRNA sense strand
gaaaucauccauugugaaa

SEQ ID NO: 527338 - RNA, 19 nt, Homo sapiens
  misc_RNA (1)...(19): siRNA sense strand
ccaaggaaaucauccauug

SEQ ID NO: 527339 - RNA, 19 nt, Homo sapiens
  misc_RNA (1)...(19): siRNA sense strand
gcacguaauucaagugaug

SEQ ID NO: 527340 - RNA, 19 nt, Homo sapiens
  misc_RNA (1)...(19): siRNA sense strand
ggaaauggacuugaaauug

SEQ ID NO: 527341 - RNA, 19 nt, Homo sapiens
  misc_RNA (1)...(19): siRNA sense strand
gaccagaccuccaagcuau

SEQ ID NO: 527342 - RNA, 19 nt, Homo sapiens
  misc_RNA (1)...(19): siRNA sense strand
ucaaaugcaucaaagcuuu

SEQ ID NO: 527343 - RNA, 19 nt, Homo sapiens
  misc_RNA (1)...(19): siRNA sense strand
gcacuuggaaauaaagaua

SEQ ID NO: 527344 - RNA, 19 nt, Homo sapiens
  misc_RNA (1)...(19): siRNA sense strand
gguuaaaucucccaaggaa

SEQ ID NO: 527345 - RNA, 19 nt, Homo sapiens
  misc_RNA (1)...(19): siRNA sense strand
ggcaauauguugaugauuc

SEQ ID NO: 527346 - RNA, 19 nt, Homo sapiens
  misc_RNA (1)...(19): siRNA sense strand
gcacagcauugcagcaguu

SEQ ID NO: 527347 - RNA, 19 nt, Homo sapiens
  misc_RNA (1)...(19): siRNA sense strand
gaacgagugauuaguacua

SEQ ID NO: 527348 - RNA, 19 nt, Homo sapiens
  misc_RNA (1)...(19): siRNA sense strand
gcauuuggcauaggaauua

SEQ ID NO: 527349 - RNA, 19 nt, Homo sapiens
  misc_RNA (1)...(19): siRNA sense strand
ccagauauaguaaagguua

SEQ ID NO: 527350 - RNA, 19 nt, Homo sapiens
  misc_RNA (1)...(19): siRNA sense strand
gaagagaaagcaucauaau

SEQ ID NO: 527351 - RNA, 19 nt, Homo sapiens
  misc_RNA (1)...(19): siRNA sense strand
ggaugaaacugcugucaca

SEQ ID NO: 527352 - RNA, 19 nt, Homo sapiens
  misc_RNA (1)...(19): siRNA sense strand
cgacaagccaaucuucuua

SEQ ID NO: 527353 - RNA, 19 nt, Homo sapiens
  misc_RNA (1)...(19): siRNA sense strand
ccaggaaaguggagaauuc

SEQ ID NO: 527354 - RNA, 19 nt, Homo sapiens
  misc_RNA (1)...(19): siRNA sense strand
ucaaauagcacuuggaaau

SEQ ID NO: 527355 - RNA, 19 nt, Homo sapiens
  misc_RNA (1)...(19): siRNA sense strand
ggauguacuuuaccuucua

SEQ ID NO: 527356 - RNA, 19 nt, Homo sapiens
  misc_RNA (1)...(19): siRNA sense strand
caaauagcacuuggaaaua

SEQ ID NO: 527357 - RNA, 19 nt, Homo sapiens
  misc_RNA (1)...(19): siRNA sense strand
gaaguuucguuacaugugu

SEQ ID NO: 527358 - RNA, 19 nt, Homo sapiens
  misc_RNA (1)...(19): siRNA sense strand
acacagauguagcacguaa

SEQ ID NO: 527359 - RNA, 19 nt, Homo sapiens
  misc_RNA (1)...(19): siRNA sense strand
ugaagaaaguggugcaguu

SEQ ID NO: 527360 - RNA, 19 nt, Homo sapiens
  misc_RNA (1)...(19): siRNA sense strand
guaaauggaccuacuaaca

SEQ ID NO: 527361 - RNA, 19 nt, Homo sapiens
  misc_RNA (1)...(19): siRNA sense strand
ugauagguauguaggauuu

SEQ ID NO: 527362 - RNA, 19 nt, Homo sapiens
  misc_RNA (1)...(19): siRNA sense strand
aaagagcaauauuccagua

SEQ ID NO: 527363 - RNA, 19 nt, Homo sapiens
  misc_RNA (1)...(19): siRNA sense strand
ggaagaggauauauuuaac

SEQ ID NO: 527364 - RNA, 19 nt, Homo sapiens
  misc_RNA (1)...(19): siRNA sense strand
gaacgccuaugaagaugau

SEQ ID NO: 527365 - RNA, 19 nt, Homo sapiens
  misc_RNA (1)...(19): siRNA sense strand
caacaauaccuuccucuau

SEQ ID NO: 527366 - RNA, 19 nt, Homo sapiens
  misc_RNA (1)...(19): siRNA sense strand
agagagaucuagaagagaa

SEQ ID NO: 527367 - RNA, 19 nt, Homo sapiens
  misc_RNA (1)...(19): siRNA sense strand
gguaguagcuguggauaca

SEQ ID NO: 527368 - RNA, 19 nt, Homo sapiens
  misc_RNA (1)...(19): siRNA sense strand
ccaccuaggacgagaaaua

SEQ ID NO: 527369 - RNA, 19 nt, Homo sapiens
  misc_RNA (1)...(19): siRNA sense strand
aaauggaccuacuaacaaa

SEQ ID NO: 527370 - RNA, 19 nt, Homo sapiens
  misc_RNA (1)...(19): siRNA sense strand
gcaagaagccggcaagcau

SEQ ID NO: 527371 - RNA, 19 nt, Homo sapiens
  misc_RNA (1)...(19): siRNA sense strand
cggaagaggauauauuuaa

SEQ ID NO: 527372 - RNA, 19 nt, Homo sapiens
  misc_RNA (1)...(19): siRNA sense strand
agagauaacauccaacuaa

SEQ ID NO: 527373 - RNA, 19 nt, Homo sapiens
  misc_RNA (1)...(19): siRNA sense strand
cggaagagaaguuucguua

SEQ ID NO: 527374 - RNA, 19 nt, Homo sapiens
  misc_RNA (1)...(19): siRNA sense strand
cagaagagaaagcaucaua

SEQ ID NO: 527375 - RNA, 19 nt, Homo sapiens
  misc_RNA (1)...(19): siRNA sense strand
uaaauggaccuacuaacaa

SEQ ID NO: 527376 - RNA, 19 nt, Homo sapiens
  misc_RNA (1)...(19): siRNA sense strand
gauguacuuuaccuucuaa

SEQ ID NO: 527377 - RNA, 19 nt, Homo sapiens
  misc_RNA (1)...(19): siRNA sense strand
gaagaaaguggugcaguug

SEQ ID NO: 527378 - RNA, 19 nt, Homo sapiens
  misc_RNA (1)...(19): siRNA sense strand
gaauguggccguguucaaa

SEQ ID NO: 527379 - RNA, 19 nt, Homo sapiens
  misc_RNA (1)...(19): siRNA sense strand
ccagugggcugagcaagaa

SEQ ID NO: 527380 - RNA, 19 nt, Homo sapiens
  misc_RNA (1)...(19): siRNA sense strand
acagaucgaugacuacaau

SEQ ID NO: 527381 - RNA, 19 nt, Homo sapiens
  misc_RNA (1)...(19): siRNA sense strand
gcaagcauccagaagagaa

SEQ ID NO: 527382 - RNA, 19 nt, Homo sapiens
  misc_RNA (1)...(19): siRNA sense strand
gcagagcugucagaagaug

SEQ ID NO: 527383 - RNA, 19 nt, Homo sapiens
  misc_RNA (1)...(19): siRNA sense strand
ggaguggaacgagugauua

SEQ ID NO: 527384 - RNA, 19 nt, Homo sapiens
  misc_RNA (1)...(19): siRNA sense strand
acucggaucuccuagcuuu

SEQ ID NO: 527385 - RNA, 19 nt, Homo sapiens
  misc_RNA (1)...(19): siRNA sense strand
gagauaacauccaacuaac

SEQ ID NO: 527386 - RNA, 19 nt, Homo sapiens
  misc_RNA (1)...(19): siRNA sense strand
agaacaaucugcaugaauc

SEQ ID NO: 527387 - RNA, 19 nt, Homo sapiens
  misc_RNA (1)...(19): siRNA sense strand
ccaaucuucuuaagggaaa

SEQ ID NO: 527388 - RNA, 19 nt, Homo sapiens
  misc_RNA (1)...(19): siRNA sense strand
uaguagcuguggauacaua

SEQ ID NO: 527389 - RNA, 19 nt, Homo sapiens
  misc_RNA (1)...(19): siRNA sense strand
ccucguggcucccuaugaa

SEQ ID NO: 527390 - RNA, 19 nt, Homo sapiens
  misc_RNA (1)...(19): siRNA sense strand
ggaaaucauccauugugaa

SEQ ID NO: 527391 - RNA, 19 nt, Homo sapiens
  misc_RNA (1)...(19): siRNA sense strand
gagaauaauaugucugaug

SEQ ID NO: 527392 - RNA, 19 nt, Homo sapiens
  misc_RNA (1)...(19): siRNA sense strand
caaaacaugucaaaaguca

SEQ ID NO: 527393 - RNA, 19 nt, Homo sapiens
  misc_RNA (1)...(19): siRNA sense strand
caagguuccugggcuauau

SEQ ID NO: 527394 - RNA, 19 nt, Homo sapiens
  misc_RNA (1)...(19): siRNA sense strand
ccucuuugccugagaauaa

SEQ ID NO: 527395 - RNA, 19 nt, Homo sapiens
  misc_RNA (1)...(19): siRNA sense strand
gaacaaucugcaugaauca

SEQ ID NO: 527396 - RNA, 19 nt, Homo sapiens
  misc_RNA (1)...(19): siRNA sense strand
gagcuuuucugaaguguuu

SEQ ID NO: 527397 - RNA, 19 nt, Homo sapiens
  misc_RNA (1)...(19): siRNA sense strand
gagagcagcaaauuuacaa

SEQ ID NO: 527398 - RNA, 19 nt, Homo sapiens
  misc_RNA (1)...(19): siRNA sense strand
guauaaagggcagguagua

SEQ ID NO: 527399 - RNA, 19 nt, Homo sapiens
  misc_RNA (1)...(19): siRNA sense strand
aaauagcucugaaggcaau

SEQ ID NO: 527400 - RNA, 19 nt, Homo sapiens
  misc_RNA (1)...(19): siRNA sense strand
uaucaaagaagcuucagaa

SEQ ID NO: 527401 - RNA, 19 nt, Homo sapiens
  misc_RNA (1)...(19): siRNA sense strand
guuagcagcauuuggcaua

SEQ ID NO: 527402 - RNA, 19 nt, Homo sapiens
  misc_RNA (1)...(19): siRNA sense strand
aagcuacgcugggcaauau

SEQ ID NO: 527403 - RNA, 19 nt, Homo sapiens
  misc_RNA (1)...(19): siRNA sense strand
uugaacagaucgaugacua

SEQ ID NO: 527404 - RNA, 19 nt, Homo sapiens
  misc_RNA (1)...(19): siRNA sense strand
gcaguuggccuaucuuaac

SEQ ID NO: 527405 - RNA, 19 nt, Homo sapiens
  misc_RNA (1)...(19): siRNA sense strand
guacuaaaggguuaaaucu

SEQ ID NO: 527406 - RNA, 19 nt, Homo sapiens
  misc_RNA (1)...(19): siRNA sense strand
ccaauaauccagauauagu

SEQ ID NO: 527407 - RNA, 19 nt, Homo sapiens
  misc_RNA (1)...(19): siRNA sense strand
ggaccaguuuggaaaugga

SEQ ID NO: 527408 - RNA, 19 nt, Homo sapiens
  misc_RNA (1)...(19): siRNA sense strand
ggaauugugcaagccauaa

SEQ ID NO: 527409 - RNA, 19 nt, Homo sapiens
  misc_RNA (1)...(19): siRNA sense strand
gcggaagaggauauauuua

SEQ ID NO: 527410 - RNA, 19 nt, Homo sapiens
  misc_RNA (1)...(19): siRNA sense strand
gguuacagaucaaacucaa

SEQ ID NO: 527411 - RNA, 19 nt, Homo sapiens
  misc_RNA (1)...(19): siRNA sense strand
gaacagaucgaugacuaca

SEQ ID NO: 527412 - RNA, 19 nt, Homo sapiens
  misc_RNA (1)...(19): siRNA sense strand
acaauaccuuccucuauca

SEQ ID NO: 527413 - RNA, 19 nt, Homo sapiens
  misc_RNA (1)...(19): siRNA sense strand
ggacucggaucuccuagcu

SEQ ID NO: 527414 - RNA, 19 nt, Homo sapiens
  misc_RNA (1)...(19): siRNA sense strand
gacaagccaaucuucuuaa

SEQ ID NO: 527415 - RNA, 19 nt, Homo sapiens
  misc_RNA (1)...(19): siRNA sense strand
guggaacgagugauuagua

SEQ ID NO: 527416 - RNA, 19 nt, Homo sapiens
  misc_RNA (1)...(19): siRNA sense strand
ucaagccuauucucguauu

SEQ ID NO: 527417 - RNA, 19 nt, Homo sapiens
  misc_RNA (1)...(19): siRNA sense strand
cuaugaagaugauguugau

SEQ ID NO: 527418 - RNA, 19 nt, Homo sapiens
  misc_RNA (1)...(19): siRNA sense strand
aacaauaccuuccucuauc

SEQ ID NO: 527419 - RNA, 19 nt, Homo sapiens
  misc_RNA (1)...(19): siRNA sense strand
ugccauggcccacaaagua

SEQ ID NO: 527420 - RNA, 19 nt, Homo sapiens
  misc_RNA (1)...(19): siRNA sense strand
gcgcaguuggccuaucuua

SEQ ID NO: 527421 - RNA, 19 nt, Homo sapiens
  misc_RNA (1)...(19): siRNA sense strand
gauaacauccaacuaacuc

SEQ ID NO: 527422 - RNA, 19 nt, Homo sapiens
  misc_RNA (1)...(19): siRNA sense strand
gagaacaaucugcaugaau

SEQ ID NO: 527423 - RNA, 19 nt, Homo sapiens
  misc_RNA (1)...(19): siRNA sense strand
guuugugccugaccuggua

SEQ ID NO: 527424 - RNA, 19 nt, Homo sapiens
  misc_RNA (1)...(19): siRNA sense strand
uuaaaucucccaaggaaau

SEQ ID NO: 527425 - RNA, 19 nt, Homo sapiens
  misc_RNA (1)...(19): siRNA sense strand
ucacgguaccagaggauua

SEQ ID NO: 527426 - RNA, 19 nt, Homo sapiens
  misc_RNA (1)...(19): siRNA sense strand
uuacgaagaagaccaagaa

SEQ ID NO: 527427 - RNA, 19 nt, Homo sapiens
  misc_RNA (1)...(19): siRNA sense strand
agucagagauaacauccaa

SEQ ID NO: 527428 - RNA, 19 nt, Homo sapiens
  misc_RNA (1)...(19): siRNA sense strand
gaaaagcuuccuccuugua

SEQ ID NO: 527429 - RNA, 19 nt, Homo sapiens
  misc_RNA (1)...(19): siRNA sense strand
gugaucauauuccagacaa

SEQ ID NO: 527430 - RNA, 19 nt, Homo sapiens
  misc_RNA (1)...(19): siRNA sense strand
caagcuauguuuaucucau

SEQ ID NO: 527431 - RNA, 19 nt, Homo sapiens
  misc_RNA (1)...(19): siRNA sense strand
gaaauggacuugaaauuga

SEQ ID NO: 527432 - RNA, 19 nt, Homo sapiens
  misc_RNA (1)...(19): siRNA sense strand
gaagagaaguuucguuaca

SEQ ID NO: 527433 - RNA, 19 nt, Homo sapiens
  misc_RNA (1)...(19): siRNA sense strand
gaucaagccuauucucgua

SEQ ID NO: 527434 - RNA, 19 nt, Homo sapiens
  misc_RNA (1)...(19): siRNA sense strand
uuccauagcucuucaaaua

SEQ ID NO: 527435 - RNA, 19 nt, Homo sapiens
  misc_RNA (1)...(19): siRNA sense strand
gugcagagcugucagaaga

SEQ ID NO: 527436 - RNA, 19 nt, Homo sapiens
  misc_RNA (1)...(19): siRNA sense strand
caaaggagcuauugcuugu

SEQ ID NO: 527437 - RNA, 19 nt, Homo sapiens
  misc_RNA (1)...(19): siRNA sense strand
gaaaucauccauugugaaa

SEQ ID NO: 527438 - RNA, 19 nt, Homo sapiens
  misc_RNA (1)...(19): siRNA sense strand
ccaaggaaaucauccauug

SEQ ID NO: 527439 - RNA, 19 nt, Homo sapiens
  misc_RNA (1)...(19): siRNA sense strand
gcacguaauucaagugaug

SEQ ID NO: 527440 - RNA, 19 nt, Homo sapiens
  misc_RNA (1)...(19): siRNA sense strand
ggaaauggacuugaaauug

SEQ ID NO: 527441 - RNA, 19 nt, Homo sapiens
  misc_RNA (1)...(19): siRNA sense strand
gaccagaccuccaagcuau

SEQ ID NO: 527442 - RNA, 19 nt, Homo sapiens
  misc_RNA (1)...(19): siRNA sense strand
ucaaaugcaucaaagcuuu

SEQ ID NO: 527443 - RNA, 19 nt, Homo sapiens
  misc_RNA (1)...(19): siRNA sense strand
gcacuuggaaauaaagaua

SEQ ID NO: 527444 - RNA, 19 nt, Homo sapiens
  misc_RNA (1)...(19): siRNA sense strand
gguuaaaucucccaaggaa

SEQ ID NO: 527445 - RNA, 19 nt, Homo sapiens
  misc_RNA (1)...(19): siRNA sense strand
ggcaauauguugaugauuc

SEQ ID NO: 527446 - RNA, 19 nt, Homo sapiens
  misc_RNA (1)...(19): siRNA sense strand
gcacagcauugcagcaguu

SEQ ID NO: 527447 - RNA, 19 nt, Homo sapiens
  misc_RNA (1)...(19): siRNA sense strand
gaacgagugauuaguacua

SEQ ID NO: 527448 - RNA, 19 nt, Homo sapiens
  misc_RNA (1)...(19): siRNA sense strand
gcauuuggcauaggaauua

SEQ ID NO: 527449 - RNA, 19 nt, Homo sapiens
  misc_RNA (1)...(19): siRNA sense strand
ccagauauaguaaagguua

SEQ ID NO: 527450 - RNA, 19 nt, Homo sapiens
  misc_RNA (1)...(19): siRNA sense strand
gaagagaaagcaucauaau

SEQ ID NO: 527451 - RNA, 19 nt, Homo sapiens
  misc_RNA (1)...(19): siRNA sense strand
ggaugaaacugcugucaca

SEQ ID NO: 527452 - RNA, 19 nt, Homo sapiens
  misc_RNA (1)...(19): siRNA sense strand
cgacaagccaaucuucuua

SEQ ID NO: 527453 - RNA, 19 nt, Homo sapiens
  misc_RNA (1)...(19): siRNA sense strand
ccaggaaaguggagaauuc

SEQ ID NO: 527454 - RNA, 19 nt, Homo sapiens
  misc_RNA (1)...(19): siRNA sense strand
ucaaauagcacuuggaaau

SEQ ID NO: 527455 - RNA, 19 nt, Homo sapiens
  misc_RNA (1)...(19): siRNA sense strand
ggauguacuuuaccuucua

SEQ ID NO: 527456 - RNA, 19 nt, Homo sapiens
  misc_RNA (1)...(19): siRNA sense strand
caaauagcacuuggaaaua

SEQ ID NO: 527457 - RNA, 19 nt, Homo sapiens
  misc_RNA (1)...(19): siRNA sense strand
gaaguuucguuacaugugu

SEQ ID NO: 527458 - RNA, 19 nt, Homo sapiens
  misc_RNA (1)...(19): siRNA sense strand
acacagauguagcacguaa

SEQ ID NO: 527459 - RNA, 19 nt, Homo sapiens
  misc_RNA (1)...(19): siRNA sense strand
ugaagaaaguggugcaguu

SEQ ID NO: 527460 - RNA, 19 nt, Homo sapiens
  misc_RNA (1)...(19): siRNA sense strand
guaaauggaccuacuaaca

SEQ ID NO: 527461 - RNA, 19 nt, Homo sapiens
  misc_RNA (1)...(19): siRNA sense strand
ugauagguauguaggauuu

SEQ ID NO: 527462 - RNA, 19 nt, Homo sapiens
  misc_RNA (1)...(19): siRNA sense strand
aaagagcaauauuccagua

SEQ ID NO: 527463 - RNA, 19 nt, Homo sapiens
  misc_RNA (1)...(19): siRNA sense strand
ggaagaggauauauuuaac

SEQ ID NO: 527464 - RNA, 19 nt, Homo sapiens
  misc_RNA (1)...(19): siRNA sense strand
gaacgccuaugaagaugau

SEQ ID NO: 527465 - RNA, 19 nt, Homo sapiens
  misc_RNA (1)...(19): siRNA sense strand
caacaauaccuuccucuau

SEQ ID NO: 527466 - RNA, 19 nt, Homo sapiens
  misc_RNA (1)...(19): siRNA sense strand
agagagaucuagaagagaa

SEQ ID NO: 527467 - RNA, 19 nt, Homo sapiens
  misc_RNA (1)...(19): siRNA sense strand
gguaguagcuguggauaca

SEQ ID NO: 527468 - RNA, 19 nt, Homo sapiens
  misc_RNA (1)...(19): siRNA sense strand
ccaccuaggacgagaaaua

SEQ ID NO: 527469 - RNA, 19 nt, Homo sapiens
  misc_RNA (1)...(19): siRNA sense strand
aaauggaccuacuaacaaa

SEQ ID NO: 527470 - RNA, 19 nt, Homo sapiens
  misc_RNA (1)...(19): siRNA sense strand
gcaagaagccggcaagcau

SEQ ID NO: 527471 - RNA, 19 nt, Homo sapiens
  misc_RNA (1)...(19): siRNA sense strand
cggaagaggauauauuuaa

SEQ ID NO: 527472 - RNA, 19 nt, Homo sapiens
  misc_RNA (1)...(19): siRNA sense strand
agagauaacauccaacuaa

SEQ ID NO: 527473 - RNA, 19 nt, Homo sapiens
  misc_RNA (1)...(19): siRNA sense strand
cggaagagaaguuucguua

SEQ ID NO: 527474 - RNA, 19 nt, Homo sapiens
  misc_RNA (1)...(19): siRNA sense strand
cagaagagaaagcaucaua

SEQ ID NO: 527475 - RNA, 19 nt, Homo sapiens
  misc_RNA (1)...(19): siRNA sense strand
uaaauggaccuacuaacaa

SEQ ID NO: 527476 - RNA, 19 nt, Homo sapiens
  misc_RNA (1)...(19): siRNA sense strand
gauguacuuuaccuucuaa

SEQ ID NO: 527477 - RNA, 19 nt, Homo sapiens
  misc_RNA (1)...(19): siRNA sense strand
gaagaaaguggugcaguug

SEQ ID NO: 527478 - RNA, 19 nt, Homo sapiens
  misc_RNA (1)...(19): siRNA sense strand
gaauguggccguguucaaa

SEQ ID NO: 527479 - RNA, 19 nt, Homo sapiens
  misc_RNA (1)...(19): siRNA sense strand
ccagugggcugagcaagaa

SEQ ID NO: 527480 - RNA, 19 nt, Homo sapiens
  misc_RNA (1)...(19): siRNA sense strand
acagaucgaugacuacaau

SEQ ID NO: 527481 - RNA, 19 nt, Homo sapiens
  misc_RNA (1)...(19): siRNA sense strand
gcaagcauccagaagagaa

SEQ ID NO: 527482 - RNA, 19 nt, Homo sapiens
  misc_RNA (1)...(19): siRNA sense strand
gcagagcugucagaagaug

SEQ ID NO: 527483 - RNA, 19 nt, Homo sapiens
  misc_RNA (1)...(19): siRNA sense strand
ggaguggaacgagugauua

SEQ ID NO: 527484 - RNA, 19 nt, Homo sapiens
  misc_RNA (1)...(19): siRNA sense strand
acucggaucuccuagcuuu

SEQ ID NO: 527485 - RNA, 19 nt, Homo sapiens
  misc_RNA (1)...(19): siRNA sense strand
gagauaacauccaacuaac

SEQ ID NO: 527486 - RNA, 19 nt, Homo sapiens
  misc_RNA (1)...(19): siRNA sense strand
agaacaaucugcaugaauc

SEQ ID NO: 527487 - RNA, 19 nt, Homo sapiens
  misc_RNA (1)...(19): siRNA sense strand
ccaaucuucuuaagggaaa

SEQ ID NO: 527488 - RNA, 19 nt, Homo sapiens
  misc_RNA (1)...(19): siRNA sense strand
uaguagcuguggauacaua

SEQ ID NO: 527489 - RNA, 19 nt, Homo sapiens
  misc_RNA (1)...(19): siRNA sense strand
ccucguggcucccuaugaa

SEQ ID NO: 527490 - RNA, 19 nt, Homo sapiens
  misc_RNA (1)...(19): siRNA sense strand
ggaaaucauccauugugaa

SEQ ID NO: 527491 - RNA, 19 nt, Homo sapiens
  misc_RNA (1)...(19): siRNA sense strand
gagaauaauaugucugaug

SEQ ID NO: 527492 - RNA, 19 nt, Homo sapiens
  misc_RNA (1)...(19): siRNA sense strand
caaaacaugucaaaaguca

SEQ ID NO: 527493 - RNA, 19 nt, Homo sapiens
  misc_RNA (1)...(19): siRNA sense strand
caagguuccugggcuauau

SEQ ID NO: 527494 - RNA, 19 nt, Homo sapiens
  misc_RNA (1)...(19): siRNA sense strand
ccucuuugccugagaauaa

SEQ ID NO: 527495 - RNA, 19 nt, Homo sapiens
  misc_RNA (1)...(19): siRNA sense strand
gaacaaucugcaugaauca

SEQ ID NO: 527496 - RNA, 19 nt, Homo sapiens
  misc_RNA (1)...(19): siRNA sense strand
gagcuuuucugaaguguuu

SEQ ID NO: 527497 - RNA, 19 nt, Homo sapiens
  misc_RNA (1)...(19): siRNA sense strand
gagagcagcaaauuuacaa

SEQ ID NO: 527498 - RNA, 19 nt, Homo sapiens
  misc_RNA (1)...(19): siRNA sense strand
guauaaagggcagguagua

SEQ ID NO: 527499 - RNA, 19 nt, Homo sapiens
  misc_RNA (1)...(19): siRNA sense strand
aaauagcucugaaggcaau

SEQ ID NO: 527500 - RNA, 19 nt, Homo sapiens
  misc_RNA (1)...(19): siRNA sense strand
uaucaaagaagcuucagaa

SEQ ID NO: 527501 - RNA, 19 nt, Homo sapiens
  misc_RNA (1)...(19): siRNA sense strand
guuagcagcauuuggcaua

SEQ ID NO: 527502 - RNA, 19 nt, Homo sapiens
  misc_RNA (1)...(19): siRNA sense strand
aagcuacgcugggcaauau

SEQ ID NO: 527503 - RNA, 19 nt, Homo sapiens
  misc_RNA (1)...(19): siRNA sense strand
uugaacagaucgaugacua

SEQ ID NO: 527504 - RNA, 19 nt, Homo sapiens
  misc_RNA (1)...(19): siRNA sense strand
gcaguuggccuaucuuaac

SEQ ID NO: 527505 - RNA, 19 nt, Homo sapiens
  misc_RNA (1)...(19): siRNA sense strand
guacuaaaggguuaaaucu

SEQ ID NO: 527506 - RNA, 19 nt, Homo sapiens
  misc_RNA (1)...(19): siRNA sense strand
ccaauaauccagauauagu

SEQ ID NO: 527507 - RNA, 19 nt, Homo sapiens
  misc_RNA (1)...(19): siRNA sense strand
ggaccaguuuggaaaugga

SEQ ID NO: 527508 - RNA, 19 nt, Homo sapiens
  misc_RNA (1)...(19): siRNA sense strand
ggaauugugcaagccauaa

SEQ ID NO: 527509 - RNA, 19 nt, Homo sapiens
  misc_RNA (1)...(19): siRNA sense strand
gcggaagaggauauauuua

SEQ ID NO: 527510 - RNA, 19 nt, Homo sapiens
  misc_RNA (1)...(19): siRNA sense strand
gguuacagaucaaacucaa

SEQ ID NO: 527511 - RNA, 19 nt, Homo sapiens
  misc_RNA (1)...(19): siRNA sense strand
gaacagaucgaugacuaca

SEQ ID NO: 527512 - RNA, 19 nt, Homo sapiens
  misc_RNA (1)...(19): siRNA sense strand
acaauaccuuccucuauca

SEQ ID NO: 527513 - RNA, 19 nt, Homo sapiens
  misc_RNA (1)...(19): siRNA sense strand
ggacucggaucuccuagcu

SEQ ID NO: 527514 - RNA, 19 nt, Homo sapiens
  misc_RNA (1)...(19): siRNA sense strand
gacaagccaaucuucuuaa

SEQ ID NO: 527515 - RNA, 19 nt, Homo sapiens
  misc_RNA (1)...(19): siRNA sense strand
guggaacgagugauuagua

SEQ ID NO: 527516 - RNA, 19 nt, Homo sapiens
  misc_RNA (1)...(19): siRNA sense strand
ucaagccuauucucguauu

SEQ ID NO: 527517 - RNA, 19 nt, Homo sapiens
  misc_RNA (1)...(19): siRNA sense strand
cuaugaagaugauguugau

SEQ ID NO: 527518 - RNA, 19 nt, Homo sapiens
  misc_RNA (1)...(19): siRNA sense strand
aacaauaccuuccucuauc

SEQ ID NO: 527519 - RNA, 19 nt, Homo sapiens
  misc_RNA (1)...(19): siRNA sense strand
ugccauggcccacaaagua

SEQ ID NO: 527520 - RNA, 19 nt, Homo sapiens
  misc_RNA (1)...(19): siRNA sense strand
gcgcaguuggccuaucuua

SEQ ID NO: 527521 - RNA, 19 nt, Homo sapiens
  misc_RNA (1)...(19): siRNA sense strand
gauaacauccaacuaacuc

SEQ ID NO: 527522 - RNA, 19 nt, Homo sapiens
  misc_RNA (1)...(19): siRNA sense strand
gagaacaaucugcaugaau

SEQ ID NO: 527523 - RNA, 19 nt, Homo sapiens
  misc_RNA (1)...(19): siRNA sense strand
guuugugccugaccuggua

SEQ ID NO: 527524 - RNA, 19 nt, Homo sapiens
  misc_RNA (1)...(19): siRNA sense strand
uuaaaucucccaaggaaau

SEQ ID NO: 527525 - RNA, 19 nt, Homo sapiens
  misc_RNA (1)...(19): siRNA sense strand
ucacgguaccagaggauua

SEQ ID NO: 527526 - RNA, 19 nt, Homo sapiens
  misc_RNA (1)...(19): siRNA sense strand
uuacgaagaagaccaagaa

SEQ ID NO: 527527 - RNA, 19 nt, Homo sapiens
  misc_RNA (1)...(19): siRNA sense strand
agucagagauaacauccaa

SEQ ID NO: 527528 - RNA, 19 nt, Homo sapiens
  misc_RNA (1)...(19): siRNA sense strand
gaaaagcuuccuccuugua

SEQ ID NO: 527529 - RNA, 19 nt, Homo sapiens
  misc_RNA (1)...(19): siRNA sense strand
gugaucauauuccagacaa

SEQ ID NO: 527530 - RNA, 19 nt, Homo sapiens
  misc_RNA (1)...(19): siRNA sense strand
caagcuauguuuaucucau

SEQ ID NO: 527531 - RNA, 19 nt, Homo sapiens
  misc_RNA (1)...(19): siRNA sense strand
gaaauggacuugaaauuga

SEQ ID NO: 527532 - RNA, 19 nt, Homo sapiens
  misc_RNA (1)...(19): siRNA sense strand
gaagagaaguuucguuaca

SEQ ID NO: 527533 - RNA, 19 nt, Homo sapiens
  misc_RNA (1)...(19): siRNA sense strand
gaucaagccuauucucgua

SEQ ID NO: 527534 - RNA, 19 nt, Homo sapiens
  misc_RNA (1)...(19): siRNA sense strand
uuccauagcucuucaaaua

SEQ ID NO: 527535 - RNA, 19 nt, Homo sapiens
  misc_RNA (1)...(19): siRNA sense strand
gugcagagcugucagaaga

SEQ ID NO: 527536 - RNA, 19 nt, Homo sapiens
  misc_RNA (1)...(19): siRNA sense strand
caaaggagcuauugcuugu

SEQ ID NO: 527537 - RNA, 19 nt, Homo sapiens
  misc_RNA (1)...(19): siRNA sense strand
gaaaucauccauugugaaa

SEQ ID NO: 527538 - RNA, 19 nt, Homo sapiens
  misc_RNA (1)...(19): siRNA sense strand
ccaaggaaaucauccauug

SEQ ID NO: 527539 - RNA, 19 nt, Homo sapiens
  misc_RNA (1)...(19): siRNA sense strand
gcacguaauucaagugaug

SEQ ID NO: 527540 - RNA, 19 nt, Homo sapiens
  misc_RNA (1)...(19): siRNA sense strand
ggaaauggacuugaaauug

SEQ ID NO: 527541 - RNA, 19 nt, Homo sapiens
  misc_RNA (1)...(19): siRNA sense strand
gaccagaccuccaagcuau

SEQ ID NO: 527542 - RNA, 19 nt, Homo sapiens
  misc_RNA (1)...(19): siRNA sense strand
ucaaaugcaucaaagcuuu

SEQ ID NO: 527543 - RNA, 19 nt, Homo sapiens
  misc_RNA (1)...(19): siRNA sense strand
gcacuuggaaauaaagaua

SEQ ID NO: 527544 - RNA, 19 nt, Homo sapiens
  misc_RNA (1)...(19): siRNA sense strand
gguuaaaucucccaaggaa

SEQ ID NO: 527545 - RNA, 19 nt, Homo sapiens
  misc_RNA (1)...(19): siRNA sense strand
ggcaauauguugaugauuc

SEQ ID NO: 527546 - RNA, 19 nt, Homo sapiens
  misc_RNA (1)...(19): siRNA sense strand
gcacagcauugcagcaguu

SEQ ID NO: 527547 - RNA, 19 nt, Homo sapiens
  misc_RNA (1)...(19): siRNA sense strand
gaacgagugauuaguacua

SEQ ID NO: 527548 - RNA, 19 nt, Homo sapiens
  misc_RNA (1)...(19): siRNA sense strand
gcauuuggcauaggaauua

SEQ ID NO: 527549 - RNA, 19 nt, Homo sapiens
  misc_RNA (1)...(19): siRNA sense strand
ccagauauaguaaagguua

SEQ ID NO: 527550 - RNA, 19 nt, Homo sapiens
  misc_RNA (1)...(19): siRNA sense strand
gaagagaaagcaucauaau

SEQ ID NO: 527551 - RNA, 19 nt, Homo sapiens
  misc_RNA (1)...(19): siRNA sense strand
ggaugaaacugcugucaca

SEQ ID NO: 527552 - RNA, 19 nt, Homo sapiens
  misc_RNA (1)...(19): siRNA sense strand
cgacaagccaaucuucuua

SEQ ID NO: 527553 - RNA, 19 nt, Homo sapiens
  misc_RNA (1)...(19): siRNA sense strand
ccaggaaaguggagaauuc

SEQ ID NO: 527554 - RNA, 19 nt, Homo sapiens
  misc_RNA (1)...(19): siRNA sense strand
ucaaauagcacuuggaaau

SEQ ID NO: 527555 - RNA, 19 nt, Homo sapiens
  misc_RNA (1)...(19): siRNA sense strand
ggauguacuuuaccuucua

SEQ ID NO: 527556 - RNA, 19 nt, Homo sapiens
  misc_RNA (1)...(19): siRNA sense strand
caaauagcacuuggaaaua

SEQ ID NO: 527557 - RNA, 19 nt, Homo sapiens
  misc_RNA (1)...(19): siRNA sense strand
gaaguuucguuacaugugu

SEQ ID NO: 527558 - RNA, 19 nt, Homo sapiens
  misc_RNA (1)...(19): siRNA sense strand
acacagauguagcacguaa

SEQ ID NO: 527559 - RNA, 19 nt, Homo sapiens
  misc_RNA (1)...(19): siRNA sense strand
ugaagaaaguggugcaguu

SEQ ID NO: 527560 - RNA, 19 nt, Homo sapiens
  misc_RNA (1)...(19): siRNA sense strand
guaaauggaccuacuaaca

SEQ ID NO: 527561 - RNA, 19 nt, Homo sapiens
  misc_RNA (1)...(19): siRNA sense strand
ugauagguauguaggauuu

SEQ ID NO: 527562 - RNA, 19 nt, Homo sapiens
  misc_RNA (1)...(19): siRNA sense strand
gaacgccuaugaagaugau

SEQ ID NO: 527563 - RNA, 19 nt, Homo sapiens
  misc_RNA (1)...(19): siRNA sense strand
caacaauaccuuccucuau

SEQ ID NO: 527564 - RNA, 19 nt, Homo sapiens
  misc_RNA (1)...(19): siRNA sense strand
agagagaucuagaagagaa

SEQ ID NO: 527565 - RNA, 19 nt, Homo sapiens
  misc_RNA (1)...(19): siRNA sense strand
gguaguagcuguggauaca

SEQ ID NO: 527566 - RNA, 19 nt, Homo sapiens
  misc_RNA (1)...(19): siRNA sense strand
ccaccuaggacgagaaaua

SEQ ID NO: 527567 - RNA, 19 nt, Homo sapiens
  misc_RNA (1)...(19): siRNA sense strand
aaauggaccuacuaacaaa

SEQ ID NO: 527568 - RNA, 19 nt, Homo sapiens
  misc_RNA (1)...(19): siRNA sense strand
gcaagaagccggcaagcau

SEQ ID NO: 527569 - RNA, 19 nt, Homo sapiens
  misc_RNA (1)...(19): siRNA sense strand
cggaagagaaguuucguua

SEQ ID NO: 527570 - RNA, 19 nt, Homo sapiens
  misc_RNA (1)...(19): siRNA sense strand
cagaagagaaagcaucaua

SEQ ID NO: 527571 - RNA, 19 nt, Homo sapiens
  misc_RNA (1)...(19): siRNA sense strand
uaaauggaccuacuaacaa

SEQ ID NO: 527572 - RNA, 19 nt, Homo sapiens
  misc_RNA (1)...(19): siRNA sense strand
gauguacuuuaccuucuaa

SEQ ID NO: 527573 - RNA, 19 nt, Homo sapiens
  misc_RNA (1)...(19): siRNA sense strand
gaagaaaguggugcaguug

SEQ ID NO: 527574 - RNA, 19 nt, Homo sapiens
  misc_RNA (1)...(19): siRNA sense strand
ccagugggcugagcaagaa

SEQ ID NO: 527575 - RNA, 19 nt, Homo sapiens
  misc_RNA (1)...(19): siRNA sense strand
acagaucgaugacuacaau

SEQ ID NO: 527576 - RNA, 19 nt, Homo sapiens
  misc_RNA (1)...(19): siRNA sense strand
gcaagcauccagaagagaa

SEQ ID NO: 527577 - RNA, 19 nt, Homo sapiens
  misc_RNA (1)...(19): siRNA sense strand
gcagagcugucagaagaug

SEQ ID NO: 527578 - RNA, 19 nt, Homo sapiens
  misc_RNA (1)...(19): siRNA sense strand
ggaguggaacgagugauua

SEQ ID NO: 527579 - RNA, 19 nt, Homo sapiens
  misc_RNA (1)...(19): siRNA sense strand
acucggaucuccuagcuuu

SEQ ID NO: 527580 - RNA, 19 nt, Homo sapiens
  misc_RNA (1)...(19): siRNA sense strand
agaacaaucugcaugaauc

SEQ ID NO: 527581 - RNA, 19 nt, Homo sapiens
  misc_RNA (1)...(19): siRNA sense strand
ccaaucuucuuaagggaaa

SEQ ID NO: 527582 - RNA, 19 nt, Homo sapiens
  misc_RNA (1)...(19): siRNA sense strand
uaguagcuguggauacaua

SEQ ID NO: 527583 - RNA, 19 nt, Homo sapiens
  misc_RNA (1)...(19): siRNA sense strand
ccucguggcucccuaugaa

SEQ ID NO: 527584 - RNA, 19 nt, Homo sapiens
  misc_RNA (1)...(19): siRNA sense strand
ggaaaucauccauugugaa

SEQ ID NO: 527585 - RNA, 19 nt, Homo sapiens
  misc_RNA (1)...(19): siRNA sense strand
gagaauaauaugucugaug

SEQ ID NO: 527586 - RNA, 19 nt, Homo sapiens
  misc_RNA (1)...(19): siRNA sense strand
caaaacaugucaaaaguca

SEQ ID NO: 527587 - RNA, 19 nt, Homo sapiens
  misc_RNA (1)...(19): siRNA sense strand
caagguuccugggcuauau

SEQ ID NO: 527588 - RNA, 19 nt, Homo sapiens
  misc_RNA (1)...(19): siRNA sense strand
ccucuuugccugagaauaa

SEQ ID NO: 527589 - RNA, 19 nt, Homo sapiens
  misc_RNA (1)...(19): siRNA sense strand
gaacaaucugcaugaauca

SEQ ID NO: 527590 - RNA, 19 nt, Homo sapiens
  misc_RNA (1)...(19): siRNA sense strand
gagcuuuucugaaguguuu

SEQ ID NO: 527591 - RNA, 19 nt, Homo sapiens
  misc_RNA (1)...(19): siRNA sense strand
gagagcagcaaauuuacaa

SEQ ID NO: 527592 - RNA, 19 nt, Homo sapiens
  misc_RNA (1)...(19): siRNA sense strand
guauaaagggcagguagua

SEQ ID NO: 527593 - RNA, 19 nt, Homo sapiens
  misc_RNA (1)...(19): siRNA sense strand
aaauagcucugaaggcaau

SEQ ID NO: 527594 - RNA, 19 nt, Homo sapiens
  misc_RNA (1)...(19): siRNA sense strand
uaucaaagaagcuucagaa

SEQ ID NO: 527595 - RNA, 19 nt, Homo sapiens
  misc_RNA (1)...(19): siRNA sense strand
guuagcagcauuuggcaua

SEQ ID NO: 527596 - RNA, 19 nt, Homo sapiens
  misc_RNA (1)...(19): siRNA sense strand
aagcuacgcugggcaauau

SEQ ID NO: 527597 - RNA, 19 nt, Homo sapiens
  misc_RNA (1)...(19): siRNA sense strand
uugaacagaucgaugacua

SEQ ID NO: 527598 - RNA, 19 nt, Homo sapiens
  misc_RNA (1)...(19): siRNA sense strand
gcaguuggccuaucuuaac

SEQ ID NO: 527599 - RNA, 19 nt, Homo sapiens
  misc_RNA (1)...(19): siRNA sense strand
guacuaaaggguuaaaucu

SEQ ID NO: 527600 - RNA, 19 nt, Homo sapiens
  misc_RNA (1)...(19): siRNA sense strand
ccaauaauccagauauagu

SEQ ID NO: 527601 - RNA, 19 nt, Homo sapiens
  misc_RNA (1)...(19): siRNA sense strand
ggaccaguuuggaaaugga

SEQ ID NO: 527602 - RNA, 19 nt, Homo sapiens
  misc_RNA (1)...(19): siRNA sense strand
ggaauugugcaagccauaa

SEQ ID NO: 527603 - RNA, 19 nt, Homo sapiens
  misc_RNA (1)...(19): siRNA sense strand
gguuacagaucaaacucaa

SEQ ID NO: 527604 - RNA, 19 nt, Homo sapiens
  misc_RNA (1)...(19): siRNA sense strand
gaacagaucgaugacuaca

SEQ ID NO: 527605 - RNA, 19 nt, Homo sapiens
  misc_RNA (1)...(19): siRNA sense strand
acaauaccuuccucuauca

SEQ ID NO: 527606 - RNA, 19 nt, Homo sapiens
  misc_RNA (1)...(19): siRNA sense strand
ggacucggaucuccuagcu

SEQ ID NO: 527607 - RNA, 19 nt, Homo sapiens
  misc_RNA (1)...(19): siRNA sense strand
gacaagccaaucuucuuaa

SEQ ID NO: 527608 - RNA, 19 nt, Homo sapiens
  misc_RNA (1)...(19): siRNA sense strand
guggaacgagugauuagua

SEQ ID NO: 527609 - RNA, 19 nt, Homo sapiens
  misc_RNA (1)...(19): siRNA sense strand
cuaugaagaugauguugau

SEQ ID NO: 527610 - RNA, 19 nt, Homo sapiens
  misc_RNA (1)...(19): siRNA sense strand
aacaauaccuuccucuauc

SEQ ID NO: 527611 - RNA, 19 nt, Homo sapiens
  misc_RNA (1)...(19): siRNA sense strand
ugccauggcccacaaagua

SEQ ID NO: 527612 - RNA, 19 nt, Homo sapiens
  misc_RNA (1)...(19): siRNA sense strand
ucaagccuauucucguauu

SEQ ID NO: 527613 - RNA, 19 nt, Homo sapiens
  misc_RNA (1)...(19): siRNA sense strand
gcgcaguuggccuaucuua

SEQ ID NO: 527614 - RNA, 19 nt, Homo sapiens
  misc_RNA (1)...(19): siRNA sense strand
gagaacaaucugcaugaau

SEQ ID NO: 527615 - RNA, 19 nt, Homo sapiens
  misc_RNA (1)...(19): siRNA sense strand
guuugugccugaccuggua

SEQ ID NO: 527616 - RNA, 19 nt, Homo sapiens
  misc_RNA (1)...(19): siRNA sense strand
uuaaaucucccaaggaaau

SEQ ID NO: 527617 - RNA, 19 nt, Homo sapiens
  misc_RNA (1)...(19): siRNA sense strand
ucacgguaccagaggauua

SEQ ID NO: 527618 - RNA, 19 nt, Homo sapiens
  misc_RNA (1)...(19): siRNA sense strand
uuacgaagaagaccaagaa

SEQ ID NO: 527619 - RNA, 19 nt, Homo sapiens
  misc_RNA (1)...(19): siRNA sense strand
gugaucauauuccagacaa

SEQ ID NO: 527620 - RNA, 19 nt, Homo sapiens
  misc_RNA (1)...(19): siRNA sense strand
gaagugcagagcugucaga

SEQ ID NO: 527621 - RNA, 19 nt, Homo sapiens
  misc_RNA (1)...(19): siRNA sense strand
caagcuauguuuaucucau

SEQ ID NO: 527622 - RNA, 19 nt, Homo sapiens
  misc_RNA (1)...(19): siRNA sense strand
ucugaugugucgcaguuaa

SEQ ID NO: 527623 - RNA, 19 nt, Homo sapiens
  misc_RNA (1)...(19): siRNA sense strand
ugucugaugugucgcaguu

SEQ ID NO: 527624 - RNA, 19 nt, Homo sapiens
  misc_RNA (1)...(19): siRNA sense strand
cagcaguuccgaagaaaga

SEQ ID NO: 527625 - RNA, 19 nt, Homo sapiens
  misc_RNA (1)...(19): siRNA sense strand
gagacugguugacacagau

SEQ ID NO: 527626 - RNA, 19 nt, Homo sapiens
  misc_RNA (1)...(19): siRNA sense strand
agaaaguggugcaguugug

SEQ ID NO: 527627 - RNA, 19 nt, Homo sapiens
  misc_RNA (1)...(19): siRNA sense strand
agagaaguuucguuacaug

SEQ ID NO: 527628 - RNA, 19 nt, Homo sapiens
  misc_RNA (1)...(19): siRNA sense strand
caagaucaaaccucuagga

SEQ ID NO: 527629 - RNA, 19 nt, Homo sapiens
  misc_RNA (1)...(19): siRNA sense strand
gcuauugcuugugcugaaa

SEQ ID NO: 527630 - RNA, 19 nt, Homo sapiens
  misc_RNA (1)...(19): siRNA sense strand
ucagaacccauccauguga

SEQ ID NO: 527631 - RNA, 19 nt, Homo sapiens
  misc_RNA (1)...(19): siRNA sense strand
gaaauggacuugaaauuga

SEQ ID NO: 527632 - RNA, 19 nt, Homo sapiens
  misc_RNA (1)...(19): siRNA sense strand
gaagagaaguuucguuaca

SEQ ID NO: 527633 - RNA, 19 nt, Homo sapiens
  misc_RNA (1)...(19): siRNA sense strand
gaucaagccuauucucgua

SEQ ID NO: 527634 - RNA, 19 nt, Homo sapiens
  misc_RNA (1)...(19): siRNA sense strand
uuccauagcucuucaaaua

SEQ ID NO: 527635 - RNA, 19 nt, Homo sapiens
  misc_RNA (1)...(19): siRNA sense strand
gugcagagcugucagaaga

SEQ ID NO: 527636 - RNA, 19 nt, Homo sapiens
  misc_RNA (1)...(19): siRNA sense strand
caaaggagcuauugcuugu

SEQ ID NO: 527637 - RNA, 19 nt, Homo sapiens
  misc_RNA (1)...(19): siRNA sense strand
gaaaucauccauugugaaa

SEQ ID NO: 527638 - RNA, 19 nt, Homo sapiens
  misc_RNA (1)...(19): siRNA sense strand
ccaaggaaaucauccauug

SEQ ID NO: 527639 - RNA, 19 nt, Homo sapiens
  misc_RNA (1)...(19): siRNA sense strand
gcacguaauucaagugaug

SEQ ID NO: 527640 - RNA, 19 nt, Homo sapiens
  misc_RNA (1)...(19): siRNA sense strand
ggaaauggacuugaaauug

SEQ ID NO: 527641 - RNA, 19 nt, Homo sapiens
  misc_RNA (1)...(19): siRNA sense strand
gaccagaccuccaagcuau

SEQ ID NO: 527642 - RNA, 19 nt, Homo sapiens
  misc_RNA (1)...(19): siRNA sense strand
ucaaaugcaucaaagcuuu

SEQ ID NO: 527643 - RNA, 19 nt, Homo sapiens
  misc_RNA (1)...(19): siRNA sense strand
gcacuuggaaauaaagaua

SEQ ID NO: 527644 - RNA, 19 nt, Homo sapiens
  misc_RNA (1)...(19): siRNA sense strand
gguuaaaucucccaaggaa

SEQ ID NO: 527645 - RNA, 19 nt, Homo sapiens
  misc_RNA (1)...(19): siRNA sense strand
ggcaauauguugaugauuc

SEQ ID NO: 527646 - RNA, 19 nt, Homo sapiens
  misc_RNA (1)...(19): siRNA sense strand
gcacagcauugcagcaguu

SEQ ID NO: 527647 - RNA, 19 nt, Homo sapiens
  misc_RNA (1)...(19): siRNA sense strand
gaacgagugauuaguacua

SEQ ID NO: 527648 - RNA, 19 nt, Homo sapiens
  misc_RNA (1)...(19): siRNA sense strand
gcauuuggcauaggaauua

SEQ ID NO: 527649 - RNA, 19 nt, Homo sapiens
  misc_RNA (1)...(19): siRNA sense strand
ccagauauaguaaagguua

SEQ ID NO: 527650 - RNA, 19 nt, Homo sapiens
  misc_RNA (1)...(19): siRNA sense strand
gaagagaaagcaucauaau

SEQ ID NO: 527651 - RNA, 19 nt, Homo sapiens
  misc_RNA (1)...(19): siRNA sense strand
ggaugaaacugcugucaca

SEQ ID NO: 527652 - RNA, 19 nt, Homo sapiens
  misc_RNA (1)...(19): siRNA sense strand
cgacaagccaaucuucuua

SEQ ID NO: 527653 - RNA, 19 nt, Homo sapiens
  misc_RNA (1)...(19): siRNA sense strand
ccaggaaaguggagaauuc

SEQ ID NO: 527654 - RNA, 19 nt, Homo sapiens
  misc_RNA (1)...(19): siRNA sense strand
ucaaauagcacuuggaaau

SEQ ID NO: 527655 - RNA, 19 nt, Homo sapiens
  misc_RNA (1)...(19): siRNA sense strand
ggauguacuuuaccuucua

SEQ ID NO: 527656 - RNA, 19 nt, Homo sapiens
  misc_RNA (1)...(19): siRNA sense strand
caaauagcacuuggaaaua

SEQ ID NO: 527657 - RNA, 19 nt, Homo sapiens
  misc_RNA (1)...(19): siRNA sense strand
gaaguuucguuacaugugu

SEQ ID NO: 527658 - RNA, 19 nt, Homo sapiens
  misc_RNA (1)...(19): siRNA sense strand
acacagauguagcacguaa

SEQ ID NO: 527659 - RNA, 19 nt, Homo sapiens
  misc_RNA (1)...(19): siRNA sense strand
ugaagaaaguggugcaguu

SEQ ID NO: 527660 - RNA, 19 nt, Homo sapiens
  misc_RNA (1)...(19): siRNA sense strand
guaaauggaccuacuaaca

SEQ ID NO: 527661 - RNA, 19 nt, Homo sapiens
  misc_RNA (1)...(19): siRNA sense strand
ugauagguauguaggauuu

SEQ ID NO: 527662 - RNA, 19 nt, Homo sapiens
  misc_RNA (1)...(19): siRNA sense strand
aaagagcaauauuccagua

SEQ ID NO: 527663 - RNA, 19 nt, Homo sapiens
  misc_RNA (1)...(19): siRNA sense strand
ggaagaggauauauuuaac

SEQ ID NO: 527664 - RNA, 19 nt, Homo sapiens
  misc_RNA (1)...(19): siRNA sense strand
gaacgccuaugaagaugau

SEQ ID NO: 527665 - RNA, 19 nt, Homo sapiens
  misc_RNA (1)...(19): siRNA sense strand
caacaauaccuuccucuau

SEQ ID NO: 527666 - RNA, 19 nt, Homo sapiens
  misc_RNA (1)...(19): siRNA sense strand
agagagaucuagaagagaa

SEQ ID NO: 527667 - RNA, 19 nt, Homo sapiens
  misc_RNA (1)...(19): siRNA sense strand
gguaguagcuguggauaca

SEQ ID NO: 527668 - RNA, 19 nt, Homo sapiens
  misc_RNA (1)...(19): siRNA sense strand
ccaccuaggacgagaaaua

SEQ ID NO: 527669 - RNA, 19 nt, Homo sapiens
  misc_RNA (1)...(19): siRNA sense strand
aaauggaccuacuaacaaa

SEQ ID NO: 527670 - RNA, 19 nt, Homo sapiens
  misc_RNA (1)...(19): siRNA sense strand
gcaagaagccggcaagcau

SEQ ID NO: 527671 - RNA, 19 nt, Homo sapiens
  misc_RNA (1)...(19): siRNA sense strand
cggaagaggauauauuuaa

SEQ ID NO: 527672 - RNA, 19 nt, Homo sapiens
  misc_RNA (1)...(19): siRNA sense strand
agagauaacauccaacuaa

SEQ ID NO: 527673 - RNA, 19 nt, Homo sapiens
  misc_RNA (1)...(19): siRNA sense strand
cggaagagaaguuucguua

SEQ ID NO: 527674 - RNA, 19 nt, Homo sapiens
  misc_RNA (1)...(19): siRNA sense strand
cagaagagaaagcaucaua

SEQ ID NO: 527675 - RNA, 19 nt, Homo sapiens
  misc_RNA (1)...(19): siRNA sense strand
uaaauggaccuacuaacaa

SEQ ID NO: 527676 - RNA, 19 nt, Homo sapiens
  misc_RNA (1)...(19): siRNA sense strand
gauguacuuuaccuucuaa

SEQ ID NO: 527677 - RNA, 19 nt, Homo sapiens
  misc_RNA (1)...(19): siRNA sense strand
gaagaaaguggugcaguug

SEQ ID NO: 527678 - RNA, 19 nt, Homo sapiens
  misc_RNA (1)...(19): siRNA sense strand
gaauguggccguguucaaa

SEQ ID NO: 527679 - RNA, 19 nt, Homo sapiens
  misc_RNA (1)...(19): siRNA sense strand
ccagugggcugagcaagaa

SEQ ID NO: 527680 - RNA, 19 nt, Homo sapiens
  misc_RNA (1)...(19): siRNA sense strand
acagaucgaugacuacaau

SEQ ID NO: 527681 - RNA, 19 nt, Homo sapiens
  misc_RNA (1)...(19): siRNA sense strand
gcaagcauccagaagagaa

SEQ ID NO: 527682 - RNA, 19 nt, Homo sapiens
  misc_RNA (1)...(19): siRNA sense strand
gcagagcugucagaagaug

SEQ ID NO: 527683 - RNA, 19 nt, Homo sapiens
  misc_RNA (1)...(19): siRNA sense strand
ggaguggaacgagugauua

SEQ ID NO: 527684 - RNA, 19 nt, Homo sapiens
  misc_RNA (1)...(19): siRNA sense strand
acucggaucuccuagcuuu

SEQ ID NO: 527685 - RNA, 19 nt, Homo sapiens
  misc_RNA (1)...(19): siRNA sense strand
gagauaacauccaacuaac

SEQ ID NO: 527686 - RNA, 19 nt, Homo sapiens
  misc_RNA (1)...(19): siRNA sense strand
agaacaaucugcaugaauc

SEQ ID NO: 527687 - RNA, 19 nt, Homo sapiens
  misc_RNA (1)...(19): siRNA sense strand
ccaaucuucuuaagggaaa

SEQ ID NO: 527688 - RNA, 19 nt, Homo sapiens
  misc_RNA (1)...(19): siRNA sense strand
uaguagcuguggauacaua

SEQ ID NO: 527689 - RNA, 19 nt, Homo sapiens
  misc_RNA (1)...(19): siRNA sense strand
ccucguggcucccuaugaa

SEQ ID NO: 527690 - RNA, 19 nt, Homo sapiens
  misc_RNA (1)...(19): siRNA sense strand
ggaaaucauccauugugaa

SEQ ID NO: 527691 - RNA, 19 nt, Homo sapiens
  misc_RNA (1)...(19): siRNA sense strand
gagaauaauaugucugaug

SEQ ID NO: 527692 - RNA, 19 nt, Homo sapiens
  misc_RNA (1)...(19): siRNA sense strand
caaaacaugucaaaaguca

SEQ ID NO: 527693 - RNA, 19 nt, Homo sapiens
  misc_RNA (1)...(19): siRNA sense strand
caagguuccugggcuauau

SEQ ID NO: 527694 - RNA, 19 nt, Homo sapiens
  misc_RNA (1)...(19): siRNA sense strand
ccucuuugccugagaauaa

SEQ ID NO: 527695 - RNA, 19 nt, Homo sapiens
  misc_RNA (1)...(19): siRNA sense strand
gaacaaucugcaugaauca

SEQ ID NO: 527696 - RNA, 19 nt, Homo sapiens
  misc_RNA (1)...(19): siRNA sense strand
gagcuuuucugaaguguuu

SEQ ID NO: 527697 - RNA, 19 nt, Homo sapiens
  misc_RNA (1)...(19): siRNA sense strand
gagagcagcaaauuuacaa

SEQ ID NO: 527698 - RNA, 19 nt, Homo sapiens
  misc_RNA (1)...(19): siRNA sense strand
guauaaagggcagguagua

SEQ ID NO: 527699 - RNA, 19 nt, Homo sapiens
  misc_RNA (1)...(19): siRNA sense strand
aaauagcucugaaggcaau

SEQ ID NO: 527700 - RNA, 19 nt, Homo sapiens
  misc_RNA (1)...(19): siRNA sense strand
uaucaaagaagcuucagaa

SEQ ID NO: 527701 - RNA, 19 nt, Homo sapiens
  misc_RNA (1)...(19): siRNA sense strand
guuagcagcauuuggcaua

SEQ ID NO: 527702 - RNA, 19 nt, Homo sapiens
  misc_RNA (1)...(19): siRNA sense strand
aagcuacgcugggcaauau

SEQ ID NO: 527703 - RNA, 19 nt, Homo sapiens
  misc_RNA (1)...(19): siRNA sense strand
uugaacagaucgaugacua

SEQ ID NO: 527704 - RNA, 19 nt, Homo sapiens
  misc_RNA (1)...(19): siRNA sense strand
gcaguuggccuaucuuaac

SEQ ID NO: 527705 - RNA, 19 nt, Homo sapiens
  misc_RNA (1)...(19): siRNA sense strand
guacuaaaggguuaaaucu

SEQ ID NO: 527706 - RNA, 19 nt, Homo sapiens
  misc_RNA (1)...(19): siRNA sense strand
ccaauaauccagauauagu

SEQ ID NO: 527707 - RNA, 19 nt, Homo sapiens
  misc_RNA (1)...(19): siRNA sense strand
ggaccaguuuggaaaugga

SEQ ID NO: 527708 - RNA, 19 nt, Homo sapiens
  misc_RNA (1)...(19): siRNA sense strand
ggaauugugcaagccauaa

SEQ ID NO: 527709 - RNA, 19 nt, Homo sapiens
  misc_RNA (1)...(19): siRNA sense strand
gcggaagaggauauauuua

SEQ ID NO: 527710 - RNA, 19 nt, Homo sapiens
  misc_RNA (1)...(19): siRNA sense strand
gguuacagaucaaacucaa

SEQ ID NO: 527711 - RNA, 19 nt, Homo sapiens
  misc_RNA (1)...(19): siRNA sense strand
gaacagaucgaugacuaca

SEQ ID NO: 527712 - RNA, 19 nt, Homo sapiens
  misc_RNA (1)...(19): siRNA sense strand
acaauaccuuccucuauca

SEQ ID NO: 527713 - RNA, 19 nt, Homo sapiens
  misc_RNA (1)...(19): siRNA sense strand
ggacucggaucuccuagcu

SEQ ID NO: 527714 - RNA, 19 nt, Homo sapiens
  misc_RNA (1)...(19): siRNA sense strand
gacaagccaaucuucuuaa

SEQ ID NO: 527715 - RNA, 19 nt, Homo sapiens
  misc_RNA (1)...(19): siRNA sense strand
guggaacgagugauuagua

SEQ ID NO: 527716 - RNA, 19 nt, Homo sapiens
  misc_RNA (1)...(19): siRNA sense strand
ucaagccuauucucguauu

SEQ ID NO: 527717 - RNA, 19 nt, Homo sapiens
  misc_RNA (1)...(19): siRNA sense strand
cuaugaagaugauguugau

SEQ ID NO: 527718 - RNA, 19 nt, Homo sapiens
  misc_RNA (1)...(19): siRNA sense strand
aacaauaccuuccucuauc

SEQ ID NO: 527719 - RNA, 19 nt, Homo sapiens
  misc_RNA (1)...(19): siRNA sense strand
ugccauggcccacaaagua

SEQ ID NO: 527720 - RNA, 19 nt, Homo sapiens
  misc_RNA (1)...(19): siRNA sense strand
gcgcaguuggccuaucuua

SEQ ID NO: 527721 - RNA, 19 nt, Homo sapiens
  misc_RNA (1)...(19): siRNA sense strand
gauaacauccaacuaacuc

SEQ ID NO: 527722 - RNA, 19 nt, Homo sapiens
  misc_RNA (1)...(19): siRNA sense strand
gagaacaaucugcaugaau

SEQ ID NO: 527723 - RNA, 19 nt, Homo sapiens
  misc_RNA (1)...(19): siRNA sense strand
guuugugccugaccuggua

SEQ ID NO: 527724 - RNA, 19 nt, Homo sapiens
  misc_RNA (1)...(19): siRNA sense strand
uuaaaucucccaaggaaau

SEQ ID NO: 527725 - RNA, 19 nt, Homo sapiens
  misc_RNA (1)...(19): siRNA sense strand
ucacgguaccagaggauua

SEQ ID NO: 527726 - RNA, 19 nt, Homo sapiens
  misc_RNA (1)...(19): siRNA sense strand
uuacgaagaagaccaagaa

SEQ ID NO: 527727 - RNA, 19 nt, Homo sapiens
  misc_RNA (1)...(19): siRNA sense strand
agucagagauaacauccaa

SEQ ID NO: 527728 - RNA, 19 nt, Homo sapiens
  misc_RNA (1)...(19): siRNA sense strand
gaaaagcuuccuccuugua

SEQ ID NO: 527729 - RNA, 19 nt, Homo sapiens
  misc_RNA (1)...(19): siRNA sense strand
gugaucauauuccagacaa

SEQ ID NO: 527730 - RNA, 19 nt, Homo sapiens
  misc_RNA (1)...(19): siRNA sense strand
caagcuauguuuaucucau

SEQ ID NO: 527731 - RNA, 19 nt, Homo sapiens
  misc_RNA (1)...(19): siRNA sense strand
gaaauggacuugaaauuga

SEQ ID NO: 527732 - RNA, 19 nt, Homo sapiens
  misc_RNA (1)...(19): siRNA sense strand
gaagagaaguuucguuaca

SEQ ID NO: 527733 - RNA, 19 nt, Homo sapiens
  misc_RNA (1)...(19): siRNA sense strand
gaucaagccuauucucgua

SEQ ID NO: 527734 - RNA, 19 nt, Homo sapiens
  misc_RNA (1)...(19): siRNA sense strand
uuccauagcucuucaaaua

SEQ ID NO: 527735 - RNA, 19 nt, Homo sapiens
  misc_RNA (1)...(19): siRNA sense strand
gugcagagcugucagaaga

SEQ ID NO: 527736 - RNA, 19 nt, Homo sapiens
  misc_RNA (1)...(19): siRNA sense strand
caaaggagcuauugcuugu

SEQ ID NO: 527737 - RNA, 19 nt, Homo sapiens
  misc_RNA (1)...(19): siRNA sense strand
gaaaucauccauugugaaa

SEQ ID NO: 527738 - RNA, 19 nt, Homo sapiens
  misc_RNA (1)...(19): siRNA sense strand
ccaaggaaaucauccauug

SEQ ID NO: 527739 - RNA, 19 nt, Homo sapiens
  misc_RNA (1)...(19): siRNA sense strand
gcacguaauucaagugaug

SEQ ID NO: 527740 - RNA, 19 nt, Homo sapiens
  misc_RNA (1)...(19): siRNA sense strand
ggaaauggacuugaaauug

SEQ ID NO: 527741 - RNA, 19 nt, Homo sapiens
  misc_RNA (1)...(19): siRNA sense strand
gaccagaccuccaagcuau

SEQ ID NO: 527742 - RNA, 19 nt, Homo sapiens
  misc_RNA (1)...(19): siRNA sense strand
ucaaaugcaucaaagcuuu

SEQ ID NO: 527743 - RNA, 19 nt, Homo sapiens
  misc_RNA (1)...(19): siRNA sense strand
gcacuuggaaauaaagaua

SEQ ID NO: 527744 - RNA, 19 nt, Homo sapiens
  misc_RNA (1)...(19): siRNA sense strand
gguuaaaucucccaaggaa

SEQ ID NO: 527745 - RNA, 19 nt, Homo sapiens
  misc_RNA (1)...(19): siRNA sense strand
ggcaauauguugaugauuc

SEQ ID NO: 527746 - RNA, 19 nt, Homo sapiens
  misc_RNA (1)...(19): siRNA sense strand
gcacagcauugcagcaguu

SEQ ID NO: 527747 - RNA, 19 nt, Homo sapiens
  misc_RNA (1)...(19): siRNA sense strand
gaacgagugauuaguacua

SEQ ID NO: 527748 - RNA, 19 nt, Homo sapiens
  misc_RNA (1)...(19): siRNA sense strand
gcauuuggcauaggaauua

SEQ ID NO: 527749 - RNA, 19 nt, Homo sapiens
  misc_RNA (1)...(19): siRNA sense strand
ccagauauaguaaagguua

SEQ ID NO: 527750 - RNA, 19 nt, Homo sapiens
  misc_RNA (1)...(19): siRNA sense strand
gaagagaaagcaucauaau

SEQ ID NO: 527751 - RNA, 19 nt, Homo sapiens
  misc_RNA (1)...(19): siRNA sense strand
ggaugaaacugcugucaca

SEQ ID NO: 527752 - RNA, 19 nt, Homo sapiens
  misc_RNA (1)...(19): siRNA sense strand
cgacaagccaaucuucuua

SEQ ID NO: 527753 - RNA, 19 nt, Homo sapiens
  misc_RNA (1)...(19): siRNA sense strand
ccaggaaaguggagaauuc

SEQ ID NO: 527754 - RNA, 19 nt, Homo sapiens
  misc_RNA (1)...(19): siRNA sense strand
ucaaauagcacuuggaaau

SEQ ID NO: 527755 - RNA, 19 nt, Homo sapiens
  misc_RNA (1)...(19): siRNA sense strand
ggauguacuuuaccuucua

SEQ ID NO: 527756 - RNA, 19 nt, Homo sapiens
  misc_RNA (1)...(19): siRNA sense strand
caaauagcacuuggaaaua

SEQ ID NO: 527757 - RNA, 19 nt, Homo sapiens
  misc_RNA (1)...(19): siRNA sense strand
gaaguuucguuacaugugu

SEQ ID NO: 527758 - RNA, 19 nt, Homo sapiens
  misc_RNA (1)...(19): siRNA sense strand
acacagauguagcacguaa

SEQ ID NO: 527759 - RNA, 19 nt, Homo sapiens
  misc_RNA (1)...(19): siRNA sense strand
ugaagaaaguggugcaguu

SEQ ID NO: 527760 - RNA, 19 nt, Homo sapiens
  misc_RNA (1)...(19): siRNA sense strand
guaaauggaccuacuaaca

SEQ ID NO: 527761 - RNA, 19 nt, Homo sapiens
  misc_RNA (1)...(19): siRNA sense strand
ugauagguauguaggauuu

SEQ ID NO: 527762 - RNA, 19 nt, Homo sapiens
  misc_RNA (1)...(19): siRNA sense strand
aaagagcaauauuccagua

SEQ ID NO: 527763 - RNA, 19 nt, Homo sapiens
  misc_RNA (1)...(19): siRNA sense strand
ggaagaggauauauuuaac

SEQ ID NO: 527764 - RNA, 19 nt, Homo sapiens
  misc_RNA (1)...(19): siRNA sense strand
gaacgccuaugaagaugau

SEQ ID NO: 527765 - RNA, 19 nt, Homo sapiens
  misc_RNA (1)...(19): siRNA sense strand
caacaauaccuuccucuau

SEQ ID NO: 527766 - RNA, 19 nt, Homo sapiens
  misc_RNA (1)...(19): siRNA sense strand
agagagaucuagaagagaa

SEQ ID NO: 527767 - RNA, 19 nt, Homo sapiens
  misc_RNA (1)...(19): siRNA sense strand
gguaguagcuguggauaca

SEQ ID NO: 527768 - RNA, 19 nt, Homo sapiens
  misc_RNA (1)...(19): siRNA sense strand
ccaccuaggacgagaaaua

SEQ ID NO: 527769 - RNA, 19 nt, Homo sapiens
  misc_RNA (1)...(19): siRNA sense strand
aaauggaccuacuaacaaa

SEQ ID NO: 527770 - RNA, 19 nt, Homo sapiens
  misc_RNA (1)...(19): siRNA sense strand
gcaagaagccggcaagcau

SEQ ID NO: 527771 - RNA, 19 nt, Homo sapiens
  misc_RNA (1)...(19): siRNA sense strand
cggaagaggauauauuuaa

SEQ ID NO: 527772 - RNA, 19 nt, Homo sapiens
  misc_RNA (1)...(19): siRNA sense strand
agagauaacauccaacuaa

SEQ ID NO: 527773 - RNA, 19 nt, Homo sapiens
  misc_RNA (1)...(19): siRNA sense strand
cggaagagaaguuucguua

SEQ ID NO: 527774 - RNA, 19 nt, Homo sapiens
  misc_RNA (1)...(19): siRNA sense strand
cagaagagaaagcaucaua

SEQ ID NO: 527775 - RNA, 19 nt, Homo sapiens
  misc_RNA (1)...(19): siRNA sense strand
uaaauggaccuacuaacaa

SEQ ID NO: 527776 - RNA, 19 nt, Homo sapiens
  misc_RNA (1)...(19): siRNA sense strand
gauguacuuuaccuucuaa

SEQ ID NO: 527777 - RNA, 19 nt, Homo sapiens
  misc_RNA (1)...(19): siRNA sense strand
gaagaaaguggugcaguug

SEQ ID NO: 527778 - RNA, 19 nt, Homo sapiens
  misc_RNA (1)...(19): siRNA sense strand
gaauguggccguguucaaa

SEQ ID NO: 527779 - RNA, 19 nt, Homo sapiens
  misc_RNA (1)...(19): siRNA sense strand
ccagugggcugagcaagaa

SEQ ID NO: 527780 - RNA, 19 nt, Homo sapiens
  misc_RNA (1)...(19): siRNA sense strand
acagaucgaugacuacaau

SEQ ID NO: 527781 - RNA, 19 nt, Homo sapiens
  misc_RNA (1)...(19): siRNA sense strand
gcaagcauccagaagagaa

SEQ ID NO: 527782 - RNA, 19 nt, Homo sapiens
  misc_RNA (1)...(19): siRNA sense strand
gcagagcugucagaagaug

SEQ ID NO: 527783 - RNA, 19 nt, Homo sapiens
  misc_RNA (1)...(19): siRNA sense strand
ggaguggaacgagugauua

SEQ ID NO: 527784 - RNA, 19 nt, Homo sapiens
  misc_RNA (1)...(19): siRNA sense strand
acucggaucuccuagcuuu

SEQ ID NO: 527785 - RNA, 19 nt, Homo sapiens
  misc_RNA (1)...(19): siRNA sense strand
gagauaacauccaacuaac

SEQ ID NO: 527786 - RNA, 19 nt, Homo sapiens
  misc_RNA (1)...(19): siRNA sense strand
agaacaaucugcaugaauc

SEQ ID NO: 527787 - RNA, 19 nt, Homo sapiens
  misc_RNA (1)...(19): siRNA sense strand
ccaaucuucuuaagggaaa

SEQ ID NO: 527788 - RNA, 19 nt, Homo sapiens
  misc_RNA (1)...(19): siRNA sense strand
uaguagcuguggauacaua

SEQ ID NO: 527789 - RNA, 19 nt, Homo sapiens
  misc_RNA (1)...(19): siRNA sense strand
ccucguggcucccuaugaa

SEQ ID NO: 527790 - RNA, 19 nt, Homo sapiens
  misc_RNA (1)...(19): siRNA sense strand
ggaaaucauccauugugaa

SEQ ID NO: 527791 - RNA, 19 nt, Homo sapiens
  misc_RNA (1)...(19): siRNA sense strand
gagaauaauaugucugaug

SEQ ID NO: 527792 - RNA, 19 nt, Homo sapiens
  misc_RNA (1)...(19): siRNA sense strand
caaaacaugucaaaaguca

SEQ ID NO: 527793 - RNA, 19 nt, Homo sapiens
  misc_RNA (1)...(19): siRNA sense strand
caagguuccugggcuauau

SEQ ID NO: 527794 - RNA, 19 nt, Homo sapiens
  misc_RNA (1)...(19): siRNA sense strand
ccucuuugccugagaauaa

SEQ ID NO: 527795 - RNA, 19 nt, Homo sapiens
  misc_RNA (1)...(19): siRNA sense strand
gaacaaucugcaugaauca

SEQ ID NO: 527796 - RNA, 19 nt, Homo sapiens
  misc_RNA (1)...(19): siRNA sense strand
gagcuuuucugaaguguuu

SEQ ID NO: 527797 - RNA, 19 nt, Homo sapiens
  misc_RNA (1)...(19): siRNA sense strand
gagagcagcaaauuuacaa

SEQ ID NO: 527798 - RNA, 19 nt, Homo sapiens
  misc_RNA (1)...(19): siRNA sense strand
guauaaagggcagguagua

SEQ ID NO: 527799 - RNA, 19 nt, Homo sapiens
  misc_RNA (1)...(19): siRNA sense strand
aaauagcucugaaggcaau

SEQ ID NO: 527800 - RNA, 19 nt, Homo sapiens
  misc_RNA (1)...(19): siRNA sense strand
uaucaaagaagcuucagaa

SEQ ID NO: 527801 - RNA, 19 nt, Homo sapiens
  misc_RNA (1)...(19): siRNA sense strand
guuagcagcauuuggcaua

SEQ ID NO: 527802 - RNA, 19 nt, Homo sapiens
  misc_RNA (1)...(19): siRNA sense strand
aagcuacgcugggcaauau

SEQ ID NO: 527803 - RNA, 19 nt, Homo sapiens
  misc_RNA (1)...(19): siRNA sense strand
uugaacagaucgaugacua

SEQ ID NO: 527804 - RNA, 19 nt, Homo sapiens
  misc_RNA (1)...(19): siRNA sense strand
gcaguuggccuaucuuaac

SEQ ID NO: 527805 - RNA, 19 nt, Homo sapiens
  misc_RNA (1)...(19): siRNA sense strand
guacuaaaggguuaaaucu

SEQ ID NO: 527806 - RNA, 19 nt, Homo sapiens
  misc_RNA (1)...(19): siRNA sense strand
ccaauaauccagauauagu

SEQ ID NO: 527807 - RNA, 19 nt, Homo sapiens
  misc_RNA (1)...(19): siRNA sense strand
ggaccaguuuggaaaugga

SEQ ID NO: 527808 - RNA, 19 nt, Homo sapiens
  misc_RNA (1)...(19): siRNA sense strand
ggaauugugcaagccauaa

SEQ ID NO: 527809 - RNA, 19 nt, Homo sapiens
  misc_RNA (1)...(19): siRNA sense strand
gcggaagaggauauauuua

SEQ ID NO: 527810 - RNA, 19 nt, Homo sapiens
  misc_RNA (1)...(19): siRNA sense strand
gguuacagaucaaacucaa

SEQ ID NO: 527811 - RNA, 19 nt, Homo sapiens
  misc_RNA (1)...(19): siRNA sense strand
gaacagaucgaugacuaca

SEQ ID NO: 527812 - RNA, 19 nt, Homo sapiens
  misc_RNA (1)...(19): siRNA sense strand
acaauaccuuccucuauca

SEQ ID NO: 527813 - RNA, 19 nt, Homo sapiens
  misc_RNA (1)...(19): siRNA sense strand
ggacucggaucuccuagcu

SEQ ID NO: 527814 - RNA, 19 nt, Homo sapiens
  misc_RNA (1)...(19): siRNA sense strand
gacaagccaaucuucuuaa

SEQ ID NO: 527815 - RNA, 19 nt, Homo sapiens
  misc_RNA (1)...(19): siRNA sense strand
guggaacgagugauuagua

SEQ ID NO: 527816 - RNA, 19 nt, Homo sapiens
  misc_RNA (1)...(19): siRNA sense strand
ucaagccuauucucguauu

SEQ ID NO: 527817 - RNA, 19 nt, Homo sapiens
  misc_RNA (1)...(19): siRNA sense strand
cuaugaagaugauguugau

SEQ ID NO: 527818 - RNA, 19 nt, Homo sapiens
  misc_RNA (1)...(19): siRNA sense strand
aacaauaccuuccucuauc

SEQ ID NO: 527819 - RNA, 19 nt, Homo sapiens
  misc_RNA (1)...(19): siRNA sense strand
ugccauggcccacaaagua

SEQ ID NO: 527820 - RNA, 19 nt, Homo sapiens
  misc_RNA (1)...(19): siRNA sense strand
gcgcaguuggccuaucuua

SEQ ID NO: 527821 - RNA, 19 nt, Homo sapiens
  misc_RNA (1)...(19): siRNA sense strand
gauaacauccaacuaacuc

SEQ ID NO: 527822 - RNA, 19 nt, Homo sapiens
  misc_RNA (1)...(19): siRNA sense strand
gagaacaaucugcaugaau

SEQ ID NO: 527823 - RNA, 19 nt, Homo sapiens
  misc_RNA (1)...(19): siRNA sense strand
guuugugccugaccuggua

SEQ ID NO: 527824 - RNA, 19 nt, Homo sapiens
  misc_RNA (1)...(19): siRNA sense strand
uuaaaucucccaaggaaau

SEQ ID NO: 527825 - RNA, 19 nt, Homo sapiens
  misc_RNA (1)...(19): siRNA sense strand
ucacgguaccagaggauua

SEQ ID NO: 527826 - RNA, 19 nt, Homo sapiens
  misc_RNA (1)...(19): siRNA sense strand
uuacgaagaagaccaagaa

SEQ ID NO: 527827 - RNA, 19 nt, Homo sapiens
  misc_RNA (1)...(19): siRNA sense strand
agucagagauaacauccaa

SEQ ID NO: 527828 - RNA, 19 nt, Homo sapiens
  misc_RNA (1)...(19): siRNA sense strand
gaaaagcuuccuccuugua

SEQ ID NO: 527829 - RNA, 19 nt, Homo sapiens
  misc_RNA (1)...(19): siRNA sense strand
gugaucauauuccagacaa

SEQ ID NO: 527830 - RNA, 19 nt, Homo sapiens
  misc_RNA (1)...(19): siRNA sense strand
caagcuauguuuaucucau

SEQ ID NO: 527831 - RNA, 19 nt, Homo sapiens
  misc_RNA (1)...(19): siRNA sense strand
cuacauagaugguuacaaa

SEQ ID NO: 527832 - RNA, 19 nt, Homo sapiens
  misc_RNA (1)...(19): siRNA sense strand
caucaaugcuuccuacaua

SEQ ID NO: 527833 - RNA, 19 nt, Homo sapiens
  misc_RNA (1)...(19): siRNA sense strand
gcgaacagguacauucaua

SEQ ID NO: 527834 - RNA, 19 nt, Homo sapiens
  misc_RNA (1)...(19): siRNA sense strand
gaauggaaaucccacacua

SEQ ID NO: 527835 - RNA, 19 nt, Homo sapiens
  misc_RNA (1)...(19): siRNA sense strand
gauaaaugcuaccaguauu

SEQ ID NO: 527836 - RNA, 19 nt, Homo sapiens
  misc_RNA (1)...(19): siRNA sense strand
cgauugagauaaagaauga

SEQ ID NO: 527837 - RNA, 19 nt, Homo sapiens
  misc_RNA (1)...(19): siRNA sense strand
gaagguggauguguuugaa

SEQ ID NO: 527838 - RNA, 19 nt, Homo sapiens
  misc_RNA (1)...(19): siRNA sense strand
aaacagauaucccaacauc

SEQ ID NO: 527839 - RNA, 19 nt, Homo sapiens
  misc_RNA (1)...(19): siRNA sense strand
caucaacgcauccuucaua

SEQ ID NO: 527840 - RNA, 19 nt, Homo sapiens
  misc_RNA (1)...(19): siRNA sense strand
gaaaaggggucaagaauac

SEQ ID NO: 527841 - RNA, 19 nt, Homo sapiens
  misc_RNA (1)...(19): siRNA sense strand
ggaauucccuguucagacu

SEQ ID NO: 527842 - RNA, 19 nt, Homo sapiens
  misc_RNA (1)...(19): siRNA sense strand
ggauaaaugcuaccaguau

SEQ ID NO: 527843 - RNA, 19 nt, Homo sapiens
  misc_RNA (1)...(19): siRNA sense strand
ggagaaauaacgauugaga

SEQ ID NO: 527844 - RNA, 19 nt, Homo sapiens
  misc_RNA (1)...(19): siRNA sense strand
acaaagugguacaagauuu

SEQ ID NO: 527845 - RNA, 19 nt, Homo sapiens
  misc_RNA (1)...(19): siRNA sense strand
ccaacauccuucccaauga

SEQ ID NO: 527846 - RNA, 19 nt, Homo sapiens
  misc_RNA (1)...(19): siRNA sense strand
gaaagaaaggaaagaggaa

SEQ ID NO: 527847 - RNA, 19 nt, Homo sapiens
  misc_RNA (1)...(19): siRNA sense strand
ggaaacgguuaacgacuuc

SEQ ID NO: 527848 - RNA, 19 nt, Homo sapiens
  misc_RNA (1)...(19): siRNA sense strand
ccucagggcccaagaagua

SEQ ID NO: 527849 - RNA, 19 nt, Homo sapiens
  misc_RNA (1)...(19): siRNA sense strand
cgagugauccuuuccauga

SEQ ID NO: 527850 - RNA, 19 nt, Homo sapiens
  misc_RNA (1)...(19): siRNA sense strand
gcagaagguggauguguuu

SEQ ID NO: 527851 - RNA, 19 nt, Homo sapiens
  misc_RNA (1)...(19): siRNA sense strand
gcuacaaagugguacaaga

SEQ ID NO: 527852 - RNA, 19 nt, Homo sapiens
  misc_RNA (1)...(19): siRNA sense strand
gaggaggaguucaggaaau

SEQ ID NO: 527853 - RNA, 19 nt, Homo sapiens
  misc_RNA (1)...(19): siRNA sense strand
gaggacuucuggaggauga

SEQ ID NO: 527854 - RNA, 19 nt, Homo sapiens
  misc_RNA (1)...(19): siRNA sense strand
ggagagagagcaggauaaa

SEQ ID NO: 527855 - RNA, 19 nt, Homo sapiens
  misc_RNA (1)...(19): siRNA sense strand
ucaggaaauugacaaaugu

SEQ ID NO: 527856 - RNA, 19 nt, Homo sapiens
  misc_RNA (1)...(19): siRNA sense strand
agagagagcaggauaaaug

SEQ ID NO: 527857 - RNA, 19 nt, Homo sapiens
  misc_RNA (1)...(19): siRNA sense strand
acaaauguccggaucauga

SEQ ID NO: 527858 - RNA, 19 nt, Homo sapiens
  misc_RNA (1)...(19): siRNA sense strand
ccauugggaugcugaaguu

SEQ ID NO: 527859 - RNA, 19 nt, Homo sapiens
  misc_RNA (1)...(19): siRNA sense strand
guucaucuaccaagccuua

SEQ ID NO: 527860 - RNA, 19 nt, Homo sapiens
  misc_RNA (1)...(19): siRNA sense strand
gaagaugcccaacggaauc

SEQ ID NO: 527861 - RNA, 19 nt, Homo sapiens
  misc_RNA (1)...(19): siRNA sense strand
ugcaaacccuggaacagua

SEQ ID NO: 527862 - RNA, 19 nt, Homo sapiens
  misc_RNA (1)...(19): siRNA sense strand
ugaaguuccucaagaaagu

SEQ ID NO: 527863 - RNA, 19 nt, Homo sapiens
  misc_RNA (1)...(19): siRNA sense strand
gaaugauacccuuucagaa

SEQ ID NO: 527864 - RNA, 19 nt, Homo sapiens
  misc_RNA (1)...(19): siRNA sense strand
ggauggaauucccuguuca

SEQ ID NO: 527865 - RNA, 19 nt, Homo sapiens
  misc_RNA (1)...(19): siRNA sense strand
gauaugcaguacacguuca

SEQ ID NO: 527866 - RNA, 19 nt, Homo sapiens
  misc_RNA (1)...(19): siRNA sense strand
ccaaacaggaaacgguuaa

SEQ ID NO: 527867 - RNA, 19 nt, Homo sapiens
  misc_RNA (1)...(19): siRNA sense strand
cgacuucagagaccacaua

SEQ ID NO: 527868 - RNA, 19 nt, Homo sapiens
  misc_RNA (1)...(19): siRNA sense strand
ggagcugggcgaacaggua

SEQ ID NO: 527869 - RNA, 19 nt, Homo sapiens
  misc_RNA (1)...(19): siRNA sense strand
gagugauccuuuccaugaa

SEQ ID NO: 527870 - RNA, 19 nt, Homo sapiens
  misc_RNA (1)...(19): siRNA sense strand
gaauuugugucucgaaucc

SEQ ID NO: 527871 - RNA, 19 nt, Homo sapiens
  misc_RNA (1)...(19): siRNA sense strand
ggauguguuugaauuugug

SEQ ID NO: 527872 - RNA, 19 nt, Homo sapiens
  misc_RNA (1)...(19): siRNA sense strand
ggaggaugaucugggaaug

SEQ ID NO: 527873 - RNA, 19 nt, Homo sapiens
  misc_RNA (1)...(19): siRNA sense strand
gaagaaggccagggucauc

SEQ ID NO: 527874 - RNA, 19 nt, Homo sapiens
  misc_RNA (1)...(19): siRNA sense strand
ggaggaggaguucaggaaa

SEQ ID NO: 527875 - RNA, 19 nt, Homo sapiens
  misc_RNA (1)...(19): siRNA sense strand
gaaguuccucaagaaagua

SEQ ID NO: 527876 - RNA, 19 nt, Homo sapiens
  misc_RNA (1)...(19): siRNA sense strand
gaggaguucaggaaauuga

SEQ ID NO: 527877 - RNA, 19 nt, Homo sapiens
  misc_RNA (1)...(19): siRNA sense strand
ggacgggcaccuucauugu

SEQ ID NO: 527878 - RNA, 19 nt, Homo sapiens
  misc_RNA (1)...(19): siRNA sense strand
cuuccuacauagaugguua

SEQ ID NO: 527879 - RNA, 19 nt, Homo sapiens
  misc_RNA (1)...(19): siRNA sense strand
agaaugauacccuuucaga

SEQ ID NO: 527880 - RNA, 19 nt, Homo sapiens
  misc_RNA (1)...(19): siRNA sense strand
caaggcugcuggaccuaug

SEQ ID NO: 527881 - RNA, 19 nt, Homo sapiens
  misc_RNA (1)...(19): siRNA sense strand
agaauggucugggagcaaa

SEQ ID NO: 527882 - RNA, 19 nt, Homo sapiens
  misc_RNA (1)...(19): siRNA sense strand
guggaggacugcgugguuu

SEQ ID NO: 527883 - RNA, 19 nt, Homo sapiens
  misc_RNA (1)...(19): siRNA sense strand
guaugaauucugcuacaaa

SEQ ID NO: 527884 - RNA, 19 nt, Homo sapiens
  misc_RNA (1)...(19): siRNA sense strand
aaacggauaugcaguacac

SEQ ID NO: 527885 - RNA, 19 nt, Homo sapiens
  misc_RNA (1)...(19): siRNA sense strand
guaaucagcgcccucagau

SEQ ID NO: 527886 - RNA, 19 nt, Homo sapiens
  misc_RNA (1)...(19): siRNA sense strand
guggauguguuugaauuug

SEQ ID NO: 527887 - RNA, 19 nt, Homo sapiens
  misc_RNA (1)...(19): siRNA sense strand
ugugaucgaugccaugaug

SEQ ID NO: 527888 - RNA, 19 nt, Homo sapiens
  misc_RNA (1)...(19): siRNA sense strand
caacauccuucccaaugac

SEQ ID NO: 527889 - RNA, 19 nt, Homo sapiens
  misc_RNA (1)...(19): siRNA sense strand
caacgcauccuucauagac

SEQ ID NO: 527890 - RNA, 19 nt, Homo sapiens
  misc_RNA (1)...(19): siRNA sense strand
caaauguccggaucaugaa

SEQ ID NO: 527891 - RNA, 19 nt, Homo sapiens
  misc_RNA (1)...(19): siRNA sense strand
cauagaugguuacaaagag

SEQ ID NO: 527892 - RNA, 19 nt, Homo sapiens
  misc_RNA (1)...(19): siRNA sense strand
aggaaacgguuaacgacuu

SEQ ID NO: 527893 - RNA, 19 nt, Homo sapiens
  misc_RNA (1)...(19): siRNA sense strand
cuacaaagugguacaagau

SEQ ID NO: 527894 - RNA, 19 nt, Homo sapiens
  misc_RNA (1)...(19): siRNA sense strand
ggacacauacaaggaacuu

SEQ ID NO: 527895 - RNA, 19 nt, Homo sapiens
  misc_RNA (1)...(19): siRNA sense strand
ggaggagcagguccgagua

SEQ ID NO: 527896 - RNA, 19 nt, Homo sapiens
  misc_RNA (1)...(19): siRNA sense strand
gagacuuucuggucacucu

SEQ ID NO: 527897 - RNA, 19 nt, Homo sapiens
  misc_RNA (1)...(19): siRNA sense strand
ggaaaucccacacuaucgu

SEQ ID NO: 527898 - RNA, 19 nt, Homo sapiens
  misc_RNA (1)...(19): siRNA sense strand
gaugaucugggaauggaaa

SEQ ID NO: 527899 - RNA, 19 nt, Homo sapiens
  misc_RNA (1)...(19): siRNA sense strand
cgacagaaggacuauuuca

SEQ ID NO: 527900 - RNA, 19 nt, Homo sapiens
  misc_RNA (1)...(19): siRNA sense strand
gcaguacacguucaucuac

SEQ ID NO: 527901 - RNA, 19 nt, Homo sapiens
  misc_RNA (1)...(19): siRNA sense strand
ugaacuggcaaauaaagaa

SEQ ID NO: 527902 - RNA, 19 nt, Homo sapiens
  misc_RNA (1)...(19): siRNA sense strand
uaugaauucugcuacaaag

SEQ ID NO: 527903 - RNA, 19 nt, Homo sapiens
  misc_RNA (1)...(19): siRNA sense strand
gaacuggcaaauaaagaag

SEQ ID NO: 527904 - RNA, 19 nt, Homo sapiens
  misc_RNA (1)...(19): siRNA sense strand
gaacagguacauucauagc

SEQ ID NO: 527905 - RNA, 19 nt, Homo sapiens
  misc_RNA (1)...(19): siRNA sense strand
gagaaauaacgauugagau

SEQ ID NO: 527906 - RNA, 19 nt, Homo sapiens
  misc_RNA (1)...(19): siRNA sense strand
gaauacacagacuacauca

SEQ ID NO: 527907 - RNA, 19 nt, Homo sapiens
  misc_RNA (1)...(19): siRNA sense strand
gcaccuucauugugaucga

SEQ ID NO: 527908 - RNA, 19 nt, Homo sapiens
  misc_RNA (1)...(19): siRNA sense strand
ugaauucugcuacaaagug

SEQ ID NO: 527909 - RNA, 19 nt, Homo sapiens
  misc_RNA (1)...(19): siRNA sense strand
gcaaacccuggaacaguau

SEQ ID NO: 527910 - RNA, 19 nt, Homo sapiens
  misc_RNA (1)...(19): siRNA sense strand
caggagagagagcaggaua

SEQ ID NO: 527911 - RNA, 19 nt, Homo sapiens
  misc_RNA (1)...(19): siRNA sense strand
aggaggaguucaggaaauu

SEQ ID NO: 527912 - RNA, 19 nt, Homo sapiens
  misc_RNA (1)...(19): siRNA sense strand
gcugaaguuccucaagaaa

SEQ ID NO: 527913 - RNA, 19 nt, Homo sapiens
  misc_RNA (1)...(19): siRNA sense strand
ggucaagaauacacagacu

SEQ ID NO: 527914 - RNA, 19 nt, Homo sapiens
  misc_RNA (1)...(19): siRNA sense strand
uucaggaaauugacaaaug

SEQ ID NO: 527915 - RNA, 19 nt, Homo sapiens
  misc_RNA (1)...(19): siRNA sense strand
gcgaccaucgucauguuaa

SEQ ID NO: 527916 - RNA, 19 nt, Homo sapiens
  misc_RNA (1)...(19): siRNA sense strand
gggcucaguuacucaugga

SEQ ID NO: 527917 - RNA, 19 nt, Homo sapiens
  misc_RNA (1)...(19): siRNA sense strand
agaagcaccugcagaccau

SEQ ID NO: 527918 - RNA, 19 nt, Homo sapiens
  misc_RNA (1)...(19): siRNA sense strand
acaaggaacuuuugaacug

SEQ ID NO: 527919 - RNA, 19 nt, Homo sapiens
  misc_RNA (1)...(19): siRNA sense strand
acgggcaccuucauuguga

SEQ ID NO: 527920 - RNA, 19 nt, Homo sapiens
  misc_RNA (1)...(19): siRNA sense strand
acauagaugguuacaaaga

SEQ ID NO: 527921 - RNA, 19 nt, Homo sapiens
  misc_RNA (1)...(19): siRNA sense strand
cuucagagaccacauaugg

SEQ ID NO: 527922 - RNA, 19 nt, Homo sapiens
  misc_RNA (1)...(19): siRNA sense strand
cgagggacuuuuagaugua

SEQ ID NO: 527923 - RNA, 19 nt, Homo sapiens
  misc_RNA (1)...(19): siRNA sense strand
acagaaggacuauuucauc

SEQ ID NO: 527924 - RNA, 19 nt, Homo sapiens
  misc_RNA (1)...(19): siRNA sense strand
ugaaaaggggucaagaaua

SEQ ID NO: 527925 - RNA, 19 nt, Homo sapiens
  misc_RNA (1)...(19): siRNA sense strand
gcccucagaugguucaaac

SEQ ID NO: 527926 - RNA, 19 nt, Homo sapiens
  misc_RNA (1)...(19): siRNA sense strand
gagcagaagguggaugugu

SEQ ID NO: 527927 - RNA, 19 nt, Homo sapiens
  misc_RNA (1)...(19): siRNA sense strand
ugagccaacuggauggaau

SEQ ID NO: 527928 - RNA, 19 nt, Homo sapiens
  misc_RNA (1)...(19): siRNA sense strand
gguuacaaagagaagaaua

SEQ ID NO: 527929 - RNA, 19 nt, Homo sapiens
  misc_RNA (1)...(19): siRNA sense strand
auagaugguuacaaagaga

SEQ ID NO: 527930 - RNA, 19 nt, Homo sapiens
  misc_RNA (1)...(19): siRNA sense strand
gggcgaacagguacauuca

SEQ ID NO: 527931 - RNA, 19 nt, Homo sapiens
  misc_RNA (1)...(19): siRNA sense strand
cuacauagaugguuacaaa

SEQ ID NO: 527932 - RNA, 19 nt, Homo sapiens
  misc_RNA (1)...(19): siRNA sense strand
caucaaugcuuccuacaua

SEQ ID NO: 527933 - RNA, 19 nt, Homo sapiens
  misc_RNA (1)...(19): siRNA sense strand
gcgaacagguacauucaua

SEQ ID NO: 527934 - RNA, 19 nt, Homo sapiens
  misc_RNA (1)...(19): siRNA sense strand
gaauggaaaucccacacua

SEQ ID NO: 527935 - RNA, 19 nt, Homo sapiens
  misc_RNA (1)...(19): siRNA sense strand
gauaaaugcuaccaguauu

SEQ ID NO: 527936 - RNA, 19 nt, Homo sapiens
  misc_RNA (1)...(19): siRNA sense strand
cgauugagauaaagaauga

SEQ ID NO: 527937 - RNA, 19 nt, Homo sapiens
  misc_RNA (1)...(19): siRNA sense strand
gaagguggauguguuugaa

SEQ ID NO: 527938 - RNA, 19 nt, Homo sapiens
  misc_RNA (1)...(19): siRNA sense strand
aaacagauaucccaacauc

SEQ ID NO: 527939 - RNA, 19 nt, Homo sapiens
  misc_RNA (1)...(19): siRNA sense strand
caucaacgcauccuucaua

SEQ ID NO: 527940 - RNA, 19 nt, Homo sapiens
  misc_RNA (1)...(19): siRNA sense strand
gaaaaggggucaagaauac

SEQ ID NO: 527941 - RNA, 19 nt, Homo sapiens
  misc_RNA (1)...(19): siRNA sense strand
ggaauucccuguucagacu

SEQ ID NO: 527942 - RNA, 19 nt, Homo sapiens
  misc_RNA (1)...(19): siRNA sense strand
ggauaaaugcuaccaguau

SEQ ID NO: 527943 - RNA, 19 nt, Homo sapiens
  misc_RNA (1)...(19): siRNA sense strand
ggagaaauaacgauugaga

SEQ ID NO: 527944 - RNA, 19 nt, Homo sapiens
  misc_RNA (1)...(19): siRNA sense strand
acaaagugguacaagauuu

SEQ ID NO: 527945 - RNA, 19 nt, Homo sapiens
  misc_RNA (1)...(19): siRNA sense strand
ccaacauccuucccaauga

SEQ ID NO: 527946 - RNA, 19 nt, Homo sapiens
  misc_RNA (1)...(19): siRNA sense strand
gaaagaaaggaaagaggaa

SEQ ID NO: 527947 - RNA, 19 nt, Homo sapiens
  misc_RNA (1)...(19): siRNA sense strand
ggaaacgguuaacgacuuc

SEQ ID NO: 527948 - RNA, 19 nt, Homo sapiens
  misc_RNA (1)...(19): siRNA sense strand
ccucagggcccaagaagua

SEQ ID NO: 527949 - RNA, 19 nt, Homo sapiens
  misc_RNA (1)...(19): siRNA sense strand
cgagugauccuuuccauga

SEQ ID NO: 527950 - RNA, 19 nt, Homo sapiens
  misc_RNA (1)...(19): siRNA sense strand
gcagaagguggauguguuu

SEQ ID NO: 527951 - RNA, 19 nt, Homo sapiens
  misc_RNA (1)...(19): siRNA sense strand
gcuacaaagugguacaaga

SEQ ID NO: 527952 - RNA, 19 nt, Homo sapiens
  misc_RNA (1)...(19): siRNA sense strand
gaggaggaguucaggaaau

SEQ ID NO: 527953 - RNA, 19 nt, Homo sapiens
  misc_RNA (1)...(19): siRNA sense strand
gaggacuucuggaggauga

SEQ ID NO: 527954 - RNA, 19 nt, Homo sapiens
  misc_RNA (1)...(19): siRNA sense strand
ggagagagagcaggauaaa

SEQ ID NO: 527955 - RNA, 19 nt, Homo sapiens
  misc_RNA (1)...(19): siRNA sense strand
ucaggaaauugacaaaugu

SEQ ID NO: 527956 - RNA, 19 nt, Homo sapiens
  misc_RNA (1)...(19): siRNA sense strand
agagagagcaggauaaaug

SEQ ID NO: 527957 - RNA, 19 nt, Homo sapiens
  misc_RNA (1)...(19): siRNA sense strand
acaaauguccggaucauga

SEQ ID NO: 527958 - RNA, 19 nt, Homo sapiens
  misc_RNA (1)...(19): siRNA sense strand
ccauugggaugcugaaguu

SEQ ID NO: 527959 - RNA, 19 nt, Homo sapiens
  misc_RNA (1)...(19): siRNA sense strand
guucaucuaccaagccuua

SEQ ID NO: 527960 - RNA, 19 nt, Homo sapiens
  misc_RNA (1)...(19): siRNA sense strand
gaagaugcccaacggaauc

SEQ ID NO: 527961 - RNA, 19 nt, Homo sapiens
  misc_RNA (1)...(19): siRNA sense strand
ugcaaacccuggaacagua

SEQ ID NO: 527962 - RNA, 19 nt, Homo sapiens
  misc_RNA (1)...(19): siRNA sense strand
ugaaguuccucaagaaagu

SEQ ID NO: 527963 - RNA, 19 nt, Homo sapiens
  misc_RNA (1)...(19): siRNA sense strand
gaaugauacccuuucagaa

SEQ ID NO: 527964 - RNA, 19 nt, Homo sapiens
  misc_RNA (1)...(19): siRNA sense strand
ggauggaauucccuguuca

SEQ ID NO: 527965 - RNA, 19 nt, Homo sapiens
  misc_RNA (1)...(19): siRNA sense strand
gauaugcaguacacguuca

SEQ ID NO: 527966 - RNA, 19 nt, Homo sapiens
  misc_RNA (1)...(19): siRNA sense strand
ccaaacaggaaacgguuaa

SEQ ID NO: 527967 - RNA, 19 nt, Homo sapiens
  misc_RNA (1)...(19): siRNA sense strand
cgacuucagagaccacaua

SEQ ID NO: 527968 - RNA, 19 nt, Homo sapiens
  misc_RNA (1)...(19): siRNA sense strand
ggagcugggcgaacaggua

SEQ ID NO: 527969 - RNA, 19 nt, Homo sapiens
  misc_RNA (1)...(19): siRNA sense strand
gagugauccuuuccaugaa

SEQ ID NO: 527970 - RNA, 19 nt, Homo sapiens
  misc_RNA (1)...(19): siRNA sense strand
gaauuugugucucgaaucc

SEQ ID NO: 527971 - RNA, 19 nt, Homo sapiens
  misc_RNA (1)...(19): siRNA sense strand
ggauguguuugaauuugug

SEQ ID NO: 527972 - RNA, 19 nt, Homo sapiens
  misc_RNA (1)...(19): siRNA sense strand
ggaggaugaucugggaaug

SEQ ID NO: 527973 - RNA, 19 nt, Homo sapiens
  misc_RNA (1)...(19): siRNA sense strand
gaagaaggccagggucauc

SEQ ID NO: 527974 - RNA, 19 nt, Homo sapiens
  misc_RNA (1)...(19): siRNA sense strand
ggaggaggaguucaggaaa

SEQ ID NO: 527975 - RNA, 19 nt, Homo sapiens
  misc_RNA (1)...(19): siRNA sense strand
gaaguuccucaagaaagua

SEQ ID NO: 527976 - RNA, 19 nt, Homo sapiens
  misc_RNA (1)...(19): siRNA sense strand
gaggaguucaggaaauuga

SEQ ID NO: 527977 - RNA, 19 nt, Homo sapiens
  misc_RNA (1)...(19): siRNA sense strand
ggacgggcaccuucauugu

SEQ ID NO: 527978 - RNA, 19 nt, Homo sapiens
  misc_RNA (1)...(19): siRNA sense strand
cuuccuacauagaugguua

SEQ ID NO: 527979 - RNA, 19 nt, Homo sapiens
  misc_RNA (1)...(19): siRNA sense strand
agaaugauacccuuucaga

SEQ ID NO: 527980 - RNA, 19 nt, Homo sapiens
  misc_RNA (1)...(19): siRNA sense strand
caaggcugcuggaccuaug

SEQ ID NO: 527981 - RNA, 19 nt, Homo sapiens
  misc_RNA (1)...(19): siRNA sense strand
agaauggucugggagcaaa

SEQ ID NO: 527982 - RNA, 19 nt, Homo sapiens
  misc_RNA (1)...(19): siRNA sense strand
guggaggacugcgugguuu

SEQ ID NO: 527983 - RNA, 19 nt, Homo sapiens
  misc_RNA (1)...(19): siRNA sense strand
guaugaauucugcuacaaa

SEQ ID NO: 527984 - RNA, 19 nt, Homo sapiens
  misc_RNA (1)...(19): siRNA sense strand
aaacggauaugcaguacac

SEQ ID NO: 527985 - RNA, 19 nt, Homo sapiens
  misc_RNA (1)...(19): siRNA sense strand
guaaucagcgcccucagau

SEQ ID NO: 527986 - RNA, 19 nt, Homo sapiens
  misc_RNA (1)...(19): siRNA sense strand
guggauguguuugaauuug

SEQ ID NO: 527987 - RNA, 19 nt, Homo sapiens
  misc_RNA (1)...(19): siRNA sense strand
ugugaucgaugccaugaug

SEQ ID NO: 527988 - RNA, 19 nt, Homo sapiens
  misc_RNA (1)...(19): siRNA sense strand
caacauccuucccaaugac

SEQ ID NO: 527989 - RNA, 19 nt, Homo sapiens
  misc_RNA (1)...(19): siRNA sense strand
caacgcauccuucauagac

SEQ ID NO: 527990 - RNA, 19 nt, Homo sapiens
  misc_RNA (1)...(19): siRNA sense strand
caaauguccggaucaugaa

SEQ ID NO: 527991 - RNA, 19 nt, Homo sapiens
  misc_RNA (1)...(19): siRNA sense strand
cauagaugguuacaaagag

SEQ ID NO: 527992 - RNA, 19 nt, Homo sapiens
  misc_RNA (1)...(19): siRNA sense strand
aggaaacgguuaacgacuu

SEQ ID NO: 527993 - RNA, 19 nt, Homo sapiens
  misc_RNA (1)...(19): siRNA sense strand
cuacaaagugguacaagau

SEQ ID NO: 527994 - RNA, 19 nt, Homo sapiens
  misc_RNA (1)...(19): siRNA sense strand
ggacacauacaaggaacuu

SEQ ID NO: 527995 - RNA, 19 nt, Homo sapiens
  misc_RNA (1)...(19): siRNA sense strand
ggaggagcagguccgagua

SEQ ID NO: 527996 - RNA, 19 nt, Homo sapiens
  misc_RNA (1)...(19): siRNA sense strand
gagacuuucuggucacucu

SEQ ID NO: 527997 - RNA, 19 nt, Homo sapiens
  misc_RNA (1)...(19): siRNA sense strand
ggaaaucccacacuaucgu

SEQ ID NO: 527998 - RNA, 19 nt, Homo sapiens
  misc_RNA (1)...(19): siRNA sense strand
gaugaucugggaauggaaa

SEQ ID NO: 527999 - RNA, 19 nt, Homo sapiens
  misc_RNA (1)...(19): siRNA sense strand
cgacagaaggacuauuuca

SEQ ID NO: 528000 - RNA, 19 nt, Homo sapiens
  misc_RNA (1)...(19): siRNA sense strand
gcaguacacguucaucuac

SEQ ID NO: 528001 - RNA, 19 nt, Homo sapiens
  misc_RNA (1)...(19): siRNA sense strand
ugaacuggcaaauaaagaa

SEQ ID NO: 528002 - RNA, 19 nt, Homo sapiens
  misc_RNA (1)...(19): siRNA sense strand
uaugaauucugcuacaaag

SEQ ID NO: 528003 - RNA, 19 nt, Homo sapiens
  misc_RNA (1)...(19): siRNA sense strand
gaacuggcaaauaaagaag

SEQ ID NO: 528004 - RNA, 19 nt, Homo sapiens
  misc_RNA (1)...(19): siRNA sense strand
gaacagguacauucauagc

SEQ ID NO: 528005 - RNA, 19 nt, Homo sapiens
  misc_RNA (1)...(19): siRNA sense strand
gagaaauaacgauugagau

SEQ ID NO: 528006 - RNA, 19 nt, Homo sapiens
  misc_RNA (1)...(19): siRNA sense strand
gaauacacagacuacauca

SEQ ID NO: 528007 - RNA, 19 nt, Homo sapiens
  misc_RNA (1)...(19): siRNA sense strand
gcaccuucauugugaucga

SEQ ID NO: 528008 - RNA, 19 nt, Homo sapiens
  misc_RNA (1)...(19): siRNA sense strand
ugaauucugcuacaaagug

SEQ ID NO: 528009 - RNA, 19 nt, Homo sapiens
  misc_RNA (1)...(19): siRNA sense strand
gcaaacccuggaacaguau

SEQ ID NO: 528010 - RNA, 19 nt, Homo sapiens
  misc_RNA (1)...(19): siRNA sense strand
caggagagagagcaggaua

SEQ ID NO: 528011 - RNA, 19 nt, Homo sapiens
  misc_RNA (1)...(19): siRNA sense strand
aggaggaguucaggaaauu

SEQ ID NO: 528012 - RNA, 19 nt, Homo sapiens
  misc_RNA (1)...(19): siRNA sense strand
gcugaaguuccucaagaaa

SEQ ID NO: 528013 - RNA, 19 nt, Homo sapiens
  misc_RNA (1)...(19): siRNA sense strand
ggucaagaauacacagacu

SEQ ID NO: 528014 - RNA, 19 nt, Homo sapiens
  misc_RNA (1)...(19): siRNA sense strand
uucaggaaauugacaaaug

SEQ ID NO: 528015 - RNA, 19 nt, Homo sapiens
  misc_RNA (1)...(19): siRNA sense strand
gcgaccaucgucauguuaa

SEQ ID NO: 528016 - RNA, 19 nt, Homo sapiens
  misc_RNA (1)...(19): siRNA sense strand
gggcucaguuacucaugga

SEQ ID NO: 528017 - RNA, 19 nt, Homo sapiens
  misc_RNA (1)...(19): siRNA sense strand
agaagcaccugcagaccau

SEQ ID NO: 528018 - RNA, 19 nt, Homo sapiens
  misc_RNA (1)...(19): siRNA sense strand
acaaggaacuuuugaacug

SEQ ID NO: 528019 - RNA, 19 nt, Homo sapiens
  misc_RNA (1)...(19): siRNA sense strand
acgggcaccuucauuguga

SEQ ID NO: 528020 - RNA, 19 nt, Homo sapiens
  misc_RNA (1)...(19): siRNA sense strand
acauagaugguuacaaaga

SEQ ID NO: 528021 - RNA, 19 nt, Homo sapiens
  misc_RNA (1)...(19): siRNA sense strand
cuucagagaccacauaugg

SEQ ID NO: 528022 - RNA, 19 nt, Homo sapiens
  misc_RNA (1)...(19): siRNA sense strand
cgagggacuuuuagaugua

SEQ ID NO: 528023 - RNA, 19 nt, Homo sapiens
  misc_RNA (1)...(19): siRNA sense strand
acagaaggacuauuucauc

SEQ ID NO: 528024 - RNA, 19 nt, Homo sapiens
  misc_RNA (1)...(19): siRNA sense strand
ugaaaaggggucaagaaua

SEQ ID NO: 528025 - RNA, 19 nt, Homo sapiens
  misc_RNA (1)...(19): siRNA sense strand
gcccucagaugguucaaac

SEQ ID NO: 528026 - RNA, 19 nt, Homo sapiens
  misc_RNA (1)...(19): siRNA sense strand
gagcagaagguggaugugu

SEQ ID NO: 528027 - RNA, 19 nt, Homo sapiens
  misc_RNA (1)...(19): siRNA sense strand
ugagccaacuggauggaau

SEQ ID NO: 528028 - RNA, 19 nt, Homo sapiens
  misc_RNA (1)...(19): siRNA sense strand
gguuacaaagagaagaaua

SEQ ID NO: 528029 - RNA, 19 nt, Homo sapiens
  misc_RNA (1)...(19): siRNA sense strand
auagaugguuacaaagaga

SEQ ID NO: 528030 - RNA, 19 nt, Homo sapiens
  misc_RNA (1)...(19): siRNA sense strand
gggcgaacagguacauuca

SEQ ID NO: 528031 - RNA, 19 nt, Homo sapiens
  misc_RNA (1)...(19): siRNA sense strand
gaaccuaacacgaaaguuu

SEQ ID NO: 528032 - RNA, 19 nt, Homo sapiens
  misc_RNA (1)...(19): siRNA sense strand
uaaggaugcuugauuauga

SEQ ID NO: 528033 - RNA, 19 nt, Homo sapiens
  misc_RNA (1)...(19): siRNA sense strand
gcuaauaccuuggacuuug

SEQ ID NO: 528034 - RNA, 19 nt, Homo sapiens
  misc_RNA (1)...(19): siRNA sense strand
gaaaacagcugaugaaggu

SEQ ID NO: 528035 - RNA, 19 nt, Homo sapiens
  misc_RNA (1)...(19): siRNA sense strand
gaagguacaaauacaagua

SEQ ID NO: 528036 - RNA, 19 nt, Homo sapiens
  misc_RNA (1)...(19): siRNA sense strand
aaacucgaauucaaccuua

SEQ ID NO: 528037 - RNA, 19 nt, Homo sapiens
  misc_RNA (1)...(19): siRNA sense strand
gaauggagcuauggacguu

SEQ ID NO: 528038 - RNA, 19 nt, Homo sapiens
  misc_RNA (1)...(19): siRNA sense strand
gggaaugccuuaugaccuu

SEQ ID NO: 528039 - RNA, 19 nt, Homo sapiens
  misc_RNA (1)...(19): siRNA sense strand
gcacuuggaacuuaaagaa

SEQ ID NO: 528040 - RNA, 19 nt, Homo sapiens
  misc_RNA (1)...(19): siRNA sense strand
ggccaagggucuacaauuc

SEQ ID NO: 528041 - RNA, 19 nt, Homo sapiens
  misc_RNA (1)...(19): siRNA sense strand
gaaggacaucugacaauga

SEQ ID NO: 528042 - RNA, 19 nt, Homo sapiens
  misc_RNA (1)...(19): siRNA sense strand
gcaaucaggccuaccagaa

SEQ ID NO: 528043 - RNA, 19 nt, Homo sapiens
  misc_RNA (1)...(19): siRNA sense strand
gcaaggggcugauagagaa

SEQ ID NO: 528044 - RNA, 19 nt, Homo sapiens
  misc_RNA (1)...(19): siRNA sense strand
cuuaugaccuugccauuga

SEQ ID NO: 528045 - RNA, 19 nt, Homo sapiens
  misc_RNA (1)...(19): siRNA sense strand
ccaaugagguagaucagau

SEQ ID NO: 528046 - RNA, 19 nt, Homo sapiens
  misc_RNA (1)...(19): siRNA sense strand
uuaaugagguuuacuaugc

SEQ ID NO: 528047 - RNA, 19 nt, Homo sapiens
  misc_RNA (1)...(19): siRNA sense strand
gcaauuuccugcuccucuu

SEQ ID NO: 528048 - RNA, 19 nt, Homo sapiens
  misc_RNA (1)...(19): siRNA sense strand
gcagugcaaucaagauagu

SEQ ID NO: 528049 - RNA, 19 nt, Homo sapiens
  misc_RNA (1)...(19): siRNA sense strand
gacaggaguuugugugcaa

SEQ ID NO: 528050 - RNA, 19 nt, Homo sapiens
  misc_RNA (1)...(19): siRNA sense strand
gagcuauggacguuaauuu

SEQ ID NO: 528051 - RNA, 19 nt, Homo sapiens
  misc_RNA (1)...(19): siRNA sense strand
gcugaugaagguacaaaua

SEQ ID NO: 528052 - RNA, 19 nt, Homo sapiens
  misc_RNA (1)...(19): siRNA sense strand
gaaguucaaagaccucauu

SEQ ID NO: 528053 - RNA, 19 nt, Homo sapiens
  misc_RNA (1)...(19): siRNA sense strand
aaaaguggauggaucguua

SEQ ID NO: 528054 - RNA, 19 nt, Homo sapiens
  misc_RNA (1)...(19): siRNA sense strand
gauggcacuuggaacuuaa

SEQ ID NO: 528055 - RNA, 19 nt, Homo sapiens
  misc_RNA (1)...(19): siRNA sense strand
ggcagaggauauaccagua

SEQ ID NO: 528056 - RNA, 19 nt, Homo sapiens
  misc_RNA (1)...(19): siRNA sense strand
gaaucaagcacagauagaa

SEQ ID NO: 528057 - RNA, 19 nt, Homo sapiens
  misc_RNA (1)...(19): siRNA sense strand
gaauucaaccuuauuaugc

SEQ ID NO: 528058 - RNA, 19 nt, Homo sapiens
  misc_RNA (1)...(19): siRNA sense strand
guucaaagaccucauuuua

SEQ ID NO: 528059 - RNA, 19 nt, Homo sapiens
  misc_RNA (1)...(19): siRNA sense strand
cuacauagugcauuugaaa

SEQ ID NO: 528060 - RNA, 19 nt, Homo sapiens
  misc_RNA (1)...(19): siRNA sense strand
gaacuuaguaucauucacu

SEQ ID NO: 528061 - RNA, 19 nt, Homo sapiens
  misc_RNA (1)...(19): siRNA sense strand
gcacugaagcuccuacaca

SEQ ID NO: 528062 - RNA, 19 nt, Homo sapiens
  misc_RNA (1)...(19): siRNA sense strand
uaacauucuuggaguggaa

SEQ ID NO: 528063 - RNA, 19 nt, Homo sapiens
  misc_RNA (1)...(19): siRNA sense strand
aaacucauccuguucaaga

SEQ ID NO: 528064 - RNA, 19 nt, Homo sapiens
  misc_RNA (1)...(19): siRNA sense strand
gcuauggacguuaauuuga

SEQ ID NO: 528065 - RNA, 19 nt, Homo sapiens
  misc_RNA (1)...(19): siRNA sense strand
agauggcacuuggaacuua

SEQ ID NO: 528066 - RNA, 19 nt, Homo sapiens
  misc_RNA (1)...(19): siRNA sense strand
ugagguagaucagaugaau

SEQ ID NO: 528067 - RNA, 19 nt, Homo sapiens
  misc_RNA (1)...(19): siRNA sense strand
ugaaggacaucugacaaug

SEQ ID NO: 528068 - RNA, 19 nt, Homo sapiens
  misc_RNA (1)...(19): siRNA sense strand
gaacuuaaagaagaccaaa

SEQ ID NO: 528069 - RNA, 19 nt, Homo sapiens
  misc_RNA (1)...(19): siRNA sense strand
ccaggaacccguaaacuuc

SEQ ID NO: 528070 - RNA, 19 nt, Homo sapiens
  misc_RNA (1)...(19): siRNA sense strand
ucaaagaccucauuuuaag

SEQ ID NO: 528071 - RNA, 19 nt, Homo sapiens
  misc_RNA (1)...(19): siRNA sense strand
uuacaugacugaaggacau

SEQ ID NO: 528072 - RNA, 19 nt, Homo sapiens
  misc_RNA (1)...(19): siRNA sense strand
uggcaguucuugucaguug

SEQ ID NO: 528073 - RNA, 19 nt, Homo sapiens
  misc_RNA (1)...(19): siRNA sense strand
ccaagagacuggcauagcu

SEQ ID NO: 528074 - RNA, 19 nt, Homo sapiens
  misc_RNA (1)...(19): siRNA sense strand
cgaauucaaccuuauuaug

SEQ ID NO: 528075 - RNA, 19 nt, Homo sapiens
  misc_RNA (1)...(19): siRNA sense strand
uacggucgcugacuacuug

SEQ ID NO: 528076 - RNA, 19 nt, Homo sapiens
  misc_RNA (1)...(19): siRNA sense strand
caaacgcagugcaaucaag

SEQ ID NO: 528077 - RNA, 19 nt, Homo sapiens
  misc_RNA (1)...(19): siRNA sense strand
ggacauccaacauaccaau

SEQ ID NO: 528078 - RNA, 19 nt, Homo sapiens
  misc_RNA (1)...(19): siRNA sense strand
ccguaaacuucauaacauu

SEQ ID NO: 528079 - RNA, 19 nt, Homo sapiens
  misc_RNA (1)...(19): siRNA sense strand
gacagguuguaaaggcaua

SEQ ID NO: 528080 - RNA, 19 nt, Homo sapiens
  misc_RNA (1)...(19): siRNA sense strand
gcacauuacaugacugaag

SEQ ID NO: 528081 - RNA, 19 nt, Homo sapiens
  misc_RNA (1)...(19): siRNA sense strand
ccaccaccauggacaacaa

SEQ ID NO: 528082 - RNA, 19 nt, Homo sapiens
  misc_RNA (1)...(19): siRNA sense strand
gcagcacaguuucuucaag

SEQ ID NO: 528083 - RNA, 19 nt, Homo sapiens
  misc_RNA (1)...(19): siRNA sense strand
cauuugaaacgccacuuua

SEQ ID NO: 528084 - RNA, 19 nt, Homo sapiens
  misc_RNA (1)...(19): siRNA sense strand
gaugaagguacaaauacaa

SEQ ID NO: 528085 - RNA, 19 nt, Homo sapiens
  misc_RNA (1)...(19): siRNA sense strand
gcauuugaaacgccacuuu

SEQ ID NO: 528086 - RNA, 19 nt, Homo sapiens
  misc_RNA (1)...(19): siRNA sense strand
gaacccguaaacuucauaa

SEQ ID NO: 528087 - RNA, 19 nt, Homo sapiens
  misc_RNA (1)...(19): siRNA sense strand
gaaaguuugcgcaacagau

SEQ ID NO: 528088 - RNA, 19 nt, Homo sapiens
  misc_RNA (1)...(19): siRNA sense strand
ugaugaagguacaaauaca

SEQ ID NO: 528089 - RNA, 19 nt, Homo sapiens
  misc_RNA (1)...(19): siRNA sense strand
ggagagacuucagcaugca

SEQ ID NO: 528090 - RNA, 19 nt, Homo sapiens
  misc_RNA (1)...(19): siRNA sense strand
cacgaaaguuugcgcaaca

SEQ ID NO: 528091 - RNA, 19 nt, Homo sapiens
  misc_RNA (1)...(19): siRNA sense strand
caaguaauaguguaucuac

SEQ ID NO: 528092 - RNA, 19 nt, Homo sapiens
  misc_RNA (1)...(19): siRNA sense strand
acuuggaacuuaaagaaga

SEQ ID NO: 528093 - RNA, 19 nt, Homo sapiens
  misc_RNA (1)...(19): siRNA sense strand
gagguagaucagaugaaua

SEQ ID NO: 528094 - RNA, 19 nt, Homo sapiens
  misc_RNA (1)...(19): siRNA sense strand
agguagaucagaugaauaa

SEQ ID NO: 528095 - RNA, 19 nt, Homo sapiens
  misc_RNA (1)...(19): siRNA sense strand
caacgaauagcuccucuac

SEQ ID NO: 528096 - RNA, 19 nt, Homo sapiens
  misc_RNA (1)...(19): siRNA sense strand
uuaaagaagaccaaagaug

SEQ ID NO: 528097 - RNA, 19 nt, Homo sapiens
  misc_RNA (1)...(19): siRNA sense strand
gguauuccaccugcucaua

SEQ ID NO: 528098 - RNA, 19 nt, Homo sapiens
  misc_RNA (1)...(19): siRNA sense strand
cccguaaacuucauaacau

SEQ ID NO: 528099 - RNA, 19 nt, Homo sapiens
  misc_RNA (1)...(19): siRNA sense strand
ccaagggucuacaauucuc

SEQ ID NO: 528100 - RNA, 19 nt, Homo sapiens
  misc_RNA (1)...(19): siRNA sense strand
ugaaacgccacuuuauguu

SEQ ID NO: 528101 - RNA, 19 nt, Homo sapiens
  misc_RNA (1)...(19): siRNA sense strand
aaucaggccuaccagaauc

SEQ ID NO: 528102 - RNA, 19 nt, Homo sapiens
  misc_RNA (1)...(19): siRNA sense strand
cagauucagcaaccucuaa

SEQ ID NO: 528103 - RNA, 19 nt, Homo sapiens
  misc_RNA (1)...(19): siRNA sense strand
ccaagauucuauggagguu

SEQ ID NO: 528104 - RNA, 19 nt, Homo sapiens
  misc_RNA (1)...(19): siRNA sense strand
uaaugagguuuacuaugca

SEQ ID NO: 528105 - RNA, 19 nt, Homo sapiens
  misc_RNA (1)...(19): siRNA sense strand
ggacagaauggagcuaugg

SEQ ID NO: 528106 - RNA, 19 nt, Homo sapiens
  misc_RNA (1)...(19): siRNA sense strand
caaucaggccuaccagaau

SEQ ID NO: 528107 - RNA, 19 nt, Homo sapiens
  misc_RNA (1)...(19): siRNA sense strand
uguugaaacucauccuguu

SEQ ID NO: 528108 - RNA, 19 nt, Homo sapiens
  misc_RNA (1)...(19): siRNA sense strand
caagaaaacagcugaugaa

SEQ ID NO: 528109 - RNA, 19 nt, Homo sapiens
  misc_RNA (1)...(19): siRNA sense strand
gcauauuaaugagguuuac

SEQ ID NO: 528110 - RNA, 19 nt, Homo sapiens
  misc_RNA (1)...(19): siRNA sense strand
ggaacccguaaacuucaua

SEQ ID NO: 528111 - RNA, 19 nt, Homo sapiens
  misc_RNA (1)...(19): siRNA sense strand
gaguacaaaccaccaggaa

SEQ ID NO: 528112 - RNA, 19 nt, Homo sapiens
  misc_RNA (1)...(19): siRNA sense strand
aaagaagaccaaagaugga

SEQ ID NO: 528113 - RNA, 19 nt, Homo sapiens
  misc_RNA (1)...(19): siRNA sense strand
uuugagaaguugccagaug

SEQ ID NO: 528114 - RNA, 19 nt, Homo sapiens
  misc_RNA (1)...(19): siRNA sense strand
uauuccaccugcucauauu

SEQ ID NO: 528115 - RNA, 19 nt, Homo sapiens
  misc_RNA (1)...(19): siRNA sense strand
ugaaaugcacacuggagaa

SEQ ID NO: 528116 - RNA, 19 nt, Homo sapiens
  misc_RNA (1)...(19): siRNA sense strand
ucagcaaccucuaacuaac

SEQ ID NO: 528117 - RNA, 19 nt, Homo sapiens
  misc_RNA (1)...(19): siRNA sense strand
uaguggaaguucuggguau

SEQ ID NO: 528118 - RNA, 19 nt, Homo sapiens
  misc_RNA (1)...(19): siRNA sense strand
gaaaugcacacuggagaac

SEQ ID NO: 528119 - RNA, 19 nt, Homo sapiens
  misc_RNA (1)...(19): siRNA sense strand
cagaggugcuacugggaau

SEQ ID NO: 528120 - RNA, 19 nt, Homo sapiens
  misc_RNA (1)...(19): siRNA sense strand
cggaagguuuacaaugaug

SEQ ID NO: 528121 - RNA, 19 nt, Homo sapiens
  misc_RNA (1)...(19): siRNA sense strand
aaggacaucugacaaugag

SEQ ID NO: 528122 - RNA, 19 nt, Homo sapiens
  misc_RNA (1)...(19): siRNA sense strand
caugcaaaccuucaucugu

SEQ ID NO: 528123 - RNA, 19 nt, Homo sapiens
  misc_RNA (1)...(19): siRNA sense strand
guauuccaccugcucauau

SEQ ID NO: 528124 - RNA, 19 nt, Homo sapiens
  misc_RNA (1)...(19): siRNA sense strand
cuaauaccuuggacuuugg

SEQ ID NO: 528125 - RNA, 19 nt, Homo sapiens
  misc_RNA (1)...(19): siRNA sense strand
aaacgcagugcaaucaaga

SEQ ID NO: 528126 - RNA, 19 nt, Homo sapiens
  misc_RNA (1)...(19): siRNA sense strand
gccacuuuauguuucgaaa

SEQ ID NO: 528127 - RNA, 19 nt, Homo sapiens
  misc_RNA (1)...(19): siRNA sense strand
uugaaacgccacuuuaugu

SEQ ID NO: 528128 - RNA, 19 nt, Homo sapiens
  misc_RNA (1)...(19): siRNA sense strand
uacugggaaugccuuauga

SEQ ID NO: 528129 - RNA, 19 nt, Homo sapiens
  misc_RNA (1)...(19): siRNA sense strand
ggagcuauggacguuaauu

SEQ ID NO: 528130 - RNA, 19 nt, Homo sapiens
  misc_RNA (1)...(19): siRNA sense strand
cauccaacauaccaauuuu

SEQ ID NO: 528131 - RNA, 19 nt, Homo sapiens
  misc_RNA (1)...(19): siRNA sense strand
gaaccuaacacgaaaguuu

SEQ ID NO: 528132 - RNA, 19 nt, Homo sapiens
  misc_RNA (1)...(19): siRNA sense strand
uaaggaugcuugauuauga

SEQ ID NO: 528133 - RNA, 19 nt, Homo sapiens
  misc_RNA (1)...(19): siRNA sense strand
gaaaacagcugaugaaggu

SEQ ID NO: 528134 - RNA, 19 nt, Homo sapiens
  misc_RNA (1)...(19): siRNA sense strand
gaagguacaaauacaagua

SEQ ID NO: 528135 - RNA, 19 nt, Homo sapiens
  misc_RNA (1)...(19): siRNA sense strand
aaacucgaauucaaccuua

SEQ ID NO: 528136 - RNA, 19 nt, Homo sapiens
  misc_RNA (1)...(19): siRNA sense strand
gggaaugccuuaugaccuu

SEQ ID NO: 528137 - RNA, 19 nt, Homo sapiens
  misc_RNA (1)...(19): siRNA sense strand
gcacuuggaacuuaaagaa

SEQ ID NO: 528138 - RNA, 19 nt, Homo sapiens
  misc_RNA (1)...(19): siRNA sense strand
cuuaugaccuugccauuga

SEQ ID NO: 528139 - RNA, 19 nt, Homo sapiens
  misc_RNA (1)...(19): siRNA sense strand
ccaaugagguagaucagau

SEQ ID NO: 528140 - RNA, 19 nt, Homo sapiens
  misc_RNA (1)...(19): siRNA sense strand
uuaaugagguuuacuaugc

SEQ ID NO: 528141 - RNA, 19 nt, Homo sapiens
  misc_RNA (1)...(19): siRNA sense strand
gcagugcaaucaagauagu

SEQ ID NO: 528142 - RNA, 19 nt, Homo sapiens
  misc_RNA (1)...(19): siRNA sense strand
gcugaugaagguacaaaua

SEQ ID NO: 528143 - RNA, 19 nt, Homo sapiens
  misc_RNA (1)...(19): siRNA sense strand
gaaguucaaagaccucauu

SEQ ID NO: 528144 - RNA, 19 nt, Homo sapiens
  misc_RNA (1)...(19): siRNA sense strand
aaaaguggauggaucguua

SEQ ID NO: 528145 - RNA, 19 nt, Homo sapiens
  misc_RNA (1)...(19): siRNA sense strand
gauggcacuuggaacuuaa

SEQ ID NO: 528146 - RNA, 19 nt, Homo sapiens
  misc_RNA (1)...(19): siRNA sense strand
ggcagaggauauaccagua

SEQ ID NO: 528147 - RNA, 19 nt, Homo sapiens
  misc_RNA (1)...(19): siRNA sense strand
gaaucaagcacagauagaa

SEQ ID NO: 528148 - RNA, 19 nt, Homo sapiens
  misc_RNA (1)...(19): siRNA sense strand
gaauucaaccuuauuaugc

SEQ ID NO: 528149 - RNA, 19 nt, Homo sapiens
  misc_RNA (1)...(19): siRNA sense strand
guucaaagaccucauuuua

SEQ ID NO: 528150 - RNA, 19 nt, Homo sapiens
  misc_RNA (1)...(19): siRNA sense strand
cuacauagugcauuugaaa

SEQ ID NO: 528151 - RNA, 19 nt, Homo sapiens
  misc_RNA (1)...(19): siRNA sense strand
gaacuuaguaucauucacu

SEQ ID NO: 528152 - RNA, 19 nt, Homo sapiens
  misc_RNA (1)...(19): siRNA sense strand
uaacauucuuggaguggaa

SEQ ID NO: 528153 - RNA, 19 nt, Homo sapiens
  misc_RNA (1)...(19): siRNA sense strand
agauggcacuuggaacuua

SEQ ID NO: 528154 - RNA, 19 nt, Homo sapiens
  misc_RNA (1)...(19): siRNA sense strand
ugagguagaucagaugaau

SEQ ID NO: 528155 - RNA, 19 nt, Homo sapiens
  misc_RNA (1)...(19): siRNA sense strand
gaacuuaaagaagaccaaa

SEQ ID NO: 528156 - RNA, 19 nt, Homo sapiens
  misc_RNA (1)...(19): siRNA sense strand
ccaggaacccguaaacuuc

SEQ ID NO: 528157 - RNA, 19 nt, Homo sapiens
  misc_RNA (1)...(19): siRNA sense strand
ucaaagaccucauuuuaag

SEQ ID NO: 528158 - RNA, 19 nt, Homo sapiens
  misc_RNA (1)...(19): siRNA sense strand
uggcaguucuugucaguug

SEQ ID NO: 528159 - RNA, 19 nt, Homo sapiens
  misc_RNA (1)...(19): siRNA sense strand
cgaauucaaccuuauuaug

SEQ ID NO: 528160 - RNA, 19 nt, Homo sapiens
  misc_RNA (1)...(19): siRNA sense strand
uacggucgcugacuacuug

SEQ ID NO: 528161 - RNA, 19 nt, Homo sapiens
  misc_RNA (1)...(19): siRNA sense strand
caaacgcagugcaaucaag

SEQ ID NO: 528162 - RNA, 19 nt, Homo sapiens
  misc_RNA (1)...(19): siRNA sense strand
ccguaaacuucauaacauu

SEQ ID NO: 528163 - RNA, 19 nt, Homo sapiens
  misc_RNA (1)...(19): siRNA sense strand
gacagguuguaaaggcaua

SEQ ID NO: 528164 - RNA, 19 nt, Homo sapiens
  misc_RNA (1)...(19): siRNA sense strand
gcagcacaguuucuucaag

SEQ ID NO: 528165 - RNA, 19 nt, Homo sapiens
  misc_RNA (1)...(19): siRNA sense strand
cauuugaaacgccacuuua

SEQ ID NO: 528166 - RNA, 19 nt, Homo sapiens
  misc_RNA (1)...(19): siRNA sense strand
gaugaagguacaaauacaa

SEQ ID NO: 528167 - RNA, 19 nt, Homo sapiens
  misc_RNA (1)...(19): siRNA sense strand
gcauuugaaacgccacuuu

SEQ ID NO: 528168 - RNA, 19 nt, Homo sapiens
  misc_RNA (1)...(19): siRNA sense strand
gaacccguaaacuucauaa

SEQ ID NO: 528169 - RNA, 19 nt, Homo sapiens
  misc_RNA (1)...(19): siRNA sense strand
gaaaguuugcgcaacagau

SEQ ID NO: 528170 - RNA, 19 nt, Homo sapiens
  misc_RNA (1)...(19): siRNA sense strand
ggagagacuucagcaugca

SEQ ID NO: 528171 - RNA, 19 nt, Homo sapiens
  misc_RNA (1)...(19): siRNA sense strand
ugaugaagguacaaauaca

SEQ ID NO: 528172 - RNA, 19 nt, Homo sapiens
  misc_RNA (1)...(19): siRNA sense strand
cacgaaaguuugcgcaaca

SEQ ID NO: 528173 - RNA, 19 nt, Homo sapiens
  misc_RNA (1)...(19): siRNA sense strand
caaguaauaguguaucuac

SEQ ID NO: 528174 - RNA, 19 nt, Homo sapiens
  misc_RNA (1)...(19): siRNA sense strand
acuuggaacuuaaagaaga

SEQ ID NO: 528175 - RNA, 19 nt, Homo sapiens
  misc_RNA (1)...(19): siRNA sense strand
gagguagaucagaugaaua

SEQ ID NO: 528176 - RNA, 19 nt, Homo sapiens
  misc_RNA (1)...(19): siRNA sense strand
agguagaucagaugaauaa

SEQ ID NO: 528177 - RNA, 19 nt, Homo sapiens
  misc_RNA (1)...(19): siRNA sense strand
uuaaagaagaccaaagaug

SEQ ID NO: 528178 - RNA, 19 nt, Homo sapiens
  misc_RNA (1)...(19): siRNA sense strand
gguauuccaccugcucaua

SEQ ID NO: 528179 - RNA, 19 nt, Homo sapiens
  misc_RNA (1)...(19): siRNA sense strand
cccguaaacuucauaacau

SEQ ID NO: 528180 - RNA, 19 nt, Homo sapiens
  misc_RNA (1)...(19): siRNA sense strand
ugaaacgccacuuuauguu

SEQ ID NO: 528181 - RNA, 19 nt, Homo sapiens
  misc_RNA (1)...(19): siRNA sense strand
cagauucagcaaccucuaa

SEQ ID NO: 528182 - RNA, 19 nt, Homo sapiens
  misc_RNA (1)...(19): siRNA sense strand
uaaugagguuuacuaugca

SEQ ID NO: 528183 - RNA, 19 nt, Homo sapiens
  misc_RNA (1)...(19): siRNA sense strand
caagaaaacagcugaugaa

SEQ ID NO: 528184 - RNA, 19 nt, Homo sapiens
  misc_RNA (1)...(19): siRNA sense strand
ggaacccguaaacuucaua

SEQ ID NO: 528185 - RNA, 19 nt, Homo sapiens
  misc_RNA (1)...(19): siRNA sense strand
gaguacaaaccaccaggaa

SEQ ID NO: 528186 - RNA, 19 nt, Homo sapiens
  misc_RNA (1)...(19): siRNA sense strand
aaagaagaccaaagaugga

SEQ ID NO: 528187 - RNA, 19 nt, Homo sapiens
  misc_RNA (1)...(19): siRNA sense strand
gcauauuaaugagguuuac

SEQ ID NO: 528188 - RNA, 19 nt, Homo sapiens
  misc_RNA (1)...(19): siRNA sense strand
uuugagaaguugccagaug

SEQ ID NO: 528189 - RNA, 19 nt, Homo sapiens
  misc_RNA (1)...(19): siRNA sense strand
uauuccaccugcucauauu

SEQ ID NO: 528190 - RNA, 19 nt, Homo sapiens
  misc_RNA (1)...(19): siRNA sense strand
ugaaaugcacacuggagaa

SEQ ID NO: 528191 - RNA, 19 nt, Homo sapiens
  misc_RNA (1)...(19): siRNA sense strand
ucagcaaccucuaacuaac

SEQ ID NO: 528192 - RNA, 19 nt, Homo sapiens
  misc_RNA (1)...(19): siRNA sense strand
uaguggaaguucuggguau

SEQ ID NO: 528193 - RNA, 19 nt, Homo sapiens
  misc_RNA (1)...(19): siRNA sense strand
gaaaugcacacuggagaac

SEQ ID NO: 528194 - RNA, 19 nt, Homo sapiens
  misc_RNA (1)...(19): siRNA sense strand
cagaggugcuacugggaau

SEQ ID NO: 528195 - RNA, 19 nt, Homo sapiens
  misc_RNA (1)...(19): siRNA sense strand
caugcaaaccuucaucugu

SEQ ID NO: 528196 - RNA, 19 nt, Homo sapiens
  misc_RNA (1)...(19): siRNA sense strand
cggaagguuuacaaugaug

SEQ ID NO: 528197 - RNA, 19 nt, Homo sapiens
  misc_RNA (1)...(19): siRNA sense strand
guauuccaccugcucauau

SEQ ID NO: 528198 - RNA, 19 nt, Homo sapiens
  misc_RNA (1)...(19): siRNA sense strand
uugaaacgccacuuuaugu

SEQ ID NO: 528199 - RNA, 19 nt, Homo sapiens
  misc_RNA (1)...(19): siRNA sense strand
uacugggaaugccuuauga

SEQ ID NO: 528200 - RNA, 19 nt, Homo sapiens
  misc_RNA (1)...(19): siRNA sense strand
aaacgcagugcaaucaaga

SEQ ID NO: 528201 - RNA, 19 nt, Homo sapiens
  misc_RNA (1)...(19): siRNA sense strand
gccacuuuauguuucgaaa

SEQ ID NO: 528202 - RNA, 19 nt, Homo sapiens
  misc_RNA (1)...(19): siRNA sense strand
cuuugaaccuaacacgaaa

SEQ ID NO: 528203 - RNA, 19 nt, Homo sapiens
  misc_RNA (1)...(19): siRNA sense strand
ggcaccaccuccaguacau

SEQ ID NO: 528204 - RNA, 19 nt, Homo sapiens
  misc_RNA (1)...(19): siRNA sense strand
guucaguggugccaaugag

SEQ ID NO: 528205 - RNA, 19 nt, Homo sapiens
  misc_RNA (1)...(19): siRNA sense strand
auaguugacuuuggcaguu

SEQ ID NO: 528206 - RNA, 19 nt, Homo sapiens
  misc_RNA (1)...(19): siRNA sense strand
uccagaacuuaguaucauu

SEQ ID NO: 528207 - RNA, 19 nt, Homo sapiens
  misc_RNA (1)...(19): siRNA sense strand
aaaguuugcgcaacagaug

SEQ ID NO: 528208 - RNA, 19 nt, Homo sapiens
  misc_RNA (1)...(19): siRNA sense strand
ugaaucaagcacagauaga

SEQ ID NO: 528209 - RNA, 19 nt, Homo sapiens
  misc_RNA (1)...(19): siRNA sense strand
ccagauggcacuuggaacu

SEQ ID NO: 528210 - RNA, 19 nt, Homo sapiens
  misc_RNA (1)...(19): siRNA sense strand
gaccuugccauugauaugu

SEQ ID NO: 528211 - RNA, 19 nt, Homo sapiens
  misc_RNA (1)...(19): siRNA sense strand
ccagaacuuaguaucauuc

SEQ ID NO: 528212 - RNA, 19 nt, Homo sapiens
  misc_RNA (1)...(19): siRNA sense strand
cuacugggaaugccuuaug

SEQ ID NO: 528213 - RNA, 19 nt, Homo sapiens
  misc_RNA (1)...(19): siRNA sense strand
gaucaaaacauacaagcau

SEQ ID NO: 528214 - RNA, 19 nt, Homo sapiens
  misc_RNA (1)...(19): siRNA sense strand
caagcauauuaaugagguu

SEQ ID NO: 528215 - RNA, 19 nt, Homo sapiens
  misc_RNA (1)...(19): siRNA sense strand
gaagaccaaagauggaaaa

SEQ ID NO: 528216 - RNA, 19 nt, Homo sapiens
  misc_RNA (1)...(19): siRNA sense strand
gcgacuccagaacuuagua

SEQ ID NO: 528217 - RNA, 19 nt, Homo sapiens
  misc_RNA (1)...(19): siRNA sense strand
ccccaaaacucgaauucaa

SEQ ID NO: 528218 - RNA, 19 nt, Homo sapiens
  misc_RNA (1)...(19): siRNA sense strand
uuaaggaugcuugauuaug

SEQ ID NO: 528219 - RNA, 19 nt, Homo sapiens
  misc_RNA (1)...(19): siRNA sense strand
gaagcgaagacaccaacag

SEQ ID NO: 528220 - RNA, 19 nt, Homo sapiens
  misc_RNA (1)...(19): siRNA sense strand
caccugcucauauucuuga

SEQ ID NO: 528221 - RNA, 19 nt, Homo sapiens
  misc_RNA (1)...(19): siRNA sense strand
acgcagugcaaucaagaua

SEQ ID NO: 528222 - RNA, 19 nt, Homo sapiens
  misc_RNA (1)...(19): siRNA sense strand
ucuuugaaccuaacacgaa

SEQ ID NO: 528223 - RNA, 19 nt, Homo sapiens
  misc_RNA (1)...(19): siRNA sense strand
uucagcaaccucuaacuaa

SEQ ID NO: 528224 - RNA, 19 nt, Homo sapiens
  misc_RNA (1)...(19): siRNA sense strand
caggaacccguaaacuuca

SEQ ID NO: 528225 - RNA, 19 nt, Homo sapiens
  misc_RNA (1)...(19): siRNA sense strand
acuuaaagaagaccaaaga

SEQ ID NO: 528226 - RNA, 19 nt, Homo sapiens
  misc_RNA (1)...(19): siRNA sense strand
caaugagguagaucagaug

SEQ ID NO: 528227 - RNA, 19 nt, Homo sapiens
  misc_RNA (1)...(19): siRNA sense strand
ggaacuuaaagaagaccaa

SEQ ID NO: 528228 - RNA, 19 nt, Homo sapiens
  misc_RNA (1)...(19): siRNA sense strand
ccaaacgcagugcaaucaa

SEQ ID NO: 528229 - RNA, 19 nt, Homo sapiens
  misc_RNA (1)...(19): siRNA sense strand
gcaugcaaaccuucaucug

SEQ ID NO: 528230 - RNA, 19 nt, Homo sapiens
  misc_RNA (1)...(19): siRNA sense strand
ugaccuugccauugauaug

SEQ ID NO: 528231 - RNA, 19 nt, Homo sapiens
  misc_RNA (1)...(19): siRNA sense strand
gaaccuaacacgaaaguuu

SEQ ID NO: 528232 - RNA, 19 nt, Homo sapiens
  misc_RNA (1)...(19): siRNA sense strand
uaaggaugcuugauuauga

SEQ ID NO: 528233 - RNA, 19 nt, Homo sapiens
  misc_RNA (1)...(19): siRNA sense strand
gcuaauaccuuggacuuug

SEQ ID NO: 528234 - RNA, 19 nt, Homo sapiens
  misc_RNA (1)...(19): siRNA sense strand
gaaaacagcugaugaaggu

SEQ ID NO: 528235 - RNA, 19 nt, Homo sapiens
  misc_RNA (1)...(19): siRNA sense strand
gaagguacaaauacaagua

SEQ ID NO: 528236 - RNA, 19 nt, Homo sapiens
  misc_RNA (1)...(19): siRNA sense strand
aaacucgaauucaaccuua

SEQ ID NO: 528237 - RNA, 19 nt, Homo sapiens
  misc_RNA (1)...(19): siRNA sense strand
gaauggagcuauggacguu

SEQ ID NO: 528238 - RNA, 19 nt, Homo sapiens
  misc_RNA (1)...(19): siRNA sense strand
gggaaugccuuaugaccuu

SEQ ID NO: 528239 - RNA, 19 nt, Homo sapiens
  misc_RNA (1)...(19): siRNA sense strand
gcacuuggaacuuaaagaa

SEQ ID NO: 528240 - RNA, 19 nt, Homo sapiens
  misc_RNA (1)...(19): siRNA sense strand
ggccaagggucuacaauuc

SEQ ID NO: 528241 - RNA, 19 nt, Homo sapiens
  misc_RNA (1)...(19): siRNA sense strand
gaaggacaucugacaauga

SEQ ID NO: 528242 - RNA, 19 nt, Homo sapiens
  misc_RNA (1)...(19): siRNA sense strand
gcaaucaggccuaccagaa

SEQ ID NO: 528243 - RNA, 19 nt, Homo sapiens
  misc_RNA (1)...(19): siRNA sense strand
gcaaggggcugauagagaa

SEQ ID NO: 528244 - RNA, 19 nt, Homo sapiens
  misc_RNA (1)...(19): siRNA sense strand
cuuaugaccuugccauuga

SEQ ID NO: 528245 - RNA, 19 nt, Homo sapiens
  misc_RNA (1)...(19): siRNA sense strand
ccaaugagguagaucagau

SEQ ID NO: 528246 - RNA, 19 nt, Homo sapiens
  misc_RNA (1)...(19): siRNA sense strand
uuaaugagguuuacuaugc

SEQ ID NO: 528247 - RNA, 19 nt, Homo sapiens
  misc_RNA (1)...(19): siRNA sense strand
gcaauuuccugcuccucuu

SEQ ID NO: 528248 - RNA, 19 nt, Homo sapiens
  misc_RNA (1)...(19): siRNA sense strand
gcagugcaaucaagauagu

SEQ ID NO: 528249 - RNA, 19 nt, Homo sapiens
  misc_RNA (1)...(19): siRNA sense strand
gacaggaguuugugugcaa

SEQ ID NO: 528250 - RNA, 19 nt, Homo sapiens
  misc_RNA (1)...(19): siRNA sense strand
gagcuauggacguuaauuu

SEQ ID NO: 528251 - RNA, 19 nt, Homo sapiens
  misc_RNA (1)...(19): siRNA sense strand
gcugaugaagguacaaaua

SEQ ID NO: 528252 - RNA, 19 nt, Homo sapiens
  misc_RNA (1)...(19): siRNA sense strand
gaaguucaaagaccucauu

SEQ ID NO: 528253 - RNA, 19 nt, Homo sapiens
  misc_RNA (1)...(19): siRNA sense strand
aaaaguggauggaucguua

SEQ ID NO: 528254 - RNA, 19 nt, Homo sapiens
  misc_RNA (1)...(19): siRNA sense strand
gauggcacuuggaacuuaa

SEQ ID NO: 528255 - RNA, 19 nt, Homo sapiens
  misc_RNA (1)...(19): siRNA sense strand
ggcagaggauauaccagua

SEQ ID NO: 528256 - RNA, 19 nt, Homo sapiens
  misc_RNA (1)...(19): siRNA sense strand
gaaucaagcacagauagaa

SEQ ID NO: 528257 - RNA, 19 nt, Homo sapiens
  misc_RNA (1)...(19): siRNA sense strand
gaauucaaccuuauuaugc

SEQ ID NO: 528258 - RNA, 19 nt, Homo sapiens
  misc_RNA (1)...(19): siRNA sense strand
guucaaagaccucauuuua

SEQ ID NO: 528259 - RNA, 19 nt, Homo sapiens
  misc_RNA (1)...(19): siRNA sense strand
cuacauagugcauuugaaa

SEQ ID NO: 528260 - RNA, 19 nt, Homo sapiens
  misc_RNA (1)...(19): siRNA sense strand
gaacuuaguaucauucacu

SEQ ID NO: 528261 - RNA, 19 nt, Homo sapiens
  misc_RNA (1)...(19): siRNA sense strand
gcacugaagcuccuacaca

SEQ ID NO: 528262 - RNA, 19 nt, Homo sapiens
  misc_RNA (1)...(19): siRNA sense strand
uaacauucuuggaguggaa

SEQ ID NO: 528263 - RNA, 19 nt, Homo sapiens
  misc_RNA (1)...(19): siRNA sense strand
aaacucauccuguucaaga

SEQ ID NO: 528264 - RNA, 19 nt, Homo sapiens
  misc_RNA (1)...(19): siRNA sense strand
gcuauggacguuaauuuga

SEQ ID NO: 528265 - RNA, 19 nt, Homo sapiens
  misc_RNA (1)...(19): siRNA sense strand
agauggcacuuggaacuua

SEQ ID NO: 528266 - RNA, 19 nt, Homo sapiens
  misc_RNA (1)...(19): siRNA sense strand
ugagguagaucagaugaau

SEQ ID NO: 528267 - RNA, 19 nt, Homo sapiens
  misc_RNA (1)...(19): siRNA sense strand
ugaaggacaucugacaaug

SEQ ID NO: 528268 - RNA, 19 nt, Homo sapiens
  misc_RNA (1)...(19): siRNA sense strand
gaacuuaaagaagaccaaa

SEQ ID NO: 528269 - RNA, 19 nt, Homo sapiens
  misc_RNA (1)...(19): siRNA sense strand
ccaggaacccguaaacuuc

SEQ ID NO: 528270 - RNA, 19 nt, Homo sapiens
  misc_RNA (1)...(19): siRNA sense strand
ucaaagaccucauuuuaag

SEQ ID NO: 528271 - RNA, 19 nt, Homo sapiens
  misc_RNA (1)...(19): siRNA sense strand
uuacaugacugaaggacau

SEQ ID NO: 528272 - RNA, 19 nt, Homo sapiens
  misc_RNA (1)...(19): siRNA sense strand
uggcaguucuugucaguug

SEQ ID NO: 528273 - RNA, 19 nt, Homo sapiens
  misc_RNA (1)...(19): siRNA sense strand
ccaagagacuggcauagcu

SEQ ID NO: 528274 - RNA, 19 nt, Homo sapiens
  misc_RNA (1)...(19): siRNA sense strand
cgaauucaaccuuauuaug

SEQ ID NO: 528275 - RNA, 19 nt, Homo sapiens
  misc_RNA (1)...(19): siRNA sense strand
uacggucgcugacuacuug

SEQ ID NO: 528276 - RNA, 19 nt, Homo sapiens
  misc_RNA (1)...(19): siRNA sense strand
caaacgcagugcaaucaag

SEQ ID NO: 528277 - RNA, 19 nt, Homo sapiens
  misc_RNA (1)...(19): siRNA sense strand
ggacauccaacauaccaau

SEQ ID NO: 528278 - RNA, 19 nt, Homo sapiens
  misc_RNA (1)...(19): siRNA sense strand
ccguaaacuucauaacauu

SEQ ID NO: 528279 - RNA, 19 nt, Homo sapiens
  misc_RNA (1)...(19): siRNA sense strand
gacagguuguaaaggcaua

SEQ ID NO: 528280 - RNA, 19 nt, Homo sapiens
  misc_RNA (1)...(19): siRNA sense strand
gcacauuacaugacugaag

SEQ ID NO: 528281 - RNA, 19 nt, Homo sapiens
  misc_RNA (1)...(19): siRNA sense strand
ccaccaccauggacaacaa

SEQ ID NO: 528282 - RNA, 19 nt, Homo sapiens
  misc_RNA (1)...(19): siRNA sense strand
gcagcacaguuucuucaag

SEQ ID NO: 528283 - RNA, 19 nt, Homo sapiens
  misc_RNA (1)...(19): siRNA sense strand
cauuugaaacgccacuuua

SEQ ID NO: 528284 - RNA, 19 nt, Homo sapiens
  misc_RNA (1)...(19): siRNA sense strand
gaugaagguacaaauacaa

SEQ ID NO: 528285 - RNA, 19 nt, Homo sapiens
  misc_RNA (1)...(19): siRNA sense strand
gcauuugaaacgccacuuu

SEQ ID NO: 528286 - RNA, 19 nt, Homo sapiens
  misc_RNA (1)...(19): siRNA sense strand
gaacccguaaacuucauaa

SEQ ID NO: 528287 - RNA, 19 nt, Homo sapiens
  misc_RNA (1)...(19): siRNA sense strand
gaaaguuugcgcaacagau

SEQ ID NO: 528288 - RNA, 19 nt, Homo sapiens
  misc_RNA (1)...(19): siRNA sense strand
ugaugaagguacaaauaca

SEQ ID NO: 528289 - RNA, 19 nt, Homo sapiens
  misc_RNA (1)...(19): siRNA sense strand
ggagagacuucagcaugca

SEQ ID NO: 528290 - RNA, 19 nt, Homo sapiens
  misc_RNA (1)...(19): siRNA sense strand
cacgaaaguuugcgcaaca

SEQ ID NO: 528291 - RNA, 19 nt, Homo sapiens
  misc_RNA (1)...(19): siRNA sense strand
caaguaauaguguaucuac

SEQ ID NO: 528292 - RNA, 19 nt, Homo sapiens
  misc_RNA (1)...(19): siRNA sense strand
acuuggaacuuaaagaaga

SEQ ID NO: 528293 - RNA, 19 nt, Homo sapiens
  misc_RNA (1)...(19): siRNA sense strand
gagguagaucagaugaaua

SEQ ID NO: 528294 - RNA, 19 nt, Homo sapiens
  misc_RNA (1)...(19): siRNA sense strand
agguagaucagaugaauaa

SEQ ID NO: 528295 - RNA, 19 nt, Homo sapiens
  misc_RNA (1)...(19): siRNA sense strand
caacgaauagcuccucuac

SEQ ID NO: 528296 - RNA, 19 nt, Homo sapiens
  misc_RNA (1)...(19): siRNA sense strand
uuaaagaagaccaaagaug

SEQ ID NO: 528297 - RNA, 19 nt, Homo sapiens
  misc_RNA (1)...(19): siRNA sense strand
gguauuccaccugcucaua

SEQ ID NO: 528298 - RNA, 19 nt, Homo sapiens
  misc_RNA (1)...(19): siRNA sense strand
cccguaaacuucauaacau

SEQ ID NO: 528299 - RNA, 19 nt, Homo sapiens
  misc_RNA (1)...(19): siRNA sense strand
ccaagggucuacaauucuc

SEQ ID NO: 528300 - RNA, 19 nt, Homo sapiens
  misc_RNA (1)...(19): siRNA sense strand
ugaaacgccacuuuauguu

SEQ ID NO: 528301 - RNA, 19 nt, Homo sapiens
  misc_RNA (1)...(19): siRNA sense strand
aaucaggccuaccagaauc

SEQ ID NO: 528302 - RNA, 19 nt, Homo sapiens
  misc_RNA (1)...(19): siRNA sense strand
cagauucagcaaccucuaa

SEQ ID NO: 528303 - RNA, 19 nt, Homo sapiens
  misc_RNA (1)...(19): siRNA sense strand
ccaagauucuauggagguu

SEQ ID NO: 528304 - RNA, 19 nt, Homo sapiens
  misc_RNA (1)...(19): siRNA sense strand
uaaugagguuuacuaugca

SEQ ID NO: 528305 - RNA, 19 nt, Homo sapiens
  misc_RNA (1)...(19): siRNA sense strand
ggacagaauggagcuaugg

SEQ ID NO: 528306 - RNA, 19 nt, Homo sapiens
  misc_RNA (1)...(19): siRNA sense strand
caaucaggccuaccagaau

SEQ ID NO: 528307 - RNA, 19 nt, Homo sapiens
  misc_RNA (1)...(19): siRNA sense strand
uguugaaacucauccuguu

SEQ ID NO: 528308 - RNA, 19 nt, Homo sapiens
  misc_RNA (1)...(19): siRNA sense strand
caagaaaacagcugaugaa

SEQ ID NO: 528309 - RNA, 19 nt, Homo sapiens
  misc_RNA (1)...(19): siRNA sense strand
gcauauuaaugagguuuac

SEQ ID NO: 528310 - RNA, 19 nt, Homo sapiens
  misc_RNA (1)...(19): siRNA sense strand
ggaacccguaaacuucaua

SEQ ID NO: 528311 - RNA, 19 nt, Homo sapiens
  misc_RNA (1)...(19): siRNA sense strand
gaguacaaaccaccaggaa

SEQ ID NO: 528312 - RNA, 19 nt, Homo sapiens
  misc_RNA (1)...(19): siRNA sense strand
aaagaagaccaaagaugga

SEQ ID NO: 528313 - RNA, 19 nt, Homo sapiens
  misc_RNA (1)...(19): siRNA sense strand
uuugagaaguugccagaug

SEQ ID NO: 528314 - RNA, 19 nt, Homo sapiens
  misc_RNA (1)...(19): siRNA sense strand
uauuccaccugcucauauu

SEQ ID NO: 528315 - RNA, 19 nt, Homo sapiens
  misc_RNA (1)...(19): siRNA sense strand
ugaaaugcacacuggagaa

SEQ ID NO: 528316 - RNA, 19 nt, Homo sapiens
  misc_RNA (1)...(19): siRNA sense strand
ucagcaaccucuaacuaac

SEQ ID NO: 528317 - RNA, 19 nt, Homo sapiens
  misc_RNA (1)...(19): siRNA sense strand
uaguggaaguucuggguau

SEQ ID NO: 528318 - RNA, 19 nt, Homo sapiens
  misc_RNA (1)...(19): siRNA sense strand
gaaaugcacacuggagaac

SEQ ID NO: 528319 - RNA, 19 nt, Homo sapiens
  misc_RNA (1)...(19): siRNA sense strand
cagaggugcuacugggaau

SEQ ID NO: 528320 - RNA, 19 nt, Homo sapiens
  misc_RNA (1)...(19): siRNA sense strand
cggaagguuuacaaugaug

SEQ ID NO: 528321 - RNA, 19 nt, Homo sapiens
  misc_RNA (1)...(19): siRNA sense strand
aaggacaucugacaaugag

SEQ ID NO: 528322 - RNA, 19 nt, Homo sapiens
  misc_RNA (1)...(19): siRNA sense strand
caugcaaaccuucaucugu

SEQ ID NO: 528323 - RNA, 19 nt, Homo sapiens
  misc_RNA (1)...(19): siRNA sense strand
guauuccaccugcucauau

SEQ ID NO: 528324 - RNA, 19 nt, Homo sapiens
  misc_RNA (1)...(19): siRNA sense strand
cuaauaccuuggacuuugg

SEQ ID NO: 528325 - RNA, 19 nt, Homo sapiens
  misc_RNA (1)...(19): siRNA sense strand
aaacgcagugcaaucaaga

SEQ ID NO: 528326 - RNA, 19 nt, Homo sapiens
  misc_RNA (1)...(19): siRNA sense strand
gccacuuuauguuucgaaa

SEQ ID NO: 528327 - RNA, 19 nt, Homo sapiens
  misc_RNA (1)...(19): siRNA sense strand
uugaaacgccacuuuaugu

SEQ ID NO: 528328 - RNA, 19 nt, Homo sapiens
  misc_RNA (1)...(19): siRNA sense strand
uacugggaaugccuuauga

SEQ ID NO: 528329 - RNA, 19 nt, Homo sapiens
  misc_RNA (1)...(19): siRNA sense strand
ggagcuauggacguuaauu

SEQ ID NO: 528330 - RNA, 19 nt, Homo sapiens
  misc_RNA (1)...(19): siRNA sense strand
cauccaacauaccaauuuu

SEQ ID NO: 528331 - RNA, 19 nt, Homo sapiens
  misc_RNA (1)...(19): siRNA sense strand
gaaccuaacacgaaaguuu

SEQ ID NO: 528332 - RNA, 19 nt, Homo sapiens
  misc_RNA (1)...(19): siRNA sense strand
uaaggaugcuugauuauga

SEQ ID NO: 528333 - RNA, 19 nt, Homo sapiens
  misc_RNA (1)...(19): siRNA sense strand
gaaaacagcugaugaaggu

SEQ ID NO: 528334 - RNA, 19 nt, Homo sapiens
  misc_RNA (1)...(19): siRNA sense strand
gaagguacaaauacaagua

SEQ ID NO: 528335 - RNA, 19 nt, Homo sapiens
  misc_RNA (1)...(19): siRNA sense strand
aaacucgaauucaaccuua

SEQ ID NO: 528336 - RNA, 19 nt, Homo sapiens
  misc_RNA (1)...(19): siRNA sense strand
gggaaugccuuaugaccuu

SEQ ID NO: 528337 - RNA, 19 nt, Homo sapiens
  misc_RNA (1)...(19): siRNA sense strand
gcacuuggaacuuaaagaa

SEQ ID NO: 528338 - RNA, 19 nt, Homo sapiens
  misc_RNA (1)...(19): siRNA sense strand
cuuaugaccuugccauuga

SEQ ID NO: 528339 - RNA, 19 nt, Homo sapiens
  misc_RNA (1)...(19): siRNA sense strand
ccaaugagguagaucagau

SEQ ID NO: 528340 - RNA, 19 nt, Homo sapiens
  misc_RNA (1)...(19): siRNA sense strand
uuaaugagguuuacuaugc

SEQ ID NO: 528341 - RNA, 19 nt, Homo sapiens
  misc_RNA (1)...(19): siRNA sense strand
gcagugcaaucaagauagu

SEQ ID NO: 528342 - RNA, 19 nt, Homo sapiens
  misc_RNA (1)...(19): siRNA sense strand
gcugaugaagguacaaaua

SEQ ID NO: 528343 - RNA, 19 nt, Homo sapiens
  misc_RNA (1)...(19): siRNA sense strand
gaaguucaaagaccucauu

SEQ ID NO: 528344 - RNA, 19 nt, Homo sapiens
  misc_RNA (1)...(19): siRNA sense strand
aaaaguggauggaucguua

SEQ ID NO: 528345 - RNA, 19 nt, Homo sapiens
  misc_RNA (1)...(19): siRNA sense strand
gauggcacuuggaacuuaa

SEQ ID NO: 528346 - RNA, 19 nt, Homo sapiens
  misc_RNA (1)...(19): siRNA sense strand
ggcagaggauauaccagua

SEQ ID NO: 528347 - RNA, 19 nt, Homo sapiens
  misc_RNA (1)...(19): siRNA sense strand
gaaucaagcacagauagaa

SEQ ID NO: 528348 - RNA, 19 nt, Homo sapiens
  misc_RNA (1)...(19): siRNA sense strand
gaauucaaccuuauuaugc

SEQ ID NO: 528349 - RNA, 19 nt, Homo sapiens
  misc_RNA (1)...(19): siRNA sense strand
guucaaagaccucauuuua

SEQ ID NO: 528350 - RNA, 19 nt, Homo sapiens
  misc_RNA (1)...(19): siRNA sense strand
cuacauagugcauuugaaa

SEQ ID NO: 528351 - RNA, 19 nt, Homo sapiens
  misc_RNA (1)...(19): siRNA sense strand
gaacuuaguaucauucacu

SEQ ID NO: 528352 - RNA, 19 nt, Homo sapiens
  misc_RNA (1)...(19): siRNA sense strand
uaacauucuuggaguggaa

SEQ ID NO: 528353 - RNA, 19 nt, Homo sapiens
  misc_RNA (1)...(19): siRNA sense strand
agauggcacuuggaacuua

SEQ ID NO: 528354 - RNA, 19 nt, Homo sapiens
  misc_RNA (1)...(19): siRNA sense strand
ugagguagaucagaugaau

SEQ ID NO: 528355 - RNA, 19 nt, Homo sapiens
  misc_RNA (1)...(19): siRNA sense strand
gaacuuaaagaagaccaaa

SEQ ID NO: 528356 - RNA, 19 nt, Homo sapiens
  misc_RNA (1)...(19): siRNA sense strand
ccaggaacccguaaacuuc

SEQ ID NO: 528357 - RNA, 19 nt, Homo sapiens
  misc_RNA (1)...(19): siRNA sense strand
ucaaagaccucauuuuaag

SEQ ID NO: 528358 - RNA, 19 nt, Homo sapiens
  misc_RNA (1)...(19): siRNA sense strand
uggcaguucuugucaguug

SEQ ID NO: 528359 - RNA, 19 nt, Homo sapiens
  misc_RNA (1)...(19): siRNA sense strand
cgaauucaaccuuauuaug

SEQ ID NO: 528360 - RNA, 19 nt, Homo sapiens
  misc_RNA (1)...(19): siRNA sense strand
uacggucgcugacuacuug

SEQ ID NO: 528361 - RNA, 19 nt, Homo sapiens
  misc_RNA (1)...(19): siRNA sense strand
caaacgcagugcaaucaag

SEQ ID NO: 528362 - RNA, 19 nt, Homo sapiens
  misc_RNA (1)...(19): siRNA sense strand
ccguaaacuucauaacauu

SEQ ID NO: 528363 - RNA, 19 nt, Homo sapiens
  misc_RNA (1)...(19): siRNA sense strand
gacagguuguaaaggcaua

SEQ ID NO: 528364 - RNA, 19 nt, Homo sapiens
  misc_RNA (1)...(19): siRNA sense strand
gcagcacaguuucuucaag

SEQ ID NO: 528365 - RNA, 19 nt, Homo sapiens
  misc_RNA (1)...(19): siRNA sense strand
cauuugaaacgccacuuua

SEQ ID NO: 528366 - RNA, 19 nt, Homo sapiens
  misc_RNA (1)...(19): siRNA sense strand
gaugaagguacaaauacaa

SEQ ID NO: 528367 - RNA, 19 nt, Homo sapiens
  misc_RNA (1)...(19): siRNA sense strand
gcauuugaaacgccacuuu

SEQ ID NO: 528368 - RNA, 19 nt, Homo sapiens
  misc_RNA (1)...(19): siRNA sense strand
gaacccguaaacuucauaa

SEQ ID NO: 528369 - RNA, 19 nt, Homo sapiens
  misc_RNA (1)...(19): siRNA sense strand
gaaaguuugcgcaacagau

SEQ ID NO: 528370 - RNA, 19 nt, Homo sapiens
  misc_RNA (1)...(19): siRNA sense strand
ggagagacuucagcaugca

SEQ ID NO: 528371 - RNA, 19 nt, Homo sapiens
  misc_RNA (1)...(19): siRNA sense strand
ugaugaagguacaaauaca

SEQ ID NO: 528372 - RNA, 19 nt, Homo sapiens
  misc_RNA (1)...(19): siRNA sense strand
cacgaaaguuugcgcaaca

SEQ ID NO: 528373 - RNA, 19 nt, Homo sapiens
  misc_RNA (1)...(19): siRNA sense strand
caaguaauaguguaucuac

SEQ ID NO: 528374 - RNA, 19 nt, Homo sapiens
  misc_RNA (1)...(19): siRNA sense strand
acuuggaacuuaaagaaga

SEQ ID NO: 528375 - RNA, 19 nt, Homo sapiens
  misc_RNA (1)...(19): siRNA sense strand
gagguagaucagaugaaua

SEQ ID NO: 528376 - RNA, 19 nt, Homo sapiens
  misc_RNA (1)...(19): siRNA sense strand
agguagaucagaugaauaa

SEQ ID NO: 528377 - RNA, 19 nt, Homo sapiens
  misc_RNA (1)...(19): siRNA sense strand
uuaaagaagaccaaagaug

SEQ ID NO: 528378 - RNA, 19 nt, Homo sapiens
  misc_RNA (1)...(19): siRNA sense strand
gguauuccaccugcucaua

SEQ ID NO: 528379 - RNA, 19 nt, Homo sapiens
  misc_RNA (1)...(19): siRNA sense strand
cccguaaacuucauaacau

SEQ ID NO: 528380 - RNA, 19 nt, Homo sapiens
  misc_RNA (1)...(19): siRNA sense strand
ugaaacgccacuuuauguu

SEQ ID NO: 528381 - RNA, 19 nt, Homo sapiens
  misc_RNA (1)...(19): siRNA sense strand
cagauucagcaaccucuaa

SEQ ID NO: 528382 - RNA, 19 nt, Homo sapiens
  misc_RNA (1)...(19): siRNA sense strand
uaaugagguuuacuaugca

SEQ ID NO: 528383 - RNA, 19 nt, Homo sapiens
  misc_RNA (1)...(19): siRNA sense strand
caagaaaacagcugaugaa

SEQ ID NO: 528384 - RNA, 19 nt, Homo sapiens
  misc_RNA (1)...(19): siRNA sense strand
ggaacccguaaacuucaua

SEQ ID NO: 528385 - RNA, 19 nt, Homo sapiens
  misc_RNA (1)...(19): siRNA sense strand
gaguacaaaccaccaggaa

SEQ ID NO: 528386 - RNA, 19 nt, Homo sapiens
  misc_RNA (1)...(19): siRNA sense strand
aaagaagaccaaagaugga

SEQ ID NO: 528387 - RNA, 19 nt, Homo sapiens
  misc_RNA (1)...(19): siRNA sense strand
gcauauuaaugagguuuac

SEQ ID NO: 528388 - RNA, 19 nt, Homo sapiens
  misc_RNA (1)...(19): siRNA sense strand
uuugagaaguugccagaug

SEQ ID NO: 528389 - RNA, 19 nt, Homo sapiens
  misc_RNA (1)...(19): siRNA sense strand
uauuccaccugcucauauu

SEQ ID NO: 528390 - RNA, 19 nt, Homo sapiens
  misc_RNA (1)...(19): siRNA sense strand
ugaaaugcacacuggagaa

SEQ ID NO: 528391 - RNA, 19 nt, Homo sapiens
  misc_RNA (1)...(19): siRNA sense strand
ucagcaaccucuaacuaac

SEQ ID NO: 528392 - RNA, 19 nt, Homo sapiens
  misc_RNA (1)...(19): siRNA sense strand
uaguggaaguucuggguau

SEQ ID NO: 528393 - RNA, 19 nt, Homo sapiens
  misc_RNA (1)...(19): siRNA sense strand
gaaaugcacacuggagaac

SEQ ID NO: 528394 - RNA, 19 nt, Homo sapiens
  misc_RNA (1)...(19): siRNA sense strand
cagaggugcuacugggaau

SEQ ID NO: 528395 - RNA, 19 nt, Homo sapiens
  misc_RNA (1)...(19): siRNA sense strand
caugcaaaccuucaucugu

SEQ ID NO: 528396 - RNA, 19 nt, Homo sapiens
  misc_RNA (1)...(19): siRNA sense strand
cggaagguuuacaaugaug

SEQ ID NO: 528397 - RNA, 19 nt, Homo sapiens
  misc_RNA (1)...(19): siRNA sense strand
guauuccaccugcucauau

SEQ ID NO: 528398 - RNA, 19 nt, Homo sapiens
  misc_RNA (1)...(19): siRNA sense strand
uugaaacgccacuuuaugu

SEQ ID NO: 528399 - RNA, 19 nt, Homo sapiens
  misc_RNA (1)...(19): siRNA sense strand
uacugggaaugccuuauga

SEQ ID NO: 528400 - RNA, 19 nt, Homo sapiens
  misc_RNA (1)...(19): siRNA sense strand
aaacgcagugcaaucaaga

SEQ ID NO: 528401 - RNA, 19 nt, Homo sapiens
  misc_RNA (1)...(19): siRNA sense strand
gccacuuuauguuucgaaa

SEQ ID NO: 528402 - RNA, 19 nt, Homo sapiens
  misc_RNA (1)...(19): siRNA sense strand
cuuugaaccuaacacgaaa

SEQ ID NO: 528403 - RNA, 19 nt, Homo sapiens
  misc_RNA (1)...(19): siRNA sense strand
ggcaccaccuccaguacau

SEQ ID NO: 528404 - RNA, 19 nt, Homo sapiens
  misc_RNA (1)...(19): siRNA sense strand
guucaguggugccaaugag

SEQ ID NO: 528405 - RNA, 19 nt, Homo sapiens
  misc_RNA (1)...(19): siRNA sense strand
auaguugacuuuggcaguu

SEQ ID NO: 528406 - RNA, 19 nt, Homo sapiens
  misc_RNA (1)...(19): siRNA sense strand
uccagaacuuaguaucauu

SEQ ID NO: 528407 - RNA, 19 nt, Homo sapiens
  misc_RNA (1)...(19): siRNA sense strand
aaaguuugcgcaacagaug

SEQ ID NO: 528408 - RNA, 19 nt, Homo sapiens
  misc_RNA (1)...(19): siRNA sense strand
ugaaucaagcacagauaga

SEQ ID NO: 528409 - RNA, 19 nt, Homo sapiens
  misc_RNA (1)...(19): siRNA sense strand
ccagauggcacuuggaacu

SEQ ID NO: 528410 - RNA, 19 nt, Homo sapiens
  misc_RNA (1)...(19): siRNA sense strand
gaccuugccauugauaugu

SEQ ID NO: 528411 - RNA, 19 nt, Homo sapiens
  misc_RNA (1)...(19): siRNA sense strand
ccagaacuuaguaucauuc

SEQ ID NO: 528412 - RNA, 19 nt, Homo sapiens
  misc_RNA (1)...(19): siRNA sense strand
cuacugggaaugccuuaug

SEQ ID NO: 528413 - RNA, 19 nt, Homo sapiens
  misc_RNA (1)...(19): siRNA sense strand
gaucaaaacauacaagcau

SEQ ID NO: 528414 - RNA, 19 nt, Homo sapiens
  misc_RNA (1)...(19): siRNA sense strand
caagcauauuaaugagguu

SEQ ID NO: 528415 - RNA, 19 nt, Homo sapiens
  misc_RNA (1)...(19): siRNA sense strand
gaagaccaaagauggaaaa

SEQ ID NO: 528416 - RNA, 19 nt, Homo sapiens
  misc_RNA (1)...(19): siRNA sense strand
gcgacuccagaacuuagua

SEQ ID NO: 528417 - RNA, 19 nt, Homo sapiens
  misc_RNA (1)...(19): siRNA sense strand
ccccaaaacucgaauucaa

SEQ ID NO: 528418 - RNA, 19 nt, Homo sapiens
  misc_RNA (1)...(19): siRNA sense strand
uuaaggaugcuugauuaug

SEQ ID NO: 528419 - RNA, 19 nt, Homo sapiens
  misc_RNA (1)...(19): siRNA sense strand
gaagcgaagacaccaacag

SEQ ID NO: 528420 - RNA, 19 nt, Homo sapiens
  misc_RNA (1)...(19): siRNA sense strand
caccugcucauauucuuga

SEQ ID NO: 528421 - RNA, 19 nt, Homo sapiens
  misc_RNA (1)...(19): siRNA sense strand
acgcagugcaaucaagaua

SEQ ID NO: 528422 - RNA, 19 nt, Homo sapiens
  misc_RNA (1)...(19): siRNA sense strand
ucuuugaaccuaacacgaa

SEQ ID NO: 528423 - RNA, 19 nt, Homo sapiens
  misc_RNA (1)...(19): siRNA sense strand
uucagcaaccucuaacuaa

SEQ ID NO: 528424 - RNA, 19 nt, Homo sapiens
  misc_RNA (1)...(19): siRNA sense strand
caggaacccguaaacuuca

SEQ ID NO: 528425 - RNA, 19 nt, Homo sapiens
  misc_RNA (1)...(19): siRNA sense strand
acuuaaagaagaccaaaga

SEQ ID NO: 528426 - RNA, 19 nt, Homo sapiens
  misc_RNA (1)...(19): siRNA sense strand
caaugagguagaucagaug

SEQ ID NO: 528427 - RNA, 19 nt, Homo sapiens
  misc_RNA (1)...(19): siRNA sense strand
ggaacuuaaagaagaccaa

SEQ ID NO: 528428 - RNA, 19 nt, Homo sapiens
  misc_RNA (1)...(19): siRNA sense strand
ccaaacgcagugcaaucaa

SEQ ID NO: 528429 - RNA, 19 nt, Homo sapiens
  misc_RNA (1)...(19): siRNA sense strand
gcaugcaaaccuucaucug

SEQ ID NO: 528430 - RNA, 19 nt, Homo sapiens
  misc_RNA (1)...(19): siRNA sense strand
ugaccuugccauugauaug

SEQ ID NO: 528431 - RNA, 19 nt, Homo sapiens
  misc_RNA (1)...(19): siRNA sense strand
gaaccuaacacgaaaguuu

SEQ ID NO: 528432 - RNA, 19 nt, Homo sapiens
  misc_RNA (1)...(19): siRNA sense strand
uaaggaugcuugauuauga

SEQ ID NO: 528433 - RNA, 19 nt, Homo sapiens
  misc_RNA (1)...(19): siRNA sense strand
gaaaacagcugaugaaggu

SEQ ID NO: 528434 - RNA, 19 nt, Homo sapiens
  misc_RNA (1)...(19): siRNA sense strand
gaagguacaaauacaagua

SEQ ID NO: 528435 - RNA, 19 nt, Homo sapiens
  misc_RNA (1)...(19): siRNA sense strand
aaacucgaauucaaccuua

SEQ ID NO: 528436 - RNA, 19 nt, Homo sapiens
  misc_RNA (1)...(19): siRNA sense strand
gggaaugccuuaugaccuu

SEQ ID NO: 528437 - RNA, 19 nt, Homo sapiens
  misc_RNA (1)...(19): siRNA sense strand
gcacuuggaacuuaaagaa

SEQ ID NO: 528438 - RNA, 19 nt, Homo sapiens
  misc_RNA (1)...(19): siRNA sense strand
cuuaugaccuugccauuga

SEQ ID NO: 528439 - RNA, 19 nt, Homo sapiens
  misc_RNA (1)...(19): siRNA sense strand
ccaaugagguagaucagau

SEQ ID NO: 528440 - RNA, 19 nt, Homo sapiens
  misc_RNA (1)...(19): siRNA sense strand
uuaaugagguuuacuaugc

SEQ ID NO: 528441 - RNA, 19 nt, Homo sapiens
  misc_RNA (1)...(19): siRNA sense strand
gcaauuuccugcuccucuu

SEQ ID NO: 528442 - RNA, 19 nt, Homo sapiens
  misc_RNA (1)...(19): siRNA sense strand
gcagugcaaucaagauagu

SEQ ID NO: 528443 - RNA, 19 nt, Homo sapiens
  misc_RNA (1)...(19): siRNA sense strand
gcugaugaagguacaaaua

SEQ ID NO: 528444 - RNA, 19 nt, Homo sapiens
  misc_RNA (1)...(19): siRNA sense strand
gaaguucaaagaccucauu

SEQ ID NO: 528445 - RNA, 19 nt, Homo sapiens
  misc_RNA (1)...(19): siRNA sense strand
aaaaguggauggaucguua

SEQ ID NO: 528446 - RNA, 19 nt, Homo sapiens
  misc_RNA (1)...(19): siRNA sense strand
gauggcacuuggaacuuaa

SEQ ID NO: 528447 - RNA, 19 nt, Homo sapiens
  misc_RNA (1)...(19): siRNA sense strand
ggcagaggauauaccagua

SEQ ID NO: 528448 - RNA, 19 nt, Homo sapiens
  misc_RNA (1)...(19): siRNA sense strand
gaaucaagcacagauagaa

SEQ ID NO: 528449 - RNA, 19 nt, Homo sapiens
  misc_RNA (1)...(19): siRNA sense strand
gaauucaaccuuauuaugc

SEQ ID NO: 528450 - RNA, 19 nt, Homo sapiens
  misc_RNA (1)...(19): siRNA sense strand
guucaaagaccucauuuua

SEQ ID NO: 528451 - RNA, 19 nt, Homo sapiens
  misc_RNA (1)...(19): siRNA sense strand
cuacauagugcauuugaaa

SEQ ID NO: 528452 - RNA, 19 nt, Homo sapiens
  misc_RNA (1)...(19): siRNA sense strand
gaacuuaguaucauucacu

SEQ ID NO: 528453 - RNA, 19 nt, Homo sapiens
  misc_RNA (1)...(19): siRNA sense strand
uaacauucuuggaguggaa

SEQ ID NO: 528454 - RNA, 19 nt, Homo sapiens
  misc_RNA (1)...(19): siRNA sense strand
agauggcacuuggaacuua

SEQ ID NO: 528455 - RNA, 19 nt, Homo sapiens
  misc_RNA (1)...(19): siRNA sense strand
ugagguagaucagaugaau

SEQ ID NO: 528456 - RNA, 19 nt, Homo sapiens
  misc_RNA (1)...(19): siRNA sense strand
gaacuuaaagaagaccaaa

SEQ ID NO: 528457 - RNA, 19 nt, Homo sapiens
  misc_RNA (1)...(19): siRNA sense strand
ccaggaacccguaaacuuc

SEQ ID NO: 528458 - RNA, 19 nt, Homo sapiens
  misc_RNA (1)...(19): siRNA sense strand
ucaaagaccucauuuuaag

SEQ ID NO: 528459 - RNA, 19 nt, Homo sapiens
  misc_RNA (1)...(19): siRNA sense strand
uggcaguucuugucaguug

SEQ ID NO: 528460 - RNA, 19 nt, Homo sapiens
  misc_RNA (1)...(19): siRNA sense strand
cgaauucaaccuuauuaug

SEQ ID NO: 528461 - RNA, 19 nt, Homo sapiens
  misc_RNA (1)...(19): siRNA sense strand
uacggucgcugacuacuug

SEQ ID NO: 528462 - RNA, 19 nt, Homo sapiens
  misc_RNA (1)...(19): siRNA sense strand
caaacgcagugcaaucaag

SEQ ID NO: 528463 - RNA, 19 nt, Homo sapiens
  misc_RNA (1)...(19): siRNA sense strand
ccguaaacuucauaacauu

SEQ ID NO: 528464 - RNA, 19 nt, Homo sapiens
  misc_RNA (1)...(19): siRNA sense strand
gacagguuguaaaggcaua

SEQ ID NO: 528465 - RNA, 19 nt, Homo sapiens
  misc_RNA (1)...(19): siRNA sense strand
gcagcacaguuucuucaag

SEQ ID NO: 528466 - RNA, 19 nt, Homo sapiens
  misc_RNA (1)...(19): siRNA sense strand
cauuugaaacgccacuuua

SEQ ID NO: 528467 - RNA, 19 nt, Homo sapiens
  misc_RNA (1)...(19): siRNA sense strand
gaugaagguacaaauacaa

SEQ ID NO: 528468 - RNA, 19 nt, Homo sapiens
  misc_RNA (1)...(19): siRNA sense strand
gcauuugaaacgccacuuu

SEQ ID NO: 528469 - RNA, 19 nt, Homo sapiens
  misc_RNA (1)...(19): siRNA sense strand
gaacccguaaacuucauaa

SEQ ID NO: 528470 - RNA, 19 nt, Homo sapiens
  misc_RNA (1)...(19): siRNA sense strand
gaaaguuugcgcaacagau

SEQ ID NO: 528471 - RNA, 19 nt, Homo sapiens
  misc_RNA (1)...(19): siRNA sense strand
ggagagacuucagcaugca

SEQ ID NO: 528472 - RNA, 19 nt, Homo sapiens
  misc_RNA (1)...(19): siRNA sense strand
ugaugaagguacaaauaca

SEQ ID NO: 528473 - RNA, 19 nt, Homo sapiens
  misc_RNA (1)...(19): siRNA sense strand
cacgaaaguuugcgcaaca

SEQ ID NO: 528474 - RNA, 19 nt, Homo sapiens
  misc_RNA (1)...(19): siRNA sense strand
caaguaauaguguaucuac

SEQ ID NO: 528475 - RNA, 19 nt, Homo sapiens
  misc_RNA (1)...(19): siRNA sense strand
acuuggaacuuaaagaaga

SEQ ID NO: 528476 - RNA, 19 nt, Homo sapiens
  misc_RNA (1)...(19): siRNA sense strand
gagguagaucagaugaaua

SEQ ID NO: 528477 - RNA, 19 nt, Homo sapiens
  misc_RNA (1)...(19): siRNA sense strand
agguagaucagaugaauaa

SEQ ID NO: 528478 - RNA, 19 nt, Homo sapiens
  misc_RNA (1)...(19): siRNA sense strand
uuaaagaagaccaaagaug

SEQ ID NO: 528479 - RNA, 19 nt, Homo sapiens
  misc_RNA (1)...(19): siRNA sense strand
gguauuccaccugcucaua

SEQ ID NO: 528480 - RNA, 19 nt, Homo sapiens
  misc_RNA (1)...(19): siRNA sense strand
cccguaaacuucauaacau

SEQ ID NO: 528481 - RNA, 19 nt, Homo sapiens
  misc_RNA (1)...(19): siRNA sense strand
ugaaacgccacuuuauguu

SEQ ID NO: 528482 - RNA, 19 nt, Homo sapiens
  misc_RNA (1)...(19): siRNA sense strand
cagauucagcaaccucuaa

SEQ ID NO: 528483 - RNA, 19 nt, Homo sapiens
  misc_RNA (1)...(19): siRNA sense strand
uaaugagguuuacuaugca

SEQ ID NO: 528484 - RNA, 19 nt, Homo sapiens
  misc_RNA (1)...(19): siRNA sense strand
gcauauuaaugagguuuac

SEQ ID NO: 528485 - RNA, 19 nt, Homo sapiens
  misc_RNA (1)...(19): siRNA sense strand
caagaaaacagcugaugaa

SEQ ID NO: 528486 - RNA, 19 nt, Homo sapiens
  misc_RNA (1)...(19): siRNA sense strand
ggaacccguaaacuucaua

SEQ ID NO: 528487 - RNA, 19 nt, Homo sapiens
  misc_RNA (1)...(19): siRNA sense strand
gaguacaaaccaccaggaa

SEQ ID NO: 528488 - RNA, 19 nt, Homo sapiens
  misc_RNA (1)...(19): siRNA sense strand
aaagaagaccaaagaugga

SEQ ID NO: 528489 - RNA, 19 nt, Homo sapiens
  misc_RNA (1)...(19): siRNA sense strand
uuugagaaguugccagaug

SEQ ID NO: 528490 - RNA, 19 nt, Homo sapiens
  misc_RNA (1)...(19): siRNA sense strand
uauuccaccugcucauauu

SEQ ID NO: 528491 - RNA, 19 nt, Homo sapiens
  misc_RNA (1)...(19): siRNA sense strand
ugaaaugcacacuggagaa

SEQ ID NO: 528492 - RNA, 19 nt, Homo sapiens
  misc_RNA (1)...(19): siRNA sense strand
cagaggugcuacugggaau

SEQ ID NO: 528493 - RNA, 19 nt, Homo sapiens
  misc_RNA (1)...(19): siRNA sense strand
ucagcaaccucuaacuaac

SEQ ID NO: 528494 - RNA, 19 nt, Homo sapiens
  misc_RNA (1)...(19): siRNA sense strand
uaguggaaguucuggguau

SEQ ID NO: 528495 - RNA, 19 nt, Homo sapiens
  misc_RNA (1)...(19): siRNA sense strand
gaaaugcacacuggagaac

SEQ ID NO: 528496 - RNA, 19 nt, Homo sapiens
  misc_RNA (1)...(19): siRNA sense strand
guauuccaccugcucauau

SEQ ID NO: 528497 - RNA, 19 nt, Homo sapiens
  misc_RNA (1)...(19): siRNA sense strand
caugcaaaccuucaucugu

SEQ ID NO: 528498 - RNA, 19 nt, Homo sapiens
  misc_RNA (1)...(19): siRNA sense strand
cggaagguuuacaaugaug

SEQ ID NO: 528499 - RNA, 19 nt, Homo sapiens
  misc_RNA (1)...(19): siRNA sense strand
uugaaacgccacuuuaugu

SEQ ID NO: 528500 - RNA, 19 nt, Homo sapiens
  misc_RNA (1)...(19): siRNA sense strand
uacugggaaugccuuauga

SEQ ID NO: 528501 - RNA, 19 nt, Homo sapiens
  misc_RNA (1)...(19): siRNA sense strand
aaacgcagugcaaucaaga

SEQ ID NO: 528502 - RNA, 19 nt, Homo sapiens
  misc_RNA (1)...(19): siRNA sense strand
gccacuuuauguuucgaaa

SEQ ID NO: 528503 - RNA, 19 nt, Homo sapiens
  misc_RNA (1)...(19): siRNA sense strand
cuuugaaccuaacacgaaa

SEQ ID NO: 528504 - RNA, 19 nt, Homo sapiens
  misc_RNA (1)...(19): siRNA sense strand
ggcaccaccuccaguacau

SEQ ID NO: 528505 - RNA, 19 nt, Homo sapiens
  misc_RNA (1)...(19): siRNA sense strand
guucaguggugccaaugag

SEQ ID NO: 528506 - RNA, 19 nt, Homo sapiens
  misc_RNA (1)...(19): siRNA sense strand
auaguugacuuuggcaguu

SEQ ID NO: 528507 - RNA, 19 nt, Homo sapiens
  misc_RNA (1)...(19): siRNA sense strand
uccagaacuuaguaucauu

SEQ ID NO: 528508 - RNA, 19 nt, Homo sapiens
  misc_RNA (1)...(19): siRNA sense strand
aaaguuugcgcaacagaug

SEQ ID NO: 528509 - RNA, 19 nt, Homo sapiens
  misc_RNA (1)...(19): siRNA sense strand
ugaaucaagcacagauaga

SEQ ID NO: 528510 - RNA, 19 nt, Homo sapiens
  misc_RNA (1)...(19): siRNA sense strand
ccagauggcacuuggaacu

SEQ ID NO: 528511 - RNA, 19 nt, Homo sapiens
  misc_RNA (1)...(19): siRNA sense strand
gaccuugccauugauaugu

SEQ ID NO: 528512 - RNA, 19 nt, Homo sapiens
  misc_RNA (1)...(19): siRNA sense strand
ccagaacuuaguaucauuc

SEQ ID NO: 528513 - RNA, 19 nt, Homo sapiens
  misc_RNA (1)...(19): siRNA sense strand
cuacugggaaugccuuaug

SEQ ID NO: 528514 - RNA, 19 nt, Homo sapiens
  misc_RNA (1)...(19): siRNA sense strand
caagcauauuaaugagguu

SEQ ID NO: 528515 - RNA, 19 nt, Homo sapiens
  misc_RNA (1)...(19): siRNA sense strand
gaucaaaacauacaagcau

SEQ ID NO: 528516 - RNA, 19 nt, Homo sapiens
  misc_RNA (1)...(19): siRNA sense strand
gaagaccaaagauggaaaa

SEQ ID NO: 528517 - RNA, 19 nt, Homo sapiens
  misc_RNA (1)...(19): siRNA sense strand
gcgacuccagaacuuagua

SEQ ID NO: 528518 - RNA, 19 nt, Homo sapiens
  misc_RNA (1)...(19): siRNA sense strand
ccccaaaacucgaauucaa

SEQ ID NO: 528519 - RNA, 19 nt, Homo sapiens
  misc_RNA (1)...(19): siRNA sense strand
uuaaggaugcuugauuaug

SEQ ID NO: 528520 - RNA, 19 nt, Homo sapiens
  misc_RNA (1)...(19): siRNA sense strand
caccugcucauauucuuga

SEQ ID NO: 528521 - RNA, 19 nt, Homo sapiens
  misc_RNA (1)...(19): siRNA sense strand
gaagcgaagacaccaacag

SEQ ID NO: 528522 - RNA, 19 nt, Homo sapiens
  misc_RNA (1)...(19): siRNA sense strand
acgcagugcaaucaagaua

SEQ ID NO: 528523 - RNA, 19 nt, Homo sapiens
  misc_RNA (1)...(19): siRNA sense strand
ucuuugaaccuaacacgaa

SEQ ID NO: 528524 - RNA, 19 nt, Homo sapiens
  misc_RNA (1)...(19): siRNA sense strand
caggaacccguaaacuuca

SEQ ID NO: 528525 - RNA, 19 nt, Homo sapiens
  misc_RNA (1)...(19): siRNA sense strand
acuuaaagaagaccaaaga

SEQ ID NO: 528526 - RNA, 19 nt, Homo sapiens
  misc_RNA (1)...(19): siRNA sense strand
uucagcaaccucuaacuaa

SEQ ID NO: 528527 - RNA, 19 nt, Homo sapiens
  misc_RNA (1)...(19): siRNA sense strand
caaugagguagaucagaug

SEQ ID NO: 528528 - RNA, 19 nt, Homo sapiens
  misc_RNA (1)...(19): siRNA sense strand
ggaacuuaaagaagaccaa

SEQ ID NO: 528529 - RNA, 19 nt, Homo sapiens
  misc_RNA (1)...(19): siRNA sense strand
ugaccuugccauugauaug

SEQ ID NO: 528530 - RNA, 19 nt, Homo sapiens
  misc_RNA (1)...(19): siRNA sense strand
gcaugcaaaccuucaucug

SEQ ID NO: 528531 - RNA, 19 nt, Homo sapiens
  misc_RNA (1)...(19): siRNA sense strand
gaaccuaacacgaaaguuu

SEQ ID NO: 528532 - RNA, 19 nt, Homo sapiens
  misc_RNA (1)...(19): siRNA sense strand
uaaggaugcuugauuauga

SEQ ID NO: 528533 - RNA, 19 nt, Homo sapiens
  misc_RNA (1)...(19): siRNA sense strand
gcuaauaccuuggacuuug

SEQ ID NO: 528534 - RNA, 19 nt, Homo sapiens
  misc_RNA (1)...(19): siRNA sense strand
gaaaacagcugaugaaggu

SEQ ID NO: 528535 - RNA, 19 nt, Homo sapiens
  misc_RNA (1)...(19): siRNA sense strand
gaagguacaaauacaagua

SEQ ID NO: 528536 - RNA, 19 nt, Homo sapiens
  misc_RNA (1)...(19): siRNA sense strand
aaacucgaauucaaccuua

SEQ ID NO: 528537 - RNA, 19 nt, Homo sapiens
  misc_RNA (1)...(19): siRNA sense strand
gaauggagcuauggacguu

SEQ ID NO: 528538 - RNA, 19 nt, Homo sapiens
  misc_RNA (1)...(19): siRNA sense strand
gggaaugccuuaugaccuu

SEQ ID NO: 528539 - RNA, 19 nt, Homo sapiens
  misc_RNA (1)...(19): siRNA sense strand
gcacuuggaacuuaaagaa

SEQ ID NO: 528540 - RNA, 19 nt, Homo sapiens
  misc_RNA (1)...(19): siRNA sense strand
ggccaagggucuacaauuc

SEQ ID NO: 528541 - RNA, 19 nt, Homo sapiens
  misc_RNA (1)...(19): siRNA sense strand
gaaggacaucugacaauga

SEQ ID NO: 528542 - RNA, 19 nt, Homo sapiens
  misc_RNA (1)...(19): siRNA sense strand
gcaaucaggccuaccagaa

SEQ ID NO: 528543 - RNA, 19 nt, Homo sapiens
  misc_RNA (1)...(19): siRNA sense strand
gcaaggggcugauagagaa

SEQ ID NO: 528544 - RNA, 19 nt, Homo sapiens
  misc_RNA (1)...(19): siRNA sense strand
cuuaugaccuugccauuga

SEQ ID NO: 528545 - RNA, 19 nt, Homo sapiens
  misc_RNA (1)...(19): siRNA sense strand
ccaaugagguagaucagau

SEQ ID NO: 528546 - RNA, 19 nt, Homo sapiens
  misc_RNA (1)...(19): siRNA sense strand
uuaaugagguuuacuaugc

SEQ ID NO: 528547 - RNA, 19 nt, Homo sapiens
  misc_RNA (1)...(19): siRNA sense strand
gcaauuuccugcuccucuu

SEQ ID NO: 528548 - RNA, 19 nt, Homo sapiens
  misc_RNA (1)...(19): siRNA sense strand
gcagugcaaucaagauagu

SEQ ID NO: 528549 - RNA, 19 nt, Homo sapiens
  misc_RNA (1)...(19): siRNA sense strand
gacaggaguuugugugcaa

SEQ ID NO: 528550 - RNA, 19 nt, Homo sapiens
  misc_RNA (1)...(19): siRNA sense strand
gagcuauggacguuaauuu

SEQ ID NO: 528551 - RNA, 19 nt, Homo sapiens
  misc_RNA (1)...(19): siRNA sense strand
gcugaugaagguacaaaua

SEQ ID NO: 528552 - RNA, 19 nt, Homo sapiens
  misc_RNA (1)...(19): siRNA sense strand
gaaguucaaagaccucauu

SEQ ID NO: 528553 - RNA, 19 nt, Homo sapiens
  misc_RNA (1)...(19): siRNA sense strand
aaaaguggauggaucguua

SEQ ID NO: 528554 - RNA, 19 nt, Homo sapiens
  misc_RNA (1)...(19): siRNA sense strand
gauggcacuuggaacuuaa

SEQ ID NO: 528555 - RNA, 19 nt, Homo sapiens
  misc_RNA (1)...(19): siRNA sense strand
ggcagaggauauaccagua

SEQ ID NO: 528556 - RNA, 19 nt, Homo sapiens
  misc_RNA (1)...(19): siRNA sense strand
gaaucaagcacagauagaa

SEQ ID NO: 528557 - RNA, 19 nt, Homo sapiens
  misc_RNA (1)...(19): siRNA sense strand
gaauucaaccuuauuaugc

SEQ ID NO: 528558 - RNA, 19 nt, Homo sapiens
  misc_RNA (1)...(19): siRNA sense strand
guucaaagaccucauuuua

SEQ ID NO: 528559 - RNA, 19 nt, Homo sapiens
  misc_RNA (1)...(19): siRNA sense strand
cuacauagugcauuugaaa

SEQ ID NO: 528560 - RNA, 19 nt, Homo sapiens
  misc_RNA (1)...(19): siRNA sense strand
gaacuuaguaucauucacu

SEQ ID NO: 528561 - RNA, 19 nt, Homo sapiens
  misc_RNA (1)...(19): siRNA sense strand
gcacugaagcuccuacaca

SEQ ID NO: 528562 - RNA, 19 nt, Homo sapiens
  misc_RNA (1)...(19): siRNA sense strand
uaacauucuuggaguggaa

SEQ ID NO: 528563 - RNA, 19 nt, Homo sapiens
  misc_RNA (1)...(19): siRNA sense strand
aaacucauccuguucaaga

SEQ ID NO: 528564 - RNA, 19 nt, Homo sapiens
  misc_RNA (1)...(19): siRNA sense strand
gcuauggacguuaauuuga

SEQ ID NO: 528565 - RNA, 19 nt, Homo sapiens
  misc_RNA (1)...(19): siRNA sense strand
agauggcacuuggaacuua

SEQ ID NO: 528566 - RNA, 19 nt, Homo sapiens
  misc_RNA (1)...(19): siRNA sense strand
ugagguagaucagaugaau

SEQ ID NO: 528567 - RNA, 19 nt, Homo sapiens
  misc_RNA (1)...(19): siRNA sense strand
ugaaggacaucugacaaug

SEQ ID NO: 528568 - RNA, 19 nt, Homo sapiens
  misc_RNA (1)...(19): siRNA sense strand
gaacuuaaagaagaccaaa

SEQ ID NO: 528569 - RNA, 19 nt, Homo sapiens
  misc_RNA (1)...(19): siRNA sense strand
ccaggaacccguaaacuuc

SEQ ID NO: 528570 - RNA, 19 nt, Homo sapiens
  misc_RNA (1)...(19): siRNA sense strand
ucaaagaccucauuuuaag

SEQ ID NO: 528571 - RNA, 19 nt, Homo sapiens
  misc_RNA (1)...(19): siRNA sense strand
uuacaugacugaaggacau

SEQ ID NO: 528572 - RNA, 19 nt, Homo sapiens
  misc_RNA (1)...(19): siRNA sense strand
uggcaguucuugucaguug

SEQ ID NO: 528573 - RNA, 19 nt, Homo sapiens
  misc_RNA (1)...(19): siRNA sense strand
ccaagagacuggcauagcu

SEQ ID NO: 528574 - RNA, 19 nt, Homo sapiens
  misc_RNA (1)...(19): siRNA sense strand
cgaauucaaccuuauuaug

SEQ ID NO: 528575 - RNA, 19 nt, Homo sapiens
  misc_RNA (1)...(19): siRNA sense strand
uacggucgcugacuacuug

SEQ ID NO: 528576 - RNA, 19 nt, Homo sapiens
  misc_RNA (1)...(19): siRNA sense strand
caaacgcagugcaaucaag

SEQ ID NO: 528577 - RNA, 19 nt, Homo sapiens
  misc_RNA (1)...(19): siRNA sense strand
ggacauccaacauaccaau

SEQ ID NO: 528578 - RNA, 19 nt, Homo sapiens
  misc_RNA (1)...(19): siRNA sense strand
ccguaaacuucauaacauu

SEQ ID NO: 528579 - RNA, 19 nt, Homo sapiens
  misc_RNA (1)...(19): siRNA sense strand
gacagguuguaaaggcaua

SEQ ID NO: 528580 - RNA, 19 nt, Homo sapiens
  misc_RNA (1)...(19): siRNA sense strand
gcacauuacaugacugaag

SEQ ID NO: 528581 - RNA, 19 nt, Homo sapiens
  misc_RNA (1)...(19): siRNA sense strand
ccaccaccauggacaacaa

SEQ ID NO: 528582 - RNA, 19 nt, Homo sapiens
  misc_RNA (1)...(19): siRNA sense strand
gcagcacaguuucuucaag

SEQ ID NO: 528583 - RNA, 19 nt, Homo sapiens
  misc_RNA (1)...(19): siRNA sense strand
cauuugaaacgccacuuua

SEQ ID NO: 528584 - RNA, 19 nt, Homo sapiens
  misc_RNA (1)...(19): siRNA sense strand
gaugaagguacaaauacaa

SEQ ID NO: 528585 - RNA, 19 nt, Homo sapiens
  misc_RNA (1)...(19): siRNA sense strand
gcauuugaaacgccacuuu

SEQ ID NO: 528586 - RNA, 19 nt, Homo sapiens
  misc_RNA (1)...(19): siRNA sense strand
gaacccguaaacuucauaa

SEQ ID NO: 528587 - RNA, 19 nt, Homo sapiens
  misc_RNA (1)...(19): siRNA sense strand
gaaaguuugcgcaacagau

SEQ ID NO: 528588 - RNA, 19 nt, Homo sapiens
  misc_RNA (1)...(19): siRNA sense strand
ugaugaagguacaaauaca

SEQ ID NO: 528589 - RNA, 19 nt, Homo sapiens
  misc_RNA (1)...(19): siRNA sense strand
ggagagacuucagcaugca

SEQ ID NO: 528590 - RNA, 19 nt, Homo sapiens
  misc_RNA (1)...(19): siRNA sense strand
cacgaaaguuugcgcaaca

SEQ ID NO: 528591 - RNA, 19 nt, Homo sapiens
  misc_RNA (1)...(19): siRNA sense strand
caaguaauaguguaucuac

SEQ ID NO: 528592 - RNA, 19 nt, Homo sapiens
  misc_RNA (1)...(19): siRNA sense strand
acuuggaacuuaaagaaga

SEQ ID NO: 528593 - RNA, 19 nt, Homo sapiens
  misc_RNA (1)...(19): siRNA sense strand
gagguagaucagaugaaua

SEQ ID NO: 528594 - RNA, 19 nt, Homo sapiens
  misc_RNA (1)...(19): siRNA sense strand
agguagaucagaugaauaa

SEQ ID NO: 528595 - RNA, 19 nt, Homo sapiens
  misc_RNA (1)...(19): siRNA sense strand
caacgaauagcuccucuac

SEQ ID NO: 528596 - RNA, 19 nt, Homo sapiens
  misc_RNA (1)...(19): siRNA sense strand
uuaaagaagaccaaagaug

SEQ ID NO: 528597 - RNA, 19 nt, Homo sapiens
  misc_RNA (1)...(19): siRNA sense strand
gguauuccaccugcucaua

SEQ ID NO: 528598 - RNA, 19 nt, Homo sapiens
  misc_RNA (1)...(19): siRNA sense strand
cccguaaacuucauaacau

SEQ ID NO: 528599 - RNA, 19 nt, Homo sapiens
  misc_RNA (1)...(19): siRNA sense strand
ccaagggucuacaauucuc

SEQ ID NO: 528600 - RNA, 19 nt, Homo sapiens
  misc_RNA (1)...(19): siRNA sense strand
ugaaacgccacuuuauguu

SEQ ID NO: 528601 - RNA, 19 nt, Homo sapiens
  misc_RNA (1)...(19): siRNA sense strand
aaucaggccuaccagaauc

SEQ ID NO: 528602 - RNA, 19 nt, Homo sapiens
  misc_RNA (1)...(19): siRNA sense strand
cagauucagcaaccucuaa

SEQ ID NO: 528603 - RNA, 19 nt, Homo sapiens
  misc_RNA (1)...(19): siRNA sense strand
ccaagauucuauggagguu

SEQ ID NO: 528604 - RNA, 19 nt, Homo sapiens
  misc_RNA (1)...(19): siRNA sense strand
uaaugagguuuacuaugca

SEQ ID NO: 528605 - RNA, 19 nt, Homo sapiens
  misc_RNA (1)...(19): siRNA sense strand
ggacagaauggagcuaugg

SEQ ID NO: 528606 - RNA, 19 nt, Homo sapiens
  misc_RNA (1)...(19): siRNA sense strand
caaucaggccuaccagaau

SEQ ID NO: 528607 - RNA, 19 nt, Homo sapiens
  misc_RNA (1)...(19): siRNA sense strand
uguugaaacucauccuguu

SEQ ID NO: 528608 - RNA, 19 nt, Homo sapiens
  misc_RNA (1)...(19): siRNA sense strand
caagaaaacagcugaugaa

SEQ ID NO: 528609 - RNA, 19 nt, Homo sapiens
  misc_RNA (1)...(19): siRNA sense strand
gcauauuaaugagguuuac

SEQ ID NO: 528610 - RNA, 19 nt, Homo sapiens
  misc_RNA (1)...(19): siRNA sense strand
ggaacccguaaacuucaua

SEQ ID NO: 528611 - RNA, 19 nt, Homo sapiens
  misc_RNA (1)...(19): siRNA sense strand
gaguacaaaccaccaggaa

SEQ ID NO: 528612 - RNA, 19 nt, Homo sapiens
  misc_RNA (1)...(19): siRNA sense strand
aaagaagaccaaagaugga

SEQ ID NO: 528613 - RNA, 19 nt, Homo sapiens
  misc_RNA (1)...(19): siRNA sense strand
uuugagaaguugccagaug

SEQ ID NO: 528614 - RNA, 19 nt, Homo sapiens
  misc_RNA (1)...(19): siRNA sense strand
uauuccaccugcucauauu

SEQ ID NO: 528615 - RNA, 19 nt, Homo sapiens
  misc_RNA (1)...(19): siRNA sense strand
ugaaaugcacacuggagaa

SEQ ID NO: 528616 - RNA, 19 nt, Homo sapiens
  misc_RNA (1)...(19): siRNA sense strand
ucagcaaccucuaacuaac

SEQ ID NO: 528617 - RNA, 19 nt, Homo sapiens
  misc_RNA (1)...(19): siRNA sense strand
uaguggaaguucuggguau

SEQ ID NO: 528618 - RNA, 19 nt, Homo sapiens
  misc_RNA (1)...(19): siRNA sense strand
gaaaugcacacuggagaac

SEQ ID NO: 528619 - RNA, 19 nt, Homo sapiens
  misc_RNA (1)...(19): siRNA sense strand
cagaggugcuacugggaau

SEQ ID NO: 528620 - RNA, 19 nt, Homo sapiens
  misc_RNA (1)...(19): siRNA sense strand
cggaagguuuacaaugaug

SEQ ID NO: 528621 - RNA, 19 nt, Homo sapiens
  misc_RNA (1)...(19): siRNA sense strand
aaggacaucugacaaugag

SEQ ID NO: 528622 - RNA, 19 nt, Homo sapiens
  misc_RNA (1)...(19): siRNA sense strand
caugcaaaccuucaucugu

SEQ ID NO: 528623 - RNA, 19 nt, Homo sapiens
  misc_RNA (1)...(19): siRNA sense strand
guauuccaccugcucauau

SEQ ID NO: 528624 - RNA, 19 nt, Homo sapiens
  misc_RNA (1)...(19): siRNA sense strand
cuaauaccuuggacuuugg

SEQ ID NO: 528625 - RNA, 19 nt, Homo sapiens
  misc_RNA (1)...(19): siRNA sense strand
aaacgcagugcaaucaaga

SEQ ID NO: 528626 - RNA, 19 nt, Homo sapiens
  misc_RNA (1)...(19): siRNA sense strand
gccacuuuauguuucgaaa

SEQ ID NO: 528627 - RNA, 19 nt, Homo sapiens
  misc_RNA (1)...(19): siRNA sense strand
uugaaacgccacuuuaugu

SEQ ID NO: 528628 - RNA, 19 nt, Homo sapiens
  misc_RNA (1)...(19): siRNA sense strand
uacugggaaugccuuauga

SEQ ID NO: 528629 - RNA, 19 nt, Homo sapiens
  misc_RNA (1)...(19): siRNA sense strand
ggagcuauggacguuaauu

SEQ ID NO: 528630 - RNA, 19 nt, Homo sapiens
  misc_RNA (1)...(19): siRNA sense strand
cauccaacauaccaauuuu

SEQ ID NO: 528631 - RNA, 19 nt, Homo sapiens
  misc_RNA (1)...(19): siRNA sense strand
gaaccuaacacgaaaguuu

SEQ ID NO: 528632 - RNA, 19 nt, Homo sapiens
  misc_RNA (1)...(19): siRNA sense strand
uaaggaugcuugauuauga

SEQ ID NO: 528633 - RNA, 19 nt, Homo sapiens
  misc_RNA (1)...(19): siRNA sense strand
gaaaacagcugaugaaggu

SEQ ID NO: 528634 - RNA, 19 nt, Homo sapiens
  misc_RNA (1)...(19): siRNA sense strand
gaagguacaaauacaagua

SEQ ID NO: 528635 - RNA, 19 nt, Homo sapiens
  misc_RNA (1)...(19): siRNA sense strand
aaacucgaauucaaccuua

SEQ ID NO: 528636 - RNA, 19 nt, Homo sapiens
  misc_RNA (1)...(19): siRNA sense strand
gggaaugccuuaugaccuu

SEQ ID NO: 528637 - RNA, 19 nt, Homo sapiens
  misc_RNA (1)...(19): siRNA sense strand
gcacuuggaacuuaaagaa

SEQ ID NO: 528638 - RNA, 19 nt, Homo sapiens
  misc_RNA (1)...(19): siRNA sense strand
cuuaugaccuugccauuga

SEQ ID NO: 528639 - RNA, 19 nt, Homo sapiens
  misc_RNA (1)...(19): siRNA sense strand
ccaaugagguagaucagau

SEQ ID NO: 528640 - RNA, 19 nt, Homo sapiens
  misc_RNA (1)...(19): siRNA sense strand
uuaaugagguuuacuaugc

SEQ ID NO: 528641 - RNA, 19 nt, Homo sapiens
  misc_RNA (1)...(19): siRNA sense strand
gcagugcaaucaagauagu

SEQ ID NO: 528642 - RNA, 19 nt, Homo sapiens
  misc_RNA (1)...(19): siRNA sense strand
gcugaugaagguacaaaua

SEQ ID NO: 528643 - RNA, 19 nt, Homo sapiens
  misc_RNA (1)...(19): siRNA sense strand
gaaguucaaagaccucauu

SEQ ID NO: 528644 - RNA, 19 nt, Homo sapiens
  misc_RNA (1)...(19): siRNA sense strand
aaaaguggauggaucguua

SEQ ID NO: 528645 - RNA, 19 nt, Homo sapiens
  misc_RNA (1)...(19): siRNA sense strand
gauggcacuuggaacuuaa

SEQ ID NO: 528646 - RNA, 19 nt, Homo sapiens
  misc_RNA (1)...(19): siRNA sense strand
ggcagaggauauaccagua

SEQ ID NO: 528647 - RNA, 19 nt, Homo sapiens
  misc_RNA (1)...(19): siRNA sense strand
gaaucaagcacagauagaa

SEQ ID NO: 528648 - RNA, 19 nt, Homo sapiens
  misc_RNA (1)...(19): siRNA sense strand
gaauucaaccuuauuaugc

SEQ ID NO: 528649 - RNA, 19 nt, Homo sapiens
  misc_RNA (1)...(19): siRNA sense strand
guucaaagaccucauuuua

SEQ ID NO: 528650 - RNA, 19 nt, Homo sapiens
  misc_RNA (1)...(19): siRNA sense strand
cuacauagugcauuugaaa

SEQ ID NO: 528651 - RNA, 19 nt, Homo sapiens
  misc_RNA (1)...(19): siRNA sense strand
gaacuuaguaucauucacu

SEQ ID NO: 528652 - RNA, 19 nt, Homo sapiens
  misc_RNA (1)...(19): siRNA sense strand
uaacauucuuggaguggaa

SEQ ID NO: 528653 - RNA, 19 nt, Homo sapiens
  misc_RNA (1)...(19): siRNA sense strand
agauggcacuuggaacuua

SEQ ID NO: 528654 - RNA, 19 nt, Homo sapiens
  misc_RNA (1)...(19): siRNA sense strand
ugagguagaucagaugaau

SEQ ID NO: 528655 - RNA, 19 nt, Homo sapiens
  misc_RNA (1)...(19): siRNA sense strand
gaacuuaaagaagaccaaa

SEQ ID NO: 528656 - RNA, 19 nt, Homo sapiens
  misc_RNA (1)...(19): siRNA sense strand
ccaggaacccguaaacuuc

SEQ ID NO: 528657 - RNA, 19 nt, Homo sapiens
  misc_RNA (1)...(19): siRNA sense strand
ucaaagaccucauuuuaag

SEQ ID NO: 528658 - RNA, 19 nt, Homo sapiens
  misc_RNA (1)...(19): siRNA sense strand
uggcaguucuugucaguug

SEQ ID NO: 528659 - RNA, 19 nt, Homo sapiens
  misc_RNA (1)...(19): siRNA sense strand
cgaauucaaccuuauuaug

SEQ ID NO: 528660 - RNA, 19 nt, Homo sapiens
  misc_RNA (1)...(19): siRNA sense strand
uacggucgcugacuacuug

SEQ ID NO: 528661 - RNA, 19 nt, Homo sapiens
  misc_RNA (1)...(19): siRNA sense strand
caaacgcagugcaaucaag

SEQ ID NO: 528662 - RNA, 19 nt, Homo sapiens
  misc_RNA (1)...(19): siRNA sense strand
ccguaaacuucauaacauu

SEQ ID NO: 528663 - RNA, 19 nt, Homo sapiens
  misc_RNA (1)...(19): siRNA sense strand
gacagguuguaaaggcaua

SEQ ID NO: 528664 - RNA, 19 nt, Homo sapiens
  misc_RNA (1)...(19): siRNA sense strand
gcagcacaguuucuucaag

SEQ ID NO: 528665 - RNA, 19 nt, Homo sapiens
  misc_RNA (1)...(19): siRNA sense strand
cauuugaaacgccacuuua

SEQ ID NO: 528666 - RNA, 19 nt, Homo sapiens
  misc_RNA (1)...(19): siRNA sense strand
gaugaagguacaaauacaa

SEQ ID NO: 528667 - RNA, 19 nt, Homo sapiens
  misc_RNA (1)...(19): siRNA sense strand
gcauuugaaacgccacuuu

SEQ ID NO: 528668 - RNA, 19 nt, Homo sapiens
  misc_RNA (1)...(19): siRNA sense strand
gaacccguaaacuucauaa

SEQ ID NO: 528669 - RNA, 19 nt, Homo sapiens
  misc_RNA (1)...(19): siRNA sense strand
gaaaguuugcgcaacagau

SEQ ID NO: 528670 - RNA, 19 nt, Homo sapiens
  misc_RNA (1)...(19): siRNA sense strand
ggagagacuucagcaugca

SEQ ID NO: 528671 - RNA, 19 nt, Homo sapiens
  misc_RNA (1)...(19): siRNA sense strand
ugaugaagguacaaauaca

SEQ ID NO: 528672 - RNA, 19 nt, Homo sapiens
  misc_RNA (1)...(19): siRNA sense strand
cacgaaaguuugcgcaaca

SEQ ID NO: 528673 - RNA, 19 nt, Homo sapiens
  misc_RNA (1)...(19): siRNA sense strand
caaguaauaguguaucuac

SEQ ID NO: 528674 - RNA, 19 nt, Homo sapiens
  misc_RNA (1)...(19): siRNA sense strand
acuuggaacuuaaagaaga

SEQ ID NO: 528675 - RNA, 19 nt, Homo sapiens
  misc_RNA (1)...(19): siRNA sense strand
gagguagaucagaugaaua

SEQ ID NO: 528676 - RNA, 19 nt, Homo sapiens
  misc_RNA (1)...(19): siRNA sense strand
agguagaucagaugaauaa

SEQ ID NO: 528677 - RNA, 19 nt, Homo sapiens
  misc_RNA (1)...(19): siRNA sense strand
uuaaagaagaccaaagaug

SEQ ID NO: 528678 - RNA, 19 nt, Homo sapiens
  misc_RNA (1)...(19): siRNA sense strand
gguauuccaccugcucaua

SEQ ID NO: 528679 - RNA, 19 nt, Homo sapiens
  misc_RNA (1)...(19): siRNA sense strand
cccguaaacuucauaacau

SEQ ID NO: 528680 - RNA, 19 nt, Homo sapiens
  misc_RNA (1)...(19): siRNA sense strand
ugaaacgccacuuuauguu

SEQ ID NO: 528681 - RNA, 19 nt, Homo sapiens
  misc_RNA (1)...(19): siRNA sense strand
cagauucagcaaccucuaa

SEQ ID NO: 528682 - RNA, 19 nt, Homo sapiens
  misc_RNA (1)...(19): siRNA sense strand
uaaugagguuuacuaugca

SEQ ID NO: 528683 - RNA, 19 nt, Homo sapiens
  misc_RNA (1)...(19): siRNA sense strand
caagaaaacagcugaugaa

SEQ ID NO: 528684 - RNA, 19 nt, Homo sapiens
  misc_RNA (1)...(19): siRNA sense strand
ggaacccguaaacuucaua

SEQ ID NO: 528685 - RNA, 19 nt, Homo sapiens
  misc_RNA (1)...(19): siRNA sense strand
gaguacaaaccaccaggaa

SEQ ID NO: 528686 - RNA, 19 nt, Homo sapiens
  misc_RNA (1)...(19): siRNA sense strand
aaagaagaccaaagaugga

SEQ ID NO: 528687 - RNA, 19 nt, Homo sapiens
  misc_RNA (1)...(19): siRNA sense strand
gcauauuaaugagguuuac

SEQ ID NO: 528688 - RNA, 19 nt, Homo sapiens
  misc_RNA (1)...(19): siRNA sense strand
uuugagaaguugccagaug

SEQ ID NO: 528689 - RNA, 19 nt, Homo sapiens
  misc_RNA (1)...(19): siRNA sense strand
uauuccaccugcucauauu

SEQ ID NO: 528690 - RNA, 19 nt, Homo sapiens
  misc_RNA (1)...(19): siRNA sense strand
ugaaaugcacacuggagaa

SEQ ID NO: 528691 - RNA, 19 nt, Homo sapiens
  misc_RNA (1)...(19): siRNA sense strand
ucagcaaccucuaacuaac

SEQ ID NO: 528692 - RNA, 19 nt, Homo sapiens
  misc_RNA (1)...(19): siRNA sense strand
uaguggaaguucuggguau

SEQ ID NO: 528693 - RNA, 19 nt, Homo sapiens
  misc_RNA (1)...(19): siRNA sense strand
gaaaugcacacuggagaac

SEQ ID NO: 528694 - RNA, 19 nt, Homo sapiens
  misc_RNA (1)...(19): siRNA sense strand
cagaggugcuacugggaau

SEQ ID NO: 528695 - RNA, 19 nt, Homo sapiens
  misc_RNA (1)...(19): siRNA sense strand
caugcaaaccuucaucugu

SEQ ID NO: 528696 - RNA, 19 nt, Homo sapiens
  misc_RNA (1)...(19): siRNA sense strand
cggaagguuuacaaugaug

SEQ ID NO: 528697 - RNA, 19 nt, Homo sapiens
  misc_RNA (1)...(19): siRNA sense strand
guauuccaccugcucauau

SEQ ID NO: 528698 - RNA, 19 nt, Homo sapiens
  misc_RNA (1)...(19): siRNA sense strand
uugaaacgccacuuuaugu

SEQ ID NO: 528699 - RNA, 19 nt, Homo sapiens
  misc_RNA (1)...(19): siRNA sense strand
uacugggaaugccuuauga

SEQ ID NO: 528700 - RNA, 19 nt, Homo sapiens
  misc_RNA (1)...(19): siRNA sense strand
aaacgcagugcaaucaaga

SEQ ID NO: 528701 - RNA, 19 nt, Homo sapiens
  misc_RNA (1)...(19): siRNA sense strand
gccacuuuauguuucgaaa

SEQ ID NO: 528702 - RNA, 19 nt, Homo sapiens
  misc_RNA (1)...(19): siRNA sense strand
cuuugaaccuaacacgaaa

SEQ ID NO: 528703 - RNA, 19 nt, Homo sapiens
  misc_RNA (1)...(19): siRNA sense strand
ggcaccaccuccaguacau

SEQ ID NO: 528704 - RNA, 19 nt, Homo sapiens
  misc_RNA (1)...(19): siRNA sense strand
guucaguggugccaaugag

SEQ ID NO: 528705 - RNA, 19 nt, Homo sapiens
  misc_RNA (1)...(19): siRNA sense strand
auaguugacuuuggcaguu

SEQ ID NO: 528706 - RNA, 19 nt, Homo sapiens
  misc_RNA (1)...(19): siRNA sense strand
uccagaacuuaguaucauu

SEQ ID NO: 528707 - RNA, 19 nt, Homo sapiens
  misc_RNA (1)...(19): siRNA sense strand
aaaguuugcgcaacagaug

SEQ ID NO: 528708 - RNA, 19 nt, Homo sapiens
  misc_RNA (1)...(19): siRNA sense strand
ugaaucaagcacagauaga

SEQ ID NO: 528709 - RNA, 19 nt, Homo sapiens
  misc_RNA (1)...(19): siRNA sense strand
ccagauggcacuuggaacu

SEQ ID NO: 528710 - RNA, 19 nt, Homo sapiens
  misc_RNA (1)...(19): siRNA sense strand
gaccuugccauugauaugu

SEQ ID NO: 528711 - RNA, 19 nt, Homo sapiens
  misc_RNA (1)...(19): siRNA sense strand
ccagaacuuaguaucauuc

SEQ ID NO: 528712 - RNA, 19 nt, Homo sapiens
  misc_RNA (1)...(19): siRNA sense strand
cuacugggaaugccuuaug

SEQ ID NO: 528713 - RNA, 19 nt, Homo sapiens
  misc_RNA (1)...(19): siRNA sense strand
gaucaaaacauacaagcau

SEQ ID NO: 528714 - RNA, 19 nt, Homo sapiens
  misc_RNA (1)...(19): siRNA sense strand
caagcauauuaaugagguu

SEQ ID NO: 528715 - RNA, 19 nt, Homo sapiens
  misc_RNA (1)...(19): siRNA sense strand
gaagaccaaagauggaaaa

SEQ ID NO: 528716 - RNA, 19 nt, Homo sapiens
  misc_RNA (1)...(19): siRNA sense strand
gcgacuccagaacuuagua

SEQ ID NO: 528717 - RNA, 19 nt, Homo sapiens
  misc_RNA (1)...(19): siRNA sense strand
ccccaaaacucgaauucaa

SEQ ID NO: 528718 - RNA, 19 nt, Homo sapiens
  misc_RNA (1)...(19): siRNA sense strand
uuaaggaugcuugauuaug

SEQ ID NO: 528719 - RNA, 19 nt, Homo sapiens
  misc_RNA (1)...(19): siRNA sense strand
gaagcgaagacaccaacag

SEQ ID NO: 528720 - RNA, 19 nt, Homo sapiens
  misc_RNA (1)...(19): siRNA sense strand
caccugcucauauucuuga

SEQ ID NO: 528721 - RNA, 19 nt, Homo sapiens
  misc_RNA (1)...(19): siRNA sense strand
acgcagugcaaucaagaua

SEQ ID NO: 528722 - RNA, 19 nt, Homo sapiens
  misc_RNA (1)...(19): siRNA sense strand
ucuuugaaccuaacacgaa

SEQ ID NO: 528723 - RNA, 19 nt, Homo sapiens
  misc_RNA (1)...(19): siRNA sense strand
uucagcaaccucuaacuaa

SEQ ID NO: 528724 - RNA, 19 nt, Homo sapiens
  misc_RNA (1)...(19): siRNA sense strand
caggaacccguaaacuuca

SEQ ID NO: 528725 - RNA, 19 nt, Homo sapiens
  misc_RNA (1)...(19): siRNA sense strand
acuuaaagaagaccaaaga

SEQ ID NO: 528726 - RNA, 19 nt, Homo sapiens
  misc_RNA (1)...(19): siRNA sense strand
caaugagguagaucagaug

SEQ ID NO: 528727 - RNA, 19 nt, Homo sapiens
  misc_RNA (1)...(19): siRNA sense strand
ggaacuuaaagaagaccaa

SEQ ID NO: 528728 - RNA, 19 nt, Homo sapiens
  misc_RNA (1)...(19): siRNA sense strand
ccaaacgcagugcaaucaa

SEQ ID NO: 528729 - RNA, 19 nt, Homo sapiens
  misc_RNA (1)...(19): siRNA sense strand
gcaugcaaaccuucaucug

SEQ ID NO: 528730 - RNA, 19 nt, Homo sapiens
  misc_RNA (1)...(19): siRNA sense strand
ugaccuugccauugauaug

SEQ ID NO: 528731 - RNA, 19 nt, Homo sapiens
  misc_RNA (1)...(19): siRNA sense strand
gaaccuaacacgaaaguuu

SEQ ID NO: 528732 - RNA, 19 nt, Homo sapiens
  misc_RNA (1)...(19): siRNA sense strand
uaaggaugcuugauuauga

SEQ ID NO: 528733 - RNA, 19 nt, Homo sapiens
  misc_RNA (1)...(19): siRNA sense strand
gcuaauaccuuggacuuug

SEQ ID NO: 528734 - RNA, 19 nt, Homo sapiens
  misc_RNA (1)...(19): siRNA sense strand
gaaaacagcugaugaaggu

SEQ ID NO: 528735 - RNA, 19 nt, Homo sapiens
  misc_RNA (1)...(19): siRNA sense strand
gaagguacaaauacaagua

SEQ ID NO: 528736 - RNA, 19 nt, Homo sapiens
  misc_RNA (1)...(19): siRNA sense strand
aaacucgaauucaaccuua

SEQ ID NO: 528737 - RNA, 19 nt, Homo sapiens
  misc_RNA (1)...(19): siRNA sense strand
gaauggagcuauggacguu

SEQ ID NO: 528738 - RNA, 19 nt, Homo sapiens
  misc_RNA (1)...(19): siRNA sense strand
gggaaugccuuaugaccuu

SEQ ID NO: 528739 - RNA, 19 nt, Homo sapiens
  misc_RNA (1)...(19): siRNA sense strand
gcacuuggaacuuaaagaa

SEQ ID NO: 528740 - RNA, 19 nt, Homo sapiens
  misc_RNA (1)...(19): siRNA sense strand
ggccaagggucuacaauuc

SEQ ID NO: 528741 - RNA, 19 nt, Homo sapiens
  misc_RNA (1)...(19): siRNA sense strand
gaaggacaucugacaauga

SEQ ID NO: 528742 - RNA, 19 nt, Homo sapiens
  misc_RNA (1)...(19): siRNA sense strand
gcaaucaggccuaccagaa

SEQ ID NO: 528743 - RNA, 19 nt, Homo sapiens
  misc_RNA (1)...(19): siRNA sense strand
gcaaggggcugauagagaa

SEQ ID NO: 528744 - RNA, 19 nt, Homo sapiens
  misc_RNA (1)...(19): siRNA sense strand
cuuaugaccuugccauuga

SEQ ID NO: 528745 - RNA, 19 nt, Homo sapiens
  misc_RNA (1)...(19): siRNA sense strand
ccaaugagguagaucagau

SEQ ID NO: 528746 - RNA, 19 nt, Homo sapiens
  misc_RNA (1)...(19): siRNA sense strand
uuaaugagguuuacuaugc

SEQ ID NO: 528747 - RNA, 19 nt, Homo sapiens
  misc_RNA (1)...(19): siRNA sense strand
gcaauuuccugcuccucuu

SEQ ID NO: 528748 - RNA, 19 nt, Homo sapiens
  misc_RNA (1)...(19): siRNA sense strand
gcagugcaaucaagauagu

SEQ ID NO: 528749 - RNA, 19 nt, Homo sapiens
  misc_RNA (1)...(19): siRNA sense strand
gacaggaguuugugugcaa

SEQ ID NO: 528750 - RNA, 19 nt, Homo sapiens
  misc_RNA (1)...(19): siRNA sense strand
gagcuauggacguuaauuu

SEQ ID NO: 528751 - RNA, 19 nt, Homo sapiens
  misc_RNA (1)...(19): siRNA sense strand
gcugaugaagguacaaaua

SEQ ID NO: 528752 - RNA, 19 nt, Homo sapiens
  misc_RNA (1)...(19): siRNA sense strand
gaaguucaaagaccucauu

SEQ ID NO: 528753 - RNA, 19 nt, Homo sapiens
  misc_RNA (1)...(19): siRNA sense strand
aaaaguggauggaucguua

SEQ ID NO: 528754 - RNA, 19 nt, Homo sapiens
  misc_RNA (1)...(19): siRNA sense strand
gauggcacuuggaacuuaa

SEQ ID NO: 528755 - RNA, 19 nt, Homo sapiens
  misc_RNA (1)...(19): siRNA sense strand
ggcagaggauauaccagua

SEQ ID NO: 528756 - RNA, 19 nt, Homo sapiens
  misc_RNA (1)...(19): siRNA sense strand
gaaucaagcacagauagaa

SEQ ID NO: 528757 - RNA, 19 nt, Homo sapiens
  misc_RNA (1)...(19): siRNA sense strand
gaauucaaccuuauuaugc

SEQ ID NO: 528758 - RNA, 19 nt, Homo sapiens
  misc_RNA (1)...(19): siRNA sense strand
guucaaagaccucauuuua

SEQ ID NO: 528759 - RNA, 19 nt, Homo sapiens
  misc_RNA (1)...(19): siRNA sense strand
cuacauagugcauuugaaa

SEQ ID NO: 528760 - RNA, 19 nt, Homo sapiens
  misc_RNA (1)...(19): siRNA sense strand
gaacuuaguaucauucacu

SEQ ID NO: 528761 - RNA, 19 nt, Homo sapiens
  misc_RNA (1)...(19): siRNA sense strand
gcacugaagcuccuacaca

SEQ ID NO: 528762 - RNA, 19 nt, Homo sapiens
  misc_RNA (1)...(19): siRNA sense strand
uaacauucuuggaguggaa

SEQ ID NO: 528763 - RNA, 19 nt, Homo sapiens
  misc_RNA (1)...(19): siRNA sense strand
aaacucauccuguucaaga

SEQ ID NO: 528764 - RNA, 19 nt, Homo sapiens
  misc_RNA (1)...(19): siRNA sense strand
gcuauggacguuaauuuga

SEQ ID NO: 528765 - RNA, 19 nt, Homo sapiens
  misc_RNA (1)...(19): siRNA sense strand
agauggcacuuggaacuua

SEQ ID NO: 528766 - RNA, 19 nt, Homo sapiens
  misc_RNA (1)...(19): siRNA sense strand
ugagguagaucagaugaau

SEQ ID NO: 528767 - RNA, 19 nt, Homo sapiens
  misc_RNA (1)...(19): siRNA sense strand
ugaaggacaucugacaaug

SEQ ID NO: 528768 - RNA, 19 nt, Homo sapiens
  misc_RNA (1)...(19): siRNA sense strand
gaacuuaaagaagaccaaa

SEQ ID NO: 528769 - RNA, 19 nt, Homo sapiens
  misc_RNA (1)...(19): siRNA sense strand
ccaggaacccguaaacuuc

SEQ ID NO: 528770 - RNA, 19 nt, Homo sapiens
  misc_RNA (1)...(19): siRNA sense strand
ucaaagaccucauuuuaag

SEQ ID NO: 528771 - RNA, 19 nt, Homo sapiens
  misc_RNA (1)...(19): siRNA sense strand
uuacaugacugaaggacau

SEQ ID NO: 528772 - RNA, 19 nt, Homo sapiens
  misc_RNA (1)...(19): siRNA sense strand
uggcaguucuugucaguug

SEQ ID NO: 528773 - RNA, 19 nt, Homo sapiens
  misc_RNA (1)...(19): siRNA sense strand
ccaagagacuggcauagcu

SEQ ID NO: 528774 - RNA, 19 nt, Homo sapiens
  misc_RNA (1)...(19): siRNA sense strand
cgaauucaaccuuauuaug

SEQ ID NO: 528775 - RNA, 19 nt, Homo sapiens
  misc_RNA (1)...(19): siRNA sense strand
uacggucgcugacuacuug

SEQ ID NO: 528776 - RNA, 19 nt, Homo sapiens
  misc_RNA (1)...(19): siRNA sense strand
caaacgcagugcaaucaag

SEQ ID NO: 528777 - RNA, 19 nt, Homo sapiens
  misc_RNA (1)...(19): siRNA sense strand
ggacauccaacauaccaau

SEQ ID NO: 528778 - RNA, 19 nt, Homo sapiens
  misc_RNA (1)...(19): siRNA sense strand
ccguaaacuucauaacauu

SEQ ID NO: 528779 - RNA, 19 nt, Homo sapiens
  misc_RNA (1)...(19): siRNA sense strand
gacagguuguaaaggcaua

SEQ ID NO: 528780 - RNA, 19 nt, Homo sapiens
  misc_RNA (1)...(19): siRNA sense strand
gcacauuacaugacugaag

SEQ ID NO: 528781 - RNA, 19 nt, Homo sapiens
  misc_RNA (1)...(19): siRNA sense strand
ccaccaccauggacaacaa

SEQ ID NO: 528782 - RNA, 19 nt, Homo sapiens
  misc_RNA (1)...(19): siRNA sense strand
gcagcacaguuucuucaag

SEQ ID NO: 528783 - RNA, 19 nt, Homo sapiens
  misc_RNA (1)...(19): siRNA sense strand
cauuugaaacgccacuuua

SEQ ID NO: 528784 - RNA, 19 nt, Homo sapiens
  misc_RNA (1)...(19): siRNA sense strand
gaugaagguacaaauacaa

SEQ ID NO: 528785 - RNA, 19 nt, Homo sapiens
  misc_RNA (1)...(19): siRNA sense strand
gcauuugaaacgccacuuu

SEQ ID NO: 528786 - RNA, 19 nt, Homo sapiens
  misc_RNA (1)...(19): siRNA sense strand
gaacccguaaacuucauaa

SEQ ID NO: 528787 - RNA, 19 nt, Homo sapiens
  misc_RNA (1)...(19): siRNA sense strand
gaaaguuugcgcaacagau

SEQ ID NO: 528788 - RNA, 19 nt, Homo sapiens
  misc_RNA (1)...(19): siRNA sense strand
ugaugaagguacaaauaca

SEQ ID NO: 528789 - RNA, 19 nt, Homo sapiens
  misc_RNA (1)...(19): siRNA sense strand
ggagagacuucagcaugca

SEQ ID NO: 528790 - RNA, 19 nt, Homo sapiens
  misc_RNA (1)...(19): siRNA sense strand
cacgaaaguuugcgcaaca

SEQ ID NO: 528791 - RNA, 19 nt, Homo sapiens
  misc_RNA (1)...(19): siRNA sense strand
caaguaauaguguaucuac

SEQ ID NO: 528792 - RNA, 19 nt, Homo sapiens
  misc_RNA (1)...(19): siRNA sense strand
acuuggaacuuaaagaaga

SEQ ID NO: 528793 - RNA, 19 nt, Homo sapiens
  misc_RNA (1)...(19): siRNA sense strand
gagguagaucagaugaaua

SEQ ID NO: 528794 - RNA, 19 nt, Homo sapiens
  misc_RNA (1)...(19): siRNA sense strand
agguagaucagaugaauaa

SEQ ID NO: 528795 - RNA, 19 nt, Homo sapiens
  misc_RNA (1)...(19): siRNA sense strand
caacgaauagcuccucuac

SEQ ID NO: 528796 - RNA, 19 nt, Homo sapiens
  misc_RNA (1)...(19): siRNA sense strand
uuaaagaagaccaaagaug

SEQ ID NO: 528797 - RNA, 19 nt, Homo sapiens
  misc_RNA (1)...(19): siRNA sense strand
gguauuccaccugcucaua

SEQ ID NO: 528798 - RNA, 19 nt, Homo sapiens
  misc_RNA (1)...(19): siRNA sense strand
cccguaaacuucauaacau

SEQ ID NO: 528799 - RNA, 19 nt, Homo sapiens
  misc_RNA (1)...(19): siRNA sense strand
ccaagggucuacaauucuc

SEQ ID NO: 528800 - RNA, 19 nt, Homo sapiens
  misc_RNA (1)...(19): siRNA sense strand
ugaaacgccacuuuauguu

SEQ ID NO: 528801 - RNA, 19 nt, Homo sapiens
  misc_RNA (1)...(19): siRNA sense strand
aaucaggccuaccagaauc

SEQ ID NO: 528802 - RNA, 19 nt, Homo sapiens
  misc_RNA (1)...(19): siRNA sense strand
cagauucagcaaccucuaa

SEQ ID NO: 528803 - RNA, 19 nt, Homo sapiens
  misc_RNA (1)...(19): siRNA sense strand
ccaagauucuauggagguu

SEQ ID NO: 528804 - RNA, 19 nt, Homo sapiens
  misc_RNA (1)...(19): siRNA sense strand
uaaugagguuuacuaugca

SEQ ID NO: 528805 - RNA, 19 nt, Homo sapiens
  misc_RNA (1)...(19): siRNA sense strand
ggacagaauggagcuaugg

SEQ ID NO: 528806 - RNA, 19 nt, Homo sapiens
  misc_RNA (1)...(19): siRNA sense strand
caaucaggccuaccagaau

SEQ ID NO: 528807 - RNA, 19 nt, Homo sapiens
  misc_RNA (1)...(19): siRNA sense strand
uguugaaacucauccuguu

SEQ ID NO: 528808 - RNA, 19 nt, Homo sapiens
  misc_RNA (1)...(19): siRNA sense strand
caagaaaacagcugaugaa

SEQ ID NO: 528809 - RNA, 19 nt, Homo sapiens
  misc_RNA (1)...(19): siRNA sense strand
gcauauuaaugagguuuac

SEQ ID NO: 528810 - RNA, 19 nt, Homo sapiens
  misc_RNA (1)...(19): siRNA sense strand
ggaacccguaaacuucaua

SEQ ID NO: 528811 - RNA, 19 nt, Homo sapiens
  misc_RNA (1)...(19): siRNA sense strand
gaguacaaaccaccaggaa

SEQ ID NO: 528812 - RNA, 19 nt, Homo sapiens
  misc_RNA (1)...(19): siRNA sense strand
aaagaagaccaaagaugga

SEQ ID NO: 528813 - RNA, 19 nt, Homo sapiens
  misc_RNA (1)...(19): siRNA sense strand
uuugagaaguugccagaug

SEQ ID NO: 528814 - RNA, 19 nt, Homo sapiens
  misc_RNA (1)...(19): siRNA sense strand
uauuccaccugcucauauu

SEQ ID NO: 528815 - RNA, 19 nt, Homo sapiens
  misc_RNA (1)...(19): siRNA sense strand
ugaaaugcacacuggagaa

SEQ ID NO: 528816 - RNA, 19 nt, Homo sapiens
  misc_RNA (1)...(19): siRNA sense strand
ucagcaaccucuaacuaac

SEQ ID NO: 528817 - RNA, 19 nt, Homo sapiens
  misc_RNA (1)...(19): siRNA sense strand
uaguggaaguucuggguau

SEQ ID NO: 528818 - RNA, 19 nt, Homo sapiens
  misc_RNA (1)...(19): siRNA sense strand
gaaaugcacacuggagaac

SEQ ID NO: 528819 - RNA, 19 nt, Homo sapiens
  misc_RNA (1)...(19): siRNA sense strand
cagaggugcuacugggaau

SEQ ID NO: 528820 - RNA, 19 nt, Homo sapiens
  misc_RNA (1)...(19): siRNA sense strand
cggaagguuuacaaugaug

SEQ ID NO: 528821 - RNA, 19 nt, Homo sapiens
  misc_RNA (1)...(19): siRNA sense strand
aaggacaucugacaaugag

SEQ ID NO: 528822 - RNA, 19 nt, Homo sapiens
  misc_RNA (1)...(19): siRNA sense strand
caugcaaaccuucaucugu

SEQ ID NO: 528823 - RNA, 19 nt, Homo sapiens
  misc_RNA (1)...(19): siRNA sense strand
guauuccaccugcucauau

SEQ ID NO: 528824 - RNA, 19 nt, Homo sapiens
  misc_RNA (1)...(19): siRNA sense strand
cuaauaccuuggacuuugg

SEQ ID NO: 528825 - RNA, 19 nt, Homo sapiens
  misc_RNA (1)...(19): siRNA sense strand
aaacgcagugcaaucaaga

SEQ ID NO: 528826 - RNA, 19 nt, Homo sapiens
  misc_RNA (1)...(19): siRNA sense strand
gccacuuuauguuucgaaa

SEQ ID NO: 528827 - RNA, 19 nt, Homo sapiens
  misc_RNA (1)...(19): siRNA sense strand
uugaaacgccacuuuaugu

SEQ ID NO: 528828 - RNA, 19 nt, Homo sapiens
  misc_RNA (1)...(19): siRNA sense strand
uacugggaaugccuuauga

SEQ ID NO: 528829 - RNA, 19 nt, Homo sapiens
  misc_RNA (1)...(19): siRNA sense strand
ggagcuauggacguuaauu

SEQ ID NO: 528830 - RNA, 19 nt, Homo sapiens
  misc_RNA (1)...(19): siRNA sense strand
cauccaacauaccaauuuu

SEQ ID NO: 528831 - RNA, 19 nt, Homo sapiens
  misc_RNA (1)...(19): siRNA sense strand
gaaccuaacacgaaaguuu

SEQ ID NO: 528832 - RNA, 19 nt, Homo sapiens
  misc_RNA (1)...(19): siRNA sense strand
uaaggaugcuugauuauga

SEQ ID NO: 528833 - RNA, 19 nt, Homo sapiens
  misc_RNA (1)...(19): siRNA sense strand
gaaaacagcugaugaaggu

SEQ ID NO: 528834 - RNA, 19 nt, Homo sapiens
  misc_RNA (1)...(19): siRNA sense strand
gaagguacaaauacaagua

SEQ ID NO: 528835 - RNA, 19 nt, Homo sapiens
  misc_RNA (1)...(19): siRNA sense strand
aaacucgaauucaaccuua

SEQ ID NO: 528836 - RNA, 19 nt, Homo sapiens
  misc_RNA (1)...(19): siRNA sense strand
gggaaugccuuaugaccuu

SEQ ID NO: 528837 - RNA, 19 nt, Homo sapiens
  misc_RNA (1)...(19): siRNA sense strand
gcacuuggaacuuaaagaa

SEQ ID NO: 528838 - RNA, 19 nt, Homo sapiens
  misc_RNA (1)...(19): siRNA sense strand
cuuaugaccuugccauuga

SEQ ID NO: 528839 - RNA, 19 nt, Homo sapiens
  misc_RNA (1)...(19): siRNA sense strand
ccaaugagguagaucagau

SEQ ID NO: 528840 - RNA, 19 nt, Homo sapiens
  misc_RNA (1)...(19): siRNA sense strand
uuaaugagguuuacuaugc

SEQ ID NO: 528841 - RNA, 19 nt, Homo sapiens
  misc_RNA (1)...(19): siRNA sense strand
gcagugcaaucaagauagu

SEQ ID NO: 528842 - RNA, 19 nt, Homo sapiens
  misc_RNA (1)...(19): siRNA sense strand
gcugaugaagguacaaaua

SEQ ID NO: 528843 - RNA, 19 nt, Homo sapiens
  misc_RNA (1)...(19): siRNA sense strand
gaaguucaaagaccucauu

SEQ ID NO: 528844 - RNA, 19 nt, Homo sapiens
  misc_RNA (1)...(19): siRNA sense strand
aaaaguggauggaucguua

SEQ ID NO: 528845 - RNA, 19 nt, Homo sapiens
  misc_RNA (1)...(19): siRNA sense strand
gauggcacuuggaacuuaa

SEQ ID NO: 528846 - RNA, 19 nt, Homo sapiens
  misc_RNA (1)...(19): siRNA sense strand
ggcagaggauauaccagua

SEQ ID NO: 528847 - RNA, 19 nt, Homo sapiens
  misc_RNA (1)...(19): siRNA sense strand
gaaucaagcacagauagaa

SEQ ID NO: 528848 - RNA, 19 nt, Homo sapiens
  misc_RNA (1)...(19): siRNA sense strand
gaauucaaccuuauuaugc

SEQ ID NO: 528849 - RNA, 19 nt, Homo sapiens
  misc_RNA (1)...(19): siRNA sense strand
guucaaagaccucauuuua

SEQ ID NO: 528850 - RNA, 19 nt, Homo sapiens
  misc_RNA (1)...(19): siRNA sense strand
cuacauagugcauuugaaa

SEQ ID NO: 528851 - RNA, 19 nt, Homo sapiens
  misc_RNA (1)...(19): siRNA sense strand
gaacuuaguaucauucacu

SEQ ID NO: 528852 - RNA, 19 nt, Homo sapiens
  misc_RNA (1)...(19): siRNA sense strand
uaacauucuuggaguggaa

SEQ ID NO: 528853 - RNA, 19 nt, Homo sapiens
  misc_RNA (1)...(19): siRNA sense strand
agauggcacuuggaacuua

SEQ ID NO: 528854 - RNA, 19 nt, Homo sapiens
  misc_RNA (1)...(19): siRNA sense strand
ugagguagaucagaugaau

SEQ ID NO: 528855 - RNA, 19 nt, Homo sapiens
  misc_RNA (1)...(19): siRNA sense strand
gaacuuaaagaagaccaaa

SEQ ID NO: 528856 - RNA, 19 nt, Homo sapiens
  misc_RNA (1)...(19): siRNA sense strand
ccaggaacccguaaacuuc

SEQ ID NO: 528857 - RNA, 19 nt, Homo sapiens
  misc_RNA (1)...(19): siRNA sense strand
ucaaagaccucauuuuaag

SEQ ID NO: 528858 - RNA, 19 nt, Homo sapiens
  misc_RNA (1)...(19): siRNA sense strand
uggcaguucuugucaguug

SEQ ID NO: 528859 - RNA, 19 nt, Homo sapiens
  misc_RNA (1)...(19): siRNA sense strand
cgaauucaaccuuauuaug

SEQ ID NO: 528860 - RNA, 19 nt, Homo sapiens
  misc_RNA (1)...(19): siRNA sense strand
uacggucgcugacuacuug

SEQ ID NO: 528861 - RNA, 19 nt, Homo sapiens
  misc_RNA (1)...(19): siRNA sense strand
caaacgcagugcaaucaag

SEQ ID NO: 528862 - RNA, 19 nt, Homo sapiens
  misc_RNA (1)...(19): siRNA sense strand
ccguaaacuucauaacauu

SEQ ID NO: 528863 - RNA, 19 nt, Homo sapiens
  misc_RNA (1)...(19): siRNA sense strand
gacagguuguaaaggcaua

SEQ ID NO: 528864 - RNA, 19 nt, Homo sapiens
  misc_RNA (1)...(19): siRNA sense strand
gcagcacaguuucuucaag

SEQ ID NO: 528865 - RNA, 19 nt, Homo sapiens
  misc_RNA (1)...(19): siRNA sense strand
cauuugaaacgccacuuua

SEQ ID NO: 528866 - RNA, 19 nt, Homo sapiens
  misc_RNA (1)...(19): siRNA sense strand
gaugaagguacaaauacaa

SEQ ID NO: 528867 - RNA, 19 nt, Homo sapiens
  misc_RNA (1)...(19): siRNA sense strand
gcauuugaaacgccacuuu

SEQ ID NO: 528868 - RNA, 19 nt, Homo sapiens
  misc_RNA (1)...(19): siRNA sense strand
gaacccguaaacuucauaa

SEQ ID NO: 528869 - RNA, 19 nt, Homo sapiens
  misc_RNA (1)...(19): siRNA sense strand
gaaaguuugcgcaacagau

SEQ ID NO: 528870 - RNA, 19 nt, Homo sapiens
  misc_RNA (1)...(19): siRNA sense strand
ggagagacuucagcaugca

SEQ ID NO: 528871 - RNA, 19 nt, Homo sapiens
  misc_RNA (1)...(19): siRNA sense strand
ugaugaagguacaaauaca

SEQ ID NO: 528872 - RNA, 19 nt, Homo sapiens
  misc_RNA (1)...(19): siRNA sense strand
cacgaaaguuugcgcaaca

SEQ ID NO: 528873 - RNA, 19 nt, Homo sapiens
  misc_RNA (1)...(19): siRNA sense strand
caaguaauaguguaucuac

SEQ ID NO: 528874 - RNA, 19 nt, Homo sapiens
  misc_RNA (1)...(19): siRNA sense strand
acuuggaacuuaaagaaga

SEQ ID NO: 528875 - RNA, 19 nt, Homo sapiens
  misc_RNA (1)...(19): siRNA sense strand
gagguagaucagaugaaua

SEQ ID NO: 528876 - RNA, 19 nt, Homo sapiens
  misc_RNA (1)...(19): siRNA sense strand
agguagaucagaugaauaa

SEQ ID NO: 528877 - RNA, 19 nt, Homo sapiens
  misc_RNA (1)...(19): siRNA sense strand
uuaaagaagaccaaagaug

SEQ ID NO: 528878 - RNA, 19 nt, Homo sapiens
  misc_RNA (1)...(19): siRNA sense strand
gguauuccaccugcucaua

SEQ ID NO: 528879 - RNA, 19 nt, Homo sapiens
  misc_RNA (1)...(19): siRNA sense strand
cccguaaacuucauaacau

SEQ ID NO: 528880 - RNA, 19 nt, Homo sapiens
  misc_RNA (1)...(19): siRNA sense strand
ugaaacgccacuuuauguu

SEQ ID NO: 528881 - RNA, 19 nt, Homo sapiens
  misc_RNA (1)...(19): siRNA sense strand
cagauucagcaaccucuaa

SEQ ID NO: 528882 - RNA, 19 nt, Homo sapiens
  misc_RNA (1)...(19): siRNA sense strand
uaaugagguuuacuaugca

SEQ ID NO: 528883 - RNA, 19 nt, Homo sapiens
  misc_RNA (1)...(19): siRNA sense strand
caagaaaacagcugaugaa

SEQ ID NO: 528884 - RNA, 19 nt, Homo sapiens
  misc_RNA (1)...(19): siRNA sense strand
ggaacccguaaacuucaua

SEQ ID NO: 528885 - RNA, 19 nt, Homo sapiens
  misc_RNA (1)...(19): siRNA sense strand
gaguacaaaccaccaggaa

SEQ ID NO: 528886 - RNA, 19 nt, Homo sapiens
  misc_RNA (1)...(19): siRNA sense strand
aaagaagaccaaagaugga

SEQ ID NO: 528887 - RNA, 19 nt, Homo sapiens
  misc_RNA (1)...(19): siRNA sense strand
gcauauuaaugagguuuac

SEQ ID NO: 528888 - RNA, 19 nt, Homo sapiens
  misc_RNA (1)...(19): siRNA sense strand
uuugagaaguugccagaug

SEQ ID NO: 528889 - RNA, 19 nt, Homo sapiens
  misc_RNA (1)...(19): siRNA sense strand
uauuccaccugcucauauu

SEQ ID NO: 528890 - RNA, 19 nt, Homo sapiens
  misc_RNA (1)...(19): siRNA sense strand
ugaaaugcacacuggagaa

SEQ ID NO: 528891 - RNA, 19 nt, Homo sapiens
  misc_RNA (1)...(19): siRNA sense strand
ucagcaaccucuaacuaac

SEQ ID NO: 528892 - RNA, 19 nt, Homo sapiens
  misc_RNA (1)...(19): siRNA sense strand
uaguggaaguucuggguau

SEQ ID NO: 528893 - RNA, 19 nt, Homo sapiens
  misc_RNA (1)...(19): siRNA sense strand
gaaaugcacacuggagaac

SEQ ID NO: 528894 - RNA, 19 nt, Homo sapiens
  misc_RNA (1)...(19): siRNA sense strand
cagaggugcuacugggaau

SEQ ID NO: 528895 - RNA, 19 nt, Homo sapiens
  misc_RNA (1)...(19): siRNA sense strand
caugcaaaccuucaucugu

SEQ ID NO: 528896 - RNA, 19 nt, Homo sapiens
  misc_RNA (1)...(19): siRNA sense strand
cggaagguuuacaaugaug

SEQ ID NO: 528897 - RNA, 19 nt, Homo sapiens
  misc_RNA (1)...(19): siRNA sense strand
guauuccaccugcucauau

SEQ ID NO: 528898 - RNA, 19 nt, Homo sapiens
  misc_RNA (1)...(19): siRNA sense strand
uugaaacgccacuuuaugu

SEQ ID NO: 528899 - RNA, 19 nt, Homo sapiens
  misc_RNA (1)...(19): siRNA sense strand
uacugggaaugccuuauga

SEQ ID NO: 528900 - RNA, 19 nt, Homo sapiens
  misc_RNA (1)...(19): siRNA sense strand
aaacgcagugcaaucaaga

SEQ ID NO: 528901 - RNA, 19 nt, Homo sapiens
  misc_RNA (1)...(19): siRNA sense strand
gccacuuuauguuucgaaa

SEQ ID NO: 528902 - RNA, 19 nt, Homo sapiens
  misc_RNA (1)...(19): siRNA sense strand
cuuugaaccuaacacgaaa

SEQ ID NO: 528903 - RNA, 19 nt, Homo sapiens
  misc_RNA (1)...(19): siRNA sense strand
ggcaccaccuccaguacau

SEQ ID NO: 528904 - RNA, 19 nt, Homo sapiens
  misc_RNA (1)...(19): siRNA sense strand
guucaguggugccaaugag

SEQ ID NO: 528905 - RNA, 19 nt, Homo sapiens
  misc_RNA (1)...(19): siRNA sense strand
auaguugacuuuggcaguu

SEQ ID NO: 528906 - RNA, 19 nt, Homo sapiens
  misc_RNA (1)...(19): siRNA sense strand
uccagaacuuaguaucauu

SEQ ID NO: 528907 - RNA, 19 nt, Homo sapiens
  misc_RNA (1)...(19): siRNA sense strand
aaaguuugcgcaacagaug

SEQ ID NO: 528908 - RNA, 19 nt, Homo sapiens
  misc_RNA (1)...(19): siRNA sense strand
ugaaucaagcacagauaga

SEQ ID NO: 528909 - RNA, 19 nt, Homo sapiens
  misc_RNA (1)...(19): siRNA sense strand
ccagauggcacuuggaacu

SEQ ID NO: 528910 - RNA, 19 nt, Homo sapiens
  misc_RNA (1)...(19): siRNA sense strand
gaccuugccauugauaugu

SEQ ID NO: 528911 - RNA, 19 nt, Homo sapiens
  misc_RNA (1)...(19): siRNA sense strand
ccagaacuuaguaucauuc

SEQ ID NO: 528912 - RNA, 19 nt, Homo sapiens
  misc_RNA (1)...(19): siRNA sense strand
cuacugggaaugccuuaug

SEQ ID NO: 528913 - RNA, 19 nt, Homo sapiens
  misc_RNA (1)...(19): siRNA sense strand
gaucaaaacauacaagcau

SEQ ID NO: 528914 - RNA, 19 nt, Homo sapiens
  misc_RNA (1)...(19): siRNA sense strand
caagcauauuaaugagguu

SEQ ID NO: 528915 - RNA, 19 nt, Homo sapiens
  misc_RNA (1)...(19): siRNA sense strand
gaagaccaaagauggaaaa

SEQ ID NO: 528916 - RNA, 19 nt, Homo sapiens
  misc_RNA (1)...(19): siRNA sense strand
gcgacuccagaacuuagua

SEQ ID NO: 528917 - RNA, 19 nt, Homo sapiens
  misc_RNA (1)...(19): siRNA sense strand
ccccaaaacucgaauucaa

SEQ ID NO: 528918 - RNA, 19 nt, Homo sapiens
  misc_RNA (1)...(19): siRNA sense strand
uuaaggaugcuugauuaug

SEQ ID NO: 528919 - RNA, 19 nt, Homo sapiens
  misc_RNA (1)...(19): siRNA sense strand
gaagcgaagacaccaacag

SEQ ID NO: 528920 - RNA, 19 nt, Homo sapiens
  misc_RNA (1)...(19): siRNA sense strand
caccugcucauauucuuga

SEQ ID NO: 528921 - RNA, 19 nt, Homo sapiens
  misc_RNA (1)...(19): siRNA sense strand
acgcagugcaaucaagaua

SEQ ID NO: 528922 - RNA, 19 nt, Homo sapiens
  misc_RNA (1)...(19): siRNA sense strand
ucuuugaaccuaacacgaa

SEQ ID NO: 528923 - RNA, 19 nt, Homo sapiens
  misc_RNA (1)...(19): siRNA sense strand
uucagcaaccucuaacuaa

SEQ ID NO: 528924 - RNA, 19 nt, Homo sapiens
  misc_RNA (1)...(19): siRNA sense strand
caggaacccguaaacuuca

SEQ ID NO: 528925 - RNA, 19 nt, Homo sapiens
  misc_RNA (1)...(19): siRNA sense strand
acuuaaagaagaccaaaga

SEQ ID NO: 528926 - RNA, 19 nt, Homo sapiens
  misc_RNA (1)...(19): siRNA sense strand
caaugagguagaucagaug

SEQ ID NO: 528927 - RNA, 19 nt, Homo sapiens
  misc_RNA (1)...(19): siRNA sense strand
ggaacuuaaagaagaccaa

SEQ ID NO: 528928 - RNA, 19 nt, Homo sapiens
  misc_RNA (1)...(19): siRNA sense strand
ccaaacgcagugcaaucaa

SEQ ID NO: 528929 - RNA, 19 nt, Homo sapiens
  misc_RNA (1)...(19): siRNA sense strand
gcaugcaaaccuucaucug

SEQ ID NO: 528930 - RNA, 19 nt, Homo sapiens
  misc_RNA (1)...(19): siRNA sense strand
ugaccuugccauugauaug

SEQ ID NO: 528931 - RNA, 19 nt, Homo sapiens
  misc_RNA (1)...(19): siRNA sense strand
gaaccuaacacgaaaguuu

SEQ ID NO: 528932 - RNA, 19 nt, Homo sapiens
  misc_RNA (1)...(19): siRNA sense strand
uaaggaugcuugauuauga

SEQ ID NO: 528933 - RNA, 19 nt, Homo sapiens
  misc_RNA (1)...(19): siRNA sense strand
gaaaacagcugaugaaggu

SEQ ID NO: 528934 - RNA, 19 nt, Homo sapiens
  misc_RNA (1)...(19): siRNA sense strand
gaagguacaaauacaagua

SEQ ID NO: 528935 - RNA, 19 nt, Homo sapiens
  misc_RNA (1)...(19): siRNA sense strand
aaacucgaauucaaccuua

SEQ ID NO: 528936 - RNA, 19 nt, Homo sapiens
  misc_RNA (1)...(19): siRNA sense strand
gggaaugccuuaugaccuu

SEQ ID NO: 528937 - RNA, 19 nt, Homo sapiens
  misc_RNA (1)...(19): siRNA sense strand
gcacuuggaacuuaaagaa

SEQ ID NO: 528938 - RNA, 19 nt, Homo sapiens
  misc_RNA (1)...(19): siRNA sense strand
cuuaugaccuugccauuga

SEQ ID NO: 528939 - RNA, 19 nt, Homo sapiens
  misc_RNA (1)...(19): siRNA sense strand
ccaaugagguagaucagau

SEQ ID NO: 528940 - RNA, 19 nt, Homo sapiens
  misc_RNA (1)...(19): siRNA sense strand
uuaaugagguuuacuaugc

SEQ ID NO: 528941 - RNA, 19 nt, Homo sapiens
  misc_RNA (1)...(19): siRNA sense strand
gcaauuuccugcuccucuu

SEQ ID NO: 528942 - RNA, 19 nt, Homo sapiens
  misc_RNA (1)...(19): siRNA sense strand
gcagugcaaucaagauagu

SEQ ID NO: 528943 - RNA, 19 nt, Homo sapiens
  misc_RNA (1)...(19): siRNA sense strand
gcugaugaagguacaaaua

SEQ ID NO: 528944 - RNA, 19 nt, Homo sapiens
  misc_RNA (1)...(19): siRNA sense strand
gaaguucaaagaccucauu

SEQ ID NO: 528945 - RNA, 19 nt, Homo sapiens
  misc_RNA (1)...(19): siRNA sense strand
aaaaguggauggaucguua

SEQ ID NO: 528946 - RNA, 19 nt, Homo sapiens
  misc_RNA (1)...(19): siRNA sense strand
gauggcacuuggaacuuaa

SEQ ID NO: 528947 - RNA, 19 nt, Homo sapiens
  misc_RNA (1)...(19): siRNA sense strand
ggcagaggauauaccagua

SEQ ID NO: 528948 - RNA, 19 nt, Homo sapiens
  misc_RNA (1)...(19): siRNA sense strand
gaaucaagcacagauagaa

SEQ ID NO: 528949 - RNA, 19 nt, Homo sapiens
  misc_RNA (1)...(19): siRNA sense strand
gaauucaaccuuauuaugc

SEQ ID NO: 528950 - RNA, 19 nt, Homo sapiens
  misc_RNA (1)...(19): siRNA sense strand
guucaaagaccucauuuua

SEQ ID NO: 528951 - RNA, 19 nt, Homo sapiens
  misc_RNA (1)...(19): siRNA sense strand
cuacauagugcauuugaaa

SEQ ID NO: 528952 - RNA, 19 nt, Homo sapiens
  misc_RNA (1)...(19): siRNA sense strand
gaacuuaguaucauucacu

SEQ ID NO: 528953 - RNA, 19 nt, Homo sapiens
  misc_RNA (1)...(19): siRNA sense strand
uaacauucuuggaguggaa

SEQ ID NO: 528954 - RNA, 19 nt, Homo sapiens
  misc_RNA (1)...(19): siRNA sense strand
agauggcacuuggaacuua

SEQ ID NO: 528955 - RNA, 19 nt, Homo sapiens
  misc_RNA (1)...(19): siRNA sense strand
ugagguagaucagaugaau

SEQ ID NO: 528956 - RNA, 19 nt, Homo sapiens
  misc_RNA (1)...(19): siRNA sense strand
gaacuuaaagaagaccaaa

SEQ ID NO: 528957 - RNA, 19 nt, Homo sapiens
  misc_RNA (1)...(19): siRNA sense strand
ccaggaacccguaaacuuc

SEQ ID NO: 528958 - RNA, 19 nt, Homo sapiens
  misc_RNA (1)...(19): siRNA sense strand
ucaaagaccucauuuuaag

SEQ ID NO: 528959 - RNA, 19 nt, Homo sapiens
  misc_RNA (1)...(19): siRNA sense strand
uggcaguucuugucaguug

SEQ ID NO: 528960 - RNA, 19 nt, Homo sapiens
  misc_RNA (1)...(19): siRNA sense strand
cgaauucaaccuuauuaug

SEQ ID NO: 528961 - RNA, 19 nt, Homo sapiens
  misc_RNA (1)...(19): siRNA sense strand
uacggucgcugacuacuug

SEQ ID NO: 528962 - RNA, 19 nt, Homo sapiens
  misc_RNA (1)...(19): siRNA sense strand
caaacgcagugcaaucaag

SEQ ID NO: 528963 - RNA, 19 nt, Homo sapiens
  misc_RNA (1)...(19): siRNA sense strand
ccguaaacuucauaacauu

SEQ ID NO: 528964 - RNA, 19 nt, Homo sapiens
  misc_RNA (1)...(19): siRNA sense strand
gacagguuguaaaggcaua

SEQ ID NO: 528965 - RNA, 19 nt, Homo sapiens
  misc_RNA (1)...(19): siRNA sense strand
gcagcacaguuucuucaag

SEQ ID NO: 528966 - RNA, 19 nt, Homo sapiens
  misc_RNA (1)...(19): siRNA sense strand
cauuugaaacgccacuuua

SEQ ID NO: 528967 - RNA, 19 nt, Homo sapiens
  misc_RNA (1)...(19): siRNA sense strand
gaugaagguacaaauacaa

SEQ ID NO: 528968 - RNA, 19 nt, Homo sapiens
  misc_RNA (1)...(19): siRNA sense strand
gcauuugaaacgccacuuu

SEQ ID NO: 528969 - RNA, 19 nt, Homo sapiens
  misc_RNA (1)...(19): siRNA sense strand
gaacccguaaacuucauaa

SEQ ID NO: 528970 - RNA, 19 nt, Homo sapiens
  misc_RNA (1)...(19): siRNA sense strand
gaaaguuugcgcaacagau

SEQ ID NO: 528971 - RNA, 19 nt, Homo sapiens
  misc_RNA (1)...(19): siRNA sense strand
ggagagacuucagcaugca

SEQ ID NO: 528972 - RNA, 19 nt, Homo sapiens
  misc_RNA (1)...(19): siRNA sense strand
ugaugaagguacaaauaca

SEQ ID NO: 528973 - RNA, 19 nt, Homo sapiens
  misc_RNA (1)...(19): siRNA sense strand
cacgaaaguuugcgcaaca

SEQ ID NO: 528974 - RNA, 19 nt, Homo sapiens
  misc_RNA (1)...(19): siRNA sense strand
caaguaauaguguaucuac

SEQ ID NO: 528975 - RNA, 19 nt, Homo sapiens
  misc_RNA (1)...(19): siRNA sense strand
acuuggaacuuaaagaaga

SEQ ID NO: 528976 - RNA, 19 nt, Homo sapiens
  misc_RNA (1)...(19): siRNA sense strand
gagguagaucagaugaaua

SEQ ID NO: 528977 - RNA, 19 nt, Homo sapiens
  misc_RNA (1)...(19): siRNA sense strand
agguagaucagaugaauaa

SEQ ID NO: 528978 - RNA, 19 nt, Homo sapiens
  misc_RNA (1)...(19): siRNA sense strand
uuaaagaagaccaaagaug

SEQ ID NO: 528979 - RNA, 19 nt, Homo sapiens
  misc_RNA (1)...(19): siRNA sense strand
gguauuccaccugcucaua

SEQ ID NO: 528980 - RNA, 19 nt, Homo sapiens
  misc_RNA (1)...(19): siRNA sense strand
cccguaaacuucauaacau

SEQ ID NO: 528981 - RNA, 19 nt, Homo sapiens
  misc_RNA (1)...(19): siRNA sense strand
ugaaacgccacuuuauguu

SEQ ID NO: 528982 - RNA, 19 nt, Homo sapiens
  misc_RNA (1)...(19): siRNA sense strand
cagauucagcaaccucuaa

SEQ ID NO: 528983 - RNA, 19 nt, Homo sapiens
  misc_RNA (1)...(19): siRNA sense strand
uaaugagguuuacuaugca

SEQ ID NO: 528984 - RNA, 19 nt, Homo sapiens
  misc_RNA (1)...(19): siRNA sense strand
gcauauuaaugagguuuac

SEQ ID NO: 528985 - RNA, 19 nt, Homo sapiens
  misc_RNA (1)...(19): siRNA sense strand
caagaaaacagcugaugaa

SEQ ID NO: 528986 - RNA, 19 nt, Homo sapiens
  misc_RNA (1)...(19): siRNA sense strand
ggaacccguaaacuucaua

SEQ ID NO: 528987 - RNA, 19 nt, Homo sapiens
  misc_RNA (1)...(19): siRNA sense strand
gaguacaaaccaccaggaa

SEQ ID NO: 528988 - RNA, 19 nt, Homo sapiens
  misc_RNA (1)...(19): siRNA sense strand
aaagaagaccaaagaugga

SEQ ID NO: 528989 - RNA, 19 nt, Homo sapiens
  misc_RNA (1)...(19): siRNA sense strand
uuugagaaguugccagaug

SEQ ID NO: 528990 - RNA, 19 nt, Homo sapiens
  misc_RNA (1)...(19): siRNA sense strand
uauuccaccugcucauauu

SEQ ID NO: 528991 - RNA, 19 nt, Homo sapiens
  misc_RNA (1)...(19): siRNA sense strand
ugaaaugcacacuggagaa

SEQ ID NO: 528992 - RNA, 19 nt, Homo sapiens
  misc_RNA (1)...(19): siRNA sense strand
cagaggugcuacugggaau

SEQ ID NO: 528993 - RNA, 19 nt, Homo sapiens
  misc_RNA (1)...(19): siRNA sense strand
ucagcaaccucuaacuaac

SEQ ID NO: 528994 - RNA, 19 nt, Homo sapiens
  misc_RNA (1)...(19): siRNA sense strand
uaguggaaguucuggguau

SEQ ID NO: 528995 - RNA, 19 nt, Homo sapiens
  misc_RNA (1)...(19): siRNA sense strand
gaaaugcacacuggagaac

SEQ ID NO: 528996 - RNA, 19 nt, Homo sapiens
  misc_RNA (1)...(19): siRNA sense strand
guauuccaccugcucauau

SEQ ID NO: 528997 - RNA, 19 nt, Homo sapiens
  misc_RNA (1)...(19): siRNA sense strand
caugcaaaccuucaucugu

SEQ ID NO: 528998 - RNA, 19 nt, Homo sapiens
  misc_RNA (1)...(19): siRNA sense strand
cggaagguuuacaaugaug

SEQ ID NO: 528999 - RNA, 19 nt, Homo sapiens
  misc_RNA (1)...(19): siRNA sense strand
uugaaacgccacuuuaugu

SEQ ID NO: 529000 - RNA, 19 nt, Homo sapiens
  misc_RNA (1)...(19): siRNA sense strand
uacugggaaugccuuauga

SEQ ID NO: 529001 - RNA, 19 nt, Homo sapiens
  misc_RNA (1)...(19): siRNA sense strand
aaacgcagugcaaucaaga

SEQ ID NO: 529002 - RNA, 19 nt, Homo sapiens
  misc_RNA (1)...(19): siRNA sense strand
gccacuuuauguuucgaaa

SEQ ID NO: 529003 - RNA, 19 nt, Homo sapiens
  misc_RNA (1)...(19): siRNA sense strand
cuuugaaccuaacacgaaa

SEQ ID NO: 529004 - RNA, 19 nt, Homo sapiens
  misc_RNA (1)...(19): siRNA sense strand
ggcaccaccuccaguacau

SEQ ID NO: 529005 - RNA, 19 nt, Homo sapiens
  misc_RNA (1)...(19): siRNA sense strand
guucaguggugccaaugag

SEQ ID NO: 529006 - RNA, 19 nt, Homo sapiens
  misc_RNA (1)...(19): siRNA sense strand
auaguugacuuuggcaguu

SEQ ID NO: 529007 - RNA, 19 nt, Homo sapiens
  misc_RNA (1)...(19): siRNA sense strand
uccagaacuuaguaucauu

SEQ ID NO: 529008 - RNA, 19 nt, Homo sapiens
  misc_RNA (1)...(19): siRNA sense strand
aaaguuugcgcaacagaug

SEQ ID NO: 529009 - RNA, 19 nt, Homo sapiens
  misc_RNA (1)...(19): siRNA sense strand
ugaaucaagcacagauaga

SEQ ID NO: 529010 - RNA, 19 nt, Homo sapiens
  misc_RNA (1)...(19): siRNA sense strand
ccagauggcacuuggaacu

SEQ ID NO: 529011 - RNA, 19 nt, Homo sapiens
  misc_RNA (1)...(19): siRNA sense strand
gaccuugccauugauaugu

SEQ ID NO: 529012 - RNA, 19 nt, Homo sapiens
  misc_RNA (1)...(19): siRNA sense strand
ccagaacuuaguaucauuc

SEQ ID NO: 529013 - RNA, 19 nt, Homo sapiens
  misc_RNA (1)...(19): siRNA sense strand
cuacugggaaugccuuaug

SEQ ID NO: 529014 - RNA, 19 nt, Homo sapiens
  misc_RNA (1)...(19): siRNA sense strand
caagcauauuaaugagguu

SEQ ID NO: 529015 - RNA, 19 nt, Homo sapiens
  misc_RNA (1)...(19): siRNA sense strand
gaucaaaacauacaagcau

SEQ ID NO: 529016 - RNA, 19 nt, Homo sapiens
  misc_RNA (1)...(19): siRNA sense strand
gaagaccaaagauggaaaa

SEQ ID NO: 529017 - RNA, 19 nt, Homo sapiens
  misc_RNA (1)...(19): siRNA sense strand
gcgacuccagaacuuagua

SEQ ID NO: 529018 - RNA, 19 nt, Homo sapiens
  misc_RNA (1)...(19): siRNA sense strand
ccccaaaacucgaauucaa

SEQ ID NO: 529019 - RNA, 19 nt, Homo sapiens
  misc_RNA (1)...(19): siRNA sense strand
uuaaggaugcuugauuaug

SEQ ID NO: 529020 - RNA, 19 nt, Homo sapiens
  misc_RNA (1)...(19): siRNA sense strand
caccugcucauauucuuga

SEQ ID NO: 529021 - RNA, 19 nt, Homo sapiens
  misc_RNA (1)...(19): siRNA sense strand
gaagcgaagacaccaacag

SEQ ID NO: 529022 - RNA, 19 nt, Homo sapiens
  misc_RNA (1)...(19): siRNA sense strand
acgcagugcaaucaagaua

SEQ ID NO: 529023 - RNA, 19 nt, Homo sapiens
  misc_RNA (1)...(19): siRNA sense strand
ucuuugaaccuaacacgaa

SEQ ID NO: 529024 - RNA, 19 nt, Homo sapiens
  misc_RNA (1)...(19): siRNA sense strand
caggaacccguaaacuuca

SEQ ID NO: 529025 - RNA, 19 nt, Homo sapiens
  misc_RNA (1)...(19): siRNA sense strand
acuuaaagaagaccaaaga

SEQ ID NO: 529026 - RNA, 19 nt, Homo sapiens
  misc_RNA (1)...(19): siRNA sense strand
uucagcaaccucuaacuaa

SEQ ID NO: 529027 - RNA, 19 nt, Homo sapiens
  misc_RNA (1)...(19): siRNA sense strand
caaugagguagaucagaug

SEQ ID NO: 529028 - RNA, 19 nt, Homo sapiens
  misc_RNA (1)...(19): siRNA sense strand
ggaacuuaaagaagaccaa

SEQ ID NO: 529029 - RNA, 19 nt, Homo sapiens
  misc_RNA (1)...(19): siRNA sense strand
ugaccuugccauugauaug

SEQ ID NO: 529030 - RNA, 19 nt, Homo sapiens
  misc_RNA (1)...(19): siRNA sense strand
gcaugcaaaccuucaucug

SEQ ID NO: 529031 - RNA, 19 nt, Homo sapiens
  misc_RNA (1)...(19): siRNA sense strand
gguaugagauggcugaauu

SEQ ID NO: 529032 - RNA, 19 nt, Homo sapiens
  misc_RNA (1)...(19): siRNA sense strand
gaaagucuccuuaaccaaa

SEQ ID NO: 529033 - RNA, 19 nt, Homo sapiens
  misc_RNA (1)...(19): siRNA sense strand
ggagacgacuugccagaga

SEQ ID NO: 529034 - RNA, 19 nt, Homo sapiens
  misc_RNA (1)...(19): siRNA sense strand
caaaggaagaggugaauga

SEQ ID NO: 529035 - RNA, 19 nt, Homo sapiens
  misc_RNA (1)...(19): siRNA sense strand
ugagauggcugaauucaag

SEQ ID NO: 529036 - RNA, 19 nt, Homo sapiens
  misc_RNA (1)...(19): siRNA sense strand
aagaaaggcuuggaauuga

SEQ ID NO: 529037 - RNA, 19 nt, Homo sapiens
  misc_RNA (1)...(19): siRNA sense strand
ucaaauacaugugggauuc

SEQ ID NO: 529038 - RNA, 19 nt, Homo sapiens
  misc_RNA (1)...(19): siRNA sense strand
cgacaagaaagucuccuua

SEQ ID NO: 529039 - RNA, 19 nt, Homo sapiens
  misc_RNA (1)...(19): siRNA sense strand
gaaaggcuuggaauugaaa

SEQ ID NO: 529040 - RNA, 19 nt, Homo sapiens
  misc_RNA (1)...(19): siRNA sense strand
ucaaggugaccaucaaaua

SEQ ID NO: 529041 - RNA, 19 nt, Homo sapiens
  misc_RNA (1)...(19): siRNA sense strand
gacaagaaagucuccuuaa

SEQ ID NO: 529042 - RNA, 19 nt, Homo sapiens
  misc_RNA (1)...(19): siRNA sense strand
gcacaaaggaagaggugaa

SEQ ID NO: 529043 - RNA, 19 nt, Homo sapiens
  misc_RNA (1)...(19): siRNA sense strand
gcagaugggagacgacuug

SEQ ID NO: 529044 - RNA, 19 nt, Homo sapiens
  misc_RNA (1)...(19): siRNA sense strand
ugacucugcugucugacua

SEQ ID NO: 529045 - RNA, 19 nt, Homo sapiens
  misc_RNA (1)...(19): siRNA sense strand
cgcccgagcugguaacaaa

SEQ ID NO: 529046 - RNA, 19 nt, Homo sapiens
  misc_RNA (1)...(19): siRNA sense strand
agaaaggcuuggaauugaa

SEQ ID NO: 529047 - RNA, 19 nt, Homo sapiens
  misc_RNA (1)...(19): siRNA sense strand
caagagagguguggugacu

SEQ ID NO: 529048 - RNA, 19 nt, Homo sapiens
  misc_RNA (1)...(19): siRNA sense strand
cgaaauacacagaaaugga

SEQ ID NO: 529049 - RNA, 19 nt, Homo sapiens
  misc_RNA (1)...(19): siRNA sense strand
ugaggugggucuccuguuc

SEQ ID NO: 529050 - RNA, 19 nt, Homo sapiens
  misc_RNA (1)...(19): siRNA sense strand
augagugguucacgaaaua

SEQ ID NO: 529051 - RNA, 19 nt, Homo sapiens
  misc_RNA (1)...(19): siRNA sense strand
aagaaagucuccuuaacca

SEQ ID NO: 529052 - RNA, 19 nt, Homo sapiens
  misc_RNA (1)...(19): siRNA sense strand
acaagaaagucuccuuaac

SEQ ID NO: 529053 - RNA, 19 nt, Homo sapiens
  misc_RNA (1)...(19): siRNA sense strand
ggcuuggaauugaaacaaa

SEQ ID NO: 529054 - RNA, 19 nt, Homo sapiens
  misc_RNA (1)...(19): siRNA sense strand
gaaugagugguucacgaaa

SEQ ID NO: 529055 - RNA, 19 nt, Homo sapiens
  misc_RNA (1)...(19): siRNA sense strand
gcacagccggauguucuuu

SEQ ID NO: 529056 - RNA, 19 nt, Homo sapiens
  misc_RNA (1)...(19): siRNA sense strand
caaggugaccaucaaauac

SEQ ID NO: 529057 - RNA, 19 nt, Homo sapiens
  misc_RNA (1)...(19): siRNA sense strand
gcucgcguccugaagcuuu

SEQ ID NO: 529058 - RNA, 19 nt, Homo sapiens
  misc_RNA (1)...(19): siRNA sense strand
gaauucaaggugaccauca

SEQ ID NO: 529059 - RNA, 19 nt, Homo sapiens
  misc_RNA (1)...(19): siRNA sense strand
acaaguaccuuuucaucuu

SEQ ID NO: 529060 - RNA, 19 nt, Homo sapiens
  misc_RNA (1)...(19): siRNA sense strand
aaccaaaacugccaagaaa

SEQ ID NO: 529061 - RNA, 19 nt, Homo sapiens
  misc_RNA (1)...(19): siRNA sense strand
aauccaagcgcgacaagaa

SEQ ID NO: 529062 - RNA, 19 nt, Homo sapiens
  misc_RNA (1)...(19): siRNA sense strand
gaaacaaaaccugauagaa

SEQ ID NO: 529063 - RNA, 19 nt, Homo sapiens
  misc_RNA (1)...(19): siRNA sense strand
caagaaagucuccuuaacc

SEQ ID NO: 529064 - RNA, 19 nt, Homo sapiens
  misc_RNA (1)...(19): siRNA sense strand
aaugagugguucacgaaau

SEQ ID NO: 529065 - RNA, 19 nt, Homo sapiens
  misc_RNA (1)...(19): siRNA sense strand
aacaaaaccugauagaaga

SEQ ID NO: 529066 - RNA, 19 nt, Homo sapiens
  misc_RNA (1)...(19): siRNA sense strand
ucaccaaccgcacaaagga

SEQ ID NO: 529067 - RNA, 19 nt, Homo sapiens
  misc_RNA (1)...(19): siRNA sense strand
aaacaaaaccugauagaag

SEQ ID NO: 529068 - RNA, 19 nt, Homo sapiens
  misc_RNA (1)...(19): siRNA sense strand
cacgaaauacacagaaaug

SEQ ID NO: 529069 - RNA, 19 nt, Homo sapiens
  misc_RNA (1)...(19): siRNA sense strand
uggugacucugcugucuga

SEQ ID NO: 529070 - RNA, 19 nt, Homo sapiens
  misc_RNA (1)...(19): siRNA sense strand
ucacgaaauacacagaaau

SEQ ID NO: 529071 - RNA, 19 nt, Homo sapiens
  misc_RNA (1)...(19): siRNA sense strand
caaguaccuuuucaucuuc

SEQ ID NO: 529072 - RNA, 19 nt, Homo sapiens
  misc_RNA (1)...(19): siRNA sense strand
aauucaaggugaccaucaa

SEQ ID NO: 529073 - RNA, 19 nt, Homo sapiens
  misc_RNA (1)...(19): siRNA sense strand
ggaagcacagccggauguu

SEQ ID NO: 529074 - RNA, 19 nt, Homo sapiens
  misc_RNA (1)...(19): siRNA sense strand
gcuuggaauugaaacaaaa

SEQ ID NO: 529075 - RNA, 19 nt, Homo sapiens
  misc_RNA (1)...(19): siRNA sense strand
ucugaugaauacaaagaca

SEQ ID NO: 529076 - RNA, 19 nt, Homo sapiens
  misc_RNA (1)...(19): siRNA sense strand
gaagcacagccggauguuc

SEQ ID NO: 529077 - RNA, 19 nt, Homo sapiens
  misc_RNA (1)...(19): siRNA sense strand
uaaccaaaacugccaagaa

SEQ ID NO: 529078 - RNA, 19 nt, Homo sapiens
  misc_RNA (1)...(19): siRNA sense strand
aagcacagccggauguucu

SEQ ID NO: 529079 - RNA, 19 nt, Homo sapiens
  misc_RNA (1)...(19): siRNA sense strand
gaggugggucuccuguuca

SEQ ID NO: 529080 - RNA, 19 nt, Homo sapiens
  misc_RNA (1)...(19): siRNA sense strand
gaaccuaacacgaaaguuu

SEQ ID NO: 529081 - RNA, 19 nt, Homo sapiens
  misc_RNA (1)...(19): siRNA sense strand
uaaggaugcuugauuauga

SEQ ID NO: 529082 - RNA, 19 nt, Homo sapiens
  misc_RNA (1)...(19): siRNA sense strand
gcuaauaccuuggacuuug

SEQ ID NO: 529083 - RNA, 19 nt, Homo sapiens
  misc_RNA (1)...(19): siRNA sense strand
gaaaacagcugaugaaggu

SEQ ID NO: 529084 - RNA, 19 nt, Homo sapiens
  misc_RNA (1)...(19): siRNA sense strand
gaagguacaaauacaagua

SEQ ID NO: 529085 - RNA, 19 nt, Homo sapiens
  misc_RNA (1)...(19): siRNA sense strand
aaacucgaauucaaccuua

SEQ ID NO: 529086 - RNA, 19 nt, Homo sapiens
  misc_RNA (1)...(19): siRNA sense strand
gaauggagcuauggacguu

SEQ ID NO: 529087 - RNA, 19 nt, Homo sapiens
  misc_RNA (1)...(19): siRNA sense strand
gggaaugccuuaugaccuu

SEQ ID NO: 529088 - RNA, 19 nt, Homo sapiens
  misc_RNA (1)...(19): siRNA sense strand
gcacuuggaacuuaaagaa

SEQ ID NO: 529089 - RNA, 19 nt, Homo sapiens
  misc_RNA (1)...(19): siRNA sense strand
ggccaagggucuacaauuc

SEQ ID NO: 529090 - RNA, 19 nt, Homo sapiens
  misc_RNA (1)...(19): siRNA sense strand
gaaggacaucugacaauga

SEQ ID NO: 529091 - RNA, 19 nt, Homo sapiens
  misc_RNA (1)...(19): siRNA sense strand
gcaaucaggccuaccagaa

SEQ ID NO: 529092 - RNA, 19 nt, Homo sapiens
  misc_RNA (1)...(19): siRNA sense strand
gcaaggggcugauagagaa

SEQ ID NO: 529093 - RNA, 19 nt, Homo sapiens
  misc_RNA (1)...(19): siRNA sense strand
cuuaugaccuugccauuga

SEQ ID NO: 529094 - RNA, 19 nt, Homo sapiens
  misc_RNA (1)...(19): siRNA sense strand
ccaaugagguagaucagau

SEQ ID NO: 529095 - RNA, 19 nt, Homo sapiens
  misc_RNA (1)...(19): siRNA sense strand
uuaaugagguuuacuaugc

SEQ ID NO: 529096 - RNA, 19 nt, Homo sapiens
  misc_RNA (1)...(19): siRNA sense strand
gcaauuuccugcuccucuu

SEQ ID NO: 529097 - RNA, 19 nt, Homo sapiens
  misc_RNA (1)...(19): siRNA sense strand
gcagugcaaucaagauagu

SEQ ID NO: 529098 - RNA, 19 nt, Homo sapiens
  misc_RNA (1)...(19): siRNA sense strand
gacaggaguuugugugcaa

SEQ ID NO: 529099 - RNA, 19 nt, Homo sapiens
  misc_RNA (1)...(19): siRNA sense strand
gagcuauggacguuaauuu

SEQ ID NO: 529100 - RNA, 19 nt, Homo sapiens
  misc_RNA (1)...(19): siRNA sense strand
gcugaugaagguacaaaua

SEQ ID NO: 529101 - RNA, 19 nt, Homo sapiens
  misc_RNA (1)...(19): siRNA sense strand
gaaguucaaagaccucauu

SEQ ID NO: 529102 - RNA, 19 nt, Homo sapiens
  misc_RNA (1)...(19): siRNA sense strand
aaaaguggauggaucguua

SEQ ID NO: 529103 - RNA, 19 nt, Homo sapiens
  misc_RNA (1)...(19): siRNA sense strand
gauggcacuuggaacuuaa

SEQ ID NO: 529104 - RNA, 19 nt, Homo sapiens
  misc_RNA (1)...(19): siRNA sense strand
ggcagaggauauaccagua

SEQ ID NO: 529105 - RNA, 19 nt, Homo sapiens
  misc_RNA (1)...(19): siRNA sense strand
gaaucaagcacagauagaa

SEQ ID NO: 529106 - RNA, 19 nt, Homo sapiens
  misc_RNA (1)...(19): siRNA sense strand
gaauucaaccuuauuaugc

SEQ ID NO: 529107 - RNA, 19 nt, Homo sapiens
  misc_RNA (1)...(19): siRNA sense strand
guucaaagaccucauuuua

SEQ ID NO: 529108 - RNA, 19 nt, Homo sapiens
  misc_RNA (1)...(19): siRNA sense strand
cuacauagugcauuugaaa

SEQ ID NO: 529109 - RNA, 19 nt, Homo sapiens
  misc_RNA (1)...(19): siRNA sense strand
gaacuuaguaucauucacu

SEQ ID NO: 529110 - RNA, 19 nt, Homo sapiens
  misc_RNA (1)...(19): siRNA sense strand
gcacugaagcuccuacaca

SEQ ID NO: 529111 - RNA, 19 nt, Homo sapiens
  misc_RNA (1)...(19): siRNA sense strand
uaacauucuuggaguggaa

SEQ ID NO: 529112 - RNA, 19 nt, Homo sapiens
  misc_RNA (1)...(19): siRNA sense strand
aaacucauccuguucaaga

SEQ ID NO: 529113 - RNA, 19 nt, Homo sapiens
  misc_RNA (1)...(19): siRNA sense strand
gcuauggacguuaauuuga

SEQ ID NO: 529114 - RNA, 19 nt, Homo sapiens
  misc_RNA (1)...(19): siRNA sense strand
agauggcacuuggaacuua

SEQ ID NO: 529115 - RNA, 19 nt, Homo sapiens
  misc_RNA (1)...(19): siRNA sense strand
ugagguagaucagaugaau

SEQ ID NO: 529116 - RNA, 19 nt, Homo sapiens
  misc_RNA (1)...(19): siRNA sense strand
ugaaggacaucugacaaug

SEQ ID NO: 529117 - RNA, 19 nt, Homo sapiens
  misc_RNA (1)...(19): siRNA sense strand
gaacuuaaagaagaccaaa

SEQ ID NO: 529118 - RNA, 19 nt, Homo sapiens
  misc_RNA (1)...(19): siRNA sense strand
ccaggaacccguaaacuuc

SEQ ID NO: 529119 - RNA, 19 nt, Homo sapiens
  misc_RNA (1)...(19): siRNA sense strand
ucaaagaccucauuuuaag

SEQ ID NO: 529120 - RNA, 19 nt, Homo sapiens
  misc_RNA (1)...(19): siRNA sense strand
uuacaugacugaaggacau

SEQ ID NO: 529121 - RNA, 19 nt, Homo sapiens
  misc_RNA (1)...(19): siRNA sense strand
uggcaguucuugucaguug

SEQ ID NO: 529122 - RNA, 19 nt, Homo sapiens
  misc_RNA (1)...(19): siRNA sense strand
ccaagagacuggcauagcu

SEQ ID NO: 529123 - RNA, 19 nt, Homo sapiens
  misc_RNA (1)...(19): siRNA sense strand
cgaauucaaccuuauuaug

SEQ ID NO: 529124 - RNA, 19 nt, Homo sapiens
  misc_RNA (1)...(19): siRNA sense strand
uacggucgcugacuacuug

SEQ ID NO: 529125 - RNA, 19 nt, Homo sapiens
  misc_RNA (1)...(19): siRNA sense strand
caaacgcagugcaaucaag

SEQ ID NO: 529126 - RNA, 19 nt, Homo sapiens
  misc_RNA (1)...(19): siRNA sense strand
ggacauccaacauaccaau

SEQ ID NO: 529127 - RNA, 19 nt, Homo sapiens
  misc_RNA (1)...(19): siRNA sense strand
ccguaaacuucauaacauu

SEQ ID NO: 529128 - RNA, 19 nt, Homo sapiens
  misc_RNA (1)...(19): siRNA sense strand
gacagguuguaaaggcaua

SEQ ID NO: 529129 - RNA, 19 nt, Homo sapiens
  misc_RNA (1)...(19): siRNA sense strand
gcacauuacaugacugaag

SEQ ID NO: 529130 - RNA, 19 nt, Homo sapiens
  misc_RNA (1)...(19): siRNA sense strand
ccaccaccauggacaacaa

SEQ ID NO: 529131 - RNA, 19 nt, Homo sapiens
  misc_RNA (1)...(19): siRNA sense strand
gcagcacaguuucuucaag

SEQ ID NO: 529132 - RNA, 19 nt, Homo sapiens
  misc_RNA (1)...(19): siRNA sense strand
cauuugaaacgccacuuua

SEQ ID NO: 529133 - RNA, 19 nt, Homo sapiens
  misc_RNA (1)...(19): siRNA sense strand
gaugaagguacaaauacaa

SEQ ID NO: 529134 - RNA, 19 nt, Homo sapiens
  misc_RNA (1)...(19): siRNA sense strand
gcauuugaaacgccacuuu

SEQ ID NO: 529135 - RNA, 19 nt, Homo sapiens
  misc_RNA (1)...(19): siRNA sense strand
gaacccguaaacuucauaa

SEQ ID NO: 529136 - RNA, 19 nt, Homo sapiens
  misc_RNA (1)...(19): siRNA sense strand
gaaaguuugcgcaacagau

SEQ ID NO: 529137 - RNA, 19 nt, Homo sapiens
  misc_RNA (1)...(19): siRNA sense strand
ugaugaagguacaaauaca

SEQ ID NO: 529138 - RNA, 19 nt, Homo sapiens
  misc_RNA (1)...(19): siRNA sense strand
ggagagacuucagcaugca

SEQ ID NO: 529139 - RNA, 19 nt, Homo sapiens
  misc_RNA (1)...(19): siRNA sense strand
cacgaaaguuugcgcaaca

SEQ ID NO: 529140 - RNA, 19 nt, Homo sapiens
  misc_RNA (1)...(19): siRNA sense strand
caaguaauaguguaucuac

SEQ ID NO: 529141 - RNA, 19 nt, Homo sapiens
  misc_RNA (1)...(19): siRNA sense strand
acuuggaacuuaaagaaga

SEQ ID NO: 529142 - RNA, 19 nt, Homo sapiens
  misc_RNA (1)...(19): siRNA sense strand
gagguagaucagaugaaua

SEQ ID NO: 529143 - RNA, 19 nt, Homo sapiens
  misc_RNA (1)...(19): siRNA sense strand
agguagaucagaugaauaa

SEQ ID NO: 529144 - RNA, 19 nt, Homo sapiens
  misc_RNA (1)...(19): siRNA sense strand
caacgaauagcuccucuac

SEQ ID NO: 529145 - RNA, 19 nt, Homo sapiens
  misc_RNA (1)...(19): siRNA sense strand
uuaaagaagaccaaagaug

SEQ ID NO: 529146 - RNA, 19 nt, Homo sapiens
  misc_RNA (1)...(19): siRNA sense strand
gguauuccaccugcucaua

SEQ ID NO: 529147 - RNA, 19 nt, Homo sapiens
  misc_RNA (1)...(19): siRNA sense strand
cccguaaacuucauaacau

SEQ ID NO: 529148 - RNA, 19 nt, Homo sapiens
  misc_RNA (1)...(19): siRNA sense strand
ccaagggucuacaauucuc

SEQ ID NO: 529149 - RNA, 19 nt, Homo sapiens
  misc_RNA (1)...(19): siRNA sense strand
ugaaacgccacuuuauguu

SEQ ID NO: 529150 - RNA, 19 nt, Homo sapiens
  misc_RNA (1)...(19): siRNA sense strand
aaucaggccuaccagaauc

SEQ ID NO: 529151 - RNA, 19 nt, Homo sapiens
  misc_RNA (1)...(19): siRNA sense strand
cagauucagcaaccucuaa

SEQ ID NO: 529152 - RNA, 19 nt, Homo sapiens
  misc_RNA (1)...(19): siRNA sense strand
ccaagauucuauggagguu

SEQ ID NO: 529153 - RNA, 19 nt, Homo sapiens
  misc_RNA (1)...(19): siRNA sense strand
uaaugagguuuacuaugca

SEQ ID NO: 529154 - RNA, 19 nt, Homo sapiens
  misc_RNA (1)...(19): siRNA sense strand
ggacagaauggagcuaugg

SEQ ID NO: 529155 - RNA, 19 nt, Homo sapiens
  misc_RNA (1)...(19): siRNA sense strand
caaucaggccuaccagaau

SEQ ID NO: 529156 - RNA, 19 nt, Homo sapiens
  misc_RNA (1)...(19): siRNA sense strand
uguugaaacucauccuguu

SEQ ID NO: 529157 - RNA, 19 nt, Homo sapiens
  misc_RNA (1)...(19): siRNA sense strand
caagaaaacagcugaugaa

SEQ ID NO: 529158 - RNA, 19 nt, Homo sapiens
  misc_RNA (1)...(19): siRNA sense strand
gcauauuaaugagguuuac

SEQ ID NO: 529159 - RNA, 19 nt, Homo sapiens
  misc_RNA (1)...(19): siRNA sense strand
ggaacccguaaacuucaua

SEQ ID NO: 529160 - RNA, 19 nt, Homo sapiens
  misc_RNA (1)...(19): siRNA sense strand
gaguacaaaccaccaggaa

SEQ ID NO: 529161 - RNA, 19 nt, Homo sapiens
  misc_RNA (1)...(19): siRNA sense strand
aaagaagaccaaagaugga

SEQ ID NO: 529162 - RNA, 19 nt, Homo sapiens
  misc_RNA (1)...(19): siRNA sense strand
uuugagaaguugccagaug

SEQ ID NO: 529163 - RNA, 19 nt, Homo sapiens
  misc_RNA (1)...(19): siRNA sense strand
uauuccaccugcucauauu

SEQ ID NO: 529164 - RNA, 19 nt, Homo sapiens
  misc_RNA (1)...(19): siRNA sense strand
ugaaaugcacacuggagaa

SEQ ID NO: 529165 - RNA, 19 nt, Homo sapiens
  misc_RNA (1)...(19): siRNA sense strand
ucagcaaccucuaacuaac

SEQ ID NO: 529166 - RNA, 19 nt, Homo sapiens
  misc_RNA (1)...(19): siRNA sense strand
uaguggaaguucuggguau

SEQ ID NO: 529167 - RNA, 19 nt, Homo sapiens
  misc_RNA (1)...(19): siRNA sense strand
gaaaugcacacuggagaac

SEQ ID NO: 529168 - RNA, 19 nt, Homo sapiens
  misc_RNA (1)...(19): siRNA sense strand
cagaggugcuacugggaau

SEQ ID NO: 529169 - RNA, 19 nt, Homo sapiens
  misc_RNA (1)...(19): siRNA sense strand
cggaagguuuacaaugaug

SEQ ID NO: 529170 - RNA, 19 nt, Homo sapiens
  misc_RNA (1)...(19): siRNA sense strand
aaggacaucugacaaugag

SEQ ID NO: 529171 - RNA, 19 nt, Homo sapiens
  misc_RNA (1)...(19): siRNA sense strand
caugcaaaccuucaucugu

SEQ ID NO: 529172 - RNA, 19 nt, Homo sapiens
  misc_RNA (1)...(19): siRNA sense strand
guauuccaccugcucauau

SEQ ID NO: 529173 - RNA, 19 nt, Homo sapiens
  misc_RNA (1)...(19): siRNA sense strand
cuaauaccuuggacuuugg

SEQ ID NO: 529174 - RNA, 19 nt, Homo sapiens
  misc_RNA (1)...(19): siRNA sense strand
aaacgcagugcaaucaaga

SEQ ID NO: 529175 - RNA, 19 nt, Homo sapiens
  misc_RNA (1)...(19): siRNA sense strand
gccacuuuauguuucgaaa

SEQ ID NO: 529176 - RNA, 19 nt, Homo sapiens
  misc_RNA (1)...(19): siRNA sense strand
uugaaacgccacuuuaugu

SEQ ID NO: 529177 - RNA, 19 nt, Homo sapiens
  misc_RNA (1)...(19): siRNA sense strand
uacugggaaugccuuauga

SEQ ID NO: 529178 - RNA, 19 nt, Homo sapiens
  misc_RNA (1)...(19): siRNA sense strand
ggagcuauggacguuaauu

SEQ ID NO: 529179 - RNA, 19 nt, Homo sapiens
  misc_RNA (1)...(19): siRNA sense strand
cauccaacauaccaauuuu

SEQ ID NO: 529180 - RNA, 19 nt, Homo sapiens
  misc_RNA (1)...(19): siRNA sense strand
gaaccuaacacgaaaguuu

SEQ ID NO: 529181 - RNA, 19 nt, Homo sapiens
  misc_RNA (1)...(19): siRNA sense strand
uaaggaugcuugauuauga

SEQ ID NO: 529182 - RNA, 19 nt, Homo sapiens
  misc_RNA (1)...(19): siRNA sense strand
gaaaacagcugaugaaggu

SEQ ID NO: 529183 - RNA, 19 nt, Homo sapiens
  misc_RNA (1)...(19): siRNA sense strand
gaagguacaaauacaagua

SEQ ID NO: 529184 - RNA, 19 nt, Homo sapiens
  misc_RNA (1)...(19): siRNA sense strand
aaacucgaauucaaccuua

SEQ ID NO: 529185 - RNA, 19 nt, Homo sapiens
  misc_RNA (1)...(19): siRNA sense strand
gggaaugccuuaugaccuu

SEQ ID NO: 529186 - RNA, 19 nt, Homo sapiens
  misc_RNA (1)...(19): siRNA sense strand
gcacuuggaacuuaaagaa

SEQ ID NO: 529187 - RNA, 19 nt, Homo sapiens
  misc_RNA (1)...(19): siRNA sense strand
cuuaugaccuugccauuga

SEQ ID NO: 529188 - RNA, 19 nt, Homo sapiens
  misc_RNA (1)...(19): siRNA sense strand
ccaaugagguagaucagau

SEQ ID NO: 529189 - RNA, 19 nt, Homo sapiens
  misc_RNA (1)...(19): siRNA sense strand
uuaaugagguuuacuaugc

SEQ ID NO: 529190 - RNA, 19 nt, Homo sapiens
  misc_RNA (1)...(19): siRNA sense strand
gcagugcaaucaagauagu

SEQ ID NO: 529191 - RNA, 19 nt, Homo sapiens
  misc_RNA (1)...(19): siRNA sense strand
gcugaugaagguacaaaua

SEQ ID NO: 529192 - RNA, 19 nt, Homo sapiens
  misc_RNA (1)...(19): siRNA sense strand
gaaguucaaagaccucauu

SEQ ID NO: 529193 - RNA, 19 nt, Homo sapiens
  misc_RNA (1)...(19): siRNA sense strand
aaaaguggauggaucguua

SEQ ID NO: 529194 - RNA, 19 nt, Homo sapiens
  misc_RNA (1)...(19): siRNA sense strand
gauggcacuuggaacuuaa

SEQ ID NO: 529195 - RNA, 19 nt, Homo sapiens
  misc_RNA (1)...(19): siRNA sense strand
ggcagaggauauaccagua

SEQ ID NO: 529196 - RNA, 19 nt, Homo sapiens
  misc_RNA (1)...(19): siRNA sense strand
gaaucaagcacagauagaa

SEQ ID NO: 529197 - RNA, 19 nt, Homo sapiens
  misc_RNA (1)...(19): siRNA sense strand
gaauucaaccuuauuaugc

SEQ ID NO: 529198 - RNA, 19 nt, Homo sapiens
  misc_RNA (1)...(19): siRNA sense strand
guucaaagaccucauuuua

SEQ ID NO: 529199 - RNA, 19 nt, Homo sapiens
  misc_RNA (1)...(19): siRNA sense strand
cuacauagugcauuugaaa

SEQ ID NO: 529200 - RNA, 19 nt, Homo sapiens
  misc_RNA (1)...(19): siRNA sense strand
gaacuuaguaucauucacu

SEQ ID NO: 529201 - RNA, 19 nt, Homo sapiens
  misc_RNA (1)...(19): siRNA sense strand
uaacauucuuggaguggaa

SEQ ID NO: 529202 - RNA, 19 nt, Homo sapiens
  misc_RNA (1)...(19): siRNA sense strand
agauggcacuuggaacuua

SEQ ID NO: 529203 - RNA, 19 nt, Homo sapiens
  misc_RNA (1)...(19): siRNA sense strand
ugagguagaucagaugaau

SEQ ID NO: 529204 - RNA, 19 nt, Homo sapiens
  misc_RNA (1)...(19): siRNA sense strand
gaacuuaaagaagaccaaa

SEQ ID NO: 529205 - RNA, 19 nt, Homo sapiens
  misc_RNA (1)...(19): siRNA sense strand
ccaggaacccguaaacuuc

SEQ ID NO: 529206 - RNA, 19 nt, Homo sapiens
  misc_RNA (1)...(19): siRNA sense strand
ucaaagaccucauuuuaag

SEQ ID NO: 529207 - RNA, 19 nt, Homo sapiens
  misc_RNA (1)...(19): siRNA sense strand
uggcaguucuugucaguug

SEQ ID NO: 529208 - RNA, 19 nt, Homo sapiens
  misc_RNA (1)...(19): siRNA sense strand
cgaauucaaccuuauuaug

SEQ ID NO: 529209 - RNA, 19 nt, Homo sapiens
  misc_RNA (1)...(19): siRNA sense strand
uacggucgcugacuacuug

SEQ ID NO: 529210 - RNA, 19 nt, Homo sapiens
  misc_RNA (1)...(19): siRNA sense strand
caaacgcagugcaaucaag

SEQ ID NO: 529211 - RNA, 19 nt, Homo sapiens
  misc_RNA (1)...(19): siRNA sense strand
ccguaaacuucauaacauu

SEQ ID NO: 529212 - RNA, 19 nt, Homo sapiens
  misc_RNA (1)...(19): siRNA sense strand
gacagguuguaaaggcaua

SEQ ID NO: 529213 - RNA, 19 nt, Homo sapiens
  misc_RNA (1)...(19): siRNA sense strand
gcagcacaguuucuucaag

SEQ ID NO: 529214 - RNA, 19 nt, Homo sapiens
  misc_RNA (1)...(19): siRNA sense strand
cauuugaaacgccacuuua

SEQ ID NO: 529215 - RNA, 19 nt, Homo sapiens
  misc_RNA (1)...(19): siRNA sense strand
gaugaagguacaaauacaa

SEQ ID NO: 529216 - RNA, 19 nt, Homo sapiens
  misc_RNA (1)...(19): siRNA sense strand
gcauuugaaacgccacuuu

SEQ ID NO: 529217 - RNA, 19 nt, Homo sapiens
  misc_RNA (1)...(19): siRNA sense strand
gaacccguaaacuucauaa

SEQ ID NO: 529218 - RNA, 19 nt, Homo sapiens
  misc_RNA (1)...(19): siRNA sense strand
gaaaguuugcgcaacagau

SEQ ID NO: 529219 - RNA, 19 nt, Homo sapiens
  misc_RNA (1)...(19): siRNA sense strand
ggagagacuucagcaugca

SEQ ID NO: 529220 - RNA, 19 nt, Homo sapiens
  misc_RNA (1)...(19): siRNA sense strand
ugaugaagguacaaauaca

SEQ ID NO: 529221 - RNA, 19 nt, Homo sapiens
  misc_RNA (1)...(19): siRNA sense strand
cacgaaaguuugcgcaaca

SEQ ID NO: 529222 - RNA, 19 nt, Homo sapiens
  misc_RNA (1)...(19): siRNA sense strand
caaguaauaguguaucuac

SEQ ID NO: 529223 - RNA, 19 nt, Homo sapiens
  misc_RNA (1)...(19): siRNA sense strand
acuuggaacuuaaagaaga

SEQ ID NO: 529224 - RNA, 19 nt, Homo sapiens
  misc_RNA (1)...(19): siRNA sense strand
gagguagaucagaugaaua

SEQ ID NO: 529225 - RNA, 19 nt, Homo sapiens
  misc_RNA (1)...(19): siRNA sense strand
agguagaucagaugaauaa

SEQ ID NO: 529226 - RNA, 19 nt, Homo sapiens
  misc_RNA (1)...(19): siRNA sense strand
uuaaagaagaccaaagaug

SEQ ID NO: 529227 - RNA, 19 nt, Homo sapiens
  misc_RNA (1)...(19): siRNA sense strand
gguauuccaccugcucaua

SEQ ID NO: 529228 - RNA, 19 nt, Homo sapiens
  misc_RNA (1)...(19): siRNA sense strand
cccguaaacuucauaacau

SEQ ID NO: 529229 - RNA, 19 nt, Homo sapiens
  misc_RNA (1)...(19): siRNA sense strand
ugaaacgccacuuuauguu

SEQ ID NO: 529230 - RNA, 19 nt, Homo sapiens
  misc_RNA (1)...(19): siRNA sense strand
cagauucagcaaccucuaa

SEQ ID NO: 529231 - RNA, 19 nt, Homo sapiens
  misc_RNA (1)...(19): siRNA sense strand
uaaugagguuuacuaugca

SEQ ID NO: 529232 - RNA, 19 nt, Homo sapiens
  misc_RNA (1)...(19): siRNA sense strand
caagaaaacagcugaugaa

SEQ ID NO: 529233 - RNA, 19 nt, Homo sapiens
  misc_RNA (1)...(19): siRNA sense strand
ggaacccguaaacuucaua

SEQ ID NO: 529234 - RNA, 19 nt, Homo sapiens
  misc_RNA (1)...(19): siRNA sense strand
gaguacaaaccaccaggaa

SEQ ID NO: 529235 - RNA, 19 nt, Homo sapiens
  misc_RNA (1)...(19): siRNA sense strand
aaagaagaccaaagaugga

SEQ ID NO: 529236 - RNA, 19 nt, Homo sapiens
  misc_RNA (1)...(19): siRNA sense strand
gcauauuaaugagguuuac

SEQ ID NO: 529237 - RNA, 19 nt, Homo sapiens
  misc_RNA (1)...(19): siRNA sense strand
uuugagaaguugccagaug

SEQ ID NO: 529238 - RNA, 19 nt, Homo sapiens
  misc_RNA (1)...(19): siRNA sense strand
uauuccaccugcucauauu

SEQ ID NO: 529239 - RNA, 19 nt, Homo sapiens
  misc_RNA (1)...(19): siRNA sense strand
ugaaaugcacacuggagaa

SEQ ID NO: 529240 - RNA, 19 nt, Homo sapiens
  misc_RNA (1)...(19): siRNA sense strand
ucagcaaccucuaacuaac

SEQ ID NO: 529241 - RNA, 19 nt, Homo sapiens
  misc_RNA (1)...(19): siRNA sense strand
uaguggaaguucuggguau

SEQ ID NO: 529242 - RNA, 19 nt, Homo sapiens
  misc_RNA (1)...(19): siRNA sense strand
gaaaugcacacuggagaac

SEQ ID NO: 529243 - RNA, 19 nt, Homo sapiens
  misc_RNA (1)...(19): siRNA sense strand
cagaggugcuacugggaau

SEQ ID NO: 529244 - RNA, 19 nt, Homo sapiens
  misc_RNA (1)...(19): siRNA sense strand
caugcaaaccuucaucugu

SEQ ID NO: 529245 - RNA, 19 nt, Homo sapiens
  misc_RNA (1)...(19): siRNA sense strand
cggaagguuuacaaugaug

SEQ ID NO: 529246 - RNA, 19 nt, Homo sapiens
  misc_RNA (1)...(19): siRNA sense strand
guauuccaccugcucauau

SEQ ID NO: 529247 - RNA, 19 nt, Homo sapiens
  misc_RNA (1)...(19): siRNA sense strand
uugaaacgccacuuuaugu

SEQ ID NO: 529248 - RNA, 19 nt, Homo sapiens
  misc_RNA (1)...(19): siRNA sense strand
uacugggaaugccuuauga

SEQ ID NO: 529249 - RNA, 19 nt, Homo sapiens
  misc_RNA (1)...(19): siRNA sense strand
aaacgcagugcaaucaaga

SEQ ID NO: 529250 - RNA, 19 nt, Homo sapiens
  misc_RNA (1)...(19): siRNA sense strand
gccacuuuauguuucgaaa

SEQ ID NO: 529251 - RNA, 19 nt, Homo sapiens
  misc_RNA (1)...(19): siRNA sense strand
cuuugaaccuaacacgaaa

SEQ ID NO: 529252 - RNA, 19 nt, Homo sapiens
  misc_RNA (1)...(19): siRNA sense strand
ggcaccaccuccaguacau

SEQ ID NO: 529253 - RNA, 19 nt, Homo sapiens
  misc_RNA (1)...(19): siRNA sense strand
guucaguggugccaaugag

SEQ ID NO: 529254 - RNA, 19 nt, Homo sapiens
  misc_RNA (1)...(19): siRNA sense strand
auaguugacuuuggcaguu

SEQ ID NO: 529255 - RNA, 19 nt, Homo sapiens
  misc_RNA (1)...(19): siRNA sense strand
uccagaacuuaguaucauu

SEQ ID NO: 529256 - RNA, 19 nt, Homo sapiens
  misc_RNA (1)...(19): siRNA sense strand
aaaguuugcgcaacagaug

SEQ ID NO: 529257 - RNA, 19 nt, Homo sapiens
  misc_RNA (1)...(19): siRNA sense strand
ugaaucaagcacagauaga

SEQ ID NO: 529258 - RNA, 19 nt, Homo sapiens
  misc_RNA (1)...(19): siRNA sense strand
ccagauggcacuuggaacu

SEQ ID NO: 529259 - RNA, 19 nt, Homo sapiens
  misc_RNA (1)...(19): siRNA sense strand
gaccuugccauugauaugu

SEQ ID NO: 529260 - RNA, 19 nt, Homo sapiens
  misc_RNA (1)...(19): siRNA sense strand
ccagaacuuaguaucauuc

SEQ ID NO: 529261 - RNA, 19 nt, Homo sapiens
  misc_RNA (1)...(19): siRNA sense strand
cuacugggaaugccuuaug

SEQ ID NO: 529262 - RNA, 19 nt, Homo sapiens
  misc_RNA (1)...(19): siRNA sense strand
gaucaaaacauacaagcau

SEQ ID NO: 529263 - RNA, 19 nt, Homo sapiens
  misc_RNA (1)...(19): siRNA sense strand
caagcauauuaaugagguu

SEQ ID NO: 529264 - RNA, 19 nt, Homo sapiens
  misc_RNA (1)...(19): siRNA sense strand
gaagaccaaagauggaaaa

SEQ ID NO: 529265 - RNA, 19 nt, Homo sapiens
  misc_RNA (1)...(19): siRNA sense strand
gcgacuccagaacuuagua

SEQ ID NO: 529266 - RNA, 19 nt, Homo sapiens
  misc_RNA (1)...(19): siRNA sense strand
ccccaaaacucgaauucaa

SEQ ID NO: 529267 - RNA, 19 nt, Homo sapiens
  misc_RNA (1)...(19): siRNA sense strand
uuaaggaugcuugauuaug

SEQ ID NO: 529268 - RNA, 19 nt, Homo sapiens
  misc_RNA (1)...(19): siRNA sense strand
gaagcgaagacaccaacag

SEQ ID NO: 529269 - RNA, 19 nt, Homo sapiens
  misc_RNA (1)...(19): siRNA sense strand
caccugcucauauucuuga

SEQ ID NO: 529270 - RNA, 19 nt, Homo sapiens
  misc_RNA (1)...(19): siRNA sense strand
acgcagugcaaucaagaua

SEQ ID NO: 529271 - RNA, 19 nt, Homo sapiens
  misc_RNA (1)...(19): siRNA sense strand
ucuuugaaccuaacacgaa

SEQ ID NO: 529272 - RNA, 19 nt, Homo sapiens
  misc_RNA (1)...(19): siRNA sense strand
uucagcaaccucuaacuaa

SEQ ID NO: 529273 - RNA, 19 nt, Homo sapiens
  misc_RNA (1)...(19): siRNA sense strand
caggaacccguaaacuuca

SEQ ID NO: 529274 - RNA, 19 nt, Homo sapiens
  misc_RNA (1)...(19): siRNA sense strand
acuuaaagaagaccaaaga

SEQ ID NO: 529275 - RNA, 19 nt, Homo sapiens
  misc_RNA (1)...(19): siRNA sense strand
caaugagguagaucagaug

SEQ ID NO: 529276 - RNA, 19 nt, Homo sapiens
  misc_RNA (1)...(19): siRNA sense strand
ggaacuuaaagaagaccaa

SEQ ID NO: 529277 - RNA, 19 nt, Homo sapiens
  misc_RNA (1)...(19): siRNA sense strand
ccaaacgcagugcaaucaa

SEQ ID NO: 529278 - RNA, 19 nt, Homo sapiens
  misc_RNA (1)...(19): siRNA sense strand
gcaugcaaaccuucaucug

SEQ ID NO: 529279 - RNA, 19 nt, Homo sapiens
  misc_RNA (1)...(19): siRNA sense strand
ugaccuugccauugauaug

SEQ ID NO: 529280 - RNA, 19 nt, Homo sapiens
  misc_RNA (1)...(19): siRNA sense strand
gaaccuaacacgaaaguuu

SEQ ID NO: 529281 - RNA, 19 nt, Homo sapiens
  misc_RNA (1)...(19): siRNA sense strand
uaaggaugcuugauuauga

SEQ ID NO: 529282 - RNA, 19 nt, Homo sapiens
  misc_RNA (1)...(19): siRNA sense strand
gcuaauaccuuggacuuug

SEQ ID NO: 529283 - RNA, 19 nt, Homo sapiens
  misc_RNA (1)...(19): siRNA sense strand
gaaaacagcugaugaaggu

SEQ ID NO: 529284 - RNA, 19 nt, Homo sapiens
  misc_RNA (1)...(19): siRNA sense strand
gaagguacaaauacaagua

SEQ ID NO: 529285 - RNA, 19 nt, Homo sapiens
  misc_RNA (1)...(19): siRNA sense strand
aaacucgaauucaaccuua

SEQ ID NO: 529286 - RNA, 19 nt, Homo sapiens
  misc_RNA (1)...(19): siRNA sense strand
gaauggagcuauggacguu

SEQ ID NO: 529287 - RNA, 19 nt, Homo sapiens
  misc_RNA (1)...(19): siRNA sense strand
gggaaugccuuaugaccuu

SEQ ID NO: 529288 - RNA, 19 nt, Homo sapiens
  misc_RNA (1)...(19): siRNA sense strand
gcacuuggaacuuaaagaa

SEQ ID NO: 529289 - RNA, 19 nt, Homo sapiens
  misc_RNA (1)...(19): siRNA sense strand
ggccaagggucuacaauuc

SEQ ID NO: 529290 - RNA, 19 nt, Homo sapiens
  misc_RNA (1)...(19): siRNA sense strand
gaaggacaucugacaauga

SEQ ID NO: 529291 - RNA, 19 nt, Homo sapiens
  misc_RNA (1)...(19): siRNA sense strand
gcaaucaggccuaccagaa

SEQ ID NO: 529292 - RNA, 19 nt, Homo sapiens
  misc_RNA (1)...(19): siRNA sense strand
gcaaggggcugauagagaa

SEQ ID NO: 529293 - RNA, 19 nt, Homo sapiens
  misc_RNA (1)...(19): siRNA sense strand
cuuaugaccuugccauuga

SEQ ID NO: 529294 - RNA, 19 nt, Homo sapiens
  misc_RNA (1)...(19): siRNA sense strand
ccaaugagguagaucagau

SEQ ID NO: 529295 - RNA, 19 nt, Homo sapiens
  misc_RNA (1)...(19): siRNA sense strand
uuaaugagguuuacuaugc

SEQ ID NO: 529296 - RNA, 19 nt, Homo sapiens
  misc_RNA (1)...(19): siRNA sense strand
gcaauuuccugcuccucuu

SEQ ID NO: 529297 - RNA, 19 nt, Homo sapiens
  misc_RNA (1)...(19): siRNA sense strand
gcagugcaaucaagauagu

SEQ ID NO: 529298 - RNA, 19 nt, Homo sapiens
  misc_RNA (1)...(19): siRNA sense strand
gacaggaguuugugugcaa

SEQ ID NO: 529299 - RNA, 19 nt, Homo sapiens
  misc_RNA (1)...(19): siRNA sense strand
gagcuauggacguuaauuu

SEQ ID NO: 529300 - RNA, 19 nt, Homo sapiens
  misc_RNA (1)...(19): siRNA sense strand
gcugaugaagguacaaaua

SEQ ID NO: 529301 - RNA, 19 nt, Homo sapiens
  misc_RNA (1)...(19): siRNA sense strand
gaaguucaaagaccucauu

SEQ ID NO: 529302 - RNA, 19 nt, Homo sapiens
  misc_RNA (1)...(19): siRNA sense strand
aaaaguggauggaucguua

SEQ ID NO: 529303 - RNA, 19 nt, Homo sapiens
  misc_RNA (1)...(19): siRNA sense strand
gauggcacuuggaacuuaa

SEQ ID NO: 529304 - RNA, 19 nt, Homo sapiens
  misc_RNA (1)...(19): siRNA sense strand
ggcagaggauauaccagua

SEQ ID NO: 529305 - RNA, 19 nt, Homo sapiens
  misc_RNA (1)...(19): siRNA sense strand
gaaucaagcacagauagaa

SEQ ID NO: 529306 - RNA, 19 nt, Homo sapiens
  misc_RNA (1)...(19): siRNA sense strand
gaauucaaccuuauuaugc

SEQ ID NO: 529307 - RNA, 19 nt, Homo sapiens
  misc_RNA (1)...(19): siRNA sense strand
guucaaagaccucauuuua

SEQ ID NO: 529308 - RNA, 19 nt, Homo sapiens
  misc_RNA (1)...(19): siRNA sense strand
cuacauagugcauuugaaa

SEQ ID NO: 529309 - RNA, 19 nt, Homo sapiens
  misc_RNA (1)...(19): siRNA sense strand
gaacuuaguaucauucacu

SEQ ID NO: 529310 - RNA, 19 nt, Homo sapiens
  misc_RNA (1)...(19): siRNA sense strand
gcacugaagcuccuacaca

SEQ ID NO: 529311 - RNA, 19 nt, Homo sapiens
  misc_RNA (1)...(19): siRNA sense strand
uaacauucuuggaguggaa

SEQ ID NO: 529312 - RNA, 19 nt, Homo sapiens
  misc_RNA (1)...(19): siRNA sense strand
aaacucauccuguucaaga

SEQ ID NO: 529313 - RNA, 19 nt, Homo sapiens
  misc_RNA (1)...(19): siRNA sense strand
gcuauggacguuaauuuga

SEQ ID NO: 529314 - RNA, 19 nt, Homo sapiens
  misc_RNA (1)...(19): siRNA sense strand
agauggcacuuggaacuua

SEQ ID NO: 529315 - RNA, 19 nt, Homo sapiens
  misc_RNA (1)...(19): siRNA sense strand
ugagguagaucagaugaau

SEQ ID NO: 529316 - RNA, 19 nt, Homo sapiens
  misc_RNA (1)...(19): siRNA sense strand
ugaaggacaucugacaaug

SEQ ID NO: 529317 - RNA, 19 nt, Homo sapiens
  misc_RNA (1)...(19): siRNA sense strand
gaacuuaaagaagaccaaa

SEQ ID NO: 529318 - RNA, 19 nt, Homo sapiens
  misc_RNA (1)...(19): siRNA sense strand
ccaggaacccguaaacuuc

SEQ ID NO: 529319 - RNA, 19 nt, Homo sapiens
  misc_RNA (1)...(19): siRNA sense strand
ucaaagaccucauuuuaag

SEQ ID NO: 529320 - RNA, 19 nt, Homo sapiens
  misc_RNA (1)...(19): siRNA sense strand
uuacaugacugaaggacau

SEQ ID NO: 529321 - RNA, 19 nt, Homo sapiens
  misc_RNA (1)...(19): siRNA sense strand
uggcaguucuugucaguug

SEQ ID NO: 529322 - RNA, 19 nt, Homo sapiens
  misc_RNA (1)...(19): siRNA sense strand
ccaagagacuggcauagcu

SEQ ID NO: 529323 - RNA, 19 nt, Homo sapiens
  misc_RNA (1)...(19): siRNA sense strand
cgaauucaaccuuauuaug

SEQ ID NO: 529324 - RNA, 19 nt, Homo sapiens
  misc_RNA (1)...(19): siRNA sense strand
uacggucgcugacuacuug

SEQ ID NO: 529325 - RNA, 19 nt, Homo sapiens
  misc_RNA (1)...(19): siRNA sense strand
caaacgcagugcaaucaag

SEQ ID NO: 529326 - RNA, 19 nt, Homo sapiens
  misc_RNA (1)...(19): siRNA sense strand
ggacauccaacauaccaau

SEQ ID NO: 529327 - RNA, 19 nt, Homo sapiens
  misc_RNA (1)...(19): siRNA sense strand
ccguaaacuucauaacauu

SEQ ID NO: 529328 - RNA, 19 nt, Homo sapiens
  misc_RNA (1)...(19): siRNA sense strand
gacagguuguaaaggcaua

SEQ ID NO: 529329 - RNA, 19 nt, Homo sapiens
  misc_RNA (1)...(19): siRNA sense strand
gcacauuacaugacugaag

SEQ ID NO: 529330 - RNA, 19 nt, Homo sapiens
  misc_RNA (1)...(19): siRNA sense strand
ccaccaccauggacaacaa

SEQ ID NO: 529331 - RNA, 19 nt, Homo sapiens
  misc_RNA (1)...(19): siRNA sense strand
gcagcacaguuucuucaag

SEQ ID NO: 529332 - RNA, 19 nt, Homo sapiens
  misc_RNA (1)...(19): siRNA sense strand
cauuugaaacgccacuuua

SEQ ID NO: 529333 - RNA, 19 nt, Homo sapiens
  misc_RNA (1)...(19): siRNA sense strand
gaugaagguacaaauacaa

SEQ ID NO: 529334 - RNA, 19 nt, Homo sapiens
  misc_RNA (1)...(19): siRNA sense strand
gcauuugaaacgccacuuu

SEQ ID NO: 529335 - RNA, 19 nt, Homo sapiens
  misc_RNA (1)...(19): siRNA sense strand
gaacccguaaacuucauaa

SEQ ID NO: 529336 - RNA, 19 nt, Homo sapiens
  misc_RNA (1)...(19): siRNA sense strand
gaaaguuugcgcaacagau

SEQ ID NO: 529337 - RNA, 19 nt, Homo sapiens
  misc_RNA (1)...(19): siRNA sense strand
ugaugaagguacaaauaca

SEQ ID NO: 529338 - RNA, 19 nt, Homo sapiens
  misc_RNA (1)...(19): siRNA sense strand
ggagagacuucagcaugca

SEQ ID NO: 529339 - RNA, 19 nt, Homo sapiens
  misc_RNA (1)...(19): siRNA sense strand
cacgaaaguuugcgcaaca

SEQ ID NO: 529340 - RNA, 19 nt, Homo sapiens
  misc_RNA (1)...(19): siRNA sense strand
caaguaauaguguaucuac

SEQ ID NO: 529341 - RNA, 19 nt, Homo sapiens
  misc_RNA (1)...(19): siRNA sense strand
acuuggaacuuaaagaaga

SEQ ID NO: 529342 - RNA, 19 nt, Homo sapiens
  misc_RNA (1)...(19): siRNA sense strand
gagguagaucagaugaaua

SEQ ID NO: 529343 - RNA, 19 nt, Homo sapiens
  misc_RNA (1)...(19): siRNA sense strand
agguagaucagaugaauaa

SEQ ID NO: 529344 - RNA, 19 nt, Homo sapiens
  misc_RNA (1)...(19): siRNA sense strand
caacgaauagcuccucuac

SEQ ID NO: 529345 - RNA, 19 nt, Homo sapiens
  misc_RNA (1)...(19): siRNA sense strand
uuaaagaagaccaaagaug

SEQ ID NO: 529346 - RNA, 19 nt, Homo sapiens
  misc_RNA (1)...(19): siRNA sense strand
gguauuccaccugcucaua

SEQ ID NO: 529347 - RNA, 19 nt, Homo sapiens
  misc_RNA (1)...(19): siRNA sense strand
cccguaaacuucauaacau

SEQ ID NO: 529348 - RNA, 19 nt, Homo sapiens
  misc_RNA (1)...(19): siRNA sense strand
ccaagggucuacaauucuc

SEQ ID NO: 529349 - RNA, 19 nt, Homo sapiens
  misc_RNA (1)...(19): siRNA sense strand
ugaaacgccacuuuauguu

SEQ ID NO: 529350 - RNA, 19 nt, Homo sapiens
  misc_RNA (1)...(19): siRNA sense strand
aaucaggccuaccagaauc

SEQ ID NO: 529351 - RNA, 19 nt, Homo sapiens
  misc_RNA (1)...(19): siRNA sense strand
cagauucagcaaccucuaa

SEQ ID NO: 529352 - RNA, 19 nt, Homo sapiens
  misc_RNA (1)...(19): siRNA sense strand
ccaagauucuauggagguu

SEQ ID NO: 529353 - RNA, 19 nt, Homo sapiens
  misc_RNA (1)...(19): siRNA sense strand
uaaugagguuuacuaugca

SEQ ID NO: 529354 - RNA, 19 nt, Homo sapiens
  misc_RNA (1)...(19): siRNA sense strand
ggacagaauggagcuaugg

SEQ ID NO: 529355 - RNA, 19 nt, Homo sapiens
  misc_RNA (1)...(19): siRNA sense strand
caaucaggccuaccagaau

SEQ ID NO: 529356 - RNA, 19 nt, Homo sapiens
  misc_RNA (1)...(19): siRNA sense strand
uguugaaacucauccuguu

SEQ ID NO: 529357 - RNA, 19 nt, Homo sapiens
  misc_RNA (1)...(19): siRNA sense strand
caagaaaacagcugaugaa

SEQ ID NO: 529358 - RNA, 19 nt, Homo sapiens
  misc_RNA (1)...(19): siRNA sense strand
gcauauuaaugagguuuac

SEQ ID NO: 529359 - RNA, 19 nt, Homo sapiens
  misc_RNA (1)...(19): siRNA sense strand
ggaacccguaaacuucaua

SEQ ID NO: 529360 - RNA, 19 nt, Homo sapiens
  misc_RNA (1)...(19): siRNA sense strand
gaguacaaaccaccaggaa

SEQ ID NO: 529361 - RNA, 19 nt, Homo sapiens
  misc_RNA (1)...(19): siRNA sense strand
aaagaagaccaaagaugga

SEQ ID NO: 529362 - RNA, 19 nt, Homo sapiens
  misc_RNA (1)...(19): siRNA sense strand
uuugagaaguugccagaug

SEQ ID NO: 529363 - RNA, 19 nt, Homo sapiens
  misc_RNA (1)...(19): siRNA sense strand
uauuccaccugcucauauu

SEQ ID NO: 529364 - RNA, 19 nt, Homo sapiens
  misc_RNA (1)...(19): siRNA sense strand
ugaaaugcacacuggagaa

SEQ ID NO: 529365 - RNA, 19 nt, Homo sapiens
  misc_RNA (1)...(19): siRNA sense strand
ucagcaaccucuaacuaac

SEQ ID NO: 529366 - RNA, 19 nt, Homo sapiens
  misc_RNA (1)...(19): siRNA sense strand
uaguggaaguucuggguau

SEQ ID NO: 529367 - RNA, 19 nt, Homo sapiens
  misc_RNA (1)...(19): siRNA sense strand
gaaaugcacacuggagaac

SEQ ID NO: 529368 - RNA, 19 nt, Homo sapiens
  misc_RNA (1)...(19): siRNA sense strand
cagaggugcuacugggaau

SEQ ID NO: 529369 - RNA, 19 nt, Homo sapiens
  misc_RNA (1)...(19): siRNA sense strand
cggaagguuuacaaugaug

SEQ ID NO: 529370 - RNA, 19 nt, Homo sapiens
  misc_RNA (1)...(19): siRNA sense strand
aaggacaucugacaaugag

SEQ ID NO: 529371 - RNA, 19 nt, Homo sapiens
  misc_RNA (1)...(19): siRNA sense strand
caugcaaaccuucaucugu

SEQ ID NO: 529372 - RNA, 19 nt, Homo sapiens
  misc_RNA (1)...(19): siRNA sense strand
guauuccaccugcucauau

SEQ ID NO: 529373 - RNA, 19 nt, Homo sapiens
  misc_RNA (1)...(19): siRNA sense strand
cuaauaccuuggacuuugg

SEQ ID NO: 529374 - RNA, 19 nt, Homo sapiens
  misc_RNA (1)...(19): siRNA sense strand
aaacgcagugcaaucaaga

SEQ ID NO: 529375 - RNA, 19 nt, Homo sapiens
  misc_RNA (1)...(19): siRNA sense strand
gccacuuuauguuucgaaa

SEQ ID NO: 529376 - RNA, 19 nt, Homo sapiens
  misc_RNA (1)...(19): siRNA sense strand
uugaaacgccacuuuaugu

SEQ ID NO: 529377 - RNA, 19 nt, Homo sapiens
  misc_RNA (1)...(19): siRNA sense strand
uacugggaaugccuuauga

SEQ ID NO: 529378 - RNA, 19 nt, Homo sapiens
  misc_RNA (1)...(19): siRNA sense strand
ggagcuauggacguuaauu

SEQ ID NO: 529379 - RNA, 19 nt, Homo sapiens
  misc_RNA (1)...(19): siRNA sense strand
cauccaacauaccaauuuu

SEQ ID NO: 529380 - RNA, 19 nt, Homo sapiens
  misc_RNA (1)...(19): siRNA sense strand
gaaccuaacacgaaaguuu

SEQ ID NO: 529381 - RNA, 19 nt, Homo sapiens
  misc_RNA (1)...(19): siRNA sense strand
uaaggaugcuugauuauga

SEQ ID NO: 529382 - RNA, 19 nt, Homo sapiens
  misc_RNA (1)...(19): siRNA sense strand
gaaaacagcugaugaaggu

SEQ ID NO: 529383 - RNA, 19 nt, Homo sapiens
  misc_RNA (1)...(19): siRNA sense strand
gaagguacaaauacaagua

SEQ ID NO: 529384 - RNA, 19 nt, Homo sapiens
  misc_RNA (1)...(19): siRNA sense strand
aaacucgaauucaaccuua

SEQ ID NO: 529385 - RNA, 19 nt, Homo sapiens
  misc_RNA (1)...(19): siRNA sense strand
gggaaugccuuaugaccuu

SEQ ID NO: 529386 - RNA, 19 nt, Homo sapiens
  misc_RNA (1)...(19): siRNA sense strand
gcacuuggaacuuaaagaa

SEQ ID NO: 529387 - RNA, 19 nt, Homo sapiens
  misc_RNA (1)...(19): siRNA sense strand
cuuaugaccuugccauuga

SEQ ID NO: 529388 - RNA, 19 nt, Homo sapiens
  misc_RNA (1)...(19): siRNA sense strand
ccaaugagguagaucagau

SEQ ID NO: 529389 - RNA, 19 nt, Homo sapiens
  misc_RNA (1)...(19): siRNA sense strand
uuaaugagguuuacuaugc

SEQ ID NO: 529390 - RNA, 19 nt, Homo sapiens
  misc_RNA (1)...(19): siRNA sense strand
gcagugcaaucaagauagu

SEQ ID NO: 529391 - RNA, 19 nt, Homo sapiens
  misc_RNA (1)...(19): siRNA sense strand
gcugaugaagguacaaaua

SEQ ID NO: 529392 - RNA, 19 nt, Homo sapiens
  misc_RNA (1)...(19): siRNA sense strand
gaaguucaaagaccucauu

SEQ ID NO: 529393 - RNA, 19 nt, Homo sapiens
  misc_RNA (1)...(19): siRNA sense strand
aaaaguggauggaucguua

SEQ ID NO: 529394 - RNA, 19 nt, Homo sapiens
  misc_RNA (1)...(19): siRNA sense strand
gauggcacuuggaacuuaa

SEQ ID NO: 529395 - RNA, 19 nt, Homo sapiens
  misc_RNA (1)...(19): siRNA sense strand
ggcagaggauauaccagua

SEQ ID NO: 529396 - RNA, 19 nt, Homo sapiens
  misc_RNA (1)...(19): siRNA sense strand
gaaucaagcacagauagaa

SEQ ID NO: 529397 - RNA, 19 nt, Homo sapiens
  misc_RNA (1)...(19): siRNA sense strand
gaauucaaccuuauuaugc

SEQ ID NO: 529398 - RNA, 19 nt, Homo sapiens
  misc_RNA (1)...(19): siRNA sense strand
guucaaagaccucauuuua

SEQ ID NO: 529399 - RNA, 19 nt, Homo sapiens
  misc_RNA (1)...(19): siRNA sense strand
cuacauagugcauuugaaa

SEQ ID NO: 529400 - RNA, 19 nt, Homo sapiens
  misc_RNA (1)...(19): siRNA sense strand
gaacuuaguaucauucacu

SEQ ID NO: 529401 - RNA, 19 nt, Homo sapiens
  misc_RNA (1)...(19): siRNA sense strand
uaacauucuuggaguggaa

SEQ ID NO: 529402 - RNA, 19 nt, Homo sapiens
  misc_RNA (1)...(19): siRNA sense strand
agauggcacuuggaacuua

SEQ ID NO: 529403 - RNA, 19 nt, Homo sapiens
  misc_RNA (1)...(19): siRNA sense strand
ugagguagaucagaugaau

SEQ ID NO: 529404 - RNA, 19 nt, Homo sapiens
  misc_RNA (1)...(19): siRNA sense strand
gaacuuaaagaagaccaaa

SEQ ID NO: 529405 - RNA, 19 nt, Homo sapiens
  misc_RNA (1)...(19): siRNA sense strand
ccaggaacccguaaacuuc

SEQ ID NO: 529406 - RNA, 19 nt, Homo sapiens
  misc_RNA (1)...(19): siRNA sense strand
ucaaagaccucauuuuaag

SEQ ID NO: 529407 - RNA, 19 nt, Homo sapiens
  misc_RNA (1)...(19): siRNA sense strand
uggcaguucuugucaguug

SEQ ID NO: 529408 - RNA, 19 nt, Homo sapiens
  misc_RNA (1)...(19): siRNA sense strand
cgaauucaaccuuauuaug

SEQ ID NO: 529409 - RNA, 19 nt, Homo sapiens
  misc_RNA (1)...(19): siRNA sense strand
uacggucgcugacuacuug

SEQ ID NO: 529410 - RNA, 19 nt, Homo sapiens
  misc_RNA (1)...(19): siRNA sense strand
caaacgcagugcaaucaag

SEQ ID NO: 529411 - RNA, 19 nt, Homo sapiens
  misc_RNA (1)...(19): siRNA sense strand
ccguaaacuucauaacauu

SEQ ID NO: 529412 - RNA, 19 nt, Homo sapiens
  misc_RNA (1)...(19): siRNA sense strand
gacagguuguaaaggcaua

SEQ ID NO: 529413 - RNA, 19 nt, Homo sapiens
  misc_RNA (1)...(19): siRNA sense strand
gcagcacaguuucuucaag

SEQ ID NO: 529414 - RNA, 19 nt, Homo sapiens
  misc_RNA (1)...(19): siRNA sense strand
cauuugaaacgccacuuua

SEQ ID NO: 529415 - RNA, 19 nt, Homo sapiens
  misc_RNA (1)...(19): siRNA sense strand
gaugaagguacaaauacaa

SEQ ID NO: 529416 - RNA, 19 nt, Homo sapiens
  misc_RNA (1)...(19): siRNA sense strand
gcauuugaaacgccacuuu

SEQ ID NO: 529417 - RNA, 19 nt, Homo sapiens
  misc_RNA (1)...(19): siRNA sense strand
gaacccguaaacuucauaa

SEQ ID NO: 529418 - RNA, 19 nt, Homo sapiens
  misc_RNA (1)...(19): siRNA sense strand
gaaaguuugcgcaacagau

SEQ ID NO: 529419 - RNA, 19 nt, Homo sapiens
  misc_RNA (1)...(19): siRNA sense strand
ggagagacuucagcaugca

SEQ ID NO: 529420 - RNA, 19 nt, Homo sapiens
  misc_RNA (1)...(19): siRNA sense strand
ugaugaagguacaaauaca

SEQ ID NO: 529421 - RNA, 19 nt, Homo sapiens
  misc_RNA (1)...(19): siRNA sense strand
cacgaaaguuugcgcaaca

SEQ ID NO: 529422 - RNA, 19 nt, Homo sapiens
  misc_RNA (1)...(19): siRNA sense strand
caaguaauaguguaucuac

SEQ ID NO: 529423 - RNA, 19 nt, Homo sapiens
  misc_RNA (1)...(19): siRNA sense strand
acuuggaacuuaaagaaga

SEQ ID NO: 529424 - RNA, 19 nt, Homo sapiens
  misc_RNA (1)...(19): siRNA sense strand
gagguagaucagaugaaua

SEQ ID NO: 529425 - RNA, 19 nt, Homo sapiens
  misc_RNA (1)...(19): siRNA sense strand
agguagaucagaugaauaa

SEQ ID NO: 529426 - RNA, 19 nt, Homo sapiens
  misc_RNA (1)...(19): siRNA sense strand
uuaaagaagaccaaagaug

SEQ ID NO: 529427 - RNA, 19 nt, Homo sapiens
  misc_RNA (1)...(19): siRNA sense strand
gguauuccaccugcucaua

SEQ ID NO: 529428 - RNA, 19 nt, Homo sapiens
  misc_RNA (1)...(19): siRNA sense strand
cccguaaacuucauaacau

SEQ ID NO: 529429 - RNA, 19 nt, Homo sapiens
  misc_RNA (1)...(19): siRNA sense strand
ugaaacgccacuuuauguu

SEQ ID NO: 529430 - RNA, 19 nt, Homo sapiens
  misc_RNA (1)...(19): siRNA sense strand
cagauucagcaaccucuaa

SEQ ID NO: 529431 - RNA, 19 nt, Homo sapiens
  misc_RNA (1)...(19): siRNA sense strand
uaaugagguuuacuaugca

SEQ ID NO: 529432 - RNA, 19 nt, Homo sapiens
  misc_RNA (1)...(19): siRNA sense strand
caagaaaacagcugaugaa

SEQ ID NO: 529433 - RNA, 19 nt, Homo sapiens
  misc_RNA (1)...(19): siRNA sense strand
ggaacccguaaacuucaua

SEQ ID NO: 529434 - RNA, 19 nt, Homo sapiens
  misc_RNA (1)...(19): siRNA sense strand
gaguacaaaccaccaggaa

SEQ ID NO: 529435 - RNA, 19 nt, Homo sapiens
  misc_RNA (1)...(19): siRNA sense strand
aaagaagaccaaagaugga

SEQ ID NO: 529436 - RNA, 19 nt, Homo sapiens
  misc_RNA (1)...(19): siRNA sense strand
gcauauuaaugagguuuac

SEQ ID NO: 529437 - RNA, 19 nt, Homo sapiens
  misc_RNA (1)...(19): siRNA sense strand
uuugagaaguugccagaug

SEQ ID NO: 529438 - RNA, 19 nt, Homo sapiens
  misc_RNA (1)...(19): siRNA sense strand
uauuccaccugcucauauu

SEQ ID NO: 529439 - RNA, 19 nt, Homo sapiens
  misc_RNA (1)...(19): siRNA sense strand
ugaaaugcacacuggagaa

SEQ ID NO: 529440 - RNA, 19 nt, Homo sapiens
  misc_RNA (1)...(19): siRNA sense strand
ucagcaaccucuaacuaac

SEQ ID NO: 529441 - RNA, 19 nt, Homo sapiens
  misc_RNA (1)...(19): siRNA sense strand
uaguggaaguucuggguau

SEQ ID NO: 529442 - RNA, 19 nt, Homo sapiens
  misc_RNA (1)...(19): siRNA sense strand
gaaaugcacacuggagaac

SEQ ID NO: 529443 - RNA, 19 nt, Homo sapiens
  misc_RNA (1)...(19): siRNA sense strand
cagaggugcuacugggaau

SEQ ID NO: 529444 - RNA, 19 nt, Homo sapiens
  misc_RNA (1)...(19): siRNA sense strand
caugcaaaccuucaucugu

SEQ ID NO: 529445 - RNA, 19 nt, Homo sapiens
  misc_RNA (1)...(19): siRNA sense strand
cggaagguuuacaaugaug

SEQ ID NO: 529446 - RNA, 19 nt, Homo sapiens
  misc_RNA (1)...(19): siRNA sense strand
guauuccaccugcucauau

SEQ ID NO: 529447 - RNA, 19 nt, Homo sapiens
  misc_RNA (1)...(19): siRNA sense strand
uugaaacgccacuuuaugu

SEQ ID NO: 529448 - RNA, 19 nt, Homo sapiens
  misc_RNA (1)...(19): siRNA sense strand
uacugggaaugccuuauga

SEQ ID NO: 529449 - RNA, 19 nt, Homo sapiens
  misc_RNA (1)...(19): siRNA sense strand
aaacgcagugcaaucaaga

SEQ ID NO: 529450 - RNA, 19 nt, Homo sapiens
  misc_RNA (1)...(19): siRNA sense strand
gccacuuuauguuucgaaa

SEQ ID NO: 529451 - RNA, 19 nt, Homo sapiens
  misc_RNA (1)...(19): siRNA sense strand
cuuugaaccuaacacgaaa

SEQ ID NO: 529452 - RNA, 19 nt, Homo sapiens
  misc_RNA (1)...(19): siRNA sense strand
ggcaccaccuccaguacau

SEQ ID NO: 529453 - RNA, 19 nt, Homo sapiens
  misc_RNA (1)...(19): siRNA sense strand
guucaguggugccaaugag

SEQ ID NO: 529454 - RNA, 19 nt, Homo sapiens
  misc_RNA (1)...(19): siRNA sense strand
auaguugacuuuggcaguu

SEQ ID NO: 529455 - RNA, 19 nt, Homo sapiens
  misc_RNA (1)...(19): siRNA sense strand
uccagaacuuaguaucauu

SEQ ID NO: 529456 - RNA, 19 nt, Homo sapiens
  misc_RNA (1)...(19): siRNA sense strand
aaaguuugcgcaacagaug

SEQ ID NO: 529457 - RNA, 19 nt, Homo sapiens
  misc_RNA (1)...(19): siRNA sense strand
ugaaucaagcacagauaga

SEQ ID NO: 529458 - RNA, 19 nt, Homo sapiens
  misc_RNA (1)...(19): siRNA sense strand
ccagauggcacuuggaacu

SEQ ID NO: 529459 - RNA, 19 nt, Homo sapiens
  misc_RNA (1)...(19): siRNA sense strand
gaccuugccauugauaugu

SEQ ID NO: 529460 - RNA, 19 nt, Homo sapiens
  misc_RNA (1)...(19): siRNA sense strand
ccagaacuuaguaucauuc

SEQ ID NO: 529461 - RNA, 19 nt, Homo sapiens
  misc_RNA (1)...(19): siRNA sense strand
cuacugggaaugccuuaug

SEQ ID NO: 529462 - RNA, 19 nt, Homo sapiens
  misc_RNA (1)...(19): siRNA sense strand
gaucaaaacauacaagcau

SEQ ID NO: 529463 - RNA, 19 nt, Homo sapiens
  misc_RNA (1)...(19): siRNA sense strand
caagcauauuaaugagguu

SEQ ID NO: 529464 - RNA, 19 nt, Homo sapiens
  misc_RNA (1)...(19): siRNA sense strand
gaagaccaaagauggaaaa

SEQ ID NO: 529465 - RNA, 19 nt, Homo sapiens
  misc_RNA (1)...(19): siRNA sense strand
gcgacuccagaacuuagua

SEQ ID NO: 529466 - RNA, 19 nt, Homo sapiens
  misc_RNA (1)...(19): siRNA sense strand
ccccaaaacucgaauucaa

SEQ ID NO: 529467 - RNA, 19 nt, Homo sapiens
  misc_RNA (1)...(19): siRNA sense strand
uuaaggaugcuugauuaug

SEQ ID NO: 529468 - RNA, 19 nt, Homo sapiens
  misc_RNA (1)...(19): siRNA sense strand
gaagcgaagacaccaacag

SEQ ID NO: 529469 - RNA, 19 nt, Homo sapiens
  misc_RNA (1)...(19): siRNA sense strand
caccugcucauauucuuga

SEQ ID NO: 529470 - RNA, 19 nt, Homo sapiens
  misc_RNA (1)...(19): siRNA sense strand
acgcagugcaaucaagaua

SEQ ID NO: 529471 - RNA, 19 nt, Homo sapiens
  misc_RNA (1)...(19): siRNA sense strand
ucuuugaaccuaacacgaa

SEQ ID NO: 529472 - RNA, 19 nt, Homo sapiens
  misc_RNA (1)...(19): siRNA sense strand
uucagcaaccucuaacuaa

SEQ ID NO: 529473 - RNA, 19 nt, Homo sapiens
  misc_RNA (1)...(19): siRNA sense strand
caggaacccguaaacuuca

SEQ ID NO: 529474 - RNA, 19 nt, Homo sapiens
  misc_RNA (1)...(19): siRNA sense strand
acuuaaagaagaccaaaga

SEQ ID NO: 529475 - RNA, 19 nt, Homo sapiens
  misc_RNA (1)...(19): siRNA sense strand
caaugagguagaucagaug

SEQ ID NO: 529476 - RNA, 19 nt, Homo sapiens
  misc_RNA (1)...(19): siRNA sense strand
ggaacuuaaagaagaccaa

SEQ ID NO: 529477 - RNA, 19 nt, Homo sapiens
  misc_RNA (1)...(19): siRNA sense strand
ccaaacgcagugcaaucaa

SEQ ID NO: 529478 - RNA, 19 nt, Homo sapiens
  misc_RNA (1)...(19): siRNA sense strand
gcaugcaaaccuucaucug

SEQ ID NO: 529479 - RNA, 19 nt, Homo sapiens
  misc_RNA (1)...(19): siRNA sense strand
ugaccuugccauugauaug

SEQ ID NO: 529480 - RNA, 19 nt, Homo sapiens
  misc_RNA (1)...(19): siRNA sense strand
gaaccuaacacgaaaguuu

SEQ ID NO: 529481 - RNA, 19 nt, Homo sapiens
  misc_RNA (1)...(19): siRNA sense strand
uaaggaugcuugauuauga

SEQ ID NO: 529482 - RNA, 19 nt, Homo sapiens
  misc_RNA (1)...(19): siRNA sense strand
gaaaacagcugaugaaggu

SEQ ID NO: 529483 - RNA, 19 nt, Homo sapiens
  misc_RNA (1)...(19): siRNA sense strand
gaagguacaaauacaagua

SEQ ID NO: 529484 - RNA, 19 nt, Homo sapiens
  misc_RNA (1)...(19): siRNA sense strand
aaacucgaauucaaccuua

SEQ ID NO: 529485 - RNA, 19 nt, Homo sapiens
  misc_RNA (1)...(19): siRNA sense strand
gggaaugccuuaugaccuu

SEQ ID NO: 529486 - RNA, 19 nt, Homo sapiens
  misc_RNA (1)...(19): siRNA sense strand
gcacuuggaacuuaaagaa

SEQ ID NO: 529487 - RNA, 19 nt, Homo sapiens
  misc_RNA (1)...(19): siRNA sense strand
cuuaugaccuugccauuga

SEQ ID NO: 529488 - RNA, 19 nt, Homo sapiens
  misc_RNA (1)...(19): siRNA sense strand
ccaaugagguagaucagau

SEQ ID NO: 529489 - RNA, 19 nt, Homo sapiens
  misc_RNA (1)...(19): siRNA sense strand
uuaaugagguuuacuaugc

SEQ ID NO: 529490 - RNA, 19 nt, Homo sapiens
  misc_RNA (1)...(19): siRNA sense strand
gcaauuuccugcuccucuu

SEQ ID NO: 529491 - RNA, 19 nt, Homo sapiens
  misc_RNA (1)...(19): siRNA sense strand
gcagugcaaucaagauagu

SEQ ID NO: 529492 - RNA, 19 nt, Homo sapiens
  misc_RNA (1)...(19): siRNA sense strand
gcugaugaagguacaaaua

SEQ ID NO: 529493 - RNA, 19 nt, Homo sapiens
  misc_RNA (1)...(19): siRNA sense strand
gaaguucaaagaccucauu

SEQ ID NO: 529494 - RNA, 19 nt, Homo sapiens
  misc_RNA (1)...(19): siRNA sense strand
aaaaguggauggaucguua

SEQ ID NO: 529495 - RNA, 19 nt, Homo sapiens
  misc_RNA (1)...(19): siRNA sense strand
gauggcacuuggaacuuaa

SEQ ID NO: 529496 - RNA, 19 nt, Homo sapiens
  misc_RNA (1)...(19): siRNA sense strand
ggcagaggauauaccagua

SEQ ID NO: 529497 - RNA, 19 nt, Homo sapiens
  misc_RNA (1)...(19): siRNA sense strand
gaaucaagcacagauagaa

SEQ ID NO: 529498 - RNA, 19 nt, Homo sapiens
  misc_RNA (1)...(19): siRNA sense strand
gaauucaaccuuauuaugc

SEQ ID NO: 529499 - RNA, 19 nt, Homo sapiens
  misc_RNA (1)...(19): siRNA sense strand
guucaaagaccucauuuua

SEQ ID NO: 529500 - RNA, 19 nt, Homo sapiens
  misc_RNA (1)...(19): siRNA sense strand
cuacauagugcauuugaaa

SEQ ID NO: 529501 - RNA, 19 nt, Homo sapiens
  misc_RNA (1)...(19): siRNA sense strand
gaacuuaguaucauucacu

SEQ ID NO: 529502 - RNA, 19 nt, Homo sapiens
  misc_RNA (1)...(19): siRNA sense strand
uaacauucuuggaguggaa

SEQ ID NO: 529503 - RNA, 19 nt, Homo sapiens
  misc_RNA (1)...(19): siRNA sense strand
agauggcacuuggaacuua

SEQ ID NO: 529504 - RNA, 19 nt, Homo sapiens
  misc_RNA (1)...(19): siRNA sense strand
ugagguagaucagaugaau

SEQ ID NO: 529505 - RNA, 19 nt, Homo sapiens
  misc_RNA (1)...(19): siRNA sense strand
gaacuuaaagaagaccaaa

SEQ ID NO: 529506 - RNA, 19 nt, Homo sapiens
  misc_RNA (1)...(19): siRNA sense strand
ccaggaacccguaaacuuc

SEQ ID NO: 529507 - RNA, 19 nt, Homo sapiens
  misc_RNA (1)...(19): siRNA sense strand
ucaaagaccucauuuuaag

SEQ ID NO: 529508 - RNA, 19 nt, Homo sapiens
  misc_RNA (1)...(19): siRNA sense strand
uggcaguucuugucaguug

SEQ ID NO: 529509 - RNA, 19 nt, Homo sapiens
  misc_RNA (1)...(19): siRNA sense strand
cgaauucaaccuuauuaug

SEQ ID NO: 529510 - RNA, 19 nt, Homo sapiens
  misc_RNA (1)...(19): siRNA sense strand
uacggucgcugacuacuug

SEQ ID NO: 529511 - RNA, 19 nt, Homo sapiens
  misc_RNA (1)...(19): siRNA sense strand
caaacgcagugcaaucaag

SEQ ID NO: 529512 - RNA, 19 nt, Homo sapiens
  misc_RNA (1)...(19): siRNA sense strand
ccguaaacuucauaacauu

SEQ ID NO: 529513 - RNA, 19 nt, Homo sapiens
  misc_RNA (1)...(19): siRNA sense strand
gacagguuguaaaggcaua

SEQ ID NO: 529514 - RNA, 19 nt, Homo sapiens
  misc_RNA (1)...(19): siRNA sense strand
gcagcacaguuucuucaag

SEQ ID NO: 529515 - RNA, 19 nt, Homo sapiens
  misc_RNA (1)...(19): siRNA sense strand
cauuugaaacgccacuuua

SEQ ID NO: 529516 - RNA, 19 nt, Homo sapiens
  misc_RNA (1)...(19): siRNA sense strand
gaugaagguacaaauacaa

SEQ ID NO: 529517 - RNA, 19 nt, Homo sapiens
  misc_RNA (1)...(19): siRNA sense strand
gcauuugaaacgccacuuu

SEQ ID NO: 529518 - RNA, 19 nt, Homo sapiens
  misc_RNA (1)...(19): siRNA sense strand
gaacccguaaacuucauaa

SEQ ID NO: 529519 - RNA, 19 nt, Homo sapiens
  misc_RNA (1)...(19): siRNA sense strand
gaaaguuugcgcaacagau

SEQ ID NO: 529520 - RNA, 19 nt, Homo sapiens
  misc_RNA (1)...(19): siRNA sense strand
ggagagacuucagcaugca

SEQ ID NO: 529521 - RNA, 19 nt, Homo sapiens
  misc_RNA (1)...(19): siRNA sense strand
ugaugaagguacaaauaca

SEQ ID NO: 529522 - RNA, 19 nt, Homo sapiens
  misc_RNA (1)...(19): siRNA sense strand
cacgaaaguuugcgcaaca

SEQ ID NO: 529523 - RNA, 19 nt, Homo sapiens
  misc_RNA (1)...(19): siRNA sense strand
caaguaauaguguaucuac

SEQ ID NO: 529524 - RNA, 19 nt, Homo sapiens
  misc_RNA (1)...(19): siRNA sense strand
acuuggaacuuaaagaaga

SEQ ID NO: 529525 - RNA, 19 nt, Homo sapiens
  misc_RNA (1)...(19): siRNA sense strand
gagguagaucagaugaaua

SEQ ID NO: 529526 - RNA, 19 nt, Homo sapiens
  misc_RNA (1)...(19): siRNA sense strand
agguagaucagaugaauaa

SEQ ID NO: 529527 - RNA, 19 nt, Homo sapiens
  misc_RNA (1)...(19): siRNA sense strand
uuaaagaagaccaaagaug

SEQ ID NO: 529528 - RNA, 19 nt, Homo sapiens
  misc_RNA (1)...(19): siRNA sense strand
gguauuccaccugcucaua

SEQ ID NO: 529529 - RNA, 19 nt, Homo sapiens
  misc_RNA (1)...(19): siRNA sense strand
cccguaaacuucauaacau

SEQ ID NO: 529530 - RNA, 19 nt, Homo sapiens
  misc_RNA (1)...(19): siRNA sense strand
ugaaacgccacuuuauguu

SEQ ID NO: 529531 - RNA, 19 nt, Homo sapiens
  misc_RNA (1)...(19): siRNA sense strand
cagauucagcaaccucuaa

SEQ ID NO: 529532 - RNA, 19 nt, Homo sapiens
  misc_RNA (1)...(19): siRNA sense strand
uaaugagguuuacuaugca

SEQ ID NO: 529533 - RNA, 19 nt, Homo sapiens
  misc_RNA (1)...(19): siRNA sense strand
gcauauuaaugagguuuac

SEQ ID NO: 529534 - RNA, 19 nt, Homo sapiens
  misc_RNA (1)...(19): siRNA sense strand
caagaaaacagcugaugaa

SEQ ID NO: 529535 - RNA, 19 nt, Homo sapiens
  misc_RNA (1)...(19): siRNA sense strand
ggaacccguaaacuucaua

SEQ ID NO: 529536 - RNA, 19 nt, Homo sapiens
  misc_RNA (1)...(19): siRNA sense strand
gaguacaaaccaccaggaa

SEQ ID NO: 529537 - RNA, 19 nt, Homo sapiens
  misc_RNA (1)...(19): siRNA sense strand
aaagaagaccaaagaugga

SEQ ID NO: 529538 - RNA, 19 nt, Homo sapiens
  misc_RNA (1)...(19): siRNA sense strand
uuugagaaguugccagaug

SEQ ID NO: 529539 - RNA, 19 nt, Homo sapiens
  misc_RNA (1)...(19): siRNA sense strand
uauuccaccugcucauauu

SEQ ID NO: 529540 - RNA, 19 nt, Homo sapiens
  misc_RNA (1)...(19): siRNA sense strand
ugaaaugcacacuggagaa

SEQ ID NO: 529541 - RNA, 19 nt, Homo sapiens
  misc_RNA (1)...(19): siRNA sense strand
cagaggugcuacugggaau

SEQ ID NO: 529542 - RNA, 19 nt, Homo sapiens
  misc_RNA (1)...(19): siRNA sense strand
ucagcaaccucuaacuaac

SEQ ID NO: 529543 - RNA, 19 nt, Homo sapiens
  misc_RNA (1)...(19): siRNA sense strand
uaguggaaguucuggguau

SEQ ID NO: 529544 - RNA, 19 nt, Homo sapiens
  misc_RNA (1)...(19): siRNA sense strand
gaaaugcacacuggagaac

SEQ ID NO: 529545 - RNA, 19 nt, Homo sapiens
  misc_RNA (1)...(19): siRNA sense strand
guauuccaccugcucauau

SEQ ID NO: 529546 - RNA, 19 nt, Homo sapiens
  misc_RNA (1)...(19): siRNA sense strand
caugcaaaccuucaucugu

SEQ ID NO: 529547 - RNA, 19 nt, Homo sapiens
  misc_RNA (1)...(19): siRNA sense strand
cggaagguuuacaaugaug

SEQ ID NO: 529548 - RNA, 19 nt, Homo sapiens
  misc_RNA (1)...(19): siRNA sense strand
uugaaacgccacuuuaugu

SEQ ID NO: 529549 - RNA, 19 nt, Homo sapiens
  misc_RNA (1)...(19): siRNA sense strand
uacugggaaugccuuauga

SEQ ID NO: 529550 - RNA, 19 nt, Homo sapiens
  misc_RNA (1)...(19): siRNA sense strand
aaacgcagugcaaucaaga

SEQ ID NO: 529551 - RNA, 19 nt, Homo sapiens
  misc_RNA (1)...(19): siRNA sense strand
gccacuuuauguuucgaaa

SEQ ID NO: 529552 - RNA, 19 nt, Homo sapiens
  misc_RNA (1)...(19): siRNA sense strand
cuuugaaccuaacacgaaa

SEQ ID NO: 529553 - RNA, 19 nt, Homo sapiens
  misc_RNA (1)...(19): siRNA sense strand
ggcaccaccuccaguacau

SEQ ID NO: 529554 - RNA, 19 nt, Homo sapiens
  misc_RNA (1)...(19): siRNA sense strand
guucaguggugccaaugag

SEQ ID NO: 529555 - RNA, 19 nt, Homo sapiens
  misc_RNA (1)...(19): siRNA sense strand
auaguugacuuuggcaguu

SEQ ID NO: 529556 - RNA, 19 nt, Homo sapiens
  misc_RNA (1)...(19): siRNA sense strand
uccagaacuuaguaucauu

SEQ ID NO: 529557 - RNA, 19 nt, Homo sapiens
  misc_RNA (1)...(19): siRNA sense strand
aaaguuugcgcaacagaug

SEQ ID NO: 529558 - RNA, 19 nt, Homo sapiens
  misc_RNA (1)...(19): siRNA sense strand
ugaaucaagcacagauaga

SEQ ID NO: 529559 - RNA, 19 nt, Homo sapiens
  misc_RNA (1)...(19): siRNA sense strand
ccagauggcacuuggaacu

SEQ ID NO: 529560 - RNA, 19 nt, Homo sapiens
  misc_RNA (1)...(19): siRNA sense strand
gaccuugccauugauaugu

SEQ ID NO: 529561 - RNA, 19 nt, Homo sapiens
  misc_RNA (1)...(19): siRNA sense strand
ccagaacuuaguaucauuc

SEQ ID NO: 529562 - RNA, 19 nt, Homo sapiens
  misc_RNA (1)...(19): siRNA sense strand
cuacugggaaugccuuaug

SEQ ID NO: 529563 - RNA, 19 nt, Homo sapiens
  misc_RNA (1)...(19): siRNA sense strand
caagcauauuaaugagguu

SEQ ID NO: 529564 - RNA, 19 nt, Homo sapiens
  misc_RNA (1)...(19): siRNA sense strand
gaucaaaacauacaagcau

SEQ ID NO: 529565 - RNA, 19 nt, Homo sapiens
  misc_RNA (1)...(19): siRNA sense strand
gaagaccaaagauggaaaa

SEQ ID NO: 529566 - RNA, 19 nt, Homo sapiens
  misc_RNA (1)...(19): siRNA sense strand
gcgacuccagaacuuagua

SEQ ID NO: 529567 - RNA, 19 nt, Homo sapiens
  misc_RNA (1)...(19): siRNA sense strand
ccccaaaacucgaauucaa

SEQ ID NO: 529568 - RNA, 19 nt, Homo sapiens
  misc_RNA (1)...(19): siRNA sense strand
uuaaggaugcuugauuaug

SEQ ID NO: 529569 - RNA, 19 nt, Homo sapiens
  misc_RNA (1)...(19): siRNA sense strand
caccugcucauauucuuga

SEQ ID NO: 529570 - RNA, 19 nt, Homo sapiens
  misc_RNA (1)...(19): siRNA sense strand
gaagcgaagacaccaacag

SEQ ID NO: 529571 - RNA, 19 nt, Homo sapiens
  misc_RNA (1)...(19): siRNA sense strand
acgcagugcaaucaagaua

SEQ ID NO: 529572 - RNA, 19 nt, Homo sapiens
  misc_RNA (1)...(19): siRNA sense strand
ucuuugaaccuaacacgaa

SEQ ID NO: 529573 - RNA, 19 nt, Homo sapiens
  misc_RNA (1)...(19): siRNA sense strand
caggaacccguaaacuuca

SEQ ID NO: 529574 - RNA, 19 nt, Homo sapiens
  misc_RNA (1)...(19): siRNA sense strand
acuuaaagaagaccaaaga

SEQ ID NO: 529575 - RNA, 19 nt, Homo sapiens
  misc_RNA (1)...(19): siRNA sense strand
uucagcaaccucuaacuaa

SEQ ID NO: 529576 - RNA, 19 nt, Homo sapiens
  misc_RNA (1)...(19): siRNA sense strand
caaugagguagaucagaug

SEQ ID NO: 529577 - RNA, 19 nt, Homo sapiens
  misc_RNA (1)...(19): siRNA sense strand
ggaacuuaaagaagaccaa

SEQ ID NO: 529578 - RNA, 19 nt, Homo sapiens
  misc_RNA (1)...(19): siRNA sense strand
ugaccuugccauugauaug

SEQ ID NO: 529579 - RNA, 19 nt, Homo sapiens
  misc_RNA (1)...(19): siRNA sense strand
gcaugcaaaccuucaucug

SEQ ID NO: 529580 - RNA, 19 nt, Homo sapiens
  misc_RNA (1)...(19): siRNA sense strand
gaaaguagcccgaguacaa

SEQ ID NO: 529581 - RNA, 19 nt, Homo sapiens
  misc_RNA (1)...(19): siRNA sense strand
gagaugcagugcccuaaga

SEQ ID NO: 529582 - RNA, 19 nt, Homo sapiens
  misc_RNA (1)...(19): siRNA sense strand
agaaacagagucccaguua

SEQ ID NO: 529583 - RNA, 19 nt, Homo sapiens
  misc_RNA (1)...(19): siRNA sense strand
uagcaucaauucacgcuuu

SEQ ID NO: 529584 - RNA, 19 nt, Homo sapiens
  misc_RNA (1)...(19): siRNA sense strand
gagcuauuguaaccuguaa

SEQ ID NO: 529585 - RNA, 19 nt, Homo sapiens
  misc_RNA (1)...(19): siRNA sense strand
gcccuaagacccacacuaa

SEQ ID NO: 529586 - RNA, 19 nt, Homo sapiens
  misc_RNA (1)...(19): siRNA sense strand
gaaacagagucccaguuac

SEQ ID NO: 529587 - RNA, 19 nt, Homo sapiens
  misc_RNA (1)...(19): siRNA sense strand
gaacuauccgcaaggaaga

SEQ ID NO: 529588 - RNA, 19 nt, Homo sapiens
  misc_RNA (1)...(19): siRNA sense strand
uaaggucucuagcaucaau

SEQ ID NO: 529589 - RNA, 19 nt, Homo sapiens
  misc_RNA (1)...(19): siRNA sense strand
uguaaggucucuagcauca

SEQ ID NO: 529590 - RNA, 19 nt, Homo sapiens
  misc_RNA (1)...(19): siRNA sense strand
gaugugggagcuauuguaa

SEQ ID NO: 529591 - RNA, 19 nt, Homo sapiens
  misc_RNA (1)...(19): siRNA sense strand
gacccacacuaaagaauuc

SEQ ID NO: 529592 - RNA, 19 nt, Homo sapiens
  misc_RNA (1)...(19): siRNA sense strand
uaaagaauuccggaaagua

SEQ ID NO: 529593 - RNA, 19 nt, Homo sapiens
  misc_RNA (1)...(19): siRNA sense strand
gcgaacgucuguguaacuu

SEQ ID NO: 529594 - RNA, 19 nt, Homo sapiens
  misc_RNA (1)...(19): siRNA sense strand
gaagauguccgagcaacug

SEQ ID NO: 529595 - RNA, 19 nt, Homo sapiens
  misc_RNA (1)...(19): siRNA sense strand
gaggaacuauccgcaagga

SEQ ID NO: 529596 - RNA, 19 nt, Homo sapiens
  misc_RNA (1)...(19): siRNA sense strand
ccaaagugaucuccuuagg

SEQ ID NO: 529597 - RNA, 19 nt, Homo sapiens
  misc_RNA (1)...(19): siRNA sense strand
cccaucagcuggugugaga

SEQ ID NO: 529598 - RNA, 19 nt, Homo sapiens
  misc_RNA (1)...(19): siRNA sense strand
ggccaaagugaucuccuua

SEQ ID NO: 529599 - RNA, 19 nt, Homo sapiens
  misc_RNA (1)...(19): siRNA sense strand
cuaaagaauuccggaaagu

SEQ ID NO: 529600 - RNA, 19 nt, Homo sapiens
  misc_RNA (1)...(19): siRNA sense strand
gagaaacagagucccaguu

SEQ ID NO: 529601 - RNA, 19 nt, Homo sapiens
  misc_RNA (1)...(19): siRNA sense strand
ugagucagguauccagaug

SEQ ID NO: 529602 - RNA, 19 nt, Homo sapiens
  misc_RNA (1)...(19): siRNA sense strand
ccaguggugucuguaguga

SEQ ID NO: 529603 - RNA, 19 nt, Homo sapiens
  misc_RNA (1)...(19): siRNA sense strand
gguccaugccucuuaagaa

SEQ ID NO: 529604 - RNA, 19 nt, Homo sapiens
  misc_RNA (1)...(19): siRNA sense strand
cuaagacccacacuaaaga

SEQ ID NO: 529605 - RNA, 19 nt, Homo sapiens
  misc_RNA (1)...(19): siRNA sense strand
gaguacaacccgaauucuu

SEQ ID NO: 529606 - RNA, 19 nt, Homo sapiens
  misc_RNA (1)...(19): siRNA sense strand
gugaugcacaguccaacua

SEQ ID NO: 529607 - RNA, 19 nt, Homo sapiens
  misc_RNA (1)...(19): siRNA sense strand
ggagcuauuguaaccugua

SEQ ID NO: 529608 - RNA, 19 nt, Homo sapiens
  misc_RNA (1)...(19): siRNA sense strand
aaagaauuccggaaaguag

SEQ ID NO: 529609 - RNA, 19 nt, Homo sapiens
  misc_RNA (1)...(19): siRNA sense strand
ccuaagacccacacuaaag

SEQ ID NO: 529610 - RNA, 19 nt, Homo sapiens
  misc_RNA (1)...(19): siRNA sense strand
guccaugccucuuaagaac

SEQ ID NO: 529611 - RNA, 19 nt, Homo sapiens
  misc_RNA (1)...(19): siRNA sense strand
aaacagagucccaguuacu

SEQ ID NO: 529612 - RNA, 19 nt, Homo sapiens
  misc_RNA (1)...(19): siRNA sense strand
ccuguaaggucucuagcau

SEQ ID NO: 529613 - RNA, 19 nt, Homo sapiens
  misc_RNA (1)...(19): siRNA sense strand
gauguccgagcaacugaaa

SEQ ID NO: 529614 - RNA, 19 nt, Homo sapiens
  misc_RNA (1)...(19): siRNA sense strand
uaagacccacacuaaagaa

SEQ ID NO: 529615 - RNA, 19 nt, Homo sapiens
  misc_RNA (1)...(19): siRNA sense strand
aguggugucuguagugaga

SEQ ID NO: 529616 - RNA, 19 nt, Homo sapiens
  misc_RNA (1)...(19): siRNA sense strand
ccgaauucuugcagaccua

SEQ ID NO: 529617 - RNA, 19 nt, Homo sapiens
  misc_RNA (1)...(19): siRNA sense strand
acuaaagaauuccggaaag

SEQ ID NO: 529618 - RNA, 19 nt, Homo sapiens
  misc_RNA (1)...(19): siRNA sense strand
caaagugaucuccuuaggu

SEQ ID NO: 529619 - RNA, 19 nt, Homo sapiens
  misc_RNA (1)...(19): siRNA sense strand
gaugaagagcagcgagaau

SEQ ID NO: 529620 - RNA, 19 nt, Homo sapiens
  misc_RNA (1)...(19): siRNA sense strand
guagugagagaaacagagu

SEQ ID NO: 529621 - RNA, 19 nt, Homo sapiens
  misc_RNA (1)...(19): siRNA sense strand
aguacaacccgaauucuug

SEQ ID NO: 529622 - RNA, 19 nt, Homo sapiens
  misc_RNA (1)...(19): siRNA sense strand
caguccaacuaccugcuaa

SEQ ID NO: 529623 - RNA, 19 nt, Homo sapiens
  misc_RNA (1)...(19): siRNA sense strand
agacccacacuaaagaauu

SEQ ID NO: 529624 - RNA, 19 nt, Homo sapiens
  misc_RNA (1)...(19): siRNA sense strand
ccagaugugggagcuauug

SEQ ID NO: 529625 - RNA, 19 nt, Homo sapiens
  misc_RNA (1)...(19): siRNA sense strand
ccggaaaguagcccgagua

SEQ ID NO: 529626 - RNA, 19 nt, Homo sapiens
  misc_RNA (1)...(19): siRNA sense strand
ccaugccucuuaagaacuc

SEQ ID NO: 529627 - RNA, 19 nt, Homo sapiens
  misc_RNA (1)...(19): siRNA sense strand
ccgccacggcuacaucuuu

SEQ ID NO: 529628 - RNA, 19 nt, Homo sapiens
  misc_RNA (1)...(19): siRNA sense strand
uggccaaagugaucuccuu

SEQ ID NO: 529629 - RNA, 19 nt, Homo sapiens
  misc_RNA (1)...(19): siRNA sense strand
cacuaaagaauuccggaaa

SEQ ID NO: 529630 - RNA, 19 nt, Homo sapiens
  misc_RNA (1)...(19): siRNA sense strand
ccgaguacaacccgaauuc

SEQ ID NO: 529631 - RNA, 19 nt, Homo sapiens
  misc_RNA (1)...(19): siRNA sense strand
ccggcgaacgucuguguaa

SEQ ID NO: 529632 - RNA, 19 nt, Homo sapiens
  misc_RNA (1)...(19): siRNA sense strand
cuugccggcugucugauga

SEQ ID NO: 529633 - RNA, 19 nt, Homo sapiens
  misc_RNA (1)...(19): siRNA sense strand
ggacaaaggacaucaagga

SEQ ID NO: 529634 - RNA, 19 nt, Homo sapiens
  misc_RNA (1)...(19): siRNA sense strand
agaagaagcugccaagaag

SEQ ID NO: 529635 - RNA, 19 nt, Homo sapiens
  misc_RNA (1)...(19): siRNA sense strand
ggacaucaaggaaggcauu

SEQ ID NO: 529636 - RNA, 19 nt, Homo sapiens
  misc_RNA (1)...(19): siRNA sense strand
ucaaugagaggacaaagga

SEQ ID NO: 529637 - RNA, 19 nt, Homo sapiens
  misc_RNA (1)...(19): siRNA sense strand
ugagauugcccgcaucaaa

SEQ ID NO: 529638 - RNA, 19 nt, Homo sapiens
  misc_RNA (1)...(19): siRNA sense strand
ugaagcauguguaugagau

SEQ ID NO: 529639 - RNA, 19 nt, Homo sapiens
  misc_RNA (1)...(19): siRNA sense strand
gcauuccucugccuaccaa

SEQ ID NO: 529640 - RNA, 19 nt, Homo sapiens
  misc_RNA (1)...(19): siRNA sense strand
gacaaaggacaucaaggaa

SEQ ID NO: 529641 - RNA, 19 nt, Homo sapiens
  misc_RNA (1)...(19): siRNA sense strand
gcuugcagcuuuccagaag

SEQ ID NO: 529642 - RNA, 19 nt, Homo sapiens
  misc_RNA (1)...(19): siRNA sense strand
aagaagaagcugccaagaa

SEQ ID NO: 529643 - RNA, 19 nt, Homo sapiens
  misc_RNA (1)...(19): siRNA sense strand
gagaggcguuuccaucaac

SEQ ID NO: 529644 - RNA, 19 nt, Homo sapiens
  misc_RNA (1)...(19): siRNA sense strand
gagauugcccgcaucaaag

SEQ ID NO: 529645 - RNA, 19 nt, Homo sapiens
  misc_RNA (1)...(19): siRNA sense strand
ccuugaagcauguguauga

SEQ ID NO: 529646 - RNA, 19 nt, Homo sapiens
  misc_RNA (1)...(19): siRNA sense strand
gcauucgcguggugaagga

SEQ ID NO: 529647 - RNA, 19 nt, Homo sapiens
  misc_RNA (1)...(19): siRNA sense strand
ucagaaggaggcagauuug

SEQ ID NO: 529648 - RNA, 19 nt, Homo sapiens
  misc_RNA (1)...(19): siRNA sense strand
agagaggcguuuccaucaa

SEQ ID NO: 529649 - RNA, 19 nt, Homo sapiens
  misc_RNA (1)...(19): siRNA sense strand
gcguuuccaucaaccaguu

SEQ ID NO: 529650 - RNA, 19 nt, Homo sapiens
  misc_RNA (1)...(19): siRNA sense strand
uggcaggccuggugaccuu

SEQ ID NO: 529651 - RNA, 19 nt, Homo sapiens
  misc_RNA (1)...(19): siRNA sense strand
gaagcauguguaugagauu

SEQ ID NO: 529652 - RNA, 19 nt, Homo sapiens
  misc_RNA (1)...(19): siRNA sense strand
cauuugcccugcaggaugu

SEQ ID NO: 529653 - RNA, 19 nt, Homo sapiens
  misc_RNA (1)...(19): siRNA sense strand
gaagaagcugccaagaagu

SEQ ID NO: 529654 - RNA, 19 nt, Homo sapiens
  misc_RNA (1)...(19): siRNA sense strand
ugcaaggaguucaaugaga

SEQ ID NO: 529655 - RNA, 19 nt, Homo sapiens
  misc_RNA (1)...(19): siRNA sense strand
gaccuugaagcauguguau

SEQ ID NO: 529656 - RNA, 19 nt, Homo sapiens
  misc_RNA (1)...(19): siRNA sense strand
aagcauguguaugagauug

SEQ ID NO: 529657 - RNA, 19 nt, Homo sapiens
  misc_RNA (1)...(19): siRNA sense strand
cuaccaagauuuuagugaa

SEQ ID NO: 529658 - RNA, 19 nt, Homo sapiens
  misc_RNA (1)...(19): siRNA sense strand
gcccacuguuuccuacuuc

SEQ ID NO: 529659 - RNA, 19 nt, Homo sapiens
  misc_RNA (1)...(19): siRNA sense strand
gaggacaaaggacaucaag

SEQ ID NO: 529660 - RNA, 19 nt, Homo sapiens
  misc_RNA (1)...(19): siRNA sense strand
caagaagaagcugccaaga

SEQ ID NO: 529661 - RNA, 19 nt, Homo sapiens
  misc_RNA (1)...(19): siRNA sense strand
gcucagaaggaggcagauu

SEQ ID NO: 529662 - RNA, 19 nt, Homo sapiens
  misc_RNA (1)...(19): siRNA sense strand
aagaagcugccaagaagug

SEQ ID NO: 529663 - RNA, 19 nt, Homo sapiens
  misc_RNA (1)...(19): siRNA sense strand
cucagaaggaggcagauuu

SEQ ID NO: 529664 - RNA, 19 nt, Homo sapiens
  misc_RNA (1)...(19): siRNA sense strand
uugcagcuuuccagaagga

SEQ ID NO: 529665 - RNA, 19 nt, Homo sapiens
  misc_RNA (1)...(19): siRNA sense strand
ggacaaaggacaucaagga

SEQ ID NO: 529666 - RNA, 19 nt, Homo sapiens
  misc_RNA (1)...(19): siRNA sense strand
agaagaagcugccaagaag

SEQ ID NO: 529667 - RNA, 19 nt, Homo sapiens
  misc_RNA (1)...(19): siRNA sense strand
ggacaucaaggaaggcauu

SEQ ID NO: 529668 - RNA, 19 nt, Homo sapiens
  misc_RNA (1)...(19): siRNA sense strand
ucaaugagaggacaaagga

SEQ ID NO: 529669 - RNA, 19 nt, Homo sapiens
  misc_RNA (1)...(19): siRNA sense strand
ugagauugcccgcaucaaa

SEQ ID NO: 529670 - RNA, 19 nt, Homo sapiens
  misc_RNA (1)...(19): siRNA sense strand
ugaagcauguguaugagau

SEQ ID NO: 529671 - RNA, 19 nt, Homo sapiens
  misc_RNA (1)...(19): siRNA sense strand
gcauuccucugccuaccaa

SEQ ID NO: 529672 - RNA, 19 nt, Homo sapiens
  misc_RNA (1)...(19): siRNA sense strand
gacaaaggacaucaaggaa

SEQ ID NO: 529673 - RNA, 19 nt, Homo sapiens
  misc_RNA (1)...(19): siRNA sense strand
gcuugcagcuuuccagaag

SEQ ID NO: 529674 - RNA, 19 nt, Homo sapiens
  misc_RNA (1)...(19): siRNA sense strand
aagaagaagcugccaagaa

SEQ ID NO: 529675 - RNA, 19 nt, Homo sapiens
  misc_RNA (1)...(19): siRNA sense strand
gagaggcguuuccaucaac

SEQ ID NO: 529676 - RNA, 19 nt, Homo sapiens
  misc_RNA (1)...(19): siRNA sense strand
gagauugcccgcaucaaag

SEQ ID NO: 529677 - RNA, 19 nt, Homo sapiens
  misc_RNA (1)...(19): siRNA sense strand
ccuugaagcauguguauga

SEQ ID NO: 529678 - RNA, 19 nt, Homo sapiens
  misc_RNA (1)...(19): siRNA sense strand
gcauucgcguggugaagga

SEQ ID NO: 529679 - RNA, 19 nt, Homo sapiens
  misc_RNA (1)...(19): siRNA sense strand
ucagaaggaggcagauuug

SEQ ID NO: 529680 - RNA, 19 nt, Homo sapiens
  misc_RNA (1)...(19): siRNA sense strand
agagaggcguuuccaucaa

SEQ ID NO: 529681 - RNA, 19 nt, Homo sapiens
  misc_RNA (1)...(19): siRNA sense strand
gcguuuccaucaaccaguu

SEQ ID NO: 529682 - RNA, 19 nt, Homo sapiens
  misc_RNA (1)...(19): siRNA sense strand
uggcaggccuggugaccuu

SEQ ID NO: 529683 - RNA, 19 nt, Homo sapiens
  misc_RNA (1)...(19): siRNA sense strand
gaagcauguguaugagauu

SEQ ID NO: 529684 - RNA, 19 nt, Homo sapiens
  misc_RNA (1)...(19): siRNA sense strand
cauuugcccugcaggaugu

SEQ ID NO: 529685 - RNA, 19 nt, Homo sapiens
  misc_RNA (1)...(19): siRNA sense strand
gaagaagcugccaagaagu

SEQ ID NO: 529686 - RNA, 19 nt, Homo sapiens
  misc_RNA (1)...(19): siRNA sense strand
ugcaaggaguucaaugaga

SEQ ID NO: 529687 - RNA, 19 nt, Homo sapiens
  misc_RNA (1)...(19): siRNA sense strand
gaccuugaagcauguguau

SEQ ID NO: 529688 - RNA, 19 nt, Homo sapiens
  misc_RNA (1)...(19): siRNA sense strand
aagcauguguaugagauug

SEQ ID NO: 529689 - RNA, 19 nt, Homo sapiens
  misc_RNA (1)...(19): siRNA sense strand
cuaccaagauuuuagugaa

SEQ ID NO: 529690 - RNA, 19 nt, Homo sapiens
  misc_RNA (1)...(19): siRNA sense strand
gcccacuguuuccuacuuc

SEQ ID NO: 529691 - RNA, 19 nt, Homo sapiens
  misc_RNA (1)...(19): siRNA sense strand
gaggacaaaggacaucaag

SEQ ID NO: 529692 - RNA, 19 nt, Homo sapiens
  misc_RNA (1)...(19): siRNA sense strand
caagaagaagcugccaaga

SEQ ID NO: 529693 - RNA, 19 nt, Homo sapiens
  misc_RNA (1)...(19): siRNA sense strand
gcucagaaggaggcagauu

SEQ ID NO: 529694 - RNA, 19 nt, Homo sapiens
  misc_RNA (1)...(19): siRNA sense strand
aagaagcugccaagaagug

SEQ ID NO: 529695 - RNA, 19 nt, Homo sapiens
  misc_RNA (1)...(19): siRNA sense strand
cucagaaggaggcagauuu

SEQ ID NO: 529696 - RNA, 19 nt, Homo sapiens
  misc_RNA (1)...(19): siRNA sense strand
uugcagcuuuccagaagga

SEQ ID NO: 529697 - RNA, 19 nt, Homo sapiens
  misc_RNA (1)...(19): siRNA sense strand
ggacaaaggacaucaagga

SEQ ID NO: 529698 - RNA, 19 nt, Homo sapiens
  misc_RNA (1)...(19): siRNA sense strand
ggacaucaaggaaggcauu

SEQ ID NO: 529699 - RNA, 19 nt, Homo sapiens
  misc_RNA (1)...(19): siRNA sense strand
ucaaugagaggacaaagga

SEQ ID NO: 529700 - RNA, 19 nt, Homo sapiens
  misc_RNA (1)...(19): siRNA sense strand
ugagauugcccgcaucaaa

SEQ ID NO: 529701 - RNA, 19 nt, Homo sapiens
  misc_RNA (1)...(19): siRNA sense strand
ugaagcauguguaugagau

SEQ ID NO: 529702 - RNA, 19 nt, Homo sapiens
  misc_RNA (1)...(19): siRNA sense strand
gcauuccucugccuaccaa

SEQ ID NO: 529703 - RNA, 19 nt, Homo sapiens
  misc_RNA (1)...(19): siRNA sense strand
gacaaaggacaucaaggaa

SEQ ID NO: 529704 - RNA, 19 nt, Homo sapiens
  misc_RNA (1)...(19): siRNA sense strand
gagaggcguuuccaucaac

SEQ ID NO: 529705 - RNA, 19 nt, Homo sapiens
  misc_RNA (1)...(19): siRNA sense strand
gagauugcccgcaucaaag

SEQ ID NO: 529706 - RNA, 19 nt, Homo sapiens
  misc_RNA (1)...(19): siRNA sense strand
ccuugaagcauguguauga

SEQ ID NO: 529707 - RNA, 19 nt, Homo sapiens
  misc_RNA (1)...(19): siRNA sense strand
gcauucgcguggugaagga

SEQ ID NO: 529708 - RNA, 19 nt, Homo sapiens
  misc_RNA (1)...(19): siRNA sense strand
agagaggcguuuccaucaa

SEQ ID NO: 529709 - RNA, 19 nt, Homo sapiens
  misc_RNA (1)...(19): siRNA sense strand
gcguuuccaucaaccaguu

SEQ ID NO: 529710 - RNA, 19 nt, Homo sapiens
  misc_RNA (1)...(19): siRNA sense strand
uggcaggccuggugaccuu

SEQ ID NO: 529711 - RNA, 19 nt, Homo sapiens
  misc_RNA (1)...(19): siRNA sense strand
gaagcauguguaugagauu

SEQ ID NO: 529712 - RNA, 19 nt, Homo sapiens
  misc_RNA (1)...(19): siRNA sense strand
ugcaaggaguucaaugaga

SEQ ID NO: 529713 - RNA, 19 nt, Homo sapiens
  misc_RNA (1)...(19): siRNA sense strand
cauuugcccugcaggaugu

SEQ ID NO: 529714 - RNA, 19 nt, Homo sapiens
  misc_RNA (1)...(19): siRNA sense strand
gaccuugaagcauguguau

SEQ ID NO: 529715 - RNA, 19 nt, Homo sapiens
  misc_RNA (1)...(19): siRNA sense strand
aagcauguguaugagauug

SEQ ID NO: 529716 - RNA, 19 nt, Homo sapiens
  misc_RNA (1)...(19): siRNA sense strand
cuaccaagauuuuagugaa

SEQ ID NO: 529717 - RNA, 19 nt, Homo sapiens
  misc_RNA (1)...(19): siRNA sense strand
gcccacuguuuccuacuuc

SEQ ID NO: 529718 - RNA, 19 nt, Homo sapiens
  misc_RNA (1)...(19): siRNA sense strand
gaggacaaaggacaucaag

SEQ ID NO: 529719 - RNA, 19 nt, Homo sapiens
  misc_RNA (1)...(19): siRNA sense strand
cgacuaagauuaaugaaug

SEQ ID NO: 529720 - RNA, 19 nt, Homo sapiens
  misc_RNA (1)...(19): siRNA sense strand
gaagguggagccaauguua

SEQ ID NO: 529721 - RNA, 19 nt, Homo sapiens
  misc_RNA (1)...(19): siRNA sense strand
ggaagucucuugucugcaa

SEQ ID NO: 529722 - RNA, 19 nt, Homo sapiens
  misc_RNA (1)...(19): siRNA sense strand
gagaacacauugaugaaga

SEQ ID NO: 529723 - RNA, 19 nt, Homo sapiens
  misc_RNA (1)...(19): siRNA sense strand
guaaacgccugugacaaua

SEQ ID NO: 529724 - RNA, 19 nt, Homo sapiens
  misc_RNA (1)...(19): siRNA sense strand
caaacaagccucaguguga

SEQ ID NO: 529725 - RNA, 19 nt, Homo sapiens
  misc_RNA (1)...(19): siRNA sense strand
ugaaggaucuccacagaau

SEQ ID NO: 529726 - RNA, 19 nt, Homo sapiens
  misc_RNA (1)...(19): siRNA sense strand
gaagggaagcaucucauuu

SEQ ID NO: 529727 - RNA, 19 nt, Homo sapiens
  misc_RNA (1)...(19): siRNA sense strand
gaagaggugguucaacuuu

SEQ ID NO: 529728 - RNA, 19 nt, Homo sapiens
  misc_RNA (1)...(19): siRNA sense strand
ggaaaugaauccgacauca

SEQ ID NO: 529729 - RNA, 19 nt, Homo sapiens
  misc_RNA (1)...(19): siRNA sense strand
gaacacagaauauagaaag

SEQ ID NO: 529730 - RNA, 19 nt, Homo sapiens
  misc_RNA (1)...(19): siRNA sense strand
uagaagggcugcaguggaa

SEQ ID NO: 529731 - RNA, 19 nt, Homo sapiens
  misc_RNA (1)...(19): siRNA sense strand
caagagcacauagagauua

SEQ ID NO: 529732 - RNA, 19 nt, Homo sapiens
  misc_RNA (1)...(19): siRNA sense strand
ggacgacuaagauuaauga

SEQ ID NO: 529733 - RNA, 19 nt, Homo sapiens
  misc_RNA (1)...(19): siRNA sense strand
gcauaacgcaguacaaaug

SEQ ID NO: 529734 - RNA, 19 nt, Homo sapiens
  misc_RNA (1)...(19): siRNA sense strand
ugaagauucuccuugauga

SEQ ID NO: 529735 - RNA, 19 nt, Homo sapiens
  misc_RNA (1)...(19): siRNA sense strand
uaaaggagcagaugucaau

SEQ ID NO: 529736 - RNA, 19 nt, Homo sapiens
  misc_RNA (1)...(19): siRNA sense strand
gagcagggaucauaacaac

SEQ ID NO: 529737 - RNA, 19 nt, Homo sapiens
  misc_RNA (1)...(19): siRNA sense strand
gaacuucugcuucgucaug

SEQ ID NO: 529738 - RNA, 19 nt, Homo sapiens
  misc_RNA (1)...(19): siRNA sense strand
cagaagacauuuccagauc

SEQ ID NO: 529739 - RNA, 19 nt, Homo sapiens
  misc_RNA (1)...(19): siRNA sense strand
gaaaugaauccgacaucaa

SEQ ID NO: 529740 - RNA, 19 nt, Homo sapiens
  misc_RNA (1)...(19): siRNA sense strand
uaaaguucauccggaauuu

SEQ ID NO: 529741 - RNA, 19 nt, Homo sapiens
  misc_RNA (1)...(19): siRNA sense strand
gaagacauuuccagaucug

SEQ ID NO: 529742 - RNA, 19 nt, Homo sapiens
  misc_RNA (1)...(19): siRNA sense strand
gggaagauguggaaaauga

SEQ ID NO: 529743 - RNA, 19 nt, Homo sapiens
  misc_RNA (1)...(19): siRNA sense strand
cuacagaacacagaauaua

SEQ ID NO: 529744 - RNA, 19 nt, Homo sapiens
  misc_RNA (1)...(19): siRNA sense strand
agaagaagcacuuggguuu

SEQ ID NO: 529745 - RNA, 19 nt, Homo sapiens
  misc_RNA (1)...(19): siRNA sense strand
gaauauaccgcccuaugau

SEQ ID NO: 529746 - RNA, 19 nt, Homo sapiens
  misc_RNA (1)...(19): siRNA sense strand
gaauuugggagaacacauu

SEQ ID NO: 529747 - RNA, 19 nt, Homo sapiens
  misc_RNA (1)...(19): siRNA sense strand
gaaagacaaaggaggauca

SEQ ID NO: 529748 - RNA, 19 nt, Homo sapiens
  misc_RNA (1)...(19): siRNA sense strand
ugggugaucugcuaaaguu

SEQ ID NO: 529749 - RNA, 19 nt, Homo sapiens
  misc_RNA (1)...(19): siRNA sense strand
gagaggagcaaaugugaau

SEQ ID NO: 529750 - RNA, 19 nt, Homo sapiens
  misc_RNA (1)...(19): siRNA sense strand
guccugucaucuauauuua

SEQ ID NO: 529751 - RNA, 19 nt, Homo sapiens
  misc_RNA (1)...(19): siRNA sense strand
ugacagcgaggcggaauua

SEQ ID NO: 529752 - RNA, 19 nt, Homo sapiens
  misc_RNA (1)...(19): siRNA sense strand
ggucaaagcccuaaaauuc

SEQ ID NO: 529753 - RNA, 19 nt, Homo sapiens
  misc_RNA (1)...(19): siRNA sense strand
aaaugaauccgacaucaaa

SEQ ID NO: 529754 - RNA, 19 nt, Homo sapiens
  misc_RNA (1)...(19): siRNA sense strand
caaaauugcugauacuuca

SEQ ID NO: 529755 - RNA, 19 nt, Homo sapiens
  misc_RNA (1)...(19): siRNA sense strand
gaaggaucuccacagaaua

SEQ ID NO: 529756 - RNA, 19 nt, Homo sapiens
  misc_RNA (1)...(19): siRNA sense strand
gcaagagcacauagagauu

SEQ ID NO: 529757 - RNA, 19 nt, Homo sapiens
  misc_RNA (1)...(19): siRNA sense strand
gacaauaugggcagaaaug

SEQ ID NO: 529758 - RNA, 19 nt, Homo sapiens
  misc_RNA (1)...(19): siRNA sense strand
cagcgaggcggaauuauga

SEQ ID NO: 529759 - RNA, 19 nt, Homo sapiens
  misc_RNA (1)...(19): siRNA sense strand
gcgugaagcugcugaaacu

SEQ ID NO: 529760 - RNA, 19 nt, Homo sapiens
  misc_RNA (1)...(19): siRNA sense strand
gauuaaagcuguucaaaac

SEQ ID NO: 529761 - RNA, 19 nt, Homo sapiens
  misc_RNA (1)...(19): siRNA sense strand
cauggaagccgcuguguau

SEQ ID NO: 529762 - RNA, 19 nt, Homo sapiens
  misc_RNA (1)...(19): siRNA sense strand
gcuggacaccucugcauaa

SEQ ID NO: 529763 - RNA, 19 nt, Homo sapiens
  misc_RNA (1)...(19): siRNA sense strand
ggugaucuaugucuacaca

SEQ ID NO: 529764 - RNA, 19 nt, Homo sapiens
  misc_RNA (1)...(19): siRNA sense strand
ggagacccuucccuguauu

SEQ ID NO: 529765 - RNA, 19 nt, Homo sapiens
  misc_RNA (1)...(19): siRNA sense strand
gcuggaagguggagccaau

SEQ ID NO: 529766 - RNA, 19 nt, Homo sapiens
  misc_RNA (1)...(19): siRNA sense strand
gugaagcugcugaaacuuu

SEQ ID NO: 529767 - RNA, 19 nt, Homo sapiens
  misc_RNA (1)...(19): siRNA sense strand
ugaucuaugucuacacaaa

SEQ ID NO: 529768 - RNA, 19 nt, Homo sapiens
  misc_RNA (1)...(19): siRNA sense strand
cacaggaagucaagagaga

SEQ ID NO: 529769 - RNA, 19 nt, Homo sapiens
  misc_RNA (1)...(19): siRNA sense strand
agacaaaggaggaucaaga

SEQ ID NO: 529770 - RNA, 19 nt, Homo sapiens
  misc_RNA (1)...(19): siRNA sense strand
aaacuaaggaccucauuca

SEQ ID NO: 529771 - RNA, 19 nt, Homo sapiens
  misc_RNA (1)...(19): siRNA sense strand
gaacucaaacugaagaaaa

SEQ ID NO: 529772 - RNA, 19 nt, Homo sapiens
  misc_RNA (1)...(19): siRNA sense strand
gaagaagcacuuggguuug

SEQ ID NO: 529773 - RNA, 19 nt, Homo sapiens
  misc_RNA (1)...(19): siRNA sense strand
aagagcacauagagauuaa

SEQ ID NO: 529774 - RNA, 19 nt, Homo sapiens
  misc_RNA (1)...(19): siRNA sense strand
gagccaauguuaauuucca

SEQ ID NO: 529775 - RNA, 19 nt, Homo sapiens
  misc_RNA (1)...(19): siRNA sense strand
gaaacuaaggaccucauuc

SEQ ID NO: 529776 - RNA, 19 nt, Homo sapiens
  misc_RNA (1)...(19): siRNA sense strand
ccugaaggaucuccacaga

SEQ ID NO: 529777 - RNA, 19 nt, Homo sapiens
  misc_RNA (1)...(19): siRNA sense strand
ggaagccgcuguguauggu

SEQ ID NO: 529778 - RNA, 19 nt, Homo sapiens
  misc_RNA (1)...(19): siRNA sense strand
guucaacuuucuccagaug

SEQ ID NO: 529779 - RNA, 19 nt, Homo sapiens
  misc_RNA (1)...(19): siRNA sense strand
gaagucucuugucugcaaa

SEQ ID NO: 529780 - RNA, 19 nt, Homo sapiens
  misc_RNA (1)...(19): siRNA sense strand
gagcacauagagauuaaug

SEQ ID NO: 529781 - RNA, 19 nt, Homo sapiens
  misc_RNA (1)...(19): siRNA sense strand
uaagagaggagcaaaugug

SEQ ID NO: 529782 - RNA, 19 nt, Homo sapiens
  misc_RNA (1)...(19): siRNA sense strand
aaacgccugugacaauaug

SEQ ID NO: 529783 - RNA, 19 nt, Homo sapiens
  misc_RNA (1)...(19): siRNA sense strand
gaacacauugaugaagaaa

SEQ ID NO: 529784 - RNA, 19 nt, Homo sapiens
  misc_RNA (1)...(19): siRNA sense strand
gcugggucaucccuucuuu

SEQ ID NO: 529785 - RNA, 19 nt, Homo sapiens
  misc_RNA (1)...(19): siRNA sense strand
gcaagaaguagcugugaag

SEQ ID NO: 529786 - RNA, 19 nt, Homo sapiens
  misc_RNA (1)...(19): siRNA sense strand
gcacauagagauuaaugac

SEQ ID NO: 529787 - RNA, 19 nt, Homo sapiens
  misc_RNA (1)...(19): siRNA sense strand
guaaagaagggaagcaucu

SEQ ID NO: 529788 - RNA, 19 nt, Homo sapiens
  misc_RNA (1)...(19): siRNA sense strand
aaacaagccucagugugau

SEQ ID NO: 529789 - RNA, 19 nt, Homo sapiens
  misc_RNA (1)...(19): siRNA sense strand
uggagacccuucccuguau

SEQ ID NO: 529790 - RNA, 19 nt, Homo sapiens
  misc_RNA (1)...(19): siRNA sense strand
cuccugagcucugacgaua

SEQ ID NO: 529791 - RNA, 19 nt, Homo sapiens
  misc_RNA (1)...(19): siRNA sense strand
gggcugcaguggaagacaa

SEQ ID NO: 529792 - RNA, 19 nt, Homo sapiens
  misc_RNA (1)...(19): siRNA sense strand
gggaggacauuguggaacu

SEQ ID NO: 529793 - RNA, 19 nt, Homo sapiens
  misc_RNA (1)...(19): siRNA sense strand
gagcaagagcacauagaga

SEQ ID NO: 529794 - RNA, 19 nt, Homo sapiens
  misc_RNA (1)...(19): siRNA sense strand
gcagaaaugccuugaucca

SEQ ID NO: 529795 - RNA, 19 nt, Homo sapiens
  misc_RNA (1)...(19): siRNA sense strand
agaacacauugaugaagaa

SEQ ID NO: 529796 - RNA, 19 nt, Homo sapiens
  misc_RNA (1)...(19): siRNA sense strand
ggaagucaagagagaucua

SEQ ID NO: 529797 - RNA, 19 nt, Homo sapiens
  misc_RNA (1)...(19): siRNA sense strand
auuuaaggcuguucaagaa

SEQ ID NO: 529798 - RNA, 19 nt, Homo sapiens
  misc_RNA (1)...(19): siRNA sense strand
caaagcagccgagagaaca

SEQ ID NO: 529799 - RNA, 19 nt, Homo sapiens
  misc_RNA (1)...(19): siRNA sense strand
agaauauaccgcccuauga

SEQ ID NO: 529800 - RNA, 19 nt, Homo sapiens
  misc_RNA (1)...(19): siRNA sense strand
guggagccaauguuaauuu

SEQ ID NO: 529801 - RNA, 19 nt, Homo sapiens
  misc_RNA (1)...(19): siRNA sense strand
caaguggacgacuaagauu

SEQ ID NO: 529802 - RNA, 19 nt, Homo sapiens
  misc_RNA (1)...(19): siRNA sense strand
ggaaacuaaggaccucauu

SEQ ID NO: 529803 - RNA, 19 nt, Homo sapiens
  misc_RNA (1)...(19): siRNA sense strand
ugaaagcucaaaguaauga

SEQ ID NO: 529804 - RNA, 19 nt, Homo sapiens
  misc_RNA (1)...(19): siRNA sense strand
ccacaaaacaucuuaauag

SEQ ID NO: 529805 - RNA, 19 nt, Homo sapiens
  misc_RNA (1)...(19): siRNA sense strand
gcacugcugcuugcuguug

SEQ ID NO: 529806 - RNA, 19 nt, Homo sapiens
  misc_RNA (1)...(19): siRNA sense strand
ggaggacauuguggaacuu

SEQ ID NO: 529807 - RNA, 19 nt, Homo sapiens
  misc_RNA (1)...(19): siRNA sense strand
uguaaacgccugugacaau

SEQ ID NO: 529808 - RNA, 19 nt, Homo sapiens
  misc_RNA (1)...(19): siRNA sense strand
gauguaaacgccugugaca

SEQ ID NO: 529809 - RNA, 19 nt, Homo sapiens
  misc_RNA (1)...(19): siRNA sense strand
caagagcggcugaggaaag

SEQ ID NO: 529810 - RNA, 19 nt, Homo sapiens
  misc_RNA (1)...(19): siRNA sense strand
cagaauauaccgcccuaug

SEQ ID NO: 529811 - RNA, 19 nt, Homo sapiens
  misc_RNA (1)...(19): siRNA sense strand
gaagaaaaucgccgaguug

SEQ ID NO: 529812 - RNA, 19 nt, Homo sapiens
  misc_RNA (1)...(19): siRNA sense strand
gagcagggaggacauugug

SEQ ID NO: 529813 - RNA, 19 nt, Homo sapiens
  misc_RNA (1)...(19): siRNA sense strand
gugacaauaugggcagaaa

SEQ ID NO: 529814 - RNA, 19 nt, Homo sapiens
  misc_RNA (1)...(19): siRNA sense strand
gcaaagcagccgagagaac

SEQ ID NO: 529815 - RNA, 19 nt, Homo sapiens
  misc_RNA (1)...(19): siRNA sense strand
gggagaacacauugaugaa

SEQ ID NO: 529816 - RNA, 19 nt, Homo sapiens
  misc_RNA (1)...(19): siRNA sense strand
ugggagagccgcuauagga

SEQ ID NO: 529817 - RNA, 19 nt, Homo sapiens
  misc_RNA (1)...(19): siRNA sense strand
gaagggcugcaguggaaga

SEQ ID NO: 529818 - RNA, 19 nt, Homo sapiens
  misc_RNA (1)...(19): siRNA sense strand
ggaagcguguuuggaugug

SEQ ID NO: 529819 - RNA, 19 nt, Homo sapiens
  misc_RNA (1)...(19): siRNA sense strand
cagcauggcucuaacaaga

SEQ ID NO: 529820 - RNA, 19 nt, Homo sapiens
  misc_RNA (1)...(19): siRNA sense strand
gaaccaacuucuucauuca

SEQ ID NO: 529821 - RNA, 19 nt, Homo sapiens
  misc_RNA (1)...(19): siRNA sense strand
gagaagagaucacagaaac

SEQ ID NO: 529822 - RNA, 19 nt, Homo sapiens
  misc_RNA (1)...(19): siRNA sense strand
ggguggaccucaggaauua

SEQ ID NO: 529823 - RNA, 19 nt, Homo sapiens
  misc_RNA (1)...(19): siRNA sense strand
cgaaccaacuucuucauuc

SEQ ID NO: 529824 - RNA, 19 nt, Homo sapiens
  misc_RNA (1)...(19): siRNA sense strand
ucaagaagccggacuacaa

SEQ ID NO: 529825 - RNA, 19 nt, Homo sapiens
  misc_RNA (1)...(19): siRNA sense strand
caagagaagagaucacaga

SEQ ID NO: 529826 - RNA, 19 nt, Homo sapiens
  misc_RNA (1)...(19): siRNA sense strand
gaaacgugaggaucaagaa

SEQ ID NO: 529827 - RNA, 19 nt, Homo sapiens
  misc_RNA (1)...(19): siRNA sense strand
gaagagaucacagaaacgu

SEQ ID NO: 529828 - RNA, 19 nt, Homo sapiens
  misc_RNA (1)...(19): siRNA sense strand
gaaagacgagagcccugaa

SEQ ID NO: 529829 - RNA, 19 nt, Homo sapiens
  misc_RNA (1)...(19): siRNA sense strand
gcccacaacuucggguguu

SEQ ID NO: 529830 - RNA, 19 nt, Homo sapiens
  misc_RNA (1)...(19): siRNA sense strand
caagaagccggacuacaag

SEQ ID NO: 529831 - RNA, 19 nt, Homo sapiens
  misc_RNA (1)...(19): siRNA sense strand
ggaucaagaagccggacua

SEQ ID NO: 529832 - RNA, 19 nt, Homo sapiens
  misc_RNA (1)...(19): siRNA sense strand
acagaaacgugaggaucaa

SEQ ID NO: 529833 - RNA, 19 nt, Homo sapiens
  misc_RNA (1)...(19): siRNA sense strand
cacagaaacgugaggauca

SEQ ID NO: 529834 - RNA, 19 nt, Homo sapiens
  misc_RNA (1)...(19): siRNA sense strand
agagaagagaucacagaaa

SEQ ID NO: 529835 - RNA, 19 nt, Homo sapiens
  misc_RNA (1)...(19): siRNA sense strand
ccgaaccaacuucuucauu

SEQ ID NO: 529836 - RNA, 19 nt, Homo sapiens
  misc_RNA (1)...(19): siRNA sense strand
cagaucuguuucccgagaa

SEQ ID NO: 529837 - RNA, 19 nt, Homo sapiens
  misc_RNA (1)...(19): siRNA sense strand
cacguucccagaucuguuu

SEQ ID NO: 529838 - RNA, 19 nt, Homo sapiens
  misc_RNA (1)...(19): siRNA sense strand
aagagaagagaucacagaa

SEQ ID NO: 529839 - RNA, 19 nt, Homo sapiens
  misc_RNA (1)...(19): siRNA sense strand
gaccuucacguucccagau

SEQ ID NO: 529840 - RNA, 19 nt, Homo sapiens
  misc_RNA (1)...(19): siRNA sense strand
gggugcagcauggcucuaa

SEQ ID NO: 529841 - RNA, 19 nt, Homo sapiens
  misc_RNA (1)...(19): siRNA sense strand
ccgaggacaccgugcaguu

SEQ ID NO: 529842 - RNA, 19 nt, Homo sapiens
  misc_RNA (1)...(19): siRNA sense strand
caaggguggaccucaggaa

SEQ ID NO: 529843 - RNA, 19 nt, Homo sapiens
  misc_RNA (1)...(19): siRNA sense strand
gaaucaggaugcuguauuu

SEQ ID NO: 529844 - RNA, 19 nt, Homo sapiens
  misc_RNA (1)...(19): siRNA sense strand
gaaauccacucuccagaug

SEQ ID NO: 529845 - RNA, 19 nt, Homo sapiens
  misc_RNA (1)...(19): siRNA sense strand
guacaggguugccacaauu

SEQ ID NO: 529846 - RNA, 19 nt, Homo sapiens
  misc_RNA (1)...(19): siRNA sense strand
ggaaacaccuccgccugaa

SEQ ID NO: 529847 - RNA, 19 nt, Homo sapiens
  misc_RNA (1)...(19): siRNA sense strand
aggcaaagauggagagauu

SEQ ID NO: 529848 - RNA, 19 nt, Homo sapiens
  misc_RNA (1)...(19): siRNA sense strand
gcugggagccgagagauua

SEQ ID NO: 529849 - RNA, 19 nt, Homo sapiens
  misc_RNA (1)...(19): siRNA sense strand
gaacaggcagcuugaaauc

SEQ ID NO: 529850 - RNA, 19 nt, Homo sapiens
  misc_RNA (1)...(19): siRNA sense strand
gagggugccuuucccaaga

SEQ ID NO: 529851 - RNA, 19 nt, Homo sapiens
  misc_RNA (1)...(19): siRNA sense strand
ggagugccguuugaccaua

SEQ ID NO: 529852 - RNA, 19 nt, Homo sapiens
  misc_RNA (1)...(19): siRNA sense strand
gagaacaggcagcuugaaa

SEQ ID NO: 529853 - RNA, 19 nt, Homo sapiens
  misc_RNA (1)...(19): siRNA sense strand
caauucugcugaacucauu

SEQ ID NO: 529854 - RNA, 19 nt, Homo sapiens
  misc_RNA (1)...(19): siRNA sense strand
ucaggaugcuguauuuaga

SEQ ID NO: 529855 - RNA, 19 nt, Homo sapiens
  misc_RNA (1)...(19): siRNA sense strand
ggaaucaggaugcuguauu

SEQ ID NO: 529856 - RNA, 19 nt, Homo sapiens
  misc_RNA (1)...(19): siRNA sense strand
gcaaagauggagagauuca

SEQ ID NO: 529857 - RNA, 19 nt, Homo sapiens
  misc_RNA (1)...(19): siRNA sense strand
ggcaagggauugaaacaca

SEQ ID NO: 529858 - RNA, 19 nt, Homo sapiens
  misc_RNA (1)...(19): siRNA sense strand
cagcuaagauuacaagacu

SEQ ID NO: 529859 - RNA, 19 nt, Homo sapiens
  misc_RNA (1)...(19): siRNA sense strand
gaagaaaggauccccagua

SEQ ID NO: 529860 - RNA, 19 nt, Homo sapiens
  misc_RNA (1)...(19): siRNA sense strand
caaaaugucuucagaugau

SEQ ID NO: 529861 - RNA, 19 nt, Homo sapiens
  misc_RNA (1)...(19): siRNA sense strand
ccacaauucugcugaacuc

SEQ ID NO: 529862 - RNA, 19 nt, Homo sapiens
  misc_RNA (1)...(19): siRNA sense strand
gcaagggauugaaacacau

SEQ ID NO: 529863 - RNA, 19 nt, Homo sapiens
  misc_RNA (1)...(19): siRNA sense strand
gagaagccacgcccuaugu

SEQ ID NO: 529864 - RNA, 19 nt, Homo sapiens
  misc_RNA (1)...(19): siRNA sense strand
ggacaaggagcauaguaca

SEQ ID NO: 529865 - RNA, 19 nt, Homo sapiens
  misc_RNA (1)...(19): siRNA sense strand
gaagccacgcccuauguga

SEQ ID NO: 529866 - RNA, 19 nt, Homo sapiens
  misc_RNA (1)...(19): siRNA sense strand
gaagugcugcuggaaguga

SEQ ID NO: 529867 - RNA, 19 nt, Homo sapiens
  misc_RNA (1)...(19): siRNA sense strand
gccauccauuccaacguua

SEQ ID NO: 529868 - RNA, 19 nt, Homo sapiens
  misc_RNA (1)...(19): siRNA sense strand
gauugaaacacaucucuuc

SEQ ID NO: 529869 - RNA, 19 nt, Homo sapiens
  misc_RNA (1)...(19): siRNA sense strand
guucacacauacccucuuc

SEQ ID NO: 529870 - RNA, 19 nt, Homo sapiens
  misc_RNA (1)...(19): siRNA sense strand
gccguuugaccauacauua

SEQ ID NO: 529871 - RNA, 19 nt, Homo sapiens
  misc_RNA (1)...(19): siRNA sense strand
gaacucauugcugaaauca

SEQ ID NO: 529872 - RNA, 19 nt, Homo sapiens
  misc_RNA (1)...(19): siRNA sense strand
cgggaucgcuggcacaaag

SEQ ID NO: 529873 - RNA, 19 nt, Homo sapiens
  misc_RNA (1)...(19): siRNA sense strand
caucauacagucuccuuau

SEQ ID NO: 529874 - RNA, 19 nt, Homo sapiens
  misc_RNA (1)...(19): siRNA sense strand
ggaggaaggaagccugguu

SEQ ID NO: 529875 - RNA, 19 nt, Homo sapiens
  misc_RNA (1)...(19): siRNA sense strand
ucagcccaguucacacaua

SEQ ID NO: 529876 - RNA, 19 nt, Homo sapiens
  misc_RNA (1)...(19): siRNA sense strand
ccagaagcguggcgugaag

SEQ ID NO: 529877 - RNA, 19 nt, Homo sapiens
  misc_RNA (1)...(19): siRNA sense strand
ggcacaaaguucuggugaa

SEQ ID NO: 529878 - RNA, 19 nt, Homo sapiens
  misc_RNA (1)...(19): siRNA sense strand
guggaucuguccuuugcaa

SEQ ID NO: 529879 - RNA, 19 nt, Homo sapiens
  misc_RNA (1)...(19): siRNA sense strand
ucagugccauccauuccaa

SEQ ID NO: 529880 - RNA, 19 nt, Homo sapiens
  misc_RNA (1)...(19): siRNA sense strand
aaccaggagugccguuuga

SEQ ID NO: 529881 - RNA, 19 nt, Homo sapiens
  misc_RNA (1)...(19): siRNA sense strand
ugaacucauugcugaaauc

SEQ ID NO: 529882 - RNA, 19 nt, Homo sapiens
  misc_RNA (1)...(19): siRNA sense strand
gaaacaccuccgccugaau

SEQ ID NO: 529883 - RNA, 19 nt, Homo sapiens
  misc_RNA (1)...(19): siRNA sense strand
ccauucagguccaggaaag

SEQ ID NO: 529884 - RNA, 19 nt, Homo sapiens
  misc_RNA (1)...(19): siRNA sense strand
acaggcagcuugaaaucca

SEQ ID NO: 529885 - RNA, 19 nt, Homo sapiens
  misc_RNA (1)...(19): siRNA sense strand
ucacacauacccucuucuu

SEQ ID NO: 529886 - RNA, 19 nt, Homo sapiens
  misc_RNA (1)...(19): siRNA sense strand
gcugaacucauugcugaaa

SEQ ID NO: 529887 - RNA, 19 nt, Homo sapiens
  misc_RNA (1)...(19): siRNA sense strand
gcacugcuugcaccuacaa

SEQ ID NO: 529888 - RNA, 19 nt, Homo sapiens
  misc_RNA (1)...(19): siRNA sense strand
aaacaccuccgccugaauc

SEQ ID NO: 529889 - RNA, 19 nt, Homo sapiens
  misc_RNA (1)...(19): siRNA sense strand
agauucaacuggaccuuca

SEQ ID NO: 529890 - RNA, 19 nt, Homo sapiens
  misc_RNA (1)...(19): siRNA sense strand
gagcaagaaacaguggaaa

SEQ ID NO: 529891 - RNA, 19 nt, Homo sapiens
  misc_RNA (1)...(19): siRNA sense strand
ugaaauccacucuccagau

SEQ ID NO: 529892 - RNA, 19 nt, Homo sapiens
  misc_RNA (1)...(19): siRNA sense strand
gggcaaggagaacaagaug

SEQ ID NO: 529893 - RNA, 19 nt, Homo sapiens
  misc_RNA (1)...(19): siRNA sense strand
aggaugcuguauuuagauu

SEQ ID NO: 529894 - RNA, 19 nt, Homo sapiens
  misc_RNA (1)...(19): siRNA sense strand
gauuuucuauuaccacuga

SEQ ID NO: 529895 - RNA, 19 nt, Homo sapiens
  misc_RNA (1)...(19): siRNA sense strand
gagauugggugggaaacac

SEQ ID NO: 529896 - RNA, 19 nt, Homo sapiens
  misc_RNA (1)...(19): siRNA sense strand
ugccauccauuccaacguu

SEQ ID NO: 529897 - RNA, 19 nt, Homo sapiens
  misc_RNA (1)...(19): siRNA sense strand
gcgagaagccacgcccuau

SEQ ID NO: 529898 - RNA, 19 nt, Homo sapiens
  misc_RNA (1)...(19): siRNA sense strand
gaggacgcccugguucuga

SEQ ID NO: 529899 - RNA, 19 nt, Homo sapiens
  misc_RNA (1)...(19): siRNA sense strand
aggaagugcugcuggaagu

SEQ ID NO: 529900 - RNA, 19 nt, Homo sapiens
  misc_RNA (1)...(19): siRNA sense strand
aagaaaggauccccaguau

SEQ ID NO: 529901 - RNA, 19 nt, Homo sapiens
  misc_RNA (1)...(19): siRNA sense strand
ccaauuguuuucaucauuc

SEQ ID NO: 529902 - RNA, 19 nt, Homo sapiens
  misc_RNA (1)...(19): siRNA sense strand
ggauugaaacacaucucuu

SEQ ID NO: 529903 - RNA, 19 nt, Homo sapiens
  misc_RNA (1)...(19): siRNA sense strand
guguggaucuguccuuugc

SEQ ID NO: 529904 - RNA, 19 nt, Homo sapiens
  misc_RNA (1)...(19): siRNA sense strand
ggaugcuguauuuagauuu

SEQ ID NO: 529905 - RNA, 19 nt, Homo sapiens
  misc_RNA (1)...(19): siRNA sense strand
gaaaagcucaaaaugucuu

SEQ ID NO: 529906 - RNA, 19 nt, Homo sapiens
  misc_RNA (1)...(19): siRNA sense strand
agaacaggcagcuugaaau

SEQ ID NO: 529907 - RNA, 19 nt, Homo sapiens
  misc_RNA (1)...(19): siRNA sense strand
gccaauuguuuucaucauu

SEQ ID NO: 529908 - RNA, 19 nt, Homo sapiens
  misc_RNA (1)...(19): siRNA sense strand
gcaagaaacaguggaaacc

SEQ ID NO: 529909 - RNA, 19 nt, Homo sapiens
  misc_RNA (1)...(19): siRNA sense strand
caaggaagugcugcuggaa

SEQ ID NO: 529910 - RNA, 19 nt, Homo sapiens
  misc_RNA (1)...(19): siRNA sense strand
caacuggaccuucauuccu

SEQ ID NO: 529911 - RNA, 19 nt, Homo sapiens
  misc_RNA (1)...(19): siRNA sense strand
aaucaggaugcuguauuua

SEQ ID NO: 529912 - RNA, 19 nt, Homo sapiens
  misc_RNA (1)...(19): siRNA sense strand
ccacuggacaaggagcaua

SEQ ID NO: 529913 - RNA, 19 nt, Homo sapiens
  misc_RNA (1)...(19): siRNA sense strand
cgagaagccacgcccuaug

SEQ ID NO: 529914 - RNA, 19 nt, Homo sapiens
  misc_RNA (1)...(19): siRNA sense strand
cagcccaguucacacauac

SEQ ID NO: 529915 - RNA, 19 nt, Homo sapiens
  misc_RNA (1)...(19): siRNA sense strand
guccuucuccuuccacaga

SEQ ID NO: 529916 - RNA, 19 nt, Homo sapiens
  misc_RNA (1)...(19): siRNA sense strand
guaccaggcaagggauuga

SEQ ID NO: 529917 - RNA, 19 nt, Homo sapiens
  misc_RNA (1)...(19): siRNA sense strand
guucagcccaguucacaca

SEQ ID NO: 529918 - RNA, 19 nt, Homo sapiens
  misc_RNA (1)...(19): siRNA sense strand
ugguugugcugacugagaa

SEQ ID NO: 529919 - RNA, 19 nt, Homo sapiens
  misc_RNA (1)...(19): siRNA sense strand
gaccugcugacccgaguga

SEQ ID NO: 529920 - RNA, 19 nt, Homo sapiens
  misc_RNA (1)...(19): siRNA sense strand
aagcacacggugauccuaa

SEQ ID NO: 529921 - RNA, 19 nt, Homo sapiens
  misc_RNA (1)...(19): siRNA sense strand
caagaaacaguggaaacca

SEQ ID NO: 529922 - RNA, 19 nt, Homo sapiens
  misc_RNA (1)...(19): siRNA sense strand
gagagcagcuggggaaaac

SEQ ID NO: 529923 - RNA, 19 nt, Homo sapiens
  misc_RNA (1)...(19): siRNA sense strand
ccugucagcuaagauuaca

SEQ ID NO: 529924 - RNA, 19 nt, Homo sapiens
  misc_RNA (1)...(19): siRNA sense strand
ccaucauacagucuccuua

SEQ ID NO: 529925 - RNA, 19 nt, Homo sapiens
  misc_RNA (1)...(19): siRNA sense strand
gagugccguuugaccauac

SEQ ID NO: 529926 - RNA, 19 nt, Homo sapiens
  misc_RNA (1)...(19): siRNA sense strand
aguacaggguugccacaau

SEQ ID NO: 529927 - RNA, 19 nt, Homo sapiens
  misc_RNA (1)...(19): siRNA sense strand
ggaagaagccauuaaguuu

SEQ ID NO: 529928 - RNA, 19 nt, Homo sapiens
  misc_RNA (1)...(19): siRNA sense strand
gaagugauauaguuccuuu

SEQ ID NO: 529929 - RNA, 19 nt, Homo sapiens
  misc_RNA (1)...(19): siRNA sense strand
gaaagaaguuugagaagag

SEQ ID NO: 529930 - RNA, 19 nt, Homo sapiens
  misc_RNA (1)...(19): siRNA sense strand
gaagauggguuggaugaaa

SEQ ID NO: 529931 - RNA, 19 nt, Homo sapiens
  misc_RNA (1)...(19): siRNA sense strand
ggaaagaaguuugagaaga

SEQ ID NO: 529932 - RNA, 19 nt, Homo sapiens
  misc_RNA (1)...(19): siRNA sense strand
gaugauaucuuuagaaggu

SEQ ID NO: 529933 - RNA, 19 nt, Homo sapiens
  misc_RNA (1)...(19): siRNA sense strand
guaaccagcucauaaauca

SEQ ID NO: 529934 - RNA, 19 nt, Homo sapiens
  misc_RNA (1)...(19): siRNA sense strand
gaaaucaaguucuaaaggu

SEQ ID NO: 529935 - RNA, 19 nt, Homo sapiens
  misc_RNA (1)...(19): siRNA sense strand
gcucauaaaucacaucgaa

SEQ ID NO: 529936 - RNA, 19 nt, Homo sapiens
  misc_RNA (1)...(19): siRNA sense strand
aaagucagcuggauauuau

SEQ ID NO: 529937 - RNA, 19 nt, Homo sapiens
  misc_RNA (1)...(19): siRNA sense strand
gaagauggaccuacagcua

SEQ ID NO: 529938 - RNA, 19 nt, Homo sapiens
  misc_RNA (1)...(19): siRNA sense strand
caaagaaggugauaaccau

SEQ ID NO: 529939 - RNA, 19 nt, Homo sapiens
  misc_RNA (1)...(19): siRNA sense strand
gaauuacucugaucaccaa

SEQ ID NO: 529940 - RNA, 19 nt, Homo sapiens
  misc_RNA (1)...(19): siRNA sense strand
caagagaaaguggaaauua

SEQ ID NO: 529941 - RNA, 19 nt, Homo sapiens
  misc_RNA (1)...(19): siRNA sense strand
gagaagaggcauauugaaa

SEQ ID NO: 529942 - RNA, 19 nt, Homo sapiens
  misc_RNA (1)...(19): siRNA sense strand
gagcagcgcuuuaacaacu

SEQ ID NO: 529943 - RNA, 19 nt, Homo sapiens
  misc_RNA (1)...(19): siRNA sense strand
gaaagcccuucaagagaaa

SEQ ID NO: 529944 - RNA, 19 nt, Homo sapiens
  misc_RNA (1)...(19): siRNA sense strand
ggacaguuguggaugcaaa

SEQ ID NO: 529945 - RNA, 19 nt, Homo sapiens
  misc_RNA (1)...(19): siRNA sense strand
gacgugggcuuuaccauga

SEQ ID NO: 529946 - RNA, 19 nt, Homo sapiens
  misc_RNA (1)...(19): siRNA sense strand
gcacuuuccucccugauuc

SEQ ID NO: 529947 - RNA, 19 nt, Homo sapiens
  misc_RNA (1)...(19): siRNA sense strand
uaaaucacaucgaacaguu

SEQ ID NO: 529948 - RNA, 19 nt, Homo sapiens
  misc_RNA (1)...(19): siRNA sense strand
gcagcugccuuucauggaa

SEQ ID NO: 529949 - RNA, 19 nt, Homo sapiens
  misc_RNA (1)...(19): siRNA sense strand
ugaaugcuguugaugcuuu

SEQ ID NO: 529950 - RNA, 19 nt, Homo sapiens
  misc_RNA (1)...(19): siRNA sense strand
ucaagugacugcucaggaa

SEQ ID NO: 529951 - RNA, 19 nt, Homo sapiens
  misc_RNA (1)...(19): siRNA sense strand
ugaagaagguggugaugug

SEQ ID NO: 529952 - RNA, 19 nt, Homo sapiens
  misc_RNA (1)...(19): siRNA sense strand
gggaagaagccauuaaguu

SEQ ID NO: 529953 - RNA, 19 nt, Homo sapiens
  misc_RNA (1)...(19): siRNA sense strand
gagcauggaugugauucaa

SEQ ID NO: 529954 - RNA, 19 nt, Homo sapiens
  misc_RNA (1)...(19): siRNA sense strand
ggaaauuguuguccaggau

SEQ ID NO: 529955 - RNA, 19 nt, Homo sapiens
  misc_RNA (1)...(19): siRNA sense strand
gaacaaggaugagauugcu

SEQ ID NO: 529956 - RNA, 19 nt, Homo sapiens
  misc_RNA (1)...(19): siRNA sense strand
gcgaguaaccagcucauaa

SEQ ID NO: 529957 - RNA, 19 nt, Homo sapiens
  misc_RNA (1)...(19): siRNA sense strand
gaagacagacacccuugaa

SEQ ID NO: 529958 - RNA, 19 nt, Homo sapiens
  misc_RNA (1)...(19): siRNA sense strand
ggaauuaccgaacagcaaa

SEQ ID NO: 529959 - RNA, 19 nt, Homo sapiens
  misc_RNA (1)...(19): siRNA sense strand
ggaggacauugaaagcaaa

SEQ ID NO: 529960 - RNA, 19 nt, Homo sapiens
  misc_RNA (1)...(19): siRNA sense strand
gaagagcagcgcuuuaaca

SEQ ID NO: 529961 - RNA, 19 nt, Homo sapiens
  misc_RNA (1)...(19): siRNA sense strand
uaaaguggaugaggaacaa

SEQ ID NO: 529962 - RNA, 19 nt, Homo sapiens
  misc_RNA (1)...(19): siRNA sense strand
gcauggaugugauucaaca

SEQ ID NO: 529963 - RNA, 19 nt, Homo sapiens
  misc_RNA (1)...(19): siRNA sense strand
gaacaucacagugcacaga

SEQ ID NO: 529964 - RNA, 19 nt, Homo sapiens
  misc_RNA (1)...(19): siRNA sense strand
guggugauguggacgauuu

SEQ ID NO: 529965 - RNA, 19 nt, Homo sapiens
  misc_RNA (1)...(19): siRNA sense strand
aaagaaagaugagaagaca

SEQ ID NO: 529966 - RNA, 19 nt, Homo sapiens
  misc_RNA (1)...(19): siRNA sense strand
caugggaaaucaaguucua

SEQ ID NO: 529967 - RNA, 19 nt, Homo sapiens
  misc_RNA (1)...(19): siRNA sense strand
ucgauaugcuuaugacaaa

SEQ ID NO: 529968 - RNA, 19 nt, Homo sapiens
  misc_RNA (1)...(19): siRNA sense strand
cagaagagcagcgcuuuaa

SEQ ID NO: 529969 - RNA, 19 nt, Homo sapiens
  misc_RNA (1)...(19): siRNA sense strand
caaaagagcuaauccucaa

SEQ ID NO: 529970 - RNA, 19 nt, Homo sapiens
  misc_RNA (1)...(19): siRNA sense strand
caacaugaaacaauaggaa

SEQ ID NO: 529971 - RNA, 19 nt, Homo sapiens
  misc_RNA (1)...(19): siRNA sense strand
cuaaugaaacaccguauuu

SEQ ID NO: 529972 - RNA, 19 nt, Homo sapiens
  misc_RNA (1)...(19): siRNA sense strand
gaauaaggcagcuguugug

SEQ ID NO: 529973 - RNA, 19 nt, Homo sapiens
  misc_RNA (1)...(19): siRNA sense strand
aaacuuccguguucuagug

SEQ ID NO: 529974 - RNA, 19 nt, Homo sapiens
  misc_RNA (1)...(19): siRNA sense strand
ucagauuccucucucuaaa

SEQ ID NO: 529975 - RNA, 19 nt, Homo sapiens
  misc_RNA (1)...(19): siRNA sense strand
uaacuccauuccugguaua

SEQ ID NO: 529976 - RNA, 19 nt, Homo sapiens
  misc_RNA (1)...(19): siRNA sense strand
gggccuuccuuuccacuaa

SEQ ID NO: 529977 - RNA, 19 nt, Homo sapiens
  misc_RNA (1)...(19): siRNA sense strand
gaaacaccguauuuuauga

SEQ ID NO: 529978 - RNA, 19 nt, Homo sapiens
  misc_RNA (1)...(19): siRNA sense strand
gaaacaauaggaaagaagu

SEQ ID NO: 529979 - RNA, 19 nt, Homo sapiens
  misc_RNA (1)...(19): siRNA sense strand
gugaugauaucuuuagaag

SEQ ID NO: 529980 - RNA, 19 nt, Homo sapiens
  misc_RNA (1)...(19): siRNA sense strand
ggaauaaggcagcuguugu

SEQ ID NO: 529981 - RNA, 19 nt, Homo sapiens
  misc_RNA (1)...(19): siRNA sense strand
gcaaagaaggugauaacca

SEQ ID NO: 529982 - RNA, 19 nt, Homo sapiens
  misc_RNA (1)...(19): siRNA sense strand
ggaagccucuggaaguucu

SEQ ID NO: 529983 - RNA, 19 nt, Homo sapiens
  misc_RNA (1)...(19): siRNA sense strand
guaacuccauuccugguau

SEQ ID NO: 529984 - RNA, 19 nt, Homo sapiens
  misc_RNA (1)...(19): siRNA sense strand
cgaguaaccagcucauaaa

SEQ ID NO: 529985 - RNA, 19 nt, Homo sapiens
  misc_RNA (1)...(19): siRNA sense strand
gaagaaggccagcuuugag

SEQ ID NO: 529986 - RNA, 19 nt, Homo sapiens
  misc_RNA (1)...(19): siRNA sense strand
ggaaaucaaguucuaaagg

SEQ ID NO: 529987 - RNA, 19 nt, Homo sapiens
  misc_RNA (1)...(19): siRNA sense strand
cgacagguguuugcugaga

SEQ ID NO: 529988 - RNA, 19 nt, Homo sapiens
  misc_RNA (1)...(19): siRNA sense strand
ggugauaaccauguuugua

SEQ ID NO: 529989 - RNA, 19 nt, Homo sapiens
  misc_RNA (1)...(19): siRNA sense strand
gaagaagccauuaaguuuu

SEQ ID NO: 529990 - RNA, 19 nt, Homo sapiens
  misc_RNA (1)...(19): siRNA sense strand
ggaugaggaacaaaugaaa

SEQ ID NO: 529991 - RNA, 19 nt, Homo sapiens
  misc_RNA (1)...(19): siRNA sense strand
ugauauaguuccuuucucu

SEQ ID NO: 529992 - RNA, 19 nt, Homo sapiens
  misc_RNA (1)...(19): siRNA sense strand
caaaccaaguggagacaca

SEQ ID NO: 529993 - RNA, 19 nt, Homo sapiens
  misc_RNA (1)...(19): siRNA sense strand
guacagauggcacugacaa

SEQ ID NO: 529994 - RNA, 19 nt, Homo sapiens
  misc_RNA (1)...(19): siRNA sense strand
gaagacuuguuuccaacca

SEQ ID NO: 529995 - RNA, 19 nt, Homo sapiens
  misc_RNA (1)...(19): siRNA sense strand
gcaaagaaagaugagaaga

SEQ ID NO: 529996 - RNA, 19 nt, Homo sapiens
  misc_RNA (1)...(19): siRNA sense strand
gcugaaaacuuccguguuc

SEQ ID NO: 529997 - RNA, 19 nt, Homo sapiens
  misc_RNA (1)...(19): siRNA sense strand
uggguuggaugaaauuuau

SEQ ID NO: 529998 - RNA, 19 nt, Homo sapiens
  misc_RNA (1)...(19): siRNA sense strand
gaaggugauaaccauguuu

SEQ ID NO: 529999 - RNA, 19 nt, Homo sapiens
  misc_RNA (1)...(19): siRNA sense strand
agacagacacccuugaaga

SEQ ID NO: 530000 - RNA, 19 nt, Homo sapiens
  misc_RNA (1)...(19): siRNA sense strand
caauaggaaagaaguuuga

SEQ ID NO: 530001 - RNA, 19 nt, Homo sapiens
  misc_RNA (1)...(19): siRNA sense strand
gaaugcuguugaugcuuug

SEQ ID NO: 530002 - RNA, 19 nt, Homo sapiens
  misc_RNA (1)...(19): siRNA sense strand
gcuuaaaugaugaugauga

SEQ ID NO: 530003 - RNA, 19 nt, Homo sapiens
  misc_RNA (1)...(19): siRNA sense strand
gcuuuaguccuguuuggua

SEQ ID NO: 530004 - RNA, 19 nt, Homo sapiens
  misc_RNA (1)...(19): siRNA sense strand
uauaaggauugcagccuau

SEQ ID NO: 530005 - RNA, 19 nt, Homo sapiens
  misc_RNA (1)...(19): siRNA sense strand
gugaagauggguuggauga

SEQ ID NO: 530006 - RNA, 19 nt, Homo sapiens
  misc_RNA (1)...(19): siRNA sense strand
ugacaucucccugcaauuc

SEQ ID NO: 530007 - RNA, 19 nt, Homo sapiens
  misc_RNA (1)...(19): siRNA sense strand
ggaugagauugcuuuaguc

SEQ ID NO: 530008 - RNA, 19 nt, Homo sapiens
  misc_RNA (1)...(19): siRNA sense strand
ugauguggacgauuuauug

SEQ ID NO: 530009 - RNA, 19 nt, Homo sapiens
  misc_RNA (1)...(19): siRNA sense strand
ggauggaauuacucugauc

SEQ ID NO: 530010 - RNA, 19 nt, Homo sapiens
  misc_RNA (1)...(19): siRNA sense strand
gaaggccagcuuugaggaa

SEQ ID NO: 530011 - RNA, 19 nt, Homo sapiens
  misc_RNA (1)...(19): siRNA sense strand
cagacacccuugaagacuu

SEQ ID NO: 530012 - RNA, 19 nt, Homo sapiens
  misc_RNA (1)...(19): siRNA sense strand
agaaagaugagaagacaga

SEQ ID NO: 530013 - RNA, 19 nt, Homo sapiens
  misc_RNA (1)...(19): siRNA sense strand
gacagguguuugcugagaa

SEQ ID NO: 530014 - RNA, 19 nt, Homo sapiens
  misc_RNA (1)...(19): siRNA sense strand
uuguaaaucuucucagguu

SEQ ID NO: 530015 - RNA, 19 nt, Homo sapiens
  misc_RNA (1)...(19): siRNA sense strand
agaagaggcauauugaaau

SEQ ID NO: 530016 - RNA, 19 nt, Homo sapiens
  misc_RNA (1)...(19): siRNA sense strand
uaggaaagaaguuugagaa

SEQ ID NO: 530017 - RNA, 19 nt, Homo sapiens
  misc_RNA (1)...(19): siRNA sense strand
caaggaugagauugcuuua

SEQ ID NO: 530018 - RNA, 19 nt, Homo sapiens
  misc_RNA (1)...(19): siRNA sense strand
gacgauuuauuggacauga

SEQ ID NO: 530019 - RNA, 19 nt, Homo sapiens
  misc_RNA (1)...(19): siRNA sense strand
agauggaccuacagcuaaa

SEQ ID NO: 530020 - RNA, 19 nt, Homo sapiens
  misc_RNA (1)...(19): siRNA sense strand
agacacccuugaagacuug

SEQ ID NO: 530021 - RNA, 19 nt, Homo sapiens
  misc_RNA (1)...(19): siRNA sense strand
cuaugaguguuuaguguau

SEQ ID NO: 530022 - RNA, 19 nt, Homo sapiens
  misc_RNA (1)...(19): siRNA sense strand
gauauaguuccuuucucua

SEQ ID NO: 530023 - RNA, 19 nt, Homo sapiens
  misc_RNA (1)...(19): siRNA sense strand
aggaugagauugcuuuagu

SEQ ID NO: 530024 - RNA, 19 nt, Homo sapiens
  misc_RNA (1)...(19): siRNA sense strand
gccuauaaaucgauucuac

SEQ ID NO: 530025 - RNA, 19 nt, Homo sapiens
  misc_RNA (1)...(19): siRNA sense strand
gcuccaauuugucuauaag

SEQ ID NO: 530026 - RNA, 19 nt, Homo sapiens
  misc_RNA (1)...(19): siRNA sense strand
cgauuuauuggacaugaua

SEQ ID NO: 530027 - RNA, 19 nt, Homo sapiens
  misc_RNA (1)...(19): siRNA sense strand
caagaagacucgcaucauc

SEQ ID NO: 530028 - RNA, 19 nt, Homo sapiens
  misc_RNA (1)...(19): siRNA sense strand
caacaagcuucugggcaaa

SEQ ID NO: 530029 - RNA, 19 nt, Homo sapiens
  misc_RNA (1)...(19): siRNA sense strand
aaacugagagccaccacaa

SEQ ID NO: 530030 - RNA, 19 nt, Homo sapiens
  misc_RNA (1)...(19): siRNA sense strand
gagagccaccacaagacua

SEQ ID NO: 530031 - RNA, 19 nt, Homo sapiens
  misc_RNA (1)...(19): siRNA sense strand
guaccugaccgccgagauc

SEQ ID NO: 530032 - RNA, 19 nt, Homo sapiens
  misc_RNA (1)...(19): siRNA sense strand
ccaccacaagacuaaguaa

SEQ ID NO: 530033 - RNA, 19 nt, Homo sapiens
  misc_RNA (1)...(19): siRNA sense strand
acugagagccaccacaaga

SEQ ID NO: 530034 - RNA, 19 nt, Homo sapiens
  misc_RNA (1)...(19): siRNA sense strand
agagccaccacaagacuaa

SEQ ID NO: 530035 - RNA, 19 nt, Homo sapiens
  misc_RNA (1)...(19): siRNA sense strand
gccaccacaagacuaagua

SEQ ID NO: 530036 - RNA, 19 nt, Homo sapiens
  misc_RNA (1)...(19): siRNA sense strand
gcaagcagcuggccacuaa

SEQ ID NO: 530037 - RNA, 19 nt, Homo sapiens
  misc_RNA (1)...(19): siRNA sense strand
gaaaucgacugagcuacug

SEQ ID NO: 530038 - RNA, 19 nt, Homo sapiens
  misc_RNA (1)...(19): siRNA sense strand
cgacugagcuacugauucg

SEQ ID NO: 530039 - RNA, 19 nt, Homo sapiens
  misc_RNA (1)...(19): siRNA sense strand
uaaguccacuggcggcaaa

SEQ ID NO: 530040 - RNA, 19 nt, Homo sapiens
  misc_RNA (1)...(19): siRNA sense strand
gcuacugauucgcaagcua

SEQ ID NO: 530041 - RNA, 19 nt, Homo sapiens
  misc_RNA (1)...(19): siRNA sense strand
ugacuaucaugcccaagga

SEQ ID NO: 530042 - RNA, 19 nt, Homo sapiens
  misc_RNA (1)...(19): siRNA sense strand
gaagcaaacagcucguaag

SEQ ID NO: 530043 - RNA, 19 nt, Homo sapiens
  misc_RNA (1)...(19): siRNA sense strand
uuccagagcucggcuguga

SEQ ID NO: 530044 - RNA, 19 nt, Homo sapiens
  misc_RNA (1)...(19): siRNA sense strand
cgaagcaaacagcucguaa

SEQ ID NO: 530045 - RNA, 19 nt, Homo sapiens
  misc_RNA (1)...(19): siRNA sense strand
gccaagcgagugacuauca

SEQ ID NO: 530046 - RNA, 19 nt, Homo sapiens
  misc_RNA (1)...(19): siRNA sense strand
ccagagcucggcugugaug

SEQ ID NO: 530047 - RNA, 19 nt, Homo sapiens
  misc_RNA (1)...(19): siRNA sense strand
ccaagcgagugacuaucau

SEQ ID NO: 530048 - RNA, 19 nt, Homo sapiens
  misc_RNA (1)...(19): siRNA sense strand
aagcaaacagcucguaagu

SEQ ID NO: 530049 - RNA, 19 nt, Homo sapiens
  misc_RNA (1)...(19): siRNA sense strand
ugagaucgcgcaggacuuc

SEQ ID NO: 530050 - RNA, 19 nt, Homo sapiens
  misc_RNA (1)...(19): siRNA sense strand
gaacggcugggccauagaa

SEQ ID NO: 530051 - RNA, 19 nt, Homo sapiens
  misc_RNA (1)...(19): siRNA sense strand
gaacugcggcugcgucuac

SEQ ID NO: 530052 - RNA, 19 nt, Homo sapiens
  misc_RNA (1)...(19): siRNA sense strand
aaaaggaaguggucaaguu

SEQ ID NO: 530053 - RNA, 19 nt, Homo sapiens
  misc_RNA (1)...(19): siRNA sense strand
ggacagcgcccagauugag

SEQ ID NO: 530054 - RNA, 19 nt, Homo sapiens
  misc_RNA (1)...(19): siRNA sense strand
gccgcaaucucaucuucaa

SEQ ID NO: 530055 - RNA, 19 nt, Homo sapiens
  misc_RNA (1)...(19): siRNA sense strand
gcaaucucaucuucaacuc

SEQ ID NO: 530056 - RNA, 19 nt, Homo sapiens
  misc_RNA (1)...(19): siRNA sense strand
cgugaccucuuucgaaugg

SEQ ID NO: 530057 - RNA, 19 nt, Homo sapiens
  misc_RNA (1)...(19): siRNA sense strand
caagggcauccgcuacgua

SEQ ID NO: 530058 - RNA, 19 nt, Homo sapiens
  misc_RNA (1)...(19): siRNA sense strand
ccacgucuucaccaacuuu

SEQ ID NO: 530059 - RNA, 19 nt, Homo sapiens
  misc_RNA (1)...(19): siRNA sense strand
gcaagggcauccgcuacgu

SEQ ID NO: 530060 - RNA, 19 nt, Homo sapiens
  misc_RNA (1)...(19): siRNA sense strand
ggauguguaugaaaaggaa

SEQ ID NO: 530061 - RNA, 19 nt, Homo sapiens
  misc_RNA (1)...(19): siRNA sense strand
gggcauccgcuacguaucu

SEQ ID NO: 530062 - RNA, 19 nt, Homo sapiens
  misc_RNA (1)...(19): siRNA sense strand
aaaggaaguggucaaguuc

SEQ ID NO: 530063 - RNA, 19 nt, Homo sapiens
  misc_RNA (1)...(19): siRNA sense strand
ggaaguggucaaguucuca

SEQ ID NO: 530064 - RNA, 19 nt, Homo sapiens
  misc_RNA (1)...(19): siRNA sense strand
acaggucucccacgucuuc

SEQ ID NO: 530065 - RNA, 19 nt, Homo sapiens
  misc_RNA (1)...(19): siRNA sense strand
gaacggcugggccauagaa

SEQ ID NO: 530066 - RNA, 19 nt, Homo sapiens
  misc_RNA (1)...(19): siRNA sense strand
gaacugcggcugcgucuac

SEQ ID NO: 530067 - RNA, 19 nt, Homo sapiens
  misc_RNA (1)...(19): siRNA sense strand
aaaaggaaguggucaaguu

SEQ ID NO: 530068 - RNA, 19 nt, Homo sapiens
  misc_RNA (1)...(19): siRNA sense strand
ggacagcgcccagauugag

SEQ ID NO: 530069 - RNA, 19 nt, Homo sapiens
  misc_RNA (1)...(19): siRNA sense strand
gccgcaaucucaucuucaa

SEQ ID NO: 530070 - RNA, 19 nt, Homo sapiens
  misc_RNA (1)...(19): siRNA sense strand
gcaaucucaucuucaacuc

SEQ ID NO: 530071 - RNA, 19 nt, Homo sapiens
  misc_RNA (1)...(19): siRNA sense strand
cgugaccucuuucgaaugg

SEQ ID NO: 530072 - RNA, 19 nt, Homo sapiens
  misc_RNA (1)...(19): siRNA sense strand
caagggcauccgcuacgua

SEQ ID NO: 530073 - RNA, 19 nt, Homo sapiens
  misc_RNA (1)...(19): siRNA sense strand
ccacgucuucaccaacuuu

SEQ ID NO: 530074 - RNA, 19 nt, Homo sapiens
  misc_RNA (1)...(19): siRNA sense strand
gcaagggcauccgcuacgu

SEQ ID NO: 530075 - RNA, 19 nt, Homo sapiens
  misc_RNA (1)...(19): siRNA sense strand
ggauguguaugaaaaggaa

SEQ ID NO: 530076 - RNA, 19 nt, Homo sapiens
  misc_RNA (1)...(19): siRNA sense strand
gggcauccgcuacguaucu

SEQ ID NO: 530077 - RNA, 19 nt, Homo sapiens
  misc_RNA (1)...(19): siRNA sense strand
aaaggaaguggucaaguuc

SEQ ID NO: 530078 - RNA, 19 nt, Homo sapiens
  misc_RNA (1)...(19): siRNA sense strand
ggaaguggucaaguucuca

SEQ ID NO: 530079 - RNA, 19 nt, Homo sapiens
  misc_RNA (1)...(19): siRNA sense strand
acaggucucccacgucuuc

SEQ ID NO: 530080 - RNA, 19 nt, Homo sapiens
  misc_RNA (1)...(19): siRNA sense strand
gacucuggcuacuggagau

SEQ ID NO: 530081 - RNA, 19 nt, Homo sapiens
  misc_RNA (1)...(19): siRNA sense strand
cgacauagcugaggacuug

SEQ ID NO: 530082 - RNA, 19 nt, Homo sapiens
  misc_RNA (1)...(19): siRNA sense strand
gacaauaccuacuaugcaa

SEQ ID NO: 530083 - RNA, 19 nt, Homo sapiens
  misc_RNA (1)...(19): siRNA sense strand
gggaaggccuuggauguuu

SEQ ID NO: 530084 - RNA, 19 nt, Homo sapiens
  misc_RNA (1)...(19): siRNA sense strand
caagaucgcugacuuuggu

SEQ ID NO: 530085 - RNA, 19 nt, Homo sapiens
  misc_RNA (1)...(19): siRNA sense strand
gaaauugccauccucaaga

SEQ ID NO: 530086 - RNA, 19 nt, Homo sapiens
  misc_RNA (1)...(19): siRNA sense strand
ugaagaccaugauacguaa

SEQ ID NO: 530087 - RNA, 19 nt, Homo sapiens
  misc_RNA (1)...(19): siRNA sense strand
ucaaaccacucucugaaga

SEQ ID NO: 530088 - RNA, 19 nt, Homo sapiens
  misc_RNA (1)...(19): siRNA sense strand
caaguuggccuacaaugaa

SEQ ID NO: 530089 - RNA, 19 nt, Homo sapiens
  misc_RNA (1)...(19): siRNA sense strand
caaugaaggugcuguccaa

SEQ ID NO: 530090 - RNA, 19 nt, Homo sapiens
  misc_RNA (1)...(19): siRNA sense strand
acaguaagaucaagaguca

SEQ ID NO: 530091 - RNA, 19 nt, Homo sapiens
  misc_RNA (1)...(19): siRNA sense strand
ggaaggccuuggauguuug

SEQ ID NO: 530092 - RNA, 19 nt, Homo sapiens
  misc_RNA (1)...(19): siRNA sense strand
ucaaaggcaucgaguacuu

SEQ ID NO: 530093 - RNA, 19 nt, Homo sapiens
  misc_RNA (1)...(19): siRNA sense strand
gagcagguguaccaggaaa

SEQ ID NO: 530094 - RNA, 19 nt, Homo sapiens
  misc_RNA (1)...(19): siRNA sense strand
gugaagaccaugauacgua

SEQ ID NO: 530095 - RNA, 19 nt, Homo sapiens
  misc_RNA (1)...(19): siRNA sense strand
ggaagugcccacccucaaa

SEQ ID NO: 530096 - RNA, 19 nt, Homo sapiens
  misc_RNA (1)...(19): siRNA sense strand
ccaaugaggaccaucugua

SEQ ID NO: 530097 - RNA, 19 nt, Homo sapiens
  misc_RNA (1)...(19): siRNA sense strand
gaucaaaggcaucgaguac

SEQ ID NO: 530098 - RNA, 19 nt, Homo sapiens
  misc_RNA (1)...(19): siRNA sense strand
caaaggcaucgaguacuua

SEQ ID NO: 530099 - RNA, 19 nt, Homo sapiens
  misc_RNA (1)...(19): siRNA sense strand
ggaaauugccauccucaag

SEQ ID NO: 530100 - RNA, 19 nt, Homo sapiens
  misc_RNA (1)...(19): siRNA sense strand
aguauacccugaaggauga

SEQ ID NO: 530101 - RNA, 19 nt, Homo sapiens
  misc_RNA (1)...(19): siRNA sense strand
ggaggaacgcucacuguca

SEQ ID NO: 530102 - RNA, 19 nt, Homo sapiens
  misc_RNA (1)...(19): siRNA sense strand
ggcauggaguccuucauug

SEQ ID NO: 530103 - RNA, 19 nt, Homo sapiens
  misc_RNA (1)...(19): siRNA sense strand
aaauugccauccucaagaa

SEQ ID NO: 530104 - RNA, 19 nt, Homo sapiens
  misc_RNA (1)...(19): siRNA sense strand
gggcauggaguccuucauu

SEQ ID NO: 530105 - RNA, 19 nt, Homo sapiens
  misc_RNA (1)...(19): siRNA sense strand
ccugaaggaugaaauugga

SEQ ID NO: 530106 - RNA, 19 nt, Homo sapiens
  misc_RNA (1)...(19): siRNA sense strand
guacuuacacuaccagaag

SEQ ID NO: 530107 - RNA, 19 nt, Homo sapiens
  misc_RNA (1)...(19): siRNA sense strand
ucaaguuggccuacaauga

SEQ ID NO: 530108 - RNA, 19 nt, Homo sapiens
  misc_RNA (1)...(19): siRNA sense strand
ccuauggugucgucaaguu

SEQ ID NO: 530109 - RNA, 19 nt, Homo sapiens
  misc_RNA (1)...(19): siRNA sense strand
cauccaccgugacaucaaa

SEQ ID NO: 530110 - RNA, 19 nt, Homo sapiens
  misc_RNA (1)...(19): siRNA sense strand
gagcggaucauguguuuac

SEQ ID NO: 530111 - RNA, 19 nt, Homo sapiens
  misc_RNA (1)...(19): siRNA sense strand
gcagguguaccaggaaauu

SEQ ID NO: 530112 - RNA, 19 nt, Homo sapiens
  misc_RNA (1)...(19): siRNA sense strand
caucaagaucgcugacuuu

SEQ ID NO: 530113 - RNA, 19 nt, Homo sapiens
  misc_RNA (1)...(19): siRNA sense strand
gaucauccaccgugacauc

SEQ ID NO: 530114 - RNA, 19 nt, Homo sapiens
  misc_RNA (1)...(19): siRNA sense strand
gcauggaguccuucauugu

SEQ ID NO: 530115 - RNA, 19 nt, Homo sapiens
  misc_RNA (1)...(19): siRNA sense strand
gugacgcgcuccucuccaa

SEQ ID NO: 530116 - RNA, 19 nt, Homo sapiens
  misc_RNA (1)...(19): siRNA sense strand
acgagcggaucauguguuu

SEQ ID NO: 530117 - RNA, 19 nt, Homo sapiens
  misc_RNA (1)...(19): siRNA sense strand
acacuauacugcuuugucu

SEQ ID NO: 530118 - RNA, 19 nt, Homo sapiens
  misc_RNA (1)...(19): siRNA sense strand
ugguggagguccuggauga

SEQ ID NO: 530119 - RNA, 19 nt, Homo sapiens
  misc_RNA (1)...(19): siRNA sense strand
gucagcgccuggaaacuug

SEQ ID NO: 530120 - RNA, 19 nt, Homo sapiens
  misc_RNA (1)...(19): siRNA sense strand
ggacuugaaggaccugauc

SEQ ID NO: 530121 - RNA, 19 nt, Homo sapiens
  misc_RNA (1)...(19): siRNA sense strand
guacaugguguucgaacug

SEQ ID NO: 530122 - RNA, 19 nt, Homo sapiens
  misc_RNA (1)...(19): siRNA sense strand
ggccgacaguggagucuca

SEQ ID NO: 530123 - RNA, 19 nt, Homo sapiens
  misc_RNA (1)...(19): siRNA sense strand
ccucaaaccacucucugaa

SEQ ID NO: 530124 - RNA, 19 nt, Homo sapiens
  misc_RNA (1)...(19): siRNA sense strand
ccaggcccguuucuacuuc

SEQ ID NO: 530125 - RNA, 19 nt, Homo sapiens
  misc_RNA (1)...(19): siRNA sense strand
cccguaugcuggacaagaa

SEQ ID NO: 530126 - RNA, 19 nt, Homo sapiens
  misc_RNA (1)...(19): siRNA sense strand
gcaucgaguacuuacacua

SEQ ID NO: 530127 - RNA, 19 nt, Homo sapiens
  misc_RNA (1)...(19): siRNA sense strand
ugaaggaugaaauuggaaa

SEQ ID NO: 530128 - RNA, 19 nt, Homo sapiens
  misc_RNA (1)...(19): siRNA sense strand
uagcugaggacuugaagga

SEQ ID NO: 530129 - RNA, 19 nt, Homo sapiens
  misc_RNA (1)...(19): siRNA sense strand
gaagugcccacccucaaac

SEQ ID NO: 530130 - RNA, 19 nt, Homo sapiens
  misc_RNA (1)...(19): siRNA sense strand
gguggcagccuggacauga

SEQ ID NO: 530131 - RNA, 19 nt, Homo sapiens
  misc_RNA (1)...(19): siRNA sense strand
caauaccuacuaugcaaug

SEQ ID NO: 530132 - RNA, 19 nt, Homo sapiens
  misc_RNA (1)...(19): siRNA sense strand
acaucaagaucgcugacuu

SEQ ID NO: 530133 - RNA, 19 nt, Homo sapiens
  misc_RNA (1)...(19): siRNA sense strand
ggaucguggugccggaaau

SEQ ID NO: 530134 - RNA, 19 nt, Homo sapiens
  misc_RNA (1)...(19): siRNA sense strand
aaguuggccuacaaugaaa

SEQ ID NO: 530135 - RNA, 19 nt, Homo sapiens
  misc_RNA (1)...(19): siRNA sense strand
gaagaccaugauacguaaa

SEQ ID NO: 530136 - RNA, 19 nt, Homo sapiens
  misc_RNA (1)...(19): siRNA sense strand
cugaagaccaggcccguuu

SEQ ID NO: 530137 - RNA, 19 nt, Homo sapiens
  misc_RNA (1)...(19): siRNA sense strand
guggcagccuggacaugaa

SEQ ID NO: 530138 - RNA, 19 nt, Homo sapiens
  misc_RNA (1)...(19): siRNA sense strand
ugacaauaccuacuaugca

SEQ ID NO: 530139 - RNA, 19 nt, Homo sapiens
  misc_RNA (1)...(19): siRNA sense strand
gcaagcugucucugcaaga

SEQ ID NO: 530140 - RNA, 19 nt, Homo sapiens
  misc_RNA (1)...(19): siRNA sense strand
gaccugaucacccguaugc

SEQ ID NO: 530141 - RNA, 19 nt, Homo sapiens
  misc_RNA (1)...(19): siRNA sense strand
acuauacugcuuugucuuu

SEQ ID NO: 530142 - RNA, 19 nt, Homo sapiens
  misc_RNA (1)...(19): siRNA sense strand
ggcagcagcagcagcgaaa

SEQ ID NO: 530143 - RNA, 19 nt, Homo sapiens
  misc_RNA (1)...(19): siRNA sense strand
ugugagcaaugaauucaag

SEQ ID NO: 530144 - RNA, 19 nt, Homo sapiens
  misc_RNA (1)...(19): siRNA sense strand
ugaggaccaucuguacaug

SEQ ID NO: 530145 - RNA, 19 nt, Homo sapiens
  misc_RNA (1)...(19): siRNA sense strand
gaaggaugaaauuggaaag

SEQ ID NO: 530146 - RNA, 19 nt, Homo sapiens
  misc_RNA (1)...(19): siRNA sense strand
auacguaaacgcuccuuug

SEQ ID NO: 530147 - RNA, 19 nt, Homo sapiens
  misc_RNA (1)...(19): siRNA sense strand
caaugaggaccaucuguac

SEQ ID NO: 530148 - RNA, 19 nt, Homo sapiens
  misc_RNA (1)...(19): siRNA sense strand
uaccuacuaugcaaugaag

SEQ ID NO: 530149 - RNA, 19 nt, Homo sapiens
  misc_RNA (1)...(19): siRNA sense strand
ggacgagcggaucaugugu

SEQ ID NO: 530150 - RNA, 19 nt, Homo sapiens
  misc_RNA (1)...(19): siRNA sense strand
cuauacugcuuugucuuug

SEQ ID NO: 530151 - RNA, 19 nt, Homo sapiens
  misc_RNA (1)...(19): siRNA sense strand
gugacacuauacugcuuug

SEQ ID NO: 530152 - RNA, 19 nt, Homo sapiens
  misc_RNA (1)...(19): siRNA sense strand
ugacuuuggugugagcaau

SEQ ID NO: 530153 - RNA, 19 nt, Homo sapiens
  misc_RNA (1)...(19): siRNA sense strand
ggugugagcaaugaauuca

SEQ ID NO: 530154 - RNA, 19 nt, Homo sapiens
  misc_RNA (1)...(19): siRNA sense strand
cauggaguccuucauugug

SEQ ID NO: 530155 - RNA, 19 nt, Homo sapiens
  misc_RNA (1)...(19): siRNA sense strand
gaagaccaggcccguuucu

SEQ ID NO: 530156 - RNA, 19 nt, Homo sapiens
  misc_RNA (1)...(19): siRNA sense strand
gacgagcggaucauguguu

SEQ ID NO: 530157 - RNA, 19 nt, Homo sapiens
  misc_RNA (1)...(19): siRNA sense strand
ugucagcgccuggaaacuu

SEQ ID NO: 530158 - RNA, 19 nt, Homo sapiens
  misc_RNA (1)...(19): siRNA sense strand
gauacguaaacgcuccuuu

SEQ ID NO: 530159 - RNA, 19 nt, Homo sapiens
  misc_RNA (1)...(19): siRNA sense strand
caucgaguacuuacacuac

SEQ ID NO: 530160 - RNA, 19 nt, Homo sapiens
  misc_RNA (1)...(19): siRNA sense strand
ucacccguaugcuggacaa

SEQ ID NO: 530161 - RNA, 19 nt, Homo sapiens
  misc_RNA (1)...(19): siRNA sense strand
cgacauagcugaggacuug

SEQ ID NO: 530162 - RNA, 19 nt, Homo sapiens
  misc_RNA (1)...(19): siRNA sense strand
gacaauaccuacuaugcaa

SEQ ID NO: 530163 - RNA, 19 nt, Homo sapiens
  misc_RNA (1)...(19): siRNA sense strand
gggaaggccuuggauguuu

SEQ ID NO: 530164 - RNA, 19 nt, Homo sapiens
  misc_RNA (1)...(19): siRNA sense strand
caagaucgcugacuuuggu

SEQ ID NO: 530165 - RNA, 19 nt, Homo sapiens
  misc_RNA (1)...(19): siRNA sense strand
gaaauugccauccucaaga

SEQ ID NO: 530166 - RNA, 19 nt, Homo sapiens
  misc_RNA (1)...(19): siRNA sense strand
ugaagaccaugauacguaa

SEQ ID NO: 530167 - RNA, 19 nt, Homo sapiens
  misc_RNA (1)...(19): siRNA sense strand
ucaaaccacucucugaaga

SEQ ID NO: 530168 - RNA, 19 nt, Homo sapiens
  misc_RNA (1)...(19): siRNA sense strand
caaguuggccuacaaugaa

SEQ ID NO: 530169 - RNA, 19 nt, Homo sapiens
  misc_RNA (1)...(19): siRNA sense strand
caaugaaggugcuguccaa

SEQ ID NO: 530170 - RNA, 19 nt, Homo sapiens
  misc_RNA (1)...(19): siRNA sense strand
acaguaagaucaagaguca

SEQ ID NO: 530171 - RNA, 19 nt, Homo sapiens
  misc_RNA (1)...(19): siRNA sense strand
ggaaggccuuggauguuug

SEQ ID NO: 530172 - RNA, 19 nt, Homo sapiens
  misc_RNA (1)...(19): siRNA sense strand
ucaaaggcaucgaguacuu

SEQ ID NO: 530173 - RNA, 19 nt, Homo sapiens
  misc_RNA (1)...(19): siRNA sense strand
gagcagguguaccaggaaa

SEQ ID NO: 530174 - RNA, 19 nt, Homo sapiens
  misc_RNA (1)...(19): siRNA sense strand
gugaagaccaugauacgua

SEQ ID NO: 530175 - RNA, 19 nt, Homo sapiens
  misc_RNA (1)...(19): siRNA sense strand
ggaagugcccacccucaaa

SEQ ID NO: 530176 - RNA, 19 nt, Homo sapiens
  misc_RNA (1)...(19): siRNA sense strand
ccaaugaggaccaucugua

SEQ ID NO: 530177 - RNA, 19 nt, Homo sapiens
  misc_RNA (1)...(19): siRNA sense strand
gaucaaaggcaucgaguac

SEQ ID NO: 530178 - RNA, 19 nt, Homo sapiens
  misc_RNA (1)...(19): siRNA sense strand
caaaggcaucgaguacuua

SEQ ID NO: 530179 - RNA, 19 nt, Homo sapiens
  misc_RNA (1)...(19): siRNA sense strand
ggaaauugccauccucaag

SEQ ID NO: 530180 - RNA, 19 nt, Homo sapiens
  misc_RNA (1)...(19): siRNA sense strand
aguauacccugaaggauga

SEQ ID NO: 530181 - RNA, 19 nt, Homo sapiens
  misc_RNA (1)...(19): siRNA sense strand
ggaggaacgcucacuguca

SEQ ID NO: 530182 - RNA, 19 nt, Homo sapiens
  misc_RNA (1)...(19): siRNA sense strand
ggcauggaguccuucauug

SEQ ID NO: 530183 - RNA, 19 nt, Homo sapiens
  misc_RNA (1)...(19): siRNA sense strand
aaauugccauccucaagaa

SEQ ID NO: 530184 - RNA, 19 nt, Homo sapiens
  misc_RNA (1)...(19): siRNA sense strand
gggcauggaguccuucauu

SEQ ID NO: 530185 - RNA, 19 nt, Homo sapiens
  misc_RNA (1)...(19): siRNA sense strand
ccugaaggaugaaauugga

SEQ ID NO: 530186 - RNA, 19 nt, Homo sapiens
  misc_RNA (1)...(19): siRNA sense strand
guacuuacacuaccagaag

SEQ ID NO: 530187 - RNA, 19 nt, Homo sapiens
  misc_RNA (1)...(19): siRNA sense strand
ucaaguuggccuacaauga

SEQ ID NO: 530188 - RNA, 19 nt, Homo sapiens
  misc_RNA (1)...(19): siRNA sense strand
ccuauggugucgucaaguu

SEQ ID NO: 530189 - RNA, 19 nt, Homo sapiens
  misc_RNA (1)...(19): siRNA sense strand
cauccaccgugacaucaaa

SEQ ID NO: 530190 - RNA, 19 nt, Homo sapiens
  misc_RNA (1)...(19): siRNA sense strand
gagcggaucauguguuuac

SEQ ID NO: 530191 - RNA, 19 nt, Homo sapiens
  misc_RNA (1)...(19): siRNA sense strand
gcagguguaccaggaaauu

SEQ ID NO: 530192 - RNA, 19 nt, Homo sapiens
  misc_RNA (1)...(19): siRNA sense strand
caucaagaucgcugacuuu

SEQ ID NO: 530193 - RNA, 19 nt, Homo sapiens
  misc_RNA (1)...(19): siRNA sense strand
gaucauccaccgugacauc

SEQ ID NO: 530194 - RNA, 19 nt, Homo sapiens
  misc_RNA (1)...(19): siRNA sense strand
gcauggaguccuucauugu

SEQ ID NO: 530195 - RNA, 19 nt, Homo sapiens
  misc_RNA (1)...(19): siRNA sense strand
gugacgcgcuccucuccaa

SEQ ID NO: 530196 - RNA, 19 nt, Homo sapiens
  misc_RNA (1)...(19): siRNA sense strand
acgagcggaucauguguuu

SEQ ID NO: 530197 - RNA, 19 nt, Homo sapiens
  misc_RNA (1)...(19): siRNA sense strand
acacuauacugcuuugucu

SEQ ID NO: 530198 - RNA, 19 nt, Homo sapiens
  misc_RNA (1)...(19): siRNA sense strand
ugguggagguccuggauga

SEQ ID NO: 530199 - RNA, 19 nt, Homo sapiens
  misc_RNA (1)...(19): siRNA sense strand
gucagcgccuggaaacuug

SEQ ID NO: 530200 - RNA, 19 nt, Homo sapiens
  misc_RNA (1)...(19): siRNA sense strand
ggacuugaaggaccugauc

SEQ ID NO: 530201 - RNA, 19 nt, Homo sapiens
  misc_RNA (1)...(19): siRNA sense strand
guacaugguguucgaacug

SEQ ID NO: 530202 - RNA, 19 nt, Homo sapiens
  misc_RNA (1)...(19): siRNA sense strand
ggccgacaguggagucuca

SEQ ID NO: 530203 - RNA, 19 nt, Homo sapiens
  misc_RNA (1)...(19): siRNA sense strand
ccucaaaccacucucugaa

SEQ ID NO: 530204 - RNA, 19 nt, Homo sapiens
  misc_RNA (1)...(19): siRNA sense strand
ccaggcccguuucuacuuc

SEQ ID NO: 530205 - RNA, 19 nt, Homo sapiens
  misc_RNA (1)...(19): siRNA sense strand
cccguaugcuggacaagaa

SEQ ID NO: 530206 - RNA, 19 nt, Homo sapiens
  misc_RNA (1)...(19): siRNA sense strand
gcaucgaguacuuacacua

SEQ ID NO: 530207 - RNA, 19 nt, Homo sapiens
  misc_RNA (1)...(19): siRNA sense strand
ugaaggaugaaauuggaaa

SEQ ID NO: 530208 - RNA, 19 nt, Homo sapiens
  misc_RNA (1)...(19): siRNA sense strand
uagcugaggacuugaagga

SEQ ID NO: 530209 - RNA, 19 nt, Homo sapiens
  misc_RNA (1)...(19): siRNA sense strand
gaagugcccacccucaaac

SEQ ID NO: 530210 - RNA, 19 nt, Homo sapiens
  misc_RNA (1)...(19): siRNA sense strand
gguggcagccuggacauga

SEQ ID NO: 530211 - RNA, 19 nt, Homo sapiens
  misc_RNA (1)...(19): siRNA sense strand
caauaccuacuaugcaaug

SEQ ID NO: 530212 - RNA, 19 nt, Homo sapiens
  misc_RNA (1)...(19): siRNA sense strand
acaucaagaucgcugacuu

SEQ ID NO: 530213 - RNA, 19 nt, Homo sapiens
  misc_RNA (1)...(19): siRNA sense strand
ggaucguggugccggaaau

SEQ ID NO: 530214 - RNA, 19 nt, Homo sapiens
  misc_RNA (1)...(19): siRNA sense strand
aaguuggccuacaaugaaa

SEQ ID NO: 530215 - RNA, 19 nt, Homo sapiens
  misc_RNA (1)...(19): siRNA sense strand
gaagaccaugauacguaaa

SEQ ID NO: 530216 - RNA, 19 nt, Homo sapiens
  misc_RNA (1)...(19): siRNA sense strand
cugaagaccaggcccguuu

SEQ ID NO: 530217 - RNA, 19 nt, Homo sapiens
  misc_RNA (1)...(19): siRNA sense strand
guggcagccuggacaugaa

SEQ ID NO: 530218 - RNA, 19 nt, Homo sapiens
  misc_RNA (1)...(19): siRNA sense strand
ugacaauaccuacuaugca

SEQ ID NO: 530219 - RNA, 19 nt, Homo sapiens
  misc_RNA (1)...(19): siRNA sense strand
gcaagcugucucugcaaga

SEQ ID NO: 530220 - RNA, 19 nt, Homo sapiens
  misc_RNA (1)...(19): siRNA sense strand
gaccugaucacccguaugc

SEQ ID NO: 530221 - RNA, 19 nt, Homo sapiens
  misc_RNA (1)...(19): siRNA sense strand
acuauacugcuuugucuuu

SEQ ID NO: 530222 - RNA, 19 nt, Homo sapiens
  misc_RNA (1)...(19): siRNA sense strand
ggcagcagcagcagcgaaa

SEQ ID NO: 530223 - RNA, 19 nt, Homo sapiens
  misc_RNA (1)...(19): siRNA sense strand
ugugagcaaugaauucaag

SEQ ID NO: 530224 - RNA, 19 nt, Homo sapiens
  misc_RNA (1)...(19): siRNA sense strand
ugaggaccaucuguacaug

SEQ ID NO: 530225 - RNA, 19 nt, Homo sapiens
  misc_RNA (1)...(19): siRNA sense strand
gaaggaugaaauuggaaag

SEQ ID NO: 530226 - RNA, 19 nt, Homo sapiens
  misc_RNA (1)...(19): siRNA sense strand
auacguaaacgcuccuuug

SEQ ID NO: 530227 - RNA, 19 nt, Homo sapiens
  misc_RNA (1)...(19): siRNA sense strand
caaugaggaccaucuguac

SEQ ID NO: 530228 - RNA, 19 nt, Homo sapiens
  misc_RNA (1)...(19): siRNA sense strand
uaccuacuaugcaaugaag

SEQ ID NO: 530229 - RNA, 19 nt, Homo sapiens
  misc_RNA (1)...(19): siRNA sense strand
ggacgagcggaucaugugu

SEQ ID NO: 530230 - RNA, 19 nt, Homo sapiens
  misc_RNA (1)...(19): siRNA sense strand
cuauacugcuuugucuuug

SEQ ID NO: 530231 - RNA, 19 nt, Homo sapiens
  misc_RNA (1)...(19): siRNA sense strand
gugacacuauacugcuuug

SEQ ID NO: 530232 - RNA, 19 nt, Homo sapiens
  misc_RNA (1)...(19): siRNA sense strand
ugacuuuggugugagcaau

SEQ ID NO: 530233 - RNA, 19 nt, Homo sapiens
  misc_RNA (1)...(19): siRNA sense strand
ggugugagcaaugaauuca

SEQ ID NO: 530234 - RNA, 19 nt, Homo sapiens
  misc_RNA (1)...(19): siRNA sense strand
cauggaguccuucauugug

SEQ ID NO: 530235 - RNA, 19 nt, Homo sapiens
  misc_RNA (1)...(19): siRNA sense strand
gaagaccaggcccguuucu

SEQ ID NO: 530236 - RNA, 19 nt, Homo sapiens
  misc_RNA (1)...(19): siRNA sense strand
gacgagcggaucauguguu

SEQ ID NO: 530237 - RNA, 19 nt, Homo sapiens
  misc_RNA (1)...(19): siRNA sense strand
ugucagcgccuggaaacuu

SEQ ID NO: 530238 - RNA, 19 nt, Homo sapiens
  misc_RNA (1)...(19): siRNA sense strand
gauacguaaacgcuccuuu

SEQ ID NO: 530239 - RNA, 19 nt, Homo sapiens
  misc_RNA (1)...(19): siRNA sense strand
caucgaguacuuacacuac

SEQ ID NO: 530240 - RNA, 19 nt, Homo sapiens
  misc_RNA (1)...(19): siRNA sense strand
ucacccguaugcuggacaa

SEQ ID NO: 530241 - RNA, 19 nt, Homo sapiens
  misc_RNA (1)...(19): siRNA sense strand
cgacauagcugaggacuug

SEQ ID NO: 530242 - RNA, 19 nt, Homo sapiens
  misc_RNA (1)...(19): siRNA sense strand
gacaauaccuacuaugcaa

SEQ ID NO: 530243 - RNA, 19 nt, Homo sapiens
  misc_RNA (1)...(19): siRNA sense strand
gggaaggccuuggauguuu

SEQ ID NO: 530244 - RNA, 19 nt, Homo sapiens
  misc_RNA (1)...(19): siRNA sense strand
caagaucgcugacuuuggu

SEQ ID NO: 530245 - RNA, 19 nt, Homo sapiens
  misc_RNA (1)...(19): siRNA sense strand
gaaauugccauccucaaga

SEQ ID NO: 530246 - RNA, 19 nt, Homo sapiens
  misc_RNA (1)...(19): siRNA sense strand
ugaagaccaugauacguaa

SEQ ID NO: 530247 - RNA, 19 nt, Homo sapiens
  misc_RNA (1)...(19): siRNA sense strand
ucaaaccacucucugaaga

SEQ ID NO: 530248 - RNA, 19 nt, Homo sapiens
  misc_RNA (1)...(19): siRNA sense strand
caaguuggccuacaaugaa

SEQ ID NO: 530249 - RNA, 19 nt, Homo sapiens
  misc_RNA (1)...(19): siRNA sense strand
caaugaaggugcuguccaa

SEQ ID NO: 530250 - RNA, 19 nt, Homo sapiens
  misc_RNA (1)...(19): siRNA sense strand
acaguaagaucaagaguca

SEQ ID NO: 530251 - RNA, 19 nt, Homo sapiens
  misc_RNA (1)...(19): siRNA sense strand
ggaaggccuuggauguuug

SEQ ID NO: 530252 - RNA, 19 nt, Homo sapiens
  misc_RNA (1)...(19): siRNA sense strand
ucaaaggcaucgaguacuu

SEQ ID NO: 530253 - RNA, 19 nt, Homo sapiens
  misc_RNA (1)...(19): siRNA sense strand
gagcagguguaccaggaaa

SEQ ID NO: 530254 - RNA, 19 nt, Homo sapiens
  misc_RNA (1)...(19): siRNA sense strand
gugaagaccaugauacgua

SEQ ID NO: 530255 - RNA, 19 nt, Homo sapiens
  misc_RNA (1)...(19): siRNA sense strand
ggaagugcccacccucaaa

SEQ ID NO: 530256 - RNA, 19 nt, Homo sapiens
  misc_RNA (1)...(19): siRNA sense strand
ccaaugaggaccaucugua

SEQ ID NO: 530257 - RNA, 19 nt, Homo sapiens
  misc_RNA (1)...(19): siRNA sense strand
gaucaaaggcaucgaguac

SEQ ID NO: 530258 - RNA, 19 nt, Homo sapiens
  misc_RNA (1)...(19): siRNA sense strand
caaaggcaucgaguacuua

SEQ ID NO: 530259 - RNA, 19 nt, Homo sapiens
  misc_RNA (1)...(19): siRNA sense strand
ggaaauugccauccucaag

SEQ ID NO: 530260 - RNA, 19 nt, Homo sapiens
  misc_RNA (1)...(19): siRNA sense strand
aguauacccugaaggauga

SEQ ID NO: 530261 - RNA, 19 nt, Homo sapiens
  misc_RNA (1)...(19): siRNA sense strand
ggaggaacgcucacuguca

SEQ ID NO: 530262 - RNA, 19 nt, Homo sapiens
  misc_RNA (1)...(19): siRNA sense strand
ggcauggaguccuucauug

SEQ ID NO: 530263 - RNA, 19 nt, Homo sapiens
  misc_RNA (1)...(19): siRNA sense strand
aaauugccauccucaagaa

SEQ ID NO: 530264 - RNA, 19 nt, Homo sapiens
  misc_RNA (1)...(19): siRNA sense strand
gggcauggaguccuucauu

SEQ ID NO: 530265 - RNA, 19 nt, Homo sapiens
  misc_RNA (1)...(19): siRNA sense strand
ccugaaggaugaaauugga

SEQ ID NO: 530266 - RNA, 19 nt, Homo sapiens
  misc_RNA (1)...(19): siRNA sense strand
guacuuacacuaccagaag

SEQ ID NO: 530267 - RNA, 19 nt, Homo sapiens
  misc_RNA (1)...(19): siRNA sense strand
ucaaguuggccuacaauga

SEQ ID NO: 530268 - RNA, 19 nt, Homo sapiens
  misc_RNA (1)...(19): siRNA sense strand
ccuauggugucgucaaguu

SEQ ID NO: 530269 - RNA, 19 nt, Homo sapiens
  misc_RNA (1)...(19): siRNA sense strand
cauccaccgugacaucaaa

SEQ ID NO: 530270 - RNA, 19 nt, Homo sapiens
  misc_RNA (1)...(19): siRNA sense strand
gagcggaucauguguuuac

SEQ ID NO: 530271 - RNA, 19 nt, Homo sapiens
  misc_RNA (1)...(19): siRNA sense strand
gcagguguaccaggaaauu

SEQ ID NO: 530272 - RNA, 19 nt, Homo sapiens
  misc_RNA (1)...(19): siRNA sense strand
caucaagaucgcugacuuu

SEQ ID NO: 530273 - RNA, 19 nt, Homo sapiens
  misc_RNA (1)...(19): siRNA sense strand
gaucauccaccgugacauc

SEQ ID NO: 530274 - RNA, 19 nt, Homo sapiens
  misc_RNA (1)...(19): siRNA sense strand
gcauggaguccuucauugu

SEQ ID NO: 530275 - RNA, 19 nt, Homo sapiens
  misc_RNA (1)...(19): siRNA sense strand
gugacgcgcuccucuccaa

SEQ ID NO: 530276 - RNA, 19 nt, Homo sapiens
  misc_RNA (1)...(19): siRNA sense strand
acgagcggaucauguguuu

SEQ ID NO: 530277 - RNA, 19 nt, Homo sapiens
  misc_RNA (1)...(19): siRNA sense strand
acacuauacugcuuugucu

SEQ ID NO: 530278 - RNA, 19 nt, Homo sapiens
  misc_RNA (1)...(19): siRNA sense strand
ugguggagguccuggauga

SEQ ID NO: 530279 - RNA, 19 nt, Homo sapiens
  misc_RNA (1)...(19): siRNA sense strand
gucagcgccuggaaacuug

SEQ ID NO: 530280 - RNA, 19 nt, Homo sapiens
  misc_RNA (1)...(19): siRNA sense strand
ggacuugaaggaccugauc

SEQ ID NO: 530281 - RNA, 19 nt, Homo sapiens
  misc_RNA (1)...(19): siRNA sense strand
guacaugguguucgaacug

SEQ ID NO: 530282 - RNA, 19 nt, Homo sapiens
  misc_RNA (1)...(19): siRNA sense strand
ggccgacaguggagucuca

SEQ ID NO: 530283 - RNA, 19 nt, Homo sapiens
  misc_RNA (1)...(19): siRNA sense strand
ccucaaaccacucucugaa

SEQ ID NO: 530284 - RNA, 19 nt, Homo sapiens
  misc_RNA (1)...(19): siRNA sense strand
ccaggcccguuucuacuuc

SEQ ID NO: 530285 - RNA, 19 nt, Homo sapiens
  misc_RNA (1)...(19): siRNA sense strand
cccguaugcuggacaagaa

SEQ ID NO: 530286 - RNA, 19 nt, Homo sapiens
  misc_RNA (1)...(19): siRNA sense strand
gcaucgaguacuuacacua

SEQ ID NO: 530287 - RNA, 19 nt, Homo sapiens
  misc_RNA (1)...(19): siRNA sense strand
ugaaggaugaaauuggaaa

SEQ ID NO: 530288 - RNA, 19 nt, Homo sapiens
  misc_RNA (1)...(19): siRNA sense strand
uagcugaggacuugaagga

SEQ ID NO: 530289 - RNA, 19 nt, Homo sapiens
  misc_RNA (1)...(19): siRNA sense strand
gaagugcccacccucaaac

SEQ ID NO: 530290 - RNA, 19 nt, Homo sapiens
  misc_RNA (1)...(19): siRNA sense strand
gguggcagccuggacauga

SEQ ID NO: 530291 - RNA, 19 nt, Homo sapiens
  misc_RNA (1)...(19): siRNA sense strand
caauaccuacuaugcaaug

SEQ ID NO: 530292 - RNA, 19 nt, Homo sapiens
  misc_RNA (1)...(19): siRNA sense strand
acaucaagaucgcugacuu

SEQ ID NO: 530293 - RNA, 19 nt, Homo sapiens
  misc_RNA (1)...(19): siRNA sense strand
ggaucguggugccggaaau

SEQ ID NO: 530294 - RNA, 19 nt, Homo sapiens
  misc_RNA (1)...(19): siRNA sense strand
aaguuggccuacaaugaaa

SEQ ID NO: 530295 - RNA, 19 nt, Homo sapiens
  misc_RNA (1)...(19): siRNA sense strand
gaagaccaugauacguaaa

SEQ ID NO: 530296 - RNA, 19 nt, Homo sapiens
  misc_RNA (1)...(19): siRNA sense strand
cugaagaccaggcccguuu

SEQ ID NO: 530297 - RNA, 19 nt, Homo sapiens
  misc_RNA (1)...(19): siRNA sense strand
guggcagccuggacaugaa

SEQ ID NO: 530298 - RNA, 19 nt, Homo sapiens
  misc_RNA (1)...(19): siRNA sense strand
ugacaauaccuacuaugca

SEQ ID NO: 530299 - RNA, 19 nt, Homo sapiens
  misc_RNA (1)...(19): siRNA sense strand
gcaagcugucucugcaaga

SEQ ID NO: 530300 - RNA, 19 nt, Homo sapiens
  misc_RNA (1)...(19): siRNA sense strand
gaccugaucacccguaugc

SEQ ID NO: 530301 - RNA, 19 nt, Homo sapiens
  misc_RNA (1)...(19): siRNA sense strand
acuauacugcuuugucuuu

SEQ ID NO: 530302 - RNA, 19 nt, Homo sapiens
  misc_RNA (1)...(19): siRNA sense strand
ggcagcagcagcagcgaaa

SEQ ID NO: 530303 - RNA, 19 nt, Homo sapiens
  misc_RNA (1)...(19): siRNA sense strand
ugugagcaaugaauucaag

SEQ ID NO: 530304 - RNA, 19 nt, Homo sapiens
  misc_RNA (1)...(19): siRNA sense strand
ugaggaccaucuguacaug

SEQ ID NO: 530305 - RNA, 19 nt, Homo sapiens
  misc_RNA (1)...(19): siRNA sense strand
gaaggaugaaauuggaaag

SEQ ID NO: 530306 - RNA, 19 nt, Homo sapiens
  misc_RNA (1)...(19): siRNA sense strand
auacguaaacgcuccuuug

SEQ ID NO: 530307 - RNA, 19 nt, Homo sapiens
  misc_RNA (1)...(19): siRNA sense strand
caaugaggaccaucuguac

SEQ ID NO: 530308 - RNA, 19 nt, Homo sapiens
  misc_RNA (1)...(19): siRNA sense strand
uaccuacuaugcaaugaag

SEQ ID NO: 530309 - RNA, 19 nt, Homo sapiens
  misc_RNA (1)...(19): siRNA sense strand
ggacgagcggaucaugugu

SEQ ID NO: 530310 - RNA, 19 nt, Homo sapiens
  misc_RNA (1)...(19): siRNA sense strand
cuauacugcuuugucuuug

SEQ ID NO: 530311 - RNA, 19 nt, Homo sapiens
  misc_RNA (1)...(19): siRNA sense strand
gugacacuauacugcuuug

SEQ ID NO: 530312 - RNA, 19 nt, Homo sapiens
  misc_RNA (1)...(19): siRNA sense strand
ugacuuuggugugagcaau

SEQ ID NO: 530313 - RNA, 19 nt, Homo sapiens
  misc_RNA (1)...(19): siRNA sense strand
ggugugagcaaugaauuca

SEQ ID NO: 530314 - RNA, 19 nt, Homo sapiens
  misc_RNA (1)...(19): siRNA sense strand
cauggaguccuucauugug

SEQ ID NO: 530315 - RNA, 19 nt, Homo sapiens
  misc_RNA (1)...(19): siRNA sense strand
gaagaccaggcccguuucu

SEQ ID NO: 530316 - RNA, 19 nt, Homo sapiens
  misc_RNA (1)...(19): siRNA sense strand
gacgagcggaucauguguu

SEQ ID NO: 530317 - RNA, 19 nt, Homo sapiens
  misc_RNA (1)...(19): siRNA sense strand
ugucagcgccuggaaacuu

SEQ ID NO: 530318 - RNA, 19 nt, Homo sapiens
  misc_RNA (1)...(19): siRNA sense strand
gauacguaaacgcuccuuu

SEQ ID NO: 530319 - RNA, 19 nt, Homo sapiens
  misc_RNA (1)...(19): siRNA sense strand
caucgaguacuuacacuac

SEQ ID NO: 530320 - RNA, 19 nt, Homo sapiens
  misc_RNA (1)...(19): siRNA sense strand
ucacccguaugcuggacaa

SEQ ID NO: 530321 - RNA, 19 nt, Homo sapiens
  misc_RNA (1)...(19): siRNA sense strand
cgacauagcugaggacuug

SEQ ID NO: 530322 - RNA, 19 nt, Homo sapiens
  misc_RNA (1)...(19): siRNA sense strand
gacaauaccuacuaugcaa

SEQ ID NO: 530323 - RNA, 19 nt, Homo sapiens
  misc_RNA (1)...(19): siRNA sense strand
gggaaggccuuggauguuu

SEQ ID NO: 530324 - RNA, 19 nt, Homo sapiens
  misc_RNA (1)...(19): siRNA sense strand
caagaucgcugacuuuggu

SEQ ID NO: 530325 - RNA, 19 nt, Homo sapiens
  misc_RNA (1)...(19): siRNA sense strand
gaaauugccauccucaaga

SEQ ID NO: 530326 - RNA, 19 nt, Homo sapiens
  misc_RNA (1)...(19): siRNA sense strand
ugaagaccaugauacguaa

SEQ ID NO: 530327 - RNA, 19 nt, Homo sapiens
  misc_RNA (1)...(19): siRNA sense strand
ucaaaccacucucugaaga

SEQ ID NO: 530328 - RNA, 19 nt, Homo sapiens
  misc_RNA (1)...(19): siRNA sense strand
caaguuggccuacaaugaa

SEQ ID NO: 530329 - RNA, 19 nt, Homo sapiens
  misc_RNA (1)...(19): siRNA sense strand
caaugaaggugcuguccaa

SEQ ID NO: 530330 - RNA, 19 nt, Homo sapiens
  misc_RNA (1)...(19): siRNA sense strand
acaguaagaucaagaguca

SEQ ID NO: 530331 - RNA, 19 nt, Homo sapiens
  misc_RNA (1)...(19): siRNA sense strand
ggaaggccuuggauguuug

SEQ ID NO: 530332 - RNA, 19 nt, Homo sapiens
  misc_RNA (1)...(19): siRNA sense strand
ucaaaggcaucgaguacuu

SEQ ID NO: 530333 - RNA, 19 nt, Homo sapiens
  misc_RNA (1)...(19): siRNA sense strand
gagcagguguaccaggaaa

SEQ ID NO: 530334 - RNA, 19 nt, Homo sapiens
  misc_RNA (1)...(19): siRNA sense strand
gugaagaccaugauacgua

SEQ ID NO: 530335 - RNA, 19 nt, Homo sapiens
  misc_RNA (1)...(19): siRNA sense strand
ggaagugcccacccucaaa

SEQ ID NO: 530336 - RNA, 19 nt, Homo sapiens
  misc_RNA (1)...(19): siRNA sense strand
ccaaugaggaccaucugua

SEQ ID NO: 530337 - RNA, 19 nt, Homo sapiens
  misc_RNA (1)...(19): siRNA sense strand
gaucaaaggcaucgaguac

SEQ ID NO: 530338 - RNA, 19 nt, Homo sapiens
  misc_RNA (1)...(19): siRNA sense strand
caaaggcaucgaguacuua

SEQ ID NO: 530339 - RNA, 19 nt, Homo sapiens
  misc_RNA (1)...(19): siRNA sense strand
ggaaauugccauccucaag

SEQ ID NO: 530340 - RNA, 19 nt, Homo sapiens
  misc_RNA (1)...(19): siRNA sense strand
aguauacccugaaggauga

SEQ ID NO: 530341 - RNA, 19 nt, Homo sapiens
  misc_RNA (1)...(19): siRNA sense strand
ggaggaacgcucacuguca

SEQ ID NO: 530342 - RNA, 19 nt, Homo sapiens
  misc_RNA (1)...(19): siRNA sense strand
ggcauggaguccuucauug

SEQ ID NO: 530343 - RNA, 19 nt, Homo sapiens
  misc_RNA (1)...(19): siRNA sense strand
aaauugccauccucaagaa

SEQ ID NO: 530344 - RNA, 19 nt, Homo sapiens
  misc_RNA (1)...(19): siRNA sense strand
gggcauggaguccuucauu

SEQ ID NO: 530345 - RNA, 19 nt, Homo sapiens
  misc_RNA (1)...(19): siRNA sense strand
ccugaaggaugaaauugga

SEQ ID NO: 530346 - RNA, 19 nt, Homo sapiens
  misc_RNA (1)...(19): siRNA sense strand
guacuuacacuaccagaag

SEQ ID NO: 530347 - RNA, 19 nt, Homo sapiens
  misc_RNA (1)...(19): siRNA sense strand
ucaaguuggccuacaauga

SEQ ID NO: 530348 - RNA, 19 nt, Homo sapiens
  misc_RNA (1)...(19): siRNA sense strand
ccuauggugucgucaaguu

SEQ ID NO: 530349 - RNA, 19 nt, Homo sapiens
  misc_RNA (1)...(19): siRNA sense strand
cauccaccgugacaucaaa

SEQ ID NO: 530350 - RNA, 19 nt, Homo sapiens
  misc_RNA (1)...(19): siRNA sense strand
gagcggaucauguguuuac

SEQ ID NO: 530351 - RNA, 19 nt, Homo sapiens
  misc_RNA (1)...(19): siRNA sense strand
gcagguguaccaggaaauu

SEQ ID NO: 530352 - RNA, 19 nt, Homo sapiens
  misc_RNA (1)...(19): siRNA sense strand
caucaagaucgcugacuuu

SEQ ID NO: 530353 - RNA, 19 nt, Homo sapiens
  misc_RNA (1)...(19): siRNA sense strand
gaucauccaccgugacauc

SEQ ID NO: 530354 - RNA, 19 nt, Homo sapiens
  misc_RNA (1)...(19): siRNA sense strand
gcauggaguccuucauugu

SEQ ID NO: 530355 - RNA, 19 nt, Homo sapiens
  misc_RNA (1)...(19): siRNA sense strand
gugacgcgcuccucuccaa

SEQ ID NO: 530356 - RNA, 19 nt, Homo sapiens
  misc_RNA (1)...(19): siRNA sense strand
acgagcggaucauguguuu

SEQ ID NO: 530357 - RNA, 19 nt, Homo sapiens
  misc_RNA (1)...(19): siRNA sense strand
acacuauacugcuuugucu

SEQ ID NO: 530358 - RNA, 19 nt, Homo sapiens
  misc_RNA (1)...(19): siRNA sense strand
ugguggagguccuggauga

SEQ ID NO: 530359 - RNA, 19 nt, Homo sapiens
  misc_RNA (1)...(19): siRNA sense strand
gucagcgccuggaaacuug

SEQ ID NO: 530360 - RNA, 19 nt, Homo sapiens
  misc_RNA (1)...(19): siRNA sense strand
ggacuugaaggaccugauc

SEQ ID NO: 530361 - RNA, 19 nt, Homo sapiens
  misc_RNA (1)...(19): siRNA sense strand
guacaugguguucgaacug

SEQ ID NO: 530362 - RNA, 19 nt, Homo sapiens
  misc_RNA (1)...(19): siRNA sense strand
ggccgacaguggagucuca

SEQ ID NO: 530363 - RNA, 19 nt, Homo sapiens
  misc_RNA (1)...(19): siRNA sense strand
ccucaaaccacucucugaa

SEQ ID NO: 530364 - RNA, 19 nt, Homo sapiens
  misc_RNA (1)...(19): siRNA sense strand
ccaggcccguuucuacuuc

SEQ ID NO: 530365 - RNA, 19 nt, Homo sapiens
  misc_RNA (1)...(19): siRNA sense strand
cccguaugcuggacaagaa

SEQ ID NO: 530366 - RNA, 19 nt, Homo sapiens
  misc_RNA (1)...(19): siRNA sense strand
gcaucgaguacuuacacua

SEQ ID NO: 530367 - RNA, 19 nt, Homo sapiens
  misc_RNA (1)...(19): siRNA sense strand
ugaaggaugaaauuggaaa

SEQ ID NO: 530368 - RNA, 19 nt, Homo sapiens
  misc_RNA (1)...(19): siRNA sense strand
uagcugaggacuugaagga

SEQ ID NO: 530369 - RNA, 19 nt, Homo sapiens
  misc_RNA (1)...(19): siRNA sense strand
gaagugcccacccucaaac

SEQ ID NO: 530370 - RNA, 19 nt, Homo sapiens
  misc_RNA (1)...(19): siRNA sense strand
gguggcagccuggacauga

SEQ ID NO: 530371 - RNA, 19 nt, Homo sapiens
  misc_RNA (1)...(19): siRNA sense strand
caauaccuacuaugcaaug

SEQ ID NO: 530372 - RNA, 19 nt, Homo sapiens
  misc_RNA (1)...(19): siRNA sense strand
acaucaagaucgcugacuu

SEQ ID NO: 530373 - RNA, 19 nt, Homo sapiens
  misc_RNA (1)...(19): siRNA sense strand
ggaucguggugccggaaau

SEQ ID NO: 530374 - RNA, 19 nt, Homo sapiens
  misc_RNA (1)...(19): siRNA sense strand
aaguuggccuacaaugaaa

SEQ ID NO: 530375 - RNA, 19 nt, Homo sapiens
  misc_RNA (1)...(19): siRNA sense strand
gaagaccaugauacguaaa

SEQ ID NO: 530376 - RNA, 19 nt, Homo sapiens
  misc_RNA (1)...(19): siRNA sense strand
cugaagaccaggcccguuu

SEQ ID NO: 530377 - RNA, 19 nt, Homo sapiens
  misc_RNA (1)...(19): siRNA sense strand
guggcagccuggacaugaa

SEQ ID NO: 530378 - RNA, 19 nt, Homo sapiens
  misc_RNA (1)...(19): siRNA sense strand
ugacaauaccuacuaugca

SEQ ID NO: 530379 - RNA, 19 nt, Homo sapiens
  misc_RNA (1)...(19): siRNA sense strand
gcaagcugucucugcaaga

SEQ ID NO: 530380 - RNA, 19 nt, Homo sapiens
  misc_RNA (1)...(19): siRNA sense strand
gaccugaucacccguaugc

SEQ ID NO: 530381 - RNA, 19 nt, Homo sapiens
  misc_RNA (1)...(19): siRNA sense strand
acuauacugcuuugucuuu

SEQ ID NO: 530382 - RNA, 19 nt, Homo sapiens
  misc_RNA (1)...(19): siRNA sense strand
ggcagcagcagcagcgaaa

SEQ ID NO: 530383 - RNA, 19 nt, Homo sapiens
  misc_RNA (1)...(19): siRNA sense strand
ugugagcaaugaauucaag

SEQ ID NO: 530384 - RNA, 19 nt, Homo sapiens
  misc_RNA (1)...(19): siRNA sense strand
ugaggaccaucuguacaug

SEQ ID NO: 530385 - RNA, 19 nt, Homo sapiens
  misc_RNA (1)...(19): siRNA sense strand
gaaggaugaaauuggaaag

SEQ ID NO: 530386 - RNA, 19 nt, Homo sapiens
  misc_RNA (1)...(19): siRNA sense strand
auacguaaacgcuccuuug

SEQ ID NO: 530387 - RNA, 19 nt, Homo sapiens
  misc_RNA (1)...(19): siRNA sense strand
caaugaggaccaucuguac

SEQ ID NO: 530388 - RNA, 19 nt, Homo sapiens
  misc_RNA (1)...(19): siRNA sense strand
uaccuacuaugcaaugaag

SEQ ID NO: 530389 - RNA, 19 nt, Homo sapiens
  misc_RNA (1)...(19): siRNA sense strand
ggacgagcggaucaugugu

SEQ ID NO: 530390 - RNA, 19 nt, Homo sapiens
  misc_RNA (1)...(19): siRNA sense strand
cuauacugcuuugucuuug

SEQ ID NO: 530391 - RNA, 19 nt, Homo sapiens
  misc_RNA (1)...(19): siRNA sense strand
gugacacuauacugcuuug

SEQ ID NO: 530392 - RNA, 19 nt, Homo sapiens
  misc_RNA (1)...(19): siRNA sense strand
ugacuuuggugugagcaau

SEQ ID NO: 530393 - RNA, 19 nt, Homo sapiens
  misc_RNA (1)...(19): siRNA sense strand
ggugugagcaaugaauuca

SEQ ID NO: 530394 - RNA, 19 nt, Homo sapiens
  misc_RNA (1)...(19): siRNA sense strand
cauggaguccuucauugug

SEQ ID NO: 530395 - RNA, 19 nt, Homo sapiens
  misc_RNA (1)...(19): siRNA sense strand
gaagaccaggcccguuucu

SEQ ID NO: 530396 - RNA, 19 nt, Homo sapiens
  misc_RNA (1)...(19): siRNA sense strand
gacgagcggaucauguguu

SEQ ID NO: 530397 - RNA, 19 nt, Homo sapiens
  misc_RNA (1)...(19): siRNA sense strand
ugucagcgccuggaaacuu

SEQ ID NO: 530398 - RNA, 19 nt, Homo sapiens
  misc_RNA (1)...(19): siRNA sense strand
gauacguaaacgcuccuuu

SEQ ID NO: 530399 - RNA, 19 nt, Homo sapiens
  misc_RNA (1)...(19): siRNA sense strand
caucgaguacuuacacuac

SEQ ID NO: 530400 - RNA, 19 nt, Homo sapiens
  misc_RNA (1)...(19): siRNA sense strand
ucacccguaugcuggacaa

SEQ ID NO: 530401 - RNA, 19 nt, Homo sapiens
  misc_RNA (1)...(19): siRNA sense strand
cgacauagcugaggacuug

SEQ ID NO: 530402 - RNA, 19 nt, Homo sapiens
  misc_RNA (1)...(19): siRNA sense strand
gacaauaccuacuaugcaa

SEQ ID NO: 530403 - RNA, 19 nt, Homo sapiens
  misc_RNA (1)...(19): siRNA sense strand
gggaaggccuuggauguuu

SEQ ID NO: 530404 - RNA, 19 nt, Homo sapiens
  misc_RNA (1)...(19): siRNA sense strand
caagaucgcugacuuuggu

SEQ ID NO: 530405 - RNA, 19 nt, Homo sapiens
  misc_RNA (1)...(19): siRNA sense strand
gaaauugccauccucaaga

SEQ ID NO: 530406 - RNA, 19 nt, Homo sapiens
  misc_RNA (1)...(19): siRNA sense strand
ugaagaccaugauacguaa

SEQ ID NO: 530407 - RNA, 19 nt, Homo sapiens
  misc_RNA (1)...(19): siRNA sense strand
ucaaaccacucucugaaga

SEQ ID NO: 530408 - RNA, 19 nt, Homo sapiens
  misc_RNA (1)...(19): siRNA sense strand
caaguuggccuacaaugaa

SEQ ID NO: 530409 - RNA, 19 nt, Homo sapiens
  misc_RNA (1)...(19): siRNA sense strand
caaugaaggugcuguccaa

SEQ ID NO: 530410 - RNA, 19 nt, Homo sapiens
  misc_RNA (1)...(19): siRNA sense strand
acaguaagaucaagaguca

SEQ ID NO: 530411 - RNA, 19 nt, Homo sapiens
  misc_RNA (1)...(19): siRNA sense strand
ggaaggccuuggauguuug

SEQ ID NO: 530412 - RNA, 19 nt, Homo sapiens
  misc_RNA (1)...(19): siRNA sense strand
ucaaaggcaucgaguacuu

SEQ ID NO: 530413 - RNA, 19 nt, Homo sapiens
  misc_RNA (1)...(19): siRNA sense strand
gagcagguguaccaggaaa

SEQ ID NO: 530414 - RNA, 19 nt, Homo sapiens
  misc_RNA (1)...(19): siRNA sense strand
gugaagaccaugauacgua

SEQ ID NO: 530415 - RNA, 19 nt, Homo sapiens
  misc_RNA (1)...(19): siRNA sense strand
ggaagugcccacccucaaa

SEQ ID NO: 530416 - RNA, 19 nt, Homo sapiens
  misc_RNA (1)...(19): siRNA sense strand
ccaaugaggaccaucugua

SEQ ID NO: 530417 - RNA, 19 nt, Homo sapiens
  misc_RNA (1)...(19): siRNA sense strand
gaucaaaggcaucgaguac

SEQ ID NO: 530418 - RNA, 19 nt, Homo sapiens
  misc_RNA (1)...(19): siRNA sense strand
caaaggcaucgaguacuua

SEQ ID NO: 530419 - RNA, 19 nt, Homo sapiens
  misc_RNA (1)...(19): siRNA sense strand
ggaaauugccauccucaag

SEQ ID NO: 530420 - RNA, 19 nt, Homo sapiens
  misc_RNA (1)...(19): siRNA sense strand
aguauacccugaaggauga

SEQ ID NO: 530421 - RNA, 19 nt, Homo sapiens
  misc_RNA (1)...(19): siRNA sense strand
ggaggaacgcucacuguca

SEQ ID NO: 530422 - RNA, 19 nt, Homo sapiens
  misc_RNA (1)...(19): siRNA sense strand
ggcauggaguccuucauug

SEQ ID NO: 530423 - RNA, 19 nt, Homo sapiens
  misc_RNA (1)...(19): siRNA sense strand
aaauugccauccucaagaa

SEQ ID NO: 530424 - RNA, 19 nt, Homo sapiens
  misc_RNA (1)...(19): siRNA sense strand
gggcauggaguccuucauu

SEQ ID NO: 530425 - RNA, 19 nt, Homo sapiens
  misc_RNA (1)...(19): siRNA sense strand
ccugaaggaugaaauugga

SEQ ID NO: 530426 - RNA, 19 nt, Homo sapiens
  misc_RNA (1)...(19): siRNA sense strand
guacuuacacuaccagaag

SEQ ID NO: 530427 - RNA, 19 nt, Homo sapiens
  misc_RNA (1)...(19): siRNA sense strand
ucaaguuggccuacaauga

SEQ ID NO: 530428 - RNA, 19 nt, Homo sapiens
  misc_RNA (1)...(19): siRNA sense strand
ccuauggugucgucaaguu

SEQ ID NO: 530429 - RNA, 19 nt, Homo sapiens
  misc_RNA (1)...(19): siRNA sense strand
cauccaccgugacaucaaa

SEQ ID NO: 530430 - RNA, 19 nt, Homo sapiens
  misc_RNA (1)...(19): siRNA sense strand
gagcggaucauguguuuac

SEQ ID NO: 530431 - RNA, 19 nt, Homo sapiens
  misc_RNA (1)...(19): siRNA sense strand
gcagguguaccaggaaauu

SEQ ID NO: 530432 - RNA, 19 nt, Homo sapiens
  misc_RNA (1)...(19): siRNA sense strand
caucaagaucgcugacuuu

SEQ ID NO: 530433 - RNA, 19 nt, Homo sapiens
  misc_RNA (1)...(19): siRNA sense strand
gaucauccaccgugacauc

SEQ ID NO: 530434 - RNA, 19 nt, Homo sapiens
  misc_RNA (1)...(19): siRNA sense strand
gcauggaguccuucauugu

SEQ ID NO: 530435 - RNA, 19 nt, Homo sapiens
  misc_RNA (1)...(19): siRNA sense strand
gugacgcgcuccucuccaa

SEQ ID NO: 530436 - RNA, 19 nt, Homo sapiens
  misc_RNA (1)...(19): siRNA sense strand
acgagcggaucauguguuu

SEQ ID NO: 530437 - RNA, 19 nt, Homo sapiens
  misc_RNA (1)...(19): siRNA sense strand
acacuauacugcuuugucu

SEQ ID NO: 530438 - RNA, 19 nt, Homo sapiens
  misc_RNA (1)...(19): siRNA sense strand
ugguggagguccuggauga

SEQ ID NO: 530439 - RNA, 19 nt, Homo sapiens
  misc_RNA (1)...(19): siRNA sense strand
gucagcgccuggaaacuug

SEQ ID NO: 530440 - RNA, 19 nt, Homo sapiens
  misc_RNA (1)...(19): siRNA sense strand
ggacuugaaggaccugauc

SEQ ID NO: 530441 - RNA, 19 nt, Homo sapiens
  misc_RNA (1)...(19): siRNA sense strand
guacaugguguucgaacug

SEQ ID NO: 530442 - RNA, 19 nt, Homo sapiens
  misc_RNA (1)...(19): siRNA sense strand
ggccgacaguggagucuca

SEQ ID NO: 530443 - RNA, 19 nt, Homo sapiens
  misc_RNA (1)...(19): siRNA sense strand
ccucaaaccacucucugaa

SEQ ID NO: 530444 - RNA, 19 nt, Homo sapiens
  misc_RNA (1)...(19): siRNA sense strand
ccaggcccguuucuacuuc

SEQ ID NO: 530445 - RNA, 19 nt, Homo sapiens
  misc_RNA (1)...(19): siRNA sense strand
cccguaugcuggacaagaa

SEQ ID NO: 530446 - RNA, 19 nt, Homo sapiens
  misc_RNA (1)...(19): siRNA sense strand
gcaucgaguacuuacacua

SEQ ID NO: 530447 - RNA, 19 nt, Homo sapiens
  misc_RNA (1)...(19): siRNA sense strand
ugaaggaugaaauuggaaa

SEQ ID NO: 530448 - RNA, 19 nt, Homo sapiens
  misc_RNA (1)...(19): siRNA sense strand
uagcugaggacuugaagga

SEQ ID NO: 530449 - RNA, 19 nt, Homo sapiens
  misc_RNA (1)...(19): siRNA sense strand
gaagugcccacccucaaac

SEQ ID NO: 530450 - RNA, 19 nt, Homo sapiens
  misc_RNA (1)...(19): siRNA sense strand
gguggcagccuggacauga

SEQ ID NO: 530451 - RNA, 19 nt, Homo sapiens
  misc_RNA (1)...(19): siRNA sense strand
caauaccuacuaugcaaug

SEQ ID NO: 530452 - RNA, 19 nt, Homo sapiens
  misc_RNA (1)...(19): siRNA sense strand
acaucaagaucgcugacuu

SEQ ID NO: 530453 - RNA, 19 nt, Homo sapiens
  misc_RNA (1)...(19): siRNA sense strand
ggaucguggugccggaaau

SEQ ID NO: 530454 - RNA, 19 nt, Homo sapiens
  misc_RNA (1)...(19): siRNA sense strand
aaguuggccuacaaugaaa

SEQ ID NO: 530455 - RNA, 19 nt, Homo sapiens
  misc_RNA (1)...(19): siRNA sense strand
gaagaccaugauacguaaa

SEQ ID NO: 530456 - RNA, 19 nt, Homo sapiens
  misc_RNA (1)...(19): siRNA sense strand
cugaagaccaggcccguuu

SEQ ID NO: 530457 - RNA, 19 nt, Homo sapiens
  misc_RNA (1)...(19): siRNA sense strand
guggcagccuggacaugaa

SEQ ID NO: 530458 - RNA, 19 nt, Homo sapiens
  misc_RNA (1)...(19): siRNA sense strand
ugacaauaccuacuaugca

SEQ ID NO: 530459 - RNA, 19 nt, Homo sapiens
  misc_RNA (1)...(19): siRNA sense strand
gcaagcugucucugcaaga

SEQ ID NO: 530460 - RNA, 19 nt, Homo sapiens
  misc_RNA (1)...(19): siRNA sense strand
gaccugaucacccguaugc

SEQ ID NO: 530461 - RNA, 19 nt, Homo sapiens
  misc_RNA (1)...(19): siRNA sense strand
acuauacugcuuugucuuu

SEQ ID NO: 530462 - RNA, 19 nt, Homo sapiens
  misc_RNA (1)...(19): siRNA sense strand
ggcagcagcagcagcgaaa

SEQ ID NO: 530463 - RNA, 19 nt, Homo sapiens
  misc_RNA (1)...(19): siRNA sense strand
ugugagcaaugaauucaag

SEQ ID NO: 530464 - RNA, 19 nt, Homo sapiens
  misc_RNA (1)...(19): siRNA sense strand
ugaggaccaucuguacaug

SEQ ID NO: 530465 - RNA, 19 nt, Homo sapiens
  misc_RNA (1)...(19): siRNA sense strand
gaaggaugaaauuggaaag

SEQ ID NO: 530466 - RNA, 19 nt, Homo sapiens
  misc_RNA (1)...(19): siRNA sense strand
auacguaaacgcuccuuug

SEQ ID NO: 530467 - RNA, 19 nt, Homo sapiens
  misc_RNA (1)...(19): siRNA sense strand
caaugaggaccaucuguac

SEQ ID NO: 530468 - RNA, 19 nt, Homo sapiens
  misc_RNA (1)...(19): siRNA sense strand
uaccuacuaugcaaugaag

SEQ ID NO: 530469 - RNA, 19 nt, Homo sapiens
  misc_RNA (1)...(19): siRNA sense strand
ggacgagcggaucaugugu

SEQ ID NO: 530470 - RNA, 19 nt, Homo sapiens
  misc_RNA (1)...(19): siRNA sense strand
cuauacugcuuugucuuug

SEQ ID NO: 530471 - RNA, 19 nt, Homo sapiens
  misc_RNA (1)...(19): siRNA sense strand
gugacacuauacugcuuug

SEQ ID NO: 530472 - RNA, 19 nt, Homo sapiens
  misc_RNA (1)...(19): siRNA sense strand
ugacuuuggugugagcaau

SEQ ID NO: 530473 - RNA, 19 nt, Homo sapiens
  misc_RNA (1)...(19): siRNA sense strand
ggugugagcaaugaauuca

SEQ ID NO: 530474 - RNA, 19 nt, Homo sapiens
  misc_RNA (1)...(19): siRNA sense strand
cauggaguccuucauugug

SEQ ID NO: 530475 - RNA, 19 nt, Homo sapiens
  misc_RNA (1)...(19): siRNA sense strand
gaagaccaggcccguuucu

SEQ ID NO: 530476 - RNA, 19 nt, Homo sapiens
  misc_RNA (1)...(19): siRNA sense strand
gacgagcggaucauguguu

SEQ ID NO: 530477 - RNA, 19 nt, Homo sapiens
  misc_RNA (1)...(19): siRNA sense strand
ugucagcgccuggaaacuu

SEQ ID NO: 530478 - RNA, 19 nt, Homo sapiens
  misc_RNA (1)...(19): siRNA sense strand
gauacguaaacgcuccuuu

SEQ ID NO: 530479 - RNA, 19 nt, Homo sapiens
  misc_RNA (1)...(19): siRNA sense strand
caucgaguacuuacacuac

SEQ ID NO: 530480 - RNA, 19 nt, Homo sapiens
  misc_RNA (1)...(19): siRNA sense strand
ucacccguaugcuggacaa

SEQ ID NO: 530481 - RNA, 19 nt, Homo sapiens
  misc_RNA (1)...(19): siRNA sense strand
cgacauagcugaggacuug

SEQ ID NO: 530482 - RNA, 19 nt, Homo sapiens
  misc_RNA (1)...(19): siRNA sense strand
gacaauaccuacuaugcaa

SEQ ID NO: 530483 - RNA, 19 nt, Homo sapiens
  misc_RNA (1)...(19): siRNA sense strand
gggaaggccuuggauguuu

SEQ ID NO: 530484 - RNA, 19 nt, Homo sapiens
  misc_RNA (1)...(19): siRNA sense strand
caagaucgcugacuuuggu

SEQ ID NO: 530485 - RNA, 19 nt, Homo sapiens
  misc_RNA (1)...(19): siRNA sense strand
gaaauugccauccucaaga

SEQ ID NO: 530486 - RNA, 19 nt, Homo sapiens
  misc_RNA (1)...(19): siRNA sense strand
ugaagaccaugauacguaa

SEQ ID NO: 530487 - RNA, 19 nt, Homo sapiens
  misc_RNA (1)...(19): siRNA sense strand
ucaaaccacucucugaaga

SEQ ID NO: 530488 - RNA, 19 nt, Homo sapiens
  misc_RNA (1)...(19): siRNA sense strand
caaguuggccuacaaugaa

SEQ ID NO: 530489 - RNA, 19 nt, Homo sapiens
  misc_RNA (1)...(19): siRNA sense strand
caaugaaggugcuguccaa

SEQ ID NO: 530490 - RNA, 19 nt, Homo sapiens
  misc_RNA (1)...(19): siRNA sense strand
acaguaagaucaagaguca

SEQ ID NO: 530491 - RNA, 19 nt, Homo sapiens
  misc_RNA (1)...(19): siRNA sense strand
ggaaggccuuggauguuug

SEQ ID NO: 530492 - RNA, 19 nt, Homo sapiens
  misc_RNA (1)...(19): siRNA sense strand
ucaaaggcaucgaguacuu

SEQ ID NO: 530493 - RNA, 19 nt, Homo sapiens
  misc_RNA (1)...(19): siRNA sense strand
gagcagguguaccaggaaa

SEQ ID NO: 530494 - RNA, 19 nt, Homo sapiens
  misc_RNA (1)...(19): siRNA sense strand
gugaagaccaugauacgua

SEQ ID NO: 530495 - RNA, 19 nt, Homo sapiens
  misc_RNA (1)...(19): siRNA sense strand
ggaagugcccacccucaaa

SEQ ID NO: 530496 - RNA, 19 nt, Homo sapiens
  misc_RNA (1)...(19): siRNA sense strand
ccaaugaggaccaucugua

SEQ ID NO: 530497 - RNA, 19 nt, Homo sapiens
  misc_RNA (1)...(19): siRNA sense strand
gaucaaaggcaucgaguac

SEQ ID NO: 530498 - RNA, 19 nt, Homo sapiens
  misc_RNA (1)...(19): siRNA sense strand
caaaggcaucgaguacuua

SEQ ID NO: 530499 - RNA, 19 nt, Homo sapiens
  misc_RNA (1)...(19): siRNA sense strand
ggaaauugccauccucaag

SEQ ID NO: 530500 - RNA, 19 nt, Homo sapiens
  misc_RNA (1)...(19): siRNA sense strand
aguauacccugaaggauga

SEQ ID NO: 530501 - RNA, 19 nt, Homo sapiens
  misc_RNA (1)...(19): siRNA sense strand
ggaggaacgcucacuguca

SEQ ID NO: 530502 - RNA, 19 nt, Homo sapiens
  misc_RNA (1)...(19): siRNA sense strand
ggcauggaguccuucauug

SEQ ID NO: 530503 - RNA, 19 nt, Homo sapiens
  misc_RNA (1)...(19): siRNA sense strand
aaauugccauccucaagaa

SEQ ID NO: 530504 - RNA, 19 nt, Homo sapiens
  misc_RNA (1)...(19): siRNA sense strand
gggcauggaguccuucauu

SEQ ID NO: 530505 - RNA, 19 nt, Homo sapiens
  misc_RNA (1)...(19): siRNA sense strand
ccugaaggaugaaauugga

SEQ ID NO: 530506 - RNA, 19 nt, Homo sapiens
  misc_RNA (1)...(19): siRNA sense strand
guacuuacacuaccagaag

SEQ ID NO: 530507 - RNA, 19 nt, Homo sapiens
  misc_RNA (1)...(19): siRNA sense strand
ucaaguuggccuacaauga

SEQ ID NO: 530508 - RNA, 19 nt, Homo sapiens
  misc_RNA (1)...(19): siRNA sense strand
ccuauggugucgucaaguu

SEQ ID NO: 530509 - RNA, 19 nt, Homo sapiens
  misc_RNA (1)...(19): siRNA sense strand
cauccaccgugacaucaaa

SEQ ID NO: 530510 - RNA, 19 nt, Homo sapiens
  misc_RNA (1)...(19): siRNA sense strand
gagcggaucauguguuuac

SEQ ID NO: 530511 - RNA, 19 nt, Homo sapiens
  misc_RNA (1)...(19): siRNA sense strand
gcagguguaccaggaaauu

SEQ ID NO: 530512 - RNA, 19 nt, Homo sapiens
  misc_RNA (1)...(19): siRNA sense strand
caucaagaucgcugacuuu

SEQ ID NO: 530513 - RNA, 19 nt, Homo sapiens
  misc_RNA (1)...(19): siRNA sense strand
gaucauccaccgugacauc

SEQ ID NO: 530514 - RNA, 19 nt, Homo sapiens
  misc_RNA (1)...(19): siRNA sense strand
gcauggaguccuucauugu

SEQ ID NO: 530515 - RNA, 19 nt, Homo sapiens
  misc_RNA (1)...(19): siRNA sense strand
gugacgcgcuccucuccaa

SEQ ID NO: 530516 - RNA, 19 nt, Homo sapiens
  misc_RNA (1)...(19): siRNA sense strand
acgagcggaucauguguuu

SEQ ID NO: 530517 - RNA, 19 nt, Homo sapiens
  misc_RNA (1)...(19): siRNA sense strand
acacuauacugcuuugucu

SEQ ID NO: 530518 - RNA, 19 nt, Homo sapiens
  misc_RNA (1)...(19): siRNA sense strand
ugguggagguccuggauga

SEQ ID NO: 530519 - RNA, 19 nt, Homo sapiens
  misc_RNA (1)...(19): siRNA sense strand
gucagcgccuggaaacuug

SEQ ID NO: 530520 - RNA, 19 nt, Homo sapiens
  misc_RNA (1)...(19): siRNA sense strand
ggacuugaaggaccugauc

SEQ ID NO: 530521 - RNA, 19 nt, Homo sapiens
  misc_RNA (1)...(19): siRNA sense strand
guacaugguguucgaacug

SEQ ID NO: 530522 - RNA, 19 nt, Homo sapiens
  misc_RNA (1)...(19): siRNA sense strand
ggccgacaguggagucuca

SEQ ID NO: 530523 - RNA, 19 nt, Homo sapiens
  misc_RNA (1)...(19): siRNA sense strand
ccucaaaccacucucugaa

SEQ ID NO: 530524 - RNA, 19 nt, Homo sapiens
  misc_RNA (1)...(19): siRNA sense strand
ccaggcccguuucuacuuc

SEQ ID NO: 530525 - RNA, 19 nt, Homo sapiens
  misc_RNA (1)...(19): siRNA sense strand
cccguaugcuggacaagaa

SEQ ID NO: 530526 - RNA, 19 nt, Homo sapiens
  misc_RNA (1)...(19): siRNA sense strand
gcaucgaguacuuacacua

SEQ ID NO: 530527 - RNA, 19 nt, Homo sapiens
  misc_RNA (1)...(19): siRNA sense strand
ugaaggaugaaauuggaaa

SEQ ID NO: 530528 - RNA, 19 nt, Homo sapiens
  misc_RNA (1)...(19): siRNA sense strand
uagcugaggacuugaagga

SEQ ID NO: 530529 - RNA, 19 nt, Homo sapiens
  misc_RNA (1)...(19): siRNA sense strand
gaagugcccacccucaaac

SEQ ID NO: 530530 - RNA, 19 nt, Homo sapiens
  misc_RNA (1)...(19): siRNA sense strand
gguggcagccuggacauga

SEQ ID NO: 530531 - RNA, 19 nt, Homo sapiens
  misc_RNA (1)...(19): siRNA sense strand
caauaccuacuaugcaaug

SEQ ID NO: 530532 - RNA, 19 nt, Homo sapiens
  misc_RNA (1)...(19): siRNA sense strand
acaucaagaucgcugacuu

SEQ ID NO: 530533 - RNA, 19 nt, Homo sapiens
  misc_RNA (1)...(19): siRNA sense strand
ggaucguggugccggaaau

SEQ ID NO: 530534 - RNA, 19 nt, Homo sapiens
  misc_RNA (1)...(19): siRNA sense strand
aaguuggccuacaaugaaa

SEQ ID NO: 530535 - RNA, 19 nt, Homo sapiens
  misc_RNA (1)...(19): siRNA sense strand
gaagaccaugauacguaaa

SEQ ID NO: 530536 - RNA, 19 nt, Homo sapiens
  misc_RNA (1)...(19): siRNA sense strand
cugaagaccaggcccguuu

SEQ ID NO: 530537 - RNA, 19 nt, Homo sapiens
  misc_RNA (1)...(19): siRNA sense strand
guggcagccuggacaugaa

SEQ ID NO: 530538 - RNA, 19 nt, Homo sapiens
  misc_RNA (1)...(19): siRNA sense strand
ugacaauaccuacuaugca

SEQ ID NO: 530539 - RNA, 19 nt, Homo sapiens
  misc_RNA (1)...(19): siRNA sense strand
gcaagcugucucugcaaga

SEQ ID NO: 530540 - RNA, 19 nt, Homo sapiens
  misc_RNA (1)...(19): siRNA sense strand
gaccugaucacccguaugc

SEQ ID NO: 530541 - RNA, 19 nt, Homo sapiens
  misc_RNA (1)...(19): siRNA sense strand
acuauacugcuuugucuuu

SEQ ID NO: 530542 - RNA, 19 nt, Homo sapiens
  misc_RNA (1)...(19): siRNA sense strand
ggcagcagcagcagcgaaa

SEQ ID NO: 530543 - RNA, 19 nt, Homo sapiens
  misc_RNA (1)...(19): siRNA sense strand
ugugagcaaugaauucaag

SEQ ID NO: 530544 - RNA, 19 nt, Homo sapiens
  misc_RNA (1)...(19): siRNA sense strand
ugaggaccaucuguacaug

SEQ ID NO: 530545 - RNA, 19 nt, Homo sapiens
  misc_RNA (1)...(19): siRNA sense strand
gaaggaugaaauuggaaag

SEQ ID NO: 530546 - RNA, 19 nt, Homo sapiens
  misc_RNA (1)...(19): siRNA sense strand
auacguaaacgcuccuuug

SEQ ID NO: 530547 - RNA, 19 nt, Homo sapiens
  misc_RNA (1)...(19): siRNA sense strand
caaugaggaccaucuguac

SEQ ID NO: 530548 - RNA, 19 nt, Homo sapiens
  misc_RNA (1)...(19): siRNA sense strand
uaccuacuaugcaaugaag

SEQ ID NO: 530549 - RNA, 19 nt, Homo sapiens
  misc_RNA (1)...(19): siRNA sense strand
ggacgagcggaucaugugu

SEQ ID NO: 530550 - RNA, 19 nt, Homo sapiens
  misc_RNA (1)...(19): siRNA sense strand
cuauacugcuuugucuuug

SEQ ID NO: 530551 - RNA, 19 nt, Homo sapiens
  misc_RNA (1)...(19): siRNA sense strand
gugacacuauacugcuuug

SEQ ID NO: 530552 - RNA, 19 nt, Homo sapiens
  misc_RNA (1)...(19): siRNA sense strand
ugacuuuggugugagcaau

SEQ ID NO: 530553 - RNA, 19 nt, Homo sapiens
  misc_RNA (1)...(19): siRNA sense strand
ggugugagcaaugaauuca

SEQ ID NO: 530554 - RNA, 19 nt, Homo sapiens
  misc_RNA (1)...(19): siRNA sense strand
cauggaguccuucauugug

SEQ ID NO: 530555 - RNA, 19 nt, Homo sapiens
  misc_RNA (1)...(19): siRNA sense strand
gaagaccaggcccguuucu

SEQ ID NO: 530556 - RNA, 19 nt, Homo sapiens
  misc_RNA (1)...(19): siRNA sense strand
gacgagcggaucauguguu

SEQ ID NO: 530557 - RNA, 19 nt, Homo sapiens
  misc_RNA (1)...(19): siRNA sense strand
ugucagcgccuggaaacuu

SEQ ID NO: 530558 - RNA, 19 nt, Homo sapiens
  misc_RNA (1)...(19): siRNA sense strand
gauacguaaacgcuccuuu

SEQ ID NO: 530559 - RNA, 19 nt, Homo sapiens
  misc_RNA (1)...(19): siRNA sense strand
caucgaguacuuacacuac

SEQ ID NO: 530560 - RNA, 19 nt, Homo sapiens
  misc_RNA (1)...(19): siRNA sense strand
ucacccguaugcuggacaa

SEQ ID NO: 530561 - RNA, 19 nt, Homo sapiens
  misc_RNA (1)...(19): siRNA sense strand
cgacauagcugaggacuug

SEQ ID NO: 530562 - RNA, 19 nt, Homo sapiens
  misc_RNA (1)...(19): siRNA sense strand
gacaauaccuacuaugcaa

SEQ ID NO: 530563 - RNA, 19 nt, Homo sapiens
  misc_RNA (1)...(19): siRNA sense strand
gggaaggccuuggauguuu

SEQ ID NO: 530564 - RNA, 19 nt, Homo sapiens
  misc_RNA (1)...(19): siRNA sense strand
caagaucgcugacuuuggu

SEQ ID NO: 530565 - RNA, 19 nt, Homo sapiens
  misc_RNA (1)...(19): siRNA sense strand
gaaauugccauccucaaga

SEQ ID NO: 530566 - RNA, 19 nt, Homo sapiens
  misc_RNA (1)...(19): siRNA sense strand
ugaagaccaugauacguaa

SEQ ID NO: 530567 - RNA, 19 nt, Homo sapiens
  misc_RNA (1)...(19): siRNA sense strand
ucaaaccacucucugaaga

SEQ ID NO: 530568 - RNA, 19 nt, Homo sapiens
  misc_RNA (1)...(19): siRNA sense strand
caaguuggccuacaaugaa

SEQ ID NO: 530569 - RNA, 19 nt, Homo sapiens
  misc_RNA (1)...(19): siRNA sense strand
caaugaaggugcuguccaa

SEQ ID NO: 530570 - RNA, 19 nt, Homo sapiens
  misc_RNA (1)...(19): siRNA sense strand
acaguaagaucaagaguca

SEQ ID NO: 530571 - RNA, 19 nt, Homo sapiens
  misc_RNA (1)...(19): siRNA sense strand
ggaaggccuuggauguuug

SEQ ID NO: 530572 - RNA, 19 nt, Homo sapiens
  misc_RNA (1)...(19): siRNA sense strand
ucaaaggcaucgaguacuu

SEQ ID NO: 530573 - RNA, 19 nt, Homo sapiens
  misc_RNA (1)...(19): siRNA sense strand
gagcagguguaccaggaaa

SEQ ID NO: 530574 - RNA, 19 nt, Homo sapiens
  misc_RNA (1)...(19): siRNA sense strand
gugaagaccaugauacgua

SEQ ID NO: 530575 - RNA, 19 nt, Homo sapiens
  misc_RNA (1)...(19): siRNA sense strand
ggaagugcccacccucaaa

SEQ ID NO: 530576 - RNA, 19 nt, Homo sapiens
  misc_RNA (1)...(19): siRNA sense strand
ccaaugaggaccaucugua

SEQ ID NO: 530577 - RNA, 19 nt, Homo sapiens
  misc_RNA (1)...(19): siRNA sense strand
gaucaaaggcaucgaguac

SEQ ID NO: 530578 - RNA, 19 nt, Homo sapiens
  misc_RNA (1)...(19): siRNA sense strand
caaaggcaucgaguacuua

SEQ ID NO: 530579 - RNA, 19 nt, Homo sapiens
  misc_RNA (1)...(19): siRNA sense strand
ggaaauugccauccucaag

SEQ ID NO: 530580 - RNA, 19 nt, Homo sapiens
  misc_RNA (1)...(19): siRNA sense strand
aguauacccugaaggauga

SEQ ID NO: 530581 - RNA, 19 nt, Homo sapiens
  misc_RNA (1)...(19): siRNA sense strand
ggaggaacgcucacuguca

SEQ ID NO: 530582 - RNA, 19 nt, Homo sapiens
  misc_RNA (1)...(19): siRNA sense strand
ggcauggaguccuucauug

SEQ ID NO: 530583 - RNA, 19 nt, Homo sapiens
  misc_RNA (1)...(19): siRNA sense strand
aaauugccauccucaagaa

SEQ ID NO: 530584 - RNA, 19 nt, Homo sapiens
  misc_RNA (1)...(19): siRNA sense strand
gggcauggaguccuucauu

SEQ ID NO: 530585 - RNA, 19 nt, Homo sapiens
  misc_RNA (1)...(19): siRNA sense strand
ccugaaggaugaaauugga

SEQ ID NO: 530586 - RNA, 19 nt, Homo sapiens
  misc_RNA (1)...(19): siRNA sense strand
guacuuacacuaccagaag

SEQ ID NO: 530587 - RNA, 19 nt, Homo sapiens
  misc_RNA (1)...(19): siRNA sense strand
ucaaguuggccuacaauga

SEQ ID NO: 530588 - RNA, 19 nt, Homo sapiens
  misc_RNA (1)...(19): siRNA sense strand
ccuauggugucgucaaguu

SEQ ID NO: 530589 - RNA, 19 nt, Homo sapiens
  misc_RNA (1)...(19): siRNA sense strand
cauccaccgugacaucaaa

SEQ ID NO: 530590 - RNA, 19 nt, Homo sapiens
  misc_RNA (1)...(19): siRNA sense strand
gagcggaucauguguuuac

SEQ ID NO: 530591 - RNA, 19 nt, Homo sapiens
  misc_RNA (1)...(19): siRNA sense strand
gcagguguaccaggaaauu

SEQ ID NO: 530592 - RNA, 19 nt, Homo sapiens
  misc_RNA (1)...(19): siRNA sense strand
caucaagaucgcugacuuu

SEQ ID NO: 530593 - RNA, 19 nt, Homo sapiens
  misc_RNA (1)...(19): siRNA sense strand
gaucauccaccgugacauc

SEQ ID NO: 530594 - RNA, 19 nt, Homo sapiens
  misc_RNA (1)...(19): siRNA sense strand
gcauggaguccuucauugu

SEQ ID NO: 530595 - RNA, 19 nt, Homo sapiens
  misc_RNA (1)...(19): siRNA sense strand
gugacgcgcuccucuccaa

SEQ ID NO: 530596 - RNA, 19 nt, Homo sapiens
  misc_RNA (1)...(19): siRNA sense strand
acgagcggaucauguguuu

SEQ ID NO: 530597 - RNA, 19 nt, Homo sapiens
  misc_RNA (1)...(19): siRNA sense strand
acacuauacugcuuugucu

SEQ ID NO: 530598 - RNA, 19 nt, Homo sapiens
  misc_RNA (1)...(19): siRNA sense strand
ugguggagguccuggauga

SEQ ID NO: 530599 - RNA, 19 nt, Homo sapiens
  misc_RNA (1)...(19): siRNA sense strand
gucagcgccuggaaacuug

SEQ ID NO: 530600 - RNA, 19 nt, Homo sapiens
  misc_RNA (1)...(19): siRNA sense strand
ggacuugaaggaccugauc

SEQ ID NO: 530601 - RNA, 19 nt, Homo sapiens
  misc_RNA (1)...(19): siRNA sense strand
guacaugguguucgaacug

SEQ ID NO: 530602 - RNA, 19 nt, Homo sapiens
  misc_RNA (1)...(19): siRNA sense strand
ggccgacaguggagucuca

SEQ ID NO: 530603 - RNA, 19 nt, Homo sapiens
  misc_RNA (1)...(19): siRNA sense strand
ccucaaaccacucucugaa

SEQ ID NO: 530604 - RNA, 19 nt, Homo sapiens
  misc_RNA (1)...(19): siRNA sense strand
ccaggcccguuucuacuuc

SEQ ID NO: 530605 - RNA, 19 nt, Homo sapiens
  misc_RNA (1)...(19): siRNA sense strand
cccguaugcuggacaagaa

SEQ ID NO: 530606 - RNA, 19 nt, Homo sapiens
  misc_RNA (1)...(19): siRNA sense strand
gcaucgaguacuuacacua

SEQ ID NO: 530607 - RNA, 19 nt, Homo sapiens
  misc_RNA (1)...(19): siRNA sense strand
ugaaggaugaaauuggaaa

SEQ ID NO: 530608 - RNA, 19 nt, Homo sapiens
  misc_RNA (1)...(19): siRNA sense strand
uagcugaggacuugaagga

SEQ ID NO: 530609 - RNA, 19 nt, Homo sapiens
  misc_RNA (1)...(19): siRNA sense strand
gaagugcccacccucaaac

SEQ ID NO: 530610 - RNA, 19 nt, Homo sapiens
  misc_RNA (1)...(19): siRNA sense strand
gguggcagccuggacauga

SEQ ID NO: 530611 - RNA, 19 nt, Homo sapiens
  misc_RNA (1)...(19): siRNA sense strand
caauaccuacuaugcaaug

SEQ ID NO: 530612 - RNA, 19 nt, Homo sapiens
  misc_RNA (1)...(19): siRNA sense strand
acaucaagaucgcugacuu

SEQ ID NO: 530613 - RNA, 19 nt, Homo sapiens
  misc_RNA (1)...(19): siRNA sense strand
ggaucguggugccggaaau

SEQ ID NO: 530614 - RNA, 19 nt, Homo sapiens
  misc_RNA (1)...(19): siRNA sense strand
aaguuggccuacaaugaaa

SEQ ID NO: 530615 - RNA, 19 nt, Homo sapiens
  misc_RNA (1)...(19): siRNA sense strand
gaagaccaugauacguaaa

SEQ ID NO: 530616 - RNA, 19 nt, Homo sapiens
  misc_RNA (1)...(19): siRNA sense strand
cugaagaccaggcccguuu

SEQ ID NO: 530617 - RNA, 19 nt, Homo sapiens
  misc_RNA (1)...(19): siRNA sense strand
guggcagccuggacaugaa

SEQ ID NO: 530618 - RNA, 19 nt, Homo sapiens
  misc_RNA (1)...(19): siRNA sense strand
ugacaauaccuacuaugca

SEQ ID NO: 530619 - RNA, 19 nt, Homo sapiens
  misc_RNA (1)...(19): siRNA sense strand
gcaagcugucucugcaaga

SEQ ID NO: 530620 - RNA, 19 nt, Homo sapiens
  misc_RNA (1)...(19): siRNA sense strand
gaccugaucacccguaugc

SEQ ID NO: 530621 - RNA, 19 nt, Homo sapiens
  misc_RNA (1)...(19): siRNA sense strand
acuauacugcuuugucuuu

SEQ ID NO: 530622 - RNA, 19 nt, Homo sapiens
  misc_RNA (1)...(19): siRNA sense strand
ggcagcagcagcagcgaaa

SEQ ID NO: 530623 - RNA, 19 nt, Homo sapiens
  misc_RNA (1)...(19): siRNA sense strand
ugugagcaaugaauucaag

SEQ ID NO: 530624 - RNA, 19 nt, Homo sapiens
  misc_RNA (1)...(19): siRNA sense strand
ugaggaccaucuguacaug

SEQ ID NO: 530625 - RNA, 19 nt, Homo sapiens
  misc_RNA (1)...(19): siRNA sense strand
gaaggaugaaauuggaaag

SEQ ID NO: 530626 - RNA, 19 nt, Homo sapiens
  misc_RNA (1)...(19): siRNA sense strand
auacguaaacgcuccuuug

SEQ ID NO: 530627 - RNA, 19 nt, Homo sapiens
  misc_RNA (1)...(19): siRNA sense strand
caaugaggaccaucuguac

SEQ ID NO: 530628 - RNA, 19 nt, Homo sapiens
  misc_RNA (1)...(19): siRNA sense strand
uaccuacuaugcaaugaag

SEQ ID NO: 530629 - RNA, 19 nt, Homo sapiens
  misc_RNA (1)...(19): siRNA sense strand
ggacgagcggaucaugugu

SEQ ID NO: 530630 - RNA, 19 nt, Homo sapiens
  misc_RNA (1)...(19): siRNA sense strand
cuauacugcuuugucuuug

SEQ ID NO: 530631 - RNA, 19 nt, Homo sapiens
  misc_RNA (1)...(19): siRNA sense strand
gugacacuauacugcuuug

SEQ ID NO: 530632 - RNA, 19 nt, Homo sapiens
  misc_RNA (1)...(19): siRNA sense strand
ugacuuuggugugagcaau

SEQ ID NO: 530633 - RNA, 19 nt, Homo sapiens
  misc_RNA (1)...(19): siRNA sense strand
ggugugagcaaugaauuca

SEQ ID NO: 530634 - RNA, 19 nt, Homo sapiens
  misc_RNA (1)...(19): siRNA sense strand
cauggaguccuucauugug

SEQ ID NO: 530635 - RNA, 19 nt, Homo sapiens
  misc_RNA (1)...(19): siRNA sense strand
gaagaccaggcccguuucu

SEQ ID NO: 530636 - RNA, 19 nt, Homo sapiens
  misc_RNA (1)...(19): siRNA sense strand
gacgagcggaucauguguu

SEQ ID NO: 530637 - RNA, 19 nt, Homo sapiens
  misc_RNA (1)...(19): siRNA sense strand
ugucagcgccuggaaacuu

SEQ ID NO: 530638 - RNA, 19 nt, Homo sapiens
  misc_RNA (1)...(19): siRNA sense strand
gauacguaaacgcuccuuu

SEQ ID NO: 530639 - RNA, 19 nt, Homo sapiens
  misc_RNA (1)...(19): siRNA sense strand
caucgaguacuuacacuac

SEQ ID NO: 530640 - RNA, 19 nt, Homo sapiens
  misc_RNA (1)...(19): siRNA sense strand
ucacccguaugcuggacaa

SEQ ID NO: 530641 - RNA, 19 nt, Homo sapiens
  misc_RNA (1)...(19): siRNA sense strand
gacauuaucugcaacaaau

SEQ ID NO: 530642 - RNA, 19 nt, Homo sapiens
  misc_RNA (1)...(19): siRNA sense strand
caacaaaugccaagacaaa

SEQ ID NO: 530643 - RNA, 19 nt, Homo sapiens
  misc_RNA (1)...(19): siRNA sense strand
cuaggaagauguucuguaa

SEQ ID NO: 530644 - RNA, 19 nt, Homo sapiens
  misc_RNA (1)...(19): siRNA sense strand
cuacagcgaucccacauuu

SEQ ID NO: 530645 - RNA, 19 nt, Homo sapiens
  misc_RNA (1)...(19): siRNA sense strand
ccacuaggcugaugaagga

SEQ ID NO: 530646 - RNA, 19 nt, Homo sapiens
  misc_RNA (1)...(19): siRNA sense strand
gcauaagguuugugacauu

SEQ ID NO: 530647 - RNA, 19 nt, Homo sapiens
  misc_RNA (1)...(19): siRNA sense strand
caaaguccauugaggugua

SEQ ID NO: 530648 - RNA, 19 nt, Homo sapiens
  misc_RNA (1)...(19): siRNA sense strand
guaccugccugaagaguug

SEQ ID NO: 530649 - RNA, 19 nt, Homo sapiens
  misc_RNA (1)...(19): siRNA sense strand
cauaagguuugugacauua

SEQ ID NO: 530650 - RNA, 19 nt, Homo sapiens
  misc_RNA (1)...(19): siRNA sense strand
cauagaggauaaagcagua

SEQ ID NO: 530651 - RNA, 19 nt, Homo sapiens
  misc_RNA (1)...(19): siRNA sense strand
ggucaacgcugcucuucug

SEQ ID NO: 530652 - RNA, 19 nt, Homo sapiens
  misc_RNA (1)...(19): siRNA sense strand
caagaaacauagcauaagg

SEQ ID NO: 530653 - RNA, 19 nt, Homo sapiens
  misc_RNA (1)...(19): siRNA sense strand
caaaugaugugcgagaugu

SEQ ID NO: 530654 - RNA, 19 nt, Homo sapiens
  misc_RNA (1)...(19): siRNA sense strand
cugacacgcugcaggauua

SEQ ID NO: 530655 - RNA, 19 nt, Homo sapiens
  misc_RNA (1)...(19): siRNA sense strand
caaaugccaagacaaauga

SEQ ID NO: 530656 - RNA, 19 nt, Homo sapiens
  misc_RNA (1)...(19): siRNA sense strand
gaugaaggauuugggcuau

SEQ ID NO: 530657 - RNA, 19 nt, Homo sapiens
  misc_RNA (1)...(19): siRNA sense strand
uaccaaggcugucauuuua

SEQ ID NO: 530658 - RNA, 19 nt, Homo sapiens
  misc_RNA (1)...(19): siRNA sense strand
aggaagauguucuguaaga

SEQ ID NO: 530659 - RNA, 19 nt, Homo sapiens
  misc_RNA (1)...(19): siRNA sense strand
gagauucaucgguucaaua

SEQ ID NO: 530660 - RNA, 19 nt, Homo sapiens
  misc_RNA (1)...(19): siRNA sense strand
gagccgcugucgagugauu

SEQ ID NO: 530661 - RNA, 19 nt, Homo sapiens
  misc_RNA (1)...(19): siRNA sense strand
gggcaggugaggagcauua

SEQ ID NO: 530662 - RNA, 19 nt, Homo sapiens
  misc_RNA (1)...(19): siRNA sense strand
guacagcgccuacaacaac

SEQ ID NO: 530663 - RNA, 19 nt, Homo sapiens
  misc_RNA (1)...(19): siRNA sense strand
gaggcaauggugacuauuu

SEQ ID NO: 530664 - RNA, 19 nt, Homo sapiens
  misc_RNA (1)...(19): siRNA sense strand
ccaaggcugucauuuuaua

SEQ ID NO: 530665 - RNA, 19 nt, Homo sapiens
  misc_RNA (1)...(19): siRNA sense strand
uugagaagcuuccaguaga

SEQ ID NO: 530666 - RNA, 19 nt, Homo sapiens
  misc_RNA (1)...(19): siRNA sense strand
gaagagugggcaauccuau

SEQ ID NO: 530667 - RNA, 19 nt, Homo sapiens
  misc_RNA (1)...(19): siRNA sense strand
ggcaaaggcuacaaguaca

SEQ ID NO: 530668 - RNA, 19 nt, Homo sapiens
  misc_RNA (1)...(19): siRNA sense strand
cacucuggcucacaucaua

SEQ ID NO: 530669 - RNA, 19 nt, Homo sapiens
  misc_RNA (1)...(19): siRNA sense strand
gcaaaggcuacaaguacaa

SEQ ID NO: 530670 - RNA, 19 nt, Homo sapiens
  misc_RNA (1)...(19): siRNA sense strand
uagaggcaauggugacuau

SEQ ID NO: 530671 - RNA, 19 nt, Homo sapiens
  misc_RNA (1)...(19): siRNA sense strand
gcaagaaacauagcauaag

SEQ ID NO: 530672 - RNA, 19 nt, Homo sapiens
  misc_RNA (1)...(19): siRNA sense strand
gaucccacauuuuauauga

SEQ ID NO: 530673 - RNA, 19 nt, Homo sapiens
  misc_RNA (1)...(19): siRNA sense strand
aggaguaccugccugaaga

SEQ ID NO: 530674 - RNA, 19 nt, Homo sapiens
  misc_RNA (1)...(19): siRNA sense strand
cagcaagaaacauagcaua

SEQ ID NO: 530675 - RNA, 19 nt, Homo sapiens
  misc_RNA (1)...(19): siRNA sense strand
caguagacacccuggcuua

SEQ ID NO: 530676 - RNA, 19 nt, Homo sapiens
  misc_RNA (1)...(19): siRNA sense strand
cacggaggcuugucagguu

SEQ ID NO: 530677 - RNA, 19 nt, Homo sapiens
  misc_RNA (1)...(19): siRNA sense strand
agguuaagcucuaggaaga

SEQ ID NO: 530678 - RNA, 19 nt, Homo sapiens
  misc_RNA (1)...(19): siRNA sense strand
guucauagaggauaaagca

SEQ ID NO: 530679 - RNA, 19 nt, Homo sapiens
  misc_RNA (1)...(19): siRNA sense strand
cuaggcugaugaaggauuu

SEQ ID NO: 530680 - RNA, 19 nt, Homo sapiens
  misc_RNA (1)...(19): siRNA sense strand
guuaagcucuaggaagaug

SEQ ID NO: 530681 - RNA, 19 nt, Homo sapiens
  misc_RNA (1)...(19): siRNA sense strand
ggguagauuucuucaagca

SEQ ID NO: 530682 - RNA, 19 nt, Homo sapiens
  misc_RNA (1)...(19): siRNA sense strand
uaagguuugugacauuauc

SEQ ID NO: 530683 - RNA, 19 nt, Homo sapiens
  misc_RNA (1)...(19): siRNA sense strand
ccagaacgccucccucuac

SEQ ID NO: 530684 - RNA, 19 nt, Homo sapiens
  misc_RNA (1)...(19): siRNA sense strand
agauucaucgguucaauaa

SEQ ID NO: 530685 - RNA, 19 nt, Homo sapiens
  misc_RNA (1)...(19): siRNA sense strand
gugaggagcauuacaacug

SEQ ID NO: 530686 - RNA, 19 nt, Homo sapiens
  misc_RNA (1)...(19): siRNA sense strand
acaaaugccaagacaaaug

SEQ ID NO: 530687 - RNA, 19 nt, Homo sapiens
  misc_RNA (1)...(19): siRNA sense strand
ccauguucauagaggauaa

SEQ ID NO: 530688 - RNA, 19 nt, Homo sapiens
  misc_RNA (1)...(19): siRNA sense strand
cugagccgcugucgaguga

SEQ ID NO: 530689 - RNA, 19 nt, Homo sapiens
  misc_RNA (1)...(19): siRNA sense strand
gacaaaugaugugcgagau

SEQ ID NO: 530690 - RNA, 19 nt, Homo sapiens
  misc_RNA (1)...(19): siRNA sense strand
gcaauggugacuauuuuaa

SEQ ID NO: 530691 - RNA, 19 nt, Homo sapiens
  misc_RNA (1)...(19): siRNA sense strand
agaaacauagcauaagguu

SEQ ID NO: 530692 - RNA, 19 nt, Homo sapiens
  misc_RNA (1)...(19): siRNA sense strand
ugaaggauuugggcuaugg

SEQ ID NO: 530693 - RNA, 19 nt, Homo sapiens
  misc_RNA (1)...(19): siRNA sense strand
gucgagugauuguucuuga

SEQ ID NO: 530694 - RNA, 19 nt, Homo sapiens
  misc_RNA (1)...(19): siRNA sense strand
ugacauuaucugcaacaaa

SEQ ID NO: 530695 - RNA, 19 nt, Homo sapiens
  misc_RNA (1)...(19): siRNA sense strand
gcaacagcaagaaacauag

SEQ ID NO: 530696 - RNA, 19 nt, Homo sapiens
  misc_RNA (1)...(19): siRNA sense strand
cauagcauaagguuuguga

SEQ ID NO: 530697 - RNA, 19 nt, Homo sapiens
  misc_RNA (1)...(19): siRNA sense strand
gcaacaaaugccaagacaa

SEQ ID NO: 530698 - RNA, 19 nt, Homo sapiens
  misc_RNA (1)...(19): siRNA sense strand
guaagaagagugggcaauc

SEQ ID NO: 530699 - RNA, 19 nt, Homo sapiens
  misc_RNA (1)...(19): siRNA sense strand
ugagaagcuuccaguagag

SEQ ID NO: 530700 - RNA, 19 nt, Homo sapiens
  misc_RNA (1)...(19): siRNA sense strand
ggagauccgacagaugcua

SEQ ID NO: 530701 - RNA, 19 nt, Homo sapiens
  misc_RNA (1)...(19): siRNA sense strand
uggcggugcuggcuagguu

SEQ ID NO: 530702 - RNA, 19 nt, Homo sapiens
  misc_RNA (1)...(19): siRNA sense strand
cacccuggcuuaccucagu

SEQ ID NO: 530703 - RNA, 19 nt, Homo sapiens
  misc_RNA (1)...(19): siRNA sense strand
cagagaaugacgugaagga

SEQ ID NO: 530704 - RNA, 19 nt, Homo sapiens
  misc_RNA (1)...(19): siRNA sense strand
uggcaaaggcuacaaguac

SEQ ID NO: 530705 - RNA, 19 nt, Homo sapiens
  misc_RNA (1)...(19): siRNA sense strand
caggugaggagcauuacaa

SEQ ID NO: 530706 - RNA, 19 nt, Homo sapiens
  misc_RNA (1)...(19): siRNA sense strand
gaugugcgagaugucauaa

SEQ ID NO: 530707 - RNA, 19 nt, Homo sapiens
  misc_RNA (1)...(19): siRNA sense strand
gaaauccccucgcuuaucc

SEQ ID NO: 530708 - RNA, 19 nt, Homo sapiens
  misc_RNA (1)...(19): siRNA sense strand
uagcauaagguuugugaca

SEQ ID NO: 530709 - RNA, 19 nt, Homo sapiens
  misc_RNA (1)...(19): siRNA sense strand
agcaacagcaagaaacaua

SEQ ID NO: 530710 - RNA, 19 nt, Homo sapiens
  misc_RNA (1)...(19): siRNA sense strand
ccgaggagauccgacagau

SEQ ID NO: 530711 - RNA, 19 nt, Homo sapiens
  misc_RNA (1)...(19): siRNA sense strand
caguagaguucugaucaca

SEQ ID NO: 530712 - RNA, 19 nt, Homo sapiens
  misc_RNA (1)...(19): siRNA sense strand
agcaagaaacauagcauaa

SEQ ID NO: 530713 - RNA, 19 nt, Homo sapiens
  misc_RNA (1)...(19): siRNA sense strand
cgagugauuguucuugaga

SEQ ID NO: 530714 - RNA, 19 nt, Homo sapiens
  misc_RNA (1)...(19): siRNA sense strand
cacagagaaugacgugaag

SEQ ID NO: 530715 - RNA, 19 nt, Homo sapiens
  misc_RNA (1)...(19): siRNA sense strand
ugagauucaucgguucaau

SEQ ID NO: 530716 - RNA, 19 nt, Homo sapiens
  misc_RNA (1)...(19): siRNA sense strand
uuugugacauuaucugcaa

SEQ ID NO: 530717 - RNA, 19 nt, Homo sapiens
  misc_RNA (1)...(19): siRNA sense strand
cuggcuagguuaagcucua

SEQ ID NO: 530718 - RNA, 19 nt, Homo sapiens
  misc_RNA (1)...(19): siRNA sense strand
gaggauaaagcaguagaca

SEQ ID NO: 530719 - RNA, 19 nt, Homo sapiens
  misc_RNA (1)...(19): siRNA sense strand
uaagaagagugggcaaucc

SEQ ID NO: 530720 - RNA, 19 nt, Homo sapiens
  misc_RNA (1)...(19): siRNA sense strand
cccaguguguggucuacuu

SEQ ID NO: 530721 - RNA, 19 nt, Homo sapiens
  misc_RNA (1)...(19): siRNA sense strand
agaccacucuggcucacau

SEQ ID NO: 530722 - RNA, 19 nt, Homo sapiens
  misc_RNA (1)...(19): siRNA sense strand
ugcaacaaaugccaagaca

SEQ ID NO: 530723 - RNA, 19 nt, Homo sapiens
  misc_RNA (1)...(19): siRNA sense strand
ugaugugcgagaugucaua

SEQ ID NO: 530724 - RNA, 19 nt, Homo sapiens
  misc_RNA (1)...(19): siRNA sense strand
cagaacgccucccucuacu

SEQ ID NO: 530725 - RNA, 19 nt, Homo sapiens
  misc_RNA (1)...(19): siRNA sense strand
acagcgaucccacauuuua

SEQ ID NO: 530726 - RNA, 19 nt, Homo sapiens
  misc_RNA (1)...(19): siRNA sense strand
agagugggcaauccuauuc

SEQ ID NO: 530727 - RNA, 19 nt, Homo sapiens
  misc_RNA (1)...(19): siRNA sense strand
ucuaggaagauguucugua

SEQ ID NO: 530728 - RNA, 19 nt, Homo sapiens
  misc_RNA (1)...(19): siRNA sense strand
ggaauccacguccuagacu

SEQ ID NO: 530729 - RNA, 19 nt, Homo sapiens
  misc_RNA (1)...(19): siRNA sense strand
guagaggcaauggugacua

SEQ ID NO: 530730 - RNA, 19 nt, Homo sapiens
  misc_RNA (1)...(19): siRNA sense strand
ccaguguguggucuacuuu

SEQ ID NO: 530731 - RNA, 19 nt, Homo sapiens
  misc_RNA (1)...(19): siRNA sense strand
ugugcgagaugucauaaaa

SEQ ID NO: 530732 - RNA, 19 nt, Homo sapiens
  misc_RNA (1)...(19): siRNA sense strand
gagcauuacaacugcaucu

SEQ ID NO: 530733 - RNA, 19 nt, Homo sapiens
  misc_RNA (1)...(19): siRNA sense strand
gcucuaggaagauguucug

SEQ ID NO: 530734 - RNA, 19 nt, Homo sapiens
  misc_RNA (1)...(19): siRNA sense strand
cuaccaaggcugucauuuu

SEQ ID NO: 530735 - RNA, 19 nt, Homo sapiens
  misc_RNA (1)...(19): siRNA sense strand
acggaggcuugucagguuu

SEQ ID NO: 530736 - RNA, 19 nt, Homo sapiens
  misc_RNA (1)...(19): siRNA sense strand
agaagagugggcaauccua

SEQ ID NO: 530737 - RNA, 19 nt, Homo sapiens
  misc_RNA (1)...(19): siRNA sense strand
gacauuaucugcaacaaau

SEQ ID NO: 530738 - RNA, 19 nt, Homo sapiens
  misc_RNA (1)...(19): siRNA sense strand
caacaaaugccaagacaaa

SEQ ID NO: 530739 - RNA, 19 nt, Homo sapiens
  misc_RNA (1)...(19): siRNA sense strand
cuaggaagauguucuguaa

SEQ ID NO: 530740 - RNA, 19 nt, Homo sapiens
  misc_RNA (1)...(19): siRNA sense strand
cuacagcgaucccacauuu

SEQ ID NO: 530741 - RNA, 19 nt, Homo sapiens
  misc_RNA (1)...(19): siRNA sense strand
ccacuaggcugaugaagga

SEQ ID NO: 530742 - RNA, 19 nt, Homo sapiens
  misc_RNA (1)...(19): siRNA sense strand
gcauaagguuugugacauu

SEQ ID NO: 530743 - RNA, 19 nt, Homo sapiens
  misc_RNA (1)...(19): siRNA sense strand
caaaguccauugaggugua

SEQ ID NO: 530744 - RNA, 19 nt, Homo sapiens
  misc_RNA (1)...(19): siRNA sense strand
guaccugccugaagaguug

SEQ ID NO: 530745 - RNA, 19 nt, Homo sapiens
  misc_RNA (1)...(19): siRNA sense strand
cauaagguuugugacauua

SEQ ID NO: 530746 - RNA, 19 nt, Homo sapiens
  misc_RNA (1)...(19): siRNA sense strand
cauagaggauaaagcagua

SEQ ID NO: 530747 - RNA, 19 nt, Homo sapiens
  misc_RNA (1)...(19): siRNA sense strand
ggucaacgcugcucuucug

SEQ ID NO: 530748 - RNA, 19 nt, Homo sapiens
  misc_RNA (1)...(19): siRNA sense strand
caagaaacauagcauaagg

SEQ ID NO: 530749 - RNA, 19 nt, Homo sapiens
  misc_RNA (1)...(19): siRNA sense strand
caaaugaugugcgagaugu

SEQ ID NO: 530750 - RNA, 19 nt, Homo sapiens
  misc_RNA (1)...(19): siRNA sense strand
cugacacgcugcaggauua

SEQ ID NO: 530751 - RNA, 19 nt, Homo sapiens
  misc_RNA (1)...(19): siRNA sense strand
caaaugccaagacaaauga

SEQ ID NO: 530752 - RNA, 19 nt, Homo sapiens
  misc_RNA (1)...(19): siRNA sense strand
gaugaaggauuugggcuau

SEQ ID NO: 530753 - RNA, 19 nt, Homo sapiens
  misc_RNA (1)...(19): siRNA sense strand
uaccaaggcugucauuuua

SEQ ID NO: 530754 - RNA, 19 nt, Homo sapiens
  misc_RNA (1)...(19): siRNA sense strand
aggaagauguucuguaaga

SEQ ID NO: 530755 - RNA, 19 nt, Homo sapiens
  misc_RNA (1)...(19): siRNA sense strand
gagauucaucgguucaaua

SEQ ID NO: 530756 - RNA, 19 nt, Homo sapiens
  misc_RNA (1)...(19): siRNA sense strand
gagccgcugucgagugauu

SEQ ID NO: 530757 - RNA, 19 nt, Homo sapiens
  misc_RNA (1)...(19): siRNA sense strand
gggcaggugaggagcauua

SEQ ID NO: 530758 - RNA, 19 nt, Homo sapiens
  misc_RNA (1)...(19): siRNA sense strand
guacagcgccuacaacaac

SEQ ID NO: 530759 - RNA, 19 nt, Homo sapiens
  misc_RNA (1)...(19): siRNA sense strand
gaggcaauggugacuauuu

SEQ ID NO: 530760 - RNA, 19 nt, Homo sapiens
  misc_RNA (1)...(19): siRNA sense strand
ccaaggcugucauuuuaua

SEQ ID NO: 530761 - RNA, 19 nt, Homo sapiens
  misc_RNA (1)...(19): siRNA sense strand
uugagaagcuuccaguaga

SEQ ID NO: 530762 - RNA, 19 nt, Homo sapiens
  misc_RNA (1)...(19): siRNA sense strand
gaagagugggcaauccuau

SEQ ID NO: 530763 - RNA, 19 nt, Homo sapiens
  misc_RNA (1)...(19): siRNA sense strand
ggcaaaggcuacaaguaca

SEQ ID NO: 530764 - RNA, 19 nt, Homo sapiens
  misc_RNA (1)...(19): siRNA sense strand
cacucuggcucacaucaua

SEQ ID NO: 530765 - RNA, 19 nt, Homo sapiens
  misc_RNA (1)...(19): siRNA sense strand
gcaaaggcuacaaguacaa

SEQ ID NO: 530766 - RNA, 19 nt, Homo sapiens
  misc_RNA (1)...(19): siRNA sense strand
uagaggcaauggugacuau

SEQ ID NO: 530767 - RNA, 19 nt, Homo sapiens
  misc_RNA (1)...(19): siRNA sense strand
gcaagaaacauagcauaag

SEQ ID NO: 530768 - RNA, 19 nt, Homo sapiens
  misc_RNA (1)...(19): siRNA sense strand
gaucccacauuuuauauga

SEQ ID NO: 530769 - RNA, 19 nt, Homo sapiens
  misc_RNA (1)...(19): siRNA sense strand
aggaguaccugccugaaga

SEQ ID NO: 530770 - RNA, 19 nt, Homo sapiens
  misc_RNA (1)...(19): siRNA sense strand
cagcaagaaacauagcaua

SEQ ID NO: 530771 - RNA, 19 nt, Homo sapiens
  misc_RNA (1)...(19): siRNA sense strand
caguagacacccuggcuua

SEQ ID NO: 530772 - RNA, 19 nt, Homo sapiens
  misc_RNA (1)...(19): siRNA sense strand
cacggaggcuugucagguu

SEQ ID NO: 530773 - RNA, 19 nt, Homo sapiens
  misc_RNA (1)...(19): siRNA sense strand
agguuaagcucuaggaaga

SEQ ID NO: 530774 - RNA, 19 nt, Homo sapiens
  misc_RNA (1)...(19): siRNA sense strand
guucauagaggauaaagca

SEQ ID NO: 530775 - RNA, 19 nt, Homo sapiens
  misc_RNA (1)...(19): siRNA sense strand
cuaggcugaugaaggauuu

SEQ ID NO: 530776 - RNA, 19 nt, Homo sapiens
  misc_RNA (1)...(19): siRNA sense strand
guuaagcucuaggaagaug

SEQ ID NO: 530777 - RNA, 19 nt, Homo sapiens
  misc_RNA (1)...(19): siRNA sense strand
ggguagauuucuucaagca

SEQ ID NO: 530778 - RNA, 19 nt, Homo sapiens
  misc_RNA (1)...(19): siRNA sense strand
uaagguuugugacauuauc

SEQ ID NO: 530779 - RNA, 19 nt, Homo sapiens
  misc_RNA (1)...(19): siRNA sense strand
ccagaacgccucccucuac

SEQ ID NO: 530780 - RNA, 19 nt, Homo sapiens
  misc_RNA (1)...(19): siRNA sense strand
agauucaucgguucaauaa

SEQ ID NO: 530781 - RNA, 19 nt, Homo sapiens
  misc_RNA (1)...(19): siRNA sense strand
gugaggagcauuacaacug

SEQ ID NO: 530782 - RNA, 19 nt, Homo sapiens
  misc_RNA (1)...(19): siRNA sense strand
acaaaugccaagacaaaug

SEQ ID NO: 530783 - RNA, 19 nt, Homo sapiens
  misc_RNA (1)...(19): siRNA sense strand
ccauguucauagaggauaa

SEQ ID NO: 530784 - RNA, 19 nt, Homo sapiens
  misc_RNA (1)...(19): siRNA sense strand
cugagccgcugucgaguga

SEQ ID NO: 530785 - RNA, 19 nt, Homo sapiens
  misc_RNA (1)...(19): siRNA sense strand
gacaaaugaugugcgagau

SEQ ID NO: 530786 - RNA, 19 nt, Homo sapiens
  misc_RNA (1)...(19): siRNA sense strand
gcaauggugacuauuuuaa

SEQ ID NO: 530787 - RNA, 19 nt, Homo sapiens
  misc_RNA (1)...(19): siRNA sense strand
agaaacauagcauaagguu

SEQ ID NO: 530788 - RNA, 19 nt, Homo sapiens
  misc_RNA (1)...(19): siRNA sense strand
ugaaggauuugggcuaugg

SEQ ID NO: 530789 - RNA, 19 nt, Homo sapiens
  misc_RNA (1)...(19): siRNA sense strand
gucgagugauuguucuuga

SEQ ID NO: 530790 - RNA, 19 nt, Homo sapiens
  misc_RNA (1)...(19): siRNA sense strand
ugacauuaucugcaacaaa

SEQ ID NO: 530791 - RNA, 19 nt, Homo sapiens
  misc_RNA (1)...(19): siRNA sense strand
gcaacagcaagaaacauag

SEQ ID NO: 530792 - RNA, 19 nt, Homo sapiens
  misc_RNA (1)...(19): siRNA sense strand
cauagcauaagguuuguga

SEQ ID NO: 530793 - RNA, 19 nt, Homo sapiens
  misc_RNA (1)...(19): siRNA sense strand
gcaacaaaugccaagacaa

SEQ ID NO: 530794 - RNA, 19 nt, Homo sapiens
  misc_RNA (1)...(19): siRNA sense strand
guaagaagagugggcaauc

SEQ ID NO: 530795 - RNA, 19 nt, Homo sapiens
  misc_RNA (1)...(19): siRNA sense strand
ugagaagcuuccaguagag

SEQ ID NO: 530796 - RNA, 19 nt, Homo sapiens
  misc_RNA (1)...(19): siRNA sense strand
ggagauccgacagaugcua

SEQ ID NO: 530797 - RNA, 19 nt, Homo sapiens
  misc_RNA (1)...(19): siRNA sense strand
uggcggugcuggcuagguu

SEQ ID NO: 530798 - RNA, 19 nt, Homo sapiens
  misc_RNA (1)...(19): siRNA sense strand
cacccuggcuuaccucagu

SEQ ID NO: 530799 - RNA, 19 nt, Homo sapiens
  misc_RNA (1)...(19): siRNA sense strand
cagagaaugacgugaagga

SEQ ID NO: 530800 - RNA, 19 nt, Homo sapiens
  misc_RNA (1)...(19): siRNA sense strand
uggcaaaggcuacaaguac

SEQ ID NO: 530801 - RNA, 19 nt, Homo sapiens
  misc_RNA (1)...(19): siRNA sense strand
caggugaggagcauuacaa

SEQ ID NO: 530802 - RNA, 19 nt, Homo sapiens
  misc_RNA (1)...(19): siRNA sense strand
gaugugcgagaugucauaa

SEQ ID NO: 530803 - RNA, 19 nt, Homo sapiens
  misc_RNA (1)...(19): siRNA sense strand
gaaauccccucgcuuaucc

SEQ ID NO: 530804 - RNA, 19 nt, Homo sapiens
  misc_RNA (1)...(19): siRNA sense strand
uagcauaagguuugugaca

SEQ ID NO: 530805 - RNA, 19 nt, Homo sapiens
  misc_RNA (1)...(19): siRNA sense strand
agcaacagcaagaaacaua

SEQ ID NO: 530806 - RNA, 19 nt, Homo sapiens
  misc_RNA (1)...(19): siRNA sense strand
ccgaggagauccgacagau

SEQ ID NO: 530807 - RNA, 19 nt, Homo sapiens
  misc_RNA (1)...(19): siRNA sense strand
caguagaguucugaucaca

SEQ ID NO: 530808 - RNA, 19 nt, Homo sapiens
  misc_RNA (1)...(19): siRNA sense strand
agcaagaaacauagcauaa

SEQ ID NO: 530809 - RNA, 19 nt, Homo sapiens
  misc_RNA (1)...(19): siRNA sense strand
cgagugauuguucuugaga

SEQ ID NO: 530810 - RNA, 19 nt, Homo sapiens
  misc_RNA (1)...(19): siRNA sense strand
cacagagaaugacgugaag

SEQ ID NO: 530811 - RNA, 19 nt, Homo sapiens
  misc_RNA (1)...(19): siRNA sense strand
ugagauucaucgguucaau

SEQ ID NO: 530812 - RNA, 19 nt, Homo sapiens
  misc_RNA (1)...(19): siRNA sense strand
uuugugacauuaucugcaa

SEQ ID NO: 530813 - RNA, 19 nt, Homo sapiens
  misc_RNA (1)...(19): siRNA sense strand
cuggcuagguuaagcucua

SEQ ID NO: 530814 - RNA, 19 nt, Homo sapiens
  misc_RNA (1)...(19): siRNA sense strand
gaggauaaagcaguagaca

SEQ ID NO: 530815 - RNA, 19 nt, Homo sapiens
  misc_RNA (1)...(19): siRNA sense strand
uaagaagagugggcaaucc

SEQ ID NO: 530816 - RNA, 19 nt, Homo sapiens
  misc_RNA (1)...(19): siRNA sense strand
cccaguguguggucuacuu

SEQ ID NO: 530817 - RNA, 19 nt, Homo sapiens
  misc_RNA (1)...(19): siRNA sense strand
agaccacucuggcucacau

SEQ ID NO: 530818 - RNA, 19 nt, Homo sapiens
  misc_RNA (1)...(19): siRNA sense strand
ugcaacaaaugccaagaca

SEQ ID NO: 530819 - RNA, 19 nt, Homo sapiens
  misc_RNA (1)...(19): siRNA sense strand
ugaugugcgagaugucaua

SEQ ID NO: 530820 - RNA, 19 nt, Homo sapiens
  misc_RNA (1)...(19): siRNA sense strand
cagaacgccucccucuacu

SEQ ID NO: 530821 - RNA, 19 nt, Homo sapiens
  misc_RNA (1)...(19): siRNA sense strand
acagcgaucccacauuuua

SEQ ID NO: 530822 - RNA, 19 nt, Homo sapiens
  misc_RNA (1)...(19): siRNA sense strand
agagugggcaauccuauuc

SEQ ID NO: 530823 - RNA, 19 nt, Homo sapiens
  misc_RNA (1)...(19): siRNA sense strand
ucuaggaagauguucugua

SEQ ID NO: 530824 - RNA, 19 nt, Homo sapiens
  misc_RNA (1)...(19): siRNA sense strand
ggaauccacguccuagacu

SEQ ID NO: 530825 - RNA, 19 nt, Homo sapiens
  misc_RNA (1)...(19): siRNA sense strand
guagaggcaauggugacua

SEQ ID NO: 530826 - RNA, 19 nt, Homo sapiens
  misc_RNA (1)...(19): siRNA sense strand
ccaguguguggucuacuuu

SEQ ID NO: 530827 - RNA, 19 nt, Homo sapiens
  misc_RNA (1)...(19): siRNA sense strand
ugugcgagaugucauaaaa

SEQ ID NO: 530828 - RNA, 19 nt, Homo sapiens
  misc_RNA (1)...(19): siRNA sense strand
gagcauuacaacugcaucu

SEQ ID NO: 530829 - RNA, 19 nt, Homo sapiens
  misc_RNA (1)...(19): siRNA sense strand
gcucuaggaagauguucug

SEQ ID NO: 530830 - RNA, 19 nt, Homo sapiens
  misc_RNA (1)...(19): siRNA sense strand
cuaccaaggcugucauuuu

SEQ ID NO: 530831 - RNA, 19 nt, Homo sapiens
  misc_RNA (1)...(19): siRNA sense strand
acggaggcuugucagguuu

SEQ ID NO: 530832 - RNA, 19 nt, Homo sapiens
  misc_RNA (1)...(19): siRNA sense strand
agaagagugggcaauccua

SEQ ID NO: 530833 - RNA, 19 nt, Homo sapiens
  misc_RNA (1)...(19): siRNA sense strand
cagagaaccuggagauaua

SEQ ID NO: 530834 - RNA, 19 nt, Homo sapiens
  misc_RNA (1)...(19): siRNA sense strand
ggaauaugcuuggauaaga

SEQ ID NO: 530835 - RNA, 19 nt, Homo sapiens
  misc_RNA (1)...(19): siRNA sense strand
caaugaagcugaccucugu

SEQ ID NO: 530836 - RNA, 19 nt, Homo sapiens
  misc_RNA (1)...(19): siRNA sense strand
gcaaaugcccucagcagaa

SEQ ID NO: 530837 - RNA, 19 nt, Homo sapiens
  misc_RNA (1)...(19): siRNA sense strand
gaugcuguaucccuaauaa

SEQ ID NO: 530838 - RNA, 19 nt, Homo sapiens
  misc_RNA (1)...(19): siRNA sense strand
caauaaagauucccaaagg

SEQ ID NO: 530839 - RNA, 19 nt, Homo sapiens
  misc_RNA (1)...(19): siRNA sense strand
ggaaagaagucugaucagu

SEQ ID NO: 530840 - RNA, 19 nt, Homo sapiens
  misc_RNA (1)...(19): siRNA sense strand
aaagaagucugaucaguca

SEQ ID NO: 530841 - RNA, 19 nt, Homo sapiens
  misc_RNA (1)...(19): siRNA sense strand
guacgagacuggagugugu

SEQ ID NO: 530842 - RNA, 19 nt, Homo sapiens
  misc_RNA (1)...(19): siRNA sense strand
gauuacaucuugugugugu

SEQ ID NO: 530843 - RNA, 19 nt, Homo sapiens
  misc_RNA (1)...(19): siRNA sense strand
gcagagaaccuggagauau

SEQ ID NO: 530844 - RNA, 19 nt, Homo sapiens
  misc_RNA (1)...(19): siRNA sense strand
cgacagcaauauauuaaag

SEQ ID NO: 530845 - RNA, 19 nt, Homo sapiens
  misc_RNA (1)...(19): siRNA sense strand
auagaaaucucccacuuau

SEQ ID NO: 530846 - RNA, 19 nt, Homo sapiens
  misc_RNA (1)...(19): siRNA sense strand
cagcaacugugaaaugaga

SEQ ID NO: 530847 - RNA, 19 nt, Homo sapiens
  misc_RNA (1)...(19): siRNA sense strand
cuaacagggugaccaauga

SEQ ID NO: 530848 - RNA, 19 nt, Homo sapiens
  misc_RNA (1)...(19): siRNA sense strand
uggaagaugcuguggauua

SEQ ID NO: 530849 - RNA, 19 nt, Homo sapiens
  misc_RNA (1)...(19): siRNA sense strand
gaauaugcuuggauaagag

SEQ ID NO: 530850 - RNA, 19 nt, Homo sapiens
  misc_RNA (1)...(19): siRNA sense strand
uauagaaaucucccacuua

SEQ ID NO: 530851 - RNA, 19 nt, Homo sapiens
  misc_RNA (1)...(19): siRNA sense strand
ggaagaugcuguggauuac

SEQ ID NO: 530852 - RNA, 19 nt, Homo sapiens
  misc_RNA (1)...(19): siRNA sense strand
aaacaugccaaccuacuuu

SEQ ID NO: 530853 - RNA, 19 nt, Homo sapiens
  misc_RNA (1)...(19): siRNA sense strand
gaacaugugggaugggaau

SEQ ID NO: 530854 - RNA, 19 nt, Homo sapiens
  misc_RNA (1)...(19): siRNA sense strand
cagagaaacugcagagaac

SEQ ID NO: 530855 - RNA, 19 nt, Homo sapiens
  misc_RNA (1)...(19): siRNA sense strand
uguggaauaugcuuggaua

SEQ ID NO: 530856 - RNA, 19 nt, Homo sapiens
  misc_RNA (1)...(19): siRNA sense strand
ucaaccagguacauuauca

SEQ ID NO: 530857 - RNA, 19 nt, Homo sapiens
  misc_RNA (1)...(19): siRNA sense strand
gagugagccuggugagaga

SEQ ID NO: 530858 - RNA, 19 nt, Homo sapiens
  misc_RNA (1)...(19): siRNA sense strand
caaaugcccucagcagaag

SEQ ID NO: 530859 - RNA, 19 nt, Homo sapiens
  misc_RNA (1)...(19): siRNA sense strand
aaacaaugccagcuuauag

SEQ ID NO: 530860 - RNA, 19 nt, Homo sapiens
  misc_RNA (1)...(19): siRNA sense strand
gaaaagacuguguuacauu

SEQ ID NO: 530861 - RNA, 19 nt, Homo sapiens
  misc_RNA (1)...(19): siRNA sense strand
caaccuacuuuccaacucu

SEQ ID NO: 530862 - RNA, 19 nt, Homo sapiens
  misc_RNA (1)...(19): siRNA sense strand
acaaaacaaugccagcuua

SEQ ID NO: 530863 - RNA, 19 nt, Homo sapiens
  misc_RNA (1)...(19): siRNA sense strand
gcacaccucuguucauacc

SEQ ID NO: 530864 - RNA, 19 nt, Homo sapiens
  misc_RNA (1)...(19): siRNA sense strand
ucagagaaacugcagagaa

SEQ ID NO: 530865 - RNA, 19 nt, Homo sapiens
  misc_RNA (1)...(19): siRNA sense strand
uggauuacaucuugugugu

SEQ ID NO: 530866 - RNA, 19 nt, Homo sapiens
  misc_RNA (1)...(19): siRNA sense strand
gagaugcuguaucccuaau

SEQ ID NO: 530867 - RNA, 19 nt, Homo sapiens
  misc_RNA (1)...(19): siRNA sense strand
uuucugagcucaagauucu

SEQ ID NO: 530868 - RNA, 19 nt, Homo sapiens
  misc_RNA (1)...(19): siRNA sense strand
uacagcagcuuucaacaag

SEQ ID NO: 530869 - RNA, 19 nt, Homo sapiens
  misc_RNA (1)...(19): siRNA sense strand
aauaaagauucccaaagga

SEQ ID NO: 530870 - RNA, 19 nt, Homo sapiens
  misc_RNA (1)...(19): siRNA sense strand
gacaauaaagauucccaaa

SEQ ID NO: 530871 - RNA, 19 nt, Homo sapiens
  misc_RNA (1)...(19): siRNA sense strand
gagcuaaagguggaaagaa

SEQ ID NO: 530872 - RNA, 19 nt, Homo sapiens
  misc_RNA (1)...(19): siRNA sense strand
uuauagaaaucucccacuu

SEQ ID NO: 530873 - RNA, 19 nt, Homo sapiens
  misc_RNA (1)...(19): siRNA sense strand
aaugccagcuuauagaaau

SEQ ID NO: 530874 - RNA, 19 nt, Homo sapiens
  misc_RNA (1)...(19): siRNA sense strand
augcacaccucuguucaua

SEQ ID NO: 530875 - RNA, 19 nt, Homo sapiens
  misc_RNA (1)...(19): siRNA sense strand
ucaacaagcuacaaaacaa

SEQ ID NO: 530876 - RNA, 19 nt, Homo sapiens
  misc_RNA (1)...(19): siRNA sense strand
cuacagcagcuuucaacaa

SEQ ID NO: 530877 - RNA, 19 nt, Homo sapiens
  misc_RNA (1)...(19): siRNA sense strand
aauggaagaugcuguggau

SEQ ID NO: 530878 - RNA, 19 nt, Homo sapiens
  misc_RNA (1)...(19): siRNA sense strand
ucauaauggccaaguguuu

SEQ ID NO: 530879 - RNA, 19 nt, Homo sapiens
  misc_RNA (1)...(19): siRNA sense strand
gagaaaagacuguguuaca

SEQ ID NO: 530880 - RNA, 19 nt, Homo sapiens
  misc_RNA (1)...(19): siRNA sense strand
gcaacugugaaaugagaaa

SEQ ID NO: 530881 - RNA, 19 nt, Homo sapiens
  misc_RNA (1)...(19): siRNA sense strand
ccacacaaagggcuguauu

SEQ ID NO: 530882 - RNA, 19 nt, Homo sapiens
  misc_RNA (1)...(19): siRNA sense strand
gcuguauugugacuacuca

SEQ ID NO: 530883 - RNA, 19 nt, Homo sapiens
  misc_RNA (1)...(19): siRNA sense strand
uaaaaucugugccaagcaa

SEQ ID NO: 530884 - RNA, 19 nt, Homo sapiens
  misc_RNA (1)...(19): siRNA sense strand
gggaugggaauaucuaaca

SEQ ID NO: 530885 - RNA, 19 nt, Homo sapiens
  misc_RNA (1)...(19): siRNA sense strand
guggaaagaagucugauca

SEQ ID NO: 530886 - RNA, 19 nt, Homo sapiens
  misc_RNA (1)...(19): siRNA sense strand
ggaaaucugcaaugaagcu

SEQ ID NO: 530887 - RNA, 19 nt, Homo sapiens
  misc_RNA (1)...(19): siRNA sense strand
ggggaaaucugcaaugaag

SEQ ID NO: 530888 - RNA, 19 nt, Homo sapiens
  misc_RNA (1)...(19): siRNA sense strand
gagaaccuggagauauauu

SEQ ID NO: 530889 - RNA, 19 nt, Homo sapiens
  misc_RNA (1)...(19): siRNA sense strand
gaaccuggagauauauuuu

SEQ ID NO: 530890 - RNA, 19 nt, Homo sapiens
  misc_RNA (1)...(19): siRNA sense strand
guucaaccagguacauuau

SEQ ID NO: 530891 - RNA, 19 nt, Homo sapiens
  misc_RNA (1)...(19): siRNA sense strand
uaacagggugaccaaugaa

SEQ ID NO: 530892 - RNA, 19 nt, Homo sapiens
  misc_RNA (1)...(19): siRNA sense strand
gucaaacuguagccuggaa

SEQ ID NO: 530893 - RNA, 19 nt, Homo sapiens
  misc_RNA (1)...(19): siRNA sense strand
acaccucuguucauaccaa

SEQ ID NO: 530894 - RNA, 19 nt, Homo sapiens
  misc_RNA (1)...(19): siRNA sense strand
gcgacagcaauauauuaaa

SEQ ID NO: 530895 - RNA, 19 nt, Homo sapiens
  misc_RNA (1)...(19): siRNA sense strand
aaaagacuguguuacauuc

SEQ ID NO: 530896 - RNA, 19 nt, Homo sapiens
  misc_RNA (1)...(19): siRNA sense strand
caaugccagcuuauagaaa

SEQ ID NO: 530897 - RNA, 19 nt, Homo sapiens
  misc_RNA (1)...(19): siRNA sense strand
gaagucugaucagucaaac

SEQ ID NO: 530898 - RNA, 19 nt, Homo sapiens
  misc_RNA (1)...(19): siRNA sense strand
ggagcuaaagguggaaaga

SEQ ID NO: 530899 - RNA, 19 nt, Homo sapiens
  misc_RNA (1)...(19): siRNA sense strand
ggaugggaauaucuaacag

SEQ ID NO: 530900 - RNA, 19 nt, Homo sapiens
  misc_RNA (1)...(19): siRNA sense strand
acaaugccagcuuauagaa

SEQ ID NO: 530901 - RNA, 19 nt, Homo sapiens
  misc_RNA (1)...(19): siRNA sense strand
agaagucugaucagucaaa

SEQ ID NO: 530902 - RNA, 19 nt, Homo sapiens
  misc_RNA (1)...(19): siRNA sense strand
aagaugcuguggauuacau

SEQ ID NO: 530903 - RNA, 19 nt, Homo sapiens
  misc_RNA (1)...(19): siRNA sense strand
aaccagguacauuaucaua

SEQ ID NO: 530904 - RNA, 19 nt, Homo sapiens
  misc_RNA (1)...(19): siRNA sense strand
acuguagccuggaaccauu

SEQ ID NO: 530905 - RNA, 19 nt, Homo sapiens
  misc_RNA (1)...(19): siRNA sense strand
gcuaaagguggaaagaagu

SEQ ID NO: 530906 - RNA, 19 nt, Homo sapiens
  misc_RNA (1)...(19): siRNA sense strand
caguagacaggccuaggua

SEQ ID NO: 530907 - RNA, 19 nt, Homo sapiens
  misc_RNA (1)...(19): siRNA sense strand
cauaauggccaaguguuuc

SEQ ID NO: 530908 - RNA, 19 nt, Homo sapiens
  misc_RNA (1)...(19): siRNA sense strand
agaguuacaaacccacuuu

SEQ ID NO: 530909 - RNA, 19 nt, Homo sapiens
  misc_RNA (1)...(19): siRNA sense strand
caugugggaugggaauauc

SEQ ID NO: 530910 - RNA, 19 nt, Homo sapiens
  misc_RNA (1)...(19): siRNA sense strand
ucacuggcccugcaaaugc

SEQ ID NO: 530911 - RNA, 19 nt, Homo sapiens
  misc_RNA (1)...(19): siRNA sense strand
ugcgacagcaauauauuaa

SEQ ID NO: 530912 - RNA, 19 nt, Homo sapiens
  misc_RNA (1)...(19): siRNA sense strand
acaauaaagauucccaaag

SEQ ID NO: 530913 - RNA, 19 nt, Homo sapiens
  misc_RNA (1)...(19): siRNA sense strand
uaucauaauggccaagugu

SEQ ID NO: 530914 - RNA, 19 nt, Homo sapiens
  misc_RNA (1)...(19): siRNA sense strand
ggaugcacaccucuguuca

SEQ ID NO: 530915 - RNA, 19 nt, Homo sapiens
  misc_RNA (1)...(19): siRNA sense strand
gaagaugcuguggauuaca

SEQ ID NO: 530916 - RNA, 19 nt, Homo sapiens
  misc_RNA (1)...(19): siRNA sense strand
uagccuggaaccauuacua

SEQ ID NO: 530917 - RNA, 19 nt, Homo sapiens
  misc_RNA (1)...(19): siRNA sense strand
cacacaaagggcuguauug

SEQ ID NO: 530918 - RNA, 19 nt, Homo sapiens
  misc_RNA (1)...(19): siRNA sense strand
ugcuguggauuacaucuug

SEQ ID NO: 530919 - RNA, 19 nt, Homo sapiens
  misc_RNA (1)...(19): siRNA sense strand
ccaacucuccaaagcugaa

SEQ ID NO: 530920 - RNA, 19 nt, Homo sapiens
  misc_RNA (1)...(19): siRNA sense strand
uagaaaucucccacuuauu

SEQ ID NO: 530921 - RNA, 19 nt, Homo sapiens
  misc_RNA (1)...(19): siRNA sense strand
gcuguaucccuaauaaguc

SEQ ID NO: 530922 - RNA, 19 nt, Homo sapiens
  misc_RNA (1)...(19): siRNA sense strand
ccaaccuacuuuccaacuc

SEQ ID NO: 530923 - RNA, 19 nt, Homo sapiens
  misc_RNA (1)...(19): siRNA sense strand
ucuaacagggugaccaaug

SEQ ID NO: 530924 - RNA, 19 nt, Homo sapiens
  misc_RNA (1)...(19): siRNA sense strand
aguucaaccagguacauua

SEQ ID NO: 530925 - RNA, 19 nt, Homo sapiens
  misc_RNA (1)...(19): siRNA sense strand
agaaccuggagauauauuu

SEQ ID NO: 530926 - RNA, 19 nt, Homo sapiens
  misc_RNA (1)...(19): siRNA sense strand
agagauggcuguggaugcu

SEQ ID NO: 530927 - RNA, 19 nt, Homo sapiens
  misc_RNA (1)...(19): siRNA sense strand
gaguucaaccagguacauu

SEQ ID NO: 530928 - RNA, 19 nt, Homo sapiens
  misc_RNA (1)...(19): siRNA sense strand
aacaaugccagcuuauaga

SEQ ID NO: 530929 - RNA, 19 nt, Homo sapiens
  misc_RNA (1)...(19): siRNA sense strand
cagagaaccuggagauaua

SEQ ID NO: 530930 - RNA, 19 nt, Homo sapiens
  misc_RNA (1)...(19): siRNA sense strand
ggaauaugcuuggauaaga

SEQ ID NO: 530931 - RNA, 19 nt, Homo sapiens
  misc_RNA (1)...(19): siRNA sense strand
caaugaagcugaccucugu

SEQ ID NO: 530932 - RNA, 19 nt, Homo sapiens
  misc_RNA (1)...(19): siRNA sense strand
gcaaaugcccucagcagaa

SEQ ID NO: 530933 - RNA, 19 nt, Homo sapiens
  misc_RNA (1)...(19): siRNA sense strand
gaugcuguaucccuaauaa

SEQ ID NO: 530934 - RNA, 19 nt, Homo sapiens
  misc_RNA (1)...(19): siRNA sense strand
caauaaagauucccaaagg

SEQ ID NO: 530935 - RNA, 19 nt, Homo sapiens
  misc_RNA (1)...(19): siRNA sense strand
ggaaagaagucugaucagu

SEQ ID NO: 530936 - RNA, 19 nt, Homo sapiens
  misc_RNA (1)...(19): siRNA sense strand
aaagaagucugaucaguca

SEQ ID NO: 530937 - RNA, 19 nt, Homo sapiens
  misc_RNA (1)...(19): siRNA sense strand
guacgagacuggagugugu

SEQ ID NO: 530938 - RNA, 19 nt, Homo sapiens
  misc_RNA (1)...(19): siRNA sense strand
gauuacaucuugugugugu

SEQ ID NO: 530939 - RNA, 19 nt, Homo sapiens
  misc_RNA (1)...(19): siRNA sense strand
gcagagaaccuggagauau

SEQ ID NO: 530940 - RNA, 19 nt, Homo sapiens
  misc_RNA (1)...(19): siRNA sense strand
cgacagcaauauauuaaag

SEQ ID NO: 530941 - RNA, 19 nt, Homo sapiens
  misc_RNA (1)...(19): siRNA sense strand
auagaaaucucccacuuau

SEQ ID NO: 530942 - RNA, 19 nt, Homo sapiens
  misc_RNA (1)...(19): siRNA sense strand
cagcaacugugaaaugaga

SEQ ID NO: 530943 - RNA, 19 nt, Homo sapiens
  misc_RNA (1)...(19): siRNA sense strand
cuaacagggugaccaauga

SEQ ID NO: 530944 - RNA, 19 nt, Homo sapiens
  misc_RNA (1)...(19): siRNA sense strand
uggaagaugcuguggauua

SEQ ID NO: 530945 - RNA, 19 nt, Homo sapiens
  misc_RNA (1)...(19): siRNA sense strand
gaauaugcuuggauaagag

SEQ ID NO: 530946 - RNA, 19 nt, Homo sapiens
  misc_RNA (1)...(19): siRNA sense strand
uauagaaaucucccacuua

SEQ ID NO: 530947 - RNA, 19 nt, Homo sapiens
  misc_RNA (1)...(19): siRNA sense strand
ggaagaugcuguggauuac

SEQ ID NO: 530948 - RNA, 19 nt, Homo sapiens
  misc_RNA (1)...(19): siRNA sense strand
aaacaugccaaccuacuuu

SEQ ID NO: 530949 - RNA, 19 nt, Homo sapiens
  misc_RNA (1)...(19): siRNA sense strand
gaacaugugggaugggaau

SEQ ID NO: 530950 - RNA, 19 nt, Homo sapiens
  misc_RNA (1)...(19): siRNA sense strand
cagagaaacugcagagaac

SEQ ID NO: 530951 - RNA, 19 nt, Homo sapiens
  misc_RNA (1)...(19): siRNA sense strand
uguggaauaugcuuggaua

SEQ ID NO: 530952 - RNA, 19 nt, Homo sapiens
  misc_RNA (1)...(19): siRNA sense strand
ucaaccagguacauuauca

SEQ ID NO: 530953 - RNA, 19 nt, Homo sapiens
  misc_RNA (1)...(19): siRNA sense strand
gagugagccuggugagaga

SEQ ID NO: 530954 - RNA, 19 nt, Homo sapiens
  misc_RNA (1)...(19): siRNA sense strand
caaaugcccucagcagaag

SEQ ID NO: 530955 - RNA, 19 nt, Homo sapiens
  misc_RNA (1)...(19): siRNA sense strand
aaacaaugccagcuuauag

SEQ ID NO: 530956 - RNA, 19 nt, Homo sapiens
  misc_RNA (1)...(19): siRNA sense strand
gaaaagacuguguuacauu

SEQ ID NO: 530957 - RNA, 19 nt, Homo sapiens
  misc_RNA (1)...(19): siRNA sense strand
caaccuacuuuccaacucu

SEQ ID NO: 530958 - RNA, 19 nt, Homo sapiens
  misc_RNA (1)...(19): siRNA sense strand
acaaaacaaugccagcuua

SEQ ID NO: 530959 - RNA, 19 nt, Homo sapiens
  misc_RNA (1)...(19): siRNA sense strand
gcacaccucuguucauacc

SEQ ID NO: 530960 - RNA, 19 nt, Homo sapiens
  misc_RNA (1)...(19): siRNA sense strand
ucagagaaacugcagagaa

SEQ ID NO: 530961 - RNA, 19 nt, Homo sapiens
  misc_RNA (1)...(19): siRNA sense strand
uggauuacaucuugugugu

SEQ ID NO: 530962 - RNA, 19 nt, Homo sapiens
  misc_RNA (1)...(19): siRNA sense strand
gagaugcuguaucccuaau

SEQ ID NO: 530963 - RNA, 19 nt, Homo sapiens
  misc_RNA (1)...(19): siRNA sense strand
uuucugagcucaagauucu

SEQ ID NO: 530964 - RNA, 19 nt, Homo sapiens
  misc_RNA (1)...(19): siRNA sense strand
uacagcagcuuucaacaag

SEQ ID NO: 530965 - RNA, 19 nt, Homo sapiens
  misc_RNA (1)...(19): siRNA sense strand
aauaaagauucccaaagga

SEQ ID NO: 530966 - RNA, 19 nt, Homo sapiens
  misc_RNA (1)...(19): siRNA sense strand
gacaauaaagauucccaaa

SEQ ID NO: 530967 - RNA, 19 nt, Homo sapiens
  misc_RNA (1)...(19): siRNA sense strand
gagcuaaagguggaaagaa

SEQ ID NO: 530968 - RNA, 19 nt, Homo sapiens
  misc_RNA (1)...(19): siRNA sense strand
uuauagaaaucucccacuu

SEQ ID NO: 530969 - RNA, 19 nt, Homo sapiens
  misc_RNA (1)...(19): siRNA sense strand
aaugccagcuuauagaaau

SEQ ID NO: 530970 - RNA, 19 nt, Homo sapiens
  misc_RNA (1)...(19): siRNA sense strand
augcacaccucuguucaua

SEQ ID NO: 530971 - RNA, 19 nt, Homo sapiens
  misc_RNA (1)...(19): siRNA sense strand
ucaacaagcuacaaaacaa

SEQ ID NO: 530972 - RNA, 19 nt, Homo sapiens
  misc_RNA (1)...(19): siRNA sense strand
cuacagcagcuuucaacaa

SEQ ID NO: 530973 - RNA, 19 nt, Homo sapiens
  misc_RNA (1)...(19): siRNA sense strand
aauggaagaugcuguggau

SEQ ID NO: 530974 - RNA, 19 nt, Homo sapiens
  misc_RNA (1)...(19): siRNA sense strand
ucauaauggccaaguguuu

SEQ ID NO: 530975 - RNA, 19 nt, Homo sapiens
  misc_RNA (1)...(19): siRNA sense strand
gagaaaagacuguguuaca

SEQ ID NO: 530976 - RNA, 19 nt, Homo sapiens
  misc_RNA (1)...(19): siRNA sense strand
gcaacugugaaaugagaaa

SEQ ID NO: 530977 - RNA, 19 nt, Homo sapiens
  misc_RNA (1)...(19): siRNA sense strand
ccacacaaagggcuguauu

SEQ ID NO: 530978 - RNA, 19 nt, Homo sapiens
  misc_RNA (1)...(19): siRNA sense strand
gcuguauugugacuacuca

SEQ ID NO: 530979 - RNA, 19 nt, Homo sapiens
  misc_RNA (1)...(19): siRNA sense strand
uaaaaucugugccaagcaa

SEQ ID NO: 530980 - RNA, 19 nt, Homo sapiens
  misc_RNA (1)...(19): siRNA sense strand
gggaugggaauaucuaaca

SEQ ID NO: 530981 - RNA, 19 nt, Homo sapiens
  misc_RNA (1)...(19): siRNA sense strand
guggaaagaagucugauca

SEQ ID NO: 530982 - RNA, 19 nt, Homo sapiens
  misc_RNA (1)...(19): siRNA sense strand
ggaaaucugcaaugaagcu

SEQ ID NO: 530983 - RNA, 19 nt, Homo sapiens
  misc_RNA (1)...(19): siRNA sense strand
ggggaaaucugcaaugaag

SEQ ID NO: 530984 - RNA, 19 nt, Homo sapiens
  misc_RNA (1)...(19): siRNA sense strand
gagaaccuggagauauauu

SEQ ID NO: 530985 - RNA, 19 nt, Homo sapiens
  misc_RNA (1)...(19): siRNA sense strand
gaaccuggagauauauuuu

SEQ ID NO: 530986 - RNA, 19 nt, Homo sapiens
  misc_RNA (1)...(19): siRNA sense strand
guucaaccagguacauuau

SEQ ID NO: 530987 - RNA, 19 nt, Homo sapiens
  misc_RNA (1)...(19): siRNA sense strand
uaacagggugaccaaugaa

SEQ ID NO: 530988 - RNA, 19 nt, Homo sapiens
  misc_RNA (1)...(19): siRNA sense strand
gucaaacuguagccuggaa

SEQ ID NO: 530989 - RNA, 19 nt, Homo sapiens
  misc_RNA (1)...(19): siRNA sense strand
acaccucuguucauaccaa

SEQ ID NO: 530990 - RNA, 19 nt, Homo sapiens
  misc_RNA (1)...(19): siRNA sense strand
gcgacagcaauauauuaaa

SEQ ID NO: 530991 - RNA, 19 nt, Homo sapiens
  misc_RNA (1)...(19): siRNA sense strand
aaaagacuguguuacauuc

SEQ ID NO: 530992 - RNA, 19 nt, Homo sapiens
  misc_RNA (1)...(19): siRNA sense strand
caaugccagcuuauagaaa

SEQ ID NO: 530993 - RNA, 19 nt, Homo sapiens
  misc_RNA (1)...(19): siRNA sense strand
gaagucugaucagucaaac

SEQ ID NO: 530994 - RNA, 19 nt, Homo sapiens
  misc_RNA (1)...(19): siRNA sense strand
ggagcuaaagguggaaaga

SEQ ID NO: 530995 - RNA, 19 nt, Homo sapiens
  misc_RNA (1)...(19): siRNA sense strand
ggaugggaauaucuaacag

SEQ ID NO: 530996 - RNA, 19 nt, Homo sapiens
  misc_RNA (1)...(19): siRNA sense strand
acaaugccagcuuauagaa

SEQ ID NO: 530997 - RNA, 19 nt, Homo sapiens
  misc_RNA (1)...(19): siRNA sense strand
agaagucugaucagucaaa

SEQ ID NO: 530998 - RNA, 19 nt, Homo sapiens
  misc_RNA (1)...(19): siRNA sense strand
aagaugcuguggauuacau

SEQ ID NO: 530999 - RNA, 19 nt, Homo sapiens
  misc_RNA (1)...(19): siRNA sense strand
aaccagguacauuaucaua

SEQ ID NO: 531000 - RNA, 19 nt, Homo sapiens
  misc_RNA (1)...(19): siRNA sense strand
acuguagccuggaaccauu

SEQ ID NO: 531001 - RNA, 19 nt, Homo sapiens
  misc_RNA (1)...(19): siRNA sense strand
gcuaaagguggaaagaagu

SEQ ID NO: 531002 - RNA, 19 nt, Homo sapiens
  misc_RNA (1)...(19): siRNA sense strand
caguagacaggccuaggua

SEQ ID NO: 531003 - RNA, 19 nt, Homo sapiens
  misc_RNA (1)...(19): siRNA sense strand
cauaauggccaaguguuuc

SEQ ID NO: 531004 - RNA, 19 nt, Homo sapiens
  misc_RNA (1)...(19): siRNA sense strand
agaguuacaaacccacuuu

SEQ ID NO: 531005 - RNA, 19 nt, Homo sapiens
  misc_RNA (1)...(19): siRNA sense strand
caugugggaugggaauauc

SEQ ID NO: 531006 - RNA, 19 nt, Homo sapiens
  misc_RNA (1)...(19): siRNA sense strand
ucacuggcccugcaaaugc

SEQ ID NO: 531007 - RNA, 19 nt, Homo sapiens
  misc_RNA (1)...(19): siRNA sense strand
ugcgacagcaauauauuaa

SEQ ID NO: 531008 - RNA, 19 nt, Homo sapiens
  misc_RNA (1)...(19): siRNA sense strand
acaauaaagauucccaaag

SEQ ID NO: 531009 - RNA, 19 nt, Homo sapiens
  misc_RNA (1)...(19): siRNA sense strand
uaucauaauggccaagugu

SEQ ID NO: 531010 - RNA, 19 nt, Homo sapiens
  misc_RNA (1)...(19): siRNA sense strand
ggaugcacaccucuguuca

SEQ ID NO: 531011 - RNA, 19 nt, Homo sapiens
  misc_RNA (1)...(19): siRNA sense strand
gaagaugcuguggauuaca

SEQ ID NO: 531012 - RNA, 19 nt, Homo sapiens
  misc_RNA (1)...(19): siRNA sense strand
uagccuggaaccauuacua

SEQ ID NO: 531013 - RNA, 19 nt, Homo sapiens
  misc_RNA (1)...(19): siRNA sense strand
cacacaaagggcuguauug

SEQ ID NO: 531014 - RNA, 19 nt, Homo sapiens
  misc_RNA (1)...(19): siRNA sense strand
ugcuguggauuacaucuug

SEQ ID NO: 531015 - RNA, 19 nt, Homo sapiens
  misc_RNA (1)...(19): siRNA sense strand
ccaacucuccaaagcugaa

SEQ ID NO: 531016 - RNA, 19 nt, Homo sapiens
  misc_RNA (1)...(19): siRNA sense strand
uagaaaucucccacuuauu

SEQ ID NO: 531017 - RNA, 19 nt, Homo sapiens
  misc_RNA (1)...(19): siRNA sense strand
gcuguaucccuaauaaguc

SEQ ID NO: 531018 - RNA, 19 nt, Homo sapiens
  misc_RNA (1)...(19): siRNA sense strand
ccaaccuacuuuccaacuc

SEQ ID NO: 531019 - RNA, 19 nt, Homo sapiens
  misc_RNA (1)...(19): siRNA sense strand
ucuaacagggugaccaaug

SEQ ID NO: 531020 - RNA, 19 nt, Homo sapiens
  misc_RNA (1)...(19): siRNA sense strand
aguucaaccagguacauua

SEQ ID NO: 531021 - RNA, 19 nt, Homo sapiens
  misc_RNA (1)...(19): siRNA sense strand
agaaccuggagauauauuu

SEQ ID NO: 531022 - RNA, 19 nt, Homo sapiens
  misc_RNA (1)...(19): siRNA sense strand
agagauggcuguggaugcu

SEQ ID NO: 531023 - RNA, 19 nt, Homo sapiens
  misc_RNA (1)...(19): siRNA sense strand
gaguucaaccagguacauu

SEQ ID NO: 531024 - RNA, 19 nt, Homo sapiens
  misc_RNA (1)...(19): siRNA sense strand
aacaaugccagcuuauaga

SEQ ID NO: 531025 - RNA, 19 nt, Homo sapiens
  misc_RNA (1)...(19): siRNA sense strand
cagagaaccuggagauaua

SEQ ID NO: 531026 - RNA, 19 nt, Homo sapiens
  misc_RNA (1)...(19): siRNA sense strand
ggaauaugcuuggauaaga

SEQ ID NO: 531027 - RNA, 19 nt, Homo sapiens
  misc_RNA (1)...(19): siRNA sense strand
caaugaagcugaccucugu

SEQ ID NO: 531028 - RNA, 19 nt, Homo sapiens
  misc_RNA (1)...(19): siRNA sense strand
gcaaaugcccucagcagaa

SEQ ID NO: 531029 - RNA, 19 nt, Homo sapiens
  misc_RNA (1)...(19): siRNA sense strand
gaugcuguaucccuaauaa

SEQ ID NO: 531030 - RNA, 19 nt, Homo sapiens
  misc_RNA (1)...(19): siRNA sense strand
caauaaagauucccaaagg

SEQ ID NO: 531031 - RNA, 19 nt, Homo sapiens
  misc_RNA (1)...(19): siRNA sense strand
ggaaagaagucugaucagu

SEQ ID NO: 531032 - RNA, 19 nt, Homo sapiens
  misc_RNA (1)...(19): siRNA sense strand
aaagaagucugaucaguca

SEQ ID NO: 531033 - RNA, 19 nt, Homo sapiens
  misc_RNA (1)...(19): siRNA sense strand
guacgagacuggagugugu

SEQ ID NO: 531034 - RNA, 19 nt, Homo sapiens
  misc_RNA (1)...(19): siRNA sense strand
gauuacaucuugugugugu

SEQ ID NO: 531035 - RNA, 19 nt, Homo sapiens
  misc_RNA (1)...(19): siRNA sense strand
gcagagaaccuggagauau

SEQ ID NO: 531036 - RNA, 19 nt, Homo sapiens
  misc_RNA (1)...(19): siRNA sense strand
cgacagcaauauauuaaag

SEQ ID NO: 531037 - RNA, 19 nt, Homo sapiens
  misc_RNA (1)...(19): siRNA sense strand
auagaaaucucccacuuau

SEQ ID NO: 531038 - RNA, 19 nt, Homo sapiens
  misc_RNA (1)...(19): siRNA sense strand
cagcaacugugaaaugaga

SEQ ID NO: 531039 - RNA, 19 nt, Homo sapiens
  misc_RNA (1)...(19): siRNA sense strand
cuaacagggugaccaauga

SEQ ID NO: 531040 - RNA, 19 nt, Homo sapiens
  misc_RNA (1)...(19): siRNA sense strand
uggaagaugcuguggauua

SEQ ID NO: 531041 - RNA, 19 nt, Homo sapiens
  misc_RNA (1)...(19): siRNA sense strand
gaauaugcuuggauaagag

SEQ ID NO: 531042 - RNA, 19 nt, Homo sapiens
  misc_RNA (1)...(19): siRNA sense strand
uauagaaaucucccacuua

SEQ ID NO: 531043 - RNA, 19 nt, Homo sapiens
  misc_RNA (1)...(19): siRNA sense strand
ggaagaugcuguggauuac

SEQ ID NO: 531044 - RNA, 19 nt, Homo sapiens
  misc_RNA (1)...(19): siRNA sense strand
aaacaugccaaccuacuuu

SEQ ID NO: 531045 - RNA, 19 nt, Homo sapiens
  misc_RNA (1)...(19): siRNA sense strand
gaacaugugggaugggaau

SEQ ID NO: 531046 - RNA, 19 nt, Homo sapiens
  misc_RNA (1)...(19): siRNA sense strand
cagagaaacugcagagaac

SEQ ID NO: 531047 - RNA, 19 nt, Homo sapiens
  misc_RNA (1)...(19): siRNA sense strand
uguggaauaugcuuggaua

SEQ ID NO: 531048 - RNA, 19 nt, Homo sapiens
  misc_RNA (1)...(19): siRNA sense strand
ucaaccagguacauuauca

SEQ ID NO: 531049 - RNA, 19 nt, Homo sapiens
  misc_RNA (1)...(19): siRNA sense strand
gagugagccuggugagaga

SEQ ID NO: 531050 - RNA, 19 nt, Homo sapiens
  misc_RNA (1)...(19): siRNA sense strand
caaaugcccucagcagaag

SEQ ID NO: 531051 - RNA, 19 nt, Homo sapiens
  misc_RNA (1)...(19): siRNA sense strand
aaacaaugccagcuuauag

SEQ ID NO: 531052 - RNA, 19 nt, Homo sapiens
  misc_RNA (1)...(19): siRNA sense strand
gaaaagacuguguuacauu

SEQ ID NO: 531053 - RNA, 19 nt, Homo sapiens
  misc_RNA (1)...(19): siRNA sense strand
caaccuacuuuccaacucu

SEQ ID NO: 531054 - RNA, 19 nt, Homo sapiens
  misc_RNA (1)...(19): siRNA sense strand
acaaaacaaugccagcuua

SEQ ID NO: 531055 - RNA, 19 nt, Homo sapiens
  misc_RNA (1)...(19): siRNA sense strand
gcacaccucuguucauacc

SEQ ID NO: 531056 - RNA, 19 nt, Homo sapiens
  misc_RNA (1)...(19): siRNA sense strand
ucagagaaacugcagagaa

SEQ ID NO: 531057 - RNA, 19 nt, Homo sapiens
  misc_RNA (1)...(19): siRNA sense strand
uggauuacaucuugugugu

SEQ ID NO: 531058 - RNA, 19 nt, Homo sapiens
  misc_RNA (1)...(19): siRNA sense strand
gagaugcuguaucccuaau

SEQ ID NO: 531059 - RNA, 19 nt, Homo sapiens
  misc_RNA (1)...(19): siRNA sense strand
uuucugagcucaagauucu

SEQ ID NO: 531060 - RNA, 19 nt, Homo sapiens
  misc_RNA (1)...(19): siRNA sense strand
uacagcagcuuucaacaag

SEQ ID NO: 531061 - RNA, 19 nt, Homo sapiens
  misc_RNA (1)...(19): siRNA sense strand
aauaaagauucccaaagga

SEQ ID NO: 531062 - RNA, 19 nt, Homo sapiens
  misc_RNA (1)...(19): siRNA sense strand
gacaauaaagauucccaaa

SEQ ID NO: 531063 - RNA, 19 nt, Homo sapiens
  misc_RNA (1)...(19): siRNA sense strand
gagcuaaagguggaaagaa

SEQ ID NO: 531064 - RNA, 19 nt, Homo sapiens
  misc_RNA (1)...(19): siRNA sense strand
uuauagaaaucucccacuu

SEQ ID NO: 531065 - RNA, 19 nt, Homo sapiens
  misc_RNA (1)...(19): siRNA sense strand
aaugccagcuuauagaaau

SEQ ID NO: 531066 - RNA, 19 nt, Homo sapiens
  misc_RNA (1)...(19): siRNA sense strand
augcacaccucuguucaua

SEQ ID NO: 531067 - RNA, 19 nt, Homo sapiens
  misc_RNA (1)...(19): siRNA sense strand
ucaacaagcuacaaaacaa

SEQ ID NO: 531068 - RNA, 19 nt, Homo sapiens
  misc_RNA (1)...(19): siRNA sense strand
cuacagcagcuuucaacaa

SEQ ID NO: 531069 - RNA, 19 nt, Homo sapiens
  misc_RNA (1)...(19): siRNA sense strand
aauggaagaugcuguggau

SEQ ID NO: 531070 - RNA, 19 nt, Homo sapiens
  misc_RNA (1)...(19): siRNA sense strand
ucauaauggccaaguguuu

SEQ ID NO: 531071 - RNA, 19 nt, Homo sapiens
  misc_RNA (1)...(19): siRNA sense strand
gagaaaagacuguguuaca

SEQ ID NO: 531072 - RNA, 19 nt, Homo sapiens
  misc_RNA (1)...(19): siRNA sense strand
gcaacugugaaaugagaaa

SEQ ID NO: 531073 - RNA, 19 nt, Homo sapiens
  misc_RNA (1)...(19): siRNA sense strand
ccacacaaagggcuguauu

SEQ ID NO: 531074 - RNA, 19 nt, Homo sapiens
  misc_RNA (1)...(19): siRNA sense strand
gcuguauugugacuacuca

SEQ ID NO: 531075 - RNA, 19 nt, Homo sapiens
  misc_RNA (1)...(19): siRNA sense strand
uaaaaucugugccaagcaa

SEQ ID NO: 531076 - RNA, 19 nt, Homo sapiens
  misc_RNA (1)...(19): siRNA sense strand
gggaugggaauaucuaaca

SEQ ID NO: 531077 - RNA, 19 nt, Homo sapiens
  misc_RNA (1)...(19): siRNA sense strand
guggaaagaagucugauca

SEQ ID NO: 531078 - RNA, 19 nt, Homo sapiens
  misc_RNA (1)...(19): siRNA sense strand
ggaaaucugcaaugaagcu

SEQ ID NO: 531079 - RNA, 19 nt, Homo sapiens
  misc_RNA (1)...(19): siRNA sense strand
ggggaaaucugcaaugaag

SEQ ID NO: 531080 - RNA, 19 nt, Homo sapiens
  misc_RNA (1)...(19): siRNA sense strand
gagaaccuggagauauauu

SEQ ID NO: 531081 - RNA, 19 nt, Homo sapiens
  misc_RNA (1)...(19): siRNA sense strand
gaaccuggagauauauuuu

SEQ ID NO: 531082 - RNA, 19 nt, Homo sapiens
  misc_RNA (1)...(19): siRNA sense strand
guucaaccagguacauuau

SEQ ID NO: 531083 - RNA, 19 nt, Homo sapiens
  misc_RNA (1)...(19): siRNA sense strand
uaacagggugaccaaugaa

SEQ ID NO: 531084 - RNA, 19 nt, Homo sapiens
  misc_RNA (1)...(19): siRNA sense strand
gucaaacuguagccuggaa

SEQ ID NO: 531085 - RNA, 19 nt, Homo sapiens
  misc_RNA (1)...(19): siRNA sense strand
acaccucuguucauaccaa

SEQ ID NO: 531086 - RNA, 19 nt, Homo sapiens
  misc_RNA (1)...(19): siRNA sense strand
gcgacagcaauauauuaaa

SEQ ID NO: 531087 - RNA, 19 nt, Homo sapiens
  misc_RNA (1)...(19): siRNA sense strand
aaaagacuguguuacauuc

SEQ ID NO: 531088 - RNA, 19 nt, Homo sapiens
  misc_RNA (1)...(19): siRNA sense strand
caaugccagcuuauagaaa

SEQ ID NO: 531089 - RNA, 19 nt, Homo sapiens
  misc_RNA (1)...(19): siRNA sense strand
gaagucugaucagucaaac

SEQ ID NO: 531090 - RNA, 19 nt, Homo sapiens
  misc_RNA (1)...(19): siRNA sense strand
ggagcuaaagguggaaaga

SEQ ID NO: 531091 - RNA, 19 nt, Homo sapiens
  misc_RNA (1)...(19): siRNA sense strand
ggaugggaauaucuaacag

SEQ ID NO: 531092 - RNA, 19 nt, Homo sapiens
  misc_RNA (1)...(19): siRNA sense strand
acaaugccagcuuauagaa

SEQ ID NO: 531093 - RNA, 19 nt, Homo sapiens
  misc_RNA (1)...(19): siRNA sense strand
agaagucugaucagucaaa

SEQ ID NO: 531094 - RNA, 19 nt, Homo sapiens
  misc_RNA (1)...(19): siRNA sense strand
aagaugcuguggauuacau

SEQ ID NO: 531095 - RNA, 19 nt, Homo sapiens
  misc_RNA (1)...(19): siRNA sense strand
aaccagguacauuaucaua

SEQ ID NO: 531096 - RNA, 19 nt, Homo sapiens
  misc_RNA (1)...(19): siRNA sense strand
acuguagccuggaaccauu

SEQ ID NO: 531097 - RNA, 19 nt, Homo sapiens
  misc_RNA (1)...(19): siRNA sense strand
gcuaaagguggaaagaagu

SEQ ID NO: 531098 - RNA, 19 nt, Homo sapiens
  misc_RNA (1)...(19): siRNA sense strand
caguagacaggccuaggua

SEQ ID NO: 531099 - RNA, 19 nt, Homo sapiens
  misc_RNA (1)...(19): siRNA sense strand
cauaauggccaaguguuuc

SEQ ID NO: 531100 - RNA, 19 nt, Homo sapiens
  misc_RNA (1)...(19): siRNA sense strand
agaguuacaaacccacuuu

SEQ ID NO: 531101 - RNA, 19 nt, Homo sapiens
  misc_RNA (1)...(19): siRNA sense strand
caugugggaugggaauauc

SEQ ID NO: 531102 - RNA, 19 nt, Homo sapiens
  misc_RNA (1)...(19): siRNA sense strand
ucacuggcccugcaaaugc

SEQ ID NO: 531103 - RNA, 19 nt, Homo sapiens
  misc_RNA (1)...(19): siRNA sense strand
ugcgacagcaauauauuaa

SEQ ID NO: 531104 - RNA, 19 nt, Homo sapiens
  misc_RNA (1)...(19): siRNA sense strand
acaauaaagauucccaaag

SEQ ID NO: 531105 - RNA, 19 nt, Homo sapiens
  misc_RNA (1)...(19): siRNA sense strand
uaucauaauggccaagugu

SEQ ID NO: 531106 - RNA, 19 nt, Homo sapiens
  misc_RNA (1)...(19): siRNA sense strand
ggaugcacaccucuguuca

SEQ ID NO: 531107 - RNA, 19 nt, Homo sapiens
  misc_RNA (1)...(19): siRNA sense strand
gaagaugcuguggauuaca

SEQ ID NO: 531108 - RNA, 19 nt, Homo sapiens
  misc_RNA (1)...(19): siRNA sense strand
uagccuggaaccauuacua

SEQ ID NO: 531109 - RNA, 19 nt, Homo sapiens
  misc_RNA (1)...(19): siRNA sense strand
cacacaaagggcuguauug

SEQ ID NO: 531110 - RNA, 19 nt, Homo sapiens
  misc_RNA (1)...(19): siRNA sense strand
ugcuguggauuacaucuug

SEQ ID NO: 531111 - RNA, 19 nt, Homo sapiens
  misc_RNA (1)...(19): siRNA sense strand
ccaacucuccaaagcugaa

SEQ ID NO: 531112 - RNA, 19 nt, Homo sapiens
  misc_RNA (1)...(19): siRNA sense strand
uagaaaucucccacuuauu

SEQ ID NO: 531113 - RNA, 19 nt, Homo sapiens
  misc_RNA (1)...(19): siRNA sense strand
gcuguaucccuaauaaguc

SEQ ID NO: 531114 - RNA, 19 nt, Homo sapiens
  misc_RNA (1)...(19): siRNA sense strand
ccaaccuacuuuccaacuc

SEQ ID NO: 531115 - RNA, 19 nt, Homo sapiens
  misc_RNA (1)...(19): siRNA sense strand
ucuaacagggugaccaaug

SEQ ID NO: 531116 - RNA, 19 nt, Homo sapiens
  misc_RNA (1)...(19): siRNA sense strand
aguucaaccagguacauua

SEQ ID NO: 531117 - RNA, 19 nt, Homo sapiens
  misc_RNA (1)...(19): siRNA sense strand
agaaccuggagauauauuu

SEQ ID NO: 531118 - RNA, 19 nt, Homo sapiens
  misc_RNA (1)...(19): siRNA sense strand
agagauggcuguggaugcu

SEQ ID NO: 531119 - RNA, 19 nt, Homo sapiens
  misc_RNA (1)...(19): siRNA sense strand
gaguucaaccagguacauu

SEQ ID NO: 531120 - RNA, 19 nt, Homo sapiens
  misc_RNA (1)...(19): siRNA sense strand
aacaaugccagcuuauaga

SEQ ID NO: 531121 - RNA, 19 nt, Homo sapiens
  misc_RNA (1)...(19): siRNA sense strand
gaagaugguugugaaguua

SEQ ID NO: 531122 - RNA, 19 nt, Homo sapiens
  misc_RNA (1)...(19): siRNA sense strand
gaagacagcuggaucacau

SEQ ID NO: 531123 - RNA, 19 nt, Homo sapiens
  misc_RNA (1)...(19): siRNA sense strand
gcacggagauaaugagaau

SEQ ID NO: 531124 - RNA, 19 nt, Homo sapiens
  misc_RNA (1)...(19): siRNA sense strand
aaacuuagcuuggacagaa

SEQ ID NO: 531125 - RNA, 19 nt, Homo sapiens
  misc_RNA (1)...(19): siRNA sense strand
gaaauacagcucuucauga

SEQ ID NO: 531126 - RNA, 19 nt, Homo sapiens
  misc_RNA (1)...(19): siRNA sense strand
gaucugauguugggacuaa

SEQ ID NO: 531127 - RNA, 19 nt, Homo sapiens
  misc_RNA (1)...(19): siRNA sense strand
gaaaaugagugaccauaaa

SEQ ID NO: 531128 - RNA, 19 nt, Homo sapiens
  misc_RNA (1)...(19): siRNA sense strand
aaauacagcucuucaugaa

SEQ ID NO: 531129 - RNA, 19 nt, Homo sapiens
  misc_RNA (1)...(19): siRNA sense strand
ccacgaagaugguugugaa

SEQ ID NO: 531130 - RNA, 19 nt, Homo sapiens
  misc_RNA (1)...(19): siRNA sense strand
ggaagaggguacuggagaa

SEQ ID NO: 531131 - RNA, 19 nt, Homo sapiens
  misc_RNA (1)...(19): siRNA sense strand
gaacaaggcagugaauuuc

SEQ ID NO: 531132 - RNA, 19 nt, Homo sapiens
  misc_RNA (1)...(19): siRNA sense strand
acaagaaccuuuaccugaa

SEQ ID NO: 531133 - RNA, 19 nt, Homo sapiens
  misc_RNA (1)...(19): siRNA sense strand
cgaagaugguugugaaguu

SEQ ID NO: 531134 - RNA, 19 nt, Homo sapiens
  misc_RNA (1)...(19): siRNA sense strand
gaauuauagucaagucuca

SEQ ID NO: 531135 - RNA, 19 nt, Homo sapiens
  misc_RNA (1)...(19): siRNA sense strand
caugaacacucccaucugu

SEQ ID NO: 531136 - RNA, 19 nt, Homo sapiens
  misc_RNA (1)...(19): siRNA sense strand
ugaacaaggcagugaauuu

SEQ ID NO: 531137 - RNA, 19 nt, Homo sapiens
  misc_RNA (1)...(19): siRNA sense strand
gaccaacucgcucaaacua

SEQ ID NO: 531138 - RNA, 19 nt, Homo sapiens
  misc_RNA (1)...(19): siRNA sense strand
ugaaggagaagguaauuug

SEQ ID NO: 531139 - RNA, 19 nt, Homo sapiens
  misc_RNA (1)...(19): siRNA sense strand
agucaagucucaaacaaga

SEQ ID NO: 531140 - RNA, 19 nt, Homo sapiens
  misc_RNA (1)...(19): siRNA sense strand
gaaaagaaggagcagcuua

SEQ ID NO: 531141 - RNA, 19 nt, Homo sapiens
  misc_RNA (1)...(19): siRNA sense strand
ccugcuggcuguucuguuu

SEQ ID NO: 531142 - RNA, 19 nt, Homo sapiens
  misc_RNA (1)...(19): siRNA sense strand
gcucagaaauacagcucuu

SEQ ID NO: 531143 - RNA, 19 nt, Homo sapiens
  misc_RNA (1)...(19): siRNA sense strand
ggagaagacagcuggauca

SEQ ID NO: 531144 - RNA, 19 nt, Homo sapiens
  misc_RNA (1)...(19): siRNA sense strand
ggaaagcuuaucucugcua

SEQ ID NO: 531145 - RNA, 19 nt, Homo sapiens
  misc_RNA (1)...(19): siRNA sense strand
acucuuugcugccaaguuu

SEQ ID NO: 531146 - RNA, 19 nt, Homo sapiens
  misc_RNA (1)...(19): siRNA sense strand
agagagcaccgccacuuua

SEQ ID NO: 531147 - RNA, 19 nt, Homo sapiens
  misc_RNA (1)...(19): siRNA sense strand
gagagagcaccgccacuuu

SEQ ID NO: 531148 - RNA, 19 nt, Homo sapiens
  misc_RNA (1)...(19): siRNA sense strand
gcagagaggagcagacauc

SEQ ID NO: 531149 - RNA, 19 nt, Homo sapiens
  misc_RNA (1)...(19): siRNA sense strand
gacaaucgacccgucauaa

SEQ ID NO: 531150 - RNA, 19 nt, Homo sapiens
  misc_RNA (1)...(19): siRNA sense strand
gaagcuugguacccaugaa

SEQ ID NO: 531151 - RNA, 19 nt, Homo sapiens
  misc_RNA (1)...(19): siRNA sense strand
cauacgaccuggcucugaa

SEQ ID NO: 531152 - RNA, 19 nt, Homo sapiens
  misc_RNA (1)...(19): siRNA sense strand
ucucaaacaagaaccuuua

SEQ ID NO: 531153 - RNA, 19 nt, Homo sapiens
  misc_RNA (1)...(19): siRNA sense strand
caacugcugugaugaagac

SEQ ID NO: 531154 - RNA, 19 nt, Homo sapiens
  misc_RNA (1)...(19): siRNA sense strand
caccugagauacuguguca

SEQ ID NO: 531155 - RNA, 19 nt, Homo sapiens
  misc_RNA (1)...(19): siRNA sense strand
ggauaaagaauuucaagac

SEQ ID NO: 531156 - RNA, 19 nt, Homo sapiens
  misc_RNA (1)...(19): siRNA sense strand
ucaccugucugcccgauuc

SEQ ID NO: 531157 - RNA, 19 nt, Homo sapiens
  misc_RNA (1)...(19): siRNA sense strand
gagcucagaugggcuugug

SEQ ID NO: 531158 - RNA, 19 nt, Homo sapiens
  misc_RNA (1)...(19): siRNA sense strand
gaacuagccucucaaaagc

SEQ ID NO: 531159 - RNA, 19 nt, Homo sapiens
  misc_RNA (1)...(19): siRNA sense strand
ggacuaagagggacauagg

SEQ ID NO: 531160 - RNA, 19 nt, Homo sapiens
  misc_RNA (1)...(19): siRNA sense strand
gagcagcuuauaccugaaa

SEQ ID NO: 531161 - RNA, 19 nt, Homo sapiens
  misc_RNA (1)...(19): siRNA sense strand
uaagcaccaugaagcgauu

SEQ ID NO: 531162 - RNA, 19 nt, Homo sapiens
  misc_RNA (1)...(19): siRNA sense strand
aaccguggcuguuaugaau

SEQ ID NO: 531163 - RNA, 19 nt, Homo sapiens
  misc_RNA (1)...(19): siRNA sense strand
ugugugaagucccuaguga

SEQ ID NO: 531164 - RNA, 19 nt, Homo sapiens
  misc_RNA (1)...(19): siRNA sense strand
gcuuauaccugaaaacaga

SEQ ID NO: 531165 - RNA, 19 nt, Homo sapiens
  misc_RNA (1)...(19): siRNA sense strand
aaagaaggagcagcuuaua

SEQ ID NO: 531166 - RNA, 19 nt, Homo sapiens
  misc_RNA (1)...(19): siRNA sense strand
caagaaccuuuaccugaac

SEQ ID NO: 531167 - RNA, 19 nt, Homo sapiens
  misc_RNA (1)...(19): siRNA sense strand
ggacauaggaacacagacu

SEQ ID NO: 531168 - RNA, 19 nt, Homo sapiens
  misc_RNA (1)...(19): siRNA sense strand
gaccauuuccugcuacaga

SEQ ID NO: 531169 - RNA, 19 nt, Homo sapiens
  misc_RNA (1)...(19): siRNA sense strand
agaaauacagcucuucaug

SEQ ID NO: 531170 - RNA, 19 nt, Homo sapiens
  misc_RNA (1)...(19): siRNA sense strand
ggcucuagcugcugaggaa

SEQ ID NO: 531171 - RNA, 19 nt, Homo sapiens
  misc_RNA (1)...(19): siRNA sense strand
ugaagucccuagugaaacu

SEQ ID NO: 531172 - RNA, 19 nt, Homo sapiens
  misc_RNA (1)...(19): siRNA sense strand
gcuguucuguuugcccuaa

SEQ ID NO: 531173 - RNA, 19 nt, Homo sapiens
  misc_RNA (1)...(19): siRNA sense strand
gaacacuggagaugaccuu

SEQ ID NO: 531174 - RNA, 19 nt, Homo sapiens
  misc_RNA (1)...(19): siRNA sense strand
ggaacuagccucucaaaag

SEQ ID NO: 531175 - RNA, 19 nt, Homo sapiens
  misc_RNA (1)...(19): siRNA sense strand
gaauucaaagggagacaga

SEQ ID NO: 531176 - RNA, 19 nt, Homo sapiens
  misc_RNA (1)...(19): siRNA sense strand
gaauuucagcgaucaccuu

SEQ ID NO: 531177 - RNA, 19 nt, Homo sapiens
  misc_RNA (1)...(19): siRNA sense strand
uaagcggucagaaguguuu

SEQ ID NO: 531178 - RNA, 19 nt, Homo sapiens
  misc_RNA (1)...(19): siRNA sense strand
cuggcaagcugcuagcaaa

SEQ ID NO: 531179 - RNA, 19 nt, Homo sapiens
  misc_RNA (1)...(19): siRNA sense strand
gagcaccgccacuuuacug

SEQ ID NO: 531180 - RNA, 19 nt, Homo sapiens
  misc_RNA (1)...(19): siRNA sense strand
uaccucagauacuauugaa

SEQ ID NO: 531181 - RNA, 19 nt, Homo sapiens
  misc_RNA (1)...(19): siRNA sense strand
cagaaguguuugacaagca

SEQ ID NO: 531182 - RNA, 19 nt, Homo sapiens
  misc_RNA (1)...(19): siRNA sense strand
gggcuugugugcagaaugc

SEQ ID NO: 531183 - RNA, 19 nt, Homo sapiens
  misc_RNA (1)...(19): siRNA sense strand
ggagauaaugagaauucaa

SEQ ID NO: 531184 - RNA, 19 nt, Homo sapiens
  misc_RNA (1)...(19): siRNA sense strand
gccuggcagucccugaaua

SEQ ID NO: 531185 - RNA, 19 nt, Homo sapiens
  misc_RNA (1)...(19): siRNA sense strand
ugacaagcacggagauaau

SEQ ID NO: 531186 - RNA, 19 nt, Homo sapiens
  misc_RNA (1)...(19): siRNA sense strand
aagcuuaucucugcuacug

SEQ ID NO: 531187 - RNA, 19 nt, Homo sapiens
  misc_RNA (1)...(19): siRNA sense strand
cguaagcggucagaagugu

SEQ ID NO: 531188 - RNA, 19 nt, Homo sapiens
  misc_RNA (1)...(19): siRNA sense strand
ccacuuuacugggaugcaa

SEQ ID NO: 531189 - RNA, 19 nt, Homo sapiens
  misc_RNA (1)...(19): siRNA sense strand
guaccucagauacuauuga

SEQ ID NO: 531190 - RNA, 19 nt, Homo sapiens
  misc_RNA (1)...(19): siRNA sense strand
gacaagcacggagauaaug

SEQ ID NO: 531191 - RNA, 19 nt, Homo sapiens
  misc_RNA (1)...(19): siRNA sense strand
caggaggccagacagcaua

SEQ ID NO: 531192 - RNA, 19 nt, Homo sapiens
  misc_RNA (1)...(19): siRNA sense strand
ggccagcaaucaccugucu

SEQ ID NO: 531193 - RNA, 19 nt, Homo sapiens
  misc_RNA (1)...(19): siRNA sense strand
auagucaagucucaaacaa

SEQ ID NO: 531194 - RNA, 19 nt, Homo sapiens
  misc_RNA (1)...(19): siRNA sense strand
aacaggaacuagccucuca

SEQ ID NO: 531195 - RNA, 19 nt, Homo sapiens
  misc_RNA (1)...(19): siRNA sense strand
ccaucugugugguguguga

SEQ ID NO: 531196 - RNA, 19 nt, Homo sapiens
  misc_RNA (1)...(19): siRNA sense strand
ugugaagucccuagugaaa

SEQ ID NO: 531197 - RNA, 19 nt, Homo sapiens
  misc_RNA (1)...(19): siRNA sense strand
ggcccugccuucaucacaa

SEQ ID NO: 531198 - RNA, 19 nt, Homo sapiens
  misc_RNA (1)...(19): siRNA sense strand
cagccuggaugacuguuag

SEQ ID NO: 531199 - RNA, 19 nt, Homo sapiens
  misc_RNA (1)...(19): siRNA sense strand
uaagagggacauaggaaca

SEQ ID NO: 531200 - RNA, 19 nt, Homo sapiens
  misc_RNA (1)...(19): siRNA sense strand
ccagcugggugagugacua

SEQ ID NO: 531201 - RNA, 19 nt, Homo sapiens
  misc_RNA (1)...(19): siRNA sense strand
gcauacgaccuggcucuga

SEQ ID NO: 531202 - RNA, 19 nt, Homo sapiens
  misc_RNA (1)...(19): siRNA sense strand
ccaugaagcgauuccaguu

SEQ ID NO: 531203 - RNA, 19 nt, Homo sapiens
  misc_RNA (1)...(19): siRNA sense strand
cagauguggucgcuggaau

SEQ ID NO: 531204 - RNA, 19 nt, Homo sapiens
  misc_RNA (1)...(19): siRNA sense strand
cuugucaccucacucuuug

SEQ ID NO: 531205 - RNA, 19 nt, Homo sapiens
  misc_RNA (1)...(19): siRNA sense strand
gaaggagaagguaauuugc

SEQ ID NO: 531206 - RNA, 19 nt, Homo sapiens
  misc_RNA (1)...(19): siRNA sense strand
gauaaugagaauucaaagg

SEQ ID NO: 531207 - RNA, 19 nt, Homo sapiens
  misc_RNA (1)...(19): siRNA sense strand
gcucugaacacuggagaug

SEQ ID NO: 531208 - RNA, 19 nt, Homo sapiens
  misc_RNA (1)...(19): siRNA sense strand
uguggucgcuggaaucucu

SEQ ID NO: 531209 - RNA, 19 nt, Homo sapiens
  misc_RNA (1)...(19): siRNA sense strand
gcaggaggccagacagcau

SEQ ID NO: 531210 - RNA, 19 nt, Homo sapiens
  misc_RNA (1)...(19): siRNA sense strand
gaaugcaggaggccagaca

SEQ ID NO: 531211 - RNA, 19 nt, Homo sapiens
  misc_RNA (1)...(19): siRNA sense strand
gagagcaccgccacuuuac

SEQ ID NO: 531212 - RNA, 19 nt, Homo sapiens
  misc_RNA (1)...(19): siRNA sense strand
ucagaaauacagcucuuca

SEQ ID NO: 531213 - RNA, 19 nt, Homo sapiens
  misc_RNA (1)...(19): siRNA sense strand
agacaaucgacccgucaua

SEQ ID NO: 531214 - RNA, 19 nt, Homo sapiens
  misc_RNA (1)...(19): siRNA sense strand
gagucucugugauugaaca

SEQ ID NO: 531215 - RNA, 19 nt, Homo sapiens
  misc_RNA (1)...(19): siRNA sense strand
ggagcagcuuauaccugaa

SEQ ID NO: 531216 - RNA, 19 nt, Homo sapiens
  misc_RNA (1)...(19): siRNA sense strand
gaaacuuagcuuggacaga

SEQ ID NO: 531217 - RNA, 19 nt, Homo sapiens
  misc_RNA (1)...(19): siRNA sense strand
uagugaaacuuagcuugga

SEQ ID NO: 531218 - RNA, 19 nt, Homo sapiens
  misc_RNA (1)...(19): siRNA sense strand
gcaagcauccaaaagaaga

SEQ ID NO: 531219 - RNA, 19 nt, Homo sapiens
  misc_RNA (1)...(19): siRNA sense strand
ggaccaacucgcucaaacu

SEQ ID NO: 531220 - RNA, 19 nt, Homo sapiens
  misc_RNA (1)...(19): siRNA sense strand
cgaccuggcucugaacacu

SEQ ID NO: 531221 - RNA, 19 nt, Homo sapiens
  misc_RNA (1)...(19): siRNA sense strand
gaaauggacuugaaauuga

SEQ ID NO: 531222 - RNA, 19 nt, Homo sapiens
  misc_RNA (1)...(19): siRNA sense strand
gaagagaaguuucguuaca

SEQ ID NO: 531223 - RNA, 19 nt, Homo sapiens
  misc_RNA (1)...(19): siRNA sense strand
gaucaagccuauucucgua

SEQ ID NO: 531224 - RNA, 19 nt, Homo sapiens
  misc_RNA (1)...(19): siRNA sense strand
uuccauagcucuucaaaua

SEQ ID NO: 531225 - RNA, 19 nt, Homo sapiens
  misc_RNA (1)...(19): siRNA sense strand
gugcagagcugucagaaga

SEQ ID NO: 531226 - RNA, 19 nt, Homo sapiens
  misc_RNA (1)...(19): siRNA sense strand
caaaggagcuauugcuugu

SEQ ID NO: 531227 - RNA, 19 nt, Homo sapiens
  misc_RNA (1)...(19): siRNA sense strand
gaaaucauccauugugaaa

SEQ ID NO: 531228 - RNA, 19 nt, Homo sapiens
  misc_RNA (1)...(19): siRNA sense strand
ccaaggaaaucauccauug

SEQ ID NO: 531229 - RNA, 19 nt, Homo sapiens
  misc_RNA (1)...(19): siRNA sense strand
gcacguaauucaagugaug

SEQ ID NO: 531230 - RNA, 19 nt, Homo sapiens
  misc_RNA (1)...(19): siRNA sense strand
ggaaauggacuugaaauug

SEQ ID NO: 531231 - RNA, 19 nt, Homo sapiens
  misc_RNA (1)...(19): siRNA sense strand
gaccagaccuccaagcuau

SEQ ID NO: 531232 - RNA, 19 nt, Homo sapiens
  misc_RNA (1)...(19): siRNA sense strand
ucaaaugcaucaaagcuuu

SEQ ID NO: 531233 - RNA, 19 nt, Homo sapiens
  misc_RNA (1)...(19): siRNA sense strand
gcacuuggaaauaaagaua

SEQ ID NO: 531234 - RNA, 19 nt, Homo sapiens
  misc_RNA (1)...(19): siRNA sense strand
gguuaaaucucccaaggaa

SEQ ID NO: 531235 - RNA, 19 nt, Homo sapiens
  misc_RNA (1)...(19): siRNA sense strand
ggcaauauguugaugauuc

SEQ ID NO: 531236 - RNA, 19 nt, Homo sapiens
  misc_RNA (1)...(19): siRNA sense strand
gcacagcauugcagcaguu

SEQ ID NO: 531237 - RNA, 19 nt, Homo sapiens
  misc_RNA (1)...(19): siRNA sense strand
gaacgagugauuaguacua

SEQ ID NO: 531238 - RNA, 19 nt, Homo sapiens
  misc_RNA (1)...(19): siRNA sense strand
gcauuuggcauaggaauua

SEQ ID NO: 531239 - RNA, 19 nt, Homo sapiens
  misc_RNA (1)...(19): siRNA sense strand
ccagauauaguaaagguua

SEQ ID NO: 531240 - RNA, 19 nt, Homo sapiens
  misc_RNA (1)...(19): siRNA sense strand
gaagagaaagcaucauaau

SEQ ID NO: 531241 - RNA, 19 nt, Homo sapiens
  misc_RNA (1)...(19): siRNA sense strand
ggaugaaacugcugucaca

SEQ ID NO: 531242 - RNA, 19 nt, Homo sapiens
  misc_RNA (1)...(19): siRNA sense strand
cgacaagccaaucuucuua

SEQ ID NO: 531243 - RNA, 19 nt, Homo sapiens
  misc_RNA (1)...(19): siRNA sense strand
ccaggaaaguggagaauuc

SEQ ID NO: 531244 - RNA, 19 nt, Homo sapiens
  misc_RNA (1)...(19): siRNA sense strand
ucaaauagcacuuggaaau

SEQ ID NO: 531245 - RNA, 19 nt, Homo sapiens
  misc_RNA (1)...(19): siRNA sense strand
ggauguacuuuaccuucua

SEQ ID NO: 531246 - RNA, 19 nt, Homo sapiens
  misc_RNA (1)...(19): siRNA sense strand
caaauagcacuuggaaaua

SEQ ID NO: 531247 - RNA, 19 nt, Homo sapiens
  misc_RNA (1)...(19): siRNA sense strand
gaaguuucguuacaugugu

SEQ ID NO: 531248 - RNA, 19 nt, Homo sapiens
  misc_RNA (1)...(19): siRNA sense strand
acacagauguagcacguaa

SEQ ID NO: 531249 - RNA, 19 nt, Homo sapiens
  misc_RNA (1)...(19): siRNA sense strand
ugaagaaaguggugcaguu

SEQ ID NO: 531250 - RNA, 19 nt, Homo sapiens
  misc_RNA (1)...(19): siRNA sense strand
guaaauggaccuacuaaca

SEQ ID NO: 531251 - RNA, 19 nt, Homo sapiens
  misc_RNA (1)...(19): siRNA sense strand
ugauagguauguaggauuu

SEQ ID NO: 531252 - RNA, 19 nt, Homo sapiens
  misc_RNA (1)...(19): siRNA sense strand
gaacgccuaugaagaugau

SEQ ID NO: 531253 - RNA, 19 nt, Homo sapiens
  misc_RNA (1)...(19): siRNA sense strand
caacaauaccuuccucuau

SEQ ID NO: 531254 - RNA, 19 nt, Homo sapiens
  misc_RNA (1)...(19): siRNA sense strand
agagagaucuagaagagaa

SEQ ID NO: 531255 - RNA, 19 nt, Homo sapiens
  misc_RNA (1)...(19): siRNA sense strand
gguaguagcuguggauaca

SEQ ID NO: 531256 - RNA, 19 nt, Homo sapiens
  misc_RNA (1)...(19): siRNA sense strand
ccaccuaggacgagaaaua

SEQ ID NO: 531257 - RNA, 19 nt, Homo sapiens
  misc_RNA (1)...(19): siRNA sense strand
aaauggaccuacuaacaaa

SEQ ID NO: 531258 - RNA, 19 nt, Homo sapiens
  misc_RNA (1)...(19): siRNA sense strand
gcaagaagccggcaagcau

SEQ ID NO: 531259 - RNA, 19 nt, Homo sapiens
  misc_RNA (1)...(19): siRNA sense strand
cggaagagaaguuucguua

SEQ ID NO: 531260 - RNA, 19 nt, Homo sapiens
  misc_RNA (1)...(19): siRNA sense strand
cagaagagaaagcaucaua

SEQ ID NO: 531261 - RNA, 19 nt, Homo sapiens
  misc_RNA (1)...(19): siRNA sense strand
uaaauggaccuacuaacaa

SEQ ID NO: 531262 - RNA, 19 nt, Homo sapiens
  misc_RNA (1)...(19): siRNA sense strand
gauguacuuuaccuucuaa

SEQ ID NO: 531263 - RNA, 19 nt, Homo sapiens
  misc_RNA (1)...(19): siRNA sense strand
gaagaaaguggugcaguug

SEQ ID NO: 531264 - RNA, 19 nt, Homo sapiens
  misc_RNA (1)...(19): siRNA sense strand
ccagugggcugagcaagaa

SEQ ID NO: 531265 - RNA, 19 nt, Homo sapiens
  misc_RNA (1)...(19): siRNA sense strand
acagaucgaugacuacaau

SEQ ID NO: 531266 - RNA, 19 nt, Homo sapiens
  misc_RNA (1)...(19): siRNA sense strand
gcaagcauccagaagagaa

SEQ ID NO: 531267 - RNA, 19 nt, Homo sapiens
  misc_RNA (1)...(19): siRNA sense strand
gcagagcugucagaagaug

SEQ ID NO: 531268 - RNA, 19 nt, Homo sapiens
  misc_RNA (1)...(19): siRNA sense strand
ggaguggaacgagugauua

SEQ ID NO: 531269 - RNA, 19 nt, Homo sapiens
  misc_RNA (1)...(19): siRNA sense strand
acucggaucuccuagcuuu
